United States Patent Application Publication US 2004/0031072 A1 - sequence listing, part 30

SEQ ID NO: 138474 - DNA, 256 bp, Glycine max
  Clone ID: PAT_MRT3847_9604C.1
taagctcggattacggtcagctcgaccgtgtcaggtaccttatcagttgattttgaggacttcaactttaaactttgtacatttgggtggtgtacttggagaatcgctcagtccatgtgttgtgtgatcgaaccattatacataaatatgggtgatgaaagaatacaaagtgctgtcttcttggactaagactattgatgtgtctaccagtaacattcctattgggtgcttgttccaatatgctctacaacaaggg

SEQ ID NO: 138475 - DNA, 441 bp, Glycine max
  Clone ID: PAT_MRT3847_96050C.1
ctttatcatttgatctagccatcgaagttcttgttgaacttgtgactaaacatgagggagtgccccgaattttgttatgcaaagtacattatctgaaggaagtacttctttttccagctctttctaggggagacataaaagttattggtggtctttcttgcttgttgtcagaaattgggcaggctgctccatctctaattgtagaagcaagtgcagaggccctagccttgattgatgccctcttgagctgtgtggcatttacaagtgaagattgggagattgcagactcaatactgcagctttggaccactcttgcaagctatatacttggcattgatgaagatgatgcagaaagttgaaaacgcgttgaagacattttttctaccgtgatctcaacattacttgattcactgacattgcgttctcacgtggatgattcta

SEQ ID NO: 138476 - DNA, 454 bp, Glycine max
  unsure (1)..(454): unsure at all n locations
  Clone ID: PAT_MRT3847_96051C.1
ttcccttcccactcccttccttcatcatnctaccttctccttcaacattacagatccctcttattgcttcttaagtgacttccttgcacntanattttccccatccatcttctatacttcattatctcccatctatcttttcaagcttcttctttatttacatctttcctacaatctaatcacttcaaataatcaatacaaattctttatatactgcgttttccttattcccaattaacatttaattctttccttcttactcttttaccttaccaatttcatcaaatactttcccacccattctcttaacttccccttcatatataattacaagcatatcttccttttttttagtaaccattaaacccaattttttccctacttttcattttatctttcatctaatttttcctcattttccctattccctttattttattttccctctttattt

SEQ ID NO: 138477 - DNA, 481 bp, Glycine max
  Clone ID: PAT_MRT3847_96052C.1
ccgcggttttaatcagtaatcatcaagttaccaaatatgaaagaaagaaaagctgagctagtgggtgaggaaaggagagagatcagggaagtggaaaacacaccggagagttcttcaggaggaagcatcctatgctcacgaatcagcttatgttgtcttgtatgcccacattttatgccttcttgcattgacacacaatttacttgtttctctgcctatgcctaaatatctcttttttcatcactttccttcttgctatttcactgtcaatcaatttactccctaacttactgggatcagtcagtggtgacaatgttctaatgtttaagttagttcatgccaattttagggactaataattgaacttgtgaaaatttaaaactcgattgagaggtgccctcttgccagtgtggagtaaaactgaactgtaggaataatatctatatttgcttcgggtaattgaaattcgagactttagcct

SEQ ID NO: 138478 - DNA, 291 bp, Glycine max
  unsure (1)..(291): unsure at all n locations
  Clone ID: PAT_MRT3847_96053C.1
cnnacgtaagctcggaattcggctcgagntaaacttaagaaaatacttgaactgtgttatagtaagtgaaaaattactattttgtgtttgaatattgaaaaaaatttcagtaacttctgaaaaacagttaatgtatagtttcttatgtaggtactatcattcttttttttttattncnctagggtttactagtaaataatgggatntttaaaangtngttnattcttcnggcctcantggggnacaattncngtattgaagaagaaatttggatgctgtgantagcntgtc

SEQ ID NO: 138479 - DNA, 401 bp, Glycine max
  Clone ID: PAT_MRT3847_96054C.1
gagggaaaaaaggagatatatgaagaaagaagagaaaaactttatagcaactgaataaaaacaccattatgaggctttacatggcacaatggcattgcctctcatcatctctttaatactatctctctcccgctggttttagaaccccaagaacaagattttgaactaagattcgcggttgtttgtgtgttggttaggttgttgggatctgtgttgttcctttctctttctccctctccctctccctctctctattttctcagacacacacacacttagatacacaaaggccattatacgtgtagtagacacaaaattttcggtatctctctatatttggggtcacacatacataggtaatggcacagttaccttctaaaataccaaccacaccccaaaat

SEQ ID NO: 138480 - DNA, 726 bp, Glycine max
  Clone ID: PAT_MRT3847_96055C.1
ttttgttatctcttcttccacaaactttcggagttttctttcgttaattaataaaatctttgcttaattaatttgtccttcctggaggggcaattaattaattaatctctggtgagtatttataaatatggagagcctggaagaaagagtgtttatgttcatggatgaacaatattatttttccaattccaatgaatcagagctgcatatgcatcatcatccctctgtgtctgtggagaacatatcgtgggaaaacaacaccgacttcgatgactcacccgagagaactttgtattggaaatctcagatcgcactgcttcaggaaattttagagcgataccatttaagtggatcaaaattgagacgagaggttggtcgaatcataaaagaggtgaaagcttcggatttttgcagctgtttgaaggctaactcttgggattgcaccacctgtttgagaagacgagtggttgatgggctctgccgaacaggattcagtaccaacctttgcatttcaaaatgggaaaccacaaaaaagtttccaggaggctgtcacgagtatattgaggtgattgcaaacacatcaacaatgaagaagattcattttctggtggaattggaattgaaggagcagtttcagattgcaaaagcaatgaaataatacccagaatctagagtcctgtttgcccagattttatattggaaaaccggaatacttaactgccattg

SEQ ID NO: 138481 - DNA, 2170 bp, Glycine max
  unsure (1)..(2170): unsure at all n locations
  Clone ID: PAT_MRT3847_96056C.1
gattaccgtcagcgaaggccaacaagaagaatttagctggaaggagaacaagaagaaaaaaccgacacaaagatctagtcctagctagaatcaaacaggggcgatctcaccttcaagaacacatcgccatggcaaggaacttgcttcttgtgctttttgcagtagccaccctcctccatggctcagcagcccaaaccagacacatggtcggtgatgccacgggctggatcatccctgctggcggcgctgccacctacaccgcctgggcttccaacaaaaccttcaccgtaaacgacactctcgtgttcaacttcgccaccggccaacacaacgtggccaaggtaacgaaatcggctttcgacgcgtgcaacggcgggagcgccgttttcaccctgacctccggtccagcgaccgtgaccctgaacgaaacaggggagcaatactacatttgctccgttggatcacactgttccgctggccagaaactggcaattaacgttaacagagcttcttctaccggtccttcccctgcacctcaacccagaggaagtggttctccaccaagggctagccctgtccccacacaagcaccacaagccagtagccccactcctccaccaaggtctgcaccagcacctgcttttggtccatcctctgaaccagctactttcattgttggagaaaccgctggctggattgttcctggcaacgcttccttttacacagcttgggcctctggcaaaaacttcagggttggagacgtccttgtgttcaactacgcatcaaatacacacaacgtagaggaggttacaaaggccaacttcgatgcttgcagctcagcctctcctattgccactttcaccactccacctgcgagagtgaccctcaacaaatctggtcaacatttcttcatctgtggaattccagggcactgtttgggaggtcaaaagcttgccatcaacgtcaccggcagcagcaccgccaccccaccttccgccgcggccccccccaccactccttctagcccttctccagccggtgctgtcactcctcccccacagaactctggtgctgcatctcttggagttgttggagtatttgccaccctgctttcagttgccgccacttttttctattagatactccacgagattattctagtcaggagcttgcgagtcatcatcatcgctctttgattgtgtttcatgaattcagtttttttcttatttttttgaggatgacaataaagttagctttaatttaatttctcttcagctgctaaaacttatggtggaagatttggacctacaagaacttaaagtagctgcgagtgcagaagacagagaaaacaacaacagcaacattagtggcaaccaagcacaaactccaaccacaccatcagcggccacaacatcaacagcaacagcgccaccaccaccaccaccaacgacaacagcaacaaaaccgacaggcaaaagatccgatgccatcaatgcccccgatagcgacccttcacagcatgttgcaatgaataatagacaaggcttctcggaaaaccaagcaaagaagtccaccgcatccaccaccgccaccaccaccaccgccgccgcctctgaggtggcgccacccgtgtctcagtgcttcgactcagacctgcccccacacagattaatggcctctaatgacaacacgtgtcgcttggtcacagcagattttgggaccgcatctgcaagtgctgacattggatccacactcattaggtttgggaccacacccggtgacgtgtcactcaccctagggcttcgccacgccgggaacatgccctctgagaaaactcctttctctgttagagaatttggagccatttaaacttcaatatatatatatatatatatacagtactacttcacataataatcaaaataataatatatataggaagatgctttatcatattattatatataatcatatcatctaaagaaaacatttttacgccctttattgtttctcagttattcctcgatctgtcttatttgcattgtggaaggacaggagaaaaaaaaggtaatacgatatgagaaaggtagtctgaaggtagctattaattaggtgtagcattaatatggtatctattgtataactgcatagnnnannnnttttgnnnatt

SEQ ID NO: 138482 - DNA, 231 bp, Glycine max
  Clone ID: PAT_MRT3847_96057C.1
gaaaaggacaaccccccccctggtgccttcaaaaggggaactcgcaaaaaaccacataggtgggggaaaaacatgcccaaaggggaccaacagaaaagaaggcccgaagataatgtttaacaaaaagagggggcttccagaaggcgggaaaaccctgatagaaggaggcctacggggactgttcccccacgaatccccaacaggcgcgtattcaaaaaaaaaaaatttacc

SEQ ID NO: 138483 - DNA, 433 bp, Glycine max
  Clone ID: PAT_MRT3847_96058C.1
aaggggaccgcccaattcccaaattggttttttatattttttttccaaaaccatccggcccccatgaacccttttttgtttgcctgttggattgaaaaaaaaaaaaacccaaacttccttaaccctggcccccttttttttttaccgtttttattggtccaccaggtaatttttttaaaaaaaaaaaaaaaaccttcgaaaaatccctttttttcggcccttttgtttttttcaaaaaaattttaaccaagtttttttttttataaactgacccccaaaaacgggggggccggaggatccaacccattttctttaaaggaaaaggaaaattttttttgcccaaaaacggccttagaaaattgggaaaccaaactgtacctttgggttttaaaccccccaggggggccaccttggccttaaaaaaatggattgg

SEQ ID NO: 138484 - DNA, 651 bp, Glycine max
  Clone ID: PAT_MRT3847_96059C.1
cggcaccaagtgatgttggtagcaaatgcaatagatgccacattctcgaaaggagatgcaattgccattgacatgcaaatgacagtcaatgctgtgattatatatctagccattgttctagcaggatgtgtagtggtatcaatagcagatagctttgcaccaaaagaaattgcaactcgtctgcgtgtttctaaagcaaagggtattttcactcaggatttcatatcaagaggtggcaggaaattccctttgtacagtcgagtcattgaagcagctgcatgtaaagttatcgttctgcctgtgataggtgatgatctaggtgtgcaattaagagattgcgatatatcatggaaggtttttctttcttctagcagacagcatcccaggtcacatcactactctccaatcattcaatcaattgatactgtcactaacatacttttctcatctggaaccacaggggagccaaaagcaattccttggactcaactttcaccaatacgaagtgcagcagatgcatgggctttcattgatattcaacctggagatgtctattgctggcctacaaatttgggatgggtgatgggcccaactcttatatattcatgctttctgtcaggtgcaactcttgctctgtatcatggatctcct

SEQ ID NO: 138485 - DNA, 425 bp, Glycine max
  Clone ID: PAT_MRT3847_9605C.1
gcagccaaaatgctggatagaaaacgaagcaatgccatatgcttcagatattaggttcagtgagctaccataatccaactctgttattgatggatgataaaatcatctcactaacaagtaagctcaggagtagaatatgcatgatgaatgcttgacaccaatggacacgcgacacggagagaaagcttttgttatcgtgataatcgaagctatcatagcatcctctgaatgcagtgtaatgtacgtcttctcatccaagcagaaatcaagcacccagaaattaacactaccggctaaagctcttcacaacgtattccgcatataaggtgaaggaatgcttgatcgcttcataggcagctgatgcaggatgaaagtcgttcactgcaaccactttgatttcattgttcttgtaacctttacggaaa

SEQ ID NO: 138486 - DNA, 540 bp, Glycine max
  Clone ID: PAT_MRT3847_96060C.1
ctgtttcttgctgcttgtgctctatgtgggtcgcgtgaagggaacttcatcagcacaggatggatttccagggattcctaaacgacttgcaggattgggaactttctagaaaggataaaacacgagcacaaaaggaaaatgttggcttcatcttcacagcttactggatccgtgggtgtggagaaggcatcaaaaggagataccatttcttttgatcgtgcaagaaattctccaggacagtatgatttgtcaagaattaatgatcctttcaatcgtgtgcatagtagttttgttcctgaagatgttcctgatgctgtttctgagaaagatctgggtatgagtttttcaagcagaaaaagtttaaggaagctagagactgctattcaaggagcattgccttatcaccaacagctgtcgcatatgcaaatagggcaatggccaatatcaagctcagaagattccaagaggctgaggatgactgcacagaggccttaaatcttgatgatcgttacataaaagcatactcacgaagagcaacgg

SEQ ID NO: 138487 - DNA, 454 bp, Glycine max
  unsure (1)..(454): unsure at all n locations
  Clone ID: PAT_MRT3847_96061C.1
gtcttatggcaacaaatgcgttaaactcgggggttgcacatgccgataccacggaaggtcacatggagcctctgaaaaaatctcaatcttaaatcgtactaaccaaaatcacatctataggaaccatacatagtattgatctattgatcaatgacctgacagctggcgatgttagagcaagggttcactcacagcacactcatgatattaaaggaatcagtcatatggaggccacagttgggatctctgagaatacaggtgtagcattagcctgtgctatgaatagatgctttaggcggcgtgccagctctgatattgacaccatttgctctcaagactgtgaattatggcatgctgcttgcacacaagcaatgactatggcaattaatcgaaacccgggttctgatgcatggagtttggaatatntgaagcgcaccggatttcattgtgatat

SEQ ID NO: 138488 - DNA, 223 bp, Glycine max
  Clone ID: PAT_MRT3847_96062C.1
gaaaaatctttccttacacttgccctagagatgagtcaaggctgtgctcaatctgatgcacggctacttctgagaaggctgaagtctcttaacccttcacaagttcaaagacctacgggtccaattgaattatccccgcaattacttgaatggctagcatttgctaagttggctggtacaaaagttgcgctcaaaattgtcacaccgaccaagcccataaaat

SEQ ID NO: 138489 - DNA, 256 bp, Glycine max
  Clone ID: PAT_MRT3847_96063C.1
gaagggcaagcacaaccgctcggagaagaagtcgcgcaaggccatgcttaagctcggcatgaagcccgtgggcggcatcatccgcgtgacgaccacgcacaacaagaacgtgctgttcgtcatctccaagccggacgtgttcaagagcactgacagcgagacccacggcatcggcggcgaggccaagatcgaggacctgaacgcccaggcccaggcgctggccgcccagcagtacaaggcccccgccgcagaggcc

SEQ ID NO: 138490 - DNA, 537 bp, Glycine max
  unsure (1)..(537): unsure at all n locations
  Clone ID: PAT_MRT3847_96064C.1
actnnannnacttttatcatattaattccactagttatttcttctcccctccatgtcattgtaggcatccaagaaaaaagacattttagaattattcaagttttttttggacttataaaatatacaactaagaggggtctttctatttttgggaagtaaaaccccccaacttttttttataacccattcaatatgantatttggggttgccttttaatgtcgggcaaactttttttacaccacgaccnccattagaggtatttngttagaacatcgaaagtaacttagtctctaagtaccacccattagttaacatttccattctgacttggaacagcttctgagaggcacatcttggggaggggggtcttttggatccccttggacttcgaggcggtcgaacagggcagaaaaactgggataggcttgccattttggaatcatagagcctcagcatccttgatttaactggatggaaaatctttattcaacctgtgcaggagaatgatctaaaggcattttattttgggttccata

SEQ ID NO: 138491 - DNA, 541 bp, Glycine max
  unsure (1)..(541): unsure at all n locations
  Clone ID: PAT_MRT3847_96065C.1
gtccactcactcaccttgttctttttcttcttcttcttcttcactgcaatctctctctctctctctctcttcgctttccagaaaatggtgaaccctagatgcttcctcgacatcaccatcggcggcgagttagaaggcaggatcgtcgtcgagctcttccacgacgttgttcccaaaaccgccgagaatttccgcgccctctgcaccggcgaaaagggcatcggccccaacaccggcgtccccctccactacaagggcatgtgtttccaccgcgtgatcaaagggttcatgatccagggcggcgacatctccgctggggatggcaccggtggggaatcaatctatggcgccaagttcgaggacgagaacttggagatgaagcacgagaggaaggggacgctntccatggccaatgcgggacccaacaccaacggctcccagttcttcatcaccaccacgcgcactcctcacttggacggaaagcacgtcgtgtttgggaaaagtctgaaaggaatgggcattgttcgatctgtggaacacg

SEQ ID NO: 138492 - DNA, 382 bp, Glycine max
  Clone ID: PAT_MRT3847_96066C.1
ccaacgcaacgattccagcagaaggcacaaaccaaaaaaggaacgggaagaacgaaacagcgggcatacaaaccgaaggggggaaaacacagcggacataagaatgtgccccggaatacgacaacaaaggaaaccatgaccatataaacccaggtaaaatcagattcacccacccaagacgcagcaaacctggtgatgagaaaccgcactaaacaaaagggcaaatatacaaaatgcaccaaccaacatagggctcgcaactgcaggcaggctcctatatgcaaggagaaagatgctgacatcggcaaaaagggcaaaacaatattccaaggcatgaactgaaccaaacctgaaatcccaagaaaagctcaaacagacgcaa

SEQ ID NO: 138493 - DNA, 207 bp, Glycine max
  unsure (1)..(207): unsure at all n locations
  Clone ID: PAT_MRT3847_96067C.1
bgangnagcgtacgtnagnaggactcgggacgaggnggntccgggcgnngnnngccnngcagnanacganggctcaacgngtnanaagaggcngcannnggccnanggcggaaagancannggncaanngcgncacggcgancncggagacncagagcnngnngacancgnggngngnnnggnggcgaggnngangaggcagnannc

SEQ ID NO: 138494 - DNA, 421 bp, Glycine max
  Clone ID: PAT_MRT3847_96068C.1
tcgcgatctagactcgcgtttgtgtttctcgacctggcagaccgggaccggcacgtgtacgagcatccacctatacctagagggagtagagttagagctagtcatggtcatggccgtagcctgtgtcagagtgaaattggcatacaatcacacacacccacaacatccgaggcataagcagaaaatgctgaggcggcggagcagagagcgagctcacactaacagtgatgggctcactgtcactgtccgattcgcaaaacctgaaccggcagcgccatctatgaaaatgacaacgcccgcgcacaggcagaggccgtatgggtctccagcgcgatggtggtttttatcagcaccacggacaccagcagcaggtccttgaccgtctgcccctgaccgagagagagcaagaggacgccgctca

SEQ ID NO: 138495 - DNA, 329 bp, Glycine max
  Clone ID: PAT_MRT3847_96069C.1
tttttattttttttttttttattttttaaaacctcggtcttttttattctttatttgggcattctctgttaaatttcaaacatgttatgaaactgtgttgctgggttgctattactcttctgctgccaatacagagtgctgataatggaggatgccagctatataaatcagcattgatgatgaatgcaacaattattatcaaaaatcaaaatcacccatctaggcccttttattgcaatcttttcctgccactgaacaccgagacaagaactaagcgttccttagctagtactattaacaccacccccgtgccttcgtggagggaaatg

SEQ ID NO: 138496 - DNA, 321 bp, Glycine max
  unsure (1)..(321): unsure at all n locations
  Clone ID: PAT_MRT3847_9606C.1
gttgatgnangngtangtaagntnggaattaggntngaggtgatggnaagaantttgnagnatantagnatgagnatgaagntattntagntnttntnnatantnnnattatttntntanttntanataatatatgatantanntgtnatnaaaagtaatttnatntntgaaataanggngatntaganaaatgtnanntnaagggntagtaatntagaagattntnggaataanggtgtggtnantgtaaaanatttangtntnanatgntgaatantaaaatnatgnnatannaaangttnangnaaganngnntnnat

SEQ ID NO: 138497 - DNA, 366 bp, Glycine max
  Clone ID: PAT_MRT3847_96070C.1
tttgtttttcatatttgaagtgaagaagccattgaagactgctaaacttctcgctttgacagaacgcctgctgctgggaatctcatctggtgcaggtgcagctgctgcacttaagatagcacacaggccagagaacgctacaatgcgcattattgcggccttcccaagctttggagagcggactccatcatctgtgctctatgaatccgcgaatcgagaaacagagagcatggccttcaccccttgtatatgaagacacaccagtcacatggcggtttgtaagaaggattggccccctgcattgcgtctctatcccttcgctaatggacctgataaataaaagcaggatcatgcttggttcccctt

SEQ ID NO: 138498 - DNA, 352 bp, Glycine max
  Clone ID: PAT_MRT3847_96071C.1
cgtcacaggaccaggtgtggagatgaaatattctagagtgtttccaaccgttggatcatgataatgatccaacggacaaaagcatcactttttatcataagctatgttggttccaaaacatacgacaccgtattaattaaccaaacacgtacctacatgtggaaagatcttaaatacaaggaatactcctcacaacacatgttttactcgatcttgtgctgtacaataatgcattgttcgaattactatattaagcaagagaaagatattgagacatagatatatgtattatggatcacgaaaaggactaatgtgttatttccacgtgtcctccatacaggcggtcccacaa

SEQ ID NO: 138499 - DNA, 127 bp, Glycine max
  Clone ID: PAT_MRT3847_96072C.1
agaacccagtggatgacttgacacataggccgaatgacttgctctcatttgtcgtggtggagaaaaggggggtgcagacttctattagaacacccacctattgagtatttgctcctaactgacactg

SEQ ID NO: 138500 - DNA, 203 bp, Glycine max
  Clone ID: PAT_MRT3847_96073C.1
aggtacagctgcgaggagcacacagcagggattgtagcatgactagtaaatgtcaattttaaaacttagtttcaattctactccgcatcgccgattctcgccatgccgaaagccaagtgggcgctctaaaggatcgaaacttaggtacacgtgaatgcgacgtcataggtcttcgaaactgtcacctaaatctcacttcagat

SEQ ID NO: 138501 - DNA, 230 bp, Glycine max
  Clone ID: PAT_MRT3847_96074C.1
gacaaaagtagcaaagcaattcactcagcctcttcaccacctctttaagctcaggctatctaagaaatgttagtacttctttcctggcaggtttaaatccgtttgtggtgtgagaaaaaaggggatggatttggcaagagcaagggtcttcttcatggggttcgttgtggggggtctatttgctgcaagggtgagtgctcagaccagtgagttccctcaagcggcaggac

SEQ ID NO: 138502 - DNA, 217 bp, Glycine max
  Clone ID: PAT_MRT3847_96075C.1
aatctcgctattcggctcgagtacggctgcgagaagacgacagaatgggggaagaaaaagagcgtgaaggtcgggggatagatagggtttgcccttaccctgctttgctctcggtggtgtcactgattggcgttgccaaatttcccttggcttctcttctccgactctttcagaaactctctctcaatgaattttgaattgaagtttccttcccaat

SEQ ID NO: 138503 - DNA, 146 bp, Glycine max
  Clone ID: PAT_MRT3847_96076C.1
ggctcgagcatatatcacttctctcatcataacatatctgatttttgagctatctggaggtcggacttctgtatgaaaagggaaagacgagttttcaactgagtgccacttgggagatgtttttcaaacagtacagggctgcctat

SEQ ID NO: 138504 - DNA, 286 bp, Glycine max
  unsure (1)..(286): unsure at all n locations
  Clone ID: PAT_MRT3847_96077C.1
gggggnncatttttcgggggggttcccttgggaaaaataaatttatttttgggtttttacctgccgacttaaaaattggtgggccccaccaggggttttttgaagctttttttttaaaattcgcccttggccccaaacttccccatttgggcaccgtccgggaggggaaaaaattaatggccaaatgccttctttaaaaaaaccttttggccattttgtggtggtgggttcctccaggggcttttggggggcctttgatttcacccaaattgggcttcccttgaaa

SEQ ID NO: 138505 - DNA, 277 bp, Glycine max
  unsure (1)..(277): unsure at all n locations
  Clone ID: PAT_MRT3847_96078C.1
gtctcacctaccgcgaacgcgccagctatgctaccaaatccaaccagcacagagtggtcaagactcccgggggggagcttgtgtatcagaccaccaaaaanagggggancgggcccaantgccctgtgacggggggagaggttcaangggttccacatttaangcgagcanagtataatagatcaaggggacacanaaaccggggggctgggaaccctgcatatggggggggggtggctggcggtgctggtanagaaagaatcattccagctttctt

SEQ ID NO: 138506 - DNA, 440 bp, Glycine max
  Clone ID: PAT_MRT3847_96079C.1
aaagcgtataacttatttttaattttaaaaaattgatttattttatcttttcatttccttaatttttttttttgtgtgtgtgtgtggaagaatttattcaacctgtctctatatgtgatttgtgactctatattgaaattgaaacaatggatgcacaaattatatatcttgtggcgtgagtattaatccataaacacagtcacatgtatagagaactgtaatacgattttaaatatataaaactcgtaagacaaactattacgaaatgacgaaaaaactttgaaatgaaaataaaataatgagtttaaatgtgtaatactctttttttttatcatttgctaattatccatgtcagataaataaattatacaaattcatcatatataacttttctaacaaattttccagtacatattatccagatttttccaccattagga

SEQ ID NO: 138507 - DNA, 181 bp, Glycine max
  Clone ID: PAT_MRT3847_9607C.1
gggtcgagccgaatcggctcgagcttttctccagcagcaccaaaaccaggcaacactcgaactggatatccattattaccaaaggaaaagcataaaggatatcaaacaccctgttcatcattaaaactctcagtgccctctttccctagcaaaaccctttcccacaacacgactcagtcca

SEQ ID NO: 138508 - DNA, 384 bp, Glycine max
  Clone ID: PAT_MRT3847_96080C.1
cggctgcgagaagacgacagaagggtacggctgcgagaagacgacagaagggtacggctgcgagaagacgacagaagggtacggctgcgagaagacgacagaagggagttctttatttgtttatgtacttagtgatttttatttgattggtcatcttatagatgaattcaggaattgacttgcgttttgacaagcctttttgaaacccaaacatgaattgagtacttaattaggattatctccaggaatagaataatcttggttaagtctcgctaattctcgaccattaatgttaattgcttgtgtcaatatgttcaagggattgagtatcaggcaggtagtttggaaacatccaatgctgatgatcgagaccaaaacactaaa

SEQ ID NO: 138509 - DNA, 376 bp, Glycine max
  unsure (1)..(376): unsure at all n locations
  Clone ID: PAT_MRT3847_96081C.1
ggcgtgcatggatgcgtcgccctcatctgccgcgacgacgcgagacagtgtatactggctgccacaacttgatgttgcacaatcggcacatgatttanaataccttcttaggaagggatggatttcttgcttgtaattcgagctagagcacggtttcgtgtaccgcgagcacaataggtcaccagcatactactatggacgctactggaccgtgtggaagctgtctatgtttgggtgcactgatgcttctaaagtgatgaatgagcttgatgaggctgagactgcatactccaacggcttcatccgtatcatcggattcgacaacggtcgccaagtgcagtgcattacgctcattgtctacaagccttcaggctac

SEQ ID NO: 138510 - DNA, 110 bp, Glycine max
  Clone ID: PAT_MRT3847_96082C.1
cttaaatactggttttatgattttataacgcccgcttgcacatttaggttgaatgaatgttttgtcttgcactactatcttcttcgatgggctaacaaatagtagttgat

SEQ ID NO: 138511 - DNA, 262 bp, Glycine max
  Clone ID: PAT_MRT3847_96083C.1
gcgcgagtagcatgaccctgtctcctttataacccttacaagtctatcactagttagagtattcattggaactgaaacagattcactctctgtttatctagagatgcgattgacaagcacacctaatgacaaagctaacaactccatcgacagagggcgagagagagtgagagagggacgcagatcgtagaagaaccaaacgtggctggagtgcaaccacaacagcagcaacgtcgaggaatgcggaggatggtgcatgtcc

SEQ ID NO: 138512 - DNA, 305 bp, Glycine max
  Clone ID: PAT_MRT3847_96084C.1
cttgtgaacagtcatcaaacacgggattgcgagattcctaagacttaaacaagccctgtgcagtccaatgctcctaaggctgggcaaaaaatacaataaaaactcctaatactgcacatagggtcatcggttggtgaatatggagccagccgcaattccatactagaccaggtgtgttacagtgactcttgattggctaaggggtcagtcttacaacaccaacaggaggttcgtgcacgctgacgccaccaggacctaacggctagggtggtttaggttcgttgaaccaccggggtgtttcagac

SEQ ID NO: 138513 - DNA, 319 bp, Glycine max
  Clone ID: PAT_MRT3847_96085C.1
cacacttggggaagatggccattttttttcatatttcataaccaaaagcaaaattaaaaggggggctaaaataaatgtttttttttcccaatgaaataaagaaaaagaaaacccaattttgtttaagacatatggggctacccttgccaagggtttggggtttggttatgttgggaggagttgatccaccttcccataccagcaatgttggggatttcagggggggagagaggtctaagacccaaaaaatcttttgccagggcttaattattgtttcctttggcaccgtcatgggggggggttgttttcgtcatggcat

SEQ ID NO: 138514 - DNA, 564 bp, Glycine max
  Clone ID: PAT_MRT3847_96086C.1
ccacttggggaagatggccaatttttttcatatttcataaccaaaggcaaaattaaaaggggggctaaaataaaggtttttttttcccaaggaaataaaaaaaaagaaaacccaattttgtttaagacatagggggctaaccttgccaagggttgggggtttggttatgtggggaggagttgatgcaacttcccatcccagcaaggttggggatatcagggggagagagaggtctaaaacccaaaaaatcttttggcagggcttaattatggtttcctcgggccccgtcatgggggggggttgttttggtaagggcatccccaccagccccaccaaaggggtcctaaaaagaagccccttcaaggggggaaaaaaaagagtcaatgatatggggaaggggggaaggaaaaacccctttaccaacggcgggaacagttttattcccaaagggtcccaagccagggaaaggggggggcatttgggggtcacggggggccaaattcaaaggggctttgggagacacgggagccctgtgggggggggggcccaaatatgcccccgggt

SEQ ID NO: 138515 - DNA, 240 bp, Glycine max
  unsure (1)..(240): unsure at all n locations
  Clone ID: PAT_MRT3847_96087C.1
cngacgcgtgccaaggcaaactatatgtcgcccaattcgccgctcatgaggaagggcgtctcacgtcgcatggcatttactaagcgacagctcgccaatccctcaactcttatccgctgaaccatggtgttaaacgacaccttcttaatgctggcatatgccaacaatataaagaggacgctgctgctataaccaatgcatttgcacgatatactgaactgtatccaacacttttaggac

SEQ ID NO: 138516 - DNA, 292 bp, Glycine max
  Clone ID: PAT_MRT3847_96088C.1
tttttacaaattttcagtgtatcaaattaacgcatgtgtaatggcaaaaggcaaaaaaaagctttgattctttttttacgtgtgacgaagcttgcacaaccaaaaaatttatttcgttctaaacaaatcgggtcaaactcactgcacgaaaggactttaattttgtgggccaaggaggctgcttaaagtggttgaaacagatccaatagcggtttatttttagacaccgccaaacgcacgggtctattatgatgctcaaaacttacccgaaaacacggacttatgtaatgcg

SEQ ID NO: 138517 - DNA, 146 bp, Glycine max
  Clone ID: PAT_MRT3847_96089C.1
ggctcgagcccagcggcaacacaaaagcgaaccgccaatacgctacacagaccagaccgcaaggcaccacagggcaggatcaagaccgacgccacagcagagacagggacgaccccaccgacacagctcaacaacagagaggaagg

SEQ ID NO: 138518 - DNA, 234 bp, Glycine max
  Clone ID: PAT_MRT3847_9608C.1
tttttccttttttttgttttcaccggcgcttgcctttggggggccgcggaacgaaatttacatattaagagaggttatctactgtatttaaacaaattttcgaacaagaaatttacattggatttcaactaaacataggcgttgaaagataatgggaattaaattcacattcacattcattttaaaaatctttgaattagaaaatccctgaatgctttccaaaatgggtaagga

SEQ ID NO: 138519 - DNA, 184 bp, Glycine max
  unsure (1)..(184): unsure at all n locations
  Clone ID: PAT_MRT3847_96090C.1
ctaggtgggggacgacccaagatccttttttccggtgccacagccatggctatctcattatcgctcatctcttacttcctgttcctcgatgttaagtggactccgcgactggtggttttgttcgtcatgatttacaatgctgcctttggtttctcgtggggacctatgcccctgntagtcccac

SEQ ID NO: 138520 - DNA, 239 bp, Glycine max
  Clone ID: PAT_MRT3847_96091C.1
ccacttgccttcttttgcgaatggttcatcacgatctgacattaaaacactctaagcaatgccctgctttctggactgtctgagataactgcgtgaggctgctgttctatcgggcactgtagcaaaagccagcagcaagttggcatttaaccctagaagctggattcaaccatattgtgttaatgtgtaatcgtggaaaaccattgcacaaatgaaggctagtgggataaaaccaaaaa

SEQ ID NO: 138521 - DNA, 392 bp, Glycine max
  Clone ID: PAT_MRT3847_96092C.1
gggtttatttttttttttttttttttaataagtatacaactactggttggacatttttattgacatataactcacaagctggttacataaaactcaaactgcacaaacctattaatatcggggcgatagagcatcaccaccaccatcccttaatactaatatttacatataacataatattaatatagggggggtagaaccatgacgtgcggaaataaccacgtcatggtttggttcccatacaggcaaagggtggacaccatatatatatatatatatatatgatatatcctatttaactaaataaggcttaattttgggtatcatctacgtctttacaaaaaacttacttacccctcctatggcactatatatatatatatatatatatt

SEQ ID NO: 138522 - DNA, 386 bp, Glycine max
  Clone ID: PAT_MRT3847_96093C.1
ccactctttcttttttttttttttttttttttttttttttttttttttttttttggggcggccgggggggccccccgaggaatggccggccgcccccggggggccgaccagttcttattataaggggtacaaaaaaagcgggaaacaatggtcagaatagttccctgcggaaaaaaaaaacccccccacaacaacccacaacaaactaccggcaggaaaaaaaagaagaaccggcggggctacaaaaggaggcacccaacaaaaaatagttgcgcaccccttacccccttttaaaaaggaaaaaaacccgcccagccagcataataaaaaaagccaccacccggcgagaagaggcagtattattaatcccccccagggtgtttttt

SEQ ID NO: 138523 - DNA, 415 bp, Glycine max
  Clone ID: PAT_MRT3847_96094C.1
gaggttggtggtccaagccccccgacctaagcttcgaattccgcttgagggccggtttaggcgttgaagggttctccggactggcccaacaatggtgtggaactttggtaccgggtctttggttttccggggggggggaacatggtgagagacctcttccccaacggggttgggaaaaggatgccggtgcccaaggtgatggcgattccctttctggttggggcctactttgccattgaaatgtgccttgggagtttggtgggttacgggtggctcaagcttaacacttagaaggcagaggccatgattccagcaactgcctttggactcatttgtggagaaggccctgtggctcttcccgctttcaattcttgcttttggcaaagttaacccctcctattttcatgaaattttc

SEQ ID NO: 138524 - DNA, 823 bp, Glycine max
  Clone ID: PAT_MRT3847_96095C.1
attcaaaacataaattaactgcccatttactaaaataataagttgataatgtttatggaactatccggtttataaaattgtctataattaattatagaatcaagagatgcatctaatatttgcatcaacctgcattactcttttttgactcctcgctttgccattccaaatcaaatcctcaaagccgtggaatcaaactaatgtactatgatgattttttatggctggttacttagtaagtgtaaccagtccaatatatagattataaacagcaataatcagggtagacctctataccacgtgccaatatactactattaaacacagcatatggctatctaatcaagcagattaacactcgtattatacagccaccctaatagctactatttgatgatcatataggtgtaaattgagcggaggagttatattttgtgatcaaatgctgacatctctggattttggaacctggtcacaatctgctggtgcccaaccaatcaactgcttgtcgttgtcaaataccatcactttgtttagcatggatatgtctccgattaggttcagatcccccatccctacttcagagccgtttagaatgcccaagcaaacatttcccatgtttgatactatcagatatgcttcaggaagcatttcaaattgagctttacttctcccgttgctggtgaaactaagcacaattggcttgaagtattttctcacttcgtatatgcttctgaaaggtcttctaccacgccaacaaagagggagagtttgatcatcatgtgcttcttttaggggctttccacctgattccttcttcaac

SEQ ID NO: 138525 - DNA, 385 bp, Glycine max
  Clone ID: PAT_MRT3847_96096C.1
tttttgttaaaagtttcgattggtggccggactgattccattttactataaaccatgtgactaaaaaaaattgtgcatcgtctatttctcaccctacttttgggtgaattcactctatcccaccagaggagagcatatttagaatcttggttaccgagcctaaatggcaaaaagacacaccacttttgcacgggctggtccagagaaggctcacaatatctagtttaacctaaagctgtgcctgacactgtattatacatcactagtgccaaacggaaagcgggcttcgttaatgtcgtgccatgcctaatccctagactcccacaaccatgcgttcgacaatcattcttttgatatagtgacaccaacttcaaattaaatggcc

SEQ ID NO: 138526 - DNA, 758 bp, Glycine max
  Clone ID: PAT_MRT3847_96097C.1
gcgtcgtaagctcggaattcggctcgagacggaagacgacagaagggggacgaaaaggaggagcattatcaatagcgtcataacacacctctgcaattggatccgccacaaatcgaagagcataaatggcgttgaagttgcaaatttagagatctgaacattaatcataatcaccatcactgttcatgctcttctggttgcgctgattctcaccaatggacaagtcaagtgctctggagtacatcaaccagatgttccccaacgaggtgtctctttctggcgtggaaccgctgatgcagaaaatccagaacgagattcgcacagtcgatgccggaattctcgccgccgttcgccaacagagcaactcaggaactaaggcgaaggaggatctcgctgctgccacacgcgccgtcgaggaacttatgtataagatccgagagataaaaactaaagcggttcagagtgaaacaatggttcaagaaatatgccgtgacattaagaaacttgactttgccaagaagcatataactaccacaattactgcacttcaccggcttacaatgctggtctctgctgttgaacagcttcaagtcatggcttcaaaacgtcaatatagagaggcagctgcgcagctggaggcagtgaaccagttatgtagtcactttgaggcctatagggatattccaaagatcatagaactgagggacaagtttaagaatatcaagcaaatactcaaggcacatgtgttttctgatttt

SEQ ID NO: 138527 - DNA, 466 bp, Glycine max
  Clone ID: PAT_MRT3847_96098C.1
ccgcgtcgtaagctcggaattcggctcgagtgaacgttatcagataagaacatctcttcagcttttggctttgcagagggagggaagtgcagtaagtatacataatcttttcatattccacttttcttttctttctgaactattttcgttattaagactgtgtattccaggtatctgtcaagaagcagagaagtgcatttcctcctaactttgtacattcattggatagttcacacatgatgatgactgctctagcctgcaatgatgctggattatgttttgcaggtttgaagacaacattttaccaatgaaataataaacatatgtgaagtttccctatagaataataaattcataaatattagtttgttatactttttaaatgtatagaaattgtctatttgcctttggtgtttgtttaattgcatttggaagtaaggatggagttggaattaattacttttac

SEQ ID NO: 138528 - DNA, 271 bp, Glycine max
  Clone ID: PAT_MRT3847_96099C.1
ctctcccttatattaccgttttttttgcgcgaatgcccccggggactttttgggaccccaaaggggatctcccctttcccaagttgaaagctgaatattataaactcagggggtcctcccacaccaatgcgtgggtgctgtgcacaaataaaacatgaagggactttttaggttgccttaaaacagaaccttaaacccctggtggaaactaagacttgggatttccaggatacaaaaggatttgttacaaaatcaccccccggctgcagac

SEQ ID NO: 138529 - DNA, 539 bp, Glycine max
  Clone ID: PAT_MRT3847_9609C.1
cccacgcgtccggtatcttccgtgccaataaaaataaagcaccagtagcaatcaactttgcttctcacttctgtgtttgaagcttctgtgaggggaaaaagagatgcagtttgcaggttcaatagtttcaactttcaggcaatagaaagagttctttttacacggtttgagttgagaatccagtatagactttccgctatggcagcaggattggaactcatacccataggtacaattttgacagtggtaactaaccaagtcttgaagacggctcatgcagcatctgatgttcttattggtaaagaaagcttcaaggccctttcgacacatctatttgatattgagccagtgctaaaggaattacagcttcaagaattgaatgactctcaagccgcaagggttgctctggagtctcttgaagcagatgttaagaaggcaaacaatttggttgacaagtataggaaccgtggccgtttttacttactgattaagtgtcgatccatagttgaggaggttgaacaagtcacaagggatattgg

SEQ ID NO: 138530 - DNA, 754 bp, Glycine max
  unsure (1)..(754): unsure at all n locations
  Clone ID: PAT_MRT3847_960C.1
gtttttattatcttctcagaccagaacaacttgcggagggctttgcagtgtgttgtctccagaatgcaggattctgaacttactgtgcgtgtcgattcagtttttgctttgcgttcttttattgaagcttgcaaagatttgaatgaaatccgtcctattcttcctcaacttcttgatgagtttttcaaacttatgaatgaagttgagaatgaggaccttgtatttacattggagactattgtggacaagtttggggaagagatggccccttatgcacttggtctttgccaaaatttggccgctgcattttggaggtgtatgaacactgcagaagctgatgaagaagctgatgatccaggtgctcttgctgcagttggttgtttacgtgctattagcacaatacttgaatcagtgagcaggcttccacatctttttgttcaaattgagcctactttgcttcccataatgcgtagaatgttaacaactgatggtcaaggtacttcttcccattttgcatctctctctcactctcccttttgtttatgaaattttctttcataaacaaaacgtaatttccactttgaatgatggttacttgtttaaatttgaggcttaaattatttttttaacccttttcattttcaatgccatttgtgtttgtggatgtattcacttcaatttttcntgaagagaagaattataaaacttttggaggaggggatcctcttagatctataatgactacacaaactac

SEQ ID NO: 138531 - DNA, 486 bp, Glycine max
  Clone ID: PAT_MRT3847_96100C.1
caaaatagtagaacaaataattatccatattatagatcatgtccaactgatatttaaaacgaagagttcattgaattagaaagaaaacccaatataaaaaaacaaaaatgatctgcatgagtttgtgtgtgtgtgtgtgtcaatttgttctcactaaaatcttatttgaattatttcctataattcacaaaaatcttaggtgtgtgtatctattaagccaacaatggtagtgtcagaaaatttagtttgttatcttttggatcaataagaactcataatattgtttagcttaaacttgcattcatcatattgatccaaaagataacaaactaaacaatattatgagttcttattatcacttttttttctaaaccttgtcacaaaatgatctttttctcttcgtgtcgacaaaacgtgagaatctatggatgaagttttgaattactgagccagaatttggttgccaaaatttttctaattatcatt

SEQ ID NO: 138532 - DNA, 260 bp, Glycine max
  Clone ID: PAT_MRT3847_96101C.1
ataattttgaagtggttattatctaaggtgatactttgattctgctatgggataaatatactacagcacgtgttatctttgtatatagtttctgcaaaagatctcactagaattgctttagaaggttaaaggtagatgaagtttatacaggtttaatgatacgtgtagtatcaaaggtacctgcagaaatggtaagtgacagaggaaggagaagaaagggaaaggaaaatatctgcgaagctattgctcccccaagtgac

SEQ ID NO: 138533 - DNA, 130 bp, Glycine max
  Clone ID: PAT_MRT3847_96102C.1
gcaagtcaaccaaatggattgagtttttacgtgtgtttagagatcttgagacacaagaaacgccttgtcctaccttgacatctgttttaaattactgtatccttgtactacaggattactcttattcaga

SEQ ID NO: 138534 - DNA, 535 bp, Glycine max
  Clone ID: PAT_MRT3847_96103C.1
cagggatttggttctgagagaattggtttggaagttgaactggaggtggcaaaccctgttgtggaggaggttgaggaggtgcattagggggaggaacaacaggaattgattgtggaagattagcaggggtaggaagctgtggttgagattgcacaggagcagatgcagcttgctgaacaggattggtaatcgcactagtttgcatttctgattgctgatctgtcttggacacttgtagctttgctagttgcagctgagcttgcacaatatcttgcttgtccttgatagtctgcacccctgattgcacctctcgaagaatattctccagctgtctcaattttccatcagtgctaccatgattatttccaaccgataccttcaaatcatccacagaattttcaagatggtgggttctggtttctagttgtgttaaccgtgcactaacaccttccagaacatgaagcatattttccatatgtttcttcatggtacgatcaatctcagacagcattgtagcatcaaaagcacttcggtc

SEQ ID NO: 138535 - DNA, 332 bp, Glycine max
  Clone ID: PAT_MRT3847_96104C.1
ccggttccgggaattcccgggttcgacccacgcctccccgcacacatgggactttttccttatattaccattctatcattctttctttgcaccttcattataggatgtcagatggtgaagctagacatctccttggtttgatataatggaactggaatggccacagctgcattctctggagatgatgctccaagggctgtgctccctatcattgtggcttgaacaccccacactggagtgatggttataatggcgccgaatcacgcataatgtagggaggaggcacagcccaagatgggtattttaacaatgaccacacccaactgagcatg

SEQ ID NO: 138536 - DNA, 472 bp, Glycine max
  Clone ID: PAT_MRT3847_96105C.1
ggctcgagctggaatccacgaaaccacctacaacagcatcatgaagtgcgatgttgatatccgtaaggacttgtacggaaacgttgtgctctctggaggtacaactatgttcccaggaattgctgatcgcatgcaaaaggagctcactgccctcgctccctcaaccatgaagatcaagatcattgctccccctgagcgcaaatactccgtatggatcggtgggtccattttggcctctttgtccaccttccaacagatgtggatctccaaggaggaatatgacgagtctggtccctccatcgtccacagaaaatgcttctaagcgtttccccattctagtgtttcgcacctagcaatattcatgtattttttgaagtgtactttattctgtatgttttaggaattatattcatcttgttagggctgtatatatacaattcaacgatttgaaataaactacctgtcgtgaggc

SEQ ID NO: 138537 - DNA, 549 bp, Glycine max
  unsure (1)..(549): unsure at all n locations
  Clone ID: PAT_MRT3847_96106C.1
gattggttgaagagagaataatgtgaatggtggcaggcagcaatggcagctcctaagaatcattggatctgctgctgacacctatctaatctattgtttccttctttctctgtttcctaaaacaacaaacagcagcagtttctggttgggatgggaatttcatggagtaatagtaacagtaacagtagcagcagaagaagaagaaacacttactttcatcctcatcctccacccccttactattaccatccactgccgccaccgccacaaggttactttgttgcctcaaccaacccttctgcttctaccaccaccggctacgttggtcctcctcctcctcctactcagtattacccaaatggcttcactgccaattccgtgatgccaaatcanggntgaagtggaatccatgcttcgccacccccctatgttcatcatcaagccactaagaagataaggaatgatgtgaattagcataaacacactctgcgcctccacctagatcctaacaatccagatcaccacttgatgtccttttattttgatgcc

SEQ ID NO: 138538 - DNA, 683 bp, Glycine max
  Clone ID: PAT_MRT3847_96107C.1
tttttaatgctgcaacattcatctcatcttctgtctggactctgtaacaagataactgaagaggattcagttgtcttatttattcttcttgccaccagccagaatgcgctggatttgaagccctcggctgaaagcttggttgtatagcagtctagtttggaattcggaaacaaaagggaaccaagccattatggccactggtgcaaagataatcactcccatcacgtattcataccctcttgataacgctttgatagacccccacattccaattcccttcaccaatggcttacatgcttgagctatctgtataaatgcccaacctgtgggcataaaggctaggaggctcgcaaagatgtcaccaactgtgaaactaagtaggacaaacatcaaaattagaatgacaatggttccaataaacagaaacattttgaggagacgaaacatcagctggaaatctgcactgaatgtcttgctccccatggacactatcttcaagatgactatgacagccactacaactaaccaggacagaccataaaccccgatactcttgtcacctctagcaacatgtagatgatacacaatcccatactgatagacaaagaaacgcagggcaagaatgacctcccaaatcctcccccaaatcccagtgtactgcagatgttcctgctcctcatccc

SEQ ID NO: 138539 - DNA, 136 bp, Glycine max
  unsure (1)..(136): unsure at all n locations
  Clone ID: PAT_MRT3847_96108C.1
cctgatcgaagagcaccatagtattcacctttcccttttgcttaccctagctccaccttttcatgttctgcattccaccgncatacttggcaagcttgtatgaacgtgggggagccttgtccttctttggagccat

SEQ ID NO: 138540 - DNA, 241 bp, Glycine max
  Clone ID: PAT_MRT3847_96109C.1
tctcgagccgattcggctcgaggcgagaagacgacagatgggggactggatgatgatgcaatcttcaggattgatacatatacttgctcagatatttaaagagaagaaaaatcaagctggaggtgaaactgctcattcccagctagtgctgttcaaacttagaatcctttcgttgttggaaattttccttcatgaaaatccaggtaagcctcaggttcttatggtttactcaaatttggct

SEQ ID NO: 138541 - DNA, 230 bp, Glycine max
  Clone ID: PAT_MRT3847_9610C.1
gttttaaaggagatcaacttgctttttacttaaacagctttaatttgtatgaggaggcttctcaggggagaaaagacaatggtaatcgggcacagacatctagttttaatgaactagaagctgcgacgggaagttttaggatggatcgctacttggtagaatgaggttctggcaaggactacaagggatacttcgttaagtataaacctgggtgtagctataaatcaact

SEQ ID NO: 138542 - DNA, 601 bp, Glycine max
  Clone ID: PAT_MRT3847_96110C.1
tggattccaaaaaggtattaaaaaaaccactaatggaataaacactttggttggcaggggggtggaggaaccccaaagaaaaagaacttccaataccaatggaaaagaaaaaccagaaggcctgggtggtattgttaatggtctggcagaaccttaaggttctgggttttatttcaaaaccattcttcaaggttcctggccgaatctgaatttggcaagaagaaaccaccttctggggggtcttacctgggcgctatttccggtacctaaccatggaattgaactttaaaaagctccagaagaattggacactccaattgggaaagaccgggaaggggaaaaatctgaccttaagaaattaacggaccttccaaccctccggaaagaaactatggggccgtattcccccaagcctggaatcacccctccggccagcctggaaaaatggaccttttcctgggggttatcacattccaagccggacgcaatttaatcgggatacatgggaaaaaccttaaaaatggtggggaatggctgggacccaggaattcaacctgaaaggtccttacagccccaagatgtgaatggaaaagggcgaaat

SEQ ID NO: 138543 - DNA, 304 bp, Glycine max
  Clone ID: PAT_MRT3847_96111C.1
gattgacaaaagacatatataaagaaagaaagaaatgagggagcttcaactccaaaggatttagccaaggagaagaagacagatcgaagcattcaaggcagacattcctcgatacagtagttggatagaacataaaagatactgaagtaagcgtgtgcaaaataatgactagactaaattaccagtggacggagaataacacccagtaatcctaagctcactggccatgctgaaacgttgaatgtcttgaaagctgagaatcaactgggtaagatttaacaaaatggtacagtggtggctgatg

SEQ ID NO: 138544 - DNA, 933 bp, Glycine max
  unsure (1)..(933): unsure at all n locations
  Clone ID: PAT_MRT3847_96112C.1
tgccgttccggatctgccgaagtcttgttgtgcaagtacaagtcgcgaacacaaaaacaagcagcgataaggaaggaaaggaaaaggagacttggtgcgaaagttgaaagcacgaaaatggggtgggtttggaaggatgacaacagcgacgatgttcgacgcgataactcttcggaacgatgcgccaccaccaaggtcgtcaaatctcagtgcagaacagaggaggtcgaaactggaaagttcgtcagaaagtgcgagaaaaccgaagagattctcaggaattgcatcggaaagcccgccgaagtgttgcaatcaaacaaagagtatactgaagaggatatcacagatgaagtacttaaaggaaggtctgttccatttagctcatctgacggtgccagtggtgtggttgactttcctgggctacaaaatgatattgaagtcatggaacgtaacctgttaagtggtctcagtcatttcttcgacgcagcgaatgggttttttgatgttttttccaagtctccaagcatctttgatgcagagtcatcctcaccctctgtgaggagagggatacctattgaagaatatcgtcggccagaagcttatcctaaatccaaggagaaggaatcaggagatactgattttgttgcaatggctaaagatgtttaaaccttaaatatgccctgggtataaaataagttttcttagttttgtattagattgtggacatctggaccacaatcaagtcctctagtaacatgtttctctgtattaagtattaacatgtttctttttactttttatttgaagttgtttctgatgtagcgtgtgaccaaatttttgttttccccctacactcagttgtaggcaataagaatgattaagcaattcatttttaagccaaaaaaaaagggggggggttnnnnnnnnaannna

SEQ ID NO: 138545 - DNA, 944 bp, Glycine max
  Clone ID: PAT_MRT3847_96113C.1
ttccccccaatatgctcaccccctggaatgggtggttccgtttcaatcccttttggaaggtcaaaattaattccctaaattgaagggtatttggagatgatcaatttgagacattgtccagttccacctgctacattaaccaaagttgatataccctcatatcctgtgtatacttcaagtatttttttcatatgggttgtgcatacatcattcattgctttgttaaatacgtggtttagttctggttctttcccaaagtactcgaacttagaaattccatgaaccttcttgaataggtcaatctcaggatcaataatcgcttccttaaaattcaaccatactcctaacatcgcagggtgacacagaaatgatgtgaatgaagcaagatagccaccaccatttttatcatagacgaaatatttacccgatggtgagaccgcataaactctcacggcgctaccattctcatcggtgcgagtggaaacagtgagaagagagtagctagcaagcaagagcaacaaacgctcaagcctatttggcaagtcagagtggtgttgttgtgttggtaataacaacttggaagcaatttcatggggtgacatgaatccaccactctcttctgagctttccttcccaatgatctcaaacactttgagctcaattgcagcgttgagagcggcaggaaagaccacattggaaccgagcaccatggcatccaggataatatcagtgtcttctctttgtggggtggcagtttccaccacatggttctctttctctaagcaacacgaactcatgttactttgttaatttcggttagtatagttttgtgatattttctcttctgtgatgaacgtatataatgtgctgtttttataggcacatttaacactacttgttatcagctatgtatacattaaaaataatttcttgcttttttgtct

SEQ ID NO: 138546 - DNA, 325 bp, Glycine max
  Clone ID: PAT_MRT3847_96114C.1
gagccccaacccaaacaacattattggatcggcaaggttcagaccattccagactcatgtggaacggaagttacagacccatatcacaatacattaatgaggataatgtcaggcttactgcagcgttgaggatagaacaacatttatctagggctgatcaccccacgggacaacgcagcagcatgcgctctgttaaacccccataggggttgtgatgacaaaggacgcttaccttatataactgggcggcataaacaacaacctgttggtggtccgtggggattaccatcctgtccaggagcttggccttaacagtgaaaatggt

SEQ ID NO: 138547 - DNA, 232 bp, Glycine max
  unsure (1)..(232): unsure at all n locations
  Clone ID: PAT_MRT3847_96115C.1
ttctctcgagctcgatccttcaatttatatacttatcttacttatcttcctttattttttttttcgtatcaaactcnncctaggtgctttttttttccatacaggcccgaccaccatacaccnccatactaccaccgataagctcgaatagtcctttctttttctttcccagacccaaacctatcttacccaaagtcaaactcccatataatcaaaacaccaatctctcaaa

SEQ ID NO: 138548 - DNA, 128 bp, Glycine max
  unsure (1)..(128): unsure at all n locations
  Clone ID: PAT_MRT3847_96116C.1
gnngcntntggacgagcaagttaaacgactggatctcatacccccaaanaagaacatcaaaatcncaacaagagtcttgaatccagcaagaactactgctccaaattaaccttcccttccacacaaca

SEQ ID NO: 138549 - DNA, 535 bp, Glycine max
  Clone ID: PAT_MRT3847_96117C.1
atcttccttcccctctttcatccaaaacgcggcttttgctgttgtctcattcttgatgatacctgcaacagcgaaagaggatatgatatttgaatgcgacatggctctcgaagaactgcctaattctgccatgtacaataatgaactcaacactatggatgttgaacctataagatctgatgcggcgtatgataggacattatgctctgatggtgttccatcatctgaagtctcatacatgatcacagctagctgcaatcccttcaataaagataaattcgacgcgaatgcagctttggattgcgatcttgacccatgctcaagcaccaagttcatggtcgttgcttgctaacactcatgggagtgcctatctgatgtgctacattgccaaccgatacacgcctatgtggtcagaaatgtggccaacttagtcccaccatttgacgcaccataatactctggaactgaggctgacccttgatatgctgtgatgcatacttaagcgtcggataaagaagaaatgggacacagttct

SEQ ID NO: 138550 - DNA, 794 bp, Glycine max
  Clone ID: PAT_MRT3847_96118C.1
cccacgcgtccgggacgtgctgtatatttcgggcttgagagaagtttgtgtggattttcataatggcgcattggggtcactatgatttaaattgtgaccttaaaaatggagtcaacatgtgttgtgatgaagagtcttttgtcaaagagatcaatacaacttccattgaatatgctgtcaaagtcttgctgatggatctaggggaagacatcaacagggaaggcattataaagacaccacatcgtgttgcaaaggccctctttgaaggaacaagaggttacaagcaaagtgcgaaggaaattgtggaaggtgcattattccctgaagctggtgtagacagcacaaaagttggtcatgcaggtgaacttgtgattgtgagagaccttgaattttattcctattgtgagtcttgcatgctaccattttatttcaagtgtcatgtgggttatgtcccttctggtcaaagagttttgggtttaagcaagctctctcgtgtgaccaatgtgtttgcaaaacgattccaagagcctcagcgtcttgcaaatgaggtgtgttctgctttgcatcaaggaatagaaccagcgggtgttgctgtcgtgctccaatgcacacacatcaacattccagacacagaatcaaacttttttgactcaaatcacaaagggttggtggagacactagtttcttcagggtctggtgtttttgaaaacaacgatgcagacacctggggtgatgtttttggtcttctcaaggttagaggaatagataaggacaaagtacatgttaagagatca

SEQ ID NO: 138551 - DNA, 224 bp, Glycine max
  Clone ID: PAT_MRT3847_96119C.1
cacacgcgttcggagagaagacgacagatggggagatagagagtatcggtcgtcaccatgacttttaagcgcaggattggaggtcgcaacaaacacggtcgtggtcacgttaagtttattcgatgctccaactgcggcaaatgctgaactaaggacaaggctatcaagaggtctcaggtgaggaacattgttgaacaggctgcagtcatagatggctatgaggc

SEQ ID NO: 138552 - DNA, 321 bp, Glycine max
  Clone ID: PAT_MRT3847_9611C.1
gaagggaaagcagacccgccggcaggaaccggaccggaaaacccggaacgacccacgtgaactaccacgcggccgcccacgcgccgacggaaaggaagaaaaaaagaggacggcccccaacaacaaaagaacagacaccaccaccagagcacaaggaaaaacggacgaagacaccaaaaaacagaggcaaacccccacaagcaggagcaggcaggagagacccaggaaaaagcagaaaagaaaaacccacaagaggaaaaccaaacagcaagggcaacacaggagcgaacagcaacaacaacgaaggcagaagggagacca

SEQ ID NO: 138553 - DNA, 749 bp, Glycine max
  Clone ID: PAT_MRT3847_96120C.1
cggaattaccggcccgacccacgcgtccgtttctctttgtgtgtgggttttttctttatcctcagtttgatcgcaatttgcaaatagaaatggcgaaatcgagcaaagatccgacaacgtcgtatccggcgataaagtcagagcagtacttacacagccccgttcactacgcggtggcgattcgcgaccacacaaagctttccagaatcatttcttcgcttccccgagttcccgacccggcccgagtcatcaccgagtccgactcgctcactcaggagcgagtcgccgagaaaatctctgccgtgctcgaccgccgcgacgtcccattccgggagacgcctctccacctcgctgtccgcctcaacgacgtctccgccgcgcgggccatcgcctccgccggcgccgacatctccctccacaacgccgccggctggaacccgctccaggaggcgctctgccggcgcgcctccgaaatcgcgcaggtgctcgtccggctccaccaccgcgccgcctgggcgaagtggcgccgccgcctgcctcgcctcgtggcggctctccgccgcatgcgtgatttctacatggagatctcgtttcactttgagagctccgtgattcccttcgtcggaaaaatcgctccctccgacacctacaaaatctggaagagcgacgggaacctccgcgccgacaccaccctcgccggcttcgacggcctcaaaatccaccgcgccgaccagagtttcctcttcctc

SEQ ID NO: 138554 - DNA, 380 bp, Glycine max
  Clone ID: PAT_MRT3847_96121C.1
caaaataaccatttattgatgtttagtgaaacaatacttcagttggaaactgtttgatcaagcctataattacattaagcactttggtgtgcgtttctagacatcctaaataggaaaagaccaactagccagaagacatctttttactcgcgcctatattacattgcccatcatatctgacagtatgttaacatttccatatgctttatgcaacattatctcttgaatcatgcttaactaaccaatcagagaatcaccctctctaaacatgctctagtatcaccacccggtccttcaagcattcacgtatactctatctccttaaaacgaattacctgattctagcattcctttgcaacatcctgcccgtttattaactg

SEQ ID NO: 138555 - DNA, 286 bp, Glycine max
  Clone ID: PAT_MRT3847_96122C.1
cccccaaaagcccttttgattgtttgggaacttgtttccctgccaattagaccgcccacttccacgaagaccgtttttcagaaagataaaccaccttccttccttttggggaagggtccttaaattggctcctccttccgttgccagtatcccgtggtttccgcaattctcctttccttccaaccgtaatcccgaaattctggtgccagggagaagcctgattagtaaaggccttttggccaagtaattttccttccttccgaattcctccaagaaagccgaccgt

SEQ ID NO: 138556 - DNA, 363 bp, Glycine max
  Clone ID: PAT_MRT3847_96123C.1
aagacacatactgaaagctgaaccacacaatctggttagtgaaggcagaccacgcatgacagggattatgatacggtggaagagacacaaatgtaaggtattgcggtattaccgttctgtgtctcacatggcagctcttctgcaggtaggattatacagaaatcatcctcacccagaagccaagataatgagtctgaagactactggtcgatgcactaatactcaggatcactcctcttggatagcacccattcatgtggacaccataattcattgtgaaaacctagatgaagtgtttatcgaaggtaccaataccaatcacttaccgacccacgaaatcaattacatgttacaggctgatga

SEQ ID NO: 138557 - DNA, 415 bp, Glycine max
  Clone ID: PAT_MRT3847_96124C.1
ccaggaccctggaaggtccttagaagagtggggaataggaaatatgtgggtctacatcagcagaatagtatgccatccctcaaggaagttgcccttgagattcttccatctgcttgataaatacttatggtaagcaattctagcttgttatgtgccataactggggaaatccactatggtgtctttttcagagctacaatattgttttaatgtatatgtattagaaaaaacattgacattaacttaagactgctgatttgttgacaccccaaacagtgcagacacctacttggcaccccttatattagctttctttattctttcgtttttcttgtcacatcacattaccaatcttactaaatagaactactatcctactttaaagttgattactatcctactcttcttatctctg

SEQ ID NO: 138558 - DNA, 484 bp, Glycine max
  Clone ID: PAT_MRT3847_96125C.1
cccggggcgaccgcacgcgtacgatcccatacaattatttaaacagctttttcttcttaataaaggcactttaaaacagggtcgtttaatactaaagttgcgtaccccctatcctccggatctttattctcttgctctctcaaatgtaacacgaacatcaaaaacagtctgacatttagtccattctttaacatattcattctaacatgtattattttttccaaaaatttcttcatctatatttaacttaatcttaatgaaaataaagatactgctcttcaaatttatttgcctatttaaaaacaaatatccttccttatcatgtatatggattcaaactatcaatataccatcaatttaacctccgccccactctataaaatccaaactttcttactcttacatgccaacatatatttcttttatacaccaacctaaatttaactaacattccgactttttacaactttattacttacaaaac

SEQ ID NO: 138559 - DNA, 366 bp, Glycine max
  unsure (1)..(366): unsure at all n locations
  Clone ID: PAT_MRT3847_96126C.1
cccctccccttcnntttttanaaacctcttctaacgcccctttataccccgactncccgaaccccctactcttttcccctttcctggtgcntnnngncccatttcttattttccgagcagggggggtgtttcgtccaacccaaccctttatatanactattttgngaattatccccacccccggcncccccccgcccttccctncatnttcttttcccccccgccccccaccaacnnattacaanacnaaccccttgctcttcncncacccccccctcccacccccccncccccccccccaaaccccccacccctttcaacccccgcccccccacccccccctgcgcttaggcaacggcccccccc

SEQ ID NO: 138560 - DNA, 238 bp, Glycine max
  Clone ID: PAT_MRT3847_96127C.1
cagtgtggcaaactgcgcgacacgaggacgcctctggggtgccacatcctgcgccttccacaccgcggctcccgggaagtgcctcaccggcaactgctcaggtgttctgcagtgcgtcttctcgggtgcaccctctaacgcgctccctgatttcgcgttgaacctttctcactacctcgacttctacgacttctccctcgtcaactgtttctccgttcccctaccgctgaccccgacc

SEQ ID NO: 138561 - DNA, 313 bp, Glycine max
  Clone ID: PAT_MRT3847_96128C.1
ggttggtgttgcatatatttgtttctcatatgcagccatgcaacattctttattttgggcctttttcaacccccaaaaaacaaaaaccactggtccaagtcgccccccaaaggggggggggtgatctgagggaaacaaatttccccccgaaaaacaaaaaccttaaaagagaaccagaagacaagagggtctccgaccaccagaatgaaatgaaaacggagacgccaaacattgggaccacataaaaaggggcagcggatgccaactcggccgggcccgaatcgtgggggggaagaaaaaaaacttggaggga

SEQ ID NO: 138562 - DNA, 358 bp, Glycine max
  Clone ID: PAT_MRT3847_96129C.1
aaaccccaagggaaaaattaaaaggggggcgtaaaaaaaaaaaaaggaggcccaatttgccccccccccccccggagggaccattaaaaaaaggacggggggggattttttccccccaaaacaaacaaaaaaaaaattaaaaccccccctcgatttttttaaaaaaaaaaaaattttaaaacaactttcacctggggaccatttattttgggacccttataaaaaccaacccccccccgaaagaggaaaaaaacgggggggcttgaaatcaaggacccccttggagttaaaccaagatcccacccacccctttgttaaaaacacattttggggttcaccatttttggcttccaaaggg

SEQ ID NO: 138563 - DNA, 1599 bp, Glycine max
  Clone ID: PAT_MRT3847_9612C.1
taatgaaaatgcaaacgaatgcatctcaggcatttaaattcccgatgggaaacagaacatgaaatccaaaaggatacccgacaccacgaggttcttctcgttcaaaacatcgaagacgaattcacagcaacgaatccatgggtaatacatctagaagacccatcaaattaaagtataaatagtataacaagtatttcaaaaatgataaagactatccattcatgacttggacagttttgcacaaagcagcaaactcaacaaacatatagttcaacttaattacacaatctcactcgttttctttcataataatgctctccggcacaggcaagttggtcgatttagcctctgaaactgttgaatctgtaaagacaacaccatccatgttacaaaaggaatctttgaccgcaaagggtctccttgttgaagctaccacatcaaagctggttggggagacataaaggtatgtagtagataaaccattaaataattcgtctttcttaggacaatcaataagctctttgtgactagataaatccagaccattggatttatcttggaagctgatatcattctgcaataaataaagggaatcactattaaacttttcccctatctcaaaatttatgtccatatgtccaacttgtttgctcaaacaatcaatttgatcatcatgatgagcattttcctggttattgacacccttaagtggtggcaaatcatgatgagctttctccactacatggaagtgtgatgtattttcaacagcaccaatggatatgtcggaagagcttttgccattctgcacgctattagatgtcttaattgcaacatctaatgattcatgaaaaggatttggatgtggaggttgctggttgttgggttttgtattatcaattgaaacaaaagatctggatggttgcagctttccaagttctgctttgttttggccttctcttggactttcagctccatgttttggcaagccaccaggtacaacagacccacgtggagtgcgcactaagggcttcaccccatcaaaataaccaatctttggtgaaggcagtcgaaggcctgaaggtttcttggaaactggaggaagaactgtcgctccaggcactgtcctttccttctgactaataatcccactttgccgagcctcttgcctttctaagcttgaatcactcagaggagtctgagggtgtgtaccttgatctgcatcagtgttcaataaaacctttctgcttgacccacaatcaatgctgggccttgaactattacacacacgtttagccatagaagttgttgaggatgactctgatgaagaccagtcactgatagagctagcgggcgaaatactagaagaaagctttgtggcagacatcaaccttgaaagactagaaatctcaggttcagctttatttcttgaagcaacccttgaaggtgttttgacaacagaagatgtggaagtcactgatttagtcctggttgatactgtcggaccagaaggtgatttggatggtagtgtgggcttaggcacagaacctcgagaacctctaacaacagatgcttttgccactgaactgactctatctgaag

SEQ ID NO: 138564 - DNA, 466 bp, Glycine max
  Clone ID: PAT_MRT3847_96130C.1
cgagaagacgacagaaggggataagtgtgaatgaaattcacatcagctaagaagaaggttgaatcctatagtgtggataaaattcataaatttaagctttaaaaactttaataaatgttcttattggatctttcatataaaatctaatattttattgtctctctctcaaaaaaagtacatttattatacacataaaaaagtgtgggcaagtttcatttcccttgagttagaatcactttatacttggaagtttgaaccccaaagacttttatcttcaaaaaggcgcatttgagatataactaaatcttaatctaacagcgtagatattccttgaaacaccttatcaatggattgtattctatcaatgctgattatatataaacaagtttacgtaatataattaacccaaacatatgcaaaatcaacactgttctctcaaatattttcatcatatagatttaataag

SEQ ID NO: 138565 - DNA, 243 bp, Glycine max
  Clone ID: PAT_MRT3847_96131C.1
gaacccatccgtcacctaggaaccaggatctgcaaatttctccacttgcagatgaaaagctctaaactttaccataattaaatcctatccccagatttcttcctctcactttaggcactccccaatttgccacttttcccctctgtcttaaaagaggggcgtgagccactatctatctcataaatgggagagcgaaagactgtaccttctttactttctatttttccataatacaagttaacc

SEQ ID NO: 138566 - DNA, 643 bp, Glycine max
  unsure (1)..(643): unsure at all n locations
  Clone ID: PAT_MRT3847_96132C.1
tacgaattcgacgctcttacccggggatcctctagagtcgacctgcagatgctgtaaggtgaggggttctgcatgaaaacctcacatgcatgcgcatagaagaagaagaagaaagccattggcacagggataaggttgcagttgcagtgcccattgtattttgattaaaggttattttttaaaaatattaacatttaatttaaaaattgaaatgaaaaagcaaattaatagagctaaggggttaaaaagatcgtatataaataaatataaaattatgatagtttaaaatagctgagattttatataaaaaagacagaaaaagaaacatacaatcatagatacactcgtaatttttcacaatctattttttccacgatagtaaagctctgaaacacactgctgaaaccattaattaattaattaattaaacaaatagaaaaagagagagaaaaaataaacagataatagaatttccattgctcatttatcattattatttcattcatctttcgtgcagaaatttcccgaaggaggaagaggttcctgaacttctttggttttgttttgtctgggttcccttttctttctttanaccaattttggagatccccgaaccggcatcagatcccgattcgaaatgtac

SEQ ID NO: 138567 - DNA, 328 bp, Glycine max
  Clone ID: PAT_MRT3847_96133C.1
attactcgaaaggccttgctttctcattatattactattctttaagtgccagttatggctgaaagtataactatggtgtctcacttacttatactctaacaaatgggttctatccctatattggattccttactatacatagtcttcgatatcaaacttagtcaaaataccttgatgacaggcctgttcacatataaatattattatgcttaacatacctacaatatgcgatattagtactatgatatagcatatgcatcgactctgaactatactcttttacaggacatcgcattgatgaccattactagtcatatattttaaactt

SEQ ID NO: 138568 - DNA, 192 bp, Glycine max
  Clone ID: PAT_MRT3847_96134C.1
caacccgccaaggaagcaattcaaatcccaattcacatggttatttacgtaccaagattaggaggcggttaaaggcatgccatactatgtcaaatcatcctatacaacttgatttccaacagggactggatgtacaacgcacatgatcctaagggtgtcagggcccgccagtttataaaccatggtcaatat

SEQ ID NO: 138569 - DNA, 180 bp, Glycine max
  Clone ID: PAT_MRT3847_96135C.1
ttttttttttataaaaaagacttaatatccattaatatgaaataaggtccttttctgactagaaaaacaaacggagaaatgctggtaatctacatcacaatgtttttgcctaaaaaaagaaatatcacgaagttttgtaaatctaatttgttatttaatgaattttactcgtaatttttt

SEQ ID NO: 138570 - DNA, 276 bp, Glycine max
  Clone ID: PAT_MRT3847_96136C.1
ggggggggtttttttttttgggattttttttttttttacccgggcaacaaaatttttttgggaaaaccattttacaagttccattcaaaggaacagggccccgggaaaatttccacaaacaacttggggggacaggaaatctacccccaaaaatgtcgggggaaaccgggccaccatttttatcccatacatttaccccaaaaccgataaactccttgggatcttagcgaatattttaaggaagaaacaggggggaaaaaaccaccccctttttta

SEQ ID NO: 138571 - DNA, 210 bp, Glycine max
  Clone ID: PAT_MRT3847_96137C.1
ggccgacacacaccgccaggcggatcttttatcttgcgcttaacacggtggatccttgcccctcgatatcgaggcccttcgatggcggaaggggccaacgataagacctggtgatcctgagtcgaccctcgcggatcccaggagttcggcgtgtgggactggccgatggatcagctgggcccaccacctgtggaactgcgcatggctcga

SEQ ID NO: 138572 - DNA, 1321 bp, Glycine max
  unsure (1)..(1321): unsure at all n locations
  Clone ID: PAT_MRT3847_96138C.1
aagcagatagacaagatatgtaaagttgcaaataaaccactggtagtgacctacactggcttgatgcaagcaagtctagacgctggaaccggatattgtagtctatcatgctgtccttaatgcttgtgttaggcggaaacaatgggaaggagccttttgggttttgcagcagttaaagaagcaaggacagccgccttctgccacaacttacggcctagttatggaggtgatgctttcatgtggcaagtataacttggttcatgaatttttcagaaaacttcagaagtctttcagtcccaattcattgacatatagagttcttgtaaatacactttggcaagagggaaaacctgatgaggctatactggctgtccaagaaatggaaagacgtggaattgtaggttctgcttctctttattatgatctagctcgatgcctcagtgcagcaggaagaagtcatgaggcactaaagcagatagacaagatatgtaaagttgcaaataaaccactggtagtgacctacactggcttgatgcaagcaagtctagacgctggaaacattcaagatggggcttatatttttgagaaaatgaaggaaatttgtgctccaaatctggttacttgtaacataattctgaaagcttacttggaacatggcatgtttcaagaagctaaagtgttgtttgagcagatgtcagaaaatgcaaatcgtctgaggggaaatactgattacaaaatgctggtggtaccagatacatactcattcaacaccatgctagatgcatgtgttgcagagaagagatgggattattttgatcatgtgtatcaaaggatgctgtaccatggttatcacttcaatccaaaacgtcatcttcgaatgatattggaggcttcaaaagctggaaaggaacggcctttggagataacatggaagcacttaaccgatacagatcgtattccacctgctcctctgatcaaggagaggttctgtgcaaagcttgagaaagatgactatgttgctgctctcacatgtatcatcaacaatccccctaaagacttgcagccattttccaaatcgtcttggttgaaactattcaaagaaaattctcagcgatttcagaaggatacgattgttggactaatgaacgaggccagcaatatagtttccaataatagttttccaaatccaacacttgagtatttaattcaatcatgcaaagaatttctttttgctactgtcctcagtacagctgacatggattcagtaaaaatgtagtgnnggtagagtaagctggtagtagccaaatctgtatccaaatct

SEQ ID NO: 138573 - DNA, 187 bp, Glycine max
  Clone ID: PAT_MRT3847_96139C.1
gaaaaagccagcgacactaaagcacattaaagaccccctaatggcacaggaggaaatgacacccggtgctggaacacattccagagctgcaatggtgagtaaaaatagcaagcctaatcccactcagattgatgccagatcgagacaaattataaatgctagtttcgcaagtgctgactgcaacaat

SEQ ID NO: 138574 - DNA, 374 bp, Glycine max
  Clone ID: PAT_MRT3847_9613C.1
gatcggatgtcagagcactcaacctcagtaccgctacgaaagcataaccaaaagcttttgacgaagtctcagattttcctaggggctccggcaaaggcagagaagaagccggcggagaagaagccagcggaggagaaggcaccggcggagaataagccgaatgcggacacgaagatctcgaacgaaagagggagcgacaagaataagaatcgcacgatgaagagcgtggagacctagatgatctacatcttcaaggtcctcaagcatgttcaccccgacattggtatttccagcagggccatgggcatcatgaatagcttcatcaacgacatcttcgagaagctcgcccaggatgcgtcgcgttgggctcgcta

SEQ ID NO: 138575 - DNA, 427 bp, Glycine max
  Clone ID: PAT_MRT3847_96140C.1
ggcaaaaaacaaagcatccgactgtttcttgggcatgagaaccacttgaaactgataccaaaactagcatgggaagggcacgaatgaaagttacaaggattgatacccacccacaagggagatctgttgcaaatttacaaacatccgacagatgaacaatggcgtagcagctgtgcaattcacatacaggccatgttacataccgcatggatacagattatattgcctacgacaggggtctgctcaacaagcaatccatctgtgcaaaaacagcgacacctttgggcgcatgagtttatcaaaatgcaaagttatgcgcatactgctcataaatacctgaagctgaaccattatattgcctatgatcaggagcacactgcttgacagtaaaaatttgtggccaatatagggaaacatataaaagact

SEQ ID NO: 138576 - DNA, 293 bp, Glycine max
  unsure (1)..(293): unsure at all n locations
  Clone ID: PAT_MRT3847_96141C.1
aaacancaacaaccaaatcaatccatccaccctagaaacaacaaagcactctctcttctctcattctattatcttctctcanncctcttattctctccaaaccaacaaaaaaaaaaatggttgctgagaactacccttntcccanatacttcatcctcctgttcataaccataacacgtttgatctncacagtgggcaaaacctccccaatggacgaaggcctgtcgctgactcgggaattggcntngtctccctcgacgacacnnttttttgaagctccgtgacgancnagt

SEQ ID NO: 138577 - DNA, 373 bp, Glycine max
  Clone ID: PAT_MRT3847_96142C.1
atcttttactcaaaggagtcaacagagagacggttttgaatttcttgtttgagatctgacctttttctttcaattttcattttcttttttatgtatgatcgatttatgttgttccatggggaaaaaagtgttgcgaaaattacgattcataaacaaaacatagccacgatttccagatatttagtggatcgcgatcaccacattttattttcacaccgtccataatttcaccgaaaaagaaaaatatcttgcatattttgagaagttgatggaatcaatcatgatgatttctctctatatagaatatcgaaattttagaactgaagtgttgaatcgatgtagttttggtgaagatccatgtttatatactcga

SEQ ID NO: 138578 - DNA, 208 bp, Glycine max
  unsure (1)..(208): unsure at all n locations
  Clone ID: PAT_MRT3847_96143C.1
ctgttctgggactcttaaatctgactcttgggctgacgcgtgggtagatcgcgagcgtncgcncctgcggggggcgaagccacccacctctttatttattaacacaatgaacaagtaggttggggaaaacccataaaaaactagagggggctactattgggggggcgcacncctcccttactcttttttttaaaaacccgggggcaaa

SEQ ID NO: 138579 - DNA, 861 bp, Glycine max
  unsure (1)..(861): unsure at all n locations
  Clone ID: PAT_MRT3847_96144C.1
gcacagccctcaggcttcaccttctcttcctctcctcttccttttcttctcttcttccccatccctttccctttgtgcttttccttaacctctctacttcccttcttcacattctccttttgcaacaatggcaggtgcaatccacgccacaaagcaccaaaaactcccacttgcacaacaccaagaggaccaaaataagttctattaccatttcctctacaaagccacactagtcctcatcttcttcgttattctccctctgctcccctcacaggctcctgaattcatcaaccaatcgctcctcaccagaaactgggaactcctccaccttctcctcgtcggtgtcgccatctcctacggcctcttcagccgccggaacgatgaaacagacaaagagcataacaactcaaagtttgacactgcacaaactcttgtgtcaaggttccttcaggtttcttcttttttcgaggacgagggtgagagccccgtcgagtctgatgaaacaaaagtccaaacttggagcagccaacactacaggaacgaacctgtggttgttgttgctgctccacagttacaaaagtattctagttttgatgaccagagtggggagaagcctctgcttttgcccattcgaagcttgaaatctcgcttatctgaagaagatattgatgttcaatctctgaacatgtcaatgagttctaaaagattttcaagctattcgaatagaaaagcagaagttgaagctgttgatgttgatgttcaatatctaaatagctcaacaaccttcaaaaggttttcaagcaattcanatagaaatgctgaagtgaagtngatgtgttgatactgatgttcaatctctaa

SEQ ID NO: 138580 - DNA, 253 bp, Glycine max
  Clone ID: PAT_MRT3847_96145C.1
ggctcgagcggcacacttagatttttcactccaattccgatcttcccaccaccgttctcccacattttccgccaaagtgatacatctttgtcagtagtggcggctacatacccgcttttttcaccctatcatctccaattgcttaattcaatttggatcacattgttgaaatttttcccaaattaaaccagaaagaagtcctcatttggcgtgcacaaaccctggctgttgattatatttaaacacccatcgg

SEQ ID NO: 138581 - DNA, 389 bp, Glycine max
  Clone ID: PAT_MRT3847_96146C.1
ttttatttactaatacaacattttttattttttccattcaaaatatgcattttggggggggggaaattatataaagcatttctatccaaataaaacaagatggtatctagttcatatatgctcattaaaaacaataatgaatagaccacaagatcaagaatctaaaatcaattgctaatatacaaaatatcatgtctgtccttaacatgactcaaatactatttatatataaaccttttcaaggaatcacatgtccttaccaacttcagtaaatttatcttcttccataaacttttagattaacaaattggacataatcgaccacttttttacattaaaaaaaactatttgatttaatcaagataaccctttaaagctttcttgttgtg

SEQ ID NO: 138582 - DNA, 332 bp, Glycine max
  Clone ID: PAT_MRT3847_96147C.1
ctcaactaagtaccaatgctaagagacgaaagcgtgggttctagaagcgccaggcacagcgccaccgccaccgccaccgtctccaacaaggttctcgtcgccgtcaaggccgagaaggtcatctccaacaccgcattagcctgggctctcactcatgtcgctcactccaccgactccatcacgctcctcgccgtttactcttctcacaaaaccggcagaaggttctggaatttttcgagactggccggagactgtacgaacggaccggcgggaaagttgccggagcaaattccggatatcttcgagtcctgtgctcagatggtgcttcagct

SEQ ID NO: 138583 - DNA, 2687 bp, Glycine max
  Clone ID: PAT_MRT3847_96148C.1
tttttgacacctgtgtaaagttttaaatctgaataaaaagctacacaaaggaaaatagattcaatactcatgtaatcgattggagagtgcacgattccaaataattacaacattttgcacaaaattggaaattataacagcgtactaaaatgaaggtaatgtacaagcaggcagcaattgaaggaaaattttacataaaaagtctaaggtcaatataattttattgaactactaatctctgtaagtgatccaggaagacatcaaagctaacatcatccgtaaagataatatcccctccgggattgtaagattcagtgttataagtagcagaagggtttaactttgccagtaaaaatcgagcctgagagccatgctgatcacaaacaaccaggcgaggtacaggaaatctctcctttataattaaatcagcatcatcatgaggagctcgtagcaattgagcaaatgcctgatgttctggttcattatgatatccagccttacgccactgagcaatggttgaaccatgaaaaatgacaactgtgaaaaatgaatccaaaagcaggatcttatcagccgcaatggctgcaacatcaagaagagctggttcaggaccagcatggaatgaataagaaatcaacgaaggctgaaccatgacaacagaattcgcaacattttcacggtttagtatcattctaaagtaagcagtctcatctgggctgttgttaaagacctgaacaaactgagagcgtcgtaaatgaaacataaattgagggaatattgacaacctgggagacaaactgaaagaagatggagtgtctttttgaaattccccaaaccgagaacacaaatttatcaatgccttgtccaaccatctgataggatcaaattcggcctctgtttccattttgaaggagacttggcgtgccatgactatagcagctgcttcttggtcaaatccagcaatcaagtcctgtatactttcaggtccagcaacccatcaacccgaaaggcacaaaactagacaatagatttaatactcatgtcatcgatttgagaatgcatgattccaaataattacaacattttgcacaaaattggaaattataacagcatactaaaatgaaggtaatgtacaagcagcaatcgaaggaaaattttacataaaaagtccaaggtaaaactgtaattttattgaactactaatctctgtaagtgatccaggaagacctcaaagctaacatcatcggtaaagataatatcccctccaggattataagattcagtgttataagtagcagaagggtttaactttgctagtagaaatcgagcctgagagccatgctgatcacaaacaaccaggcgaggcacaggaaatctctcctttattattaaatctgaatcatcatgaggagctagtagcaattgagcaaatgcctgatgttccggttcattatgatatccagccttacgccactgagcaatggttgaaccatgaaaaatgacaacagtgaaaagtgaatccaaaagcaggatccatttatggtaatgtggcacagaatctttatccagatccttgtgagagcgaattggttcagaaagttgtttggatacaataggagcaggtccttcagtagccggtcctccaataaatgccattattctcgcagcagagccagggacacatgcccccaacaaacccgccgcgatactcagtgccgtgctggtgcaccgagcagcacgctgatccgccggcaccgcccaaggatccttctgcagctcctccaataccgaattgatagtgaactcgcactccgacgccggcacgaggaacctcgaaatactttccggggagagcccgtccctcgcgccagccaccacgccgaccgccgggcgcggcttcttcgcgaaaaaactcatctgctcgagcagctggtccttcgtcaaatccttagatcccttgaaaacataagtcttcggcaccgcaccaaaccctaattcgtgaacatgaacaaacgttccaaacgtaatgagtccaacgagcgagttctcgggcaaaagctcaaccgcctgcgcgagcgcggagcgcaggaacccgatctcctcttcgatgacgcacgtgttgacgacaaagaggaaaacagggggtacggaggggttattataagtggggcccacggcggcgtcggagttgtactcgacggtggtgtactgcgggaagagctcggcggggggggtgtcgtcggagatggaggagtagttaggggggaagtggttgcgctggaagcagaaggggcagatccagatcttggcggcgaagtcgacgatccagaaggggttgaggacggagcggcacgtgcggcaccggagaggggagtagttgaggaccggcatcgaggggaagtgctttatcggagtgtagacggcggagatggggacgacggcgttttgggcgtcctgcttcgtaccggggatcacgttccacggcattcgaacgccgtcttgggattcgagatccagaaattcggccatggtgaaagcgaaggtttggatctgctgcaatggaatgtgcagttcttctacttctttgcgaaggcttgtcgactgaacaatagtgtatcctaagggtgattttgattggtggcttaatgcggacgcgtgggtcgacccgggaattccggcccagaacc

SEQ ID NO: 138584 - DNA, 1364 bp, Glycine max
  Clone ID: PAT_MRT3847_96149C.1
cggacgcgtgggcggacgcgtgggtaaagattctgtgccacattaccataactgtgtgaaattctatgatggactttcgaagcagcttgttcatcaaggccatgtactagatctttttgcttgtgctcttgatcaggttggaattgctgaacttaaaacagctgttgaaagaaccggaggtcttgttgtacttgctgaaagttttggccattcagtgttcaaggattcactaaagcgtgttttccaatcgggtgattatgatttgggtctatcttcaaatggaatatttgagataaactgctctaaggacttgaaagtccaaggtattattggcccttgtgcatctcttgaaaagaaaggcccattatgctcagatgttgtcattggtcaagggggtacaagtgcatggaagatgtgtggccttgacaaatccacatcattgtgtctatttttcgacgttgtgaggaaggaaactcctgatgcaacaatgcagtccacaagcaatcaattttacttccaatttttgacgtaatgttttgcttcagttatcagaataacagtgggcaaatgagattaccacgcgtccgtacgaccctttcacgtagatgggttgctggaccagaaagtatacaggacttgattgctggatttgaccaagaagcagctgctatagtcatggcacgccaagtctcttttaaaatggaaacagaggttagtgccggatgttttcttcacttttcttatatttggataaatgtatcaaccttctgtgcttgtgtgtgtgtgtggaagggatccacttattgctgaagtcgtgaacatttactttgttttataattttttgtagaataaaaatttaagataccttattgttgaattacgagatattatcttgaccatgcatactaaatttttgataaatcatacaatcataggtgttagagattatgtaaatattttaattggtgatattatgagccctatcaaattatagtaaataggtaattagggtaactgttatcaatattaactttttaaggtttggctgtcctgcttctcatgctgttatgctctggttctgaagattgatggttttaggaggcttggaggtattttttgattggtctcatacttagagagaaggaaaccaagttgctgatttgttagctaactttggctatttgcttgagggacagattaagatttttgaatttgtacctttcttcttgtcttatgctattttagcagatgtatcctcaaccgtgttctgtcgcggcttttaagtttgtgtttgagctttacccccttcattcaccaagaaaaaacacatggaatgctctcttgttttttgcctctttctgca

SEQ ID NO: 138585 - DNA, 239 bp, Glycine max
  Clone ID: PAT_MRT3847_9614C.1
aatgttgcaatgtgtaataataataatattggatgctgttgttgttgtgaaagggtttaatctgtgaaagtagtagcacatgaagggaaagttgtagtagcagtagatgaagatccagcgaaactggtaaaaaaactaaagatcggaagaatgcatgctgaattatgccataaccagaaacgaggaataatgtgtaatcagattcagaactatcctatcaatccgcaattccagaacat

SEQ ID NO: 138586 - DNA, 474 bp, Glycine max
  Clone ID: PAT_MRT3847_96150C.1
cctatcgcgttcggtccagttaagctgtcttttgtttgtcacatacaaattccgtctccgtccaaaaatgcctgagttacttttcaagaccatcacgcagcaatcgttcacaattgaagttgaggaaactgcaacgatcggcgaagtcaaacgaaagatccaacaggtcaaaggcgcagaatacccagcggagaaccaaaagctgatcttcaacgggaggatgctcgaggatgccatgttggtctctgagctgaactttgcggcgccgaaattcattgtcatcatggtcatgcgaaaacccgcgcaggcatcgtcaactgttcggtcagcaacatcgtccacatcgccacaaaagaagacatcgacagcggacggacaggcgccgaaagtcgcggaagacaaagcgacgggggcgacttccaacacatcggtggcccagtcgggagcagcaaacggagtgcccgcagagcatgc

SEQ ID NO: 138587 - DNA, 712 bp, Glycine max
  unsure (1)..(712): unsure at all n locations
  Clone ID: PAT_MRT3847_96151C.1
gtgcagatctgaaaatgagaaaattgggttcacacccaagtccacctcctccacccttgcgtgccccgtctcggcatactcgtcctcctcgtcctcggcatcgtcatcctcctcctcatcctccagccatttcctaacttttcatgttatttgatccctgcaatattacaagaaaacatgagggaatcaaggttcatgatttgagtttttcttcgatcagcaggcacaaaatttcaacaggccggccgaccccttcattaagttgttggcataattttctatgggagatttcattgaaaactcaaataattaaaagtatcattgactctcatgcattcgtgactataaatttcggtgactacgaagcaacctgatctgaaaatgagaaaattgggtctcatgccaagtccacctcctccaccccagcctggcaaaccacaacatcctcgtcatcctcctcggcaagatggtccctaactgtgtgttacttgatccctgcaacattacaaaaaatcatttgagcctgatcaagctttaattcatactcattttctttatataaatagctttacattatttggtttatgtccaaataacactatctgtctaaaggcaggatatattgaatattttattcaaagcgtgtatgcatgtgcaattagatttggagaaattaaaagcttttttannaaaaaaaaaaaaaaaaaaaaaa

SEQ ID NO: 138588 - DNA, 219 bp, Glycine max
  Clone ID: PAT_MRT3847_96152C.1
gcatatctcatttgagttaattaatttgttgtagtttagtactgaaaaatgggttcgaagatagcaacagtacctaccctaggcctgttggccatgctcgttttgatctcctcggaggtcttatgccgctagtaggtggtagcgggtatactttggtgagtggtaacccctagtgttggtggtggattacctggtggtggtggtgatgttggattacgt

SEQ ID NO: 138589 - DNA, 703 bp, Glycine max
  unsure (1)..(703): unsure at all n locations
  Clone ID: PAT_MRT3847_96153C.1
attcgagctctgtacccggggatcctctagagtcgacctgcagataatcgtttatggacaacttgaactctgccaataaggtcctcatttacaactttggagagggttgagaatggtgcttaaattttctatttccaaattatctgccactattgcacctctttgccttgaagagaaaaaaaaaaaaaancaacataatttaatcctagtgaagncttagccaaggccaggagagtcaccaacattctaaagcaaaattctatttttaccttaacacattaagatgggcgtcaaagatggccatcataagaattcaaaaatggattcctaacaacacccaacttcttcctttgagcccatccctttttaggaactgcttttatatatatatactgctttgagtttgacgtaaccatatttaacttgctacctatcttagtcaactataataatgtagtaatactttatatgtggctgcgtgttatcagatgtaatcccgtgagcgatatagtaatactgcaatttattacctatcaataagctataataatatagtaatacttaaccccctggntgtatatggttctttgtttatgtttagctaatggaggatttactaatcatatatagatcacacaaaggcaaagcactggtgttgaggttgacgaatactnggatccatttccctgaccctgaaaatgaa

SEQ ID NO: 138590 - DNA, 112 bp, Glycine max
  Clone ID: PAT_MRT3847_96154C.1
ggctcgagcagcaacataatcatctggattttgtgcgacaacgtacacatggtagccagactagtgaccgattctgtggttacacccgatgtctctgcaagtaattcatcac

SEQ ID NO: 138591 - DNA, 582 bp, Glycine max
  unsure (1)..(582): unsure at all n locations
  Clone ID: PAT_MRT3847_96155C.1
ccacgcgtccgttatcaggctaggagagaagatactttattgaagcttgcccacttcaggcggcacaagaggaaaacattgaagaaaacacccggaaaggctactgagttacccttttacaagcctgaggaaaaccactcctccagggaaggactcaaccaaaaaaatttcaaacataattggaaaagcagcaaattatgctggttctgcaaaatctaagaaggttaaatgctaaccatcatgcaactgctaacaaaactggttatatttgataatttttagtcattgaattcagttgggtttgatgtaatgataattagtttttaaggatgactataattcaacaactcattcttttccaaacgatttaagctagaagctcattttcttcatccagttatagaaactggcctgttttacttgctaactgctaatatccaatntttattttaatgaattaaactaattggtattcatatgcatcacctatttgntggcatattggcacattgatagatagtatcaatagcatgtggcccccagtttgctatgtttggagtaaatctgtgtcaacattattta

SEQ ID NO: 138592 - DNA, 775 bp, Glycine max
  unsure (1)..(775): unsure at all n locations
  Clone ID: PAT_MRT3847_96156C.1
cccacgcgtccgggcaacaacttgttagatctgagattatggagacctacggtaacatgttgcctcattcctttcgtgacatggacagacttcgaaacttgaaagcactaacaatggtaattcaagagagtctacgtctttatggccctgcagttacaaccgcgaggggagtgttggctgagatgaagttaggggaacacgttccgccaaaaggcatcgacatgtggttgtacttaccagcgtggctccggggccccgacgactgggggccccttcctcgggggccccagccggagtggtggcctgggggtggttctgcggcctgtatgtgccccctagcggctacaccttgtggccgcgcgcgccggcgttgctccggccccctctttgctcggctccagatcctgggggctccgtgcctgcttcgctccctcgtcgcctttcctgtgcctccaagctccctccagcgccctcaccattgggtctcgggggccccatttgctggggccaggcctctgccttgctacaaatgaaggaagttctgtgtcttcttctgtccaacttctcctttgctgtttcaccaaactattgccattgccctgtggatagttttcgggtaatgccaaaatatggtgtaagacttcttgttagcaaggttcacaagactagtgcgtagttcaggttttgttctgtgttgtcccaacatatgtgaccaagtctagctagctttgttagtgacttcgttggcntngannntgcatatagcaaannnaag

SEQ ID NO: 138593 - DNA, 379 bp, Glycine max
  Clone ID: PAT_MRT3847_96157C.1
taccagatgagcaatcttaggacctattcctggcagcaagagtagtccttcaattgagcttggtatgtctccatcgtacttcaagaaacaaaaatattggcaattttcttcaagttactcgcttttcttgtataaaatccagattatttgaatagcatgagtaaatggttttcaaccgataccatagattctgtgacaaagaacatactgggtaaatcaacttttagatggtttcctcatcagttttgttcattgcatcagctgtaagcaaaccattttcacaaagaggttgagtcgctcctactcttaaaagtacaaacttgtaattaaaacaatttcataagcaagttgaatatcatgacactggcaatgggcatca

SEQ ID NO: 138594 - DNA, 116 bp, Glycine max
  Clone ID: PAT_MRT3847_96158C.1
gtaaataccatgcttaagatcataaccttttatgactataccctaagctttttggacccggctactttttaaccctgtcgtacataacttaaatatctatttggcccattttgcat

SEQ ID NO: 138595 - DNA, 534 bp, Glycine max
  Clone ID: PAT_MRT3847_96159C.1
ggctccaatacctcccaggtgcaacctgaagcatacctcgtccctcttataattctaaccccacggaaagggcatctacgaacccatgcaccatgactcctccctctgctgaagtaaccccacggacacaccgaagagattactcattctccacaccggggtgaaagtgcaaagcagtggcatagtaaatcgtagaatgactgaggaaactcatgctcaaacaccccaactatcctttatggttcaataactggttctttgcatataggaagaatattctttgatatcagtgctgatgaatagttgtagctcggcaacgatcatatcctcttcccgagacgaaaccgaactctatagtcaccgcccctgacatggcagtactattcgtggccgacaactctgccgccaaaacattgttcggcaactatgcgcgtcttctgccggtcaacagaggcggcataacatggcaccaactggaacacgaagtaaatagttcaaaagaagaaagtttaagtgtgactccaaagatgagct

SEQ ID NO: 138596 - DNA, 154 bp, Glycine max
  Clone ID: PAT_MRT3847_9615C.1
agaagctaaagctgctttattaggcagaattcaacggttgactaagttgattttggtctccacaacagcatcatcgtccacaagatttcctaacagacctggtcctcgtagaagacattccttcggggaagaggagctggcataccttccatac

SEQ ID NO: 138597 - DNA, 532 bp, Glycine max
  Clone ID: PAT_MRT3847_96160C.1
ggctctctcaatgatctcttcctcagctgttaccactgtctaccgtgcctgtgccggcatggttgctccattcactgtcctcaagtccatggctggcttccccaccaggaagaccaacaatgacattacctccattgctaacaacggaggaagagtgcactgcatgcatgtgtggccaccaagcgtcaagaagaagttcgatactctcttcttcctgccacacctcgctgatgcacagttggcaaatggaagtgaataccttcctatgatgggatggatttcttgcttacaatttaagttggagcacggctccgtgtaccgcgagcacaacaggtcaccaggatactactatggactctactgtaccatgtcgaagctgcctatttttgcctgcactgatgcttctcacgcgtcgaaggatctgctagaagcttaaactgtattccccgacggcttcctccgtatcattagattccacaatgttcgccaagagcattgcatcatcttcatctcctacaatcgctcatgcttc

SEQ ID NO: 138598 - DNA, 295 bp, Glycine max
  unsure (1)..(295): unsure at all n locations
  Clone ID: PAT_MRT3847_96161C.1
ctatttttntntntnattatanattttattcatatgaatatttcctgananaaananaattatgtaattggttagattggaagtgtttnggggtaatttcatagactgaagnttttggcnttttaatttcntagactggttaatgaantnaatcaatttattnatctggattttnatgtnttgtcaaatggnttgngtanacaanctgtngaatataaacggtgctgttgattttggaagnccatgggtgtggtttgatttacgnggatggatcactgggnatcctgaagaaccc

SEQ ID NO: 138599 - DNA, 443 bp, Glycine max
  unsure (1)..(443): unsure at all n locations
  Clone ID: PAT_MRT3847_96162C.1
tgcactcataatgcaagagatctctaggaaatgtgcttgggaaacatccaagggcgttcgtaaatgctgtatactgaaacatgtgagaaatatcttccttttttgctaaccacttttcattgtgattgtgatgtgacataacatacaggtctaggcattagagatacattacaatgccattttggaagtaccggtattgcaaatactttttctttaaatttccaaaatatttcttttgttacagtaggagattttgggcagtgatgggggaataagagacttggtgaaagagagctaaaagtcacatggcaaatccttatgggattttaacacaaatcctacagaacctcaaacctatggtaaatcctggtgaggtgatgctgtangatctactctaagattcaatgcctatacttctcaattctcattccattttggcttgg

SEQ ID NO: 138600 - DNA, 355 bp, Glycine max
  Clone ID: PAT_MRT3847_96163C.1
gaagaacaagaagaagcagctgtttctggaattcgcaaagagctaatgagaaacattccgtatcttgtgatcattgatgacttggaaagtgaaaaggattggtgggatcacaaacttgtgatggatctcctccctcgttttggtggagagacccatgtaattatatcaacacgccttcctcgtgtcatgaacttggaacctcaaaaactttcatacttatctggagttgaagcaatgtctctaatgctaggaagtggcaaggactatccagttgcagaggttgatgctctgagaactattgaggagaagcttggaaggttaactttgggccttgccattgttagtggaattttgt

SEQ ID NO: 138601 - DNA, 461 bp, Glycine max
  Clone ID: PAT_MRT3847_96164C.1
agttaatcctaaaatttaggtctagaagtgaaatgcaataacaagaatatcaaagaacattttagtacatattaacttagataagacatttatacactaccgacaatgttttacccaatttagtgttatagacttgtagtgtcatgtttttaacttttagggaacctatatatcttatagtatactagtattatgaattgatgagtatgggataaaatcaagatgaaaagctatttattaatccatgccttatgcttatcatgttggcacgtcacctatcacatttcttactgtgttgtctgattgccttgtaactaagttgtgttttcttgattttaaccctggttaagaagtattggactatgtgacctaccatactctattctttaatttaagatgtagttcaaaaaaaaaatcatgaggagtttgtgttataattcttaatgttgttcattaatcat

SEQ ID NO: 138602 - DNA, 638 bp, Glycine max
  unsure (1)..(638): unsure at all n locations
  Clone ID: PAT_MRT3847_96165C.1
cccttaaatttagggtaattttgtcgatttaattaattttccatctcgttttgctcccaagcacggaacaatgcccagacagatggttcaacatattttggattttatgatgtcaaaattgataattactatacaaagaattaatgggtcatcatccggctcacatccccccaccccccacccccaacccgatgaataaatgttatgtactaatccctcctattgtatggccctgccactaaccgtctattttcccgctgatcaaattggaaaagcttaacatcctcaagcctcgattggcagttatttgcctaatgttcacatatgatcctttactttgcttcaatcaagaatgagtatcttccaacttcaaattcaatctgtttgatgttggataggggcttggctgttttcatgaacaaattgactcaatgatccaggactatagagtaacaatgccccgtcaaaccacatgtccctctagaagaagagagcagaaaccacatacatcatccttcacctcgggcttcttttcttttgcattgagcttattactttgactgcttaaattgngatccttcttacttttcttaagtacatcgacacgtgattgatgtactccttgcctgtttgctttc

SEQ ID NO: 138603 - DNA, 362 bp, Glycine max
  Clone ID: PAT_MRT3847_96166C.1
agaagggtcattctgagtaaggccatggcatttgttatgtaacatttcatgcataggcctcattgtgtgctagtccaaaaccgaaatttgtcatgtacagtcaacaacaatgcactttggtcaatcgtaaacactattttaactatttttgttttgagaaacaagatatttgactaaaaactttttgcccatgtaagttataaatttctggtactaaaaaagtaactctagcatggtatttaggggggaattatgttacttaacatttgcctaaaaatcaacaaacaatatttgctaaaaaaaatcacacaatttttcaaacttcgaaaaagaatcagataaccaaattaggttggtgggat

SEQ ID NO: 138604 - DNA, 621 bp, Glycine max
  Clone ID: PAT_MRT3847_96167C.1
ataattggtggttgcaatgtcgcactttgaatcctttgctggtgcgaattcatccacactccaattgttttccaacgttgattctcgtggttcttcgggcatggccaatcgcacatcagcaccaacttgcaactgtcctgacatcgcgattgtgcgaactgcaatcacagaaaattactatggaaggagattttgggaatgtcccaactacaagcggctgcattgttgaattttcacaagactacatgctgaattgctaggcttagccatttttaactattgatttatgttggtgattgaaaacaacgtggggttgacagtggatgcaacaactttcgatggctaccaaatgaagtagttgatgacaaaagcctagttattgttagacaaagaaggaagattgtgaagcttgagatgtcgttgaagaacaaagacaaatggctgaagtttgtgattgtaatttgttgtttgctgttaatgttgaatgttatagtgatgaacatgtggtggagcacaagaagtaaagacaggaggaatgtgtatcttaggtagataggaattataatgttttgttgtagttgaagttggtgtaatgaagcaggttgtagcaatgaattctaa

SEQ ID NO: 138605 - DNA, 1934 bp, Glycine max
  unsure (1)..(1934): unsure at all n locations
  Clone ID: PAT_MRT3847_96168C.1
cgaagctnggnnatcggctccagcagcgatgcaaggcaatggcaaagccaagaagatcaaagatgatgtctttgaaactccctttcctgttgaccttgttcctcgcactctcccaagctcaaccgcattccgatgatccaccgccgccaccctcctccaacgtctgcgtcatcggcgctggcatcggtggctcctccgtcgctcacttcctccgcaaatactcgccgtcctccactccctccaccaaaatccgagtgttcgagcgcaacggccgcgtcgggggacgcatcgccaccgtgacggtggcgggcgagaccttcgaggccggagcgtccattctccatccaaagaacctgcacacagtggattacgttaagatcctgaagctgaaggtcaaagagccgaccgcgtcggaggattccctctctctcggcatttgggatgggaacaagttcgttttcaaaacggtgtcgccgcttagttccactgttcccctcatcgataagcttctcaaacttccgtttgttaatactctcgtatcgttcgttaattccgcactcatgttcgttcgctacggcttctcgctctttaagatgcagaacttcgttgagattgctgtggataaattcgtaaagtactatgaagatcctggttcaagacctatttttgagactgtggatgagatgctgcagtgggctggtctgtataatcttactaccaggactttgcgggatgaattggtggatgctgggttgtctacctcgttgatcaatgaacttgttactgtcatcacacgcattaattatggccagagtgtctccatgagtgggttgggtggtgtggtttctctagcaggatcaggtggaggattatggtccatcgaaggaggcaactggcaaatggctgctggactgattaatcagtcagatgtggcattacacctgcatgaagaaataaaatctgttgctgaccttggagattactacgaactcaactcaacaaaaggaaacagttacagatgtgaagtcgctgtggttgctacaccactggatgagttagatattcaatttattcctccaatttcaattcctgagagaaaattacagcacacatttacaacttttgtcaggggccttctaaaccctgcatattttggtctgaaggctgtgacaaaaattccagatcttgtgggcacaatagaggaccctgagcttccattttcatgcattgcagttctcaagaagcacaatgaaaaagaatctacttataaattattttctcgtcaaccaatggcagacacattactggatagcatcttcagtgtgaggaaggagaccattcggataaactgggctgcatatcctcattaccacgccccagaagtatttgcaccatttatattggacgggcgacatctatactacgttaatgcatttgaaaatgcagctagcaccatggagacaagtgctgtggcagctgagaatattgcccgactcatactgtcaagatattttggccaagtaattgtgcattcatctaatttgtctgcaagttctcaaggagagggtactcatttagatttgtgagacagtgatcgtaagatattgttagtttggatgatggtagattttatataaattgcatctgaattctgaaaatttggaaaatcatacaatgtataaacactgggtcaataaatgattactctctccacccataaagccgatacattgcctgtttataaaaaagaatgttgcgagaggtaaaactgataatgtttatactttgaagggattagcctctcactgttgactagagatacccttgatgcatacgacatataggcaaaaaagccctctcccttgtatcttctccttctgtattctattaatggacagtgtgtgtgaaatgtgaatgttaagattgcaaaaaaa

SEQ ID NO: 138606 - DNA, 208 bp, Glycine max
  Clone ID: PAT_MRT3847_96169C.1
aattcgtgccattcagcctgcaaatcctgtatttgcgcattatcgtatcccgcacagtgtttttgtgttgacataaccgatttctgctatgaaccctgcaagcctagtgaagacgacaaagaaaactaagacaaatgtaaagaacccaaaataaccttggcctttcttctctcgtcaaaattgtgagatcgactttacccacagggat

SEQ ID NO: 138607 - DNA, 782 bp, Glycine max
  Clone ID: PAT_MRT3847_9616C.1
gtgtggtggtgcaggtccgaagatatcgtggacgcaggtgagacgggttcggcgatcacgtggaagtacccgagtgttgtgctggaaggagatggtagtgtggggagttctattctgtggctttgacgaataactatcagcaggcggataccgggaccaagatgatacacaaagggaagaacacgaggagtaggattatatccaaaggaatatcggttgggcattccaggaactgttatagagggcttgttcaggttctgtccaaggctgacaatgcccgaaactcgtcacagtgtgattctatgcttattggtgacaatgctgctgcaaatacctatccttatatccaggtgaaaaatccaaccgcaagaattgaacatgaagctagtacatccaaaattggagaagatcaattgttttattttcaacaaaggggaatagactatgaaaaggcaatggctgctatgatctctggattttgccgtgatgtgtttaatgagcttcctgatgaatttggttccgaagtgaaccaactcatgagcttgaagcttgagggatcagtaggttaaacagcatatcactatttggaatttactcaggccatttgttcttgaaattgtccaagtccttagaggtagtgtattcgaaaggatgtgtacatgttgtatatagatactgtcttcaactgtaccgcaaaagtggcctgaaacattaccagttttgaatcttaataaacaatcaatgtcatcctataattttgtttgtcgatttactcatgattt

SEQ ID NO: 138608 - DNA, 388 bp, Glycine max
  Clone ID: PAT_MRT3847_96170C.1
ggggggaaggcgaatggcccattaaaccccagggggattcggcgtctaaccccgttccctgaaaccccaccacccgagtgggacccaaaaaaaagtcgcctgaaaaaccttcttgtcttatccaaccccgccccaattttcaaaggaaacccccttaccttaaaatccttccggcaaccaaaatcccaagatatccatttccaaaagaccttaacccaacccttgcccaaatatgtaaaacctaaaaatccaccatttccaagcaaactgtccctatggccccccaaagattttcccgggaacatggccataaatgctctaagcccaagcatattaagttttgctcaaaagaaacttggaacaaaaaacacccctcaattcccccccc

SEQ ID NO: 138609 - DNA, 1199 bp, Glycine max
  Clone ID: PAT_MRT3847_96171C.1
cgggcgtccgataagaacacctctgagattccacgaggatgctcatggaggaacacgtctcggataaggtggagatcatcctcaaaatcattgtttcagcacgacgcattcatcgtgtgtgagtcgtatgtcgtttgagtcggggatggtcatggaggaacacgactcggagaaggtggagatcgtcctcaaaaccattggtcctgcacgcccctctcgccttctcgtttcttcttccatcaaggtgcgtgatttgaggagattaattgctgggaatgataatttgcaaattgacaacttgagtcttattttacgcggaagtgcactgtatgacatgaaaaatggagatgatgtatacatacaacttaatgatggagattgcttgattgttgctgtcaaaccaaagccaccagtgaaagatggatatgacaatgatgacgaggatgaagatctgaagtttcggcttcctcagtcatcaagttggtggaagaagaggttgtacacttttctacacgataacttgaagcttccagatatccttttgatggtaattttcactctgagtctgaaggcatggcttctcataattttgtggtttatcctggctcctgttgcccatagatgggatctcggacctttgtatatacttgcaactggcttttgtctcattctcttcaatcttggaaagcgccaagctggtgacataagtgcatattccatcttcaatgaagacttcagagagcttccagggacgctgaatgcagatcggcttgatagagatataagagcaggacagttttgagccctacttcacggcactctttccaatcatcccaacactactgatgtcaagtcacatgatgtatatctgcacaatcacaaggagatgacattgactagccaaagagttaacaagtacagtgtcaatgaagatgacaagttttctatgagaggctatgccccttctgtgtatatatcgttgtactaagatgtattgatatgaacatgtttcattgtggattactgtgtttgtctcttgtaccgaggttcctgtttatgaatttcagagtttaacactttcggtgtagcggcaagctttgggccatatatgcagtgacttgtcaggaatcaaaacatgacagcggcattttaaatactgttaagattatgtaatataggttgttactttttattaataa

SEQ ID NO: 138610 - DNA, 290 bp, Glycine max
  unsure (1)..(290): unsure at all n locations
  Clone ID: PAT_MRT3847_96172C.1
cataagtgtagttttagagtcctcactgcttggtccccaaagccttattacttaccttttagcgctggctttaattaggtttgcaacgtgctgcctcagccccctgcaggcaggcccaggtaggactncctggaggctgtgcttttaactttgtaacagacatttccgaaccaaaggctgctgggtttgcatgtttacaggctccaccctagggccagtgtcagagctggctttggggagctgggcaaggaagaggaggcccagcccagactcttcctggcctttctcaa

SEQ ID NO: 138611 - DNA, 139 bp, Glycine max
  Clone ID: PAT_MRT3847_96173C.1
tgagaatgagagggatgatgattacctcttggctctcggcttcactggcccctccggctactccgggaagggttccattgaaaaattcacagacggcatctacgccggcggcctcaccgccatcatcactggggcgtcc

SEQ ID NO: 138612 - DNA, 292 bp, Glycine max
  Clone ID: PAT_MRT3847_96174C.1
aactaggggaattaacttttatttagccaaaaaactactttgggcaaattgtttcattttgcaaatgaccaaatcctaggaggggtgggttaatgcgccaccaaccaactaagagcaaatttaactggggggctcaataacaaattgtttttttcctaaaaacatttccatttcccctaaatgaaaaccattttccttcacatcctccccagtttttcctttgggtttttcctccatcgggggaaactctgccttaactttttaacgacttaaaccgtgcttttttttcttt

SEQ ID NO: 138613 - DNA, 284 bp, Glycine max
  Clone ID: PAT_MRT3847_96175C.1
tttggggtttttttttttgccgcggatccgctcctgtatattatgcggagcggcgactaattatttatacaaataagagaaggaaagcaggagctattgggagggaaaattcaaaaacctacgaattctattcttttggttctacacgagagcactaacgaatcggcataaccagggaggaagtgaatttggttaacaagcgggagccatcccgaaccccgctgggtttcatgcccaagaaatcgtaagccgcagcagcagcagaagaaggagtggtgttgccc

SEQ ID NO: 138614 - DNA, 443 bp, Glycine max
  Clone ID: PAT_MRT3847_96176C.1
aattggaaatataaaaaagaaaaaaaaaaaaaaaaaaaaaaaaaaagggaaaaaaaagggggcaaaaaggaaaaaaagggaaaacacaacaaaaaaaaaaaaacacaaggaaaaaaaaaaaaaaagaaagggaagaaaacccactaaaaaaaaagagaaaaacctaaaaaaaaaaacgaaaaaccaaaaggtaaaaccaaaaaaccgaggggggaaaaaaaggggaccaggggaggaaactggggaaaagaaaacaggaaacgagaaaaactcacggagggaaggatggtccccaatggaggggaaaaagggccgaagggcccgaaacacggacccgaagcactgggcccaaggccaaaacgccatatgaaaagccctagatacctattgggaccccccttaaaacagaggggggcgcaaaaagaccaaggggaccggataaa

SEQ ID NO: 138615 - DNA, 336 bp, Glycine max
  Clone ID: PAT_MRT3847_96177C.1
cacgcagtgcgcgcgctcggaatctgggtagagctctagagaacttatgcgatgttttgaggttttatgcttcttgaactaatgatgcatctgtggctagtcacttagcgcatactgcatacctatgacttatgctgtctaatcgcgagagcctagaggagggagcgtgtgtgaacccttcatgttggtgtactgttgggaagagctaggatggaccatagacggattgttgatcatgggagcagggcccataggacttgatacgatgctgccatatcatgcagaaggagcccccttatctgtactagtggatggtgatgaccagcgtgattcatg

SEQ ID NO: 138616 - DNA, 1381 bp, Glycine max
  Clone ID: PAT_MRT3847_96178C.1
ccacgcgtccgggaatctaatgttaagtgcagcgaagtagatgagattgagaaggaaggcaaaaacgtgtctgacagcaactctgttaactgtgacaccccactcactcgaccattccatttgttaactcagtctcagacacaacacaatccaaaaaacacaacattctggagataaaatggcagcttgcatattcacggtggcacaggacgggactgcagatttccaaacggtgcaggaggctatcgacgccgtgccgctgggcaacattcgccggacggtgattcgggtctcgccgggaacctaccggcagccggtgtacgttcccaagaccaagaatttcatcactctcgccgctctcagccctgaggacaccgtgcttacctggaacaacactgccaccggaattgatcaccaccaacctgcgagggtgatagggactgggacgtttggttgtggaactaccattgtggaaggggaggactttattgctgagaatattactttcgagaattctgcgcctgagggttcagggcaagcagttgcaattagagtaacagcagatcgatgtgccttctacaattgcaggttccttggatggcaggacacactgtacttacattacggtaaacaatatttgaaagattgctacattgaaaggaagtgggggacttcatctttggcaatagcactgctcttttggagcactgtcatatccactgcaagtctgcaggcttcataaccgcacagagcagaaaatcatcacaggaaacaactggttatgtattcttaagatgcgttatcacgggtaatggaggaaattcatatgcatatcttggacgaccgtggggcccttttggaagggtggtctttgcatacacttacatggatcaatgtataaggcatgttggctgggataactgggggaaaatggagaatgaaagaagtgtttgcttttatgaatacaggtgttttggacctggttgctgtccatcaaaaagagtaacctggtgtagagaattgttggatgaagaagctgagcagttcctcacgcatcctttcattgatccagaaccagagaaaccttggcttgctcaaaggatggccctcaggattccatattctgcttgaaaattacttgggactgtacttgatgagaatattccaaacagacaatcacacagtttatacgcttaatatcttgtttatttggcttaagaaaatatgccatgttttcatccgtgtgaagtgctagatgatgtgttttcctgtatgaaatctcccaagaagctatattcccttcattgaagaattttgtgtgtgtgtaataaatagaataagagcttcatatccaaaaaaaaaatttaaaaaaaaacacaaa

SEQ ID NO: 138617 - DNA, 618 bp, Glycine max
  Clone ID: PAT_MRT3847_96179C.1
aagcacaacggctacattggtatccaggtggccaaggtgagtaggtgaccctttacatcggattgaggtgccccccacccccgatcgtggttccttcgtgtctgaggctctagtctcttgttgcgtgaatggctcttgtctctagattctagaatgttttttattattattattaaaatggaatacatggattcgtgaaatatgcattacatctcttggattacatttgaacatctctagtaattcttctggccagctctagctgacattccatttgtatgcacatggtatgaatcatacgctctctaggagttgcatgcttgctcaacagattgagtcctctgagaaatgaaaggaacaattagaagttccatgtgaaacacctttcataggaggtgctggtagaagtatgcactgataaaactccctttaacacatcaggacctgtggttgaggcctcaacaggtcgaatttccttgagcattgcaacagtgtccttcattgatggacggtcctcggctcggttgctgacacatagaaatgacacggctagagtttgtagcatttcatgcacactagaatcagttctccctctcagctttgggtcaagaaggtcat

SEQ ID NO: 138618 - DNA, 1963 bp, Glycine max
  unsure (1)..(1963): unsure at all n locations
  Clone ID: PAT_MRT3847_9617C.1
caggaagacaacaaaatcccctcattcagggtctaaaaacaaacgaaacctcatccatggcttctcttctccgttgcaacggagtcttcctctcccccttacctccccaacccagacgcgaccccatccttcccaaattctttctcccccaatccccaaatcctaaaccgtcacgcctcctgacggtgcgcgcggaggtgaaagagacctcctccgccgccgccaccaccaccaccaccacttcctccgacgacaagatccgcgaaatcctccgcaaccgcgactacgacaagaaattcgggttcagcgtggacatcgagtctttgacaatcccaaaagggctctcgaaagaaaccatccgtctgatctcgtccctgaaagaggagccccagtggatgctcgaattccgcctcaaggccttcgagaaattcctgtccatgaaggaacccacctggtctgataacacttacccccccatcgacttccagaacatctgctactactccgctcccaagaataaaccctcactccaatccctcgacgacgccgaccccgagcttctccgctacttcgacaagctcggtgtccctctcaacgagcagaagcgcctcgccaacgtcgccgttgacgctgtcctcgacagcgtctccatcgccaccactcaccgcaaaaccctagaaaaagccggcgtcattttctgctccatctccgaggccattaaggagtatcctgatttggtgagaaagcatttgggaagagttgtcccctccgacgacaactactacgccgcgttgaacgccgccgtcttcagcgacgggtcgttttgctacattccgaaggacaccaagtgtcctatgcagatttcgacttacttcagaatcaacgcgttggagacagggcagtttgagaggactttgattgtcgccgatgatcggagctctgtggagtatctggaagggtgcactgcgccttcctatgaccggaatcagctccatgccgcggtggtggagttgtattgcggcgagggggcggagattaagtactccacggtgcagaattggtacgctggggatgaagaagggaagggtggggtttacaatttcgtgacgaagagagggctgtgtgctggtgccgggtcgaagatatcgtggacgcaggtggagacgggttcggcgatcacgtggaagtacccgagcgttgtgttggagggagatggcagtgtgggggagttttattctgtggctttgacgaataactatcaacaggccgatacagggacgaagatgatacacaaagggaagaacacaaggagtaggattatatcaaaggggatatcggtggggcattccaggaactgttatagagggctggttcaggttctgtccaaggccgagaatgcccgaaactcctcgcagtgtgactctatgctcattggtgacaatgcagctgcaaatacctatccttacattcaggtgaaaaatccaacagcaagaatcgaacatgaagctagtacgtccaaaattggtgaagatcaattgttttattttcagcaaaggggaatagactatgaaaaagcaatggctgctatgatctctggattttgccgtgatgtctttaatgagcttcctgatgaatttggttctgaggtgaaccaactcatgagcttgaagcttgagggatcagtaggttaaacttaaacagcttgttaagcatatcattatatggaatttgctcaggccatttgttcctgaaattgtcaaagtccttataggtagtgtattcggaaggatgtgtatatgtttgtatatagatgctgtcttcaactgcaccctgcaaaagtggcctgaaacatagccagttttgaaccttaataaatgatcattgcaatcctataatgttgtttgtaaaaaaccanaaaaaaaaaaaaaaaaaaaaaaaaaaaaaaaaaaaaaaaaaaaaaaaa

SEQ ID NO: 138619 - DNA, 660 bp, Glycine max
  Clone ID: PAT_MRT3847_96180C.1
aataaaactagatgctgttgaatatttcattcattcccggaagtgacccacggcgcaaccaaaaacaaattgttcgtaatatattacatcaattagaatacgagaatttccttgtatgataataatatgtacgaacagcagacgcctacctgtttctaaatattatgaattttgaggaacaagtactaaaaaagttggatcacccatctataaagctgctgctacaaaatttccaaggcatatacatacacatgtactttcatagtcatattctaccaaccgaacaaagcaaaataatgagccacacagaagattggcagaagtggaacatgtagatgatacagccttctcccttctttttgccatgaataacactagaattaagtttgagctaaagatttatcccaataaaaaataatgccccaaagaatagaatgtattattcttatgccgtaaccttttccatcacaaagtgccaagttgaagttaaaacggctttcatctattgtaactgtcattatttgggtcattcccaaaagcactgaaaccactaccatgtgaattacaaaggtgctgctttggtttgactttctgccccaaatgcaccagattgacctgacccaaaatttccaaaaccaccagattgacctgacccaaaat

SEQ ID NO: 138620 - DNA, 304 bp, Glycine max
  Clone ID: PAT_MRT3847_96181C.1
cacgatcagatgagaatgattgataacattaatgcacttatttctgagctgtcattggagaaagaagaattgattaaagccttgacatctgtattatctgagtgttacaggatgaaggatataaacaaggagttgtccacaaagctagaggtccaaacacaaagattagagcttacgactgctcaaagcatggactatgaaaatgtttatgctgagcaactagattgtaagtgctatgtatgagaacaccccatatgcagagtaaggtgattaggctctggaaagggtgctaggatggattatg

SEQ ID NO: 138621 - DNA, 242 bp, Glycine max
  Clone ID: PAT_MRT3847_96182C.1
gagctctaaggctttgttaatgctaccgtttttcttgcttttacaggccgagccatggttttgtacagggcggggaaaaaactttgggcttcggatggttccccaaatctctcagattgctccctaccctttcttatctcccccagggatcagctcgagctgtttttttttttgctgtaactcaggctctttgaggggtgcctgcttatcaaaaagacaggctttcttcaagtgttgaagaa

SEQ ID NO: 138622 - DNA, 425 bp, Glycine max
  Clone ID: PAT_MRT3847_96183C.1
cgtgatactatttatatgaaatgttttggtttttttttgcaggaattaaatgaaaagagaatggggtcactccccattacagaaaggaagaaagtaaaccatacttgcccggggacgaaacttatacagattctggagaacgttgtgaacccagccttgcaaacgattataaaaattgtctgcattctaaattgcttgcggaacataatacaactgcttccaaggcttctgaggttttatatggttgtgtaagcaataaatgcatgaactcctatgttttcccgctctcaggaaagcactgcttgaggaaattctggatttcgctccgactaacaataccacgcttctttaataaaagcattgtgataacctctggattttagttgctggacttgcccacaatggggaaaaaggctctaaattgg

SEQ ID NO: 138623 - DNA, 339 bp, Glycine max
  Clone ID: PAT_MRT3847_96184C.1
atatcctgttgttgaccattcgcaacctatctacaccttctagaaaaactgcattgactcgtaaatctaagggcaagctggggcatggaccgaatgtctacccgtgctaatagagacaggaaaggctaaaagtcttgcctgaacctctaccagaataataccgaagtttctcctttttaaaggaaaaagccttttttactgagccaaataaaaaaggccttttactttaaaagcgaggaactttggggatctattcctggataggtggctatggcaaaaactctttctatttatctgactataaagcacggatagaccagacccgccacaaacatgccc

SEQ ID NO: 138624 - DNA, 275 bp, Glycine max
  Clone ID: PAT_MRT3847_96185C.1
tttctttgggcttttatcaaacactatcttctctatggatttgattcactctacaggtaaagcataagagttcaaggacttggtgaccaatatcacaaagttggttggaaacaccaaactgggcagaatttttttccagtgtagaagatggttgatccacagagcatcaaaagacgacagagtaagaacttgtagaaggtgctggacatgtttaaccactttggttagccataggttgaacctaagggaggatgggaaagttcacatcgacatgt

SEQ ID NO: 138625 - DNA, 311 bp, Glycine max
  Clone ID: PAT_MRT3847_96186C.1
gtccccagcagtgtttgtatatctggcacagatggttcaagatgggacactgtcatcatggatgaaagactcgcagtaaaacttgaagtcactatgagaatagcaaataaccaaggtgctagcacagctcgagccaagttgctcttcacaggttctcctacatataagaaaatattcaagagtttaattttgataaactgaaacaattagaattggttcttgatatggcttaattactacaaaagttaacaactttcaattatatgataattcataaaaaaaaaaaaaaaaaaaaaaattataattaatat

SEQ ID NO: 138626 - DNA, 200 bp, Glycine max
  Clone ID: PAT_MRT3847_96187C.1
tttttgaaaataagacgatattccattcatttttaagaacggcccgtctatttcttttttcccatctaacccctaatttatgtttctttccaaactaagtaaacctgaaacacaggagcatccaaagaggcttaaaaacaagcctaagaaattgcaactttgccatgaaattacactttccatcataccatgccaggcta

SEQ ID NO: 138627 - DNA, 1080 bp, Glycine max
  unsure (1)..(1080): unsure at all n locations
  Clone ID: PAT_MRT3847_96188C.1
acgaggctgttcgtgctggctttgccactgatggttttgtcctcaatgcacgtgttgaaagatctttgataagatgcctcatagagaccccgcctcatagagaccccgttccgtggaattcaatgctcacagcttatgttcatcatggtcttgaggttgaggcaatgaaaattttccgccaaatgattttgtaagggtgtgaagctgattctgttagcatatccaccattcttacaggggggtcatcactaggtcttggggtccaaattcatagatgggtaatccggcgaggacatgaacggaacttgtccattggtaattcgttgatcatgatgtactccaataatggtaggttggaaaaggcacgttgaatattcaatctaatgccagagaggggatgttgtttcgtggaattctataatatctgcccattgcaaacgccgagaagccctttcatttttcaagcaaatggaggaatctggtgttgatcctgataaaataacgtttgttgcaatattnatcagcttgagcctacttaggtttggtgaaggatggagagagattgttttctnnaatgtgtggaaaatataaaatnnnnccaattatggaacattatggttgtatggttaacctttatggaagagcaggactgattaaaaaggcttatagcatcatagtcgatggaatgggctctgaggctgctggtccaactctgtggggagctttattatatgcctgctttatgcacggtgatgctactataggggagattgctgcaaacaggctttttgatttagagccagacaatgaacataattttgtacttcttatgaggatttatgaaaatgcaggcagattagaagacatggagagagttagaatgatgctggttgacagaggattggattattagaaagctgtacatccaaagacttgtcaccacaagtacaacccatttgttttctcttgattcattcagtttccattttgtcccacaaaatgtgattacgatgaacattctttgttgtacagcatcagcacatagcttccttgatcaaattctaacttggcattgtcttc

SEQ ID NO: 138628 - DNA, 570 bp, Glycine max
  Clone ID: PAT_MRT3847_96189C.1
gttcgttcctttttttttttgtactatattgacactgtataacgatgatcatatacagagaatcagtatatatattgccttacagtgtataatgctgcgatataccaattcgagctactacgcatactatatcaaatggaaaatcaacggcgaaatatacactaagtagcttacaagtcaaccgttgcatatacgagaacagcgtaaaatataagtattgaattccagatagcgaacataaaagtcatcgcagatatagaaataccaacttagaaagaagcactaatagtagaaatacagtcttttacaaaccaggtatctaggcaggaatagcaatctatcatttagtttcactttcctcaaatcttggtggccagcacccactctccaccagtaaggaggcagcagcatacctcattctcctgctgcaccagtcaccacccaccgtttggaccatgcaccatccttggtacactcttggcattcacttggatgtgcaacatgcttttccaattcccttcatttcttgtccttaaaacttcatctcgcttcttgcaaagcctggcttgc

SEQ ID NO: 138629 - DNA, 607 bp, Glycine max
  Clone ID: PAT_MRT3847_9618C.1
gcagcgtccaggtacatccccttcctccctccgtcgaacccacgcctcccaattcctaattagggttagggctttcccaatttcaatgaccttctcttcttccttcccctcacaatccctattcttcatcgttcttcttcttcgttgggattaatcaattaacctatcctatcgtttcagtatcttcttcttctgctgcttcctccatggacctctctcaccctcaatccaacctgtccctcggattctcttcctcccacgcctctccgcctcgccgctccgacccgccggtgccgctgcagctcatggaaccgcagacggagaacggcaacaacctagatgtcgaatcggacgacgacgacgacgacaaagaagtcgaggagttcgcattctaggccactcaatgtgcctcaagaggcgaagagattgcgactcctcctcctcctccgccggcggcggcaagaggggttccgtcgaacccgatctctacgcgcgtaaagccgccgtgcgcgcgcggggctgtcaacccctctccatcggtggttccgacatccacgagataatgggaaaagagaagaagcgggcattttgggggggcgaactcata

SEQ ID NO: 138630 - DNA, 277 bp, Glycine max
  Clone ID: PAT_MRT3847_96190C.1
attccttttcatatttaaaactaacgttaacatactggttcattgataactttatatcttttatacccaattcaaatacactatactaaatactaacctttctattctttattattacttcactacttaatacaatcctttccttctcatctttaccttcatttaatccttctctaattaatattaatacatattaactattttttatatatatcattattccaacatttatctaattaaatattataaaattaatatactacctacattaatactt

SEQ ID NO: 138631 - DNA, 182 bp, Glycine max
  Clone ID: PAT_MRT3847_96191C.1
gcccatatcaagcacattggactggtccccaccatgggcttactccactcgggccatctatctatacttggcccagggccgacaactctccaacatcgtcgccgtcatcatctacgggaacccgggccattcctcccacacggaggacctatgcatctacccctcctacttcgactgcgact

SEQ ID NO: 138632 - DNA, 246 bp, Glycine max
  unsure (1)..(246): unsure at all n locations
  Clone ID: PAT_MRT3847_96192C.1
cacaattcttcctttctcttcttttgatgtcttaggaaccaaccaaccccccaatctgaattgatttcatcgtatttgtgtatcattgcgtgattgattttccgtntcttcttcttctcttcttcctgtgtgtgcgtgtggcgganatagtgtaattgtaatggcataccaagcgatcaaggtcgagtcgggatcgagttcgagtcggggncagtatgnntctcgtcggaganccacctacacaaa

SEQ ID NO: 138633 - DNA, 416 bp, Glycine max
  Clone ID: PAT_MRT3847_96193C.1
ttcctttgtgtgatttcatttgactgaattgcattaacatttcccctcttgttctttttcttctggtcattgttgatatggcattggccattgccacccatgaaatgtgaatcattcaatcccaggcattagcattagcactagtgagtgccactagttgcttattcctccctttccaatactaatctcatgcaagcaaatcaaatcaaatcaaaagtgaaagggtctgattctcgtgctgttgcgcccattaaacacactttcctgcacaggaagcatcgcgtttacttttcctcataatacgtaaaggcttctattagaaattgatttttttttttaaatcttctaatgcaacaatcttataaatcacacaaagtaaaatacaatataattttggcgcgtaactgaaatatact

SEQ ID NO: 138634 - DNA, 330 bp, Glycine max
  Clone ID: PAT_MRT3847_96194C.1
cctttcatcattctatattctcaataccccacctcgcactcgctcttaccttgctctggtggcgaccatgacgactcctgctaggaagaggctgatgagagacttcaagaggctgcaccaagacccgcctgcagggaacactggtgccccccaggataacaacataatgctgaggaaggctgtcgtatatggtcctgatgatactccatgggatggaggcacgctcaaacttgcactccaatctactgaggactatccaaataaaccaccgactgtacgactagtgactggcatgtgtcatccaaatatttatgccgatggaagtatttg

SEQ ID NO: 138635 - DNA, 346 bp, Glycine max
  Clone ID: PAT_MRT3847_96195C.1
aatcattggtcattaaattgattcaattgatttttatggtgtcatttcggtcatttttaatccatcttaatgtgaaaatttcatttttaatttcgtgtcgtttgcatttcaccatttgaagtcttaagttattaggataaagatggcgtgaattaacgtaggaagcattagttttatacagctgacaaaagtaggtaggatttttttattttattttataggatttagttaatttttatgggggaaactagataaaacagtggtaagaatcattcatccatttttttttttggattaaatgtttggtttctgtaaataagataatgtttacatttagtttctaaca

SEQ ID NO: 138636 - DNA, 346 bp, Glycine max
  Clone ID: PAT_MRT3847_96196C.1
gagagagaactagtctcagctttttttttttcccttcattttgtgttagatcattggattccgcaaagccttgtagtcattggtttattgtggtactgtggagtgtcatcactgccctcaagcttgctaaggagaagggcgtttcacagctgtggattgagactgattgtactccagtaatggattgtattttgaataaacgggtacagaaaggtgttccttttgctcctcttgttgagtccatacttgagttgatgacaaattttgacggatcgagtttaccgttgttatcatgaagcaaccacagttgctgactggttgtctaaatatgcgcataatattgcat

SEQ ID NO: 138637 - DNA, 297 bp, Glycine max
  Clone ID: PAT_MRT3847_96197C.1
cggcagttacaactgcggccgctgcggcctcccgaagaagggccacaactgcaccgtcaaaaccctcgcctccaccgccgatgcaactcccgattcgtctctctccgttgtctccgtcccttccgcggccgcgcccagtctccgaaagccttcgtcgaatctccgtcgcgcgctggtcgttcgacgatcttgatgaacgtcttcccgttgtcgatcggtccgaaccagatgaagaagtggattcggatgtgttcgatgagaccgatccggatctggatctggacgccgatgcgtgcg

SEQ ID NO: 138638 - DNA, 334 bp, Glycine max
  Clone ID: PAT_MRT3847_96198C.1
aaatgggacaagatttgttctttacctcagggtataaagtttgctgccttgccctttgaaagaattgtaatacaagaattggagtaaaaaaaatggccctagattaatttttaaggtaaatcccagataattacagtttgtttggaataaaatagtcactctcgtccttttggaaaatttattcattggttatacttcccctaaaagggtgatttgctcctgggggggtttgggaaatcccgaaatttcatgggtagatactcaacttgcaccgaacaatgaagggtgacgtattttctttcatttttcagtggcggaaccctctttcaaagtt

SEQ ID NO: 138639 - DNA, 233 bp, Glycine max
  unsure (1)..(233): unsure at all n locations
  Clone ID: PAT_MRT3847_96199C.1
tttttaaacaaaatttgcattttattattcgggggagtccaaaagacaagaatctnnnnaagcgggggcctttgcgggccacttgcatttttaaaaacagaaaagctttatccggtaacaacaaacacactttactctttcgaggggcacaaatcgcaaaaggctaaaacttactacctaatgacaacgccacgtctttaaattattttacttgacccccaaaattgccaagg

SEQ ID NO: 138640 - DNA, 286 bp, Glycine max
  Clone ID: PAT_MRT3847_9619C.1
gcggccggccctaagggtaagtgctgtgttacatttttcactctcgactcgaaatcgaaactctatttagatctcacaaaaacagggtttaatttcactcccttcagacttattattattagggtttggcgattcaaaggggaaagagaggtggcagatcgaaacggaatcccccttgctctggggctctcggcgatgctcctcttcttcatggctacttcctcttccttgccctcgttcgagcttccgatgactccgacgacgcgatcttgtactagtcattcga

SEQ ID NO: 138641 - DNA, 141 bp, Glycine max
  Clone ID: PAT_MRT3847_961C.1
gcccctgaattcacctttaatttattagcctaatctctcaactcatttcccatttcctagacaacacacctgttttgagaatctaaaggctactactacgttgctgcgggaatgacatcacgggctctattcttttatcac

SEQ ID NO: 138642 - DNA, 1935 bp, Glycine max
  Clone ID: PAT_MRT3847_96200C.1
tggagtatggcgatgctggtgctctaaattaaaattggatgacctactataacaattcggatcaagtggaaaagctgcgccttgtgttgacactactttgctgtgttcattttcatgtccaaagttctcttggatttgaagatggaatcagcagatctcaattcccagaagggttcctcttcggaacatgcacttcctcataccagattgagggagcacctcttgaagatggcaaaggtttaagcaactgggatgtttttagtcatataccaggaaatataaacaatgatgagaatggtgacattgcagatgatcactatcatcgctatttggaagacatcgagttgatgtcctctcttgggataaatgtgtatcgattttctatttcatgggcaagaattctacctagagggatatatggggacataaatccaagtgggattatgttctacaacaagatcatagacaatctgcttcttagagggattgagccatttgtgacaattcatcactatgactacccggaagaactggaagaaagatatggtgcttggcttagtcccctaatacagagagattttgttcattttgctgaagtttgttttaagagctttggagacagggtaaagtactggactaccatcaatgaaccaaacctgtttgcagattttggctatatggaaggaacatatgcccctggtcactgttccccaccttttggaaattgtaataccgggaactctgatgttgagcctctcattgtcatgcacaatatgttactgtcacatgccaaggctgttgaattataccgcaagcactttcaggcaaagcaagggggaaccattggcattgttgcattttccttcatgtatgacccacttagagatgaagaatgtgatagacaagccgtgaaaagggccttggcttttgttgtagcctggtccttagatcccttggtttttggtgagtaccctcctgagatgcactctattctcgggagtcagttgccaagattctctcctgaggagaagagtctcataaaaggcagcatagacttcattggcatcaataactatggaactctctatgccaaggactgctccctcactgcttgtcctcttggaacagatcgtccaatacgaggcttcgtagaagcaactggaacaagagatggcattccaattggtgatctgacaggaaacccaagattttttgtggttccaaggggcttagagaagattgtagactacatcaagataagataccataacatgcccatgtatattacagaaaatggatattcgtcaccgcacaaaccaaatgtgacaatggatgatttactacaagatttcaaacgaatagattatcataaagcctaccttgcagctctgcttagatccataaggaaaggtgcggatgtaagaggatatatgatatggtcattgttggacaactttgaatggacaagtggctatgacataagatttgggctatattatgtggacagaggcactcttgaacgaattcctaaactttctgttcaatggttttctagtttcctcaacaacagtagccaccccaacataacagaacacttgagcaagcaacatattgaaagcaaagatgtgagaaatgttggttttgattttatttgaactatcccgtcaaacacggttaacattttcttactcatatcaatttattgtttttggacattattaatcttcagacatttttctaaaacatcgagaggaagacatggaagttgaagaaaggctcacaatgtagatctgaaaatatacaatcaagtatcaaaagagttacaacactttgttgtttaaacaagatttgttgattactaattactagctaaatgtaagtaaccagttgtgtagatccatgctttagtggaaaaataatttttttgaaattata

SEQ ID NO: 138643 - DNA, 312 bp, Glycine max
  Clone ID: PAT_MRT3847_96201C.1
atcacctacgtatgctcgtaatgctgattgagactatatgtgggaactgaatgaacatgatatttgggaaaggatttgaatcaactctgcttctgtgttgcatggatctgtgaaaatccggtttatatgatctacgaattgaggagaggagctaagcgttactgtgtgcgttggtatatatactctgatggaatcccttgcttgattattcgcagcttttgtcttagggagtgtttagattacaggatgcaaatagagaacataggactgcacgagaaatcttgcaattgacgtctgtgtcgaacgtgagtc

SEQ ID NO: 138644 - DNA, 1979 bp, Glycine max
  Clone ID: PAT_MRT3847_96202C.1
cggatatctcggctcttgcatcgatgaagaacgtagcgaaatgcgatacttggtgtgaattgcagaatcccgtgaaccatcgagtctttgaacgcaagttgcgcccgaagccattaggccgagggcacgcctggcaaaacgttttttggttgcatcatgtctgccatcactaatcattggaacaaaatgaaaatgctgcagaggcagctaagagctgtattgatactgttttgctgtgttcaatttcatgtccaaagttgtgatgaaattgaagatgtaatcagcagatctcaatttccagaagggttccttttcggaacaggcacttcctcttaccagattgaaggagcgtattttgaagatggaaagggtttaagcaattgggatgcttttagtcatacaccaggaaagataaaaaaggatgaaaatggtgacattgcagatgatcattatcatcgctatttggaagacattgagttgatgtcctctcttgggataaatgtgtatcgattttctatctcatgggcaagaattctacctagagggatatatggggacataaatccaagtggggttatgttctacaacaagatcatagacaatctgcttcttagagggattgagccatttgtgacaattcatcaccatgactacccgggagaattggaagaaagatatggtgcttggcttagtcccctaatacagagagatttcgttcattttgctgaagtttgttttaagagctttggagacagggttaagtactgggctaccatcaatgagcccaacctgtttgcagacatgggttttataaggggaacatatcccccgggtcattgttcgccgccttttggaaattgtaatactggtaactctgatgttgagcctctcattgccgtgcacaatatgatactgtcgcatgccaaggctgttgaattataccgcaagcactttcaggcaaagcaaggtggaatcattggcattgttactcataccttcatgtatgaacctcttagagatgaagaatgtgatagacaagccgtgaaaagggccttggcttttgttgtagcctggtccttagatcccttggtttttggtgagtaccctcctgagatgcactctattctcgggagtcagttgccaagattctctcctgaggagaagagtctcataaaaggcagcatagacttcattggcatcaataactatggaactctctatgccaaggactgctccctcactgcttgtcctcttggaacagatcgtccaatacgaggcttcgtagaagcaactggaacaagagatggcattccaattggtgatctgacaggaaacccaagattttttgtggttccaaggggcttagagaagattgtagactacatcaagataagataccataacatgcccatgtatattacagaaaatggatattcgtcaccgcacaaaccaaatgtgacaatggatgatctactacaagatttcaaacgaatagattatcataaagcctaccttgcagctctgcttagagccataaggaaaggcgcggatgtaagaggatatatgatatggtcattgatggacaactttgaatggacaagcggctatggcgtgagatatggactttattatgtggatagacacactctcgaacggattcccaaacgttctgttcaatggttttctagttttctcaacgacacaagccacagcaataaacaagacttgagtgagcagtatgtcagaagcaaagatgtgacaactgctggtttcaaagttgtttgaacttgctgaaatctgcaagaacttacatggacgtggagaagatgatactaacatgccaagacaagactagaatgaaaatgttacttcatatatttccaatgccactgttttatgttattggtcgaacatcaaatttgtatccacgggacaacactgaatactgatgttgattacttagagagtttaattttgat

SEQ ID NO: 138645 - DNA, 247 bp, Glycine max
  Clone ID: PAT_MRT3847_96203C.1
cgaaagctcaactcgtttggggcctcctataacgaaaggatttctgctagggcaaaaactaaaggccattgcaacttcatcatgtaagggggattcctgttcgctactctagccgggaaagggatacaactctcacgcaggtcactgctaagcctccagggatgattgctcccctcacaaccctaactccggggggcgaaagggcacaatgtgctttccatgtatacctaccaactgctgcaaaggt

SEQ ID NO: 138646 - DNA, 296 bp, Glycine max
  Clone ID: PAT_MRT3847_96204C.1
gattttgttgggtttacaatgatcaaacacactctttgcacatagaaatgcgctttatttaaaggaagagaatactacctaccaggtcacaaatgctggaggacactcatggagcagatatttgacacttttacagaattgaagaaatccccggagccttttattaggggggttagaactcagaattgtatttttaacgccaaaaagaacaggcagtaaagctacctgggaaaggatcaactctagttaaaaaaacaatttttttaactttcccaagggctgggccaatacttttg

SEQ ID NO: 138647 - DNA, 213 bp, Glycine max
  Clone ID: PAT_MRT3847_96205C.1
ggtccacaacagagggtgccattatttttttatgaaacaagaatgatgctttacttttaccgccatttcaaaaaccagaaccgggtttcaaggttattactaataattttcccccacattaaattaccttaaaacctggattttttaaccccttcctggtcatgggcgcttgagggacccaattaaattaccttaaaactgtgtttaattttt

SEQ ID NO: 138648 - DNA, 585 bp, Glycine max
  unsure (1)..(585): unsure at all n locations
  Clone ID: PAT_MRT3847_96206C.1
actaagtacaaaaagttaggtccatactcannnnttccaaaataaaactaatgtagtttgaaaaggaaccatagtatggctacataataaggtatctaatatctgctacaactcctactctgagctactgaaagctaatacagagtgtttaaaagcatagtatagaccacaatctcatgcagagtgtttaaaataagaacaagctcactaaccgtgtgtttggatacacattttttaatgtaaaaatccacgtccaaaggataaaaaacgtgaaagccatagtgtatagcttctaaagagatgcagaaagtcacgttctggatgtgtatgcaaacacactataagacgatagatactgtcctgctacttaggtagatgtggggatgagagttggaaatagaagaatttaatgattattacttttccaagtagtgtagttattatgttcaattgagttcaatgtctcttaggaagtagagatattttaaatattctctagaaaaaaataattattatctttgtaattattacttttatattattgtagcatagtagatcactctactgagtgatatagtcaacaac

SEQ ID NO: 138649 - DNA, 395 bp, Glycine max
  Clone ID: PAT_MRT3847_96207C.1
gtattgaatgaatgatcattaaattacttaaatgattaatgctaaaacagtacttaattgtttcttgtttaggtccaattttagcagagtttttcaaatgcagtgggcgccagtccaagaaagaacaaagagggtaaagccaccacctaatttggttcacacaccaacacaacaagaagggggggctgcagaaatagaaaaggggcaaacccccaaagaacaagggaacaaaaaaaaaaaaaatgcgggactagggagaaaccctgagaggagaaaggaaatatcaagcctcaaggggaagcccccccattcgggcgggtgctccaagacctttttcttaaccttgtggggggggggaccgaaccagttttgaatggcccggaccgaacaaccct

SEQ ID NO: 138650 - DNA, 254 bp, Glycine max
  Clone ID: PAT_MRT3847_96208C.1
aaagctactttatctaatttcactactggggtttgaaaattttgcaatttcatcatttaatttgatgctgttttctcatcattggcatttttttcctcccccaatcttttttggatgacaatacttgctcatgatgtattttcaaatgaaaaatctgattttaatttttgttttttgtttaaaatatatgatatatcctttttattgcagatgttgtatttggacaaagttttttactttttcatcaatttttt

SEQ ID NO: 138651 - DNA, 387 bp, Glycine max
  Clone ID: PAT_MRT3847_96209C.1
ctacggggggctgctgggtacattactactagctagctttactgattgctatgaaccctatactgcttgctccttgctccttcgttagaaccctccctatctgcttgctgcttcgtatgaaccctacctctatttgacattgaagccctaccggttctttcattgaagcttcatcacttgatcttccattgaagctactaccccttcttgcattgcagctcctttacctcttcgactttatcgatccaacttctggatcagtgtattcaagtttgacaatttactggctctgaaactattagatggggaattgtttgcacatgatcaatcaggctctataagattgcgaattcatcatacgctcagttctaacgtgactgggaagag

SEQ ID NO: 138652 - DNA, 319 bp, Glycine max
  Clone ID: PAT_MRT3847_9620C.1
ggggctcgagtgcttttctagaggtacctagacctcaaacgctaggattcatagagcagaaccactgctcataacagtcaaggacgtgctatatcaccccattacttggggcctttttagcttattcaaatatgggaagatactggaaaattgctagtttctcaactatctatgtccttgaatgttatcactgattcactggcctagtgccagctaaccaccatagaaaaactcccaaattctacaaactaaacacatccattatccagaaaaaatagtgaagattaccatatttcaagttattttgtatctatccact

SEQ ID NO: 138653 - DNA, 480 bp, Glycine max
  unsure (1)..(480): unsure at all n locations
  Clone ID: PAT_MRT3847_96210C.1
tntnngnnnnnnnnnnnnnnnnnnnnnttggggaatcttaattttggttttacttttataagattatacaattatatcataataatatcaacatgaaattttaatcataatattcataacataaaatagtcaattttaacatgaaatattgtaggataatctcatgagttacatgtagcaaaatgcaacaatacttaatgacattaaacttttaaaaaaacctccttctttgaatttgtacccactgcaacacttttgccggccttccgtaatgcaagaataatatagaacatcagattgccaagtatattttgcaagtccatttgtttcctttacgatcaattaaatcaatgatttgagtatggatggcctaagaaaattgacaaaattccaaaaacaaatacagcatcaaaattaccataaatattcagcaaaagaaaagattaatataaagatacatactcaatataacatataata

SEQ ID NO: 138654 - DNA, 1526 bp, Glycine max
  Clone ID: PAT_MRT3847_96211C.1
tggacgcctgcggtaccggtccgaattcccggtcgaccccgcgtccgaccccccaaaaccctaggtagagagctcttcctcactctcattcgcaatggccgcagcagcacgtcctctcgtcaccgtgcaggccctcgacagtgacatggccaccgacgcctccgccaccgtccctatccctgacgtcatgaagtcctccatccgcccggacatcgtcaacttcgtacactccaacatctccaagaacagccgacaaccctatgcagtcagccgccgcgccggccaccagacttccgccgagtcctggggaaccggtcgtgccgtctcccgtatcccccgtgttcccggcggcggaacccatcgcgccggccagggagccttcggaaacatgtgtcgtggaggacgcatgtttgccccgaccaagatctggcgccgctggcacaggaaaatcaatgtgaaccagaagcgctacgccgttgtctccgccatcgctgcctccgccatcccctccctcgtcctcgcccgcggccaccgcatcgagtccgtcccggagctcccactcgtcgttagcgactccgccgagagcgtcgagaaaacaaaagaagcaatcaaagtcctcaagcagatcggagcattccctgacgcagagaaagcaaaagacagtcgcagcattcgtcctggaaaggggaaaatgcgtaaccgtcgctacatctcacgccgtggaccactcatcgtgtacggaacggaaggagccaaagccgttaaggccttccgtaacgtccccggcgtggaagtcgctaacgtcgagaggcttaaccttctgaaacttgctccaggaggacacctcgggaggtttgtggtttggacaaaaagcgcttttgagaagctggattcgatttatgggtcttttgataagccctctgagaagaagaaggggtacttgcttcccaggcccaagatggttaactctgatcttgccaggattattaattctgacgaggttcagtctgttgtgaggcccattaagaaggatgtgaagaaggccacgctgaagaagaaccctcttaagaacctgaactctatgctgaagctgaatccttatgccaagactgctaagaggatggctcttcttgctgaagctcagcgcgttaaggccaagaaggagaagctcgacaagaagaggaagactgtctctaaggaggaagcttctgccatcaagtctgctgggaaagcatggtatcacactatggtgtcagattctgattatacagaattcgacaacttttctaagtggctgggtgtttcacagtaaactttatgattcatattttcgtattagatttttgttttgtatgcccatcagaactaaatatctttggtttttttgttttgcgagttaaggttatcataattatgcagacaatttggaaattttgtttgtcggattttatagtgcaaattctggttgtcttatattaaagcagatccatttttattacgctttaccaaaaaaaaaaaaaaaaaac

SEQ ID NO: 138655 - DNA, 181 bp, Glycine max
  unsure (1)..(181): unsure at all n locations
  Clone ID: PAT_MRT3847_96212C.1
atcagcccaacacaacatttttataagctaaaatcacttcatcatgggtgcctcgtgtgcttcctctgccattgcagctgttgccatcttcacacnaaggcaagtttattttttttcacgtgcccattacttgtaagttgtataatagtgaaccattaacgtacgtgaaattagtctatgc

SEQ ID NO: 138656 - DNA, 424 bp, Glycine max
  Clone ID: PAT_MRT3847_96213C.1
gtggagcatatttgaagtagatagcaagctatggattatatatacagtatacagaaggcatttaatggagatgggataatcactgtctctaggaatcattctgtaactatatatgaactaacaaggtaatggagaactttctcaagttcattccatgtttagagtacagacataatgcttatggggattcttctatcatgtagtaagttaaatttaggttgcacaagcatgcctccaatgttaatcaatcacatcaaatgttacaaaggtcaaatgtaatgaaaatgacatgtttgacacttcccaggactaatatcatatactagtataatttactgtgggaggagaccagaaagggttgggcaggatgctgagtactataagaacaagccaagttcaaatataaatgcaattttagatgtcc

SEQ ID NO: 138657 - DNA, 129 bp, Glycine max
  Clone ID: PAT_MRT3847_96214C.1
gacggttgcgagaacacaatacaaaggtaaaaggcgcacgatctagaggatccaggcttacgatcccgtatatgcgacgtcataactcttctatagtgacacctaaatataattcactggtctgttgta

SEQ ID NO: 138658 - DNA, 463 bp, Glycine max
  Clone ID: PAT_MRT3847_96215C.1
cccacgcgttcgcaggaacatggtggtcttgatcgagatgatgaggtaatagtttattgtattgtaactgaagttattttatttcattaatttcagggattttgagaaccacttttgctctttaaaatatcttgtttcatttggaaatttggtgactgtgtcactctcattatggtggtcatccataagtacaattgtgttttgtgccctgtaattttactatcttgggccattagttgctttacttttgtagccttactatgtaatcaatcaacatatattgcaataggaaactgggtattttatgacagaaaatagggagaaaccctcatttcaaagatctgaatcacaagttcatcactgtaagtgtatatgagtgaataactctggttggctttataactagttagttgacagttgtgtttagttagatttctgttacaattgaatctcagcagtaaaa

SEQ ID NO: 138659 - DNA, 427 bp, Glycine max
  Clone ID: PAT_MRT3847_96216C.1
cttttgcgttcgataaaaaaaaaaaaaagaaaaaaaaaaaaaaaaaaaaaaaaaaaaaaaaaaaaaaaaaaaaaaataaaaaaaaaaaaaaaaaaaaaaaaaaaaaagaaaaaataaaaaaaaaaataaaagaaaaaacaataaaaataacaaaacgtgtttcatttaataaaaatgtaataattttgacaattgatgaaaaagataatttattaaaaaggatcataataacaaatgatcctacatggaaaatgaacagtggaatgggaaatataattaattaataaaacttgaagaggttaaatggataaacctcatctttaacgcgctattagttgaaataaacattgggggaatgcgaataataattttaaaatatatctgtcttattaaaaaggcccgataaacccgctaagttcaaaacttt

SEQ ID NO: 138660 - DNA, 244 bp, Glycine max
  Clone ID: PAT_MRT3847_96217C.1
ggctcgagctcgacttaagcacagggtatttgtgtttgctctttcaacaaaattgactgattgtccgtcagcacatgatcgttgcagggctgattcgcaataaggtcttatattgcctctgatactatttgagctgtagaagagtctatctacggttgggcgggtgaaataccgtcgctaacaatcttaaggcgacgcgacatttcatgagaaagtgttttaaaacttactgctctccctctct

SEQ ID NO: 138661 - DNA, 380 bp, Glycine max
  Clone ID: PAT_MRT3847_96218C.1
aaaaaggggaagcccccatacccgatttttaatgccccattcaaaaaagcctttacggggttggttttattttacaaaaaattcaaacaaaaatttgcccccccttttaaaaaatatggaacccctggccgggggcccctcatctgatgggtcccccctgggggggggaaaaataaaacttctttttccatattttcatggaaacccaaaaaaaaagctacctttccacctcgggaacagtatttaggggcaaaccatacaattacaaggcctttattttggaacatatacttaaggccttcttgaacaaatgggtgggctcgacaaacaaaatccagatatttttgggattgaactctgaaggaaccctcgatccaaaa

SEQ ID NO: 138662 - DNA, 207 bp, Glycine max
  Clone ID: PAT_MRT3847_96219C.1
gctagcaataagtttggtaggggaatatattgaatattaataagccactcttattaaaggccaacaagggccaaggagtgattcccccaaattcctaaaaaccttatttcatagaatgccaccaaaaggggcttggatttttttgtagcttgggcattaaattggcacaaggaagggagccattaaaatgtaagaaaggcaccattg

SEQ ID NO: 138663 - DNA, 320 bp, Glycine max
  Clone ID: PAT_MRT3847_9621C.1
cgctatctatcacactgagtgagagtggctgaaggggggcttcagcaaggcacggtcttataatcacctcatgcaattcaaccgtcaactaaagaggtgtgtctattacttgaacgcatggataaaatgtagttatcctggatctgaacttaaaaagggctttgagctgccggaacaggatggtggaataggatgggaacgactgcaatccatggttagggacagagcatgacaaatggtgagtgcataatcagcacttgctaatgcttactttgataaataatgcttgtttgcattgtctatcatgcaaacactgagac

SEQ ID NO: 138664 - DNA, 346 bp, Glycine max
  Clone ID: PAT_MRT3847_96220C.1
aaccaacatagctatttcaatcttctgttaccatgagtggacaagtcaagacaattgcccgcattctgcaggcagcaggttccgctatacaagcaaatggcaatctcgtcctcctcaatgtggagaatggccaccttgtagagaggatctttgacggggaggaactcaaagaccagagactggtcgtggatggcgtgaagtctggcgcattcgcagccttcgtcgtttcagacaaccatgccttgatcctctacattactgatgggggtgaactcaaggctagggagtttgaccccgactcaaaagagtgggatgagtctgagctcaatggcttgggcgaaatcaa

SEQ ID NO: 138665 - DNA, 738 bp, Glycine max
  Clone ID: PAT_MRT3847_96221C.1
cgggaatgcccctgcaggtacctgttctcccatggagactcagccgcggatcctttgtcgggaggtcagctcccgtgggtcccgactcccgatctgttcttcctccgtgggctgtgcctcactctcaggccgtggttcccgcattgtgtgtccttcgatgccttggtcatcgcgagcccgtcggatttgcgtctgctttgggtgcactggcctgcgttagttggcctggagctccatgggttggacgttttcatgtctccgcagccggccaactgtgctctaccaaatgcaattccatctgctactcttcctcattcagagacaacagaagaatttgaagtgcagaatagcatcaaagtcaaggaagaaggcacagcagcaaatgataacacaaaagtttgtgtttcctcgtttagagaattggaatatccatgacttgccacagcagttatttccaagtgcacatctcatgagatgttcaatttagtcttcctcttcttcgataagtggggttcactaaatgctacagcacgaaattttctaacccgaaggaattgagactagattggaaacacaatccagcgttattattcgagaagctccatgagttagatgttttcaattttcctcatttgacaaacttagtatattcaacttctagattgtctttctctcgtctgacaaaggtgtctacattcaactgtccccacatgcaacatttatttacatattcagaag

SEQ ID NO: 138666 - DNA, 128 bp, Glycine max
  Clone ID: PAT_MRT3847_96222C.1
gttaatattccatccagaatggaacactatcattgtaccttcacagaccccatatcatccgtgggggcacaaaattgcttggggactggtaactatgctgaattaaaagcacaatcattcactgatct

SEQ ID NO: 138667 - DNA, 313 bp, Glycine max
  Clone ID: PAT_MRT3847_96223C.1
tgactccaagaacaacaccacaggatctagaaaagcccttccatcttcaccacccaaaaagaaaataagggcaatggccagtgcaacaacttcagccacaatcactgtgggggcaatttccagggttgccggcccaaaagaaagggagaggaatgtgcacttcatcaaaggtttgaattcctttggagggttgaaggctcaaaacagtgtgacatcactaggtcttcctgtgtgcactgaacagtgtttcgcagatgtggagagcccattgaaatatcaatcatcatctaaggccaaatgtggaggcgctgcc

SEQ ID NO: 138668 - DNA, 307 bp, Glycine max
  unsure (1)..(307): unsure at all n locations
  Clone ID: PAT_MRT3847_96224C.1
gtngcatgcacgcgtacgtaagctcggaattcggctcgagctgggggctgagtttgttatgagtgtgttgattgttgttgctgagtttgttatgagtgtgatgaatattggaacagtaagtaggatgtaaattgttaagtttaggagggttaagttagggttgtatggaaggattgctgtattcatcctatgtgggcaattgatgaatatgctatgatttttcgtgtttgggtctggttaagtcctcctcaggcgccaacaaagactgatgaaattgcgagaatggtggtgatagttgggctaggag

SEQ ID NO: 138669 - DNA, 1630 bp, Glycine max
  Clone ID: PAT_MRT3847_96225C.1
ggatagtgggacgtttggatgtagcaatgagcaacataatcgaaaatcagaggaatgagtgagactgggaaccccgttttgtttcactttcctcatccccaaccccaaccccttataacactcaaaaacacgcacgcagacttagactcactcctttccatttccaacgcaatggacccatggctcgacgatcttaccgacgaccttcagagtcttagcttcgcctccaccgccaccgcggacatcaagcggagcaccagcttcggctccgaaaccaccaccctaacggcctcctcctccgcccacctccccgccaacagcaagccccacgcgccctcctccgacccccgctgggccgccatccaccggatccgatcggactcccccagccgccgcatcctcccctccgacctcctcttctcccgccgccttggctccggcgacatcagctccgtctacctcgccgaactcaacgacggctccctctccgtcatgttcgccgccaaggtcatggacaagaaggagctcgccagccgcagcaaggagggaagagccaagaccgagcgagaaattctcgaatcgctcgaccaccccttgctccccaccctctacgccaccatcgacgccaccaaatggctctgcctcctcaccgagttctgccccggcggcgacctccacgtcctacgccaacgacagccccacaaacgcttcccgggggatagtgtaccgtgatacgcgtccggagaacgagttagttcgatcagacggccacttcatgcgcactgattttgacctctcgttaaaatgtgatgattccacatcaacgccccagatcatcttggatcagaaaaacaccccacacaaggacccccgcgtggatccctcgcagtctcagttcacctcgtcttcctgcatactacccagctgtatagtccccgccggggcgtgtttccacccaaaacgcaagcgaaagaagaagcagacccaacataatgggcctgagtttgtggccgagcccattgatgttcgctccatgtccttcgttgggacccacgagtacctggctccggaaatcgtgtccggggagggccacggtagtgccgtggactggtggactttgggcatattcatatttgaattgttctatggtgtcacgccctttaggggaatggacaacgagctaaccctagcaaacattgtggctcgagccttggagttccctaaggaaccctccgtgccacccacggcaaaggacctcatctctcagctattggttaaggacccttcgaggaggctaggctcaacaatgggtgcttccgctatcaagcaccacccctttttccaaggtgttaattgggcattgctaaggtgtacacctccaccctatgtgcccccaccttatattaaagaagctgtatcatctgatcatgaaattgaaacctgtccgcagactccaattgattactattgatgatcatagggaggagattcatagagtacagttaataagatagttccaccaaatttaattattttcttctcctccgtttaatttttcaccatactttttttagcaaaagtgtaattgtcaaccgactatgatactaataattaagattgatgataaaaa

SEQ ID NO: 138670 - DNA, 178 bp, Glycine max
  Clone ID: PAT_MRT3847_96226C.1
ggtcaggaattcccgggccgacccacgcgtcagcggatgcgacagtacggctgagagggaactcaaaactgagacagctttaatgcgttctcggagatttgatctgaccttccacccttcaattcgcgggacgatggcaggatctcacgctggcgtgacagaagttctcgacgacggt

SEQ ID NO: 138671 - DNA, 700 bp, Glycine max
  unsure (1)..(700): unsure at all n locations
  Clone ID: PAT_MRT3847_96227C.1
ccacgcgtccgaaagagaaagagtatcatctntgttcactctgttcagtttggaaccttttattgttcacagcccaaattgttctttttgccattaacagaaggaagtccggtttgggattggactgttcaacttttcaaatcccaaacctctcctttatcctttgccttcaccaccgtcgtcgagaccaaatagaaaacagcggttcagattgagaaccacacgcacggtgcacctggctaatcgaacatcgaggagttggagtaattgatgtttggtgagggaatgcgttcttgggcttaatcttgttgaagcgcgtaagtagtcctgttgcaaaggaggacactgctattgttgaaggaaaatggggcctgctccggacacaattgatttggaaggttatgatgatgtgagagcgattctgaaaccgaaaggttctaattctaaggattgtaggttagaaagacgatggaagagatttgaaaattcaggttcaaacaaacaattgaagcacaatcacagtgacagtggtacaagatcaactgtgaagagtcatggaaaagtggcaagtttaacaataaagaagggtcatatgtcagaggatgaagtggatgaagattacaaattctttttgcttacatatgatcctcatattgatgttgtcagtgatagtgatgtggatgggtctgatgatgacatc

SEQ ID NO: 138672 - DNA, 185 bp, Glycine max
  Clone ID: PAT_MRT3847_96228C.1
ctctatacggccgctttttttttttttttatttttatctctcttcgtaattttactaatcttctcattcattaatggatgggcaatatttccattcttgaatttcaataccagtttcatttaagcttttcacattttttaatagtattttatttgaaatggcttttcctacacatttctatttta

SEQ ID NO: 138673 - DNA, 999 bp, Glycine max
  Clone ID: PAT_MRT3847_96229C.1
ccacgcgtccgcacagaccccacgcgtccgcggacgccccggcgcccacgcccatggccacgctccttcttcccaaccctttctccaccaagctccccgcccagcgctactcgcaccggcgcttcacctgctcctccatcaccgcccaatcacgatccgccaaggagcaactcctcgccctcatcgccgaccaggaccgcggcatcaagacccagagcgaccccgcgaagcacgccgcgatcgtcgaagccatcaatgcgatggccgcggcgggcgaaggctccgtgaccaccggggatgcgctgtcggcgacgtggcggctgctgtggacaacggagaaggagcagctcttcatcgtcgagaaggctcccttgttcggaacccaagcgggtgacgtgttgcaggtcatagatgttcggaatcggacgctcaacaacgtcataacgtttccacctgatggcgttttcattgttcgatcaactattgaggttgcgtcgccgcagagagtcaatttcagatttacaagtgcagtattatgtgggaagaactgggaaataccattgccaccatttggacagggttggtttgatattgtgtacctcgatgatgaccttcgagttgtaaaggatatcagaggagactatttagttgttgaccgagcttcctatgattggaaagaatgaacagaatcttcattgtcattgttagagcattttcattaatcaaaacttacactcaactgcccgtatggtttcagtgctgtctttgtgctttataaatttctagctagatcttgcatctcttccgcttaagctaatttaatatgtttatttgtttgacaattgtgtgatccctgtagccaacctcacttattgggataagactttgttgttgttgtagtagtatttgtttggcagttaaagtaaggattagttaatgtacataatttttttttaaatatctttataggaatatgacaatttgcattgttggctgttt

SEQ ID NO: 138674 - DNA, 544 bp, Glycine max
  Clone ID: PAT_MRT3847_9622C.1
gaactagtctcgagttttttttttttttttttggttacagaaaaaaaattaaacattctttgctaaatataatatcaaattttaaaaaagactaaatttttttaaatctatttaacgtgattaatgtataagttttgatgcacaatatacttttatactcaaattttgatgcacaatatacttttatacttttatgcacgggtctaaattagctttaatctagtgatttaatttttatataatgaagactattaagtataacataatttttctaaataaaagtatatcataattaaagcctaattagtagtggaatgaccatttgttaattctaatatgtaatttattaattaattattatatgtagcaaaaagaataaataatgtttaatatcatatattagtaaaaaaaagagtatattttcaagtattattttaaaatacatataaaacatgaaaaaatatatctttagttgatgagcaagataacaattatgaatgagaattttgtaataaaagagaacataaatgagcattctcttatt

SEQ ID NO: 138675 - DNA, 376 bp, Glycine max
  Clone ID: PAT_MRT3847_96230C.1
gccgcatcagagttgttttagctccacaaaagcataagcatactgccaatagaagcttccatgttaattctagcaacttgagtcactcatttcaaaggagtgaaagaactcagcctgtgaaagcttcagagatttcaggggactgggaacaagaaactgagtcaaaaataattgctaactgcaaagacctaagtgctacttcaaagacaatatatgcttcaaacttggcatacagtatggagaaggatgatatggagtttcttttcaaaaattgtggagaaattgttgatatccgcctacatacagatcataacgggcggtttaaaggccatggacatgttgagtttgcaaccacagaagctgcacaaaaagctct

SEQ ID NO: 138676 - DNA, 272 bp, Glycine max
  unsure (1)..(272): unsure at all n locations
  Clone ID: PAT_MRT3847_96231C.1
cgacattgttnatgtgaatgggaaatttgatcccaattctgatattgatgttatcaatttagatctagttttctcatatttggaccagattgaaaaaagaattgataagctaaataaaggcaaagcaaaagattcacaaaaactcaaagaagaagcagaaaagtctgcactggaaaagattcntagaagcgcttatggatggaaaacccgcgcgatctgttaccttaaccgattttgaaaaggatgctgtaaagnatctctgcttgctcacc

SEQ ID NO: 138677 - DNA, 505 bp, Glycine max
  Clone ID: PAT_MRT3847_96232C.1
gcacgaggaaaattataaaattttataagtctcacattctgtctcataaatgtcaaaaacaatgttggagacttaggtggttatcatttcttattgatacttatttatagagtatgaatttaagtcttacacaatcatttacccctattcatatacatatccctagacatttgaacgtagcagtgtatttgtctataattgatgacccaatatgtgcatcaacaattaggataaattttgaattttgataccatcttaaagttgaaatttagatttaacttaacctcaaaattagttcattgaggatcagagtgtgtggatttgtgcgctaactcaatagagtaaactaactcattgattattatatgcattattttaatcatatcattagtctgtgtaggatcttcaacaaaatcaacacttctcaaattgaggtctagacattctaaatgtgaattttgcaaactgttacattagaatttgatttcatcttaaaatttatgtt

SEQ ID NO: 138678 - DNA, 333 bp, Glycine max
  Clone ID: PAT_MRT3847_96233C.1
ggtttttataccacttcagttttagaaaatgtgatcatgtagttataagttttacaaagattttgctaggctttttgaattgagggtaattttcaaaattattaaatgaaaaatactttttaaattaattttcatttagaaataagttttaaaaatggttatgattttataaataaaagttgtaaaattttacatgacttcaattttaagaaaggtgatcttgcaactagaagtagtatatcgatttatgacttttgtttgcaaaatcataattacatttacaacttatttttaaatgagaattaatttgaaaagaaatcccatttgataatt

SEQ ID NO: 138679 - DNA, 379 bp, Glycine max
  Clone ID: PAT_MRT3847_96234C.1
gcttctacaaaacaatacaaataggggagggcttattgtttggtcaggccgctaaacaaagggttacattcatatatcatatatgcatagtggtaaacactcgtgacaaaatacatgactcattaggaagcccaattagggagattttctcagttttggcagtcatagtgattttcaggataaaaaccagaattcaaagttctatggcgagtaggtctcgagatcacactgtatcagctccagtatgaacgttagatctaaccgacttcaggttttctttacctatactgttgcatcctaccaacttagatcctgcagaatttatgttaccactttgaaatcccctgttcaaagggtccaccactttattttttatttt

SEQ ID NO: 138680 - DNA, 1996 bp, Glycine max
  Clone ID: PAT_MRT3847_96235C.1
ggtccggattcccgggtcgacccacgcgtccgcaggctcgaccacaatccaacgtagaaaataaaaatgttaggttaagaggttacatgcggtgatgtggtcggagcagtgaataacactagcactagaatgcaacgttactaacattgggggctatggtggttggttttggttagagttggaacctccgtcttctttcgatgaattcgaggacttaattaacacttcataaacacacatatcatttcgtttcttctcttcattccattctcattcaatccaatgatggctcaccttctccacactccctttatcccttcctcctccgcgctccgccgcgccgcccccattccccaccgcaaaacgaccactccactcgtcgttcgggccaagatccgggagattttcatgccggcactgagctccaccatgacggagggcaaaatcgtctcgtggaccaaatccgaaggcgacaagctctccaagggcgacagcgtggtcgtcgtcgagtccgacaaggccgacatggacgtcgagaccttctacgacggctacctcgccgcaatcgtcgtcgaggaaggcggcgtcgccgccgtcggatcccccatcgcattcctcgccgagaccgaggacgagattcctcaagccaagtccaaagcttcttcctcctcctcttcctcttccgcacccgcacctgcaactgcacctgcaccagcaccgccggtggaatctcaaccggaaaaggttgcggcgcccgtcgcggcggcggttgcagctccggtcgtagcgtccagtcatcctgcttcggagggagggaagaggattgttgcttcaccttatgcgaagaagctcgccaaggagttgaaggtggagttggggaggattgtggggactggaccgatgggaaggattgtggctaaagatgttgaggcatttgcagctgcagggaatgttgcagcagcggtagcaccagcactggggaagagtgcagcacctgccggggtagagttgggatccgtggtgcctttcaccacaatgcagagtgctgtgagtaggaacatggcggagagtttggcggttcccactttcagagttggttacaccatcaccacggatgcactcgatgccttgtacaagaagattaagtcaaagggagtcacaatgacagcgttgcttgctaaggctactgcacttgcacttgttaaacaccctgttatgaactctagttgtagagatggtaatagctttacatataatagcagcatcaatattgcagttgctgtggctatagatggtggactgattacaccagtgcttcaggatgctgataagttggatgtctatctattgtcccaaaaatggaaggagctagtggaaaaagctcgtgcaaagcagttgcaacctcatgagtataattcaggaactttcacgctttccaatttgggtatgtttggagttgacaggtttgatgccatacttccaccaggccagggtgctatcatggctgttggcgcatcaaagcctactgttctggctgataaagatggattcttcagcgtgaagaataaaatgctggtgaatgtaacagctgatcatcgaattatttatggggctgacttggccgctttcctccagacattctcgaaaatcattgaaaacccagaaagcctgacattgtagtcattctgtacttccaacataaaattatctccaccactggatcacgactcgataatgtttgtttagaagctatttgactcaatgccgaacattttgtgatttttttccctcaactttcattgttttatcttttaggagctatcctgaggaccaatgatagattttttgacagggagaaacagctttaaaattgtttacagtgagggatgttctaaacggcaattattttgagaatctacatgtaagcaataagcggttttaacttttaaatgttggatttttcagtaaaaaattactttttactccttgatttggt

SEQ ID NO: 138681 - DNA, 745 bp, Glycine max
  unsure (1)..(745): unsure at all n locations
  Clone ID: PAT_MRT3847_96236C.1
cacgcgtccggaatagacgttagttacattgagcgctatgatggttggagttggaacctccgtcttctttcgatgaattcgaggaaatccttttatacttaattaacacttaacaaacacacaatctcattttgtttctcttcaatccaaacgcattcacattcacattcaatcaatgatggctcagcttctccacactcccttcatcccttcctcctcctccgcgctccgccgcgccgccaccattccccaccgcaaaacgacctctcgcctcgtcgttcgggccaagatccgggagattttcatgccggcactgagctccaccatgaccgagggcaaaatcgtctcctggaccaaatccgaaggcgacaagctctccaagggcgacagcgtcgtcgtcgtcgagtccgacaaggccgacatggacgtcgagaccttctacgacggctacctcgccgccatcgtcgtcgaggaaggcggcgtcgccgcccgtcggatcccccatcgcattccttgccgagaccgaggacgagattcctcaagccaagtccaaagcctcttcttcttcctcttcctcttccgcacctgcaccagcaccagcaccagcaccagcaccagcacaagcnaccgccagtggaatctcaaccggnaaaaaggttgcggcgccagtcgcaagctgcggtttcagctccggtcattgcgtccagtcatcctgcttcggagggagggaagaggactgttgctt

SEQ ID NO: 138682 - DNA, 623 bp, Glycine max
  Clone ID: PAT_MRT3847_96237C.1
ctcccactactcctaaatcctaattctccttcatttcctaaaagcttcgtgtgttgggcatgacggtgtattggtcctactttccttttctctaaagtattcctctgtttgaacacgaagctataagcctacaactataattgttgctagttattcactgataattactataattaacgtaaaacatgttgcactgcgccaacacgtcggggaatctggctgtggctggggacatgacagtgttggaaagacagagggcgaggatgaagtggcaagaagagcaagggtacttttctggcaacagcttcaacggtgttttttcttcttcttctctgcacgttcatgattccattatggtggctgctgactccggttgtgcactcgctgaggtcgtggctcaggcccaggctcgctcaaccaattcttcttcaatttcaaggacttttagttgtccacctgctctggtggagcccgagtccgagtccaagcccaagcccaagcccaccgactcctctgttgggaaagacggtttcaagaagaggaaacctgacaagcctcaccatccgaaggttgttgcagaaaatgataacaaagacaagaggatcaaattcggctctgatgat

SEQ ID NO: 138683 - DNA, 383 bp, Glycine max
  Clone ID: PAT_MRT3847_96238C.1
acaccatccgatgaccattgaaatttcatttttttgatgatttgttatttgttgtgggggaaaaaaaagaaacggtttatttttattgattgggcaaacaaggatgctttttcccccccttttttaaacccgcgaaatttttttttttgcctaagcccgggaaagcttaaacaaaacctcgacctgaataaccttacaacacccctcggaaaaatttgacttatttatccccctttcggcccccctttattgagattttattgaaaacaccttttggcatcctaaaaaacggggggacaccctggggagggtccatcgggtgtggggggtttcattatggagcctttgaacccgctgttttttacactggttttttgtaaaaa

SEQ ID NO: 138684 - DNA, 306 bp, Glycine max
  Clone ID: PAT_MRT3847_96239C.1
gggaaaaagtttcgaaattccatatttttaaatcgggggggggtcaggggagtgaacccccgaaacaaaaaggggctttgacattttttaaaaccaatgattggatcttttggccctttaaaaagggattaggattggtgtacctttttgttttctgcccaaaagggtacccgcaatgatcccgaaggattttttaacaaatcccacaccttttaaaacccttgggggcccccataattagggtccggaacctcactttttataatcttcttacaggacgagccccttaacttaacctttttatgg

SEQ ID NO: 138685 - DNA, 1110 bp, Glycine max
  Clone ID: PAT_MRT3847_9623C.1
gggacgtcaactgtgattgtgaacatcattgattcaaggcaatggaagttttcttgatgaaatgacataaataaaatttctacaaagcccagttaaataaaaatagcttccaaagttatcagatatcaaatctatgatatgatgatccaataacctatgaagcacggacaccccagccctttgtcgtgtccgatgttcgacccacgtccgtgtcagtgtccaacacggacacaacacccatactacgttctatattttggacattacaggtgtcaacgtgtccgtgtccggtgtccgtatcggtgtcaatacttcatagccaataacaagcaaaactgaaaggtagtttcaattgggtataagttgcataaaaaaatttaaaaacatagactactcagtacttgactggagcaagaatatcaagttgggaaccgagcttgtcttcagcaaccttctcggctttcacccttaatttgttgagctgcttctttctctcataaaccaattgtgccttttcctttctcttcttttctagctccctgatggtatcatagtagctccatccaacttcagatgacaacctgcccagtatgcagtacttgtgtcctttctgaagtctcaacaccttcagagcatctggaacaaccattctctttatcttgtcatatggaggaggaattccctcataaaccttcaaacgagcgagagcggcttccccacgctttgtcttgtgtggtatcattccacgaacggtgcgccagaagatcttggagggtgcgcggaagtggatggggccgtgggaaggcttggtgttcatgcgtttgcggaggaacctcaagtacttcattttctgcctcaccagaccaccggagatgcaaatctcttcgcatcgcacgaccaccactttttgtccgttcagcagctcctttgccacaatcgaggcgagccgacccagcatgtggtgccgggcgtccaccaccacgcgcttcgcgcagatccccgaacctgacaccatcttctcttctctttcttttgccaagcacaaaaaccctacttctcttgctttgttggggttgagggttggggatacgagaagtatgatattttggg

SEQ ID NO: 138686 - DNA, 767 bp, Glycine max
  Clone ID: PAT_MRT3847_96240C.1
acacacaaatcaaaaatcaaattcattattgcatgtttaagagataagattatctgactcatgagggaaatattactataaaccaattcatctttattctttcttccctctcacccattccacacggaaacagggtagacgtcagaattttcctttgaactactataaaccaattcttctatttgaggaaaactgttgattgtgctgaccccaaaccctctaatttgcaacggtacgtattgtgatgtgagcgtttgtgatgcgactgtaaccttaattttcaacattggatgatgtttggcacgactattcagaaagtgagaacatgcttggtcgtacattagatacacatgattcgatttaataccataatgtggtctttccaagtacacaatgatactgttaccttcttcaccttcagccccagtggtgattttgagtttcaaattggaacccccataggggacttctggaacaataaagccaaaaatgaagcccaagtgagaggaatgtggagcaatagttacataatcatcatcataaccatgtcttgtcttatggtccaaccattgcggaacatcacttcccggatacacgtatgtaccttgagcatcacgaaatgtagataaatgttggtgtgcaaatttcaccatgttaatttgcgcattcatctcaatggccatgagagaatattcatccaattgcaagcagttccagaagcaaacttttttcttattttccttcctttgttaggaatagaagggaac

SEQ ID NO: 138687 - DNA, 564 bp, Glycine max
  Clone ID: PAT_MRT3847_96241C.1
tctcctaaagaatgctcctatccttatacttgatgaggtgatatttttatttatttaactctatgcatttctatatactctctccatgcttcatttcataataacaatgaggttagattcaatgagaagcacagacacagaacatcatgcagccattggaacctttcttgttgctttttacgctgctgatatctacttgacccattattccaaattgcataccacatcacacgatacagttgcaacattttagctgcagctggcttctgacgtgcttgcaaattgcatggactcagatcagatcgaaacaaccacaatttaaaaccctaatatgatcctatttatgcatgtcttgatttagatattctttgctgctgcaggctaccagtgcccttgatgctgtcagtgagcgattggtccaggatgctctcaaccatctgatgaagggaaggacaacattagtaatagcacatcgattaagcacagtccaaaatgcatatcaaattgcactctgttctgaggggcggattgcagaactaggcacccattttgagttattggcta

SEQ ID NO: 138688 - DNA, 507 bp, Glycine max
  Clone ID: PAT_MRT3847_96242C.1
aactaaaaaattattgatatctatttatacactaacattggggaaaaggaagaacaatgaacacaaacacacaggacacccgaacatccaaattggtaaacttcaacatttttaataaaccttacatgtagaaggggaacacaatcggttaacttaaatccctaagtcacaaaagcttttttttgttactttaaccttcaagccatgttttatttgaaggacaatggaaacttttggggattttatttggccttccaccaaggggacattataattcgataataaaaaaacaggaaccatttttatttaaagggagcttatgtccttacccaaacaactttttggtcctgggttgaatgcaatgaacttgtaaaagggtatgtgaataatccctccttgcttaaaaatccacctttctggtttaaacttaaagcaatcttcgccccatatttcctttgctcttcccatggggtataaagaaatatagatcatggtgtttgaatttat

SEQ ID NO: 138689 - DNA, 474 bp, Glycine max
  Clone ID: PAT_MRT3847_96243C.1
ggattttaaaccagtatgtgcatttagtaggtcttcatatttggtttcagagccttgttttatccttagaatggtaacaccaaaaccagaatctaaaagtattttagtaataaataagtttttaagaactatctctgttcattgagtagaatatgtggctatgaattgatacacttagaaaatctatttccatattaccctggaatagataatggtttgtagaacttgaaaataatcatatcagcatacaccatggttaaaatataccattatttagtttaaccatttaaaattttactgaaagatgagtttgcaactagagaaaatgaaagggaaagaaattactgtaactttatagttcatttctctacacgtttcacattttcaggcctcatttattttccaagcatatgcattgaaatcctctcttgtgataaaatgtcaatattatggctctcattttaaatagaaact

SEQ ID NO: 138690 - DNA, 244 bp, Glycine max
  Clone ID: PAT_MRT3847_96244C.1
ctccaaccaaaattggcatatacttccataaaaccctgcaaatttaaaaggccatgtttttccataaacccaaaaaagcttactaggaacaagcccgttttaacatccaaaagggttggagcttacacaattggggggttaaagcaaaccgggttttaaaactcaaggtgaagaaaagaggggcctaattcagcggagatataaggcctttttaaggcgggctcccccttccgggggggggggg

SEQ ID NO: 138691 - DNA, 406 bp, Glycine max
  Clone ID: PAT_MRT3847_96245C.1
caaggcttggaggctcagtatttgcttgagagggttgagtgcgtcaaggcttggcaaactcaaccctctcactgctttgcttgagagggttgagtttgtcaagcatagcagtgaaggtgagccatgccaattgtgacgactcattggagacggaattccacgttgacgtgaaaaacgaaggctcaatggatgggacccacacccttctcatattctcgaaaccacccccgggaaaatggtcacacattaaacagtcggtgaccttgcacaagacccatgttcctgctggctccaagcatcgacttaatgttaatgttcattcctgcaaacacttgtccgttgtggaccagtttggggttcgaagaatcccaaccggtgaacatgaactccacattggcgatctcaa

SEQ ID NO: 138692 - DNA, 181 bp, Glycine max
  Clone ID: PAT_MRT3847_96246C.1
aaattatggcatggggaaaataatgaaactggaaatcaaacaaccaaatccttcatttaaatttttgggctttaaaagaaaggacgcaccggttgatgaggctttcctattttgcttgcccacctttttcttgtatggtggttcaccctccaaatagtaccattttgtccttttttatgca

SEQ ID NO: 138693 - DNA, 297 bp, Glycine max
  Clone ID: PAT_MRT3847_96247C.1
atggaatttcttttcttagtcatctcttttaccattctggggggggttgctattgcaggagggagccctatccatccattgctacctgacgcaaattattgggaagctatttggccaaacactcccattcccactgcactgctagagcttttaaaacctctccctgcatgtgttgaaatcgatgaactccctaagcaaattgatgatacacagtacccaaaaacattcttctataaagaagacctttatccttgctaaacattgaatgtacaatttaccaaccgttcctatgcacaa

SEQ ID NO: 138694 - DNA, 776 bp, Glycine max
  unsure (1)..(776): unsure at all n locations
  Clone ID: PAT_MRT3847_96248C.1
accttactcccaaggattagagagatttatcgaagaacaaaagcacagccagtatggtgcactgtgtgatcctaccatatccaagtcaaggccacattaaccccatgcatcagttctccaagctcttgcaactacaaggggtgagaataacactagtcaccaccctttcctatagcaagaacttgcaaaacatacctgcttctattgcacttgaaaccatttctgatggttttgacaatggtggtcttgcagaggcagggagctacaagacctacttggaacgtttttggcaagtaggggcaaagactcttgctgagcttcttgagaaacttggtagatcaggtaaccctgttgattgtgttatttatgattccttcttcccttgggttcttgatgttgcaaagggatttgggatagttggagctgtttttctcactcaaaatatgttcgtcaatagtatatactaccatgtacagcaagggaagttgcgtgttcccctcacaaaaaatgagatttcccttcctttgttgcccaaacttcaacttgaagacatgccctcattcctctcctccactgatggggaggaatttagttttgctcgatttggcagtggctcagntctccaatgtcgacaaggctgattggatcctttgcaattcattctacgagttggaaaaagaggtaaataattggacattgaagatttggcctaaatttagactataggaccatgcataacatctatggttttaaacaagcgacttacagatgataat

SEQ ID NO: 138695 - DNA, 128 bp, Glycine max
  Clone ID: PAT_MRT3847_96249C.1
aagaaattgcgtgcccttcaactttattatgtaactagatatgtatattattaccaagtatatccaactttctctgttacaggaatttgagactttccatcaatttattttttgccccttccatttgt

SEQ ID NO: 138696 - DNA, 236 bp, Glycine max
  Clone ID: PAT_MRT3847_9624C.1
attattttttttttttgtttatttttttttatctttttgtttgtttgtttgtttttttggaaaaagagagggggaaatttttattggaaaaaacaaaatgttgctgcaaccgaaggcttaaaaaacaaaaggtgaggtgggcatcaaaaatatgcaggaatccacgacccccgaccccaagaggcggtcacgaagacgaacacgaggaatatcccggtaattaaagaacggaacct

SEQ ID NO: 138697 - DNA, 403 bp, Glycine max
  Clone ID: PAT_MRT3847_96250C.1
ttgttttggttttttttatctttttttttttttttttttctttttttttttttttttttttttttttttcggaaagaaaaacattttttccctaaaaattaagcaaacccaaacatggtttaactcacctttaatttggccttcaaagggaaaatgcccttcccataaagggggccaattccattccattaaatttccccacccaataagccttttctccccgggtccccactttcccttgaacaaaagttttgggcaaaattcctccccctggggcgggctcttggctttttccccaatttttttggctttttccccccgggtcctcccttgggggggggggtggtcccccgccccccctggggcccgggcttttttgaaggcttgggcccccaagggtgcc

SEQ ID NO: 138698 - DNA, 214 bp, Glycine max
  Clone ID: PAT_MRT3847_96251C.1
taagtaaaatttatggggggaccatggggtattttgttgatatacggacacatattatgtccaaagttctaaccactcttaaagacacatcacctgatataaactgtcaatggcttttcttgccatattccttttccatacgatcgcatgtgcctctgacttattaatggtcttaaagttgcaccatcaattctttaacgttcacatatataag

SEQ ID NO: 138699 - DNA, 259 bp, Glycine max
  Clone ID: PAT_MRT3847_96252C.1
ggagcgcggcggcaagatggcagtgcaaatatccaagaagaggaagtttgtcgctgatggcatcttcaaagctgaactgaatgagtttcttactcgggagctggctgaagatggctactctggagttgaggtgcgagttacaccaaccaggacagaaatcattatcttagccaccagaacacagaatgttcttggtgagaagggccggcggattcgggaactgactgctgtagttcagaagaggtttggctttccagag

SEQ ID NO: 138700 - DNA, 752 bp, Glycine max
  unsure (1)..(752): unsure at all n locations
  Clone ID: PAT_MRT3847_96253C.1
cgagaaattggagaaagccgacattcaatgtaaaaaaaaaaaaaaagctacaaagggagtgtaaatagtagctccctaacgcacaatcgaatacaaacacttcccatagaggcgaaagcgaccttctttctctgcagttttggagattgaacactgaacaggaaaggaggcaatattatctccgttttcttcttcttccaccatttttatctctctctcattcagggtagtgaggtggttgttcatggctctttcctccaaacatccacacctgttcaaccatattaggacttttgtgaatgcgaaggtcaaatgggtccgagatccatatcttgataatgcagtcctgaaagagaaagatcttaaacagacaatttccctcaagaaccaaatcatttcatctccttccaaatccctctccatctatgctgcttctcaacttaaagcttctctctaccttcccactacaactaccaaattcattgacaaatatcattgcattntcacacaattccaacctggtcctggtcttcctccagttgtcaagctcactcctcaagccttgtccctccacanagaagaaatggctgtttataaaactcccattaatcgtgaagacactggtcagaggctcgcaaggcttctaatgcttgctggcatggaaaaaaatgcctcttatgtatttgagaagctaaatgggaatggggacttctcatggatatgtgacaccccttttggctgataccctgata

SEQ ID NO: 138701 - DNA, 277 bp, Glycine max
  Clone ID: PAT_MRT3847_96254C.1
cgagggcagagtgaggacaggcgaacccgatgcatggccaacaaagagaaggaggaaccgtgagctagaactaggtacgagggggatgcagatctacagcagactttaacagggaaaacgatgaccggagagggcaaagctaagaaccaaagaaacggcaaggccgagatcgagagacaaggagggaagccaatcagaccagcaacgtctcacgatgaggcggaaagcaactagaggacaggcgcacccgcggcaaagacatcaaagagaaggaatg

SEQ ID NO: 138702 - DNA, 524 bp, Glycine max
  Clone ID: PAT_MRT3847_96255C.1
tcggttactgttttaccctggagctaggatccatagattcccatatctacatgtcacttccttacttacatgtctatcctctttggtctcagaattgtctactctcttcttataattttgagtgttaaaacccccacaaaatcccataaaacttccacagtttttttaactcttcttcatcttcttctacactctcaggcctaaacgctcagagcaaaacaataaccaatagccagatcaaacacacaaagagcataacaaaacaataaagaacaataaagaggaaaaccaagaagaacacgaggaaggagaaagagaaagagtgtttgggagggaagtcgtgcgcaaatctggtggcgtatgggttggcgacatgtggtgacggaacggaggagatggtgctggttggtgtccttggctcaagtgcgcagatctggtgtgcatggctcgtgagcgcggtgatggtgccggttggtgccgcgcgtgcgcggtggaggttatgcaggcggcggtgtgacgcggag

SEQ ID NO: 138703 - DNA, 553 bp, Glycine max
  Clone ID: PAT_MRT3847_96256C.1
ctattgtgaataaaattgtgttgcttgtattgtatgtgtttaatgtttgactcacaaacaccacagaagacttgcttcagatgaataatatatgatgagttatgcagatccaaagcaaaatagaaagactttggatcagcttacaccagacagactacttattcagttgcaagactctcgtgttagttgatccaaagtctttcttcaattcgagtttttgttctctataataatcctatagcagaactgtgaagatatatgtggttattatcccaaaaagaagtaaaaatagaaacaccctgatatcaaatgccaccgtttattggtttgattgagaaacttggtctaaaaatttattaaactaatgtctcccattatccataaatacctttcaatagagtccttctttcacctgcagtgtctcaaccgtgaacttggaagttggatcccctgcacatttaaaggagctaaggatttggaaattattaaattatgttaaaggataagttatcatgcataagaataaataacaaatgtatttacccgttactag

SEQ ID NO: 138704 - DNA, 1648 bp, Glycine max
  Clone ID: PAT_MRT3847_96257C.1
tcctgcaagtggtccgttgtccggccaagcaggtattaatatacctgagtaccctaccaggagaaggtccttcccctgtttacactgttgctggtaggattattgattttgagaaaagatttccaaaagaaatttctcttggcgaagatatagaagcacatgggttttggttaatggatgtaaacacaaattctatggcaatgcaatctgacgatatccaaggtttatgaaaacacacacattctttcctttgttaactgtgctgactatgtgaatgcatttgtgcagctactgctgttcgaggcatgaaagcctgggaaaaaatgcgtggaggagcttcaaaacttatggggaagtatgctgtccaaacttgtggatattatccagaggtgcaagtgggacccaaaggtcatagagtacgaaattgtcaagctttcaaacaccagataagggatgggcaacgtgcatggtagggggcaacaattgatgatttggcacctccagtatatgtctatcacatccgagatgatcaacataggaagcctttggtaaatgagttgaaaaggtactatggtatgctgcctgcagtggttgagctatttgcccaggctggggcaccagttgataagaattatgcttctatgatgagggaagatgtcgtaatccctgaaatggatgaggaaaagttggttgtttaaagcaatggtttgattgacttcatatgcatggaagaggcatttgggcaatggaagagtctaaatatgaaaaatttaaggtttaatttctttcaaattataacaggttgtatttgtatatatgctaagatagaggacctgtctaatgttggtaattagacatataataggatgaaacaagagcattgggccactaaactatctcatgttctattggcaatataaggttgcagtattgattatatggaacaaatttacttttggcactcactgcatcatcacctaatttaaaaggtactatgaaatgctgcggacagtggttgaggtttttgcccaggctgggtcttcatccctctaccgatctcattcatcaactaagttaagtatagtctgatctgcttttaatgagtaaaagttggttgtttaaagatttcgtttgattgacttcaaatgcatggaagagccattagggcaatttagtagcctctggattacaaatttaagagggatggtcgacaatgcactagataaggtggaaaaagtgttttacttgccaagcatattaggaagaggaagaaagtgtaaaaggaacttcaaaaattggcaacagtaaagtagttcctgtgctcgagctctatcagattttcagaacaggaatccgtttcgccatgaagacagtctccagtggaaagtttcttcaagaaactgtttttacaaatgaagaaacccagaaagaaccctccgttggaaatgacctaatatcattcaagtagagttgtgaaaaattgttaaataaaaaaagaacaatttctttgcttgaatcttttaatcgaagaagtcttttaataaagtaccctacaatacaaactatggatgtgctagtttgtgttatcattctattcatgattttgatttatctggtgatcggattgtaatcagaacaggttttcacc

SEQ ID NO: 138705 - DNA, 1673 bp, Glycine max
  Clone ID: PAT_MRT3847_96258C.1
gatcaagtgacacacgatacgaacaaaagctgatcaatccagtcaacgtaagagagttccactgtctttccacttccacaattttcatctcccttggtgtttggttcctcttaaaatctatactaatctagttagttttttcttactctcctcaaattgtgtatgcaacaaaaattttgtagaatggaggaagttcaagagtctcaaacccaatcatcgctcggtcaagaagaggaaaatgaagtgattactgaaagttcagcatttgttaagggggaaccggcaccagaattcagtagtaaccccccaaaagttgattctgaagttgaggtccttcatgagaaggtcagcaaacaaatcattaaggaaggtcatggccagaaaccttccaaatattcaacttgcttcttccattacagggcgtgggctgagaaatcacaacacaagtttgaagacacatggcaggagcaacggccaattgagatggtcttaggaaaagaaaagaaagaaatgactgggttgggcattggtgtggcaagcatgaaagctggggagcgggcgttggtgcgtgtgggctgggaattaggatatggagaggaaggaagcttctcttttccaaatgttccacccaaggcagatttagtttatgaagttgagctcattggctttgatgaaaccaaagaaggcaaagctcgcagtgatatgactgtggaagaaaggattggtgcagcagaccggagaaagatggatggaaatgctttgtatcaggaagaaaaactagaggaggctatgcaacagtatgaaatggccatagcatatatgggagatgacttcatgttccagggctgcgaaagacgacagaagggggctctggcagtaaagaatccatgccatcttaacatggcagcctgtttgattaagctgaaccgctacgaagaagccataggacaatgcagcattgtactgggtgaggatgagaacaatgtgaaggcattatttaggcgaggtaaggctagagcagcacttgggcaaacggatactgccagggaagattttctaaaggcaagtaaatatgcccctcaagacaaagcaattgctaaagaattgagattgcttgctgaacatgacaaggctgtttaccaaaagcagaaagagatatataaaggaatatttggaccaaggcctcaaccagttcctaagccaagaaattggctcatacttatttggcagtggttgctttcagtattctatggccttgtcacgctcttcaagcgtcaaaggcataaatctgactaaacaagaagaccattgctgagttgagttgacaattatttacgtgcatcctacgaaaggccacgtcttgtgctactgaggaaataatcatacttctactattttgctttgcttgtggaacaatcaaacgttgaaaaagcagtgctgatttctctcttaggagtcatctttgacaatgctatcaatcgcttatgttgctttcaaatagagtttggtagtttgtctagaaggaacttgttctttaatttaatctctagtaattgaaatgggaaatgatcagtgttgctgaaatcagatagttattttcaaaaagatttgtagtgtgcctttgaaatttgaattaattcatgatcgggtagatctaatgcatggatatttcc

SEQ ID NO: 138706 - DNA, 843 bp, Glycine max
  Clone ID: PAT_MRT3847_96259C.1
gaccaacgcgtccgtccacgcgtccgacgacagaagggctccgatcaagtgacacacgatacgaacaaaagctgatccatccagtcaacaatggaggaagttcaagagtctcaaacccaatcatcgctcggtcaagaagaggaaaatgaagtgattactgaaagttcagcatttgttaagggggaaccggcaccagaattcagtagtaaccccccaaaagttgattctgaagttgaggtccttcatgagaaggtcagcaaacaaatcattaaggaaggtcatggccagaaaccttccaaatattcaacttgcttctgtaagtaccacactcaatcttagtctcactctgtcatgtttgcaatttagtgtgaaatccaatgatgccacgatgttttgttgcatgtttcctacttgtaaaacgctcttacataatttaagctgcaattgtgtgtataaaaaaaatatttgaacacaattgaacctatccctgttaaactacttgtgctttcaccataaattcgaggggtaagtcagacagccccagatttgagtattgctgtaatggaggggaatttgagacatgctaaagtactatcaaattatgtgatgtcagtattttctttttccttggaaaggcttttattgtgtctagtaaggtatagcaacttaagctataatttaagcaatatatgagaatggtttgatgtgaaaatgtaaaatgtttggacatctaatgttttttcaacataagaaaaaaatcctttgttgaggctgagtggggataaaagctgggaggaccaaaattatatctggaagtagttcctaatatctactactgtacta

SEQ ID NO: 138707 - DNA, 425 bp, Glycine max
  Clone ID: PAT_MRT3847_9625C.1
tgccagagtcctgtcacctcacccgctcatgagcattgctcatggtcagtgttcctaagttctcctcaccggtcgttacgaaaatcctcttcgagactcccagtgctcatctgccctccacgcctaagccaccctcacaatctcactaataaccgcagtcaaggcagcaatcacagacttactagtgttcaggataccttgttccgcaacaactacgatgctaatggcctctccacctgcaactggtgcagtttcagcggtcaccacaggacccatagcaataaacatctctggtttcagaatatggctaatcttcgttgtcttggtaaccaactgtgtcaagttctgagccaatgttgtacaggtccaactcaccctactaactgggatggcccgttggcaatcccatcaaaggagcaagaaag

SEQ ID NO: 138708 - DNA, 1458 bp, Glycine max
  unsure (1)..(1458): unsure at all n locations
  Clone ID: PAT_MRT3847_96260C.1
cccacgcgtccgcccacgcgtccgcccacgcgtccgaagaaagaaatgactgggttgggcattggtgtggcaagcatgaaagctggggagcgtgcgttggtgcgtgtgggctgggaattaggatatggagaggaaggaagcttctcttttccaaatgttccacccaaggcagatttagtttatgaagttgagctcattggctttgatgaaacaaaagaagtaagttgccattaaattatggatggctgtggacttggttagatgcttatagcacctgatttcacaggggaaagctcgcagtgatatgactgtggaggaaagaattggtgcagcagaccggagaaagatggatggaaatgctttgtatcaggaagaaaaactagaggaggctatgcaacagccattgcatatatgggagatgacttcatgttccagttgtttgggaagtatagagatatggctctggcagtaaagaatccatgccatcttaacatggcagcctgtttgattaagctgaaccgctacgaagaagccataggacaatgcagcattgtgagtatcagactttaactgatcaattcagcataaaaggctttctgtttgttntaattnttgtagctatacctcttattgaggttcctttaaatagtggtaaaattatctnttctgcaagttcctttagtttttgngttgtgaatggaatataattataactagccattatattctgggcatatgctgcagtagctttgttatgcaataagataataacataatactctctcagaaaacaaattaagccaattcgctttgctttttaactaaattgtattgtgaatttatgatgcaatgtgaaactatgattttctggctgatattgaaataatcttttccacattatagtacaaccatgaaagtcaagtcattggtgatccacttgtgtttaactttatgatggaacttgcaggtactgggtgaggatgagaacaatgtgaaggcattatttaggcgaggtaaggctagagcagcacttgggcaaacggatactgccagggaagattttctaaaggcaagtaaatatgcccctcaagacaaagcaattgctaaagaattgagattgcttgctgaacatgacaaggctgtttaccaaaagcagaaagagatatataaaggaatatttggaccaaggcctcaaccagttcctaagccaagaaattggctcatacttatttggcagtggttgctttcagtattctatggccttgtcacgctcttcaagcgtcaaaggcataaatctgactaaacaagaagaccattgctgagttgagttgacaattatttacgtgcatcctacgaaaggccacgtcttgtgctactgaggaaataatcatacttctactattttgctttgcttgtggaacaatcaaacgttgaaaaagcagtgctgatttctctctt

SEQ ID NO: 138709 - DNA, 176 bp, Glycine max
  Clone ID: PAT_MRT3847_96261C.1
cctcgagccgaatcggctcgagtacggctgcgagaagacgacagatacggcatcttgtgtcatttactcacttgacaaactctgcttcatctgacaaaactgcaacaacactgcataaagccactgagaatcagatgggcatggatcataagatcctgtccatcaatgtgcctcat

SEQ ID NO: 138710 - DNA, 201 bp, Glycine max
  unsure (1)..(201): unsure at all n locations
  Clone ID: PAT_MRT3847_96262C.1
gtacaccaacctatgcacagaagattagaccgtttttgttttnnnnttgctttccagtatgcgggagaaagcacttattactagcaattagatgattaggttgttnnnntacgtacacaagcaaccacatgttgaccatttactttcccaacactcatcgacaacggtcttggcaccatcatagactatgggatataacga

SEQ ID NO: 138711 - DNA, 114 bp, Glycine max
  Clone ID: PAT_MRT3847_96263C.1
taaaaactcagtatcgagttctttgtcccacaaaagatggggttcactccgacaagtagtggaagatgcttgctcataatagcgcctctggttgtgccatggtgttggaggcta

SEQ ID NO: 138712 - DNA, 249 bp, Glycine max
  unsure (1)..(249): unsure at all n locations
  Clone ID: PAT_MRT3847_96264C.1
ccaccagagcccaacccgcgcccagagagaggggaaggagaagagggacacaaccagcggcggcccaccacgacgcacaacgaaccccgagaacagcgnagaacaggaagccgaaaaggccaacacaagcaacgacggcgcnacagaacacgcggaggggggagggaaccagcttcttggagggccacccgtgaacagggcgggcagcgagagcggggggccggacaaggagcccccccccagagggaa

SEQ ID NO: 138713 - DNA, 187 bp, Glycine max
  Clone ID: PAT_MRT3847_96265C.1
ctgtgttgcattcttttttttttttaaaaaaaaactggtttaaattcctcccgggaaaaacttgtgccctatttccagaaaagaaggggcaatacctttgaaatccttcaacgcacccaacaagggcatatcaccatcccttgcgggggaaaatacaaatcctggtaattgaagaatttaccccctc

SEQ ID NO: 138714 - DNA, 304 bp, Glycine max
  unsure (1)..(304): unsure at all n locations
  Clone ID: PAT_MRT3847_96266C.1
ancnannacacnnacnnaancacanaatacngcncnaatcacgcncnncccacncaacacaancncnncaacacaacanaaccaaaacacaanaaaaacaacaccaagacaancacaagnaancaaananaanaaanncaaaccaactnnnaaanagatacaagnnanacagcaangaanaaaaannananaaaaacagnaggaaatagagnacaaatactgcnagaagataancancatgagnagaannagcaaacntngacagngaacgcancncagaacnnnangncnaagaccangggag

SEQ ID NO: 138715 - DNA, 301 bp, Glycine max
  unsure (1)..(301): unsure at all n locations
  Clone ID: PAT_MRT3847_96267C.1
cccttatttgatcttggagttcggattctgtgtcacaagaaagntacatganacgccaagtggacgccnangaccancagctaanggtgttatancgagtctatgttgccctcatcattcagcaactctcaagttttncncccntnganccttangcctntgttgncnancctgcgtgagaccatggtngcctgccttcngttcgnnnggttgtttggntgntatatagtnnccgcaantgcttangggtngtgtntagtncngttggatgtggnagaaaaagtgtttgaggctatagngt

SEQ ID NO: 138716 - DNA, 943 bp, Glycine max
  Clone ID: PAT_MRT3847_96268C.1
taatcacaacagtttataattaattaatatatcaataaactatcaattagcgacatttattaatttattaattaatgcagctaacttagatgcaccatgtatctgatacaattctgctttgtctcatcccccaaaccccaactggctcatacaaataaatacaagaatagctatatcagaatcagatgaaattattttggttgaatatacaaacatcttaacaggagttcctcctatgcaaaccttaacattagaactaaaagcctcaaaatcaaaatatggcactacttattgtatcttaagagactgagagaaagcaccaaacatgccttcttgattctgtcttgaggactaggtgctactattggatgatgagatgttgcttttggcttgagaggaagcagctgaggcattactctttacctgtgaagtctgtgtggagctggagtcggtgaagaaaacaacgttctcatggttgtcaacaaaggcttggagggtccttggaattggaggcaaagtcacatccaagaacccttcaaggatttgaaccacctgacccatggaaggcctatgagattcatcatcttggacacaccatgaagctactttgatgactctagtgacctcttcaatgtcagcattttcctccaacctagggtccaaaaggcttagcacattccctccttggtgcatcatgtttgcagcaatggtaggaaagaatctcacttggccatcttccgatgcctcggagttcctcctacccgacacaaactcaaaaagcatcattccatagctgtagacatcagctttggcagtgatagccacacctgaaatccactcaggagcaagatagcctcttgtccctctcatggtagtgaggaccctgctgaagtcccttccaacaagctttgcaagaccaaaatctgccaccctcgagccgaat

SEQ ID NO: 138717 - DNA, 1436 bp, Glycine max
  Clone ID: PAT_MRT3847_96269C.1
ccttgctcctgttgttgtgctgacaactggtgttcccctggtggcagtattttgacggtggttgcgcctgtcgttgaccgctggccggggctccaatgggcctccgttgcgttctttctccgccctcgcgcttgccctttccgccagtgaagcctttgaatctgaaaatatttctgagaatcttgatagtggaaatatagagacaagaagtttggctatgttgaagacctaagtcttcgaccacgcgtccggggaaagattacagatatttttgcaatcctcagacttgtatgatccagaagaagttcttgacttgattgaaggatcagaattatggttagaaaaggctattctgtatagaagactggggcaggagactttggtcctccaaattttggctttgaaactggaagacagtgaagctgctgagcaatattgtgctgagataggaagagctgatgcatatatgcagttgcttgaaatgtatttggatccacaagatgataaggatcccatgtttactgctgctgttcgccttctgcataatcatggagaatcattagatccattgcaagttttagagaaactgtctccagatatgccacttcaacttgcttctgacactttactaagaatgttcagggccagagttcatcatcatcgtcaaggacagattgtgcataatttatctcgtgccgtagacattgatgcaagattgtcaagattggaggagaggtcaaggaatgtacaaattaatgatgagagcctctgtgactcctgtgatgcacgtcttggtacgaagctatttgcaatgtattatgatgtcagtctacataagtaacttaaaacaccgccgtcaaggtgagtcagtgtctgtctcaggtcgcaattttaaggaagacatcctaattaaaccgggttggctcgtgagtcgttgatctcgaacctacgatgttgttaggtagatattgcttggttgaatcccagaagttgccattccctgtaccaaatccgaattcattcaaaattgggaaaaaaggaaatgcgtcaatgatcactcggtttacatagttaacttaaaggttttaagtcaacgtcaggtttgacacaatggagaagcaactaggcagttgctttggcatttttgtcttgaaatgtgttttttttcgttcaacgtggtctaaacactttgccaaacacagcctaagtatcagcttctaacccccacactgaaagagtaaataattattgcccgttgagtgtactctactgtaaatgtctgctgagttctacattgtactctccataccccccccccccccccccaccctttcgcaatttgctttgtatatttgataatgtacaatgtaaatttttgcacataataacgagctcattcttccgttgtagttcagtaaaaaaaaaaaaaagggcgg

SEQ ID NO: 138718 - DNA, 1677 bp, Glycine max
  Clone ID: PAT_MRT3847_9626C.1
tttcactctagtttctctttctgtttcacgggttgcaacagaaccaacaagtttcaggaaggagatgcaaggagaacatgacacgtctccttaaacctgctggtcaaaggataatcttgatcggtcaatggtgaaaacagacccaagcctgtaaactgtaaagtgtttttgtaacagtttcactttcatgttgatataaaaaagaaccaaaatgatgaatcagccgtgagttctgttccgctagggttttgaaagagcaaccagtgtacgacggcgatggcgaaggcccaacaagcgcttcctgaggagctgatagtggagattctgtcatgggttccggtgaagcctctgatgcgtttcaagtgcgtttccaaaacttggaactccctcatcttccaccccaccttcgtgaaattgcaccttcaaaggtcatccacaaacacccacgtcctgttaacgcccgaagaagaagaagatccccccgacgatgatgaaaaagtaaccgacggtcttcaaagagccgccacaccttgctccgtacttcgtttgcttgaggagaatccatcacccgctcctcatgatgatcattaccaattcaatgatgtttactctttcgtaggttcctgcaatggcttgatttgcttgcgtttttttactgttagtggcagaggtaattttgaatactgggtacgattttggaacccagccacaaggatcacgtcccaagaatctccacacttacgtctccgtcgacgcgattatatgcttttagaggattatgtgaagtttgggtttggttacgatgatgtgagtgacacttacaaggtggtggcacttgtcttcaatactaaatcgcaaaattgggaggtgaaagttcactgtatgggagatacttgttggataaacattttaacttgccctgcttttcccattagtcggaggttactcgatggacatcttgtcagtggcaccgttaactggttagcatttcgcatgttgggtattgattatgaatggaacaatgtcactgtccatcaattagtaattttttcatatgatctaaagaaggagacttttaaatatttgtcgatgcctgatggtgtttctcaagttcctgattatcctcctaagattggggttttgaagggttgcctgtctctttcctacactcacaggagaagaacccatttcgttgtttggctaatgaggcaatttggagttgaaaaatcctggactcggttgttgaatgtaagttatctgaattttcaactctctccaactaacgaattagattggttgccgaccacgcctttgtgcatctctgaaaatgatgatatgatgttgctggcaaactgcgtgtatgatgaatttgttctccataatcgaagagataatagaatagacagtattggaagtttcgacggcaaagtgccaatgtgctcctatgattatgttccaagcttggttttgccatattgtaattaagctaccttgcacttgcttcctgtatgaatgtaaattatgttaatggtttcagaaccttggctatttaatgtatggacatgacagagagtgtgaatacttttggtgtttccttagtttgattactttgttggatgattctaaaaaaaaaaaattggctattgctaattgtgtgtctgctttgtttttggatgc

SEQ ID NO: 138719 - DNA, 254 bp, Glycine max
  Clone ID: PAT_MRT3847_96270C.1
gccaaaagaagaccgaaggggaacgtggaagaaattatttagcgtcaaccgtcgcactcgggccttcgttcagcacagtttcgcaatccctttcgaagaaacgcgttttgtcgtccctttctgagcgtgggcctttgtttcggacttggaccccacattcgcgcacattcgcaccacagtatatcccccctttcgatgaattcgcgtgccctttcacagtttccaccaggacctagtcccaaaggttcacctta

SEQ ID NO: 138720 - DNA, 357 bp, Glycine max
  Clone ID: PAT_MRT3847_96271C.1
ttttttttttttttttttttttttttttttttttttttaaaagcaaaaattttttttttatttacaagggaaagaacactccataaaaaatttctatggggctttatatgctactggtctttacatcctacaaagatgtgagattaaactaaaatttccaggtcaaagaatgaaacatttcattctagccccatataaacatttcatataatctgaatgtcaaaaggcaaatgcaaccttgttaccacttccaatcctttgttagaaaaaggtcggggactggttcgcggttctttcgcggtctggtttttaagcagtcaccggaaagacacccaagatgacacctgtccccaggtc

SEQ ID NO: 138721 - DNA, 320 bp, Glycine max
  Clone ID: PAT_MRT3847_96272C.1
tccacgcgttcgcggagctcataaaaaaaagaaacctaatcgccgaccgcgtctaaaggtcgttgttgttctgtgaaatagccttttttttttaccgacctgtgatacttctgtgagtaataacaataactgatgtgtgttacctcttttaggtaacgcagctgcggttccttattctctataaatgttaagccgtatgaagatagcccatgcgcacgctgctgcttttggggtcactggggctttaatgctgagcacctttttaatgctacacattagattgatgattctcagatgagtgatttcgatgttttctatga

SEQ ID NO: 138722 - DNA, 265 bp, Glycine max
  Clone ID: PAT_MRT3847_96273C.1
ctcgagcgaatcggctcgagcaaatcccgagcagtaccaagactagaagacatcatattaacttttgattcaacaacaattgaacgacccaaattcgaggatttgaatgagcattgatttggttatcatgccctttctgctgtaagataaaaaaaaaaaaagaaaagaaagaaaaaagggggggcaccgacttggacagatgaggaccctggatttaaagacggaggaggtaactacggtggaaaagtgtgtcccaaaggggggg

SEQ ID NO: 138723 - DNA, 271 bp, Glycine max
  Clone ID: PAT_MRT3847_96274C.1
ttttccggttttttaggcacagaacatgacggataggagccttcccttggaggaatccaaaaccatgcgcctcccatgatgcccatagatgaagaaatctttcctaaggtcgctcaccactatggtgaggactggcccgattgctgtgacgaggaggttggaatttctgaagcccacccgatttcattgggatatcaatcgggccactggatggaccgccactccaatgcaggacgctcagggtacaactgatcggttcattcccctctca

SEQ ID NO: 138724 - DNA, 380 bp, Glycine max
  Clone ID: PAT_MRT3847_96275C.1
ccaacaaggaaaggaactggtgtcctttggccaactttgcaaatggggccctttttaccaggaggaaacaaaccccacccaacaacccccaccataaattaatcttttttggaccctcccttctttccagccaaggttttatttttcccaaaacaaaacctttctgagttctgatctgtatgaccttttcaggtcaaattttactatgactttgtagacgtttacaataaacagggttttttttcccgggggaaataaagaccccccagttaccacaagaaaatcaaagggtccttttcctgacggatcaactgcggccatccggctttgcaaatctaagtctcggttcagctggaaactactttcgccaggtcacaaaa

SEQ ID NO: 138725 - DNA, 133 bp, Glycine max
  Clone ID: PAT_MRT3847_96276C.1
gccactgggaagaacataaaatcggtaaactgcttctttttttttaatagccacagaattatggtgctggatcaattaactcccctttatggaagaagaatgccactaatttttcaaaacaataccactataa

SEQ ID NO: 138726 - DNA, 552 bp, Glycine max
  Clone ID: PAT_MRT3847_96277C.1
ataccagaattagggtttctggtagcacctgcttttgagtttttagctctaatgaggaagaaggaaaaatgtacatgtgcagttgttctattacagcatagcctagtcacattgggagggaaagagagtgaaggagcttccctcagcccattcatggagataacgaaagattgggttgctgaattaactgctagctcacacattcattcatacaatagtattcaattagggtaatattgtgtgaatgaagcgggagtatatagtatctatattgcaaccctctttctctgtgcttggactgaaaggagctccttctttttctgctccctccatttgtatcatccatgtctcaaagggctttatgcatattgtctaaagcttaatctacataatatgatgctcagcacaaaaaaaggttatgctactgatgaaagacttaaggaggtgtctatggtacttgagatattttctcacattagagcatctataatagaacaactctctatagttgcttccaataggacccccttgtatacattactcatttttact

SEQ ID NO: 138727 - DNA, 181 bp, Glycine max
  Clone ID: PAT_MRT3847_96278C.1
taatcaaaaacgcctcgcataaattaaaatagaatgtacgcgtgatcataaattacatagcgcccaggaccatcagcaaagctgaaacttacagtctttcagccgagagtccttaagaattaagagactcatgtaatcgagattgacttactataaagaatattattgcgtgagggcaatc

SEQ ID NO: 138728 - DNA, 247 bp, Glycine max
  unsure (1)..(247): unsure at all n locations
  Clone ID: PAT_MRT3847_96279C.1
ctgccttagttgcaatcacccctagcccatcttaattgcagcttctttgggctgcgtaacagtctcaagcaccttcattgtactgggtgtgagtggtcctgttttgtcccacatttcctagtaatatggcccaattgtagtcctcaccttacaagctggttttgtgggggtgagtaagggcttaagcccaaattctaagggttantttttctgnaatttccaaaataaacancngtcntccatcnna

SEQ ID NO: 138729 - DNA, 551 bp, Glycine max
  Clone ID: PAT_MRT3847_9627C.1
gagcagctgatgtatacattggtgcaaacccttctgctgacggtggaggagaagatgagggagttgatgatgcagctgctaagggtgatgacattgttgacacattcagacttcaggagcaacccgaatgcgataagaagcagatcgattccttcatgatgaggtatatcaagaatatgactcccaagctcgatgcatagcaacaggagttgattaagaagcacatatagggagcgactgaatacctgctctctaagattaaagatgtccaatgttttgtaggtgagagcatgggcgatgatgctcgcttggtctttgcctactacgaggacggatctgctgatccaacagtcctgtacttagcatatgccttaaaggaggtcaagtgctcagtgacttactgtaccgagctatctacttataatgtctagtttttcatgaccatctgtcctaagttacttgaaactttgacctggtattgcgatattaacgtgagacctgtgctactggtacatcatacttgccattgtattaattatcgctgggttaga

SEQ ID NO: 138730 - DNA, 433 bp, Glycine max
  Clone ID: PAT_MRT3847_96280C.1
gctcgagcaagacggtccagtgatcaatagattgccagtcgtcgtgtacgcggaactctccaattctgtttgagcctctctcgcgcactctctctctctctctctcatacacataaaacacacacatatcatccatatactttcctcatcatgtctggttccatcaatccatttgatgctcctgatgaagaatatgcaaatccctacgaacctcctggaggatctcataaacttaactctaaatcgacatatggtcgtgtaccatctgatgctacaccacttgtaccactcactaatatctcattatcatcatcatcatcaccctatgctaatgtagcatctggacggatggatggagggcttgatgaccgtgaagctacattgagagcacgtgaagaagctgtagctgaaaaagaacgacaattgagaatac

SEQ ID NO: 138731 - DNA, 829 bp, Glycine max
  Clone ID: PAT_MRT3847_96281C.1
cccacgcgtccgaaaaaaaaaaaaaaaagagtagatactgagttggtgaacacagtaatgtatgttatctatatgtctatcatctgttgttggacttgtatgttggataatgtgtttactttgcacttgtattcttttttcttattctgtgtggtatggtagctttatggaaccttgacttagagtgcagctacggacctccgcagaaaagaccccgatctctacaaacgaaacggaatctttccaatgcttaaaagaaattcaacagtcaaattagcaccgcaacggtggcaagaaaatgccgctgatggttcctttgatgtggtagttacatttgaagaaaaagtgtttgatatggttattgaagatctccataatagagatcatgctttattgaaaactgtgctggtaatcaacttggaggtaaaagataaccacgatgaagcagccgtgggagcaaggcttactttagatctctgtcgggagattgaagctgctgaatcatgggaagagtcaattgatgaaattattgctggttttgagaataaacatcggcggaagcttttgtacagcatctccttctactaaaattaccccagtctcccaagaaaaattagtgacccatttttgtaaatttctgaccattgaatgttctgaagtaactgaaaataaatttgggttgtaggatatttgaatttgagtaactttttgattgatgtttactttctagtaatacaaaccttcagcttcacattatgtttggttgatagcctctgtgacagttgggttttaagctgagacatttgttagtggggctagaaggaagttt

SEQ ID NO: 138732 - DNA, 791 bp, Glycine max
  Clone ID: PAT_MRT3847_96282C.1
gatcggcaatgcctgctgggagctctactgcctggaacatggcatccagcctgatggccagatgccaagtgacaagaccattgggggaggagatgactccttcaacaccttcttcagtgagacaggagctggcaagcatgtgccccgggcagtgttcgtagacctggaacccacggtcatcgatgaagttcgcaccggcacctaccgccagctcttccaccctgagcagctcatcacaggcaaggaggatgctgccaataactatgctcgtggccactacaccattggcaaggagatcattgaccttgtcctggacaggattcgcaagctggctgaccagtgcacgggtctccagggcttcttggttttccacagctttggcgggggaactggctctggcttcacctccctgctgatggagcggctctctgtggattacggaaagaagtccaagctggagttctccatttacccagccccccaggtttccactgctgtggttgagccctacaattccatcctcaccacccacaccaccctggagcactctgattgtgccttcatggtagacaatgaggccatctatgatatctgtcgtagaaacctcgacattgagcgcccaacctacactaacctaaacaggttgataggtcaaattgtgtcttccatcactgcttccctcagatttgatggggccctgaatgttgatctgacagaattccagaccaacctggtaccctaccctcgtatccacttccctctggccacttatgcccctgtcatctctgctg

SEQ ID NO: 138733 - DNA, 611 bp, Glycine max
  unsure (1)..(611): unsure at all n locations
  Clone ID: PAT_MRT3847_96283C.1
gatccatattccttatcatcacttcactggtctaacctgcgacatacatttcccgctaagccgaaacagaaatgctcctcagttactctctgcacctcccaattacatcttcttactcacacacctccaaccgcagtcccaactcgagcggttacataaagttccgaacaaggtaccgcgaaaacctgcgatacctgcgagccttaaccataatcgacccaaaaaccaaaccagaggaccttcctctccccaacgacgtcgaccacatcatcgacactctcacattcctcaagtcgcactctttctccgacgccgacatccctcgcctcaagttcctgacccctgagctcttcaccaccgccgtcgtcccctccgacgtctccgccgtgttccgcttcctcgccgacgacctcgccgccacgaaatccgagtcccgcgacctcatcctccgatgccccaaactcctcttcttacacgtcgacctctgcctccgacccacgctccaatntctnccggcagtggtttagggttgggtgcaggggctgaaccggccaacgacaaggaacgcgcacctgctgaacacgcgcgtagacaagctgcatgcgaaagtt

SEQ ID NO: 138734 - DNA, 338 bp, Glycine max
  Clone ID: PAT_MRT3847_96284C.1
gtgacagttagaaaatagtgaagttgttaccaagaaaccaacttcacagtatgatgtaacattggtatgctattctcttttttcaggaaatattataaaatatgggtaaatagtaaaaattacattgaactttgattggttcagtataatttggcataaacatgaacacaagcccatccaacacactcacgggtctttacaggtcacactaaatctcaaccccgcaaattgcagtctcctgtttgggggaaaaaattgtagctcacactcccaccaactgtcatttttccaactacatactcactccttgggttggacagcatttcgttaaaaacaga

SEQ ID NO: 138735 - DNA, 183 bp, Glycine max
  Clone ID: PAT_MRT3847_96285C.1
ctcgagccgacagtggacctggataaggttcatcagaatcaaataacgtaatattatctacaacaaacaaagaatgaaggaaatactatggttctggttgcaaagtgcagacatacccttgaggcctttcttcttaagatacacgcggagggtgcagctcatttaagcacaatgcaggagggt

SEQ ID NO: 138736 - DNA, 287 bp, Glycine max
  Clone ID: PAT_MRT3847_96286C.1
gactctcggcaacggatatctcggctcttgcatcgatgaagaacgtagcgaaatgcgatacttggtgtgaattgcagaatcccgtgaaccatcgagtctttgaacgcaagttgcgcccgaagccattaggccgagggcacgcctgcctgggtgtcacactcggcgtccgaattgtagtctggagaagcgtcctcaactcggatcgcgcatacacaaataaggttgaagagggccctgccggaaagagataaataccgtctttcattttccgggcgatctcttttttc

SEQ ID NO: 138737 - DNA, 478 bp, Glycine max
  Clone ID: PAT_MRT3847_96287C.1
ctctttcacactctcccaatcttcttatgcataatcttcttcaccagcaccactacttccaccactctccctccttcctctccatcattcccatccggtctgtcgtaccacatcgactgtggaagtcccacgaactccaccgaccagttcaacacgacgtggctctccgaccgctactttcagcgcggcgccaccggaatcgtgtcggagccgctgcgcttccgccacgggcacgagaagaccctccgtttcttcccaatctcctccggcaagaagaactgctacaccattccgaatcttcctccctcccgctacctcctccgcacattcgtcgtctacgacaactacgacggccggtcccaccctccctccttcgacgtcgccatcgccgccaccgtcgtcttctcctggcgctccccgtggccccagtccctcgcccgcgacggcgcctacgctgacctcttcgccactatcaccg

SEQ ID NO: 138738 - DNA, 186 bp, Glycine max
  Clone ID: PAT_MRT3847_96288C.1
acgagagttcgtgtgttaattggaaataggtttgttttcattttctgtgttgttctctgtttatctaaatctgaagtgtgttatgtgtgtgatttggttcttggatcgaacttttttttttcgcatcgtagtgctttgtggttttgattattgaagatacttgatcgagctttgaaatcttacagg

SEQ ID NO: 138739 - DNA, 322 bp, Glycine max
  Clone ID: PAT_MRT3847_96289C.1
agggccaaaggaaaagggcccaaatttaatttaagggggccccggaacctaaaatttttggggaaaacgggcccatttgaaaaaattaggaagaacattttaaacttaagattttttttttgcccccaaaacattggaaaagcctaaaaaggtcccccccaggcccatcacaacttttaacccctgggttagaccaacaacccttaaaaacagaaaaatttacctgccaaagttggtttgcccccaattcaaaaccgggaaaaaagacccccctgaaaagaatccccggtaggatttccaaaaacagccccggtcaaaaact

SEQ ID NO: 138740 - DNA, 413 bp, Glycine max
  Clone ID: PAT_MRT3847_9628C.1
gcgctcgaggagaggcaagcgggcatgtggtagatggagatcacgggatcatttacgcgcacgaagaggaaccactaaaagcataactttgtatgcaaaacttaactcactttcaaggtataacatgctcgcctccacacaggaggatcactaccatgttcagtcatgacatgcacaacttgcagagatgctgaccatgtatcatcgccactatcgcttgaccctttccagggcctttatcttacctggagcaagctcaaggggggaggaacaactcgtgcgaatgctacagtgggagaatacgtgtataacacattccgagtatgtaaaacaggagcggctggacagatacaaatctgattcactacggactgggcgaacttgaataattaccgagagagtcttattataga

SEQ ID NO: 138741 - DNA, 439 bp, Glycine max
  Clone ID: PAT_MRT3847_96290C.1
taccggccaacgctgctctctctttcatttatcctccataaatcaaccttgtagcaaaaaatctcctctgtgcttttcatgattatacagatcatcaggctgcttctgctgcagaattggtgacatggacacacaaaaagattcaaacttttcagctctctgagctgctggcttatcaattgtgaaggaggtcaatactgtaccctattagtaggaagcctgaaataagaatcggtatcgccgcatcataaattattttgaacagtccctataatcaaccatgtaaatattggctatactactgtgtgtcaccatacacgttactggctccttaatggcttacaaacgcgagctgacatactattattgcatggcaatcaaagatgcaggcagaccttgtccaacatacaaacgaatgcacgagggtattaagcttgca

SEQ ID NO: 138742 - DNA, 502 bp, Glycine max
  Clone ID: PAT_MRT3847_96291C.1
gaaatggggaagaaaacagagctgaaagatcacaaggagatagccaaagttgaaactgttcttgagcttctcaggaaacaaacccctctcactgtgaaacaggagaagttttgcaactatgcttgtgtgaaacggtttctgaaagcaaaaggggatagtgtgaaaaaagcttcgaagcaactcaaggcttgtcttgcttggagagagagtgttatcgctgatcacttgatagcagatgatttctcagctgaactggctgatgggttggcctatttggctggtcatgatgacgaatccagacctgttatgatttttcgtttgaagcaagattatcaaaagttgcattcccagaagatgttcactcgtttgctggcctttacaatagaggtggccatttcgaccatgccaaaaaacgtagaacaattcgtgatgctttttgacgcaagcttttacagatcagcatctgctttcatgaacctattactaccagcactgaaaattg

SEQ ID NO: 138743 - DNA, 162 bp, Glycine max
  Clone ID: PAT_MRT3847_96292C.1
gtaatactcccggaaggataaccaacgcagcccacacacgaaatcaggcgcaagtgaaagacacgtcggagggaaatttcccccccgaaagagaaccacgccctacaacggaaaaagtcaccgccacaaaagcacaaccagccagcggaaaaacccccaaac

SEQ ID NO: 138744 - DNA, 1424 bp, Glycine max
  Clone ID: PAT_MRT3847_96293C.1
ttcctaaactcttctcttctacactttgctctctaccctctttctttctctttctttttcccttccctcaagtactatcatacacaaacacaaggtacttcacatacccacatacacacacataagcaaaaactcttacttccctttttcaagttcttaaactcatcactacttaactcaggagtgtgcatattttcgttgtatggatggatccttctagtggacaacaccagcaaatgtctagccagtcattggagaacatgttggcatgttcaaaagcccaccaagagagaaaaccaacgcctcagccagaacaagctctaaagtgccccagatgtgactccaccaacaccaaattctgctactacaacaattacagcctttcccagccaaggtacttctgcaagtcatgcaggagatattggaccaaaggaggtacacttaggaatgtccctgtgggaggagggtgcaggaagaacaaaaggtcatcatcatcatcttcaacatcaaagagagttcaagatcaagcattcacaccaaatgttaaccctctcactggccttccttcattaatgtcttatgactccaatgacctcactcttgcattggcaaggcttcaaaagcagtcatgtgggcaattagggtatgatgatcatgatctttcaatgttggggaaccaccacacaaacaccccatgtggtgataatatccttggcatgcatcaccactcatcatcctcatccacaaacccagggttcttggatgccctcagaagtgggttccttggaacacaaagtaataataatatgcatcagaatatgtactatggatatgggaatggggacatgggggaggtggacaatggtggtggggttggggttagtagtagtggagagatgatgatgatgatgatgccttataataatgatcaagaaatgagtattgcatccacacaggcagtgacagtcaccaccatgaagcaagagatttgcaacggaagggaacaaaaggtgttgtggggttttccatggcaactcaatggagacacaaacatgggtgaacttgactcaggaagagctagtaattggaatggcatcaattcatcatggcatggacttctcaacagtcccctaatgtagacaacaaccacagggcctctactactgataattttatttccttaatttctcatgttttgttttactaaaaatgttattagtctaattaggattttcaatatccttttgagtgctgggttaattaattacaggggtttggttgattcccttgaatcatctcttttctttctttcttgtttttttttcttctctttttgccccttaaattgtcaaattttttgtactactactgtcttttaattggtgaatagactaatgaaatttcagaaaggttgtttgctaacc

SEQ ID NO: 138745 - DNA, 501 bp, Glycine max
  Clone ID: PAT_MRT3847_96294C.1
cttctttgcatgacttcctaaactctctctatactcttctctcttctacactttgctctaccctctttcccttccctcaagtactatcatacacatcacacacacaagcaaaaactcttgctttccttttcaagttcttaaactcatcacttacctcaggagtttgcatattttctttgtatggatggatccttccagtggacaacaccagcaaatgtctagccagtcattggagaacatgttggcatgttcaaaagcacagcaagagaggaagccaaggcctcagccagaacaggctctgaagtgtcccagatgtgactccaccaacaccaaattctgctactacaataattacagcctctcccaaccaaggtatttctgcaagtcctgcaggagatattggaccaaaggaggtacacttaggaatgtccctgtgggaggagggtgcaggaagaacaaaaggtcatcatcatcatcatcttcaacatcaaagagagttca

SEQ ID NO: 138746 - DNA, 1392 bp, Glycine max
  Clone ID: PAT_MRT3847_96295C.1
aactgaacctgttgggtttcagaagttcgaccgacgcgtccgcttaaatgagataaatacgactttctattgtgtgcccgtgggcacagtgtgaaagccttgtgtatacctattagatgctttaaattacttacaaatcgtacattgaatgattggtgtattgtctatacataagtagttaagtactttgtattttcaacttcttatcatgtgctgacccccctgtaaaaaattgagtgttgagccttccaccattaactgagagttgagacttctgacaatatataaaattaaaacaagtgccaagtaatttgattcactaaggaattaaaagaaaactaaataaatagactgcatgactgcctatcaagtttaaatggctgtttccctttcaaaatgcttctgggtgttgttgctttagttgccatatcttaaaatacacttttaccaggaaaaaacaactaatgggcagttaaaataaatctttcttagggattgttatattgctatgatgtgttaattcagttggtagtttgttaaaataaagtgaagaaacctctcttaatttttttctttttgcaggtttaatcttgttatatgagtatagatttacattcccattcatttgaggctgcgagaagacgacagaagggcaagaacaagaaggatttacccacaggtgcagtggtagaggcaaaacctcaactggttgggattcatgagcgagtaagaagtgacatcaatggtagccaaccaccaacatcagctgccttgggcacatcagaaggaggcaagtgggtgccgactgcaacaaatcctaatgctgaagatgctgcagagcttttaagaatgtgcttgcagtgtgggattcccaaaacctactccaatgcacgtggaatggtctgccctgtatgtggtgatcgccctccaaaggatgatacaagcgcagaatccaagaagaaaggatcaactgtcaaagataaggaaaaatctaaaaggatgaagggtcaatcatcccatgcaacctggaaaagtgaaacagagatgcatctaaggcaacagtttgattagcattatgtgttccttgtaggttaccagttacctggtagaatgtgtttgtgtttaggacaatgctgttaaattaacaaacttcattgttatcaatgccaacagaagtacaagttgctacatatggctctaaaattatggtattattagtagctgaagttagatttttgttcgataagagagaaatctcttttgactctcttgaatctaaacatgactactaaatgtcactattgtttttatgtgttgtaatcaaacaagaattgttccttcaaaaaaaaaaaaaaaaaaaaaaaaaaaaaagcggccgctctacaggatcca

SEQ ID NO: 138747 - DNA, 464 bp, Glycine max
  unsure (1)..(464): unsure at all n locations
  Clone ID: PAT_MRT3847_96296C.1
cggaattcccgggtcgacccacgcgtccgggatcttcttctcantctcaggtgtcagttcaccatgaccgtgttgatgcccgctcccatggatcacctagaggtcgaggagggtctcgtgccgcacgcggattcgcctgcgaacactcaccaacctatggaagtggtagctcaacctggacttgcctctaccgtggagagtctacccgtaggagatcctgcgtcatgtatattttcctggctaattgacaatttttcaagggtgattacaaagatgctctattcataaagatttgttgtaggcgcctatagatggtgtgtgcttattttcccgcagggaatctatgcggactatatgctcatgtattatgcatgtggcagatggatccactttgcacctatggctgtagttgatgtgcacaggttagcttggcagttggtcatctggcgcatattacggattcc

SEQ ID NO: 138748 - DNA, 392 bp, Glycine max
  unsure (1)..(392): unsure at all n locations
  Clone ID: PAT_MRT3847_96297C.1
ttcacaagtgagtttgttgatcgagataagtanagacagtttgataaaaatgaaggtccttgttttcttcgttgctacaattttgttagcatggcaatgcaatgcatacgatatcttctgtcttaaaacgaacacttttctataatcctttactatacatattattagtcctcatattacaatttactattttttaactatacttatattacatattaacaccttcttactcttttttatacatttgttcttactctttgtataaaatgattcttcctatattgtattatttattcttatatttattttatttatactcaatgtgtttttatttttttattttattttatttttcctcttttttttacttttttttcatattttttttttat

SEQ ID NO: 138749 - DNA, 454 bp, Glycine max
  unsure (1)..(454): unsure at all n locations
  Clone ID: PAT_MRT3847_96298C.1
aaaaaaagaannaaannnnagaagaaaaaagagnnannngaagggggaangggngaggaagagaaaaaannagaagaaaggaaagaggagaacaaaaaagcagaggaaccaaagaaggaagaagagaagaaagaggagagaaaaacngaggaanncaaaagagacaaagaancnaaggagaaagnngcgccgncagaaancgngcccaaagngnncangcanngngaagggngngcncgcaaggnncgncgcncccncaaagganncccaggggncgaagnaanacccacaganngcaagncncacaaggnggnngngaaaggagaaaaagcgganccgcngaaggggcnagagagacnacagaagaaaagccanagaaagggggaaccccncncnccgancccaaaaccacccacggaagaggagaaaaaaccccaagaggaacaagagaagc

SEQ ID NO: 138750 - DNA, 422 bp, Glycine max
  Clone ID: PAT_MRT3847_96299C.1
cggggcgagccccaacccaaattccaggttacctacccggggatgggaaggtataagttttttttagggggacccaaaatcaaatccctgggccgcggtttaaaaacgcgggaaagggaaaaacccgggggtacccaaattaaatggcttggaggaaaatcccctttttgccggtgggggaaaaaagaaaaaggccccacccattgccctttccaaaaaatggccaaccctaaaggggaaagggaccccccccttaaccgggcaataaaggcgggggggggggggggtacccccaaagggaaccgttaaattggcaggggcctaaagcccggttcttttggtttttttcctttctttttcggcaaggttggcgggttttccccgcaaagtttaaaaaggggggttcctttaagggtcccaat

SEQ ID NO: 138751 - DNA, 364 bp, Glycine max
  Clone ID: PAT_MRT3847_9629C.1
gttagctaaccttaatgatagcacaactcttctacttaaacagggaagaagaagacaacacccaggaaaaaaaaggggagaggggagcattaccacccccggcggataaaaaaacacgcgcagggaaccacccaaaaaaggggccccggggggaaaaaaacccgagagctggggagaaaacaacgagaaccccccataaaaagaagcggtttccccccccccacaaaaaagggggcaaagaacggggccccgctcgccacagaagaaaaacacgggcgagtctaaaggggggggggagtttcggacaaaagggccaaacaaaagggggggggggggggccaaaaaaaccggcgccccgggggaa

SEQ ID NO: 138752 - DNA, 434 bp, Glycine max
  Clone ID: PAT_MRT3847_962C.1
cggaattccgggggcgacccacgcgtccgatgtctatggctctagctgcggtctgaggagacatagcttcgtactcctttggagcggaacctcaggccatacccattagccccgataaatgtcttgagcagaaaagagccttgctgaaaatgcgctatcataggctgaagcagcaaccgcagctgcacaacatgctcttatgctgtatgctgttgtacaggcaacggtcaagtcgtccaccctggccctcgtgttactgctcagattgaaaggtatgcgagctgaattttaccttctgggttagatccacctgcttgctcgctgtgtgtatgctaggtcacatccatacgcaggtgaatgagccatttttgcaggacggtgagtggggtacttggcccagttgaaggctggtagctcataacatacgatgggtc

SEQ ID NO: 138753 - DNA, 259 bp, Glycine max
  unsure (1)..(259): unsure at all n locations
  Clone ID: PAT_MRT3847_96300C.1
ctgtggggtggaattgcgtagctgggggtggggtgtgcttgtggtgaatggggaccttttatagtgttgatagcaattgagttttgttttgcggggttgtntnttctttttatgtatgtggcttgggggggggttgaaccatttggtttttattactttccttgtgtgcattggtgccattgttataggcccgatttggtgctttgggggggggggcggctgaccacgggcttacatttgtgggtttttttgttgtcta

SEQ ID NO: 138754 - DNA, 339 bp, Glycine max
  Clone ID: PAT_MRT3847_96301C.1
aattcggcttcgaggagggtgtgaatgtgaatgctgttaggcccatcatgaataattctcccagtgttgaagatgtggcagcagcagcaatggggaagaagaaagtgaggaaagagggtgagctgaacgggagaacgtgtggcggagaagatgaagaaagaaagtctaatcactcttgtgatgaagaacaccgattcttctagtaggacatagctgatggggtggaccttcttgcgatgccttatttaggatgttgtgtggtcattattcaaactatgcagctgagtaccacagcttcacggacagggcctactgtatccactcacatgtttctcatca

SEQ ID NO: 138755 - DNA, 289 bp, Glycine max
  Clone ID: PAT_MRT3847_96302C.1
tttgggctgatttatgtgcttgcatgggccctaaaaaattttttcaaagggcttccccctctaaaaaatttttataaaggcatgtttcgtgagacgataataaaagggcatgggtcgtgaaaaaattatataacgccatagacgtaagaccatgattgtacgtccttgacgttacaagatcatcacagcggtattcaaaactaacccaacggattgcttcccacaaatgatttaatatcgaaaaatttccgtaccctttaatccaaactctccacaacgtaacttttcc

SEQ ID NO: 138756 - DNA, 363 bp, Glycine max
  Clone ID: PAT_MRT3847_96303C.1
agctcgaggcattgggccgcatcctgccagagcttatggtgatgagctctttcacgacgaagacgattccggtggcggtccacctcaagaacgggatctggagggacgcaagcggagagggcctgctcgtgcgcgaagctgtacatgacgacgggggcctgtattgtggttagggctggcaaggtgaggatggagagggactatattgatgtgaatgtgcgatggcggaatcgcggggatcgtggtggtcgtgcacgacaagtggagcaatgtgaggcctctgcatttcgaagatgctggagagcgttggtcttgcgaactaccggactgattctgatgtgaattggaagaaagacggattta

SEQ ID NO: 138757 - DNA, 146 bp, Glycine max
  Clone ID: PAT_MRT3847_96304C.1
ggctcgagtggcgccgcaaagcttatgctggaataccgagagggcttcatcatgagcatgtaaaagatagaggagagagcatacacaggtgaaataaacccaagggatgttactactggacaatggcatcataggcagaaagcccc

SEQ ID NO: 138758 - DNA, 396 bp, Glycine max
  unsure (1)..(396): unsure at all n locations
  Clone ID: PAT_MRT3847_96305C.1
acacgnccaaaggattttatttttgcaccaaatcaagtcgcgttttgtaaattgcagcgggagctccacataacagtgttttcaaagggtgtgaacatccaaaccacagaaaacatggttaattaaaaaggtttggggagggcaaataccgctcaaatacttatgaacagcatgatgccgccctaattccttcggcgggtctatcaggaagaaccatcccatttggttttttagctggctgagcccttgaaaacctcttgggtatttcttaaaatatatttttaaagatggatgcacttttggaaaaggttttcatgaaaaacaaaccatttggttcagcctttacccggggttatttaaccgacactttacttttatcttccaaaaaaggtttgc

SEQ ID NO: 138759 - DNA, 332 bp, Glycine max
  Clone ID: PAT_MRT3847_96306C.1
gccacgcgtcggtctcagacatagcttatctactccagagcgcagaagaacccgatcgacaccatgagggtgtgctcgttccctcgctctctgctctcgctcgagcgccacctcacgcatacaagcggcggtgcggctgcagccaccgccgcggttcatctaccgccgcggtgatctgcacctccggttacctgccacctcgggcatctccaccgcggtcacctgccgcgcggtcacctgcaccgcggtcatgtgccgcgcggttatctgccgcgcaccatccactaccctactataccgcccggcctagcctcatccgcagcacacccatg

SEQ ID NO: 138760 - DNA, 849 bp, Glycine max
  unsure (1)..(849): unsure at all n locations
  Clone ID: PAT_MRT3847_96307C.1
cttcggacatgtaatgaaatgagacgtaaggaaacgaaaaccctcttgttgttcatcttatactgaacttggaattatgtgcaccaccgtcgccaagtctcaatgaacgctgtttggagtctcgaatttctcgggaaacaaacacaatcaatcgtccgaactcaaacctaaacgacaactaatcgtggcgaatggcggtttctgaagaagaatgctcttctgcgaattcaggttcaggtccctcttcttcgtcttcctccgcctcggcgcgctactacctctccaagtgcgttctcagaggcagcgtcgttcttcaggttctccacgctcacatccgttctccctcctcaaacgacgtcattttcggcaaggagacatctattgaattggtggttattgacgaggatgggaatgtgcaatctgtgtgtgatcagcctgtctttggcaccgtcaaagatcttgccatattgccctggaatgagaaatttcgtgtcgcacgtgatccgcagctgtggggtaaagaccttttggttgctacatctgattctgggaagttgtcgttgctcacattttgcaatgaaatgcacaggtttattcctgtaacacatattcagctatctaatcctggaaaccaaatttatcttcctggaagaaagttagcagttgattccagtggttgttttattgcttccagtgcatacgaagatcggctggctntgttttctttgtcaatgtctagtggtgatatcattgatgagagaattgtatatccttctgaaaatgaaaggactgcaagtacttccagaagcatccagagaatcggtntacgtggtactatttggagcatct

SEQ ID NO: 138761 - DNA, 370 bp, Glycine max
  Clone ID: PAT_MRT3847_96308C.1
gggggaaaacaaatttttttccttttttttaacaaaatttggggcccttaaaataaccggggggaattggttccaaatgccttttgggaaaaacccccccccccgccaaattttaattgttttggtaacaccttttaacaattcccgggggatttgggcccccctttttcttgtaaaaccttaccccccaaagcttgcaaaaattttttttggcacttttcccgggttaaaaaattttgaagcagccccctttagggcaaaaaatttttccttttttggagcccaaaaaaggggttttttctttttggcgacccgggggttttcaacatttttttttttatttttttaaaaatattgggccttttttttt

SEQ ID NO: 138762 - DNA, 339 bp, Glycine max
  Clone ID: PAT_MRT3847_96309C.1
aaatacatgcgtgctcatgcgtgaattgccattgaagtacgtataccgaaacccaaaagtcatgctgatgaagtcttgtagagcaaaaacaaatgggaacgtaggtgaagttcaacaaacaacgtgtgggggttacagatgctttgcatattttgcaatgactgagaagtctgggggcttgttggcgaagaagctgttgcactgtacttggcgaacgttgtgatatccaatgattccgttgatgccattggggtatgcagccttagcctttatactctctttcaacaccggggaagcatatgtgctgccaatcataggccggttccagatggttcagca

SEQ ID NO: 138763 - DNA, 866 bp, Glycine max
  Clone ID: PAT_MRT3847_9630C.1
actcgcgtccgggcgcggccatcccatgcgagtcaaaggttaataaacctaaatggataccacgttgtttagggtagtgagtagtttccaacaccaacaccaacccgatcacgatcaatccctcaacaactccaccacaagcagcagctctcgatcctccagacaacaacaaaactatccctacccacaagaagacgaagaatgcttcaactttttcatggatgaagaagacctatcctcgtcttcttccaagcactattgtccctatcaaccccaccctccctccactaccaccatccaccactccttctcccccactccctgcgactttgaattctccggcaagtgggcccaggacatcctcctcgaaaccgcacgggccgtggccgacaagaacaccacgcgcctccaacaactcatgtggatgctaaacgagctaagctccccctacggcgacaccgaccagaaactggcctcgtacttcctccaagccttcttcagccgcatctcccaagccggggaccgaacctaccgaaccttagcttcggcctcggagaaaacatgctccttcgaatcgacccgcaagacggtgctcaagttccaggaggtgagtccctggacaaccttcggccacgtggcgtccaatggcgccatcttggaagccttggaaggcgagcccaaactacacataattgacatcagcaacacctattgcacccaatggccaaccctcttcgaagccttggccactcgaaatgacgacactccgcacctccgtttaacctccgtcgtcaccgctgacgccaccgcgcagaaactcatgaaggaaatcggcgccagaatggagaaattcgccagactcatgg

SEQ ID NO: 138764 - DNA, 723 bp, Glycine max
  Clone ID: PAT_MRT3847_96310C.1
tttcgggaaccctatataccatttcatactttccgacacctaaaacttgagcatgctgagtaagtacctagctccaatttatactcatctcaaatgggtattagattttgttctctactaccctttttacatgctttatgattctcatccacccataaatcttggaactgaattgagtacatttcattatgaattttcctctggctcagaggaacatgtggattgtgctgtgtgtctaagcaaatttggagaaggagatgaggtgattagagttatgagatgtgagcatgtcttccacaaaggttgtttggatagatgggttggtttcgagaatgccacgtgtcctctttgcagaggatcactgactccaaaaaggcctatcactaactctggagctgaggttgtgctatttcagttttgttctgtccaaaagtgtaatgatgagacatggtggctacgctgagtacattaatgggggcttcaaggcttttgcatcctacaccagcacagtgtgtagattgttagtttttttttttttttaagatatggtttagaaattcgagttctagtcatgtgtataaaaaaaatattttgttgagataaaattcaatacaataactctacgtctgaaatcaaattagtctcagactatcgttagaaggatagtgggaaaaaacttttggatccaatgaaataaaccaatcgcagagtttagtttatcta

SEQ ID NO: 138765 - DNA, 428 bp, Glycine max
  Clone ID: PAT_MRT3847_96311C.1
gattaatgcagtaagggcggtgggggagcaaattattgatgttaatcctattgagttagctgtgggaaatatcgtgaggcgtgttttgcacattataagggaggaggatctttcccttgtgacagatgctgtggctggttttgggatgtttgctggaagtgatgatgaggatgatgttgagcgagatgattatcctgctttatccgcggcttctgttgcagctgctgcaagaagcacctcgcgtccaccgtcattgcaaactcttcttgaggatgtgactgattcagctgttgttccaccaacaccttcatcaggcggtgactctgaagggataagtagaactcttgaaaaaggttcaagtggtcggaagttgaagcatgatgtcattgaagcagtcaatgaactcatccaagacataacctcttgcc

SEQ ID NO: 138766 - DNA, 1101 bp, Glycine max
  unsure (1)..(1101): unsure at all n locations
  Clone ID: PAT_MRT3847_96312C.1
tgcttgcatttggtggagtgattggataccgttttagatctanatttcaaagctncnctgccacaaagagacatccgagagatattcaacagcttgcttggtacaggagaacaccatttctaatgtttattgggggtcttgtgccttttagtgcaatagtcctgcaactacaccaggcatatgctagtatgtggggctacaaaatatacactcttcctagcattttgtttgccacattcattcctgtcattttgatcattgcacttgtcagtattggcttgacatacattcaactatctgcggaagaccatgaatggtggtggagatcagtgctgtgtggtggctcaacagccattttcatgtttgggtattgcgtctacttctatgtgagatcaaatatgagtggattcttgcagctatccttctttattggctataatgcatgcctatgctatgctttcttcctaatatttggtgccattagtttccgagtttcattgctatttgttcgccatatataccacgatgttaaaagagagtgagttacctatctcagaagcaaaagcaatattggttataatgcaagggtatcccttccttgagttatggactaccctttggaaagtctagtgtacacagtatgatgtaacggtatcccttgaatttttttagttaaaggacatttgtgcagacaatgtatcctttattttacttttctcaactccatgactgcacattttggaagaggcttcctgtggtggcacgttttaccctgggaaaagagatgagtggaatgacatttctaagaaggattaagtgtctatttttgttttgaagtttattagagttgattttaaatccttaaatataattaaaatgtgccaaaaataattccagccaccaattttacattaaaatgtgtgtataatgtgaataattgatttctaatgtaactcaaacaggtcccaagtcccaagtccacaggttgtttgagtaacttttcttttttgggtgttacttttctactgaagtttgtcaattgtaatgatctgtccaaaaaaaagagttcattgtaataaggtttaatattttctcattttt

SEQ ID NO: 138767 - DNA, 254 bp, Glycine max
  Clone ID: PAT_MRT3847_96313C.1
aagagccaaggagaaaagaagaaaataaagaactggactccttcaattagtgcattgtggctgttcgtcaaagggtagcaagaagacattgtgaatttgagacatgacgagtgacgaggctattaagagctttgaggatgatgatgatgatgatgatgacgtggagatgggagtcccccttagccagatctctgaatcaagatcggccagtggttcgtcccccattggccagactaccccgcttcacatccaca

SEQ ID NO: 138768 - DNA, 496 bp, Glycine max
  Clone ID: PAT_MRT3847_96314C.1
ttttcaagcttcatggacaaaccacatactcccagtgggcaatctgaaaatagatatggtcagttttcaactccctgtgcaaagattgcaaagggtaaagcagccgaaaggcgaggatttctcatttcttcgttagatattctccctgcatactttgaccaataacaaaatcctgttatgagcctatctttttggcctgacttgatttattgcccactttttatgcgccattttttttctctgctgaagttgggaatcactcacaataacttccacatagcaggggtgtcacactgctttttttttcttccctctactcttgaagcagttcgttcccacattgtatattggcttgcaaggtatcacacattccactacctttgattgtctgcgactgccaaaagaaaaaaaaaattatcttttcaaaagactgtgctgagggaaagtttcatcatttatgccaatgacggccccattgttgtactatagtttcagg

SEQ ID NO: 138769 - DNA, 137 bp, Glycine max
  Clone ID: PAT_MRT3847_96315C.1
atgcacccttccgtaagctctcaattcggctcccacctaaataacaatcaactattttattttttactatcacaacattataatgagcgccggattctttacacattccacctcctcatcttcatacatgaacccta

SEQ ID NO: 138770 - DNA, 181 bp, Glycine max
  Clone ID: PAT_MRT3847_96316C.1
ggctacatcttgatccatggctcactcatccccatccttggctgataaggccgttaagctgggcccatcagccctatatgtggaatgggtgatcatgatgaagaccgtcaccaatcaggtctcttcaggaagcccatggcacagcccataccgactcaattacttgggcacattctatggc

SEQ ID NO: 138771 - DNA, 903 bp, Glycine max
  Clone ID: PAT_MRT3847_96317C.1
agcgggtagcagttcattcagctttccccaatgaaattaggaagtagccatgcagattataatttcgcaggttgtgggaattgaatgcgtgtgacatgagatatggttattttattttttaaaatttatcacctttctttaacatcaaagccaggatcaacttaaaaaagtttcagtaaccatgctcaaatttttgttagatcttttatggatttgattcttcgccttttgtgggctctagattggcaaccaacaccaattgaataaatctatggtttatggtagctaatcgctacactggtactaaaatgctcatcactctcaagtctcaaccattcaggctattgaaataattcatttttttattgatatatattatttttccaatattctttttgacttagtttttttttattgatatatatttttaatatccatataccttcacatagtgagaagccttcgggcaccagggtatgctagtcgttagtttagtttagtttagtttaagtttaccaactagttgcgtattctttcatcaagtagaatttgataacagaatcatctgccattctagaatcttgcccatttgcccatttcttttcacatattttatctttgaggatgggattgtagtgaaggttccatgacattgatgtgttatagagtactcattaataggtgaaaaaatgttcagtctagtctctacagcatatcttaaatggattttgctctttcactaaacaattgtgttctctaaagaacatgtggagaacttgtagcacatgacctgaacgttctttcagataaaagatgcatttgaatccaattggaatgcttaatattttgtgacatttgcattgatatatccagaaatcactctgaaacctgttcaaagtaagt

SEQ ID NO: 138772 - DNA, 382 bp, Glycine max
  Clone ID: PAT_MRT3847_96318C.1
gacccattgagatgctgtcttgttctttaaggagatgaaggaagtgggagtgacgcctgatgttgttacgtacaatagtttgatggatgtttattgcaaggggagggaaattgagaaggcctataagatgcttgatgaaatgcgtgaccaggatttttcgccggatgtgatcacgtatacttgtatcatcggcggattggggttgattggacagcctgataaggctaggaatgttttgaaggagatgaaggagtatgggtgttaccctgatgctgcggcttacaatgctgccatcaggaacttttgcattgcaaagaggcttggtgatgctcatgggttggtggaggagatggtgaccaagggtttgagtccgaatgcaacg

SEQ ID NO: 138773 - DNA, 452 bp, Glycine max
  unsure (1)..(452): unsure at all n locations
  Clone ID: PAT_MRT3847_96319C.1
gtaagctactgctaagggggaaaatattacgtctaaccccgtgttctgactgaagnagtatagtagaaacgcacagtcttctgaatttttggattcattgcactttgcactgccagtctaatatgctgaaaagtgaaaacctgagatctattgaagcaataggttgggaaataccttatctctatgaaaagcaatatgttaaaagatacacgctgcttgtttccaaaagagaaaaaaaaggtacttgtggcttggattgaaattgatagagatatctgagaacaagtgtgagatgtcttatgttggtacttggtagatgatcactgttacattatctaatacattattacattgactcataaaatatatgtgcacaaacattggatatgcacgaaattatgtatttgactgatggttacaatatgtgtttataagtgtacaatcaaattaca

SEQ ID NO: 138774 - DNA, 263 bp, Glycine max
  Clone ID: PAT_MRT3847_9631C.1
caaagcaaagggccctttttttaaaaaggggggctgtcccaaaaaggggcataaaaccccccctgtggttccaaaaagatttatatcccttcccaatttattgaaagaaaatttggggggaaaatcccattccccccacccattttttgaaagccacaaaaacttttggaagggttcttgccaaaatccaagttttagctcccctggtggcggcggcataatttttttataggggtccctaaattcaaatcccgggccggggg

SEQ ID NO: 138775 - DNA, 371 bp, Glycine max
  Clone ID: PAT_MRT3847_96320C.1
ggcaaaagtgagtttgttgatcgagattcatacacacagtgtgatgaaaatgaacgcccttgatttcttcgatgctacacttttggtaccatggcaatgccatgcgtattataggttccctctctgaatgaacactggctatggtgcccgtactcaggacgtgaaatgcacacgttggaagcatgctgtggacacatacaacatctttgactttgagaacagtcgtgaacactgcgttgaagcaatccaggaagacatccatggtcaacatgtatagatgacactctagtagagttaacctacacgcttacattcaagcgagagacctcaaagtccatcacgtcgacacatttgtgttcagtataaatggc

SEQ ID NO: 138776 - DNA, 699 bp, Glycine max
  unsure (1)..(699): unsure at all n locations
  Clone ID: PAT_MRT3847_96321C.1
gaaccaaacaccttgtccgtggacttcatcaatttggttgaggcggaagtagctaggttagaagcgttaaaatcaagcaagatgaaagagcttgtattaaagaaaagaacagagctggaggagatttgtcgaaagactcatttgattccagaaatagataatgcagtggaatccgctgttgatgccatagaatctggatctgtggaccctgcttgcattcttgaacaaattgaacttcagatttcccaagtcaaagaggaagcttttggcagaaaagagatacttgaaaaggttgagaaatggttggcagcatgcgatgaagagtcttggcttgaggagtacaacagggatgataatcgatacaatgctgggagaggtgctcatcttactcttaagcgagctgagaaagctcgtgccttggttaacaaaattccagcaatggtagatggtctgacttcaaaaactattgcatgggagaaggaaaaaggcattgagttcacgtatgatggtattcgtcttctttctatgcttgaagaatacaatatattacggcaagggaaagagcaagaacgtcgtnaggcagcgggatctgaagaaactccagggacaaatgatagctgaacaggaggcactctatgggtcaaagccaagcccttcaagccccaaagtgttaaaaagggacctangatgtcacttgga

SEQ ID NO: 138777 - DNA, 208 bp, Glycine max
  Clone ID: PAT_MRT3847_96322C.1
gtgtcgcttggcaaacggtgtgagactgggtgtgtgtcgcactattaactgaaggagtagatacttaatactgtgaggttaatggtaatgaggtaacttgagaatgtaagcgcttgtgagtgttttaccattacgtgatggatccgcaacgaataatacagtttcgcaataagaagctgaggacagtgataaccttgtaagagaaact

SEQ ID NO: 138778 - DNA, 315 bp, Glycine max
  unsure (1)..(315): unsure at all n locations
  Clone ID: PAT_MRT3847_96323C.1
aagcccggaattcggctcgaggggaccccggacccggaggtcgcggagagctgggcagtgttggccgctggcggagcgctggggcagcatgaagtgcctggtcacgggcggcaacgtgaaggtgctcggcaaggccgtccactccctgtcccgcatcggggacgagctctacctggaacccttggaggacggggtgaggggctagggtgtggggggcggatgggactncngccgggagcgggttacccggtcttgagtctcgccctcactaggcgggatgaccgctggcagatttgtcgggaaagtttcaagttc

SEQ ID NO: 138779 - DNA, 279 bp, Glycine max
  unsure (1)..(279): unsure at all n locations
  Clone ID: PAT_MRT3847_96324C.1
tcgaggttgcagaccgagctagctagctagnnagcnagcacagngatgnaggcnaagcgnngccatacnatcatantgattggaacgtagtttcataatcacactgtgnntctaaccctntccgctgctcacgggnagcaccacggttcaagacattcgcgagacagttgaaactcggggacaacgagcttctgcgcacggagaagaagttcaaggttttcatggagaattacgggaggngctaattccacagaggaggngtatttgcnccgtttngng

SEQ ID NO: 138780 - DNA, 298 bp, Glycine max
  Clone ID: PAT_MRT3847_96325C.1
acggctgcgagaagacgacagtagggcatccttctgttatggaagataacaacattatttgataatggcgttgaatgccgagaagccttagatgctattattgatagatgttctgcacttcaaaacattcgtcaagcagtcttacagtatagaaaagtattcaatcaacagcatgtcgagccaagggtaaggacggtggcgttaaatcgtggtgctgagtacttggagcggtactttcgtctaattgcttttgcagcatatcttggaagtgaagcatttgatggattttgtggacaag

SEQ ID NO: 138781 - DNA, 204 bp, Glycine max
  unsure (1)..(204): unsure at all n locations
  Clone ID: PAT_MRT3847_96326C.1
tgccaataatgatactcttctcctgtgtgagttgtgcttngccaggaaagaatttctcgttttctactttngaataaacgactaagnagncttcacaccgcttcgttttgtggtgcttgcttctttttctcttccttttcgcntnttactagtatcctttcntcttcatttcgttttctccgccgttttcgtcatcagcatcag

SEQ ID NO: 138782 - DNA, 376 bp, Glycine max
  Clone ID: PAT_MRT3847_96327C.1
gttccaacaggggggggccccgcccatgagcatcctcttgccttgaatactgtgcagcgacccgtggtgctacttgaaacgtccttacgaaacacatcccgtttgttttgtagctgcgtactgccaaagatgggccctcatgtctctctcgtgccggcttcggggtcctcttctctcgctggcgaggggtctatcgggcaatccaaagacggttaggccatgtggggttgcttttcggggtaccctgctgacctacttgacacgggggtgatccgcaaccgagtgacacagctcagggtccctgtccggaatgggtgggcacaaccttgccggcagtgcccgtgctccgtggccccccaggctgcggccatgctgt

SEQ ID NO: 138783 - DNA, 322 bp, Glycine max
  Clone ID: PAT_MRT3847_96328C.1
ttttggggggattttttgagtatttttttttttttttccccccgggaggaaaaagtttcatttatatactgggggcaatgggtccatgggccaactcaaaaaacactaatgccctgtgttctattcccaaatctttaacgaggctatcctagggtttcatcacattgcactctcctttttggcccccaaatcgttctgaagataaatatggcttccgaaatcttttgtgcaaatttttcacaccaccgttccttgagcctggttcccagcgccccaatgcaaacagtttctttcaaccccaacccacaacaaaaccaccaac

SEQ ID NO: 138784 - DNA, 268 bp, Glycine max
  Clone ID: PAT_MRT3847_96329C.1
tgtagccattgggggatctttgtggcttcagcaaattctcttgttaaaccggagtgaaaacttcaggggaagggtggggagtcagccaagtgcctcagtgtgccctgttgaaacttaggtttttccacgcaatcgatggatcgtgtcctaggaagacttttcttttcctctggatttttgttcctcctgtacaagaggtgtctttgcttggtttggtggggctgcggccacttaaaacctcccgatctctttttgagtcctttattat

SEQ ID NO: 138785 - DNA, 339 bp, Glycine max
  unsure (1)..(339): unsure at all n locations
  Clone ID: PAT_MRT3847_9632C.1
ctattaccctcgatccaaaaaccatttattatttttctctgagtctgacgattcacgcgttagtgttacttttactcagctcttagtcccttcctttattccaattctccacacttcatttcatttnaattctcaaaaaataaanttaacgttttctttctttcagtgaaaaaagaagaagaagaaaaaattggttttgaaaaaatggttaaccaatcgttcctgttcctcaaaaaccaaggcccaaatccatgtttttaaaaagaaatccccaattggttttttaattcccatggccttttccccaattaccgttttaatcatcgctttttttttttt

SEQ ID NO: 138786 - DNA, 330 bp, Glycine max
  Clone ID: PAT_MRT3847_96330C.1
ccaacccgtccgcccactcttccgcccacgcttccggaacgacattgagcttaagcatgggcaagcgcaggggtgggtaaggaactgcccctgttttcgtttgggaggagctttggttccaaccgagtccgattggttttaaacctaaaagggcttaattccaattccaggcccgtcattttgttaaagggagaacattctcgccctgagtttttccagctaaatcctgtgggtggggtccccgttttagtggatgaccacgttgttttttatgactttttcgccatttttttgtttttggaagataagtttcctaacaatcctttgttc

SEQ ID NO: 138787 - DNA, 327 bp, Glycine max
  Clone ID: PAT_MRT3847_96331C.1
gcaagatgtaatttcttcccacttcttccatagagcaatcatcgttttctatcaccggctcccttaggctccggaaatttttagaggggagagggggcgatattccctgtcacaaaactgagagtacttacccaggtgttttttatgggaattaaaacggcttgtaaaaagattattggttagttttgtaacaatagtaggggaggaagagctgataaaactaattgatttttgcatcaaatttcacctaggaacaaatgatgatgaaatagatggagagaacattatcttctaaagtggttcaccaactataagtaagtcaaattt

SEQ ID NO: 138788 - DNA, 368 bp, Glycine max
  Clone ID: PAT_MRT3847_96332C.1
gcagcgccagtgctgcagcggtgcctgtctgctgcgcgcagccgccgaatcggcacactttcgagtcgtccgtctctatctccatgttcgtgtcctgtccctccccctcctgcgcgtgcccttcgaggtgttggtgcaattcccgcggcgagctaaagttcggctgcccagctccacacccattccagcggcacttccaccgctcgtcgagcttgcgctcgccctcggaccgcacctcgggtggcggctttggccggatcccagcgacaatataacttctggtaccgtcggcgccctcgacgcacttgggcgaggccgaggggaacgcttcgctgatgtgcttgatgacgtctgatgcattcagcatg

SEQ ID NO: 138789 - DNA, 1357 bp, Glycine max
  Clone ID: PAT_MRT3847_96333C.1
gcggctcgcccggctcgagagcgagtatccatttctaggtgccatcataataactaataacccaacctctcgagagtttgttatattattactgataaattgttggtgggggtggcatagttgcagttggaaatcgaaagaagagaaaagaaattggatagtgattatttgggttcgttatcgttgaaacgttttctcaaatctggtgtggtgaataacatcacccctcacactcactcaacctaaacaaaatgcagagccagagaaccacgccgctaaggaaccctcacacctccacctccgatctcctaacgtggtccgaacaacctccgccggaatcctccgcctccggctaccgctctcgccagccttctgataaaatcggtgaggttctccgcggaagccagctcaccgatgaagaagcacagagtctaacaaaaaagaaaccctgctcaggatataaattgaaagagatgactggaagtggtatattttctggtaaatctgaagataccacatcagaagaaaattctgcaaattcaaaaaacagaacaagcatacgcgtatataagcaagcaatgaatggaatcagtcagatatcattcagcactgaaggaaacatttctcctaaaaaaccaacctctctacccgagatagcaaagcaacgtgaacttggtggaacatatcaaagcaaaacagtcacgaagatcaacaagcaaacatcaagtgccaagaccaaggagctcagtggaagtgatatatttgcccctccttctgaaattgtgcctcgttcattggctgctgcacacactttggaatcaaaagaaagtaaagacacaagaagatctgttccacaaaaagtgagtacatctgcgcaagtttctaatcgagctgatggccaaagtaatttctcattcagtgaacaaccagttaagatattgaggaaaaaaatgcatgaccagaagtttgcagagatgacaggcaataatattttcaagggagacgttcctgcaggatcaccggaaaagccttcaagcagagctaaacttagagaaatggctgggagtgacatatttgccgatggaaaggcagaaagtagagaccatatactaggtgcccgcagaccccccggtggaggaagcggcattgccctcgtttaaatttgatcatctaaattcgtccaattaactgtgtgcgttctataaattcctctgaagttctgtgttttgactggaaggatcagtgtgttggattgtcaacattgtttattattcatttatgttgatatacacagtcatatattggataaataaaattgtctgagatttttttgtaataagaaattatttactaaaaa

SEQ ID NO: 138790 - DNA, 496 bp, Glycine max
  unsure (1)..(496): unsure at all n locations
  Clone ID: PAT_MRT3847_96334C.1
tacgggtgcgagaagacgacagaaggggaaattgtgttggagcaaaataccatcatgaagctaagaagcattctccttattgtgtgggctttgtttgctctcttgagccacgcttatggggaaatccgtttttgccaaaaagaaatgacgttggatgggtcatgtccacttgggacttcaggggaaagctgctttctggaattcctgaatagattgggagcaagtgccatgcctatgaattgctcttgcaaagatgatccttcccataataaacgccaatgcacttgtaatgttgtgtgtaacacatgagacaattttgcctctagagtgcacttcagtccaaattattcataaaataaaaaaacgtgtactgatcttgtaatttctctacatatgttgagaattttaaaagcccatcacctaatgttccagttattatagttaatgatattttcaatttgttatccaaaaaaaaaaaaaaaaaaaaaaaacnaaa

SEQ ID NO: 138791 - DNA, 138 bp, Glycine max
  Clone ID: PAT_MRT3847_96335C.1
acctaccatcgatgtgagggagcgggacgcgttccctacaaatcgcgccatcgcaccattgaaaccggcggaaggagcacacatattgtatacctcgaatatgacagccgatgaggcagtcgcgcaggtgctccagtg

SEQ ID NO: 138792 - DNA, 244 bp, Glycine max
  Clone ID: PAT_MRT3847_96336C.1
tttttttttggggcccccaaatttaatttcctgggccgggtttttccaccggggggcgggggaaacccctgggggtcccccacttaattggcttggagacaatcccccttttccccggtggggttataagaaaaggggccccccccgtccccctttcccaccagtggcccaccttgatggggaaaggggcccccccttgtaggggccctttaacccggggggggggggggtttccccccagggg

SEQ ID NO: 138793 - DNA, 168 bp, Glycine max
  Clone ID: PAT_MRT3847_96337C.1
gggaccgggccggaaaacccgggccgacccacgcgcccgattgatttacaaaccgagaacgcagaaagcacaacggggggggcggaaaaaaaaacccgcggcccgggacaccaagaacggcacaaaccgaaaccggaccggactgcgacccgagacacaaaagggaaa

SEQ ID NO: 138794 - DNA, 589 bp, Glycine max
  Clone ID: PAT_MRT3847_96338C.1
atagttctcattgtacaacccatggtatataataaggcaacaacattctatggataaatactattacaggagtcggcctattaaagtgaaggacactatagatggcaaactgtgtcggtaaacattttttattaaggacaagccactatcgcagcaagaaaagacaaacactgaattattggcactgcaactgaattatcttcaggttgctgattttgttatataaagaaatatataggcccaataaatgttcaaagttatctctgtatagattgtaattagtctatgttaacgattgacaaaatatgactgttgcgagagacatactgctcaataacatgctatagaagagtagcgcaacaaactatggcattcaaataacaaagcgtgtatcaacagctgccaaaattgggggtattttcatggtctatagtggtgataccatgaaataagcttccaatatacatatatgcacctgaaaaaacattgtttaggattatttgcggaaaattgtcccccacccgacattctaaagcatatgaatccttacatgatacaatatgaaaccgttcttccttgaccattacta

SEQ ID NO: 138795 - DNA, 1378 bp, Glycine max
  Clone ID: PAT_MRT3847_96339C.1
acggctcgagaagacgacagaaggggaacacaacacaatactatgcattccctatgggcatagctttgagcagcaattgtgatcttatcagctatggcggagaaacacaaccttaagaatccagctgtgaagcggattctccaagagctcaaggagatgcaatcaaacccatccgatgactacctgagcctccctcttgaggaaaatatatttgaatggcaatttgctataagggggcctcgtgatactgaatttgaaggtggtatttatcacggacggattcagctgccttcagaatatcccttcaaacctccttcgtttatgttgctcacacctagtggccgttttgagacccaaaccaagatttgcttgagcatatcaaatcatcaccctgagcattggcaaccatcatggagcgtaaggactgctttagtcgcactgattgcattcatgcccaccaacccaaatggcgcgttgggctcattaaactacaagaaagaagacaggcgtgccttggccattaaatcccgtgaagcacctccaaaatttgggactcctgaacgtcaaagactgattgatgagatacacgagtatatgctaagcaagtcatcccccgttccacaacttgccccctcacaagtttctgaagaaacattccaaaactgaggaggctgaggctgaggcccaggttaatttacataatcctgaagctttacctgcgggagtggagattccagatcaagcaggcgacagagttgttgaagaacaagaactccctgtcaatgttaattctaaccctgcaggagttgaagcttcaatggataattcatccagcggctcaagtaaccagttgctccaaaagtcagatgcaagggttcaaaatctgaaaccagagacaaggattcaaaaatctgacgatcgattgtttacacttgctgctattgggcttactatagcaattgtggttcttttgctgaagaagttcattaaatctacagaatatggtgctgttttcatggatgaatcttagatgaattatttgctcgtgttagcttcaatatcaagattcttagcccatggtatagtcgataggaaaatttagcacttctgtgatattttatgatctttgaattgtacgtatgtcttgtaattatggcaatactaatatcgatatactacagctttgagttagtgagcaagggtctactatgtggtaggtacagttacaatgccttattgtttgcttatgacccctgatttatgtatacaaaccgaaagtactcatcattgacaaaaaggtcggataaacaacttcgtggcttatatttttaatagttgagtagcattattgatagttgcttatacaagcatattctat

SEQ ID NO: 138796 - DNA, 325 bp, Glycine max
  Clone ID: PAT_MRT3847_9633C.1
gtcgcgaactattatctcggagcgatatcatccatgagcacaccgtgattaaacgataagagtgtacgcgtgctacatatgtgctacgcggcaacattttgattattcggtacaagcctaggtcgatggcataaactaattaaccggagcggagtgtgacgtctcaaaatcttatatcctcataaatataattcactacaaccgatatagatatctttgacagagagattggtgagtccctttacgggatcactttgtttcacagtatactattcaggcaatagagttctaacaccacctttctgaacataggcagaacatttcg

SEQ ID NO: 138797 - DNA, 399 bp, Glycine max
  Clone ID: PAT_MRT3847_96340C.1
ttcgctaaccccttaataatatccccaacctcccggggccagaacagagcctttttaattaagctttgcttcatgagaagaagaaagacacataaaagctagctatctatccagccaaaagaaactactacatctcttctcttctgagcttgttaagaagagcagtgattagagcatctctcttatcagccctaacttcttccctaatccttctttgttcttccctctccctccacctttggtccatcattaacctctcattctccgacgcctccatggtttgccttcactccatctccttcagcctcctctcattctcccttgcctcaaaggcttccatccactgtgccttcatttgcaattgctgccttatgaactcgtccatgatctcctcaaact

SEQ ID NO: 138798 - DNA, 114 bp, Glycine max
  Clone ID: PAT_MRT3847_96341C.1
aggatcgagctttctctgtctatctgtatgtctctctgaagatggtttcacgcaggcttgtatcttatatgattagatggtgcgttggtagatgtgaatagaagtggtgaattt

SEQ ID NO: 138799 - DNA, 348 bp, Glycine max
  Clone ID: PAT_MRT3847_96342C.1
tagctcagacatgggagaccaggtggatctgctggatatctggccaagtccatttgggatgagggtcaggattgcactcgctgaaaagggtatcaaatatgattacaaagaagaggacttgaggaacaagagtcctcttctcctccaaatgaaccctgattatatgaagagttcgggtctcatgcacaatggctaacccattcgagaatccctcgttggtgttcagtacattgaggaggtttggaatgacacaaatccctctgttgccttcttgcccctaccagagagctcatgctagattctgaggctgcttacgaccataagaaaatatttcattcctggaaggaa

SEQ ID NO: 138800 - DNA, 137 bp, Glycine max
  Clone ID: PAT_MRT3847_96343C.1
tgcattctaacaactatgaaagagtttacaaacctacacgatagccacactggtcaatttgtatcatgcaatgaattgtcgatgactttgatctgtacaatacttgcattaattgatgatatcaatgcaatttcata

SEQ ID NO: 138801 - DNA, 615 bp, Glycine max
  unsure (1)..(615): unsure at all n locations
  Clone ID: PAT_MRT3847_96344C.1
ctagcctatggtgacagattacaggacagcttctaagagcttctacaagcttctacaacaagctagaaatataaaacattatcaaacaacaacttcaatagttatagcttgttgatgcactcatactaaaaaaataggaatgtgtacgttagcaaaccccactagcatttgctaacgtatacactcctattttttagtgtgcgttagcaagttacaccattggtgcattttaagacaatctttagttatagcttgttaacgcactcatgctaaaaaataggtgtataagttagtaaatccttatatatatacataactactgatatttagtttcttctttgacacagtcttaacatgaataaaactgcaggaggtacaatgctggggatagtcaaaagctgcataggtaccaaattcactagtcaatttggggatttagttgctgtgagtatcctctactgcatgggcaagatttttaaatttcaaatttgtcttcttttttcttttatcttcattctgacttntgaaaattcactnnatgagtcnnncacctacttgggnnnggggaatttgatgtacataaccttacccnnnnnggcagctnnannanncnng

SEQ ID NO: 138802 - DNA, 583 bp, Glycine max
  Clone ID: PAT_MRT3847_96345C.1
tgtagctcaagcgaaaacccagcaaattaaactgcccaacgcctttttcactttccccattctctctccactgaaactgctcacttttttctggttaatttggtacgaggaaggggtaaaacgaggaggaagaagagaggagaaggagaaggaaagatgcgcaagtctttcaaggattcactcaaagctcttgaagctgacatccagtttgccaacacactagcttctgagtatccaagtgctggtgcttgcttccaaatgagattgtcctacagcccagctgctcaattcttcctttttctggttaagtggactgactgtcaccttgctggagctttaggattgctcagaattcttatatacaaggcatatgaagatgggaagacaaccatatccatttatgaaaaaaaagccagtctgaaggaattctatggtgtggtgtttccctctttattgcaacttcacagaggaatcactgatgttgatgaccggaaacaaaaacatctatgtgctactaagtataagcataaagatttgacaagcaaaggaaagctttctgagattgacatggagagagaattag

SEQ ID NO: 138803 - DNA, 472 bp, Glycine max
  Clone ID: PAT_MRT3847_96346C.1
gggtaccgctccgaatttcgggtcgcccacgccctccccacgcgtacgaccagatacgagggggggtctgttggggagagggggccttctacactaactaaagccgagctgcgagagagagacacccttacaaaaatgccggctgggcacggatagagatccctcaccaacaatcccttctctcgtacctccaagaagaagggtaccatcgacctcaccacataccttaaaacctaccacgtgggcgatgatgcggacctctaggattacgtcgccgtgcacaagggaatgcctgacaagttctaccatggccgcaccggccgcgtctggaatgtcaccaaacgcgctgttggggtccaagtcaacatgcaggtctgcaacagaatcatatggaagaggatacacgtgcgtgtggagcactgtatgccatcaaggtgcactgaggagttgcgccttaggaagagcatgaatg

SEQ ID NO: 138804 - DNA, 637 bp, Glycine max
  Clone ID: PAT_MRT3847_96347C.1
gaattttcaggtaccagccaggggtggtgcactggctgccagacaaggtagttcccatgctaggaatgttccgacagctggagctactactcataggggtatggttcctaaccaacctgccagatggacgcaatctgtttcggttcaaaatctaagtactgtagcaggcacacctttccaggggttaacaggagagcaaagaggaaatacagcacagtcagtttctaggcctgaagaattattcagtccgcaatcagaacagaattggactcccactggacgaatgcgtggaagtctagatttaagtcagctttacgatgagtctattgcacagcgaataattacgccaacacaaggtcaaaattcaaagccaccaggtccacaacccgtccgacggactggtatttcctctttgcaacccgccacgacccaactggatgtgcttattgcaaacaatagaaatgcaaatgctcataatcgttcttccagtagataacatttctgcatggctccacttgcacatttctgcataggctgtaaatacagttatctagtcacaatatatattttgactataaccagacggacatatccaaggttttttattcttattttttatggaaaaatcatggttttc

SEQ ID NO: 138805 - DNA, 1566 bp, Glycine max
  Clone ID: PAT_MRT3847_96348C.1
caagaatctacttgccctcctggtactgttgacctcaccaaagatgatgatggtttggatacagtgggctcttgtgatattgtagaaagaaaacctaccccggcatctattcatagtcagtttgtcaccccaaattcaagctttccttgtgtattgatctctcactggtgttaatgaaaaatgttgccactcaaatagatgacttttggcctggagttagttttgtccgtagtacgtctgataccccaacagttggtaattctgagctacctgttctgcctgatactgtttctcctacattaagtcagcaatctgctggtcatgacaataaccctgttgttaactctgccatgcataatcaatttttgggaccaaacaacttgcagatgcagatgaatcatatgaattcagttaacgagtatggcagatcatcctcagcaccaagacatattcataggactccggtagctgttcaggccctcccagtccaatctcaggcattgggaccacagcaaaattcaataactaatttgaatagttccttgctacctagcaattcctctgctgctcctcatatttctttgtccaaccctacctctgtagatactttgaatgccatactaagtgatacggaaagacaacaacatttttctcgaactccaatgaatctgcctcaggtctcaggtgtaaattcacctgcatttcagcatcacactgcaacacagaatcggggaccacttataaatacgtcagtaccaactcaaccgcagaatcaatacagagcaaatgcgttttctgaatttagaaattcgcatctgcagcaagctctgaatctccggccacccccaccaagatcatctaatgcccagtggtcccacatccagcaaagtgttccgcaatctgggaattttcaggcggcagccaggggtgcttcagtggctgctggacaaggtagttcccatgctaggaatgttccaacatctggagctactactcatagccatcaagctagaggtatggttgctaaccagcctgccaggccatctgttttggttcaaaatcaaagtaccgtagcaggcacccctttccacgggttaacaacagagcaaagaggaaatacagcacagtcagtttctaggcctgaagaattattcagttcgcaatcagaacagaattgggctcccactggacgaatgcgtggaagtctagatttaagtcagcttaacgatgagtctattgcacagcgaataattacgccaacacaaggtcaaaattcaaggccaccaggtccacaacccattcgacggaccggtatttcctctttgcaacccgccacgacccaacaggatgtgcttattgcaaacaatagaaatgcaaatgctcataatcgttcttccagtagataacatttctgcaaggctccactcacacattggaagacttaaagaaagctgcacctgaatttcatctttgataggctgtaaatacagttatcttgtggcaatatatattttgactataaccagacagacatattaaaggttttttatttttattatgtaaaaa

SEQ ID NO: 138806 - DNA, 690 bp, Glycine max
  Clone ID: PAT_MRT3847_96349C.1
accaatcacttgtgctattcttaaataacaactatttttgtgtctatttctctcccatttacttgtataatctattgcacaacattctcacttagtcatgcatgatgccacccagttaaattaagatgtagtatcaattttaataaataaattgcccactcaacaagcatcacaatatattattagatgaactagcaagttaagacatctcaattttaataagtaaattagttaccgatatttaaaattaagattgtgtagtttatagaagccgcagtttgttatatgatttcagaataattcaacaaattaagggagaaggggaaagaaagacatacagaaacaacgagagcagaggtggcaagggcgaatcctgcaattttggtagcgtcgacacatttttgagcaaattctttgagatcaggctgaagggagcaagtgagtttagctgcagcaggttccaagccaaaagccttagaaatgcattgtgtagatttgaggttgcgagaggctatgccaaccttggtgggttgcatgaaggtagctgcagcttgtagtgatgcagccattgttattgttgctgtggccaccaaagtgtgagtttttgttttgattgaaaccaagtagtactactttgtaaggggtttttgtgagtgatggatggcagctcgagccgaatcggctcgagtg

SEQ ID NO: 138807 - DNA, 485 bp, Glycine max
  unsure (1)..(485): unsure at all n locations
  Clone ID: PAT_MRT3847_9634C.1
cacgcgatcctcacctacgaatgctgctcgtgcctctcgagataataatgcctttattacacttaggggctgtacgatctgggcatcgggatccttagggactggtacacctgacatacatcgcgcactgtcacaactgtacgtgaactatattgtaaccttaacaagcattcgatcccccacaccacagtcatgcttctccctactaanggacgatacgcatccggaagacagagcaaacacaagcggacactgtcgtacggcggctcgggccatccatatatgaacccccacaactgaacggactgcgcctaggagtggaagagaatcatcacccaggttatctattacggacttagacacgtacccataaaggtagaaccgctcagctcatcttgacaatctctcataccataaatcagactcagctgctccggtgggccaacagactgtatccggacgatgtggaggcacagaggaagaag

SEQ ID NO: 138808 - DNA, 299 bp, Glycine max
  Clone ID: PAT_MRT3847_96350C.1
gcatctgacatgtcgtgacatggaacgttggatgattgtggggcaggtggcatcgcgattaacacatacacatcgccattttgaacgtgaaagatgggcatcaatgggaggagaagatgagatggaaatgatcaaagacttgccacaggcgctgaggagggacatgaagcgccatcttcgcctctatctcattagaaaggttactgtattccacatcttggatgatcttattcttgacaacatctgcgacagggtgaaaccgctagccttctctatagatgaaaagataatcagagaag

SEQ ID NO: 138809 - DNA, 1182 bp, Glycine max
  Clone ID: PAT_MRT3847_96351C.1
agacgacagaaggggggggaaagcaagagtagtgacagagagaggcgaggatcgttcacataaaacatcgacagagatcgacgaggaaaagctaagcctaacaatgtggagctccaaaacgacattgatgtttggcgtcgcagccattgctctgatgatgtttctctcatctgcttcagcggacgacgtcgttgcactcacagaggaaaccttcgaaaacgaggttggcaaggatcgtgccgctctcgtcgagttttacgctccctggtgtggacactgtaaaaggcttgcaccggagtacgaacagctcggaacgacttttaagaaaacgaagtccgttttgattgccaaggtggattgtgatgaacagaaaagtgtttgtagtaaatatggggtatctggttaccctaccattcaatggtttcctaagggatctctagagcctaaaaagtatgaaggtgcacgtactgcagaagcccttgcggcgtttgtgaacattgaagcaggtacaaatgtgaagatagcttctgttccatccagtgtggtagttctctctccagataactttgatgaggttgtcttcgatgaaacaaaagatgttctggtggaattctatgcaccatggggcggtcattgcaaggcccttgcccctatttatgaaaaggggcagcatttaagctggtataaagatgttggtaaaggagtttgtgtgatgccagtaagaaagattggctgagaagaaggcagtatattcccggcttgagaaggaagttaagaagcttaaaggttcttctgccagacatggcgacctctacttaaaacttgctaagaagggtatagaaaaaggtgcagactatgcaaagaatgaaattcaacgtcttgagcgcatgcttgagaagtcaatcagcccagcaaaagcagatgaattcactctcaagaagaacatcttatctatctttgcttgatcttcctgtgatagaagagccatttctttcagttcagcggggagatgtgatttgtaattcctgagtttctaggtgttatcaccctagttttcttgatgaccgtttcctataaatatgcactctttcacgcgcatttttgcactgatcatgtactgagtcgtaaaactaaagcaaaagtagcatctgagaaatcatattcaacctatattgacttccc

SEQ ID NO: 138810 - DNA, 199 bp, Glycine max
  Clone ID: PAT_MRT3847_96352C.1
gagccaagaaagtgaaggttctgagtctcagagagaaccacgaagacataagagtaagaaccctttgcagttcaactctaaaaggttccaaactgtgttcaaaaaccaatgtggccgcgttcgcgtcctcgagaggttcaacaaacgctgccaacagcttcagaatcgccgagactaccgcattgtggagttcaactca

SEQ ID NO: 138811 - DNA, 222 bp, Glycine max
  unsure (1)..(222): unsure at all n locations
  Clone ID: PAT_MRT3847_96353C.1
cctgccttacacggcacgcgcnccaccattcactcatctaaccgagggccatattcccatctgatgcaccaaacccttgtctgcanngaatccaaaaaacaaaacaacaaccacagccagcatcnntactcttccattccaagtttcagcactttttgnncaacctcattcccacactataactgccgccgccacctcccctgccctgccaatcatatgcct

SEQ ID NO: 138812 - DNA, 1496 bp, Glycine max
  Clone ID: PAT_MRT3847_96354C.1
cccacgcgtccgcccacgcgtccgcttcacttccacgcctacatatctctctcattacctatctgccactccacttcccttcaaaaaaataatagcacagaagcagaatcaagagtggctatagcgtagatggaaggagtaggagcacgccacaacgaaattagcgacggaatgcaatgcatgaaccaccctcacagaaacaacaacaacaacaaccctggtgggatctgcgccttgtgtctccaagataaactccgcaaccttctctcttcttctttccctacttcatcacctcctttttcttcttcttcttcttcttccccttctttcacttcttcttcctcggttaaaaccgaccacgaccacgactacgaccactacacgcgctctcgcctccctttcctcgtacccaagaaaaacatcatcatcaacaacaaaaaaccgtcttctatttcaacaaacatcattttcaagcgcagcaagtccaccgccacacccagaaggaacaacaaccagtttctcgaggaggaggactttagtcccagaaaaagaaacggcttttggtcttttctctatccttcttcttcaaatgggaagcacagagacaagtgcttgggaaaaaagagtgatcacgtgattgttatggaagaggacacgtgtttcagttcttcttccaaggtttcgagatctagatctattgggtgcggtagcaggagcttctccggtgatttcttcgataggatctcttctggcctcagcgattgcaccctccggagagtggagtctcagcgtgaaggaggaaaacctaaggtaattgctaatactatgaaccattgcatgaaggaaagagtgaggtgtggaggaatattcagtggcttcgttatgacttcgtcttcgtcaacaacgtcttcttcttcttcttcttcttcttcttcttgggtttcatcttctgttgatgatggcagaggaaggagttggggctgggcttttgctagtcctatgaaagcattcaccacaaaagggtcttctaagagagatgcttctgataagaacaacgacacgcataacttatcagccattccttccttgctcactgttagaggctaaaatcataaactattatttcggaggcttatgctctgtttatcttcgttgataataataatgtaatactactttcagtttcctttcatcattcttttttttcattgtttatgatagtggtttattattattattattaaaggggtgggttattatgatcattggctacattgcctatggaaaaaccccttttgaaaccctttattatggtcctgtaaaccccccccatggagaaggaaattgaaaaagaaagtctccatataatgcggttttttttttacttgggcattttggctgtatctttgtggcttttatctcgtaatgcatttcacacttgtgttaaaaaaaaaccaaaaaaaaaaaaaaaaaaaaaaaaaaaaaaacacacaaag

SEQ ID NO: 138813 - DNA, 575 bp, Glycine max
  Clone ID: PAT_MRT3847_96355C.1
ttcgttcttttttttaattgggacatgaggttgctttaaaatatttctctattatgtggcacatctagagtagacttaaattttactagactgtataaggtacgtacaaactacgcataatataatactaggctactttcagcagcacatacaactagattgcatgtaggatgccatgctacatgtagcagcttggagcttaagttacaagaaaagtcagctctactagactctgaatcagtgtgagcatgctggtaaatttcacgaggtattaggttgcttagagaaggccttctaactcgagacttagcttggtgaataaccttcctgtgagaatttcctctaatttctagtttgatctcttccttcctttcagaacccggggagaatatccgcacgacattgctataagaaccagttgcaaaatggagtccatcaccactaaagcagcactcgaatttgtcaaatatgcagtcattattatataactctggcaacttaggacgcagatgctcgtgaattttgaatattgcgactggagatgattccatacgcatgtcccaaagcttcatatt

SEQ ID NO: 138814 - DNA, 192 bp, Glycine max
  unsure (1)..(192): unsure at all n locations
  Clone ID: PAT_MRT3847_96356C.1
ttccaacattttctccatttccctttattttttcatttttataattttccaattcggtgttttaattgagaagcggttttagactattcctatntctgcttccaccgtgtccatcacggccgcgaaccctgggactcttctgagacctgtcatcgcaacttataataaaacttccactaacctcgaactcct

SEQ ID NO: 138815 - DNA, 274 bp, Glycine max
  unsure (1)..(274): unsure at all n locations
  Clone ID: PAT_MRT3847_96357C.1
gtcagaatgatgtctgtcacangcanaancnttgattttgtggcaatnacntngtctgcttgtgggctggctcttnnaatgcctntnctgttgnnaggtncnctgtncggcactatgcnaagctgaatngcnanaattctaaagggtgtggcananntcatngggctcgtaaattggtttgttgnaagaagaggaacactcattgtcnggtttcttctntgnngactgcacngcntacggtgaatggggggatcatgctttgnaggccttacca

SEQ ID NO: 138816 - DNA, 311 bp, Glycine max
  Clone ID: PAT_MRT3847_96358C.1
ggtaactagggggagaccgacagagattagattgaattactggagtgattattctgagatgcaatccagtgccgaattgaaagtaaggaccttaggtttgttgactaggaagaccgtgggattgaaagaaaaaaggcagtgggactgtggaaggtgggaccttgagctttgaacaagaaagctgcgtgagtgtaaaatgtggggaaggtaagctggggagttggggttgagtagaatagaactgtggtaatgggggtggaacggggtgtgagttagtgagggggcgcggggggcgggtgggcgggggccat

SEQ ID NO: 138817 - DNA, 561 bp, Glycine max
  Clone ID: PAT_MRT3847_96359C.1
tccaggtccgtcaccgctattatgcgcctccgggatcgcttttattataatcccagttcatcatttcaggagtaatttcccgtaccagttcaagtgccctaactgccttgtgcccacacgctggcgggggcgcctccacaaacagggctgcaaccctacaccgggcgatgagaaccacggctggcacaacacgcatgccgtgccacggcgccagcgctggcacatgaaccatcacccgtatcgtgggtagagcggccagttcaatgcgcaaaagctgaacctgggctggaattacaggcgggtagggagtaaataccaggcaatcggcggagcgcgcgctgtgtgcgtggggggagcgcggggaaggagttgggggacggcgtaagcgaaggcgcgagctaggtgagtggcgagtcgagcagtcgagtaagtaacggaaacaaaacggcacgagggaaaaaaaaaaaaaaaaaccctccttcgtcatgacgcactgtcgtcatttcgcaaggaaggttcgattccgattgctagctcgattactgggtttgagacgcacgt

SEQ ID NO: 138818 - DNA, 234 bp, Glycine max
  Clone ID: PAT_MRT3847_9635C.1
tataagggggaagtagggttaattatgcatgtgtgggatccttaacagaagcggttgcaagtcttgaggagctcacacaagaacagcagtcaacagattgggacgagggtgctccactggctgaaaggattccacctgcgaagaaactccgcagtgctgggatctacttccaaccagctaaaagtggcgccatctcatctattgatttcgttgaagaaagttgcattttctact

SEQ ID NO: 138819 - DNA, 1643 bp, Glycine max
  Clone ID: PAT_MRT3847_96360C.1
ctcgagccggttcaggagaaacttaatgagttgctggatggagatggtggaataagcaaaagaaaagatgccaccaaagggtacttgaagcttttgtttctcactgtggcatcaggtgatagaattaatggtgaagctattcaaagcaatcgagatctttccatgatccttgatgcccttctgaaaacaaaatctagagcagtgctgaatgatataattaacaaaaatggtttacagatgttacataacattatgaagcagtacaggcatgacttcaaaaaaattccaatactacgaaagcttcttaaggtcttggagttcctagaagcaagcaagattttgacatctgaacatattaatggtggtcctccttgtcatggaatggagagctttagagagtcaatgctttctctgacagagcatgaagacaaacaggtccatcaaattgctcgaaacttccgagacagatggtttcccagacacgccagaaaacatggctatatggacagggatgataacagagtggaatctcacagaagtttcaagtgcaacagattttcagcatcacacagtcagaggcatgaacaggatttaaggactacagaagcaattgattgtagtcagcaggcgatgcttgtgacaactccagtagatgctgaaacctgggaaggctgtcctgtgcagtctctagatggggttgaaatcaaaagagctaaaaaacgcaagcgcaaaagccgatgggatcaaccagccgatacaaactcgcattctgatgccgttatgagctctatcggtgaaagccagaacattcccgaggatggtccaccagggttttcatgtccagtaggttcattaaatgcttccctaaactctggtaatcttgccttgcaaaatgcaagccgttctggatgcccctctgatatagttattggtcatccaaaagagaaatttaactctcacttgcctgtctcatatggaatgccatggtctgcccagcaatatggaacacctcatgctgaatttcctgagtgttgggtcactgcacctggcatgcctttcaacccatttcctccactacccccgtatccacgggacaacaaagactgtcaaccttctaatactactaatgctatgataattgatcagcctgctgaagttaagcagggggataccagtggtatggttaattgttgctcagatgatatgattcccagcacaactggtgttaactctgaagactccaacctactgtttgaggacgataaacacataagtaaacgattgaagggtgattccaatgatttgggaacgaggtactttagacagcagaaaatacaccgaccatggttcaagaggaatgcatggaaatgtgatgagaacaactcttgtggtgatatgtgcagtatagatgtaggagatgtaccaaaagagtcaaaagttacttgtgacgcggaggatgcaatctgtagagaggagtaaggtggcgatattatttattagcatgcacagcagcaatatcaatattgttcacaggaaaaagaaatatttttgttttcttttttcttccttatacattaatgtactgtcaattcatttgttcctgaatctattattcaatgaaaatatcattcaatttcagcaaa

SEQ ID NO: 138820 - DNA, 293 bp, Glycine max
  Clone ID: PAT_MRT3847_96361C.1
atagaacgagatgacaaaattgaacatacgttctgccttaggtatatgtatgcaaatttcagaaaaaagatttggaggaggagctatgcttagagagttggtgatggctgcttcaaaagctacatatttggaggcatatgaagagaaaatgaaccaaatcagagagataaacaatcaggcatatgagtggctcgctactgaattgcttaagaagacatgatgtaagtatgcttttagtgcgtactacaagcgtgatgttatgatgaataacatgtataagcgttctaatagtg

SEQ ID NO: 138821 - DNA, 241 bp, Glycine max
  Clone ID: PAT_MRT3847_96362C.1
ggctcgagttaaagttgagagagttcagaagtacttttattctcaaagtaacaattttttccttcatttgtgcattggaattcacaaacatacttttcaaactttaatccaacatagccgtagtctgtctaaagtctaaacgacatacttttactttttgtggaaaattttgcttagtctcatgtaactaaaatttacgatgaagatagaaaaaaacgtacagacagaacattcatcttct

SEQ ID NO: 138822 - DNA, 701 bp, Glycine max
  unsure (1)..(701): unsure at all n locations
  Clone ID: PAT_MRT3847_96363C.1
tcgttgtttgagcagttcacatttccaggtagcagagagggctttgttcttatggaacaatgatcacattgagaacctaatcaagcagaactgcanaattattcttcctattgtattgcctgctctagagaaaaatgctcgaaaccactggaatcaggcagtccaaagtttgacaataaatgtacgcaagatctttgctgataccgatcctgaactcttggaggagtgcctgcgcaagttcaaggaagatgaagcacaagagaaagctttgaagttgaagcgagaggctacatggaagcgcttagaagagattgcagccatgaaagctgcaagcaatgaaccagttcttgtttctcccagaacggcgtcttcttctggctaggcaattgtgcgcagttgaagcaatccttaattttttggcattgcagggtccaaaaagcatgaaggtacaaaaggttttgtttgttcccttggccacatgatggagtcacaatgcgatagggtgcaatgtggctgtgtcatggttttgcatgtgcaagcatagaatgtatatattgaattggatagaaataaatgggtgcctcagatatagagtcaagacacagtttatttggaaaatttgcttttgtaaagctggcgtctgcagtttgatgtaattaaattcctgagtatattgaacttggaatctttttacccttttt

SEQ ID NO: 138823 - DNA, 1679 bp, Glycine max
  Clone ID: PAT_MRT3847_96364C.1
gtgatgcaatgaacaattcgggttcacctccgcgtccgtacggctgcgagaagacgacagaaggggatggtcttatgtggggtcacataggtagggcaggagagcttacattgccgatttcgtttcatttgtgaaaaagaggaacctgagagagagaatcagaggaagaagatgatctataggaagtggagtctccttaccggcccggtcgccattctcggcggcgtagtcgtcgccatcgccgccgcaaacgtcatcttcgtcaagaatgatcctttcctcaaaccagaggagaggaagtatgaaaatgaacctgctaccaagtaggagaaaagagacaacagaagtttgcgttttgatgtcttttaaaccctgatttatgagctctgtatactgttttgcaagacatgctctgggtagttaataagattgagattctgaatggagtctggactctggagcacgggcccttagtttagaactaaccttccaatgttctagaaaactggttcatatttcagagatccttatttttctcttctgtacaatgtcaactgcaaatgtttaatatggtttctaatcttccttttctttcttttatccctatcacctcctctaattgtttggcccataacagtggagcaagacaattttgtgcaaacagaaagaccaacatgacttatctctgacttcccaggagacaaactggaagaaattgaagtcgatattccttgggaccaaaggccatgaatgttactgctcatcagcagcggagtacgacctttcaggacaacagcatttattgaggactgactagtagaaaagcaaatactcatgtttacattgcctgttgaaggaggcgaaaatgaagagtgggaaaatgggtttggggctctaagagggtattgttgatgtggcaagctttgatgagtaagtttcgaataggaaaagacgaacctgaaagagagagaatcagagcaagaagaagaagatgatctatcggaagtggagtctccttaccggcccggtcaccatcctcggcggcgtagtcgtcgccatcgccgccgccaacgttatcttcgtcaagaatgatccattcctcaaaccagaggagaggaactatgaaaatcagcctgctaccaagtaggagaaaagagacaacagaagtttgcgttttgatgtcatttaaaccctgatttatgagctctgtatactgttttgcaagatacgctctcgctagttaataagattgagtttctgaatgaagtctggactctggagcatgggccctcagtttagaactaaccttccaatgttctagaaaactggttcatacttcagagatccttacttgtctcttttgtacaatgtcaactgcaaatgcttaatgtggtttctaatcttccatttctttcgtttaaaaaaaaaaaaaaaaaaaaaaaaaaaaaaaaaaaaaaaaaaaaaaaaaaaaaaaaaaaaaaaaaaaacctctgaaaagcaacactataggcgaaggactttaggtggggattggggaattagggttattcgcggggcaaaaatgattgagggggttttgaacgatcgattgggaaaaaaggggcgcgggaagggcaacgacgatgcataccaccggggacctgaaaaagctgggggcggctcaaactggcacaaaagcc

SEQ ID NO: 138824 - DNA, 685 bp, Glycine max
  Clone ID: PAT_MRT3847_96365C.1
cccacgcgtccgtacggctgcgagaagacgacagaagggtacggctgcgagaagacgacagaagggattgatgatttcgtttcatttgtgaaaagacgaacctgaaagagagagaatcagagcaagaagaagaagatgatctatcggaagtggagtctccttgccggcccggtcaccatcctcggcggcatagtcgtcgccatcgccgccgccaacgttatcttcgtcaagaatgatccattcctcaaaccagaggagaggaactatgaaaatcagcctgctaccaagtaggagaaaagagacaacagaagtttgcgttttgatgtcatttaaaccctgatttatgagctctgtatactgttttgcaagatacgctctcgctggttaataagattgagtttctgaatggagtctggactctggagcacgggcccttagtttagaactaaccttccaatgttctagaaaactggttcatatttcagagatccttatttttctcttctgtacaatgtcaactgcaaatgtttaatatggtttctaatcttccttttctttcttttatccctatcaatttgctgttaatgcttgcctttttggattattatggcaaaatttacgccttgttgtgcttaatgcttggattgtttcatagagatggcttataaaatttaaatgttagact

SEQ ID NO: 138825 - DNA, 299 bp, Glycine max
  Clone ID: PAT_MRT3847_96366C.1
cctggggggcccccctgggtaaaaaatatatttaaaccaaacggtgcttgtttaccctaaaaagggggccccgaccccttttttaaaaaaaattttaggtaaaccccgggcccaaaaatcccggggaaatcccttttaaccaaaaggtgcccactcatagttaaaaaccctttgaggcccaacttttttttttccaagaatttttttccccggctaagaatatttaagacaaaggggggaaaaaaccacaaactttttaagcaaccccttaggttaaaaaaaaaaatgtcaaaaaataa

SEQ ID NO: 138826 - DNA, 509 bp, Glycine max
  Clone ID: PAT_MRT3847_96367C.1
ggatccaattacatcatggccggctcgagatatagaaatgatggctttggttttgcattccctttaaactccaatctcaccactcacttttcgagagccatcttgaaggtgactgagagtgagttaatgaatgaaattgagagaaaatattttgggaagaaggatattgaagaagactcgtctgcggaaatttcttccgctgctccaagcctcaactttcatagctttgcagggctattcttgattacagggattagtactttattagcactaatggtctcagaaactgttatttggcgaagggtcattttgatggctaaagcaatcagccagaggtatttgttcgccactccacctcccaccgaaacacgcgttcatccaattcatgatgattcaattcgcggaatagaggccatttaacaagaccttgttttaacatctcagagactctcgtctgtatatggcaaaaataacaggaggagcaagcttaaatagggtaatgtctgaat

SEQ ID NO: 138827 - DNA, 367 bp, Glycine max
  Clone ID: PAT_MRT3847_96368C.1
ggctcgagcgaggcatgggctactctgtgtgttgcctatttttcatatctctgcgctcaatatcgtggtgatttacaggatggagtgtggaatacagccctgcttattttgcagaagcccgagatcactactctgttggagctcatcgacaacttcaacgtgacaggtgcttaggagatcccccccatatcttgtgcgttgattgatagcgaagaagacccaaccctaccacctatgatgtcttcgcgctgtggtcaccgtcgcggcacccttaggaggggaactttaagaagccgataatgctatgctaccacactctacttttggacaggtatctgagatgacagaagcttgaccacttgccatt

SEQ ID NO: 138828 - DNA, 102 bp, Glycine max
  Clone ID: PAT_MRT3847_96369C.1
caaaattgtgtataattttctgtaatattagttattgtgagagaattgagactctaattgcaatttaaaatcttgatcttgatgaaattccaaacatgatgg

SEQ ID NO: 138829 - DNA, 197 bp, Glycine max
  Clone ID: PAT_MRT3847_9636C.1
cagatattttctggatatgtattggaaggtatctaagattttttatttgattttttgttattctttttaagatatggtttggatgctttcggatataaggaagtttgccttaaagattcttgtatagtcatgttcttcctcatgttgtgagaaataaatccataaatccaaaacgggatgaatatttggtttacgtg

SEQ ID NO: 138830 - DNA, 170 bp, Glycine max
  unsure (1)..(170): unsure at all n locations
  Clone ID: PAT_MRT3847_96370C.1
ctcaaatatatatntatatataaatatactatacttactctctaatattactattacttatctacatctcctcgatgtcatatatacctatctcaatctaaatctattaatatcataactgtatactgatattataatgtagtcttggtatctagctaactattttgaat

SEQ ID NO: 138831 - DNA, 174 bp, Glycine max
  Clone ID: PAT_MRT3847_96371C.1
tcgtcacgccttaagaaatgcggtcaattccttagtgaacctcagtatctacaggtcctaggaacacctgagagatctgacctttcagtgttaatcttaagatgccaaccacctttccatcttgtgggtcaactaactactgatgcattctctctcactcaatcacgatcatgc

SEQ ID NO: 138832 - DNA, 572 bp, Glycine max
  Clone ID: PAT_MRT3847_96372C.1
gacaaccaactccaccagatcgaattttcattgccatatctcgatctaacttacacacgtacatcgtacatttgtgtttgggtactgccctgcccaaactattagtttttgagaaagtggaataacaatcatttatttatatacaagtcttcatagagtggggaatcagagacaagtccacgtgggtttcaggggtgaggatatcatagttacattcttttgcaacccaggttgttcctcagaggaggaaagctaataacacatgcaataccatgtgtagaagctgtaccggcaggggcagagaattctgagaataaaactgaggcctaggcctaccatgcataccgcactaccctgtgtaattgccacttcatttccactattctctatatgttcaatctccgttagctgactcaaaaaatattcactccaaactaccagtcttgcagtatttcttacccatgaaaattggtactctggaaatcgacattctttttggaatactttacaaaaatgctttacttgtggaaaatgctatttacaacattacacagcagaagagatcagggtat

SEQ ID NO: 138833 - DNA, 1558 bp, Glycine max
  Clone ID: PAT_MRT3847_96373C.1
gccctctctctttctctttctgtcttccgatttcgcttaaaaatccgttttttatttcccgtgcatggctttttctgaaattaattcttacccagatgaataagtgctttggaatttgtttctaagaaccccctggttttgtgggtagcttcctactttgtggtggaattggagtaatcgatctggggtatctgctatgaatcccagctttgtgattgtgtgaagaaagttttaatgggtgtttggaaactctcgattcttcttttttcttgttttgggcttttaaaaggcttgaattagcgaggtgaagatgtcgactccggctaggaagagactgatgagggattttaaaagattgcataacttcaacaccaaaaaaaaggaaaggaacttgagccacattttgtccctggtggactcaagaagagtctttcataggacagttaattaaaattatagcctgaaataagggttcactagcaatggcctcaacctcttctgctctcactatatcctcttcttccacccttcatgattgcaaggctccaagacagtcaccagctgcttcaccacaatgtgtgagccttccctctccccttttgcactctcagaactgttcatggaagaccactgcttattgtcgcagtattgctcgaaatgttatggcaatggccacaggagaggcaccagctgaagctgccccgactgaggttctttccctgggggcctcagaatccttaacagaacaagttgcagggatggcctccactctctctatatcctcttcatccacccttgttgatgccaagcctccaactccaagacaatgcgtcacccttcccactcttccccctccaccttttcactctcagactcgtccttggaagaccactgctttctgtcgtaggcttgctcgcaattttatggcaatggccaccacaagagaggcagccgcagcagaagttgccgccacaactgacctctctattgccgagacgccagagattgtgaagactattcaagaagcttgggacaaagttgaagataaatatgcagtgagttcactggcagttgctggtgtggttgcattggtgggctcagctgggatgatctcagcaattgataggcttcctttaattcctgggcttcttgaggtcgtaggcattggctacactgggtggtttgcttacaagaacttcgttttcaagccagacagggaagcttttctacgaaaggtaaaggaaacatatagcgaaatacttggaagcagctaaaagagtgaggaattgatgcttagattctgttcacacaaaagagatctgtctttcagtattttattgaagatgcaaccttgtcgcaataagcttcctgaccatactttatcgcatgtgatgtaatctagcctgaaaataaatgtaactcttgtaataatcattctacttcaagtagatatcatttcttcaattatccctttgtggtttcaaagttaagaaaaaacatctaatgctagcatggatgacttcatgaatttgaaggaaaccttatcattataaatatt

SEQ ID NO: 138834 - DNA, 600 bp, Glycine max
  unsure (1)..(600): unsure at all n locations
  Clone ID: PAT_MRT3847_96374C.1
cgtacgctgccagaaaacaacaaaaggggggggcctcagaatccttaacacgagtgaaagtacaagttgcagggatggcctcaacctcctcctccacactctctatatcctcttcatccacccttgttgatgccaaggctccaagtccaagacaatccccacaatgtgtctcccctccacctgttcactctccttggaagaccactgctttctgtatgtcaattcatttattacaactcctttgtcttataactcaacttcattatacactatggtttgattctttcaggtcgcaggattgcaagcaatgttatggcaatggctaccaccagagaggcacccgcagcagaagttgccacgaccgagctctctgttgccgagacgccagagattgtgaagactattcaagaagcttgggacaaagttgaagacaaatatgcagtgagttcacttgccgtagccggtgtggttgcattggttggctcagctggcatgatctcagcaattgataggcttcctttaattcctggggttcttgaggtcgtangcattggctacagtgggtggtttgcttacaagaaccctattttcaagcctgac

SEQ ID NO: 138835 - DNA, 861 bp, Glycine max
  Clone ID: PAT_MRT3847_96375C.1
ggggcctcagaatcctgaacacgagtgaaagtacaagttgcagggatggcctcaacctcctcctccacactctctatatcctcttcatccacccttgttgatgccaaggctccaagtccaagacaatccccacaatgtgtctcccctccacctgttcactctccttggaagaccactgctttctgtcgcaggattgcaagcaatgttatggcaatggctaccaccagagaggcacccgcagcagaagttgccacgaccgagctctctgttgccgagacgccagagattgtgaagactattcaagaagcttgggacaaagttgaagacaaatatgcagtgagttcacttgccgtagccggtgtggttgcattggttggctcagctggcatgatctcagcaattgataggcttcctttaattcctggggttcttgaggtcgtaggcattggctacagtgggtggtttgcttacaagaacctatttttcaagcctgacagggaagcttttctacgaaaggtaaaggaaacatatagcgaaatacttggaagcagctaaaacagtgaggaattgctgcttagattctgttcacacaaaagatctctgtcttgcagcattttgttaaagatgcaaacctcgcttcattttgtcgcaataagcttcctgaccatactttatcccatgtgatgtaatctagcctgataataaatgtaactcttttaataatcaatctacttcaagaagatttcattttttcaattatccctttgtggtttcaaagttaagaagaaacatctaatgcatggatgacttcatgaatttgaaggaaaccttatcattgcatataaaaataaatttcatttt

SEQ ID NO: 138836 - DNA, 272 bp, Glycine max
  Clone ID: PAT_MRT3847_96376C.1
gtgtgcatggttgtgatgtgtgcacacaacactgtgcaaggcattacatgtgggcatggtcacggtaacctaacaccatgcctagggcttctacataatgggggggctgttaccataagatgctgcaaccgcctcaggagtattgggagcaatgctaggaccactgatgatcaccgtcgtgtgtgccaccgattgatgcttgctgctgatgctgttcgtaggagcaacacttacaatggttaagctctccccgggtaatgtgggggctacat

SEQ ID NO: 138837 - DNA, 299 bp, Glycine max
  unsure (1)..(299): unsure at all n locations
  Clone ID: PAT_MRT3847_96377C.1
agaaatttgatttgtttatgttcttttaatatgctaattctctgtaagattttttaaaatggagaatttagctgtgacaatatttgttaattctttttacttacatgttttttgtatccaaatcagtgctccactntantnnnncnnanganttctangagtatactgcttgaattcacctaggtgactataggtgagcactgatttggattcaaaaattctttgttttgtaccattgacaactattatgtctccagtatattatactcgtgactactttcttgggtaaaaaacaaaag

SEQ ID NO: 138838 - DNA, 756 bp, Glycine max
  Clone ID: PAT_MRT3847_96378C.1
ggaaaagattagtgaaaggatgaaaattcttcaggatttggtccctggttgtaataaggttattgggaaagcattggtccttgatgagataattaattatattcaatctcttcagcgccaagttgagtttttgtcaatgaagcttgaagcagtgaattcaagacttaactctggtattgaagcgtttcctcctaaagattttggtcagcaagcatttgatcctgctggcataccattcggttcgcaagctccaagagagtatagcagaggttcttcaccagactggttacatatgcagataggaggtagttttgaaagaacaacgtagtctacgagatcccttggtaataaatacataaaccagtggtattccattcttcagtagcacccagaaaacatcaatggtatactcggggaagcaagtacaatgggcacctcattcccattttctacactaggcatggagctgtcactgtttttcacaggactgcttcagtttctatttaagcatctccatatgttggtgtgttggaaaatgaattcatttactcaatatatgtagtatagtggacttttaggctttgtattctgctactcaacataacccttaaaatgatcattcttcttgtaaaagaatgctgcttcatcttaatacatgatgcttacagattgtgtaatactctcaatattggggtttgtgaaacaatgttgaataaattaacctcatagtactgtacaattctgtttttggttttt

SEQ ID NO: 138839 - DNA, 385 bp, Glycine max
  Clone ID: PAT_MRT3847_96379C.1
attaccagtatggtttttgtttatgtgtattgttttatatatggacatttggatggactcggggggggccccgggaaatgggaaccggaaccggcgggcgaaccaccattccgaaatggaggcaaaaaaaagctgggcgtaccaaggggaaaaacccaaatactgtgccaaaacgctagggccacacaggaaaacacagaacgcaaccggaaggcaaacaaggtaaaccaaggggggccaaaaaagagaccgagccaaaaaaaggcaaaggcggctcacgggccgaaatggaaaccggaaaccaatccccccaaaaaaataaagcggaagcccaaaagcggaaagaaggggggcccaaagaaggaacccaacgaaagtaaatggg

SEQ ID NO: 138840 - DNA, 150 bp, Glycine max
  Clone ID: PAT_MRT3847_9637C.1
ggggggggggtttttttccataacggcactcaaggttgagtcataaaattcaaacagcagcttccttgattcaaaaaaagctgtaaagttgccacttatagaatcacaggttggatcacattaataacatgccctagatgtataagcaaa

SEQ ID NO: 138841 - DNA, 101 bp, Glycine max
  Clone ID: PAT_MRT3847_96380C.1
cttcatgcctgcagtgtacttacagatctctcgtgaattcaattcacattttaagaaataagagcaaaatggcatggttcaattgaattatttgcttctta

SEQ ID NO: 138842 - DNA, 302 bp, Glycine max
  Clone ID: PAT_MRT3847_96381C.1
ggccgggttcatttgagacaaaaaaaattatatcacccttctcacttttaaacagatgcaatatgtactatattactggaagagggcatacactatcatacatccaagagctaaaacggacaacttaaacacaaacccaatgtagcatacacacctcctactggtcatttacgagggggacaggatacaagcctttcgaacacaacctgatcttggtcccaacctattttgatcaaatgcagaacatgctactactacttgagttccaccacttacgcaacaccgcaccccccatcgctctg

SEQ ID NO: 138843 - DNA, 545 bp, Glycine max
  unsure (1)..(545): unsure at all n locations
  Clone ID: PAT_MRT3847_96382C.1
gcgagcggagcaatcactatgtcaggtcggccagcccttnnnnnttgtttgttttttcttttcttttcttcnttctttattcattttattttttattttgttttttaaacaagttcaccctttctcctttttagaaaaagaccattttttttttttttttttttctcggggctggaaccctacccccccaacaaaaaaaaagaaaaaaaaataccctccccttttcaaagggaaacggaacaaaattttttatttttatgtttcgggttggttgggctctgatcagaaaaaaaacaaattcaccaactttttcttctctgtttccggaataggaaaaggggcgctgggaacctcgaacctttctttttggccgagtcaaatttatattggggaaaaggaaagggaccgtttccaggctcggccatattcaactttttccgtcttgccttaaaatgcgggtggcgttcacttaaaagaataggaacaggaccccggcaagggtaacccactctaaattttattttggggtgggggggggttttttt

SEQ ID NO: 138844 - DNA, 292 bp, Glycine max
  Clone ID: PAT_MRT3847_96383C.1
gacctgtcttggggagaagtagaatcagttctacagagacaacattaaaatctatccccgaatccgccatttttaagccaccatcacctggaacctttagccaccttacctgcgagcctccttgatctttatcaagagcggtcccttctcccacagagtaaacaccctctggtcaaaccagttcttcttctgatcaatgagctcgaggtcaaagtggaagatcaccttggccaagatgcagcgcatctccgcataggcaagattcttgccaaggcagttcctgggaccgttc

SEQ ID NO: 138845 - DNA, 1050 bp, Glycine max
  Clone ID: PAT_MRT3847_96384C.1
acgacccacgcgtccgcggacgcgtgggtccaattccactatcatgtgagaacttagaagatggataataataggtgtgaatattatgcaagctttatttcagcagcgaagtctgtgtttggccttaataagctccaggtaagggcgggcaatttacccaaactttttgagtaaaaaaggtaattaaagtagagtgaactgctgatgaaaaattcagaactagtgcaagatacatggattattggactagcttaatatagttacacataatggtggagccaagacgagtaattaagatgatgaatcgtgtgatagtttgttggggggaggtgctagttgacgcagctgcacttgcacttggacatgcatcccttgcagtcagagagtgtggggtaggtggtgttgcagtcgcatttcttgatgcaattgggccttgagctgccatcccacaagcaccgagccatgcagtgtaggattggtgtgcagggaggacaagcgtttttcatctggttcacaatgcagtctttgcatccccttccatctgtgggtggacaactcatgataggtgaagccaccatcatcataaccagcaacagcgcctgtgcttgtaattggaatgatactatgcgcttcttcgtctccatgtgaacctcaacacttttgctcttcacaagttgtggaaaagaataatagtgtatgctgacagatatatggtagctatgcataatgcatgccacttcgacatgtgtataaaatttggaccgaggttcgtgtcaaatacagaattccaagattcacataaggcatcggtagtgtggaagcattaagtttcttggcaggccttgcaattaaacacaacatttactcttatatgactctggcagctcatggctctctcggtttgcacagccatatctatcccatcgcaatcctttaagcaaacaagcgtaatcaatggagaataaatattttttgtattgaacttttttcctgtaattttatttgtaaatattttatatttatagtatctttttaaagattggttccttt

SEQ ID NO: 138846 - DNA, 304 bp, Glycine max
  Clone ID: PAT_MRT3847_96385C.1
ggctcgagctgatacctcatttctgagggttcaagcggatcccactactaatatttcggatttacctttgcaagcaccccacgccactacctttgacataaacggagagggttctgctctcgtgattgacctatgaaccacctacatttgtgatcatgaaaggtgacatgacccacttgctgatctaatcaacgaccaatggcacaaagcgacaccgtcttacttaggttttactgaatgctcgctattgatcgggcatagcgctaacaaccaagaacccatgaaccccaacaacctcgttttt

SEQ ID NO: 138847 - DNA, 550 bp, Glycine max
  Clone ID: PAT_MRT3847_96386C.1
catttaggatgcatcccattcccatatgctgtttatcagaaaaggactgtctgcttgcacttaactttcagtgtgttcttgtataataaaatgctctaacagcctctgaacaagatccacatcatacatagtctctcctttattataagaaggaatcaaaagatcagccagtgtagcctgctcaaactgcattcccacccttttctctaactcagtgaccagtgcaggtgcaacctttaacatgattgccattctcagcagcctaagaaggaagctgcatgagacactgtccttctgaggtggaataatgctgacaaggctctctatgatcatcctttgctctttagcttgaagacttgaagtgtgcatcttttgttccagtcacaaccatatgaagtccacttttccagctaccgccgccactactactactgttactcatgctgcagttgcttgcttcatcaccaggggttgcagtgtcactagtgcctcccggtagccacttagttgcataatgcattattgaagcaccaaccaattcaaatctcat

SEQ ID NO: 138848 - DNA, 580 bp, Glycine max
  Clone ID: PAT_MRT3847_96387C.1
ttttcatatccttttccatcggagtatttttgccattgtagttcctctgcaaggcatgaaaaatgatgatgtagataagcacaactctagattttatgtgcttttgtatttttccctaagtagttaatggcagaaggtggcatggaccactcaccccaaaaaatgctacagcagcatatctaactgcaaacggctgctacactgaagatagcaggtgcagatgcaatgtaaaaactgaataaatttgtaatatgcacataattgatattaaaaaaactaagacacatggaaattatcaatactttgctctgccttctggtttcatcactattgcatgatcctgtattaaactcataattgctactattgtggctgtaaatacctcctttaccataaggttctattgcttaaatttggaatttgagcctttgttttcatcactattgcattatcctgtcttgatacttttctaaaacaccctgtatggatgcggctgcctcttcaatctccctcacaggttgatcagcaatatttttttttattttttatcagcaatatgattgagttcaaaaatgaatcc

SEQ ID NO: 138849 - DNA, 2839 bp, Glycine max
  Clone ID: PAT_MRT3847_96388C.1
cggccgtgaaggatgtcgagtccggaaaacattaagaagtgaggtacgctaaaaagagtagggtttacagaaaggagatagcgttagtgaactgaagaaggtaacttaggagggaaacggaacgataaagtatttgattttgcacgcaaatgcgaatgtgatggcacatgttcttctacgtcgccctcctctgcttcgtgtcatcatggcctctcgcttcatcacctcctcttcctttcacatgcgcctttcttcattcccttcctctactctctccaaaaccaggacgagttttcctctgagaaagtttttggctccctgttgttcggttccaaatgcgttcactccaagggcgtttatgtcttctatctcggcgaccgaagcttttctcaaaagtgaaagttccacagcttatagttctgatcaaattcaggtgcttgaaggcttggaccctgtgaggaaaaggcccgggatgtatattggaagcaccggtccacgagggttgcaccatttggtgtacgaaattttggataattctgttgacgaagctcaagctgggtttgcttccaagatttatgttgttttgcatgcggatgattctgtgagcatcacagacaatggtcgtgggattcctactgacttgcatccagttacaaataaatctgtccttggagacagtgttgacggtcttgcatgctggcggaaaatttgctacgcgtccgagcggctactctgtttcaggaggtttacacggtgttggtttgtctgttgttaatgccttgtctgagtcgctagagataacagtttggcgtgatgggatggaatacatgcaaacatattctcgtggaaaaccagtgtcaattctgaaatgccttgtgcttccagatgaaaggaaagatcttcgagggacacgtgtcagattttggcctgacaaagaagtattcaccactgctattcagtttgatcacaacacaatagctggacgcattagggaattagctttcctcaacccaaagcttacaatcacgcttcggaaagaggacaatgatccagagaaagttcaatataatgaatatttctatgctgggggattggttgaatatgtgaaatggcttaacaccgataagaaagctcttcatgatgttctgagttttagaaaagaaacagatggcatcacagttgatatagcttttcaatggtgtgaagatgcatattcagatacaatactgggatatgctaatagtatacgcactattgatggtggtactcatattgatgctatgaaggcttctataacaagaacacttaatagtcttggaaagaagtcaaaagttattaaggagaaggatattactctaagtggcgagcatgtgagagagggtctaacatgtgttgtctcagtcaaggtcccaaatcctgagtttgaaggacaaacaaagacaaggttaggaaatccagaggtgcgaaaagtggttgatcaatctattcaagaatatcttactgagtatttagaattgcatccagatgttcttgattcagtactttctaaagctcttaatgctttcaaggcagctctggcagcaaaaagagcaagggaattggtgagacaaaagagtgtattgagatcttcttctcttccaggaaaactagctgattgttcatctacagatcctgaagaatgtgaaatctttatagttgaaggtgattcagctggaggaagtgctaaacaagggcgtgacaggcgcttccaggccattctccctctgaggggtaagattctgaatattgaaagaagggatgaagcagcaatgtacaaaaatgaagaaatccaaaatttaattcttggtcttggtcttggagtgaagggagaggattttaaaaaggatgcactccgatatcataagattattattttgactgatgctgatgtggatggtgcccatatccgaactttgctactgacatttttcttcagatatcagagagctttgtttgatgaaggttgcatatatgttggtgttccaccattgtacaaggttgtaaggggaaaacaagtgcactattgctatgatgatgctgaccttaaaaagcttcaaagatcattccctgctaatgcatcatacaacatgcaaaggttcaaagggttgggagagatgatgcctttacaactatgggaaacaaccatggatccagaacgcaggttattgaagcaattaaaagttgaggatgcagcagaagcaaatattgttttttcgtctcttatgggtactagggtggatgttcggaaggaactcatacgaaattctgcaagcctgattgatcttcatcagctagatatttgatggtgcagctggatgtggagaaatggaattccttccatgttaaccatatacactacaatacagtcaagcacaaaaaaatttccttatgatggggaatgtggagagatcttaaatgaaagcaaggttcctgtttttccattggtgccatttggtgatttaaaggaagtgttttactggcacaaaatggagttgcacttttagttgctgggaaatatatctgggaggcttgttggaggttctaattttatttttaaaatgtcaagtgcatatgttttttgcccccacctatttatggtcccaaatttggtaactgcacgtgtaatcatatttaagtacttcagatgttacccttcacaggttaccattaaaatgcaaggttaaagtgtactgtgatcaaactgggtcgagtatttgcagaaatactagaattggaacttttttttttgttgcctaaattatatttcaatggtgaatgactgaatgaaacacgtgtatgg

SEQ ID NO: 138850 - DNA, 429 bp, Glycine max
  Clone ID: PAT_MRT3847_96389C.1
cttgcacggtcgatgagttcaacgagtccatcgactgcatcaagctggtgtctgaggaacttgcggactgggtttcggccagtaggcctgagcggtggtcagatgcgttcttcaagggtctgagacacggacattactcgtctaacgctgcagcgatgttcaaggaatggctaccgctgaaacggattgaaccttcggtcgttcagatggttgacattgtcagatgcaagatgatggaaatgatatttatacgaagggagtcttctaggacttggactgagattcttacaccgtccacgagctgcaagctgcaggaagagatcaacaaatcacacgggctcgatgttgtgtgttcgaccgatagtgtgtttgatgtgcgagatgaatctctgcatgtcgtgaacattgagaactgggagtgcatatgtc

SEQ ID NO: 138851 - DNA, 307 bp, Glycine max
  Clone ID: PAT_MRT3847_9638C.1
tccactcacaaatacaagcgttcccacattacatggcctccttgcccttgaagcggggcggggatctccaaccggcggctgctactttactcccgtcgtatccgccccagcgtttgacgaatcccgaacttcctttccagagctccgacttggatgaccgataaagatttgtcatctactgtctttgatgggaatgatgcctatactcgcctcataatctccaccacaattgcaggcaaaaatggtgaacctatacaaaccatcacttacattgtaaaacttgttgtttggcacatggatcatttgg

SEQ ID NO: 138852 - DNA, 431 bp, Glycine max
  Clone ID: PAT_MRT3847_96390C.1
ttagagagcgtcgggtacgatctggttgtgttgggtgggttggaccctaattcgagggaagcatgtaattcggtgtttgtttattagatcttgatggagaagtggcgccgctgggcgtacatgccggatgggcctagcacattcttagctcgcgcgtaggatttcaaagaaacagcatattgatgccggcggacacgacaactagaagaacgcgctgcggtcagcgttagactatgatgaatacctgggacctgaggtatatgcttccggacatggaagcgtagcgcgacgagggcaagggctttttatgcagtgagaggttcgtctctgttggaggttacccgacagagacacactgaaggttggtgaagagtgcgcaagcgttctatccagccacgcggatgcggagataagagaaggaggagattctt

SEQ ID NO: 138853 - DNA, 158 bp, Glycine max
  Clone ID: PAT_MRT3847_96391C.1
tcgacccacactccgcccacgcttccgcccactcatacctccactctttctactattgactaacaaaactatcggcagttgtttttataactgcagcaatcccttctagcaaattattattcattttaataccttggcctttaaccctttcaaccatt

SEQ ID NO: 138854 - DNA, 328 bp, Glycine max
  unsure (1)..(328): unsure at all n locations
  Clone ID: PAT_MRT3847_96392C.1
cataactgttgacaatgggaacgaaaaattaccaagtgaggggccatcaaatgactagaggaatacaaaactagatgtcattcaaagtcacgctcctaatattcttaacaaagacccgccaaaatgccataacctatagcgcagcaagtgtgttcatttcaaagcaaacaggacttgaatttatgactcgagaacaaaggaaaagtgggaactggttttaactcncnnnctagtgtctcagccttcgactggagctaaggacagggacagcactggcagagtttaatgagcaaacccctccagccttcactttaccacagtttttgca

SEQ ID NO: 138855 - DNA, 272 bp, Glycine max
  unsure (1)..(272): unsure at all n locations
  Clone ID: PAT_MRT3847_96393C.1
tatcactgacgcgngggcagaagagngcacgggggtgtttttggagcagaacgggccattttccgaaggcgcactatatagtgctgacgatctggctactaacccgaaccagctgcgaaccgaggaagcctaggactcgcagaacctctctcgaagaaaagcttcttatccgtctccgtagtctcaacaaacctacgggaacacccggatcgattaccgcgaacctcggatccaacgggaatccaatggtgcgacctggcagcagaactgga

SEQ ID NO: 138856 - DNA, 1728 bp, Glycine max
  Clone ID: PAT_MRT3847_96394C.1
tctattttgttctggcctaatccatataaaggtcttgtatgtttattgaatgatttcaacacagattcttacaagtgatgtaattatgacaagtgatgtaataaaaataattgatattttaaaagttttatatgtcaaacacacttggaaatgcaatagcctgtaaattccttttttatacccccaaaagcccaaaatggcgataacaaactgagcccaaaagcctaatcccagatgcagcactgcaggtgattgaaggcacaaagttcacagaaaatagcgcgctgaatagtgtgcatcggttcagacttcagagcatatgaaatactgcaaattttccctcgtctgtgacgctaaggaaaaatcgacctagatttattttattggggaatagagggtacatatcccttccactctgtcgaaaacacatctccccaaatttgaaaagcatgatgcccatcacatgtgaaagctcaattgtttcccctcttctcctgtcacgagtatgtcaggctaagacggacccaacaagagcccttctgttagggaataaattctcaacaatggcagtaactgccttgccgaagacatgttgtatccaatgcacgattgtccgatccaaatttagccacaaaagtggtggtcccatggagaaaaaagggaagaagacaacaggaaagaaagagcaccacttgtggaaaagtagagattctgctcagtctggccaaaaggcacttgctcttgttagaactgtttataaactccctaatgagaaagaggctgtttatggggtcgttagacaaatggacagggttggaaacagagttccctgtgattgcagtgtctaaggctttaaaaatcttaaggaaaaggggtcactgggttcgtgtaattcaagtagctaagtggatgttaagcaaaggtcaaggagcaacgatgggaacatatgacacccttcttctggcatttgatatggacaagagggtagacgaggcagaatcgttgtggaatatgatcatacatgcccacatgcgctctgtctcaaaaagattgttttctaggatgatctcgttatatgatcatcataatatgccggataagattattgatgtatttgcagacatggaggagttgcggctaaaacctgatgaagatacggtcaggagagtggcaagagcttttagagaactaggtgacgaagagaagcggaaactggttataaaacaatatgggcttaaatggaagtacattcacttcaatggtgaacgggtgagagttagaacagaagcatgggaagataataaatcaacaaattgaaatgggtaaatgagtacatgtcaatgaggacaccactagatcttaatatctgggatctgccgtttcgaagcgatttatcttgttgcgttctccttctggtgcattagtggctcaccaatttgattcattgtcgtgcatcccggtccaacatagctactgatcaatcagaggcactacattgagggaaatgggtgcaccctaaattgaaaaacgacaatgttgtagcgtatagatacttagataggcatttatttcagagcaaaatttgttaatgtataagatttgatgtctacactcgaaactagttttctagctaagttctgcctgtattaattatgcgtttagggatattccttatactggatcaacctaatgagcctgacaaattgaatcatgaattgttttgtgttc

SEQ ID NO: 138857 - DNA, 479 bp, Glycine max
  unsure (1)..(479): unsure at all n locations
  Clone ID: PAT_MRT3847_96395C.1
ttgctttatgcccatcacatgtgaaagctcaattggttcccctcttctcctgtcacgagtatgtcaggctaagacggacccaacaagagcccttctgttagggaataaattctcaacaatggcagtaactgccttgccgaagacaagttgtatccaatgcacgattgtccgatccaaatttagccacaaaagtggtggtcccatggagaaaaaagggaagaagacaacaggaaagaaagagcaccacttgtggaaaagtagagattctgctcagtctggccaaaaggcacttgctcttgttagaactattatggaggtgcagatgaatgtggagaagctggtaatatcgggtttataaactccctaatgagaaagaggctgtttatggngcgttagacaaatggacagcttgggaaacagagatccctgtgattgcagtgtctaaggcttaaaaatcttaaggaaaggggtcactgggt

SEQ ID NO: 138858 - DNA, 1082 bp, Glycine max
  Clone ID: PAT_MRT3847_96396C.1
aggacccaagcaagaggctttctgttggagaataaattttcaacatttacaggaaccgcctcgccaaggtaacaacagctctagaaaaatagcattaataattgcatttcttgtatttggctttgaaaatttgaaatattctgctttgactgcagacaagttgtatccgctgcacggttgtgcaatccaaatttggccacaaaggtggtagtcccatggagaagaagtaggttattcattctattttcgtcatcttctaatgcattcttggttatatgaatgatttgttttacctggaatgcagaaaagggaagaagacaacaggaaagaaagagcaccacttgtggaaaagtagagattctgctcagtctggccaaaaggcacttgctcttgttaggactgtatgtttgcctacccattgatatccttttcattcagaatcttaggtttggggtattactggattctccacattcatcagcactgccatgatctgatattttatcatcctgtgtattcaaaattagactttgtccgccagttacgggttagtttggattagttagattcagttatttttttagtatctttaactgtaacttactttttagatatagcatactgttattatcggtttatagattgagcacattcatttcactccaatacaaagagtgatttatctcctttttcttatttttcttctggtttctggagttttctcaactttccctcaattcctctaccgatcccttctgtcgtcttctctatcagattatggaggtgcagatgaatgtggagaagctggtaatatcgggtttataaactccctaatgagaaagaggctgtttatggggcgttagacaaatggacagcttgggaaacagagttccctgtgattgcagtgtctaaggctttaaaaatcttaaggaaaaggggtcactgggttcgtgtaattcaagtagctaagtggatgttaagcaaaggtcaaggagcaacgatgggaacatatgacacccttcttctggcatttgatatggacaagagggtagacgaggcagaatcgttgtggaatatgatca

SEQ ID NO: 138859 - DNA, 347 bp, Glycine max
  unsure (1)..(347): unsure at all n locations
  Clone ID: PAT_MRT3847_96397C.1
antgatnnacgcntangtanactcggnattnngctcgagctcgancnncccgcngctcgctngnaattgcgcttcnatgcgtntcgtaggnctantncgcatcacgagggtcancagcngtagcnnacctntgganggccnnngnnnnntacngctggncgagcagacngannngcgntcagcacgcgtgngcttctagncnggnttctggnttatagagcgttcaggncatactcnaacncncggtagcttcgcncnactaggntttngnaancaaagcgctgngagccaatnnngcgaatcannggntccngtgngnnntagggtggaattatnanngncanang

SEQ ID NO: 138860 - DNA, 585 bp, Glycine max
  unsure (1)..(585): unsure at all n locations
  Clone ID: PAT_MRT3847_96398C.1
ccacgcgtccggtctttctggtactgtcacttctttcttctttagttcgtagttttgaagaagaacacaaatgactgtaatctctgctcttttctaacgacaaagacaaagagggaaacacatgtcacattcacaaagaatgagaaagagacacaacagtgacaaatatgcagacaaagaagaatcccaagctccaacttcatccaaatcagattcagaccacacatcattcctttgttcacaaaaacgagtcttcgctctctgcttggcattccgaatggtgaattccgttttggtgcagacttatttcaaccccgatgaacactggcaaggccnccgagatcgcgcatcgcatcgcttttgggtacggtcacttaacctgggagtggaaacaaggtatccgaagctacttgcaccccatcatccttcgttccgctttataggctccttgccttactgcatcttgataccccatggcttatgatgagggctccacggctactgcagtctgtattctctgcagttggtgatttattacttgtacaagcttgctggcggttctctttggtgaattctgttgcaaaa

SEQ ID NO: 138861 - DNA, 235 bp, Glycine max
  Clone ID: PAT_MRT3847_96399C.1
ccaaagaaggtgaaatctataacatgggagttcaaggttcatttggattagtaaaaaaatattggcttggcaaaccaactcgagaaatcttaattggagttctaaaaacacaaaaagggggccaaaaaccagggttggatgcgatcttacctttctcgattcccttttactttctactggcgacctttacgggctgtttattcctttttttgacaccaaactttgcaacttttag

SEQ ID NO: 138862 - DNA, 529 bp, Glycine max
  Clone ID: PAT_MRT3847_9639C.1
atcacggcaagcatgttcgcctccaacttcgtcgtcaaggacgaagccctcaagcacacccgtggcgaagacaagctcacgcgcttccgccaaaacaacaccatcgccacgggcaactacatggaaaacagcttctgcagcgtctgcggcaccctcatgtaccgccgcagcagcggctaccccggcatgagcatcccgcgcatcggcaccatcgacgactttgccctgcaggagaccaagttcaacccgcgcgtggagacgtttgagaaggatcggtgcaagtggttgcagcctgcgacggtggacgagcatgtcgagggcgcgtattatcccgcggggaaggagtggaagagtaagcatgatggggcgggttcccagtcttgagtgggagtggggaaggtggttgggagtttgtaagggtccggtgggagttgaaagctccaagtagcggacacccatatccttgggtcctggaagtagtcgacaatggaagggtgatccctagttccagcttgatattgtagttccc

SEQ ID NO: 138863 - DNA, 175 bp, Glycine max
  unsure (1)..(175): unsure at all n locations
  Clone ID: PAT_MRT3847_963C.1
ttgaacaaacccaccaagcnnccccgaagcaaccaaaagggnnccacagcacaaagaagacagggaagggaaagagacccggaaaaggagggaaccgcaaaaggaaggccaaggggcccggaacaaagacccccagggaagccancgaaggaaccnagacngacaagaagcgccc

SEQ ID NO: 138864 - DNA, 470 bp, Glycine max
  Clone ID: PAT_MRT3847_96400C.1
gcgcgtctttctcttctgttaatactcttcttccatgatgcaccatccaactgattttctcctccaacccaatttcactcgtggggtatctgcttccctcaacctagttttgctacttatgcttgttgtgtattgggtatggaagaaagtgcaagtggacaatagtgaaaagagtgagagaaaaggattccataatactgctttcttgtactacaaacacagtctggtttgtagcttagttatttgtgtgttcaaccttttgttgtgcttactaagctacttttacttgtataacaattatggttcagaggagcttgtcactgcttctgatttggctctcaaaacagttgtttggggttctgtttgtgtttttttatattctacaaactccgaggcacaggatccgagtttccctcgtttgtagagaaattggtgatgattaaatgaatgactatgaaaaacctcatact

SEQ ID NO: 138865 - DNA, 869 bp, Glycine max
  Clone ID: PAT_MRT3847_96401C.1
tacggctgcgagaagacgacagaacccacgcgtccgcatttgtgtatttgagcttaggaatagaagtagagggaactagtgaagagataaagaagacggaggcggtttggagtatgacttcttgcacctcttttgcatcctttctcatttcttcttcttcatttccttcattgtgcttcgcgcaaacccactcaatcacatgtaaacaacgcttcccatttccttctgtaaagggaagaagaaagttctcaactttatcattttcatccaccaaaaggctcgttacaagagccgctgagtacaaattcccagaccctattcccgaatttgcagatgccgagactcaaaaattcaaaagccaccttctcaaaaagctttcaaagaaagatatgtatggagaatcaattgaggaagttgtaggaatttgcactgagattttcagcactttcttacactccgagtatggaggtcctggtacactcttggtccttcctttcgttgacatggccgatgccctaaatgaacaaggattgcctggtgggccacaagctgcacgtgctgcgatcaagtgggctcaagatcatgttgacaaagactggaaagaatggactaatggtgataccaacaaaaaatagggtacctcttgtatgttatttagtcgttataactggtgcttatgttgtaagagacctaaatgatcggttttgatatctatttcttaagtgcccgttcggtttagtatttggatagagttggatagaattgattttgaaagagttaagagaaattatattgccacgtgtatttttttattgaaaaagtgcaaaagttaattgtccaaaaaaaaaaaaaaaaaaataacaaacaaa

SEQ ID NO: 138866 - DNA, 352 bp, Glycine max
  Clone ID: PAT_MRT3847_96402C.1
gcgacacaccctcaagcaaccgtagtggtacctgtgatcatgccatttgtcaagacctggggattaagggccctattgaccgccctgctgtccacatggcctttcacatttactatgatcattatcacgatcataaactcgatgtatacacccctgatcatacccgttttcatgattgttttaacgattctatggtagatgtatacattgatatctctcatcatcgctatgaccatagatgggtacacagattggtgccactgtccgttccaattgactttgcacctgatagtttgattgaaccatattcttatcctactgcttatggtccataccaagttaaattactgat

SEQ ID NO: 138867 - DNA, 347 bp, Glycine max
  unsure (1)..(347): unsure at all n locations
  Clone ID: PAT_MRT3847_96403C.1
gtacgtnagctcggaattcgggctcgagagattttatccaattgaaattttaanaatgactgggnataaacttaaagantcccaantattggaattgaataagtannacaatttaattggattggtcgaatggtatcaaaaaaatggagtactaactcccatttcttatttattattgaattaaccgatcaacttgctttgttatcgaacatttctttttgatttcaaaaattttccggaaaaaatttgantctatttttatatgcgaatcaatcctactacttctggtcctgaggnttctgcgctgaaaaaaaaatccnggggntcgnccaaaatggtccgnatan

SEQ ID NO: 138868 - DNA, 299 bp, Glycine max
  Clone ID: PAT_MRT3847_96404C.1
aaaaaacatacaaaaacaaaaaaaaaaaaaaaaaaaaaaaaacaaaaaataaaaaaaaaaagaaaacttaaaaaacctcaatcccatcttaatacatctaatatactttcacctaaattcaattacttaacatttttataacaacacctaatctatattaaacccttaatttaccacactttattaacttataaaacattctctttatctcacttaatttattttcaccatcataccactttcaccattcttcccaataactaacaaacctcaatccctcaatctaccctaactttacc

SEQ ID NO: 138869 - DNA, 1592 bp, Glycine max
  Clone ID: PAT_MRT3847_96405C.1
caaataataaactaatattatcaattaatccccaaggttcgttattattaaacgatggtatttgatttgtcaaatacatcattattgtatactcttttatatgtatggcgcaacccaatttttgttttttttttttcaatttttaatctcctatccctttttttaattttggaatcgaaatatctaatctaaataatccaaaaattcactcttaatcttgacagtgatatatgttgtatatgtaaatcctagatgtaaaaataggcagacttctcccgggaaaaaaagtaggtaaaaaaatatgctaagtataaattgtctactgatgaaatacgaaagctgatgatattgaaaaaaaaagaattgtaaataaggttcaggttcgacttccatagagaatatagatgatattgtctataatgataccaaaacttacaaccccggataaacgtattaaatggctttcggcgcaagaacattgaaaaaaataaaaaactttcgaaagattttatccaattgaaattttaaaaatgactgggataaacttaagaattcaattattgaaattgaataagtaaacaatttaattggattggtcgaatggtatcaaaaaaatggagtactaactcccatttcttatttattattgaattaaccgatcaacttgctttgttatcgaacatttctttttgatttcaaaaattttccggaaaaaatttgatttcaaaaattttccggaaaaaatttgaatctatttttatatgcgaatcaatcctactacttctggtcctgaggtttctgcgcttgaaaaaaaaaatctgggacgtatcgcccaaataattggtccggtactagatgtagcttttcccccaggtaagatgcctaatatttacaacgctctgatagttaagggtcgagatactgttggtcaacaaattaatgtgacttgtgaagtacagcaattattaggaaataatcgaattagagctgtagctatgagtgcgacagaaggtctaatgagaggaatggaagtgattgacacaggagctgccctaagtgttccagtaggtggagcaactctaggacgaattttcaacgtgcttggagagcccattgataatttaggtcctgtagatactcgcacaacatctcccattcatagatctgcgcctgcctttatacaattagatacaaaattagccatttttgaaacaggaataaaagtagtagatcttttagctccttatcgtcgtggaggaaaaataggacttttcggtggagctggagtgggtaaaacggtactgattatggaattgatcaataacattgccaaagctcatggaggtgtatccttatcgtcgtggaggaaaaataggacttttcggtggagctggagtgggtaaaacggtactgattatggaattgatcaataacattgccaaagctatgggggtgtatctgtatttggcggagtagtgaacgtactcgtgagggaaatgatctttatatggaaatgaaagaatctgggagtattaatgaaccaaatattgcaaaatcaaaagtagctctagtatatgggtcaaatgaatgaa

SEQ ID NO: 138870 - DNA, 415 bp, Glycine max
  unsure (1)..(415): unsure at all n locations
  Clone ID: PAT_MRT3847_96406C.1
caaaacggtagatggggaggctaaattaagcctaggagaaaaatagatgaaataaccatgatagccaaaagtaggaggagtgacgatggccatacctaacgattgatagattgtcgatgagcacagatatgcaaaaaacagaaagagagagtagatatatacgtataaagggaacttaaaccgaaccgtttagacgtggtttacgtaccgtaaaatagccgtgagccggtactattagcataatattgcggaaggaatacaacggattgctaggcaatgtttataggttagaggcccctatcngagcgcccgttaagagagtgttgccacgtacggccaaagtgtatgactcgtataggagcgaccataagttggaattggcacgtgggtagacgatgtgggcaccgtaatagta

SEQ ID NO: 138871 - DNA, 539 bp, Glycine max
  unsure (1)..(539): unsure at all n locations
  Clone ID: PAT_MRT3847_96407C.1
gaataccagcgacaacatgtggtaattatagaaagctctaggggaggctacactattatcaagcaagtcggagacctagcatgatgatagattcacctccactccttagattccccctttttttactcaaactcgtgggtgcttagaatgcaatgtaaaaatgtgaaatatacagcagttattacattttacacaattcaacaaatgcacacacaaagtttcacaattccacaatttcttaaaataggtctaactctctaaaaaaagtccccagtggagtcgccagctgtcgcaacatgcctttttcttgacgtccgaggcgaggctcacgggtgcgctttccaaaggaggaaagatgcgcgaagttcccaccaatgtttatttgtggaaaacgtcggaaaaactgaaggaaatcggtcaaaatgaaaattctaagttcggagttgtattactttgaggaaggtatagcaccttcacgtttgctaaagacacacctatttttagatngggaattggtatctacctttattattttattt

SEQ ID NO: 138872 - DNA, 299 bp, Glycine max
  unsure (1)..(299): unsure at all n locations
  Clone ID: PAT_MRT3847_96408C.1
tntagcntagtaagtancnagnnngtcganagagntgnntncagnggntgtngancagntnaganntnntgnanctanncgtanagncnntntacaagngnagnttacgngaaantaagncgcatgggcagantntagaaagangagagnatntanncngnanncataganggcnganggtaagatgcnagntnttngaanngncncnnnnngtggnngggtgtcgggntgcgccgtanaggngntgtngggnnccntcnangntnnnangtanggatataagagnnanaggngnnagn

SEQ ID NO: 138873 - DNA, 267 bp, Glycine max
  Clone ID: PAT_MRT3847_96409C.1
ttcctgtgaatcctactccgcgtcctacgcttgcgccggggcccaagccacagtcacaggttacggtggatttggtgactctgaaagacgactcaggcactgcatatgatcagggaaatgaagttggtatagcactgtttgctggtgcacctagctaaaatgcaattgggatatggaaagcctttccgtcaaatggtcagccataagcgacttcagcctggcaaaccccggcagcagagtctgcgaaagctgattgggaattggcat

SEQ ID NO: 138874 - DNA, 445 bp, Glycine max
  Clone ID: PAT_MRT3847_9640C.1
ggctcgaggcctgagagagacttagatatagagccagataaatatcgacttacacatatggatccctttaggagaacagtacatgtatgggacaggccccgtggccccaccccatatatgactggatgacaaagcattataccatgaaaattagcagagccttacaagatgtgccgctgataagaaagtaggatgcagtcacttgaagctaaaggctgatttcaaacgctagtgcattgtacaaagattaccaactacagacttcgtgatgtctttgacgtctctagctatcatgggcatactacatgccatacttcacactatgggaataatggccgccccgtggatatatatcttggacttaagtcacatgtctactgtcttcgtggggtactctcatagggatacatgcccgtacccgattactacgattgttactggcttg

SEQ ID NO: 138875 - DNA, 321 bp, Glycine max
  Clone ID: PAT_MRT3847_96410C.1
caacatgctaatagttgaacttgagaaaagtgttcctacattggttggcattgaatgtcccaaggatgagaaacttgctcgtcgcaaaattcttgacaaacctaagacgcgctgcttcactattctccttatggggttaaatcttgtggcccgtcagaagtttttaaattttgtgaggtccttattgagaaaaggggccaggcttagtggtcaagttggaatcaacccatactccatggaatggactgttttggccaatacattactggttaggggcaccgatattttgtgtggcgattatgctagttctgatggtttgat

SEQ ID NO: 138876 - DNA, 592 bp, Glycine max
  Clone ID: PAT_MRT3847_96411C.1
ctgggtgtctttctctttttttcgatttaaaaccgctttatactggtaggactaaacctattttatgataaaacttattctcccctatttgtcaagtataaacctctttacatcaaaaactgcacagctctcaaattactcccatatgcaacattcatagttgaactaaacccaaaccggattttgctggagagcttccttcccagcaatgcctttttttaaatttttaatatatgcgaaatattccctctctggaggaggggttgtcggatccacagaaactggctctctaaatggaaggacacctttgaccttaaatgttctgtcacctccttttgggctttcaagcccggcttcccccataagagctaactctgcccttgatattagacccccaatattaattccttgatcaaatttaacattggaaccaggaggctcctcatgttatgcacaaggccctcctatcgcatagggaatgcgcaccctctcttaggagatcctccccctttactttaaacgggaggatttaacccagctgcttgatcaatcgaacgggggggaggctgttttctttgatcgattcccggcc

SEQ ID NO: 138877 - DNA, 427 bp, Glycine max
  Clone ID: PAT_MRT3847_96412C.1
ccaacgcgtccgtagggtgccaaaagaacaaagaagggggttcatccattttcatcatcacttccacacgtcctgtgccgggtacgactcccgcatgcatcgtcatcatgactgggatcttactctggcatcattatcatctctttggtcacgcgaccttccgcattcacttttggccctgattatataactattactttcaagtaactctcagcaaacaccatttcacatccgtcaactcacgagaacgatcatcattgaaatcaatgagacatgcccggtgttattatcatgtccactgctagagtagaatactgatgataattcattatattggaactgtatcatgttttctcccattatttttttcttcactggcttaagctttggataatcttggatcatcaagtttagtgatccgaagatg

SEQ ID NO: 138878 - DNA, 175 bp, Glycine max
  unsure (1)..(175): unsure at all n locations
  Clone ID: PAT_MRT3847_96413C.1
ggaattcggtgggtcgtttggatttttgtggtctttgggttgaatgttgattntnctgttgcgaagactatgctaccgtntggacctttngttggtgnnggtgaacattgtcgagaacacagttggtgtgtttgttntttttggtttctgttttactggnntttncggggctgtt

SEQ ID NO: 138879 - DNA, 237 bp, Glycine max
  Clone ID: PAT_MRT3847_96414C.1
tggtactttaaattggttacaaactcaaccagattccataggctctcgtttatgttttctatgatgacaacattattgaaaagtccaccaacactttactggtacaaggtactatctaatcttgaacctacctaccaaataaataatcccaataagccattacacaaaccactcaagctttcattttaaaatgtctaccaattttataatcttaataccttgccaataagaattctt

SEQ ID NO: 138880 - DNA, 284 bp, Glycine max
  unsure (1)..(284): unsure at all n locations
  Clone ID: PAT_MRT3847_96415C.1
ttttatttttnggaagaggaacgcatgaaacatattaccaaaggttccaaccattttaatttttcctggtttcaagattatccgcgcttattttaataggcggtttgcattaagctaaaaaaattaaaaaatccctgttttaaacggaaagaaagcccccgcccaaacagatgggaagaaacataaaaaaatcccggtgggataaggacatccgggtccaaaaaaagctccctatggctaccccttttggtctggccccccgatgtaaaaaaccagttgaaaaa

SEQ ID NO: 138881 - DNA, 407 bp, Glycine max
  Clone ID: PAT_MRT3847_96416C.1
tcgccttcgcgttcgtccacacatccggccacagaagggcttgctcaaaatgcagcattatcatagggctgctgtctggagagtgatcctagggggcgtgccatgtttgacatcaacaccatctgttttcatgactgtgccttttggaaagatgttcgaccaaaagctagggctcttttatgttatcacagtgcgagaactgatgcatggagtttggaagtagagaagctctccggcaaatagggtactgtcactggccaaactgaacgggcgggcgctccaatgcatggtggagaggatacactacgcaagcacatcactgaaggagaatgtgtcaccaagcccgatggcggcttagaatcacatgcatgttcagtgtcaaatgagtgtgtggcattgcttgctgt

SEQ ID NO: 138882 - DNA, 390 bp, Glycine max
  unsure (1)..(390): unsure at all n locations
  Clone ID: PAT_MRT3847_96417C.1
ngntaggagagtggntcgtcgcnacnnagcacatngcagnntattgctcaagnnacnactctcncaagnagtgcnnancgncanataggctttngaatgatngtnanatgatnngaacattnntngatacgtgnnttntggtgntganaagtataagtngtaancgcgtngttcagncggatntcgnggattagaagttttgttngntggataaagnattatnncngcncnccngtanactagaggttggcagagtagantnttgagaaanattctgnaannaaggnngggtgnanggggngnatnnngtncgagnggnaatagtgntccgttagntaaaagcgtttttngagnngtaaacggttttggnaaanctnttngggtaagcnc

SEQ ID NO: 138883 - DNA, 453 bp, Glycine max
  unsure (1)..(453): unsure at all n locations
  Clone ID: PAT_MRT3847_96418C.1
ggtaaacaacgacattatgtccgatattatctggaacgaatacatttggctgccgcccaatatgacctgggccgacttggagtcccgggaaggcctcaactacccccaatttcgtgagctcagttacgcttttctggctgcttgcatcatcaccgtcgtgcgcatatgcaccgaagcatttgtattcgtcccaattggtttttatggcggatggatggatgaaaaaaagggcagcatttattatcgcatttgggaccatttgttctttggatttgccggcagaagcaaattcaaaagggttgctgagacgggttggcgcttcacttattattccatcatttggttcgtcggagtgtccgtgctctacaaagagncgcagttttccagtgtaatcgaatgctttcgcgagtggcccaaacatcacttgccaaatgatgtttggcaatattacat

SEQ ID NO: 138884 - DNA, 422 bp, Glycine max
  Clone ID: PAT_MRT3847_96419C.1
gaataaaacacccccccttcgggaaaaaaaaaaccccttcttaagggaaaaaaaaaaggccttatttttttaaaaaaaaaagggggcgcttctttcccagggaatggggcggctgaactccctagtgaggggcgcgacctacccgcataaaaggggcgggaaaaaaaaaaaccttggtgggaaccaaaaaaaaaaaactttttacatgagaaaaaagaagcgtttttttgcaaaagagaaggggtattttttttgcaaaaaacttgggggaaatctttgttaagcgcggggggccaacccctggtgggaaaaaaaaaacgaaaggttggggggggaaaaaacccccccccgggtggggaaacaccctccccgccctgccatttaaggcttaggtccgggggtattttaagttgtattttttg

SEQ ID NO: 138885 - DNA, 289 bp, Glycine max
  Clone ID: PAT_MRT3847_9641C.1
attactcatattcgcttcccctgttctcaactataacaaggatggctctgcttccctcaacttgtccttggaggaaaacttagacccagctttttgccgttatactgcaaacatctataccatctccaatattcctccgctatatatggcacaaaatcaagcctataaaagacgattttatgatgtactatccctagaactatacaccattaaatatctcgaggaggactgctattgtaacatttgcattgccaagggcctatgcatgtcaacacctgctactattgga

SEQ ID NO: 138886 - DNA, 293 bp, Glycine max
  Clone ID: PAT_MRT3847_96420C.1
gttcatacctgctattctctttatcgacgcgctgggttggttattcttgtgctgttgaatctggctaggtgcggatgaggatccacgcgctgctatgccgatcggctgtaccgcttgcttattgtggacgatattgatcaagatctccaggctcagtctcagtggaggagagccattggttgaagcacgtaggtggattttagtggatgctacctgatgtcaatgatgttcattatagtacaggcagcaataacgagtggaccagacgtctctgtatgaagagatgggcaagt

SEQ ID NO: 138887 - DNA, 412 bp, Glycine max
  unsure (1)..(412): unsure at all n locations
  Clone ID: PAT_MRT3847_96421C.1
cacacatacatgttctctaattctgaaaaagataaccaatttaagcgaatgagatgagagaggagaacccacacgatgacgtacaccaactactctagtacttgtgtcaaccacaataagcactcaggcatagcataagccatttaagtgggtcatcaatcaggataaattaaagctgcatgctctcaatnctcacgcgaacccatccaagaaagtcaattggtccaataggtttacgaaaaccgatgggtcggtgcgtgattcatcatgatgagcagatcatacgatgcgtgtttaatctcgtttggacctctagnggcatgctaacttctgaggcaccggtgtctgacttggggtagcaaacaaaagtgtgcagtaacttaggccagggacccaaatagggcctaccctg

SEQ ID NO: 138888 - DNA, 754 bp, Glycine max
  unsure (1)..(754): unsure at all n locations
  Clone ID: PAT_MRT3847_96422C.1
gtgctctcagtattatcttgcttcgccacgcgtccgtggttttctacggaatgtttattggcatgggatagtcacaagtaattaaagacaaatcacaactcagtagtcatccaattccaagaagagagcagcttcaaaacgagggaagtattcataaaggagaatacagagaggcaaatataaagaagaaaagaaatggaaaatagagtactttggtgaagaacaggagctttcctccttcttagtttgtctcacaacaaaggtaagatccttaatatccttatcggttacttgcgccccgtcttttaatttatccattgctgaaatgaatgcttgtaaataaatatatttgcatgataaatatgtctgttcctagcttcttttttttattatcaatttgatacccaaaatatattaaaagattcaatttgacacccaaaatatattaaaaaatttaatttgatctcaatttcttttaaaaaaattaatttaatttacaaatcatttaaaaacaggccaatataatctttttcgtccaactaagttatcgttagaataacaaattcaaacaatttttgtatacaaatagtgacaactactatatttattattagttntaaaaaataaaacgattntcattcttttttcttcttcttcactttcggttctattaatcctcaaaagggtttcagaaagtgctgtttaggtggattagatcttggcttgtgggtgggttaaggggggtgatgatggg

SEQ ID NO: 138889 - DNA, 1815 bp, Glycine max
  Clone ID: PAT_MRT3847_96423C.1
ttttcttactattggtttccacttcccagtgaccacaaaacaacactctgcacgttgttcccaccaccaccataccttcttcactcactctcgggagcgtcgaaaagaaaaatgttcacattagccacctcttcccaagtactgttaagacttcagccaccgcactcgatggagccaatggcccactcactcaccctaactccgtttcccgccaccgcttcctccttccgccaccgtcacctctacgccgttaaagccctaactcttcgctccgtcactcgccgtttaaaacccgcactcgttagagcctgtgatcggtcacaacagatgggtggtaatggaagcaaagagacgaagggattgagttgggtggaacccattttgacatttgctaggagaaacattctacccttggctctggttagtgcagtgacattaggattaacatatcctagtattggttgtgttgctgataaatacggtgtgtcaaaaattggtccatttggtatttttgttatctcaggattgatgttgcgtagtgaagaaatcggtgcagcagtagaagcatggcctgttggactctttgggcttgtgtctattttatttcttacaccatactttttctagggtaatattgcaaattcagctccaacccccaggaatttattacagggctggctatatttgcctgtatgccaactacattatcaagtggtgttgaacttacccagcttgctgggggaaattctgcacttgctcccacgcgtccggtgatatctaacatgttaggaatattgattattccactatccatcacaaaatttgtagctgctggagttggagtgactctacctaccaagcagttatttaaaagtcttgttctgaccatattaatcccccttattttgggaaaggttctacgtgaatcttttaaaggtgtggctgactttgttgacaaaaaccgcaagcttttcacagtgatcagtgcacttttccttagcctagtaccttggacacaagtgagtaggtcaaggtcattgctgttaatggtgaagcccagtgtttttcttgtagctattggactgggaacgcttcttcatctgtctttattggtatttaatatccttgctgtctggggtctttcagttatctccggtggtaaaaattcaattttttcccgggaacaaaatgccagtgcactcgtactagtagcaagccagaaaacattacctgtaatggtagcagtgatagagccacttcgaggtgcatttggagaatctgggttactggttcttccttgtgttgcagcacatctcaaccagattattcttgacacttttatcgttaacttcttgcgtccccaagacaattccaacaatgtcaaggtggcttaatagatgaaatggtggccatcatagatggttatggcatatcatgaaagctcatcaagctgcatcttaagaaatgttgagatgaaggatatttagaaatttgcttggtttcatttcccattgtacaacttacctaaatataatatgctcttgtacattgttcagcctggcagtttgcctgagcatataggttcagttctttacgtttctttcggggtgtattacctagattttcaatttttatattcctccattgttccagtgttctttctttagattaaatagttctgtgtattcaatggaattgataggcatttcatattcacttattgaggagtgaggattctttaacacgctatcctgacaatgtactgggctagctagcagttttgcttgtagtttatgcagtgaatttttctgtttg

SEQ ID NO: 138890 - DNA, 243 bp, Glycine max
  Clone ID: PAT_MRT3847_96424C.1
ggacacacatacacaaaaaaaaacagaacttatcaacaccgatacactagaacacgcacaacaacaaagaaccacaaaatataattacactcatatcacttaactacatccatcttaatccataattacgaactcacctcacacctttaattaatacaaaactatcagatcacataccataatcctacaatctgaaaaatttctatacacttcacatcaactattccgtaatatactttttcc

SEQ ID NO: 138891 - DNA, 396 bp, Glycine max
  unsure (1)..(396): unsure at all n locations
  Clone ID: PAT_MRT3847_96425C.1
gaccggagcgccctcccacaaatcgacacccggcacactccccgtctgaacagcgttcgcctcctctcctctcccctccgaggactccttcctcaccctccagatcgttcactccaaaccctccgacacccccaaacccctcgtcgccgacctccgcctcccctcaaagacctccacgacctccacgactccacgcgcctccgcaagttcnccctctctcgcgcctctggccgcncccacggcaagatccacctcaaactcggcctcctcggccgcccccaattcgattacgcctcccccaaccctaaccctaaccctatacctagtcctaatttcgtctgctacagaagatacacccccttcccttcccattcccattctcactccccttctcca

SEQ ID NO: 138892 - DNA, 332 bp, Glycine max
  Clone ID: PAT_MRT3847_96426C.1
gcaagagtgggaagtcaagctggaatattcagccctcgctttaggcattgttgggtatatttgcttagccttattgttctttccggtcacgagagggtcttcaattttgcggttcattggcttaacttcagagggaagcatcaagtatcatatctggctaggacacattgcaatgaccctctcacagcccatggtctaggttatattattttttggggaaagacacatcaaatcttggagatattcaaatggaacaaaattggcgtctcaaatgtggctggagctgtttctctgctagctggaataaaaccgtgggctggtaccctaacctt

SEQ ID NO: 138893 - DNA, 254 bp, Glycine max
  Clone ID: PAT_MRT3847_96427C.1
cacgcgtccgcaaaaataaatacaaattttctgacttttcattaactcatacattttttcttcttccttttcctcttcttccctttatgacttttggattgcacagaagggttttcaagttccgcagccaattaagataaaactccatggccttatgcttcttgcctccctcccagacccagtagatgatgccggcggtgaccatggtgagggcaaagccgcacgtggtggctctgatgaatgagttgagggac

SEQ ID NO: 138894 - DNA, 385 bp, Glycine max
  Clone ID: PAT_MRT3847_96428C.1
acgctgcgagaagacgacagaagggggcgtgtttagagaaaagtaactaaccagagaagaagattccgattccgattccggctgtggcagcctgagccacttctcttttgaatcgaatcaaatcgacgcagtcactcgacatggcactgtcgcgtcttcgtcaccctctcttctctcgctcccttctcatcctctcttctcccgccagatccctctccagaacttcttattcatctatttttaccctcggaggcgatcatcacaatataacaaggcctgcatcttgctctaggcttactggaattcatgacagatctttgaagtcaaagtggactgatgtcaaatacttttcatcttcagattcttcacatgaagtccttgggat

SEQ ID NO: 138895 - DNA, 649 bp, Glycine max
  unsure (1)..(649): unsure at all n locations
  Clone ID: PAT_MRT3847_96429C.1
aaacctatcaacaccatgccaaactccagattattccattaactggaacccaacccataaaaatgaagccatatatcctccatattctattatagtagcacaataacaataataataattataaatgtcttgctgatcaattcacaccatctctgcaaaaggaaagtggaatttcaagggaccaaaattacaggggagaaggggaaggtgctgatgcaataataatgtcctctgacacgccagaaacagggccaggggcagctccagagctcaccagctcaaccatggcacgacgagggttggtcttgtgcttctcacacagttctggcaaaaacacccctgcatcacatcaaagcatgcttagttattatctatgctaattagtaattatcgtaacaagaaaaatgtaaaatttgataactatgtactattgaaatggccattaaaatagttttataatataaaatttaattattatgctcactgcgtaaaataagtttttaatggtataaaatataatagttntatattgtaaaatacntttgtgataaaaatttaataattatagaccgataatataaaataattgtgtaatcacatatcgatgttggcataattattaactattattataaaatcaataaattat

SEQ ID NO: 138896 - DNA, 280 bp, Glycine max
  Clone ID: PAT_MRT3847_9642C.1
tttttccatcaacaacccgggggatcctttcattgaaagcaattatggtgtccactctaggcagtttgaggttggtgttttggactgattcgcgtggttgtgggaactcgagaaagatgagtattggggctatataacaaactgtggcacacaaggcaatcttcatggcatcctagtgaggagagaggtgttacctaatgggattatatatgcctcacatgaatcacattaatcgtgtttcaaagctgctagaatgtacatattggattgtgtgaagata

SEQ ID NO: 138897 - DNA, 408 bp, Glycine max
  unsure (1)..(408): unsure at all n locations
  Clone ID: PAT_MRT3847_96430C.1
gtgttcagcttttatttattttgtatttttataggttttaagtgttcttttttttttgnaaagcttacaaaaacgcgggaaaaaattttttggaaaatcccggtggtttttttattttcaaagcccagtcctttttgttgtgttggtaaatgggaattaaaaagccccccaaggggggccttttgtgatttccccaccttttgacccctaattattggtcccaaagctttcccccccaggtgggaagggtttcaactgcttccttggggggtgcctaaacatacacacaaacaaattttttagggccaggggggcccccaaagacttcccctggggggtcctttaacatttttttatttatggttttttggaaacccggggggttcccaacccccttttttttttttt

SEQ ID NO: 138898 - DNA, 883 bp, Glycine max
  Clone ID: PAT_MRT3847_96431C.1
tcgagctaaccaaagccacgcacaaaatggcatcgcgggcaccacctagccttcacaccgtcaatggcaatgctggcctgagacgacccttgatgaatccttcttctttttctctaaagtcatctttcttctcgcgcctagctttcacatcgtcaatggcaatgcttgcctgagacgacccttgatgaacccttttgctactaaagtcattccttcttctctggttccctcaatctctatcttcatcccaatcaccaccatcttacttcagctccacccaggatttccatgcgcgtcgcttccaaacaggcctatatctgtcgcgattgcgggtatatttacaaagacagaactccctttgagaagttgcctgataactacttctgccctgtttgtggtgctccaaagcgaagatttagggcctatgcaccggctgtcactaaaaatgacaatgacacagctgttagaaaggcacgaaaagcagaactacagagagatgaagcaattgggaaggcatttcctattgcaattgtcgtgggaattgcagtgcttgcaggattatatttctatctgaacagccaatactaggctgaatgaatgttcgattgcagtgccctttaacatggggtgtagtttgttcccgttctttcccttttctttttgttcattctgttgaatgcatccagaatgaccatacaataaattgtacaattattttgagagagaagaatggtcatgtttatcaaccctaacgggtgaaggatgcaatgtagttagacgggagaatatatttatttactttgttgccattttacgtgataagaaacattttatatatatatattttcataaataaaaggtagcagaatcttttaagataaaa

SEQ ID NO: 138899 - DNA, 683 bp, Glycine max
  Clone ID: PAT_MRT3847_96432C.1
cacgcgtccggacaaaagaaaggtattggggccctgttgatgtgtatgttgggggtgctgagcatgcagttctccatttactgtatgctaggttctggcacaaggttctttttgacattggtgttgtatccaccaaggagcccttccaatgtgtcataaaccaggggattattcttggagaggttcaatatatgacttgtagagatcaagttggcaatctgatatctgctgattcaaccgacatgttgaatgaacataaactagaaataattcctgcagaaaaggtcatgaaatctggggattcttttgtcctgaaagaacatcctgatatacgtttatttgcccgcgcccacaaaatgagtaaaagtaggggaaatgttgttaatccagatgatgttgtctctgagtatggtgcagattctcttcgattatacgaaatgttcatgggaccattgagagactcaaaaacatggagtactagtggcattgaaggtgtacaccggtttttaggaagaacttggaggctcattgttggttcacctttgtctgatggcacatttaaggatagaactgtatcagttgatgaggagcctactatagaacaacttccgttgtcttcataaatgcattgctaagtattcaggtaacagaaggaaattgagggcaccacggttaaacactgg

SEQ ID NO: 138900 - DNA, 2461 bp, Glycine max
  Clone ID: PAT_MRT3847_96433C.1
gttacctagtcgtggccccagagcataccttgttgtcatcattggtttccattgcccagagcaaacatgtagaggattatgtagaccttgcctcaaggaagagtgaccttgagaggactgaacttcagaaggaaaagactggggtctttactggctgttatgcaaaaaatccagcaaacggggaagccattccaatatgggtggcagattatgttttggggagttatggaacaggagctatcatggctgtgcctgcacatgattcacgtgattatgaatttgctttgaagtatgatgttccaatttgctgggttgtaatgccagatgataaaagtatcgagtctggaaaggctttttcaggtgaaggcactattgtaaattcatcaaatacactggtggggcttgacattaatggcttgtctagcaatgaagctgctctgaaagtcattgagtgggcagagaaaagtgggaatggaaagagaaaggtgaattacaagttaagggactggctttttgctcggcaacgttactggggtgaacctatccctgtcatcttcttggatgatagtggtgagactgtcccactgtgtgagactgaactgccccttattctacctgaattggatgatttttctcccactggaacaggggagcctcctctgtctaaggcagtgtcttgggtgaagaccgtggatagcttatctggaagaccagctacccgtgaaactaataccatgccacagtgggctggttcatgctggtactatttgagatttatggacccacataattccaaggaattggttgataagacaaaagaaaggtattggggccctgttgatgtgtatgttgggggtgctgagcatgcagttctccatttactgtatgctaggttctggcacaaggttctttttgacattggtgttgtatccaccaaggagcccttccaatgtgtcataaaccaggggattattcttggagaggtaatttcaattctttctgcatgaaaattaggagaaaaaataactaactgtgacaagtttctaattgcttgagtggcaggttcaatatatgacttgtagagatcaagttggcaatctgatatctgctgattcaaccgacatgttgaatgaacataaactagaaataattcctgcagaaaaggtcatgaaatctggggattcttttgtcctgaaagaacatcctgatatacgtttatttgcccgcgcccacaaaatgagtaaaagtaggggaaatgttgttaatccagatgatgttgtctctgagtatggtgcagattctcttcgattatacgaaatgttcatgggaccattgagagactcaaaaacatggagtactagtggcattgaaggtgtacaccggtttttaggaagaacttggaggctcattgttggttcacctttgtctgatggcacatttaaggatagaactgtatcagttgatgaggagcctactatagaacaacttcgttgtcttcataaatgcattgctaagtattcaggtaacagaggaaattgagggcacacggttcaacactggaatttctgcaatgatggagttcctcaatgcggcatataagtgggataaacatccaagatcggttattgaggcatttgttttgctgctttcaccatatgcaccacacatggctgaggagctatggtctcggctagggcacacaaaatcattagcatacgagcctttccctaaggcaaatcctgcttacctgaaggattccacggtagtacttccagttcagattaatggcaaaacaagaggtaccatccaggttgaagaaacatgtacagaagaggatgcttttgtactagcatctagggatgaaaaactatccaagtatttggatggtcaatctgtcaaaaaaagaatttacgttcctggcaagattttgaacgttgttttggaccgtaaaaacattaaggttggtgtacagtagctgctttcactcgtgtccgtttctactggaagcaacgatcaaccgttaaatatatgctgtgcctggtcaacttggtaatggccctgcatccgccgctttaaaactaaagcatatgtaaagaaggtgtctttggccggagagttatgcttctgttggatggaaagtgacagctgggcaagtattcacctctatgactgttaatttatactccgctttaagaggtgcataacttaataaaagagaggcagcctggttttccggcttgctttgatcatttcatgctcttgatgcctaaccaatttttatttaaaacaccatcacataaacagagtgcattttagcacctataatggttgtattttatttactgtatatatctggttatggaccgtcttgttgattgtaaaaaaaaaaatgttttttattgtgcgattttataattttatgtggttagaacataacccgggaatagatcatgactaggct

SEQ ID NO: 138901 - DNA, 348 bp, Glycine max
  unsure (1)..(348): unsure at all n locations
  Clone ID: PAT_MRT3847_96434C.1
gttgttagcgcgtcggaacctgtttccctgagtggttgtttgggtaggcatcacacacttcttcatatctacgcacaacacacggctcaacccgagaccgctccaagatgcggcttaattaaactactcctctcctcctcaccgccgcccccgccgccgccacactaggcgggaccccacaagaaacgggctcctatcgacaagagatacgaattgctccgacgtccctaatccaggatctattatccgggtgtaacgggccgactaaaatgccaacaacctgtaaatttgagcccctccttaaggtaccctcttcatctatcatgcanganaggaaacggacgagtt

SEQ ID NO: 138902 - DNA, 871 bp, Glycine max
  Clone ID: PAT_MRT3847_96435C.1
ggctcgagaaaaaaaaaaaaaaactatatctgaagtttattggggatcgggtattgggaaatgcctcgagacttgtcacgatcccgatcgcctccctataggcggaggcattcaccatctcctgtgggacacaggtatagcaggaggagcagaagagacagaagcagatctccttattcgtcctactcttacagcaggtgaccccgtttatatgtttatttgtttgatatattttgtaaattatttgctatgtaacttaaacattttatttatctatattttgctgctgatctttcttataatgtcattgtaaactgtactcgttggacataccgaggacattaaacagttataatatttgatatctacaaaattggaaatctggattaaacttgaacttgagatcatggtgagggttatgttattgacttgagaataataatgcataaaacactgagttacggcttgcttttccctactatccattatagttatgctgtatttaaatgtcactgtaaaaatatgatgattttccttggtcgggtctttttcaagaactgactatttttttgttggaagaaatgaacatggcatttccaggattacagagctatggcattataatgaccacagcacgttagtcaaagatgaatcccatggttgataatgcttgatatttaaattcaatatctacttgatatttgcttatgaatcaccttctcttttgtatatgctcaagtgaacaagaatggacagttcgatttcttttattatgccattagtcttcttctgatgagctccttgagccaatcaacgggatacatactggtatagctggatgatcgatattgatgattctcaagtatttgat

SEQ ID NO: 138903 - DNA, 404 bp, Glycine max
  Clone ID: PAT_MRT3847_96436C.1
ttggcttggaacctttgggctgatttatgtgcttgtttatgtgcttgcatggtcgtcagaagatgatagaagggtcagtaccgtcgatgaaacatagaaccgaggtgccgttgatccctactacgcccaaggacggagaattccacgactgtcccgagggagtaccgatcgtagactagtctaccgaatgtacagaagttggttctaaggccaagtaacaatttcatcacaacgaagatataaagaagtccgctcaccggaacggctgactatacatacgacacgaccgatcggaactatccgccctaatactggctagatacccccgaagcgaccaacggactctaaaacgttaagacctaatttcaaaacacccaacccaaccagtagcgcgacccccacaa

SEQ ID NO: 138904 - DNA, 299 bp, Glycine max
  Clone ID: PAT_MRT3847_96437C.1
ggcacagccggccagtgttcatactcaaccatcactcaagatctaaagtctgcaccttgcttccgagtcagcgattcatggcatgtacctacgaaatcgctcagcaagtccatcggctgaaatcgcacgaggaagccgttggtcacaaatgatgcgcacagttctaccctgggtccaggctgactcacaatcactcaacactccgtgccaggaatggtagttactatggagataggtctgcagtcttcaagtttggatcgagtcatggcacacgcgccggctgagaggcgcgtgtccgg

SEQ ID NO: 138905 - DNA, 417 bp, Glycine max
  Clone ID: PAT_MRT3847_96438C.1
attaatctcgcgacggcattggcatacagctacccaagctaagacatgttcgacaaaggtgttaatctgtatggcaaattaaccgacgtggccgttaacagctttctgagatcgaacgagtctcctgtgattgaggcgcctaggcttcacaacggggcataggacaacaaggaggctcttataaaatacaagggtgaacaggaccaggactttcagatacttgagtaccatgcccacaatgggaacgctgttgccatgtacaccgctgatatcttttactactttgtcctcaactttttgcggcgttatcattctaaggccctctggtgcttcctcaaggccgcagacaagagagagcctccatccatggagctttttggagagatctatgcgagaggagcacccttggagagaaac

SEQ ID NO: 138906 - DNA, 583 bp, Glycine max
  Clone ID: PAT_MRT3847_96439C.1
gaacccttcaaatggaaagttgacatttaataaaccaaagccacacaccgcaacaaagtcccgaatctggttgcgcttaacaaaaatgttattaggggttccggccaacacaacacattaaaacacggtttaattaaagcatttttgccaccgtggatcaataacccctttttgggaacaacatttgcaaaatgatggtggagacttcaaactttgtccgaaaaacaggctcccttgaaatgacaacccaagtgtaccttatagaaacccaccttttttggtaccaacttcccctgttgaaccaacccggacgatatacttgttcttatgggcagccttggtgaccttggctccggtaagatccttcttctcaacgttgttgatgactcccacagaagcagtttgacgcatgtccctaacaataatcctacccaggggtggttactcggagaaagtttcaacacccgtgggtttgggtggaatatttttaacaaaaccagagtttccttttttcaaaaacttggactccttgtcaagctctttggcggatcgcctgtgaatcttggtcatgagttccgcaaac

SEQ ID NO: 138907 - DNA, 382 bp, Glycine max
  Clone ID: PAT_MRT3847_9643C.1
tcgttagttccatccatggcgtagcaaatggcgatcctcttacgaacgcgcaccctcctctattcgaaacccaccaccaccaccctcatcaaaaccataaccacattcccctttctatcacaagagccccaattagtggactccaccccaccaccttcttactcaaccacccctctccctcccaacctcgcctccggaagccccctctacaacgaaaactggggcagcccaatcccgccgacaccgaccgcttgctcctacggcaccttccacgcgctcgcccccgtgggcttctacaaccgcgccacgtaggaaacatacgaccgccgcgcactactcgaccatattggcgactggatggcctcgcagcagtggcacgacg

SEQ ID NO: 138908 - DNA, 465 bp, Glycine max
  unsure (1)..(465): unsure at all n locations
  Clone ID: PAT_MRT3847_96440C.1
ggtttttcttttttttcacaactgaatttaaatagttatatttttcttgcctctggatttacattattcccaaagtgaatatggtgaagtaatttattagttattgtcacttacaaatcattgatcatcaaggactctgaaattaagtctcctaagccacgcggaaggaagtatttttctgtttacancanancgcngggggggagaagggaccncaaaggggcggcgaannggccncactctnnnnggcanncnnangnacnncctgggagaaananccancaaaagggccnncaagnngggaannncnnccanagaaaccncaacggagaacancnnccaanncaaaacancacggaaaggagggacanagnganccgaaaggagcacaggaacacacccngngnaaanggccnccaccacncnagggcnngccaccncanacccacnagggcagaggcaaaa

SEQ ID NO: 138909 - DNA, 527 bp, Glycine max
  Clone ID: PAT_MRT3847_96441C.1
gttttccttggagcgagtcactgactagctagcacaggcggggaatgctcgtctcgccacgcatcatacgatttcgctctggactgctacgctccactccgcaccataacgaatcggattgagatcccgaaacaagtcacgtgatattggatcatcatctattttctccgatcaatcacgagatattcgatctacttctcaatctccacagtgtaacttcagctttaaacacacaccacgcgcgcaaactttttattgtttgtatcttcgcgctgatattgagttctcgtggatgatctctctctcggtgttccgagagagatctgagtcatgcaagcatggatggccgcaacaatgttcattgtagaaaaaactcgtgggctccgcatgagtgtatgagtcaatccactttggagctgtgtgattatgatagaactgctacccctgaacaagcttggagaacgagataaaacagccatgccgatcttttaaagaattagagtaacttttacggcagctataaaatg

SEQ ID NO: 138910 - DNA, 1051 bp, Glycine max
  Clone ID: PAT_MRT3847_96442C.1
ggctgcgagaagacgacagaagggaacacaatcatggggtgtatataaaagaggttaaaagggtataattggcaataaaaaatttaatgagaaggaaggggtgaatttagtaaaaaggagcagtacttaacaagacccggatatctcagcccgcaatagaccagtccattggacccgaattgactgtttatagtttatacatgtaagtaccatcagtgattacctcagtaaacatgcaattagccaattacccccactaaacatgtttttagccgcagttaaaaagtgattagtggttcaggaatgtctaatagtaaacgccgcttgtgaatagcagaaagaagcagttgtagttgttgcaaagatgagtagtagcggcgccaagaggagcggtcccccaaagcaccagaacaagtacgcttggaaacccaacgctggtcgcaaaatcaacgaaactgaagttggaggaagattcagacccctctctgagatcactggggtgtgccctcgttgcaaggatcaaatcgaatggaaacgacgttatggaaagtacaagcctcttcttcaaccagccaaatgtcagagatgttccaagcgtgctgtacgtcaagcttaccatagcttgtgtcctggttgtgccaaggagcatggtgtatgcgcaaagtgttgttgcaatacgaagcaaatagttggaagggatatatcagaagttgaggctgagcaaaagatgcttgaggaggccattaagaactctcgggagagagaaaggagatccttattgcgtgctatgaacaaagacaaatctaaaagttcaaatagcgccccaactgatactaaaggtaacaaagttggacaattatttccaaatgcgtcacttgaagactatgccaaactgaatagagttaatgtgggtcatgacgatggtgaaatatgtgatgatagtgagggtgaagtttgtgaagatgaagatgataacagtgacaatgaagattgtgatgaagatggaaacagtgacgatgaagacggtgacagtgagaatgaagatgtgatg

SEQ ID NO: 138911 - DNA, 239 bp, Glycine max
  Clone ID: PAT_MRT3847_96443C.1
gggttaaaagaaccttagaaaaataggggcgcctatgattattttgataaaaaaaaattggccaccaaggaaaccccacatgctcgttgggcatggaactttgaactaaaacatttaccatgcaaacacaactgggggcccattccaaaaacacacttaacttgccagcagtagtacacaatttacaacgcatacgagggccaccaaacttgggtttttcatcatcctcactagcattt

SEQ ID NO: 138912 - DNA, 581 bp, Glycine max
  Clone ID: PAT_MRT3847_96444C.1
acttaaccatcaaattatttattattttgggggctccctcaaggagtaaaaaactcaaactacaactcatacaattccacttggtgccactacaatgggactcctaacactgtgtgttccaccttcttcaacccaaacaagatccccaaatgatatatttttcttcttgtacttgctatactttatcacaacatcgtagctcagcttctcatttttatatctgaatgttaatgtctcaggtgacaccgtcaccacagagccttttggttgtgtcaccttggctctgtatgtggcagcaccatctccaacattggtcactgtcctcctaaacttgtgaacaactgaccttgtgttgttgcgatagaaagctataaatgaagggtaattaagatcaaacgatggttttgcacaattgtaagatgttgatcttgtaatggttaggatttgcttttgtgtgtacttcaaagcacaaaggagattaacatagtcctgtggggtggcatcatatactaaacctggaatcaagtgctttgtttggggtcaatttgaccagctccaatggcaagaggggaagcatattg

SEQ ID NO: 138913 - DNA, 701 bp, Glycine max
  unsure (1)..(701): unsure at all n locations
  Clone ID: PAT_MRT3847_96445C.1
aattcggctcgagggaccgcacaatattattaaaacttaaacttcatatttatttaaacactgcacaccaaattagagcaagctagaatcagttacaagtatcctatagttaaaattgaacttgttttgcagagccatggacccggaaatagtaaagaagctaggaagctctcttctggtgccttctgtgcaggaattagcaaagcaaggcatcaccaaagtcccagaacgatatgttcgacccaatgaagacccatgtgttgaatatgacacaacatcgttgccacaagtcccagttatcgacctgagcaagttgttgtctgaagatgatgctgctgaactagagaagctggatcatgcgtgcaaagaatggggtttctttcagttgatcaatcacggagttaatccttgtttggtggaatatatgaagaaaaatgtgcaagagctcttcaatcttccacatgaagagaagaagttattgtggcagaaaccaggagaaatggagggatttggtcaaatgtttgttgtatcagaggaacacaaattanaatgggcagatttattctacatttccactcttccatcatacgcaagacacccccacttgtttcctaatattccccgacaattcagggataatctagagaaatattctttagaattgaaaaaactttgcatcctaatctttgaatttatgacaa

SEQ ID NO: 138914 - DNA, 255 bp, Glycine max
  unsure (1)..(255): unsure at all n locations
  Clone ID: PAT_MRT3847_96446C.1
catnnntaagtacactgtcntgctgttncntttctaccaagtaaaaccatgaattctctaatcactacttcaccttacctactaagcantttntgcgcactccgtcgccgtcncctccgcgnnttatcctnccatacnccggctcggagtccggnnngtgctccctccgcggcntcngcgtcggcgacggtattctaatccctccncggcgtantatatacgnggngngncgnatcttcgacttcacccacaant

SEQ ID NO: 138915 - DNA, 337 bp, Glycine max
  Clone ID: PAT_MRT3847_96447C.1
ctcatgttgttttttttttgatttttgtcgacttttttcccccaaaaccccgctatgcattcccatttcccaactttggggtggaataaaaacctacattggttaatttcaaccaggttttttttttttgggtttaactttaaggtcccaacccatacggttaaagcccctttccccaaaaaaaaaattattttgacattaaaacaaattttccataacatggctattgtggaagtatgatgctgttaaccctaacacatagggcaggcaaaaattccccggtttttgggctccaaaatataacttttttaagtttgtggtttattggaaatatcca

SEQ ID NO: 138916 - DNA, 441 bp, Glycine max
  Clone ID: PAT_MRT3847_96448C.1
ttgggtgggcgggatggcttggtcgtgcctttcctcgcttcagtctgcgctcggcgcggtggtattgaagcagggcctcatcgcttatttgggtgcgtcagtgccagcagtccaggtgatatcgaggccgttggaacgagcgattaggtatggggttaggcgaatctgtgtcggctgggcgggtgagcttctgtccgccagtggcagcgtagcttttcttaggatgattattgattatggtcaagtccgtgccttcaacgggatcgtgttttgggtcagcgcatgtcctatcgatgttttgcttttctgcctcatgattccctctccgcatgattgggtatggtggtcgccccgtctgtatgtttactctgaattatatctaagtgctcaggttagggttatatggaaagggggccttttggaggggccttctgatatcgg

SEQ ID NO: 138917 - DNA, 442 bp, Glycine max
  Clone ID: PAT_MRT3847_96449C.1
tacaagggcacattcttatgtagctttgaatgtaccaagataggacatattgttccttataccatgtccttacacaatagtaacctttggaaatatagcaaactgtatagatacttgaccatttactcacatatagaccgaagggaaatggctaaaatcctctagattgacgaatgcagtatctttatggtgttaatttgtcaaatctaacggatgttgtcaagttcctagcaagaagcgtaaaggctacttcattccacaggcaattttagaaacagacgtgaatcctgttatgtggtttcaatcacaccaaaagccattaaaccctccacagttggtggttccgaacttgataccctattctttacaatttgaaactaagctcttaaaaataaaatgccttgggatttctgaattgcagaaagggaaagttacaaaaccc

SEQ ID NO: 138918 - DNA, 382 bp, Glycine max
  Clone ID: PAT_MRT3847_9644C.1
gacaaaatccgagttactcacaaccgagctcaaggtaatatcactaaccttcactactttggtggttcatatttaagaccttttcttcaattaaaatttcaaccgaaacctatctaaccaataagcttggtcgctttaaccccatcaacatgttgaatacccttctctgcaaatgcatcactttcgcatcaacatcacgttaccctattttacaccactacccattaccattttctctgcgtttctacaccacaaccacttcaaattcacgctcctttgcggtatcctacctcatccacaattttgggttcttccctgaatctgcttccaaagtttctgaaaaccacaaaaattatttccgtaccccggaaaagcctgagtc

SEQ ID NO: 138919 - DNA, 407 bp, Glycine max
  Clone ID: PAT_MRT3847_96450C.1
ggcaggctacgttgagcaaacgaccatagtgtgcaatgtcccaatctctcatgtgtttattgagtccatccaaccaatcagtcgttgcaggcatatagccaaccatttccgacggtacgtttcgcggtacaaatgttttcaccgggtgtgcgatgaaacagtctgcctgcttgacgttctcccacatgaccttccatgcatttgcttgggaagtacctggctggtttaccaaatcgttccgaatttgaatgtgactgcggaagatgatcggtcgttgaggccctatcttcttagcaatcggaatgaggcctggcatttgagggttattaactatcagaacatttgcccctccgatcgccggaacccaaagtgggccttcaaggttaatctcacttcgttgggcatta

SEQ ID NO: 138920 - DNA, 1700 bp, Glycine max
  unsure (1)..(1700): unsure at all n locations
  Clone ID: PAT_MRT3847_96451C.1
gttgcatgaccaggttgagcagcggtactgtctttcgatcttctagaaaacgaagcgtctgaaaaaaccaccccaaacttctcgaaacccctttcagttctctgcattcttctaacacacacacacacacacagaatgggtgacttgttccactttgacaagaacctctcttcacaagacgaaatctcactttttctgcgtcagattctgctccgttcatcttcaccttcccactccatgcctgctggatcctgcacctccaacgctgctcaacaaaacgtaaatgcacaccacccttctttcacagcgtcacagctccaagatgggaagatcttggcccttgattccaccgcttcttttgtctccggttctgctgcttgcagttccttcaagggccatggtgcttctgctgcaaatgtgtcttcttcttctgctggagtgagtgagaacgagaatgatgactatgattgtgagagtgaggagggtgttgaggctccggccgaagaagttccaacaaaggctgcttcttctaggagttcatctaaaagatcaagagctgcagaagttcataatttgtcagagaagcggagaaggggtaggatcaacgagaaaatgaaggctttgcaaaacctaattccaaattctaacaagacagataaggcttcaatgctcgatgaagctattgaataccttaaacagcttcagctacaagtacagatgctgtcaatgagaaatgggttgagtttgcatcctatgtgctttcctgaaggcttgcagcctctgcagttgtctcagatgggtatggaattaagtgaaagaaacaggtttacctctttaaacatgtcagctactctgcctctgcaccaagacaacaatcccttgcactatgcatccaatctacctaacaaacacaatctcccaaatcagccatctgtgccctatcctccatacattgacaacccagaaacttctttcggtctggaaccccgaatccaaacggatatgaaacctcttcaacacaaaggaggatcttctgagccaatacgaggggaagacattttgcagcaccagcaatcaagtggtatccattcagatgccaatacattaggtggttctcaagttgtcaaagaattcgaatcaggcacgagactatcattcccttttgacacgcaagcatgtgaacccaaagacaacagcaactcttcgcaaccatgcattggcggaagagatcattcaggagtgatcataagaaatagtgagaccaacattgttggtaggtaggtatatgatgcttatgtgaatgatatgtagctaggttcgtgcatgcaatgcaacatgtcttgaaaagcttttcaccagagactgcagaagggagaaagtggtcagtggcaactcgaagaccgaaaagtcagatttttgaagtttactgccagtaatgccttctgaattttggtttcgtaaaagcaggaatctcaatattatcccttgagcattttgtaatgttctcaaaaagcctctggcctacgtgacatgagagcagatttttttttttttctctttctagcttctcgagttgataaaattatgtatgtataatgtatgcagagaatataactccccattgttatgcggattatataacccctgtagaaaatcctatgggggttttatttcagttcccgataaaaacaanttgcctt

SEQ ID NO: 138921 - DNA, 495 bp, Glycine max
  Clone ID: PAT_MRT3847_96452C.1
ggctcgagccgattgctagaatggcatttcgatgctcaatcgtcacttgaaccatactctgctctcttgctcttgcaggagagagccatggccatgcatcgctacctgaggaagattatggtgaagctgattggccaaacactgccattcgcactgcactgcgagagcttataaagcctctccgtgctggtgttgaaagcgatgaacgccctatgcatatagatgatacacagtacccaaacacattcttctataaagaagaccttaattcaggcaaaacagtgaaagtccaattcaccaagcggccctatgcacaaccttatggtggatatacatggctaacggatattaaagacacctctacagaaggatgtaggtctgaagagatatgcatcatgacagaagcgtatgatgcagaagagaagttcagggcataatccttgggcacagtgaatggctgtgccatttcaaagctgggaaagaacattcaagtac

SEQ ID NO: 138922 - DNA, 729 bp, Glycine max
  Clone ID: PAT_MRT3847_96453C.1
cgtcatattttcactatctacacaaacttaaaaatattaaagcaagatttagtatgaaaattttacaaataaataaagatctaaatagagttcaaaccccctccaccgctttatgttctctctttctataacaccaacaactaacaaccaactttgtcacctctctcgttctccctgcttagataacactctctcgcgagtcgcgatgctcttagctctctcttatttccatcgatggatgcagaaacggtagatctactcaatctctatccaacaggacaagacccactttcccttattcctccatctctttcaatttccctgcacgtgcgaatctattcgcaaattgcacactaaccttttccctttcccttttccttttgcttttcgtatttgtagagttggggttgtagataatgggaggggcaggaatttgaggggaagcgaaaacaaaatcagattttgattagtggggggttcgagaaagtggcgaaaatgaacttgggtgcagccgaggaagaagaatcggctgcacaagttcgtgttcctgcggaaatcgattggcacaaactcgataaatccaagtttttctgcctcggtgcagcccttttctctggggtttccgcgaccctttaccctgttgttgtgttgaaaacgcgtcaaccagtttttccgtctccaatttcttgcatcagaaccgcgttttcattgattagacttgagggttta

SEQ ID NO: 138923 - DNA, 301 bp, Glycine max
  Clone ID: PAT_MRT3847_96454C.1
gaaattcaatactcatttttattttaaaatgaaagcgtgtgaaacactaaaggctctggtgctacaagtggtgaaggaatacaacgaatttaatcacaaatcacccaaaacatggtttgttttggagactacagaaaggaaccgcatggttaaaattgacgctgccagagacataacggcataaaaaccaattttgaaccggtgccaaagcttttgtgagcggaatagtttgtccttcttcgccttaaggtacatgtggtctgcaagaataaacgtacggggaaatgagctgatcgcccct

SEQ ID NO: 138924 - DNA, 248 bp, Glycine max
  Clone ID: PAT_MRT3847_96455C.1
ggcggatccattggaataatgaaaaaaatttcgggatattccgcaaaaaccgggcaataatatcaaaatcagataaattggccccaaccgggttactaatgggagggccaaataccttacaaaattttgctttcgccaatgatctaattagaggaataattggaactattgttttaagccttttcataacacatttttattaaaaatgaattttgcaacctcttgatttctaccactgaaagaatggg

SEQ ID NO: 138925 - DNA, 334 bp, Glycine max
  Clone ID: PAT_MRT3847_96456C.1
tttttaataaaactgtaaacaacggcaaaggcaagatcatgaccaccgggtatatgttaataagacacctgcacacaactgaaactgaaagacagcagatattatacacagaaccattagcagcacagcacccagtggcttgcgttactcggaatctgctgaaagaacatgaacctttgactaacagactcgacgaggagacgctaatatacacctcgcctgacactcatttagcaactagattaggagctcaggcgagctggagaaccatgtagaatgatggactagtggtcatgtcaatccacgaggcacagacatgcatcctctcttgtaa

SEQ ID NO: 138926 - DNA, 831 bp, Glycine max
  Clone ID: PAT_MRT3847_96457C.1
ggcacccaaatatactcaaattattaaaatcaacaggattacttgtccaaacttccttttacaactttcccatctaatgatgcttggggggatcgattgagcagatagcacgccatattcaccggttatgtcccaaagcctttaaaaaggccaacttgcaatctcagacatcggaccctttcagtaaggcacctattcatcctctctacaacattctattggggtgtttttcgtactgagaaatctctctaaatgtcatgttccttatagaatttttgaaaccatgagtcagtgtattctgtgccattatcagaccccaaatacccgatctttctgtgtgtctggttttccacctcaaccttccacaacttgaacttctcaaagacttcagatttttgtttcgtgaagtacacctagaccttgcaagaaaaaacatcaatgaaggtcacaaaatagtgaaagccacccaaggatgaatctctagtaggactccacacatcaatatgcctcattatctataacttttagaatttaaaaatcatagatccaaatcctctccaattgaagaaaatgagagtcttcagtctaataaatgtgcactgttgatttaaaattaacggttgacatgaattttttaaaacttaccgtatcattaaagttaccaaactagttccagtgaaacctcctatgattttggaccttcactttcgatccgatgctaatcctcatctttccgacactgtcttttatgcactgatgccatttgaagacctacatattgattccaacaccttgagtgattcccaaatgctttattatatagaacaaaat

SEQ ID NO: 138927 - DNA, 331 bp, Glycine max
  Clone ID: PAT_MRT3847_96458C.1
aagccctgatggggatggtgttgttatcactatatttttccagacagcacttatggagcttttcttaaagttcttcttcgaggatatggataatatggagatatgaaatatcctgtgtttgggatatgcttttgaacatttcaaattctgttttgttgttttttagagttggtaatgttaatatttattttaagaataaaggacatgatcttggtgatctgttatgtgagtaagggaaatacttgtttttatatataggaaccctacgttatgtagtaccgctaataatttcatgtctagactgttatttaaatctatgtttacacagtca

SEQ ID NO: 138928 - DNA, 651 bp, Glycine max
  Clone ID: PAT_MRT3847_96459C.1
ctttttttttttttttttttttttttttttttttttttttttttttttttttggaagcagaggcaactaaaatttattttgtcttcaagccagttatcacccaataacatgaagaggggagagaaaaaatctatttttatataatcccaattcaattggaaaaatcagaaaaaaggatttttcaagttggcagtttgccaaataagaaaaaaaaaagcttctctctcataaggggggcagtattgccagcaaattcactagttgggccttgatatctcaaatcatgctgggggcaagagggcatatcaatcagaacttcatcctccatatcgaaaactatattagggagtatacagcaaacaaaaataatttttggaaactggggcttataaggcttccacataacaccttggattatcttccacatatccttcagcctagccaaggcttttttggccaccatttgggtttcaacaacccttttattaaactcaacttgaacattggaaaatcctttaccttcataaggggtaagaagccatgaaaaaaggggaaagcctgtatcccctataaaatattccctaaacagggttccatctgggaagggttttcttacccccattcaaccttttccctttttgagccagttgg

SEQ ID NO: 138929 - DNA, 238 bp, Glycine max
  Clone ID: PAT_MRT3847_9645C.1
ttatcttacatgccaaatatctgttttggataattacgatgcttgaggaattttctgatacacagcttggccaggaatttatgaacaacaaggaactctttaagcttgaattcattgacaccaactgttttccgcatccactagttcagacataggtgaggtttttttacaaactgacctggtcctttttattttagaatacccccaacacttaagctatactacacccaagaagaca

SEQ ID NO: 138930 - DNA, 358 bp, Glycine max
  Clone ID: PAT_MRT3847_96460C.1
tacaggagcaacaagactacagaaagggacccaacgaatttgcaaaactcagacgaatacgtgatctctttgtcttcaatttcacccttattagcatagcatattcatttccctttcctgaatccaagaaaaaaaccctgcattatgggggtagcttcagtggaagtgtgtgttctgtttaagaattcactatggggggtggggaggcgaagctaaactgcgagaggggatattacagaaaaagattggcctcccattaataacagatctgaatgatctggtggagtctaaaggtgggaagaagaagtcggctagtcctgaagcctttttgtgcgaagatactctgcgttacatcatt

SEQ ID NO: 138931 - DNA, 2534 bp, Glycine max
  Clone ID: PAT_MRT3847_96461C.1
cagaatctcttcctcgtcccttagaaaaaacctgaagtatactacaagggaaagatcagattttcatgctcctcctttcattaaattaaagaacagtttctaggtatggaaaccccttcaaccattgactagtatcattaagatggctaattcctacttatccttgcttgtcttgatccttgtagctctgctcctcacccctcaagggcttgctgatgaatctgattcttactataagccaccagtttacaagaaaccaccagtgtacaagcccaagcccaagccacccattcacaagcccaagccacccgtttacaagcccaagccacccgtttacaagaaacccccttatggtaagtacccaccagttcaagacaacgatcacttctaaaccatgcaacaaggcatgttaatgttaactatctactaaaataaagaggttcagttaacctactacgtacgttgctccttttaattcctaaatcgtaatttacaactttgtagggatgagacattcttggctagctctgcacttcaatcctttatttgtacaatgctatggccaagtcaataccatgcatcttatctatgtgtgtcattgaacgaagtagttgcgtgaaaatgatgcttgtactatgaataaataataaaagaactttatcatttcaaaaaaaaaaaaaaaaaaaataaaataaaaagtgtttcttcatggggttttggagatgaaactaaaccgtgggcgactaagcttgtttactcggttgatttatggcaagatcaagttcgttgcttcatagaagaggtcattggtgaaccagtctatcttgtgggcaactcactaggaggattggttgcattgtattttgcggcaaacaaccctcatttagtgaaaggtgtcgcattgcttaatgcaacacctttttgggggtttctgccaaatcccataaaaagtccaagactagcgaaaatatttccatgggccggaacattccccctaccttcaagtataaagagacttacagagttattgtgggagaaaattagtgatcctaaaagtattgctgaggtacttagtcaggtttatgcagatcattcaacaaacgtagataacgttttttcacgcatagttgaaaccacaaggcatccagctgctgcagcgtcatttgcttcaatcatgtttgctcctcaaggagaactatcctttaatgaaacattatccagatgtcgagcaaacaatgtgccaatctgcctcatgtatggaaaagaagatccctgggtggggccaatttggggtctccaggttaaaaggcaggtgcctgaagctccatattatcaaatcagccctgctggtcactgccctcatgatgaagttcctgagatcataaatttcttacttcgcgggtggatcagaaacctagagtctcagggttctgtgtcattaccattgcttgaagatctagacagtatgaagcactctattattgacagggaattagaatttcccagagaaggttcaaaaaagtcagtgatggtcagatatttcgcttccaatttctcactttgggacaggataagatctttcatcagatctcaatccaagttcagtaatattctggcagccaaacctcaatgacagggtgaatcatatggcatcttcaaatataaatcaactttgtatactgtcttctctttcatagtttgtataaagagaaaacaaacacaaatgctttagaatcataggtaaaatcttgtatatataatatacctataattactcaccaagaaagcatgctagtgaacaactattactcaggagatgttttatgttatacatacgagcattttttttaaaaaaaaaaaaaaaaaaaaaaaaaaaaaaaaaaaaaaaaaaaaaaaaaaaaaaaaaaaaaaaaaaaaaaaaaacacgcgtccgtccataaacaagtcaatttttttggagcaggaagagatttttttttcttttcaatttgaattatttattatctatgaaaagcccttgactgatgcgtcccaaatccaaaattgctatattttctgttcagttctggctagtggctacaaaatctttgtacaaatttctgaacagtttctaggtatggaaactctttcatatgggtcagcaccatgctgccaagttgtgaactcaaagtggaaattagttgaaaagagtttgagttcacgtcaatcaagagtttcctctataggaaaacttggagtttattacacaggtactatttctgcatgtgcgcctgtgagattttatgagatgggtactagggtgcagctaagaagctcaaaaagattcaatttcaaggtttgtagtggaagttatgatgatggttatgtgattggtgaagaggaagcaagggatatttcagggttagaggagcctgtaacaaccaagggtctgattccaggtctgcctgatgattcaaaaggtgaatctggtgctccaataagtagttgtgtgtggggatgggagcctaacctcaatggactctatgagaaggccg

SEQ ID NO: 138932 - DNA, 920 bp, Glycine max
  Clone ID: PAT_MRT3847_96462C.1
ctcggtgagtgaaaggtgtcacactgcttaatgcaactccttttccataaataagtcaatttttttggagcaggaagagattttttttttcttttcaatttgaattatttattatctatgaaaagcccttgactgatgcgtcccaaatccaaaattgctatattttctgttcagttctggctagtggctacaaaatctttgtacaaatttctggtaatgcattcattgctttgtttgctagaaggaaaaaagaaatcaatttgtacttcagaactacgaatttttcattgttaaatttgactctccttgtccatcacagagaaaatcgagttgaattttcactgaatcatttgtttttttttggttagtgcagaacagtttctaggtatggaaactctttcatatgggtcagcaccatgctgccaagttgtgaactcaaagtggaaattagttgaaaagagtttgagttcacgtcaatcaagagtttcctctataggaaaacttggagtttattacacaggtactatttctgcatgtgcgcctgtgagattttatgagatgggtactagggtgcagctaagaagctcaaaaagattcaatttcaaggtttgtagtggaagttatgatgatggttatgtgattggtgaagaggaagcaagggatatttcagggttagaggagcctgtaacaaccaaggttctgattccaggtctgcctgatgattcaaaaggtgaatctggtgctccaataagtagttgtttttggggatggaaacctaaactcaatgtgcactatgagaaaggccgggtgcgaaaacgtcaatgatttgcctcgtgttctctttttaccacggtttggtgttggctctttccattatgagaagcaacttaaggattttgggcgtgactacgagtgtgggc

SEQ ID NO: 138933 - DNA, 372 bp, Glycine max
  Clone ID: PAT_MRT3847_96463C.1
aaaggaaaaaaatcatattttttttctctgaaataaaggggacaggatccataccaaatcatggcatggactccacatggaaatcccggaaaaaaacaggcatgacctaccatttttacaaaaaacttaccaaccaaaggcttctttaaaactttttttttatgtatcactgaaagggaccttaactgtcaacgcctaaatttattcttgcagcaccgaaactcacctaaaaaaacaaggggatctgagaaccattcaaggaaagagaaggctgggtccttcctaaaactttcctaatccaacaactccaataagaactggccaaccaagaaatccggggggtgaaatatgtaatctagagcgcccataaaa

SEQ ID NO: 138934 - DNA, 131 bp, Glycine max
  Clone ID: PAT_MRT3847_96464C.1
aaacaacctgagggaacgtgaatccgtgcttcaatgttcagggaaagcgcatgtaccggcgcgagcagacaatccaagccaactccatcatcaagagacacgtaactatacactggaagaacatgaccagg

SEQ ID NO: 138935 - DNA, 1181 bp, Glycine max
  unsure (1)..(1181): unsure at all n locations
  Clone ID: PAT_MRT3847_96465C.1
gcggaacagagtgggcaagtaaggagatgcacgaaagcggcctccctcacggcgcatgttagcattgttgacaaaaaaacaaagcgcgtgggactcacgcgcctgagtcctcctcgtcctcttgcaaccgttgtcgacactctttctttctctctctaccttagttacgttcgtatctcggatccgtcgacgtttctgtcccttctttcggatccaccttcgttgtttcgatcgaatcttgttactatgatgagaagagatcaaatacgtgcacgtgagatgcgaaccccatccctggttgacctttgtgttcagaaagtaatagataatgtaaggtaccttggaaatgttggttctcttgaccagcatctgctcgagcaaattttgccgcactgcacagctgaccagttgatgcatgtggagaagtccaccaagggaagaaatctcagccctgtaactgataagttgtggaaaaagttctatgaaaagcagtttggcacaaataacactaatgaagtgattaagaggatgaaggaaaaaagagtgaactttagatagatgcaattatatgaggcaaaaggaaaggaaagggctcaggctgagaatgaagcacttgaccgaatcaggcaactgtacaagaaagaagatgcaagaaaacagagtaggcaagtaaggacatgcactaaagttccaccttcaagtaaaagaagattttggggagataatggacctggatacaatgtatcaaatgtgaagagtaacataatgaagaaggcaaagatagaatttctgaagagtcatgaggtaaaaaatcttgcagcaatgaagaataaatctatccagaggaatccaagttcatcaagcttcaagaagaccggaagcatttctggaattggttcaacttccaaagatcccaaacctacaaagagggtattttaggggcagactgtgaaagatagcaatgccatgtatcgtgatttgcttttaaattttaaacatttatctccataataagaaaaaaaaaatggcttctatttctcagctaagaaattttacttttgtttgcatttatgtttgccgcatagatagatagaattgaagcgtagtatgcatggtcattgttgtaatataatatatttatattcatgtaccaataaaaattcctttatttttcatatctn

SEQ ID NO: 138936 - DNA, 687 bp, Glycine max
  Clone ID: PAT_MRT3847_96466C.1
tacggctgcgagaagacgacagaaggggtcgttttttttcgttttcacctttctctttctttgttttacggtctttttccgttgtcgctttttctctttcttctttgttctgaatgacccactccccttcacgccgtcgtgtcgtcgctttcccacaatgaacaagaactcaaggcctcctcaccattcgcactaaagccatcaaccctttacttctctcctcacaaattatcgttactatccaaaaatgagcaaagaataacaatctcccccaagccttccactgcgagaactgtgacgacgtaggtggagtgagtgtagtggggcatgcggagaaagacagggaacgtgaagggttggggttgtagaccttggtgaagagcaagatggagaacgggtttgggttagatttggggtgatggcgtgtttgactttgtagatctgggtggtccttgtgattcgactcaatgagacagtggaaagcattgatggtgttgtcgacgacgggttggaagtgggagtgttcatgtggtgactccacccagttgaagaacttcaccgaaagatcgatggcctcaacaaatttttgggatttttactcctagatcttcaatttaactttttatttatttatttaaacttaaatttttctgtgtatttttttgcagaacttctaatcttttttct

SEQ ID NO: 138937 - DNA, 284 bp, Glycine max
  Clone ID: PAT_MRT3847_96467C.1
aaaaaaaaaaaaaaaaaaaaaaaaaaaaaaattaaaaaaaaaaaaaaaaaaaaaaaaaaaagagaaaagggcaaccaatataaaggaatcacaaacttacatacacatacatgcaacgtcgtcccttttatatagtccaacttaaattcacttcactgcccgtcattttacaacctcttgactcgcaaaaccctatctttacccaccttaatcacctcgcagcacatcccaaatttccccagcttgcctaatatagaagaggcccaaaccaatcgcctttccca

SEQ ID NO: 138938 - DNA, 260 bp, Glycine max
  Clone ID: PAT_MRT3847_96468C.1
tacaaggttctcctcgataaccggttagggcaacaaatgtttgatggtgggtatgttcatcatgggttgttgaaatcggcagtgtggttgttgaaccgtgaatcggagacgctgaagcggttgtgggtggagaatggttcggagtatgagatggttttcgcggggcactcgttgggttctggggtggtgtcgctgttgaccattttggttgtgaatcatagggaccgtttgggtgggattcccaaggagaagattcggtg

SEQ ID NO: 138939 - DNA, 561 bp, Glycine max
  unsure (1)..(561): unsure at all n locations
  Clone ID: PAT_MRT3847_96469C.1
gaggatatcattttctgaatgtgctgctgctgctgctgctgatgggtgagactgagactactctgctattgtttaggtctcagttgagtgtatcatgaataaaggatgatactgaattttgcagagaagcttgaaccaattgagattgtggcaaagcaagaagctgctcatggtgttgaggagttaactgcggggctgggcagatggaaacaaaccataactatgatcagaaaggtgattggttttgctggtggatctgtattacttataaccaggtgaaatctgtgtaatttgcaacatttatcctcgatgtttccaaggatgtctcacaatgagtacaaataggtctatctttcttcgtgcctttgggtttttgatcttgaccatacttggatgaagaagacacaacanatgcaagttgtgattcttgctgagtcgttccaagctaacgtagtttttcttcttggatcaatggatcacaacaaatggtgggaatcagttccatcatgaggctcttgaatcgaaattgggagattgatccatccaatcctataaagaagc

SEQ ID NO: 138940 - DNA, 436 bp, Glycine max
  Clone ID: PAT_MRT3847_9646C.1
gaattcctcttattgacatgtgattaactgtccctgaataaattttacctataactccaaaaggcaatttgttttggtgtgtaacttggtaatttcttgtagtagttgtgcttttcacctgacatggatgaagccattagcacgtttccaattaagtgaattgcatgccacatttgttttctcagttgaggcagggaggcagcttaaatttggagtacgctttgtgtttattgttattgtgttcatttaggaaaggaaagcatgcctgtggtggagactagagttgcattttagtctgcagactttctgtctgagttcccccctcctaatattaggtttctttcctcagggccgagtaactgatcatacagttggtatcacttatcactcggtagatgatgtaattcaaggtgaatatcttaatacattgatgctc

SEQ ID NO: 138941 - DNA, 264 bp, Glycine max
  Clone ID: PAT_MRT3847_96470C.1
ggacaacacaacaaaaagcgatgctggagcaaacacacatgtttgtcacaaattttctatttgaaaagccaaggctactccaagaaaactttcaggtggcgggtgattcccaaatcctaacccaaacaagtggcggcaaaacccttatggacacccccggaaaaatttccccaaaggccttcccaaggggggccccccaaaaggatcaacccttaggtccccgggaaagcaacttcaaaccccctcccaaaggcccccaaaatt

SEQ ID NO: 138942 - DNA, 381 bp, Glycine max
  Clone ID: PAT_MRT3847_96471C.1
agccgtcagtacagcagcgagagagaactaaagggggtctcgtggaattctaagcatgctcaaccctagcggcttctgcattctatgttcgtgtcttgcatcaggatgcattcacatgtcaatcacacatatgttgtcaaacttatgggtcttagtggatccagacgaccagtgatccaggttagagtgatgtctgtggatgatctcaaacttcagatcctgacgactgtggcatgacctgtgagacaatgtgacattcacagtttaactgagtctgaaagggaagcaggacaatggcgcctcacggtcgcttgttgatggcatgcctccaacatcgaacaacagccctatcttacttgatgattatggtaattaatccgt

SEQ ID NO: 138943 - DNA, 1875 bp, Glycine max
  Clone ID: PAT_MRT3847_96472C.1
ggagctagaaagtagagacacaaaatccaaaagagtctatagttgaagggtgagtgtcaccttggaaatccatccatggctcccactcttacatccaattcatcttttataactagcactcctcattcaagggtgaccctccggaatccaaggctgagagtctttgccaagaagtctggatcattcccatcttttgggctaggcaagcccaaagatgattcttcttcttcaactgaagaaaaagatggctcatccaattccaacccctttcgtttggacttcggaaagatctctctgatcccagttccaagcaacacttctgcgcctggcttttcttttggaaagccaaggcgcaaggacccttccacagtgtttgttgctggcgcaacggggcaggctggtattcgcattgcacaaacgttgttaagggaaggttttagtgtacgtgctggagtccccgaacttgcttccgcacaagaacttgctcgtcttgctgctcaatacaagattatatcaaatgaacaggcaaagcgtctgaacgctgtgcaatcaagctttgacaatgcagacacaatagccaaagcaataggcaatgccagcaaggtggttgtcaccattggtcccacagagaacggtccaaccacagaggtctccgcatcagatgccttgcaagtggttcaggcagcacagctggcaggagtaggccatgtggctgtcatttacgacgagagcagcgccggggcctcaacctacaatgtgctggatggcctctcatctttcttcagcaacctcttctccaggtctcaaccgttgactatacaagagttcttgcagaaagtgattgaaacggatgtcaaatacaccttcatcaagacaagtttgaccgatgatttctcaccggagagttcctacaatgtggtcgtcttaggcgaaggaagcgatggtgcaaacgactataaagtagccaagtccaagattgcgtcgttggtggctgatgtcttctccaacacagaggtagcagaaaacaaggttgtgaaagtgtactcggatcctggtgcccccttgaagcgtgtagatgaacttttcagccctattcctgaggacggaagaaggaaagcctatgctgaaatgcaggaaaaagcaaaggctgaggaagaagcaagagtggcagctgaaaaggccaatgaagcttctgaatcagcaaagaagttggaagaagaggtgaagaagcttttgcagcaagaagcacgggctgcaagtctggctcaggaggcccaagagaaggcagaggcagctggggcttcggtggaaaacctcttgaacaaggcaaaagactttggtgcagggttttcctgggaaaagttgagctcacagattactacttcaatccaaaagcctgatgaggatgagaaaccaaaggtgcagctagccactgtaaggggacaggccaaggctcggaatcttgctcctaacaaagcagtggttagacaaacgtctcagagaagtgctggtaagccaaaggtggaaaaaccaaagcaggcagagacaccaaaggaggtgaggaatgtatttggtggcttgttcaagcaagagactatctatgttgatgatgactagtggaagtggaatatattattttgcacggcataaaactatgttgtttgagtctgtgttaacgtagataatttggttgcatgtgtatggccttgtaaagttctatattttgaagcaggatatttatatagttgtactgtttcagaaccctctgttttctggggaaaacaataaaagggttttcccttatcttctatcctctcctctcttgctaataattaataatatctttggtcacggtaaaaaccttgcttcattaaa

SEQ ID NO: 138944 - DNA, 500 bp, Glycine max
  Clone ID: PAT_MRT3847_96473C.1
gtttaatgttaattcacaaaagtataaataaaaaataaaagtatgactttaccataccataaagcatatgtgatgtgaaaccttaatattatcaaaagataacccaacttctttgtagtagttctaaggagcaagtgagctactacaaacatagaatctaacaacataaattaaaaatcagaacctgcagcaggaaatttaaaacctttatactgtaattaaaggcagcagcaacacagcctaacagcatgaactatgttaatagcactgaaatctaataggtttagatgccaacaatttatatcataaccggcaagcacaaccctcatgactcattcaataagctgttctcatcaaactagtagcctagcacctcttaatttccttcaacctataaaagctaaataatcaggattacaattagtgtatggagaaacacatgattgcataaatgtgaatgaacatacaatttgtttattgagtaattagcgtgatcagat

SEQ ID NO: 138945 - DNA, 2002 bp, Glycine max
  Clone ID: PAT_MRT3847_96474C.1
ctgaagagctagaaagtagagacacacaatccaaaagagtcttattgaagggtgagggtcaccttggaaatccatccatgccatggctcccactcttacatccaattcatcttttttaagcaccagtcctcattcaagggtgagcctccggaatccaaggctgagagtctttgccaagaagtctggatcattcccatcatttggactaggcaagcccaaagatgattcttcttctgctgaagaaaaagataactcatccaattccaacccctttcgtttggactttggaaagatacccgatgtaacgtctttgatcccagttccaagcaacacttctgcgccaggcttttcttttggaaacacaaggcgcaaggacccttcaacagtgtttgttgccggcgcaacggggcaggctggtattcgcattgcacaaacgttgttaagggaaggtttcagtgtacgggctggagtccccgaacttggttctgcccaagaacttgctcgtctcgctactcaatacaagattatatcaaatgaacaggcaaagcgtctgaacgctgtgcaatcaagctttgacaatgcagacacaatagccaaagcaataggcaatgccggcaaggtggttgtcaccattggtccgacagagaacggtccaaccgcagaggtatctgcatcagatgccttgcaagtggttcaggcagcacagctggcaggagtaggccatgtggccatcgtctacgacaagagcagcgctggggcctcaacctacaatgtactggatggcctctcatccttcttcaacaacctcttctccaggtctcaaccgttgaccatacaagagttcttgcagaaagtcattgaaacggatgtcaagtacaccttcatcaagacaagtttgactgatgatttctcaccggagagttcctacaatgtggttgtcttgggcgaaggaagcgccagtgcaaacgactataaagtaatgcaatgtagcaaagtccaagatcgcatcgttggtggctgatgtcttctccaacacagaggtagcagaaaacaaggttgtgaaagtgcactcggatcccagtgcccccttgaagcgtgtagatgaacttttcagccctattcctgaggatggaagaaggaaagcctatgctgaaatgcaggaaaaagcaaaggcagaggaagaagcaagagtggcagctgaaaaggcccgtgaagcttctgaatcagcaaagaagttggaagaagaggtgaaaaggctttcacagcaagaaacacgggctgcaagtctggctcaagaggcccaagagaaggcagaggctggcggggcttcagttgaaaacctcttgaacaaggcaaaagactttggtgcagggttttcctgggaaaagttgagctcacagattactacttcaatccaaaagcctgatgaggatgagaaaccaaaggtgcagctagccactgtaaggggacaggccaaggctcggaatctcgcgcctaacaaagcagtggtcaaacaaacacctcagagaagtgcagctaaaccaaaggtggaaaaaccaaagcagacagagacaccaaaggaggtgaggaatgtatttggtggcctgttcaagcaagagactatctatgttgatgatgactagtggaagcggaacatattatcttgcacggcataaaactatgttgtttgagtctgtgttaacgtagataatttggttgcatgtgtatggtcttgtaaagttctatgtttgaagcagaatatttatgtagttgtactggttcagaaccctattttcgggggaaaacaataaaagggttttcccttatcttctctcctctcttgctaataattaatattgtctttggcaacggtcttgccttgcttcattaacaacttgtgtgttttcagataatacttatctcaaatcatgtttggcataaaaaaaaaaaaaaaaaaaaaaaaaaaaaaagaaaaacaaaaaaaaaaaaaaaaaaaaacaaa

SEQ ID NO: 138946 - DNA, 297 bp, Glycine max
  unsure (1)..(297): unsure at all n locations
  Clone ID: PAT_MRT3847_96475C.1
gtttagaaaggcgaaaacacaaagaangagaggggagaaaacagaaaagggcgcgggagcagaaacccccaaagaaggcaggaagcacagcaacgagaagacgagagaccaagtggccaaaccagacgcggaaacccaaccagacccaaaccagcaaaggcgcaccacaccaaaccacgcaaacaacccagaagaggcaccaaaccaagccggagggaaaaacggaaacgcagacgaacgcgaccgacaagaaggccaaagccggcgcagaaaaaaaaaatccacgaggagcaagaa

SEQ ID NO: 138947 - DNA, 571 bp, Glycine max
  Clone ID: PAT_MRT3847_96476C.1
gcgagcgtcttcattgactgatcggtgttgactttatacttcataactcataatgatgatctttacctatgattgaagagcatgccaaccaaaaacatctccatcgaaaggcctgaacaggttgctcatctagacacgttctatgctgggtccgctgatttcatctgcaccttgatcttgacgatcgctggtatggggacaggcattgattacaacaagctcaccgacaacggaaccgtcactcctgccgacctaatgtccgcatctatcgaccatgctttcgacctcttaggcgccggggccgatagcaccaacatatacggcggccacgagaaccccgccatcaccttatgcgcctctgtgagcggtgccatcaccttactccgcgtcataggctacgtcatgacccagcgtgtcggcttcatcgtgacctacctcgtcctcgctttggacactgcctcccactgtatctagtatattggctgaccggtgaagttggataaggcaacgctgtgaagtcagcagatgctgaagacctttggttcggtgtacacagactaggcctctgccg

SEQ ID NO: 138948 - DNA, 1318 bp, Glycine max
  Clone ID: PAT_MRT3847_96477C.1
ccacgcgtccggtttatccaattatgaagccttctcttctcttcatttccgatagaagccatgatggatatgcttctatcttcttcttcttcttcccttaatctcatcaaacccttttttttctcttctccctcgatttgattccgccagattctcgtcaacgcgctgttccttcacctcaatttcttccagcatgaaaccccaccccctccattatcctattctcctcccaaaaccctaccatcccttatcccctctccgtctccgctcactccgaatcatttccaaaaaccaccaaagcttttgcaacgtttcaaaatgctgccaagaccagtggccctgctgctgcagcagttggtggaaaactaatccgcactgagcttctaagtagtgcttggactggtttctttgccggttgcttgcacacactatcagggcctgaccaccttgcagctttggctccattgtcaattggccgaacccaaatggagagtgctgctgttggagccctttggggttgtggccatgatgccggtcaagttatctttggcttaatatttttgctcttaaaagatcgacttcacattgaaattatccaaacttggggcaccccgtgtgggttggcctttaccctggctagtaattggtgctatgggaattaaggaagctttcagaagtgcctaccccgtgtgttgccttagaaaatggtgaatgtgatgtcagtgtctatgaatcacgcgatagtaatcctgttgtaggaaagaagaagattggttttgctacttttgccactggaatagttcacggactgcaaccagatgcattgatgatggtgttgcctgcccttgctctaccctcacgcttggctggtgctgcatttctcatcatgttcttacttggaactgttgttgcaatggggagctatacggtatttatcggttcatgtagcgaggcactaaaagatagagtacctagaataactgagaaactcacttgggcttcttctcttattgcaatagccctcggatttgccatcatcattagccagttttttgggtttagcctgtattagtaaactttattcagccagggaccttttttatgaacatcgttttggtgtctagaaaaaagtagggacgttagagagaaatttgattgtttggagcaaggtcattatttatgcaagattttgattgtctattatttgactacgtttgtgaatgtatatatcgggtaggttcaattactctactgccaagaactatgttgctgtttcatttgaagatttcgattgattttaccaatattctgtttatgc

SEQ ID NO: 138949 - DNA, 391 bp, Glycine max
  Clone ID: PAT_MRT3847_96478C.1
gggaggactaaacgggggatttattcaacccctcccaaaataaaaataaaaaggaaaaaggaccccttcttgcccttatagccattaaaaaaaactagggttacaagggtttaacaaggggtttttggaaaaattggaaaaaagaaaatacctatttttccttatccttcacaaaaaaaaaaggcaaaaaatcccacgaaaattgaacaaaaacagagggaaggaaaagaattttgaatttttttaaacccaaaacaacggatttggatgaaaaacctaccttttcctccttttaagggggagcaaaaagaatttataaaaaattggttcaaattccttcgggggtaatcccccttttaatttgccaacctccgatgcaaaccaacactta

SEQ ID NO: 138950 - DNA, 341 bp, Glycine max
  Clone ID: PAT_MRT3847_96479C.1
tatttttttcctttatttttcttttctccgctttaatttcgggtgtttggctaatttaaaaacacgtccattatctctccttacaaaaacaaatattcgttgttctatcccccttcacgcttctttcaataccctttttaccatgatctcaataacagcttacaagaactcccccatttttaatcaccccttcttggacggtcatcctgttaaaattaaatccctccctctttcttttgacgtccctcgcaaccctatccccccactgatctatcatcacctctgtgtaaaaatggccccttaaagcactcaattcccttttctcccatccccattaaccc

SEQ ID NO: 138951 - DNA, 619 bp, Glycine max
  Clone ID: PAT_MRT3847_9647C.1
ttggaaatagctgacttatccagagatttaggtttaaccatcttaaagggggtaatggaagctcccaatgacaaaatctgggcgcgctttgctgttgaggcaaacagggatttaacaaggatggaaatatttatgtcactagttcgtcttttggagaaaacggtgaagggcaacacatctccatccaacgcaattgataacatggtgtatcactctttcccacaggctgctcagataccagtaaccggaaggcctagtagtttgcagtgaacccccctgttacatgttttcgtagtaggatgtgttgagagcaagtccggtatgcgcttgcgatgactgacatcaaatccaatttaagatttcagatcctggcgtgacgagatacttgcacgtcaagcaatattttgttgtaaatggctgagctatgaatgaatatcccctgattccatcattgaaagtttttgactccctaagcctgtttgattgtaattgacatctggaatcaattctcgacttctgtcttccaaattatatacgtgccatgcttatttttgtagcatttttttaatgcaatcaggctttctatatatttaaggtaatatttattatcatttaaggt

SEQ ID NO: 138952 - DNA, 479 bp, Glycine max
  Clone ID: PAT_MRT3847_96480C.1
cctcgtgccgaattcggcacgaggaaaagatacaagacatgagtgacaaggattgtcaagaaccatgctgtagacgtaatggcatactaggtagtgatgccatttgtcatgttatgaccaatggtcaattgtaaagttctcaatcctcatcatcattaatatcttcttccctgttatatagtttaaggtaaataacactaaccacccttgagtgttattcaatcaacactaactaaattgtatttttccttcaaaattgcactccaccccaatgagtaaacagcatgaaacacttgttactctctgttaatagaaaacagatattagcactggctttggcagtgctacttcaattcaatgagtaatattgaggagactagggaaaatctatctactacaaataatggttctctaaaatttagaaacagtatcatcttcaattataaagcacccatgttcgatattcatctaattgactg

SEQ ID NO: 138953 - DNA, 321 bp, Glycine max
  Clone ID: PAT_MRT3847_96481C.1
agcacgcagcgcggctcgagcatccatctgatttagatgagcaagatctatattttttcctcgcagcagtcaatgggggcattttttgaagcggggacgcgccacacatacactgatgttgcgatatggatagaaattgaggcttcagagagctaccttgtttgttctatgtacaaagaatcggcacaattagcttcctctggattggaacgctcgcgtcattcccatcatgatctcgacagagcacgatatgtcggaatcaagtgttatgcgtgctgccacaggcattctaccttcttctatccaacacaccacacattc

SEQ ID NO: 138954 - DNA, 273 bp, Glycine max
  unsure (1)..(273): unsure at all n locations
  Clone ID: PAT_MRT3847_96482C.1
ctagttctagatcgcgatctagaaccggctcgagagaacgatataatgtcattnccaacccctaccaattaactcgattgtagcttggtttatgaccattcctaattccggcatgattctggtgggaatcctctctccagctctcactgtatctctctttcttctctatcctgaacctcactctcacccacccatnnnnnnnnnnnnnnnnnnnnnnnactcatntctctttttcctctactaggttgatctctcctcacaaggcacttctat

SEQ ID NO: 138955 - DNA, 345 bp, Glycine max
  Clone ID: PAT_MRT3847_96483C.1
gaccttttaggggtgcagagaagagaatcaatctcaaggaattactcaacttaatttttctctcacaaataccgatttctattatttccaactcaaaatttctccattctttttgtttcggtagctcgcgacatcagatcaacatcgacagcctctcgcgattggttcgatattccattccctctttctattatctacgcaaaggtaattttattagtctattcacgatttgcggcatctgattttgtaattttcacaacaatcgtgtgcacgactgattaattgattttgccagtagtaactagcaattcatcttaaccatattttctcggttcccaatttttc

SEQ ID NO: 138956 - DNA, 683 bp, Glycine max
  unsure (1)..(683): unsure at all n locations
  Clone ID: PAT_MRT3847_96484C.1
atgcattttgtcattcatacagatcataaatctttgaagcatctgaaaggtcaagggaagttgaattaaagacatgcaaagtggttggagttcattgaactttttccatatgtcataaaaaggtaaggagaatatagttgtagatgccttatccagaaggtatgttatacttacttctcttgaagtaagattaattagttttgaatatgtgaaagatttatattaaaacaatggtgactttgctgaaatttttgctgcatgtgaaaatggagcatttgggaaattttatagagtttaagggtacttgtttagagagaataaattgtgtctcaatgttctatgcatgaattgcttgtaagggaagctcacgggggattaatgggatattttggtgtgaaaaagactttagatgttgtgcatgaacatttcttttggcctaaaatgaagcttgatgttgaaagaatctttggtaggtgcattacttgtaaaaaggaaaaatctagagttttaccacaagctttgtatactcttcttccagtacctaatgaaccttgngtagaaatatctatggactntattttgggacttcctgggtcaaggngggatgagattcaatttttgtggtagttgatagattttctaaaatgacacatttcattccttgtcataaaattgatgatatt

SEQ ID NO: 138957 - DNA, 1167 bp, Glycine max
  Clone ID: PAT_MRT3847_96485C.1
agcacggaatccggcgcgaggggggaccggcgtcatcaactccatcacacatgagccagcaagtgttgcggcctctaagacagtggccatggttccaccaccaccaccaccgcacttgcgtcaccctttcccttcaccaccttctcacccctccaccaaaaacctctcaccgtttttcttttgccacggtcgctgcttcgtctcgtcccaaggttcgaactccgaagtctcccgtaccaccaccacccactgccgattccgatctggaggagaagaagagccgaaaccaattgaagcgagaagccaggcgcactgtcaagtggggcatggacttagcttccttctcccctccccaaatcaaacgcatccttagggttgcttcctcggaccatcttcttctcttcgaagctcttatgttggttaagagactgggacctgatgtccgtgaaggaagacggagacagttcagttatattggaaaattgctacgggaagtggatcctgagttaatggaacgattaattaaagcaacaaaagattccaatcagaaggagctgcaagctttaactggcttagggcctgatgatcctgaacctgaagatgatgatgacttggtagaatctgaatccgaggaggatgaggaggaatctaattggcatgataatcaagtagcgaggtggtttgatggtttgatcagtaaggacattgaaattaccaatgaaatttattcagttcagggagttgaatttgatcgtcaggagttgcgaaagcttgtacgtagagtgcacaatactcaagaaatgaaggctgataatgaagaagagaagaaaaaaatagagacagcaacaaatggggctaagaaggctctcaaccgtttccttcgtggcctttcaaagaggattcctaatgaataatattttcattattttgatgtgtcgtgtctcggcttgaagaattcaccaaaagaggtatggtaagccatacattgtcttggtgggatacatgctacggaaaatcgtctattctttttacgttgaatgatgaatactactctctatttttttgttaagattagaccattaaattatagtgttgtgctcttaaaacattagtattaggtttatacttgatatcttgaggttttattcataaatttttctccgcaac

SEQ ID NO: 138958 - DNA, 128 bp, Glycine max
  Clone ID: PAT_MRT3847_96486C.1
tttttaaagaaatgtatactatacttctctggatttaaaaataaacacatagagatgattccaaaataaatgagtcaaagaaatgaataaccctccaaagtaatcataatgatatattacaaacagtt

SEQ ID NO: 138959 - DNA, 208 bp, Glycine max
  Clone ID: PAT_MRT3847_96487C.1
attcatagattggaggcatattgcattgaaaaggggaaaaaaaggaaagggccctaaataccagacatacttcactttgggagatggataaaaaacatctacaattaaatatacttacaaatgaaatacaaattattgtcccaactgaatcaagtgcacgaattaccaaaatggatacacaagaactttaaatttagagaaccaaaaa

SEQ ID NO: 138960 - DNA, 310 bp, Glycine max
  Clone ID: PAT_MRT3847_96488C.1
ttttatataggctggaactgatatattcattgtgcattgttaacaatcttacgccatccattatcatccctcaggtaatcagattaacattgtgctatctaaagatggagatatcttaaaccccggttcccccttctgtgcaattcaatatatacttgatgtagtggattaggacttagttatgtgcgtacaccctttctgtggcggccacagtaatattgagagtcatttaagaagaatgtctgatttgcgaagattgagtgcggagaagggaatgaatccattgattgcaaaagatcgtggcgtggga

SEQ ID NO: 138961 - DNA, 294 bp, Glycine max
  unsure (1)..(294): unsure at all n locations
  Clone ID: PAT_MRT3847_96489C.1
tttttatttatagtttatgattnnggggacaaacaaacaccaaaaaacgagtccatgggggatttaatacaaaccacataaagtttttaaattcttaaaaaatacatataataaataattcaaagtccaggaaataaacccaagttctacaaggattaaaaatgaaagttaacataacacaaaatataattataatgagtacaaaatatggaaataattaccttgtaaaagaataacaaggattataggttaaccaaactaaatgggaaactgagagctagagctaaaagaata

SEQ ID NO: 138962 - DNA, 3764 bp, Glycine max
  Clone ID: PAT_MRT3847_9648C.1
ggccaaccaaagaagaccattgttgaggctgaagctaaggtgatacctacaaattttgattcatgtctgcaacaacattctgtttataatgctagatctgcattcaatgagttatctagtttcaatcaatcaaatctgagtgacggcagccttaaatatatggaacaacaaacatcaggtgttgggagacagagtcaagttattcctaacgtgaatccatcaagtgccttaaatatgcctcggctgaaaatcgatggaggtaaaattcttgaacagaatcagagttctagtgacagttcactactcggaggaatcccaatatgtagtgggagtaatcttttgaggacaaatatttaactgctcactttcaaatcctcccaaagtatccactaggccttctgatttttctggaatgtacaaggttgggtttggactccaaagtaacaatacaacaactaatgctgtgctttgttctgtgcctaatttcactaatcaatcagttagcaatcacatgaatctagaaggctctggtcagaaaagtctttccattgatttaaagcaagtgtgggatgcctttgcgtcaactgatcaaaggatagatgatgatttgcttcaggccgcccttaagattccatctcttcatctggaggagcatgtgcctatgggtgatcacatctctggttttgttcaagattgcctcagtaaagatcttactagtcaacatatgatgaaaatgaatgttaagcatgcagaagccgatgctcaacttccatctggtgatgacctcttcgatgttttgggtatggatttgaaaaggagactactcaatggaagctggaataagttgcttgccacagattcagatgacaacacagaacatctagataaaaaggcaacatgcatgaatttgcaaggtgtaggtcctgataatagttattcagttaatgaagcaatatcagaaagtggcatcttctctggaacaggcacagaccaccttttagatgctgtggtttcaaaagctcaatctgctgcaaaacagaattctgatgaaatgtcatgcaggacaacattgacaaggattagtaccgcctcaattccttctcctgtctgcaagcaagttatgcctgatcatgttgccccgaggggattgtttgattttcctaagaccggagttaaaacagcttctgcagaaacaagttctcttaggtctgggtgtagcaaggatgatgctggaaactgctctcaaactacttccatatatgggtctaagcttagttcatgggttgagaatagtagtaattttaaacgtgaaagcagtgtttcaactggatactccaagcgaccagatgaagtttgcaaatcaaatcgtaaaagacttaaaccaggagagaaccctaggcctaggcctaaagatcgccaaatgattcaagatcgtgtgaaagagttgcgggaaattgtgccaaatggagcaaaatgtagcatagatgcacttctggaaaagaccatcaagcatatgcttttcctgcaaagggtaacaaagcgtgctgacaagctgcaacagtcagagtactctaagtatgtcagtaaaagaagtggactgctattaaaagataactttgagggaggggctacatgggcatatgaggttggtgctccaacaatcctcttgacgatcgctattcaaattgtcaaagccttaaatctgaagagaaccctaggcctcggcctggaaagcggctactttctcaagatcgtgtaaatgagcagagggttaggtttccacatcttgcaaggtgtcgtggaaacgcgcttctacaaaatctgggcacgctttgctgtttacgcaaacaggtatcaaaccaggctggaaatattaaagacacaggttcgtctttgagatctaacgatgaaggttggttcatattcgtcgaatacaattggtaacagcataaagctgtatcagtctttcccacaagctacccagatacccgcaacttgcaggactattagtttgcaattcactacctacttgtagattcgctttgtgaagaatcgtgggtgaaagctatcctctctcaggatgaatttaactttgtctaactactgtttcaaatgagtttggaggagctcgcgttgacttggtcaagacctgctttactgttaaggcaaactgtaatgtaaatatgaaggatatttttaggtcactggtacgtcttttggatcaaagttgtgaagggcggtagtgcctcttgatcgaataggaatgataacaacaagatggtttatcatttttttccacctgcgtaccgcaaaacatcacctggtaggccaagtattttgctgttgttcctctgctttgcctttggtggttactgttggattgaacttaactgcgattgtctgctgtttcacctcagtttggaaggggatgagtttagtaagttaagaacttctcaagattaatgtgcattagtataatgtatatgcatgtttcctcctattcctgccaaggtcacttatcctgtgttggcacttggcagtgtcttctgatgctttaggcaactctttagataatttgcatccattttttttcctgtgtgagtaatgccattggtcaccaagttgtataaggcttttgttgatgttgttgctgagtaatgccattggtgttgatggtgtgattcggatgtatagatatttgtaggatttgcaaagggggagatcgtatgtttgaccctcattcggaacggactgttgttcatcctgatttctttcacacttcgattttgtctttcttggagtgggaatattggctggtataatagattattaatcattaaggtgggctgcttttgaaagacaactttgaaggtggggctacgtgggcatatgaagttggctcactatcaatggtttgccccattgtagtcgaggatctgattccacctcgtcagatgctagtggagatgctttgtgaggaacgaggttgctttttggaaatagccgacttaatcagaggattaggcttaaccatcttaaagggggtaatggaagctcacaatgacaaaatctgggcacgctttgctgttgaggcaaacagggatataacaaggatggaaatatttatgtcacttgtttgtcttttggagcaaacggtgaagggcaacacatcttcatccaatgcaattgataacatggtgtatcactctttcccacaggctacgcagacaacagaaaggtctagtagtttgcagtgaacccacctgttacatgttttcttatcaggatgtgttgagagcaagtccggtatgcgcttgcgatgactgacatcaaatccaatctaagatttcaggtggtcttgactttgtctaactgttttacatctcatatctgaactcattttgaaagagtgtgtaagaggtactaggtagtggaaatcatgtcaagataaatatggattcctgcgttgtaattttgaatgtttccttctgtgccggtcaacataatgtatactgtgttggcattttctactgatatcatattactgaactcttagatgacttgcttccattttttataattgtgagttattaccaaagcagttggtcttgtgattcagatcagatgtatagatattgtaggatatggaaagaatggtctcatgtgctcattagcttgctacacattttcttctgtgccccttttctccaggcttttgaaagttttgtaccatatatatatgttatatatattatgtgaatttg

SEQ ID NO: 138963 - DNA, 1302 bp, Glycine max
  unsure (1)..(1302): unsure at all n locations
  Clone ID: PAT_MRT3847_96490C.1
gaaaaagcattttaatagataaaaacaataaggcggaaagaggagtacagggatttctaattgacgccttatgttaattagcaatttggcaatagcaaagtagtgaatgaaagtaaagctgttcatttgtttcctcctaccgattcgaacaattcgagtttcgttccctttcttgtttctgatccatggcttttttgccagctctcgcagttcaatcaatcaaaccccagacaaacctctatcagtctctctctccctaatacgatgacgaagcctttccatctcgctctccttctctgactttctcagtgttgttccgagtgtttgttgtttttctccaaccgagtcgtagtcgaatatgtctagtttcgtcggtgtccttgtttctgatcaatggcttcagagccagttcactcaagtcgaacttcgaaccctcaaatccaagtatgtgtcggaaaggactcaatcgggacgtgttactgtcggaaatttgccaccaatttttaagaaattgaaggctttctctgaactgttcaccgaggatgagattaaggatgccttggctgagtcatatcagaacatggatgaagagattgattttgagtccttcctaagggcacatttaaatctgcaatcccgagcaatagctaaagatggtggttcaaaaagttcttcttcatttctgaaggcagctacaacaactgttcatcatgcaattaatgaatctgagaaagcttcttatgttgcacatattaataactacttggctgaagataaattcatgagtcagtttcttccaattgatccatctacaaatgcgttgtttgatcttgcaaaagatggagtccttctttgcaagcttattaatattgctgttcctgggaccatagatgagcgagctatcaacacaaaacgggttcttaatccatgggaaaggaatgagaaccatacccttggcctcaattcggccaaggctattgggtgcacggtggttaatattggtacacaggatttaattgaaggaagaccccatctggtacttggtttgatttcacaagtaatcaagattcaattgttagctgatctcaatctgaagaaaactcctcaacttgtggaattagtggaagatgacaaggatgttgaggagcttatcantttagcacctgatncgctcttattgaaatggatgaatttccacttgaagaaagctggatatgagaaacaggttacaaacttctcttttgacctaaaggagggagaagcttatgcttacttgcttaatgctcttgcccccacaagggg

SEQ ID NO: 138964 - DNA, 281 bp, Glycine max
  Clone ID: PAT_MRT3847_96491C.1
tgctacaatgggacagtctcacactataggtttacaggaatccgctaaatagcactctgaggcaaaggatttcacaccttctttgacgctgatagactacagaggtgggaggaattatcacctgcagttttaacggcaatttcagcttcaaaggttgctagtagcgggcattcgtgcaaccatgccagctcctcatggcgttgagatgaccatggtcacagctttcactgcatgagggaatggctgttggtcatcaccgtcatttactaaatcaatccttc

SEQ ID NO: 138965 - DNA, 350 bp, Glycine max
  Clone ID: PAT_MRT3847_96492C.1
cgcaaacactgcgcaaagaaagagagagagagaaacacacacagagtaatgaagagacagagcagcgcggtgtcgccgtcatcgtcgcggcgagaaactccgccggagaagattcacgcgaagaccatcgggtgcatgtccggcattctccacttcatctccagctccaattcccgtcgctctcgccgcttcctcacattcggaaagaggcagattaataagaatcccgcttctacccccgccgacgccggaaatttgccgccggaaaatgccgccgccgatgactggaggctgtcgtccgacgtgcccaggagtccgactttgccggcggagattcgacggtcgagtgc

SEQ ID NO: 138966 - DNA, 286 bp, Glycine max
  Clone ID: PAT_MRT3847_96493C.1
ggcccaagaaactttcctattcacatctgaatcaatgaacgaggggcaccctgacaagctctgtgaccagatctccgatgctgagctcgatgcatgcttggagcaggaccctgacagcaaggctgcctgtgaaacctgcaccaagaccaacatggtgatggattccggagagatcacaaccaacgccaacgtggactatgagaagatcgtgcgcgacacatgcaggaacataggattagtctctgatgatgtggggcgagatgcggacaactgcgaggtccacgtc

SEQ ID NO: 138967 - DNA, 350 bp, Glycine max
  Clone ID: PAT_MRT3847_96494C.1
ttgttttatgaaacaaaaataatgcacaacatgatatgaatggagacacaacaatactaaaaagaacaataacacgcaccacccttttttttcctcaccaactcagggggcagcacctatacaggttccactgtttgatccgcaacggggggagctgagactattactgtggaggccaaacatcaattacatctacctggtgttacacagattcacaaggtcaaacccttgtgtggaccaatctaacatgtcgggatcctgagcccctattggccatctaggactgcatatgagagatccgaagagaccagctttccaaaaattgcataattctagcggggaatagggac

SEQ ID NO: 138968 - DNA, 582 bp, Glycine max
  Clone ID: PAT_MRT3847_96495C.1
atcgtcaatactataatatacaatgctaaaattaatattaatttattctctcttttatctcttataactttttagattcatttttaaaaaaattatcttatggggacaacactaatttttttgagggaaaaaataaaaattatttgatatattcatgtgacaaataaaatcttgtggggcaattgccctcatccccttgagtgtagatccactactgtaacttttcggagggactttgaggtattctcacaattttcggttctttgaactagctatggattaattctcggttcaaaatttagtcacatttaaagatcttcaccctgccatatctgtgattatgcatatactgtcttctcatacacccattcttttaaatctttctatttgtgcatttgcctctgagctgaactggttctaatcatcatagtgaacaggaaactgcacattcatatctttagatttatgtaacattttaatggtttcttctttcattgctaaaggcattcgtaaattttctttactagagtcgcgaatgtgctatttaaattttaaatattctatgtaaatatgaatgagaaa

SEQ ID NO: 138969 - DNA, 388 bp, Glycine max
  Clone ID: PAT_MRT3847_96496C.1
tagatgtagcttccttggacatatagagatgtattgtaatcaaaaaaattgtgataactttacttcccttatgcgagaactagactttcctagaaaaatctataacagaaaaacatatgcatttgaatgttctgctattaaaatcccatataatacatataatagtggaaatgttatacttagatatatatggaatatgaccattaaccgtggctatgctggaatcatagtgtaataccaacattttgttattcgaaactattctccacctgcgcaaatgagcaatagcatcgggatgaaagttagaattaaacatttgggacacatgggatgttagtacaacaaaggcaactatgatctcatatatgtcatcagtaatggtatatac

SEQ ID NO: 138970 - DNA, 398 bp, Glycine max
  Clone ID: PAT_MRT3847_96497C.1
acatatcgtgtgacattgggacccttccaattattgctcgagattggtcacacatatgccactaccctgaaaacgatagaacattaatgctgttcaccattaggctaccgtatcccaaggcagcgtctctgtgccatgaccttttgtacgaagccgggccatgactgtaatgtggtacaacacatataccttagaggttcctaatacagtggtcaagctctttatgccgctcgcattcttgagtgactaagggggaagagcgttcatctgatggtgcattccttcgttccatcttagagtcaaaggttgcccattggggcgcgactacagacagctttgctactgtagctactagggacctcgttcctagcctttagagaacctaggggatccactgg

SEQ ID NO: 138971 - DNA, 314 bp, Glycine max
  Clone ID: PAT_MRT3847_96498C.1
ccagcacaccagggcacgaaaccaaaattaaagggcgcccatgggaaatgaaaagcccaaaaaatcaagggggggggggaaaaagccaaaatgtcaaaccccaggggggttcgggacaaaccgcccggggggaagggggggccccctaagggggcttcaaaactgaggaacgaggtttccatcccgggattaaaaaaaaagaggccttcaggaacccctaaaaaaaattaacagccccaattaggaatggaaaaatggaccctcccccaacggacaagggattttccccggccaggcaaaattttaaaaccagg

SEQ ID NO: 138972 - DNA, 489 bp, Glycine max
  Clone ID: PAT_MRT3847_96499C.1
gcatgcgcacgctcgtaatctggctcgagcttcattgggatcatggcaacccttgctccatcctctgacactgcaagtgttaaagcaagtgctgtgattggactttcccaaacaagaagggtgttggtgtaagtgtaataatccttatccttaagggagggtgttttgggagatagttgctcttatttgtaccatcaaggttatggttatacaccatatggagcacccatgcaacatgatgacaatctctatgggctgcaacagtaccagtacccttcttcttactaccagtctccagcttctgctgatgggtcatttgctgctaacaaaatcaatgctcaagaagggagaatatcagctgcagccagtgctgaacatatcccttcatctgctgttattaataaagggaagctccattggtgtggtgaatgaaggttccacaaacaacaatggggatatcaagatccaagagtaagtcctcatgggact

SEQ ID NO: 138973 - DNA, 506 bp, Glycine max
  Clone ID: PAT_MRT3847_9649C.1
aaccgttctccaaaaagatattgaattttccttgtttcttcctgcaatatttggacaacaaataattgctattaacttgcctatgctatgcttcacatgagagccaagccataagtcctctctatagatataattgccacacagaactataaatatgcttagaattaaaatattgataaaaatgaagacagagatacaaaagtaatatatgtaccgatcaaaacaacccaatttacaaggaactatggatctatttgttcaatagatcgcgatgaagaaatggatatctagtcaaacaatttttcaatcatttttattggcattattttttatctgacaaaaaataaactaatatatgttagtatcttacatgtaggtaccaacattatggtatattaaagtatatattgctatattttataccaacaaaactatgaattaatttgatgtatcatattcataatataaatctatcaatggttaaaccgacaatttattttattttg

SEQ ID NO: 138974 - DNA, 542 bp, Glycine max
  Clone ID: PAT_MRT3847_964C.1
cccacgcgtccgttcttttatagcggctagggctatagcgcagcttctcttacatttaaggaagatgggtaaggaaaaggttcacatcagtattgtggatattggccatgttaactgtgtgaagtacactaccactggccacctgatctacaagctcgtaggcattgacatgcgggctattgagagacttgagaaggaagctgctgatatgaacaacaggtgcttcaagaatgcctgggtgcttgatcagcataagggtgagcgtgaaagaggaatcacaactgatgttgcctcgtggaactttgataccaccaacaactatggcacattcattgatccccgtgaacgcactgatttcatcagaaacgtgatcgctgggacatgccaagctgactgagctgttgttatcattgagtccactactgctggactggaagctggaatttcaaaggatggacggactctttaacatgctctggcttacattacccttggtgtgaaacatatgatctgctgctgtgacacgatggatgctactacgc

SEQ ID NO: 138975 - DNA, 1254 bp, Glycine max
  unsure (1)..(1254): unsure at all n locations
  Clone ID: PAT_MRT3847_96500C.1
cccataatgaatccagagaacggttctagtccagatgaatgtatgaacccatgtaagttcatggactgtggaagtggctgaggaatggttgtatcctttgagaggaaatttttntgccaggcacagctggtgaagataatccaatttttgctccatcattggacttcttattagaaaataataagggatccaaanggtaatgctggttgagtcccatgaggacctactcttggatcttgatatcctgacaaaggagcatacacaggaaagccagccctttgataagaatcatttgaattcaacaacgggcgctgggtacttgataaaaattcctttaccccattgttgtttgtggaaccttcattcaccacaccaatggagcttcctttattaataacagcagatgaagggatatgttcagcactggctgcagctgatattctcccttcttgagcattgattttgttagcagcaaatgacccatcagcagaagctggagactggtagtaagaagaagggtactggtactgttgcagcccatagagattgtcatcatgttgcatgggtgctccatatggtgtataaccataaccttgatggtacaaataagagcagctatctcccaaaacaccctgttatttaattcattacacaaaaaaaacctgtaagattgtcttaagtttaacaatttagtaaatctatattttataatttaaaaatgataagaagcaaatcatatcctggcaataataagaggaagaagatatgaaactacacatctaagaaaattggcaaatgaaggaaatgattagggctaattatacggacctcccttaaggataaggattattacacttacaccaacacccttcttgtttgggaaagtccaatcacagcacttgctttaacaccttaaaaataacaaagcaaaggaggtaggtgtaatttcctaaacaaggacagtgtcaatgtaaaaagtgctaacctcaaggaaggttactatagttttcccaaatgattttaggctcatcaaagtgatcaaactacacttatatgcactagcaattttaggattggatgtcaacaggaaaaaaaactcaaaataatgtactgctctttagaatttaaaatttaaaacaganaggatgcttatgtaatactcgaaatttacatttggtgtaacaaatttagacccccagaaacaatccaagcgtgattttagcaagtaggaagcatccatcctacaccatttga

SEQ ID NO: 138976 - DNA, 565 bp, Glycine max
  Clone ID: PAT_MRT3847_96501C.1
tggggggagaaacaatggggtctctaatggcctctgccacattgactcttgtattggcaatagtgtctctaagcttgccgtctcaaatttcagctcataactacttgtactcttcacctcctcctcctaagaagccatattactatcattctcctcccccaccttcacctcccccaccaaagaaaccatattactatttttctcctcctccaccaaagaagccatattactaccactctccacccccaccttcacctcccccaccttacaagaagccatactactatcactctccacctccaccttcacctcctccaccaaagaagccatactattaccattccccacccccaccacctatgtctaccactctcctccaccacctcctaagaagccatactactaccattctccaccacctccagtccaccaccacccttacccccatcctcacccccacccacacccttacccccatcctcacccccacccacaccctcatcctcctttacattaccactctcctcctccaccccctaagaaaccctacaagtacccttcaccc

SEQ ID NO: 138977 - DNA, 473 bp, Glycine max
  Clone ID: PAT_MRT3847_96502C.1
ctggtcttcagttcctgctgacacatcaacagaggtgcttgagaaagaaaagctgattctacaaacaacttctagaaccaagcactttggtatccagaggaaacccctgcctcttgaacctactgttcttctacgagaggccaacaggcggagggcttcactttcagctggaaatgtgtctgaaatatttgacagtcgccagggtccaatggatggatcaggttttgatgcatccactagaatgtcaccacaaaaagcacttgcaagttccatgtcacgtacaaattcttcaccaggaaactttgatagctcaattgaccgaccaatgaggcttgctgagatttttgttgctgctgagcatgctttgaagcaaacaatttctaatccagaactggggaaatcattatcatcatccgaggagtttgagcaaaaatatttagagctaactaaaggtgctgctgacaattatcatc

SEQ ID NO: 138978 - DNA, 524 bp, Glycine max
  Clone ID: PAT_MRT3847_96503C.1
tacccacctcccccaccaaagaaaccatattactatcattctcctcctccaccaaagaagccatattactaccactctccacccccaccttcacctcccccaccttacaagaagccatactactatcactctccacctccaccttcacctcctccaccaaagaagccatactattaccattccccacccccaccacctaagaagccatattactaccactctccacccccaccttcacctcccccaccttacaagaagccatacttctaccactctcctccaccacctcctaagaagccatactactaccattctccaccacctccagtccaccaccacccttacccccatcctcacccccacccacacccttacccccatcctcacccccacccacaccctcatcctccttacgtttaccactctcctccaccaccaccttacaagaagccttacatctatgcatcacctccccctccttaccactattagcatacctcttatcgatatgaagaatatgtgca

SEQ ID NO: 138979 - DNA, 244 bp, Glycine max
  Clone ID: PAT_MRT3847_96504C.1
ctatttctcaatctctctgtgtgcggctgaggattccgaacgagtgaccttccccgtttctcgcaaagtttaagtcatcatgggtaaggacaaggttcacatcgacattctcgccagtgaacatgtcgactctggaaagtcaactaccactggtcacttgatctacaagcttggaggtattgacaagcgtgtgattcagcggctcgagacagaggctaccgagatgaacaagcggtcattcaag

SEQ ID NO: 138980 - DNA, 211 bp, Glycine max
  Clone ID: PAT_MRT3847_96505C.1
atgcagagcttgtgtcaatgttctattgaccttcttggtggaggaattttagttgacaaaactggatattgtatcacacttattcgaaattctccaattagtaacttgtgtagagttgctgcttggaagaaaggcatgttaatggttaacgattgtgatgtctggtaatgcatgcagtcagaaggactgattcggcttcattggttcaagc

SEQ ID NO: 138981 - DNA, 905 bp, Glycine max
  unsure (1)..(905): unsure at all n locations
  Clone ID: PAT_MRT3847_96506C.1
cccacgcgtacggtcccccaccaccttcagcaccaccaccaaagaagccgtactactaccactcaccaccccctccttcacctgctccacctaagccatactactaccactcaccaccacccccaccaaagaaaaaaccatactattaccactccccaccaccttctcctaagaagccctacaagtacccatctcccccacctccagtgcacccttaccctgaccctcacccacacccacaccctcacccacaccctgaccctgaccctccctatgtctaccactctgctccaccacctcctaagaagccatactaccacccaccaccacccccaccaaagaaaaaaccatactactaccactctccaccaccacatcatccaaaaaagccatactattaccactctcctcctccaccccctaagaagccctacaagtacccttcacccccaccaccagttcaccctccctacattccacacccagtttaccactctactccaccaccaccttacaagaagccttacatctatgcatcacctccccctccttaccactattagcatacctcttatcgatatgaagaatatgtgcaacgaataaaagaaagcgatggaaagcgcttcgcgatgcacgaaagagaagaaatggaagcaaagtttccgcgttttgtctttcataaaaaaaatgttaaattattattttctatgataggattggtttcttgtcttttttctcttgtttaagaatttcggtgtattttaacagttgtaaagcactctgcgctctctctgcatgatcatgtacaactacaagcatgctctctgtagttttcaacctgctgcgcttgcaggggtngnaaactaatcaatataattaaataaataccatcaaaaaaacaaaaa

SEQ ID NO: 138982 - DNA, 1716 bp, Glycine max
  Clone ID: PAT_MRT3847_96507C.1
agaagccatattactatcattctcctccccgcaccttcacctcccccaccaaagaaaccatattactatcattctcctcctccaccaaagaagccatattactaccactctccacccccaccttcacctcccccaccttacaagaagccatactactatcactctccacctccaccttcacctcctccaccaaagaagccatactattaccattccccacccccaccacctaagaagccatattactaccactctccacccccaccttcacctcccccaccttacaagaagccatactactaccactctcccccaccaccttcaccaccaccaccaaagaagccgtactactaccactcaccaccccctccttcacctcctccacctaagccatactactaccactcaccaccaccccgaccaaagaaaaaaccatacctactaccactctccaccaccaccttcttcaaaaaaggcatactactaccactccccacgacctcctcctaagaagccctacaagtacccatctcccccacctccagtgcacccttaccctcaccctcacccacacccacaccctcacccacaccctcaccctcaccctccctatgtctaccactctcctccaccacctcctaagaagccatactactaccattctccaccacctccagtccaccaccacccttacccccatcttcacccccacccacaccctcatcctccaccacctcctaagaagccatactactatcattctccaccacctccagtccacccccacccttacccccatcctcacccccacccacacccttacccccatcctcacccccacccacaccctcatcctccttacgtttaccactctcctcctccaccccctaagaagccctacaagtacccttcacccccaccaccagttcaccctccctacattccacacccagtttaccactctcctccaccaccaccttacaagaagccttacatctatgcatcacctccccctccttaccactattagcatacctcttatcgatatgaagaatatgtgcaacgaataaaagaaagcgatggaaagcgcttcgcgatgcacgaaagagaagaaatggaagcaaagtttccgcgttttgtctttcataaaaaaaatgttaaattattattttctatgataggattggtttcttgtcttttttctcttgtttaagaatttcggtgtattttaacagttgtaaagcactctgcgctctctctgcatgatcatgtacaactacaagcatgctctctgtagttttcaacctgctgcgcttgcaggggttgtaaaactaatcaatataattaaataaattacattctgtctctctcaaaaaaaaaaaaaaaaaaaaaaaaaaaaaaaaaaaaaaaaaaaaaaaaaaaaaaaaaaaaaaaaaaaaaaaaaaaaaaaaaaaaaaaaaaaaaactccttgaacctgctcacaacccggaaattaattccgaaaataccccttgggggtccctgtagaggccctttccttatcgcccttccatttaaacctgggcgaaacaatggcaaaagctgttccctggggaaaattgttatcccttcaaaatcccccacaaaatacaacccgaaagaaaaaagggtaaaccctgggggccctaatgggggacctaccccaatttaattgggttgccctcactgcccgtttt

SEQ ID NO: 138983 - DNA, 645 bp, Glycine max
  Clone ID: PAT_MRT3847_96508C.1
gggaaaaaaacgaaaaaatttttcaagatttcaatagggggccccccaaaggggttatcaaattccacaaagggggggcccaacacccttccgtggtttctaatggggaccgggaaacgggaaacccacccggggcgggaacaggaacttaatggccccgggggaccattaacccaaaaaaaaaaatttccgggggcgaaaaaccgggggggttccttccccccaaagggggggggggtcaccccagggggggttctaaaacccgaaaggtggttgccccggggggcccgggaaaaaagggctccccttttcttaaaaacccccccccccccccccaggggcccccctcctttaaccgcgcttttcgtggggcgggggacaaactccaaccccccaaggggggtttttggggggggggcggggggcccctccctctgcgaccggtttagggcccccccccacaagggggccaaccccgggggggggtatcgggccccttggttttggcccccccgggggccccaaaaaaccccttgggtaaaaggggtggccccaaaaccccgggaaccggggggggttccccccctggggggaaaagggggtttcccaaaaaaaccccccagagccccccccccgggggggccc

SEQ ID NO: 138984 - DNA, 420 bp, Glycine max
  Clone ID: PAT_MRT3847_96509C.1
gctatgacgttgcatgcacgctgccctcggctcggaattcggctcgaggctggagcacacaaatgcttggaatctgtttgtttagggagggggtgctcacactgcggcatatggccagaagaatgcactgtacagcgcagcacacaccatagctgcagataccggaaatgacattcaatctctcatcatgccatgttttactcctgattatgagacgatggaactaattagttacgtatgcacggactacacctgggttcatcaggccaatggataagacccttcatgctgaggtagatgcagagcactccagctagtacccccttatggtgatggagaaactggattggtatcttcacaagagggcccaagccttgcacatttgaagtatgcatgtactggatactgtgtgtacttaga

SEQ ID NO: 138985 - DNA, 410 bp, Glycine max
  Clone ID: PAT_MRT3847_9650C.1
tttttactcatcccaatttcgaagaaactgcaattgataaaaacttgttcatcattacattttaaatttaattctactgtttttgagacacctttgggcagaagactaaaagaaaagctaacaagtacaatgtgtaaatacatggtaaagcaaactaatccgttcacattgactatatgtcaaaagaaaaacacctacccaaacctttcccatttaaaaaagaaataaacacctaactgcattctatttttttggttgccatttgccaataaaatattaattgcattgcatcagaaacaacaaaattacctaaacggctaaacctatagcttcagtagaactttcaaagtgcttctggaaaacgtaaatctgcagggcctgggcccaatatcccttttttgttcgcttat

SEQ ID NO: 138986 - DNA, 1677 bp, Glycine max
  unsure (1)..(1677): unsure at all n locations
  Clone ID: PAT_MRT3847_96510C.1
ggctcgaggcacaatcaagagacaacaaatttccatccttgagatcttataattctggcagtttagttgattttttctcagaaccagtccaagcttcagaaccacttcagaataaagcatttggcattcccagaccacctggtcctacaagatctgttagcatggacctctccaaggcaccactggaatcagcttcatctgttgatctttttcagttaccagcagcaccatctcaagctccaacattggatttgtttcaatcatctctttcatcggcagatccatctttcaacgagaatcaacttagtcaaacatcccatcttgcatctattgattttttttccgatttttctccgcagccttctactgtaacctcagatgggaaggcactggaattatctgtccctaaaaatgaaggatgggcaacttttgatatgcctcagagaacctcctctactgcacaagtggaaattccaaccactgtaccctcaaatgctaaatctttagaagaaaatttgatccattntctacctcaaatgcaaacatgcaatggccatcttttgatatgcctcaaagcacctcctctactgcacaagtggaaattccagccactgcaccctcaagtgctaaatctttacacgaaacatttgatccattttcaagctcaaatgcaaacaggcaatggccatcttttgaaatttctagtgtcagtgtaccttcttcagttacatctaatttatggcatgatggtgtgtggaatggagaagaacaagtttctgctatggcagcaaacactcaaccatggaatgcatttgaagattctggtggccatcatcctgtggattcccttagtcaaggattacaattgcacaattttccatcagctgataatcatattttgggtttaagagagtctgagggatccaatgaagatggagttaaaggcattgcccctgttggtcgatttgataatcatgacatcccatctcatgtcagttgctcagcatatcccccacccatgcttcccccaatgggagatattcaacataatgaaacgaaatctaaatcaactaatccatttgattatccctatgaaactgatgtagatcacaacaatatgtttctggatatgggttctttgcaagctgcactgccagatgccctgtttccagccaccttccatggtggtatagctgaatcttggcttcctcaaaacccggtgacctcatgtatatcctctgctggagaaggtggtttgtcattcatggctatgcaatcaccaagttcacaaatacagaacatccagaaaccggaaccagttgcttcgatagggggaaatccttttgcataggattatgctgtagaatgtactattccttttcacatagaaatttattggtagccagtgtagttgatcgtggaagtaatgtaatgttttgttaagagcaaaatgtagttcaactcctatgcaaaaggttcttgatgtttaattttagtgatctttctggctggtattgaacttcagttgagagactattgagggtattccactttgttcataattctaatataattgtaattattgagagcttctgattggcacgcacgtccaattcatgtataaaaaaaaaaaaaaaaaaaaaaaaaaaaaatgactgacgctctaagagttaccaa

SEQ ID NO: 138987 - DNA, 1011 bp, Glycine max
  Clone ID: PAT_MRT3847_96511C.1
cggctcgagctcttcacaaaacccagcatcttcaataattcatcgcctctttattaataataagtatagtaaatacgctagtctatggggaacactacttcttgttcttgtatttgtatctctaatggtgttattagtattgggaatattttgaagaagagaagaaaagctaagaaaacagcgatgctgttggacagtgatggaaacactcgggagatcaagctacccataaaatcaggggagctcatgatcgaagaattcggccacgtcgtcactccggtcgacgaacttcgtagaacgggacgggtttcggctttattggccgacgaggagcttgtggccggtaaggtttacctgctattgccagtgaataggatcaattcgaaatcttcagagtttgagatggctaatgcggaaaaacagagaaaacacacaaagagtaagaggggaaataatagggtaataatatggcggtcactgatttcgaggtctaatgaaagggacgaagaaaaccaagttacggttagtgttttccctgtgtgtccgaggtttgggaaccaagtacgatggaatcccgttttggatcctatcgtagaataatataatcaatccccctcatctccgaacgaatctggccaacaattttgatcttaaatttaaattaatttgtcttcctcacacacttgacacccgacactattgtgtgctcatttttaattttaactttacactaacatggatcaaattcttttagaagttagatgtccaccaatatttgttaaactcccgattcattcatttatgtcgattttgttcttggcaactatagtttgtttcttctcacttcccagaaccttgtagtttgcacactacttttttttttttgtcatgctcaatttgttagaaaagatggttcctcttgaaggaatagggagaaaaatatgatactcaaagtacaagtagattaaaacggtaaaagttgagtttacaatgagtacaactaattttata

SEQ ID NO: 138988 - DNA, 748 bp, Glycine max
  Clone ID: PAT_MRT3847_96512C.1
tattcccatgactggtgtgtggtgtttcgcaataagtttcttgatatgagctctttgcaagctgcactgccagatgccctgtttccagccaccttccatggtgggatagctgaatcttggcttcctcaaaacccggtgaccccatatatatcatctgctggaaaaggtggtttgtcattcatggctatgcaatcaccaagtacgcaaatacagaacatccagaaaccggaaacagttgattcgatccggggaaatccttttgcataggattgtgctgtagaatgtactattccttttcatagaaatttattggcagccagtgcagttgagcgtggaagtaattgtaatgttttgttaagagcaaaatgtagttcatcacttcgcttccacttgaggaccaccttgcaatttttagtcccccatatatattcgggccagatcatgcatttgcaatactgtaattgagtgatagttttcttgatgtttaattagtgatctggctggtattgaactttactgagagactattgagggtatttttcactttgttcataattataatataattgtaattatatgagagcttctgattggcacgcacgtccaattcatgtataaatgcggattacggtttttttttttccggtttaattatagtttttattaggttctgatagaagctcgagtaatttttaaataacttgttcggctgttaatgaatgctcttgcaactgctccttattggttc

SEQ ID NO: 138989 - DNA, 937 bp, Glycine max
  Clone ID: PAT_MRT3847_96513C.1
ggtctcgagttttgttgatctgtcacagtcaattccagagtttgctagacgcaaatcatgatggacctgtacagagctatagacatctacttgaaggagcacccaagtttgacaaaagctgaaaggaaaaagatatgtggactaatggatgtcaagaaattgacagtggaagcatcaatgcatgctgcacagaacgaacgccttcctcttcgagttgtggtccaggttctctattttgagcaggcccgaggtgcttccaatgctcgcacacttggtaacagtccacgcaattctacaaacactcatgtcaacggagacaaagagtgtgagaaatcgaggggagaaagctgccaatccctcaacaaccaaatgtgtcacatgaaggttagagacaaagagttccacaagaatggaaaattgaacaagagtagcaagaacagcagaagtggcatgcagttgttgccatctgggtcaaggagaatttttgacaagttatggattgtggggaaaggacaaggagaaaataggagctcagagacttcagggagttccaatagccctacttctgtagtccctggagataccaaatcatctggttcatcattgcgacacaggaggctttccatctcttagggaattttcgtaatttaaacaggcgaaggagagttaaattgctgtgaagtgtaaaaagtgttaggatgttaaatcttttgtgttattaatgcatgcacagaatcaggaaaaaggtctcactattagaattgcaaacaaaatgtaatgacattatattgtgtcttaatccgtgtatcatttggccagtgtattattgtcttcaatccttagaagtctttcattggggttagggatctttaggttttattcagtactacccttttgtatagaatcaccatccttaattacaggagctgatttgtgg

SEQ ID NO: 138990 - DNA, 154 bp, Glycine max
  Clone ID: PAT_MRT3847_96514C.1
tgctcgcctcaccctttcccttttgcgacgcccgtgagaaacctaagccaaccaaaaaaaaaaaaaccgagtggggtgggaggcccaccccccaacgtagagtcagaatcttcattctccaatcggagaccaagcgagctcgaaccaaccaagt

SEQ ID NO: 138991 - DNA, 114 bp, Glycine max
  unsure (1)..(114): unsure at all n locations
  Clone ID: PAT_MRT3847_96515C.1
gttncccacgtaggggcantgataaatcttgnnaagttatccctctacatgtnnagtaacataagttagatgnttgataanggtaccatcccagttncnnattcattnccaana

SEQ ID NO: 138992 - DNA, 117 bp, Glycine max
  Clone ID: PAT_MRT3847_96516C.1
tctcgagccgcatcggctcgagacgaacaaggaggtcagcaagtaagctgtatcattttatgtacagtagtggggagttctgggccaagacatgagtccgcttggtttccggcttgg

SEQ ID NO: 138993 - DNA, 435 bp, Glycine max
  Clone ID: PAT_MRT3847_96517C.1
ctcgagccgtgaaagcaatggggaggttcagcgttggagaagttacaagagtgaaagacaagaggatgagaaaaaagtacaaccaaacaagccgctaagtgtagccactactgatgtggaatctgagttggagaaagccattaaggctgctacctctacctcttagcaaagtaaaggtccttagtcgttaccacttaccactttctgaatgctttctgagtttgtctgccttgccttgccttgcaaatgtgtataaaatctcagtatctttccccaaatagatggatacactcagcattaaacatgccatttatcttactccaaggtgtagtttatcctttttatccatgccatcattgccgtggtctaaactctaatggatcggttggtaattatcattatcatttctaatcatttggatagttggttacctga

SEQ ID NO: 138994 - DNA, 371 bp, Glycine max
  Clone ID: PAT_MRT3847_96518C.1
ggtaatcgtatcgttacgagagacgatgatatggacaaagctggtgcatctgctcaaggcagaggtgagagcaaacgagatttatttagagagcaactatgatcagaggtgtaatgatatatctgaggctactgaggacatggcgagagcatagtaacatctgaagtaccaagcctataagaaacgggaagactggcaagctgatgtggataatactaatgatgaggatcacaattcgtatttgcaccatgcaaagaaggactatcaatagaaagtgcaagctgattctcgtgatgaatggctgcaaaaagctaacgtgcataccattacgcatattgaatagtgacattaaaatcataacatgatgaatg

SEQ ID NO: 138995 - DNA, 398 bp, Glycine max
  Clone ID: PAT_MRT3847_96519C.1
taaccaaaaacaattagactgcttcgttatagcacatggcatggacggctaacatacgttacctgtgtctaaaccaacaatgcccatggaaaataaggtatatggctgggcatactgtggatgacctaagtacccattgtcactaaaaagccttaccttgcttcgggcacctctttaacgcccataggctgatgacctactgaagagagctgaaccttttaaacttttgactacttttggggtggaccggctacatcacttgtgaacctcactaatacttttgggagctttggctctcgggccgctatagttaaaagcactcccccgcgctttaccatgtgttccctacaaggagagattccaaacatgcatgtctttagaaacctcattccagcgag

SEQ ID NO: 138996 - DNA, 436 bp, Glycine max
  Clone ID: PAT_MRT3847_9651C.1
cgcgctgcacatgcagcactgtaccgctatctcggtgtacgaggcattggctctggagtctcatgatataatccacctgatcatgctcgattgcgccggcaacagcatacctctgccaaacgttgctagcgggatcctggcgaatgtgatcaagatcagctggaaatacgtctaggccgaaaataccgaagacgaaccctcctaggacgagctaagatgctgagacaccaatatcatgaggggcgagcaggccacgctctgccatctgtttctgtctgctaactacttgaacatcgacaacctgatggaccttgcatgcgctactgtagccgacatgatcaaagggaagactcccgacgagattcgcaagacctttaacaataagaatgacttcacccctgaggaagaagaggaaggtcgtcgggaaaataaatgg

SEQ ID NO: 138997 - DNA, 1227 bp, Glycine max
  unsure (1)..(1227): unsure at all n locations
  Clone ID: PAT_MRT3847_96520C.1
attctaaaccaagtgtctttgatatcttgctcttgcttactataaattcctgactaaatttatataagacatatcgcctatccgccattatggtaatgttttcttacttaatgggggataggatgataccaaagatgtcaagagtagcaaagaccatatagcacaatgaagtattatcagatagttatgaatttcttaagtactcatcaaagatggcacttcacaacacctcacccattttccactctttcccttctaccttgttccacctcttaatttttctaacaaaatggaggaaagtgtgctaacaaagaggccaagagaagaagaacccctagagaacaaagatagtacttatgaattactagagtccttatcaaagaggcacaggtcatacaaccacatactctccctccttgaatcagaggaagatgactccacacaagacctatcttctctcatcacttccctccaacaagaaatcaccaattgtgcctctgattcggacacccttttgaaccaacacagcctcaccaacaccaccaccaccaccacaacaaatagtaatttagaggattgttcatcctcaacaactaaatattctagtgacatgatggaggaacatgatgacaaacgaaggggtcatgagacaccttcttgaagcttctgatgatgaacttgggattccaaataaagaggatgaatcactcgatcttggtgaagatgggttcaagttcaacggtggagacatgttttcttcaatttgtgatgggttgttgtgggagcttgaagatgaagctgctaactactatgatcttttgcagtctcaactctttctctagttttttttttttggtgggggatagaaagtgaaaaaccatagttttcatgcgttcaagatgaaatccaaggaggaaaaaaatgaaaaatttactagtttttattttttcatttttttgtcccctctttttgtaaattaaaatcatgggacgtttatgtgtggttggttactacttggcaatatgtcgatctgtagaaaaagcagctaggcttatatattcacattacacaaagtaattaattagctagtaatgatcttctaaactatttcatatgttaattttattgacttttaagggtaaatgaaaattacttctttttatttaaaaaaaaaaaaaaaagggcggcccccaactagtgngctctcaaacccnggggttttttccg

SEQ ID NO: 138998 - DNA, 307 bp, Glycine max
  Clone ID: PAT_MRT3847_96521C.1
aaaaaaaaaaaatacttcctcgatctgacattatgactgaagaaacggaaaaaccaaaagagggatttatctaaaattaggggaggggaaggggtctaattggtttaagcccccactccgaggcatctttgcctatatattcccacctgaaactatttatttttcaataacccatgaaaataaaaatatggcttgagttcgggtttcaatttatgtcactcttgtaactctacgcgatttggaacctagttcaaatttggcttggtactgaaagagggggaacttgccgcgtggaggggaaactcgg

SEQ ID NO: 138999 - DNA, 193 bp, Glycine max
  Clone ID: PAT_MRT3847_96522C.1
ggctgcgagaagactacagaagggggttcctgcatttatatttggaaaatagtaatgcaattggggtagaaaaggttgaggctcttcatgagattgtgacattggccgcacattgtcgttctttatgtgaggcgtaccgacagaatgtttatggattctcttgccggtcgaccaagtacataaacgggattct

SEQ ID NO: 139000 - DNA, 167 bp, Glycine max
  unsure (1)..(167): unsure at all n locations
  Clone ID: PAT_MRT3847_96523C.1
cncctcagtcgaattagttatccgaagccccgacacctgnaaacactgnggcgggatgggggcggatcctgtttgttctgtgtagagccttgcttgttccgctgtctctgctgttggccntggtgttttccgtncttgtggctgcggtttttttttttcgnntggcg

SEQ ID NO: 139001 - DNA, 329 bp, Glycine max
  Clone ID: PAT_MRT3847_96524C.1
atgatattgaagcgactattcattgtgcagagtggctttctattgttggtggatctagcacaagagagcagcgactaagacgtgaagaatcgttacctatttttaagaggagactcttaggaggcttgctggattttgctgctagagaattgcaggttcagactcaaattattgctgcggctgctgctggtgttgcagctgagggtttgtcaccaaaagattctaggctgaagctgagaatgctgcccagctgtctgtggctttagtagagaatgccattgtgattcttatgcttgttgaagatcatttacgactacagaacatacaat

SEQ ID NO: 139002 - DNA, 419 bp, Glycine max
  Clone ID: PAT_MRT3847_96525C.1
ttttttttttttttttttttttttttttttttttttttttttttttttttggttttttttttttttggggaaaaaaaaataaaaatgccagttttttttccaggggttcctttggggccccaccttaaggggatgcctcccattatagagcctaaaatttgaatttggcatgaaggaaccccaacggggccaaggggggtttgcaactggctagcccctcaattcaattttttccctgaaaaggttagtttaccagcccggagcccccagggggggttttccttggccccccccaaaggaaaaaaataagctgggccacaaaacaatcccggggtggtttttttcaacccattttaattttttcggccttttgggtttccggaaggtaacccccttcctggtaggggccgcccaacccc

SEQ ID NO: 139003 - DNA, 173 bp, Glycine max
  Clone ID: PAT_MRT3847_96526C.1
gtggaggatagcacgctgatggggctacttgctccactgagggtatagagtcctggtagaagaatgaaatcttatatgtaactgtgcagcatacattgccgtaagatatcatatctctggtatggtgaaatacaggtaattgagacggcatgtcgtaggtacttaattagttt

SEQ ID NO: 139004 - DNA, 252 bp, Glycine max
  Clone ID: PAT_MRT3847_96527C.1
ggtaacagcctccgcattccaaacaactccattgtccgtctcatgcactgcatacgtagcatctgcattggcattcccctctactgaatgaagttgtggatcttccaaagtccactaatctactgctcctcgtgcgttacattgcgtacctgctgcatggaaccaagtctgtaccttagattcggttgtggaagccattccacaaattgatgtgatactcggcgtcactcacacggcctaacaatctgactc

SEQ ID NO: 139005 - DNA, 408 bp, Glycine max
  Clone ID: PAT_MRT3847_96528C.1
ttgggatgtccaaccctggtggcaattgggtcgctggatctctttctacaatacaaacgagaatatggagcctcaggcggacaatcggcgccaagagactcttattgtgactactcgtcaaagcctcatggcgaaagtcctaacgagaactctggagttccactcttctagtacgagcagctcaatgaagccacagacaactccgatcacaccaaagatcttggagacggaggctacggtactgcctactatgggaggatacataatcaaaccctactagacacacaacattactcttcttggatggttcggaactactacacgctcatgggtcctagtcgatctgcaagcatccatggagcagaactactatgagcctatggccctagacaagctctataacacaca

SEQ ID NO: 139006 - DNA, 320 bp, Glycine max
  Clone ID: PAT_MRT3847_96529C.1
ggggaagggtgttttccaaagaaaccaaccccaatgaaattaaaaccgcttttccaaatttacaaaggggaaaaaaaccccgaccttaaaggggggggggcctattcctccttgagtggaccaacaatttgcaatcccccactccaaattaccctttaaaaaaaaaaaggcgttgtcaaaccctttggggggggcccaccggggaccacaaaaataaatgtggggtggcacacccccggtaactatgagccccctttctttttcacccgcttttgcctccacacctccctaaaaggaactcaagggacggctcttgaaaa

SEQ ID NO: 139007 - DNA, 481 bp, Glycine max
  Clone ID: PAT_MRT3847_9652C.1
ttcgcccactcttttttcccacgcgttcggttatcacctataatgtcaaagaggaatctttttgttccttgcacttattcctcttttctgcacctccttctctcctgagaaaccctcagatcggcgctttctctttttgctcgatgacttcgccatcatatcctctcactctctctttttcaactccctcaaatcttgcggcttcgttctccaattccacctttccgacgaccccaaaatttcgctccagagatacggccagtacctctacgactccctaattctctttttcccctccattttacgttttggaggatccattgacccggctgcaattttggattttgttgatttccggtcattgattctgattcggttgccagcctttattagcacatgtcattcttgattttatatctaggggaagattagccctcccctatgtggtgggagttgtgtccttttgattgaaaggatttcc

SEQ ID NO: 139008 - DNA, 3364 bp, Glycine max
  unsure (1)..(3364): unsure at all n locations
  Clone ID: PAT_MRT3847_96530C.1
acgctatttctctctctacaccttcaaaaatcaaaagtttcttgttgctcatcaaggggtgttgtgttgtatgattttaaaagatggggtcaaatcaacagaagttcccctattttgatctgttcgcagttgggatggaattgcaggtgatttgagcctgacacagagctttcccgcttataagtagtagtgctagtgcagcagagacgatcatgaaccacgtgcacactctaatttccatcacacaggatcttttgtgtgaagaagactagaaaaccagcttcaattatcgagaattgtttgatgggttgatcaaaaatcgctctccaaaccagattcttaacactgaaagtgttaatttttgctttggtgggtgagagtgtgcgtgtacctccttgtctgtgtctctttctctctgtcccaaatctgcttctcataggtttcgggtcattgtaatcgaaaaaaaattcttctttcctttgcagtagtagtggtagtgcagcagagaagatcatgaaccacgtgcacactctaatttccatcacaccaggatctttgtgtgaagaagactagaaaattagtttcaattatcgagaattgtttgatgggttgatccaaaaatcactctccaaaccagattcgcaacactgcaagtgtgaactagtaacaaaagcaaaagaaagattttctccgatggcgacatattttcatagtaactcggaaattcaagctggtgctgacggccttcaaaccctcgtactaatgaaccccgggtatgtaatactctgacacgccccaccgcacgcggaaacctcgtattcctcaactcgccacgcgtccgtacggctgcgagaagacgacagaagggggaaacacgagtcttgaacaaacttcgaagaaagggatcgccggcggcaccctccgaagacggagatacacccactcactcaccaccactttcccagaaaataaccaccgcctacaatttctcggaatttattttgcgttttggtgcctttgttgttcggattttcaggtgagggagctcgtgtcgtgtgtcgtttagggttaaaaatggggtttaagtgggtgcactgatgtcattgttgtggcttgtgattcgtcaacttgcagaaatcgaggcaatggctgcatctaagaaactgataacaagagaagagtgggagaagaagcttagtgatgtgaagattagaaaagaagacatgaataaattggtaatgaatttccttgtcaccgaaggctatgttgaagctgctgagaaatttcgaatggagtctggaactgaaccagacatagatcttgcaacaataacagatcgcatggctgttaaaaaggcagtacaaagtggtaatgttgaagatgcaattgaaaaagtgaatgacttaaatccggagatactggacacaaatccccaattatttttccatcttcaacagcaacgattgatagaactcatccggaatggaaaagtagaagaagcgctagagtttgcccaagaggagcttgcaccaaggggagaggaaaatcaaagctttttggaagagttggagaggactgttgcacttcttgcctttgaagatgtttctaactgtcctgttggagagctgcttgacatatcacagcgcttaaagacagcaagtgaggtgaatgcagctatacttactagccagagccatgaaaaagacccaaaacttccaagcttgttgaagatgctgctatgcgcccaaaaccagctggatgagaaagctgcttatcctcgtgtaaatgatttatccaccgctacgttagaagatcctgctgtttgaatacttgtaacgttttaatttcagtttggggattttaggtcatagatgaagatattgcagtgattggcattaaaaattgtgtatgtactttaatcgaaagatatttgttgaaattgatatccatttcctagtagatagctcttccgttggttttatactcttgtacaaagagatttgtgaatacagtcaccaattcttttcttggaccgcggtaaaaaaaaaaaaaaataaaaaaataacaatgaaaaaacgaactgcaataaaaaaacgaggttctacattcagctttatttataagggaaaaaaaatagaaacactgcctagggggtaattattgcattcctggttataacatggatcatgcaaacaatgaatattggtaatggaacaggtttcaaattggttcataaatgctcgagttcggctttggaagccaatggtggaggaaatgtacatggaggagatgaaggatcatgaacagaatggatctgaggataaatcaagcaagagcaatgaagattcttcttcgaaaatgtcagccccacaagacaaaggtccttccaatgaaaccgaagctaagagttttaattccaaacaagaagtttccaagagccagaacactgctatggtttcagtttctagaccttcaacatcaccacttggtgtgaatgtgagaaaccaatcaggattcagcttcatggggtcatcagagctagatgggatcacacaaggaagtcccaagaaaccaaggaaccatgagatgatgcattccccaaatagtgtcccttcattgaacatggatgtgaagcccaatgatgaaaacagtgagcagctctcaatgagatttggggttgaaaggcaaggcagaaatgagtcctctttcatgggaaaccaaacaaacttcattggtgggtttggacagtacccaattggggatattggaaggtttgatgcagagcaatttacaccaaggttttcaggtaatggtgtttccctcactcttggtcttgactcattaccaggaactcatcaaacatttctaccaaaccaaaacattcaacttggaagaagcttggacattggtgaaccaaatgagtttggtgccataagcacttcctctcctcactctacagctgcttatgagagtatcagcatgcaaaacccaaagaggtttgctgcacaattgttgccagactttgtgacctaaataagacattgaaaggtgagcaatgtggtagcacactgctaccattcgctgtttctgaatccctcacaatttcttcttagtcccctgctattatgtgggggagtggtgaacaattgtagtgtaaagaaagaaggaattttactttagtataggtttataccctgcatagaatcatttgagctctaaggtagcttaggatttgaaagtatatgattgagattgtatattatttttgtaagttctgaaggtgggatagatggattgttgtcataaattttattttggtaaaagataccaatatatcttcgattgaattnnnnnnaaanaaaaa

SEQ ID NO: 139009 - DNA, 284 bp, Glycine max
  Clone ID: PAT_MRT3847_96531C.1
agcccagtgacaccatcgaaaatgtgaaggccaagatccaggataaggaaggcattccccccgaccagcagaggctcatctttgcaggcaagcagctggaagatggccgcactctttctgactacaacatccagaaggagtcgaccctgcacctggtcctgcgtctgagaggtggtatgcagatcttcgtgaagaccctgaccggcaagaccatcaccctggaggtggagccccgtgacaccatcgaaaatgtgaaggccaagatccaggatacagaaggcatc

SEQ ID NO: 139010 - DNA, 1395 bp, Glycine max
  Clone ID: PAT_MRT3847_96532C.1
ggaaacacgagtcttgagcatacttcgaggaaagggatcgccggcggcaccctccgaagacggagatacacccactcactcaccaccactttcccagaatataaccaccgcctacaatttctcggaatttattttgcgttttggtgcctttgttgttcggattttcaggtgagggagctcgtgtcgtgtgtcatttagggttaaaaatggggtttaagtgggtgcactgatgtcattgttgtggcttgtgaatcgtcaacttgcagaaactcgagccgaatcggctcgagcggctcgagctcgagccgaatcggctcgagctcgtctcgtgtgtcgtttagggctagaaatggggtttaagtgggtgcactgatgtcattgttcttgcttgagattcgtcaacttgcagaaatcgaggcaatggctgcatctaagaaactgataacaagagaagagtgggagaagaagcttagtgatgtgaagattagaaaagaagacatgaataaattggtaatgaatttccttgtcaccgaaggctatgttgaagctgctgagaaatttcgaatggagtctggaactgaaccagacatagatcttgcaacaataacagatcgcatggctgttaagaaagcagtacaaagtggtaatgttgaggatgcaattgaaaaagtgaatgacttaaatccggagatactggacacaaatccccaattatttttccatcttcaacagcaacgattgatagaactcatccggaatggaaaagtagaagaagcgctagagtttgcccaagaggagcttgcaccaaggggagaggaaaatcaaagttttttggaagagttggagaggactgttgcacttcttgcctttgaagatgtttctaactgtcctgttggagagctgcttgacatatcacagcgcttaaagacagcaagtgaggtgaatgcagctatacttactagccagagccatgaaaaagacccaaaacttccaagcttgttgaagatgctgctatgcgcccaaaaccagctggatgagaaagctgcttatcctcgtgtaaatgatttatccaccgctacgttagaagatcctgctgtttgaatacttgtaacgttttaatttcagtttggggatctaaggtcatagatgaagatattgcagtcattggcattaaaaattgtgtatgtactttaatcgaaagatatttgttgaaattgatatccatttcctagtaaaaaaaaaaaaaaaaaaaaaaaaaaaaagcggccgctcttccgttggttttatactcttgtacaaagagatttgtgaatacagtcaccaattcttttcttggaccgattgttaaggtattctgttgcatattaaggtttaccatgccatgatgatagtagt

SEQ ID NO: 139011 - DNA, 1911 bp, Glycine max
  Clone ID: PAT_MRT3847_96533C.1
aaaaaacttgatataactccttgttaaacgaagaaaaaaaaactatatattgatgtattagtccatagttttagtgtatcgaggactagaagcgtaacagcaatggagctgtcttccagtgcatttgtggtaatattgttggcagtcgcagctacagcagtactctcaaatgggttggatctatctttcttgcccagcgatttcctctttggcattgcttcttcctcttaccagtatgaaggagcttacaagagtgacggcaaaggactgagcaactgggataactacactcacggaccaggtagaagtgtaataatggatggaagcaatggggatatcgcgattgatcattatcatcgctacctggaggatatagatttaatggaaactttgggagtaaacagctaccggctatccctgtcatgggcaagaattctaccaaagggtagattcggagagcccaaccatgctggtatcgagttctataacagactaattgatgttctactactcaaagggatccaaccctttgtaactcttagtcactatgacattccccaagagcttgaagacagatacgggagttggctaagtccccagttacaggaagattttgctttttatgcggacctatgttttaaaacctttggtgacagagttaagtactgggtcacattcaatgagccgaatttcctagtgtcacttggttaccgttctggtttatatcctccatgccgttgctctggccaattagcaatggctaaatgcagtgaaggagactcagaaaaggagccctttgtagcagctcataatgttatcctgtcacatgcagctgcagttgatatctatagaaccaaataccagactgagcaaaaaggaagtattggtatagtccttcaacatgaatggtttgaaccaatgagcaattcaacagctgacaaattggctagcgaaagagcaagagcattcaacttcaattggttcttggacccaatcatattcggaaagtaccctacagagatggagaacgttcttggaagcctcttgcccaaattttccagctacgaaaaagagaaactcaagagaggattggatttcattggcgtcaattactacacggctttctatgtccaagattgcatgtactccgcttgtaaaccaggacccgggatctccagaacagagggttcatacaagaaaagtggagaaaagaatggtgtcccaatcggtgaacctactccatttagttggtttaatatttacccagatggcatggaaaagactgtaacatatgtgagagatagatacaataacactccaattttcctaactgaaaatggatatgccgaagaagttgatccaaatttcacttcggaagaacatctcaatgattttaaaagaataaagtacatggtggatcacatagaggctctgttagcagcaataaggaaaggagcagatgtgaggggatactttgcctggaccttaatcgactcgtttgagtggatatatggatatacggtaagatatggattccatcatgtggattatgcgacgctgaaaagaactccaagattgtcagcaagttggtacaagcaactccttgttcagtacaagaaaacctttttattaggcacgagcatgacagggcatgaaaaactcgtacaacacacttgacgcaaaaaagcttataaccctaatgtagaaccttatcagctacaattctaataatttatgatatattgtgggtacttctgtctttaatcaatactaggagaggagatcctatatttttgttttcaaacttattgattcatgacaacactttgagcaatcgagctcattcttcatgcccaaatcaccatattgttatctattatgttcatctagcatctgattacaatttgattc

SEQ ID NO: 139012 - DNA, 1412 bp, Glycine max
  Clone ID: PAT_MRT3847_96534C.1
ggctcgagcaaatgtctgtatatcactttcaaacatttttcttttcgcaaccagcaacaaaggtgtcggggtctgcaccctccgaagacggacatacacccactcacaaccactttcccggaaaataaccaccgaccacaatttcttggaatttattctgccgacaattcactttctgcctttaattttttcataccctcgcttacggattttgtttaacccttgcaccgataaggtttcgatgatcggcggcaccctcctattgaacaatgtggaaacttaattcacaaccactttccattttaatatccaccgcctacaatttctcggaatttactttgcagtgagggagcctcgtgtcgtgtgtcgtttagggttaaaaaggggtttaagtgggtgcaccgatgtcattgttgtggcttgtgattcgtcaacttgcagaaatcgaggcaatggctgcatctaagaaacctgataacaagagaagagtgggagaagaagcttagtgatgtgaagattagaaaagaagacatgaataagttggtaatgaatttcctcgtcacttgaagggctatgttgaagctgctgagaaattccgaatggagtctggaactgagccagacattagatcttgcaacaataacagatcgcatggctgttaaaaaggcagtacaaagtggtaacgttgaagatgcaattgaaaaagtgaatgacttaaatccagagatactggacacaaatccccaattatttttccatcttcaacagcaacgattgatagaactcatccggaatggaaaagtagaagaagcgcttacggctgcgagaagacgacagaaggggacacagagcagtttacaccaaggctttcaggtaatggtgtttccctcactcttggtcttgactcattaccaggaactcatcaaacatttctcccaaaccaaaacattcaactgggaagaagcttggacattggtgaaccaaacgagtttggtgccataagcacttcctctcctcactcaacagctgcttatgagagtatcagcatgcaaaacccaaagaggtttgctgcacaattgttgccagactttgtgacctaaataagacattgaaaggtgagcaatgtggtagcacactgctactactcgctgtttccaagtccctcacaatttcttcttaggcctctgctattatgtcggggagtggcgaacaattgtagtgtaaagaaagaaggaattttactttagtataggtttataccatgcatagaaccatttgagttcttagatagcttaggatttgaaagtatatgggtgagggtgtataatatttttgtaaggtcttaaacttggatagatggaataatgtcataaaatttattttggtaaaagaaacccatatatctttgattt

SEQ ID NO: 139013 - DNA, 792 bp, Glycine max
  Clone ID: PAT_MRT3847_96535C.1
gggataactacactcacggaccaggtagaagtgtaataatggatggaagcaatggggatatcgcgattgatcattatcatcgctacctggaggatatagatttaatggaaactttgggagtaaacagctaccggctatccctgtcatgggcaagaattctaccaaagggtagattcggagagcccaaccatgctggtatcgagttctataacagactaattgatgttctactactcaaagggatccaaccctttgtaactcttagtcactatgacattccccaagagcttgaagacagatacgggagttggctaagtccccagttacagtaagcaaccagttttctagtttacatgaagaggtttcaataccacattgatcatacgagctcctaaatttcatgtttttaatgagcagggaagattttgctttttatgcggacctatgttttaaaacctttggtgacagagttaagtactgggtcacattcaatgagccgaatttcctagtgtcacttggttaccgttctggtttatatcctccatgccgttgctctggccaattagcaatggctaaatgcagtgaaggagactcagaaaaggagccctttgtagcagctcataatgttatcctgtcacatgcagctgcagttgatatctatagaaccaaataccagactgagcaaaaaggaagtattggtatagtccttcaacatgaatggtttgaaccaatgagcaattcaacagctgacaaattggctagcgaaagagcaagagcattcaacttcaattg

SEQ ID NO: 139014 - DNA, 846 bp, Glycine max
  Clone ID: PAT_MRT3847_96536C.1
actagttcgagttttttttttttttttttcgaagctacagtttttttttataattattattaaattctaaatgaaataagatcgtatacgaggtccattaaactgttttcatattatgtcttcaaagcaaagaacacacaatgttctgaaatccataatcccacatcacatggtaaaacataagaacacatcagatataccacaatcacatacacaactcagattatatatgcccaacacataggcaggcacgtaagacttgacacttgagactccaaccgctcagaaaccatgaatcttgatatgctccttcttcacgataccagcctggaccaggaaggtagaaacattcttcctctgatcaccttgaagttgaataacctgtcctagttctgggtcctgaacaactgttccattgcaacagaactctttcttaacatctttaagtatcttgttatagctgaattcttttttcaatccctgaacggttgtcaggcttttccttccatttcgctgctgtacgcgaatatgcacatactcctttgacccagcacccgagtcatcagcatttgcatcagcaaaaggatcgaaggcagtaggaatttgatcgtctaattcagacataaaacttgactctctaagaccaaaggttctaccaaccagattgctcagacctgatccgaaacttaaggtttcgatacgtcaaaggttgggtcaaaaaccgaaaccctaaaccggataaggctgaagtgaaactttgatggtcttttctttctgcaactgggtgaggtccccttctgtcgtcttctcgcagccgtacccttctgtcgtcttctagcagccgta

SEQ ID NO: 139015 - DNA, 342 bp, Glycine max
  Clone ID: PAT_MRT3847_96537C.1
acggggacatccatgcacttgtggatggcgagtatccaagaaccattcaacatatcgtggtgagtatactccacaaattcactagtgctgaagctaaaatcgggaagggtctaattgattacggtggaatcaaccagtatactacgatcattcatatatgatcctgatcaatcaaaacctaagatgccatgctatcaaatggactggaatgcaagattagcttgacagacaatgctgactttaaccattgctacagatatgatctatgcatgcccatgactatgctctctaatgcccatatggatgatgtgaacattgaatatgcagataatggactgccta

SEQ ID NO: 139016 - DNA, 459 bp, Glycine max
  Clone ID: PAT_MRT3847_96538C.1
gcagccttttgttgggcgagagttatttgcagctggatttgtcagttgttgggcgcagctaaatgagactagccagaaacaactagttcggaatctagagatggcattttcatctccaaatatccccccagaaattttggcaacacttcttaacttggctgagttcatggagcatgatgagaaacctcttcctattgtctacgccttcttggtgctcttgctgagaagtgtcgtgcatttgcaaaagccttacactataaagaaatggaatttgaaggagcacgttccaagaagatggatgctaacccagttgctgtagttgaagctcttattcatataaacaaccaattacaccaacatgaggctgcagttggaatactaacctatgcccaacagcatctagattttcaacttaaggagtcatggtatgagaaactgcagcgatgggatgatgccctc

SEQ ID NO: 139017 - DNA, 494 bp, Glycine max
  Clone ID: PAT_MRT3847_96539C.1
tccttaaccaacttactcatattttaatgtcgcacagaaaattcagagcaccccgccgtggttcattggccttttcacccagaaagagagccaacagacttagaggaaagatcagatctttccccaaggatgaccagagccaagctcctcaccttaccgccttactcggatacaaggctggtatgacacacattgtgcgtgagctcgaccgtcttggatccaagctcaacaagaaggagatcgttgagcccgtcaccatcgtcgagacccccgctctcatcgttgtcggagttgtcggttacatcgagactccccggggactccgctctctgtccaccgtgtgggctaacttcctcggagaggagctcagacgtaagttctacaagagatggtaccaatccaagaagaaggccttcaccaagtacaccaagaaggttgctgagaacccccaatctgttgagaaggagttgaacagaatcgccaagtacgccact

SEQ ID NO: 139018 - DNA, 387 bp, Glycine max
  Clone ID: PAT_MRT3847_9653C.1
gggaaaaaaatgaaactgggtttaatcaattttcaaaacccttggaattgggagacctttccatcggcccgggggtaggggggggcattttccgggcttttaaaacttcctaaggcaaataagggggcgggggaaccccccccaaacccgaataaggggtttttttttttgaaggaaaaaacagggcttttggggatcaattttccgggggaaaaaaatttcattagggggggaatttttggccgaaaagcatagcgccccattccgggggggaaatctcattggggttttgggggttggaataacccggggcggggttgggcccccacaaaaccttgtgcggagacccccctttgtttttttcccccggctttggggcccttttgc

SEQ ID NO: 139019 - DNA, 272 bp, Glycine max
  Clone ID: PAT_MRT3847_96540C.1
tctttcaactaatcaactctccaaatcacatgtggttgaaatggttagggtcctgaatggtccggaaaaggataatgtatttcgaggatttacaccagtagattgcaccatctgacctgttgaaagcttccacagcacactacttgctccacaacaaggcacaattcactggccgtcgttttaaaaaatacctgactctcaaaaggatgcaatcttacatattcatccatgtgaagtaaaacctcttctatactgtcagctaaattcaattc

SEQ ID NO: 139020 - DNA, 261 bp, Glycine max
  Clone ID: PAT_MRT3847_96541C.1
cactaacgagtagcctcaattttccgatacttgcaccctcttaacgataagattaaacacacaaagggcccaccgaaatgaaaaccaaatcaaacccaacccaccttgtacgatctgccaccatgagttcatgtactcatttgacatcaagcaacactatgtatcacatgcagttcttcacactatgctccacataatcaatacctacactatttctctaacctatttaatatctatctgtataaaaacactctcacattc

SEQ ID NO: 139021 - DNA, 226 bp, Glycine max
  Clone ID: PAT_MRT3847_96542C.1
cacggatgctagcaccttacacgtcgcagaatgtttcgtcactacacctgttcactgtcatcggaatacctctgttgtttgagccaagatggaacgttatgatatggccgtggatattatgaggaaagtatcagagcaatatgctggcacaacaggaatatacgttggcgataaccaaggaatcgctaatactgttatcaaagggtgggatgaacatgaagacaca

SEQ ID NO: 139022 - DNA, 834 bp, Glycine max
  Clone ID: PAT_MRT3847_96543C.1
tcccacgcatcagaagaaaaagaaaagaaaaaagaaagcacgttgaagattgtaacttgtaacaacaactatggctagcgatggcagcgaagagttcaggctagtgtcaccggcgttcaaaaacggggggaagttaccgaggcactacaccgacgatggtcagggtacgaagaagaacatatcccctccattggagtggtataacctcccggaggggacgaagactcttgccctcgtggtggaggatattgatgcgaccgattctggtgggcccatggtgccatggactcactgggtcgtcgcaaacatcttggccacggtgaagggcttgccggagggattttccggcaagtcggccgagatggggggcgactacgcggcgatcaaggaggggaacaatgacctgaaggtgcctgggtggaatgggcccaggctgcccacgcctggacacaggattcagtttaggctctatgctttggatgatgagctcaagcttggtaacaagttgacgaaggagaagttgttggaagataccattgaaggacatgtgttaggagaagcgaccttgatggctatattctaatgtaacaacatattgtgggtgcattgtctttggctttatacatgtaccattttaaaagtgttaggagaagcgaccttgatggctatattctaatgtaacaacatattgtgggtgcattgtctttggctttatacatgtaccattttaaaagtgtgtcatcaacgagataaacattttacccactctcaaagttattatgcatgcactttcgattagaatgatacatccaaattatgtgtttcaatgacatt

SEQ ID NO: 139023 - DNA, 248 bp, Glycine max
  Clone ID: PAT_MRT3847_96544C.1
ctcacactgatgtgtgaaagttcttaacttacaatcacgtgcaagccatgatataaataaagggacgtagctctaaaggaaaaaatcttacttacgggaacatgataagaaaactggaaataccatgtcgtacccatctttaaactgtccgttatattactgcttaagggtgaataatccccgggattaaaagggttattaatgcagtaggtaatacccctattcccaggtgggaacaataacaaggt

SEQ ID NO: 139024 - DNA, 604 bp, Glycine max
  Clone ID: PAT_MRT3847_96545C.1
gaggtcatttttggcttttagcaggatgtttatatccccatttcccctgccattagatatttctacctaatcaaaccatttataacaaattcaacaagatattctattttcttagttttcccccacatcctataatatgcattatccacatgccatgtgtgtcgtagtcaacgattgtcaattggttacgaaatagggggaatggatcctgtgcattgactttaccactacatgaaatcctaacccttcaatgatttttatcaatataatatattcctattttgaagttgaggtttaaaaaaggaacactaagatcatgacacttagttaatagttgtgtcaatttgtttttctactgaagaggatccattccctgtatgaattatttgttttttttttctggtttgttcaactgtgcttaagttttacttactagtaattacagagagctttgaaaaaataagaaatcattttacctatttacttataaacaggcctaaagtatttgttaacatgatttaagcaaattcatgaaccttaattttcccctatcaatttagctaggtgaaaaggatccaaaatctttaaacaacatgtgcttaat

SEQ ID NO: 139025 - DNA, 107 bp, Glycine max
  Clone ID: PAT_MRT3847_96546C.1
tgttttaaacgacggaccattatcttctgtatcccttgttagggggacagatacaaatagttatttaattgtgcgactcctttgaaggaacaaactacaagcaaaat

SEQ ID NO: 139026 - DNA, 313 bp, Glycine max
  unsure (1)..(313): unsure at all n locations
  Clone ID: PAT_MRT3847_96547C.1
tgggggaaactatagtgtacaaacaattatttngacccaacggaaaaataaaataactcttttccatattactcaaaaatctagaagttatttttggggggggaacattcaaaagctccaaacaaaaagggggaaagggaaaattacaagccaaaaaagcacaaaatcctaagatcagagggagaccaaagaaggttattttcaaggaaaaggcggaaacctctaccaactctaagattaaaaagcctttacttcgggggacatcaaaaatgccaaaagtgtagtccatcggcaatattccttacttctttct

SEQ ID NO: 139027 - DNA, 178 bp, Glycine max
  Clone ID: PAT_MRT3847_96548C.1
ggggaatggtggggttgcgatgtgctcagagttataagtcacgcatgcacacgctcgtaatgtctggtagtggaacacgaggcacaccagaggggctccaaagaactgattacggaccaggcgagcgacgagaacgagtaacattccattgaaaagatggaattgggacacggtcact

SEQ ID NO: 139028 - DNA, 1441 bp, Glycine max
  unsure (1)..(1441): unsure at all n locations
  Clone ID: PAT_MRT3847_96549C.1
gaagttcgtttgaagccaaccctgaagatgcattctttaatcaagttgtagcattgtcccgtgctggtctgtatctgcttgcaaatgccaagaaaaatacaatatatgctgttcacatagagtatggatccaatccaactgctacacgcatggattacattgctgagttcaccgtcacaatgcctatattaagtcttactggaactagtgatagtttaccagatggtgagcatatagtacagatatattgtgtccaaacacaagctattcaacagtatggactcaatttgtcacaatgtttgcctccacccctggacaatgttgaacttgagaaaacagaatcccatctatctcgtgcttttgatgctttggatggatcaatggaaactggaaatatgccacaagttctttgtggcagttctgaaagtgctcctgttgtgagcgttgctgtaaatttgccttcatcagatatttctgggttacctgaagcttctatatcttcgatatcagattcagagaccaagtcaaatgatttacctcctcgtaatggttttgaacttgtgcactctgcttcacctccacttcctcagagtccaagattgtccccgaagttatctggtttaaaaaattcatcaaataatttagagactagttcaacaagtgctgatcacagcagcgagcagacaaatcttgattcttctgctgaacagaaagtggaatctaaaaaagatatggcagatgtacctggatcaggtgacaatttgcgaaaggatgataaagttgttcaaaggatgtttctgtggtttctaatgcccctacaacatataaacacccaacccatttggttactccatctgagatattctctaatgctgctttatcttctgataattctcataattctcaaggtatgaacggtcaagatgtggctgcccatagagatgcagaaaactctcaagtagatgttgaagttgtaggggagacagattctattcaagaaaatactgagtatgaaagagacagagactcacacacaaatgttgctgagaagaaagagaagttattctattctcaggcctccgatctgggtattcagatggctagagagacctataacatagagggagcttgtcaagctgataatattaagaccatcaatgcacctgatcaaagtggtaactctgttgaggaagaaattcaagacacaagtaaggatgtacctgcaaacatcagtgaatcagaaactgtggctgctgctgtgcaatctcctgcaccttctgtgaaaggtaaaagacaaaaaggcaaaaattctcacgtgtctggtgcatcttccacttctcccagtccttttaactcaacagattcatcanatgatcaagggtggcattcaggagggtcatncatggaggctgctttgccacagttatttgctatgcaggaa

SEQ ID NO: 139029 - DNA, 424 bp, Glycine max
  unsure (1)..(424): unsure at all n locations
  Clone ID: PAT_MRT3847_9654C.1
actnnacncacatnntcnaccnccagactcncgnctcacggacncgacacnanacnacgantnnatgnnctgagccgatacncncgacgcacnggngnagtgatncnnngnnannnnacgacgcacnnngngnnntcacntgcngtngnncgngcngnnacnccacgtnncnctacngttgannnacgcnngngacgacacacanancantncacagncantgtacgnngtcnacnactacgcngnctccanntcnnngngnntgtngangaccanacnnngnntacnctcangagttnnggnnagnctacntgcncngcgnannntnatntnagctgncgnannnatgtncntgagnaccgtgctctnnntnnnnnagnagngnctcgcncnanacncnannnnngnnatcgngntgntnntc

SEQ ID NO: 139030 - DNA, 284 bp, Glycine max
  Clone ID: PAT_MRT3847_96550C.1
aaaaaaaacaaaggggggggcccgggcacccttttttaaaaaaagcacgggcttcaaacaccacttttttgttttcaccccgcttgtggctcacaaagttttcttacaggggggtagcaacgacgccatttcattcaccaaccaagaaaccccccacatgctggggcttttgccagctcgcggggaaagaaaaagacccatttttggccatggagttcccagacgactgacctattggcttctgggtcttgtaaacaaaatacggcggaatggcgggggatgga

SEQ ID NO: 139031 - DNA, 264 bp, Glycine max
  Clone ID: PAT_MRT3847_96551C.1
agaaacattcgagtcttcattgcagatgtcgacctcttccattaacgggtggtggctctcttccatctccccagtcaaaacctctctcaagaaggccacattaggtccttctgtcttcgcaaccgttagcactccttcgtctccttcaacatcatcatcttctacctacacgtcccgcattcaagacaggcatgtctttgcagccactgtacacatcatcataccaactgtgagagatgatatggcaaaggtatacgacaagct

SEQ ID NO: 139032 - DNA, 703 bp, Glycine max
  unsure (1)..(703): unsure at all n locations
  Clone ID: PAT_MRT3847_96552C.1
tgtaaacccaaatgctattgattccaccatttccattcaccacccaaatgctcttcacagtttcccaatttctctcttcaactttctcaggaacaggtattcgaagaaagaattctgggtgaattgaaagtttggatcttttaagcctttaaatttcctctatacatttacctacatatcccaactttgaagtttggatacagtaataatcaaaatggccacttgtgtgtcaacaatttttgcaccatctaatactagaaattccgcaagggtgctttctgttggaggaacaaatctcacttggaattatcctgggagagcttgttttacgaaaatgtatgaccgcaggaatgggttttctggtggcatccagatgtcgggtttacttcaagttaagtgttcagccaattcgcacagtgtaagtccatataataatagccaaggtccttttctagatttacatgctgaggtgtcaatgcttagaggagaagcgagcagtacagtgaacagccctagaaaggatagctcaggtggggatttatctgagagcctgngaactacatctagtcaaagtgattacaatgaagcaaagatcaaagttattggtgttggaagtggtgggtcaaatgcagtcaatcgcatgatagaaagcgaaatgcatggcgtggagttttggattgttaatactgatgttcaagccatg

SEQ ID NO: 139033 - DNA, 476 bp, Glycine max
  Clone ID: PAT_MRT3847_96553C.1
atggttggtaaaccgcccactgctttatttatttattaatacccgcaaaagttgtcgaaataatggacgtacttgtctacataaaaagttgaccaggcaaaaagaacctgcttagctagctaactgtcccatgttcacttttatttaaaaattgaaacattaaaaaaacttgaaacgaatcatttcataaaatccattctttatttattacaattaactgctatcttcacatacaatgtttatctaatttagtgccccaaaacactagcacgttattttggggggggtagaccaacttctacaaaatcggctggactgaaaattgaaacataagtggaggcccacaagaaaatgccaaagtatcaagacatgcattttgaatattctccgtgaagaaactttgagtgaagaattccacactggcttgccacccttctcttatgctttattgtgttacgcaccacacctttgaccta

SEQ ID NO: 139034 - DNA, 720 bp, Glycine max
  unsure (1)..(720): unsure at all n locations
  Clone ID: PAT_MRT3847_96554C.1
ccacgcgtccgcactctgcagcaggagcgtacgcataactccccgccgtccggacatttcttggttcctgttttcatcctccaaaaacctctctctctaacttctcaaaaggttttccccatttacaagcttaacccacaggttctttcttcctctgttactcaattttcagtttgtttttttgcttttaatctgaccccatagctatgatgttctgcgaattagattccatgatagtaatgttgactgttgctaagactggaacatggtaaatgccactgtcagtgctcctttagatatctgaattgtggaaatcttggataaacagctcataactataacagagacattcaaaatctttatcttactcctgtacctctgtacatgtaatagttagtggcaatgaaaaataagagctgataatttcttctttagattagttgttgtgatacaacatattgatctgtgaattctgaatcttgttggcatctttcattgcatgatgagcctgctttgtaaaagtcccaactagccttgccgctattttttttttttttttgttttaattttgcaaagtttgtaggaagccatgttcattttttactgttactactgttattttttaattacaatttaaaaatgcatctttctatccttcaaagtatctaggaaaccagttatacatacatatatctnctatgccatacagccataccactg

SEQ ID NO: 139035 - DNA, 487 bp, Glycine max
  Clone ID: PAT_MRT3847_96555C.1
ggaattcggcacgagggaaagtttgagaaaatggaaggagcaacttctgggaggtattgatgtgtctgctgttggagaaaacaaagagcccgaagtgaagatagtgagccttaccattatatgtccagggaggcctgacctcattctgccaattccatttacttctgatgctaaaaagagtatcttcacccttaaggaaggaagtcaataccagttgaaattctctttcactgtctccaacaacattgtttctggcctcaaatacaccaatgttgtttggaaaactgggcttagagtggacaacacaaaaaaaatgttgggaacttatagcccaagccaggaactatatacatatgaattggaagaagaaactaccccttcagggttgtttgctaggggaacctattcagcaagaaccacgtttgtagatgatgatcggaaatgctacttggatactagttaccactcttgaattcagaagacttgg

SEQ ID NO: 139036 - DNA, 401 bp, Glycine max
  Clone ID: PAT_MRT3847_96556C.1
agaagggcacaaaaacaagatttgtaacataaactgtcctttttattatgcttttacccccaaacaaaaaacacaaaatcacccttaaaaaaaaaaaaacaaaaaaaaaaaaaaaaaaaaaaaaaaaaaaaaaaaaaaaaaaaaaaaaaaaaaaaaaaaaaaaaaaaaaaaaaaaaaaaaaaaacaaaaaaaaaaaaaaaaaaaaaaaaaaaaaaaaaaaaaaaaaaaaaaaaaaaaaaaacggccccacaaaaaaataaccaaacttcaacaacatccctagaacgacaaaacccctcttagggacccaccaaataaacatccgcgggccctttttaaaaaacacccgtcaggaaaaaccccatgaacccccacacataacccccttacaaaaagccccc

SEQ ID NO: 139037 - DNA, 506 bp, Glycine max
  Clone ID: PAT_MRT3847_96557C.1
aggttctgtcatcactgtatgacgtcctccttctttgggggggggggggggcgggccgttaaggaagacacgaaaggccaagcacaccgggctggggaacctagtaagtatggcccgatagaaacctagcaataagcacgtactaacctacaacaagaagaggaatcttagtattatggcgaatagcgtatgtacgtttgtgctctactagccaaagtacatagagtttggctgtggtacatgtgttatgcgtagttggcagcagggccgtgatccgacgcaatgtgacattgaaagtaagtactgggcggcacgtagttgggcgatgcgtttgtaataatttgcctgcccgagttggccgtaatggcattatagtcgaggtacccgagaatgtacaaattggcgttataacagtatgaaacgcatcaagacaggttatatataacgcttggttgcgtgctgggtggcagtgtaacgcttaaagagcgcgttacgtgagcgtgggc

SEQ ID NO: 139038 - DNA, 514 bp, Glycine max
  unsure (1)..(514): unsure at all n locations
  Clone ID: PAT_MRT3847_96558C.1
ctttgaggaaccccatttcattgagcacttgagtctcaattgtaatttgtgctttggtttgagaaaagatcacgatttctttgtttttatatcttttaattgattgaacaattccagtcttgtttttttaagtttttcactcctagcacaatgaagggaacaaatttgttaggcactcgggccgtatattgtccttttcatcaattccaaaccacaaaagatgcagactacagacattctcaactaaattctgtgccaccatctcaattgctttctagtcttgtttatttatgtgaatattatactgttgctggactactggctgaagctaatcacctgcttagttgtaaagagaaaaataattntagtatctcaaacagatagtctgtaaagaatgtagttgtatttcctttctagataacaaggaacgtaggtgtgattaagaacatttaatcaattccaaaatacacttgatgcaagagagaaattgagtgtactaaatatcactttcttc

SEQ ID NO: 139039 - DNA, 262 bp, Glycine max
  Clone ID: PAT_MRT3847_96559C.1
aactacaaacaacaagggttcttcattaatccctccattttaaatagcatttttaggggacatatataaaaataacatcggtacataaaaatttggagctttttaacgagcaaactttttctaattggcccactaagaactgggagggggcttttccctatagaaaccgaaagaaacctccagaggaggatccattaattaaaaaaaaaagagggggtatttaaaaaagggggagagggaaaaagagggggaaaacaatttt

SEQ ID NO: 139040 - DNA, 370 bp, Glycine max
  Clone ID: PAT_MRT3847_9655C.1
agaaccttgaagttgagccgaagtagaagttgtatagcaagtatcatgaggaatttatcttcagattggtttgaagatgaagacgtaattcagaacactcctccaatggggaatgaaaaagccttccctggaagaccagagggctttccgaagaacatttatgcactaaattacaatgccaatgcagagaggctttcatgtaatggccatgggaattctgtgcaaaattcttctgttcatgatgttcagaatgtgaaatcctccactaacaaggaaagagagggtaatggtcccttggctccaaaaggaaaggaaacagaaaatcttaacaggttgagtttactggctgaccatgaggggtctgggacag

SEQ ID NO: 139041 - DNA, 909 bp, Glycine max
  unsure (1)..(909): unsure at all n locations
  Clone ID: PAT_MRT3847_96560C.1
cgctaagnctcggnaattccccacgcgtcccctaaaaattccatttagggacttcccaaacacgtcactaatcgtatcaacaattcaccatgcgcttgagctgcaatggatgccgcgttctccgcagagggtgcaccactgagtgccccattcgcatctccctccaatggatcaattcccctaactcccaatccaacgcaaccctcttccttgcaaagttctatggccgccaaggcctcctcaccctcctcaccaacgctccctcacaactacaacaagccgttttaaaatctttgctttacgaagcatgcggtcgaatagtgaacccggttctcggctcgaccgggttgctctccaccgggaattggcatttgtgcgaagccgcggtcaaagccgttcttaatggcgcgccgattgagcaggctcctttggacggcgccacaagcctgcagctcaaggcttgtaatattcgccacgtggcaaagagtgataaatcgtgcggctctgatacgcttcgcaaggtgaagtctcgcaccaccacgttcaagcgccgagccgcaaagtccagagtcgagtcagttgtggctgagttggctgaaagcgagttagatggtcatggttcgatgagtcatgactcgggatccggggtgactcggatgagtgagaacaaaatcgttggaggggaagccgatagcgactccgtgcagagtgtggggccggcacgagccgatggtgaagaaatggaacttcaattaacattggggtggggtccactgaagagacaatgatgacgccacgtgtagggcttgatctctctggctagtagggttggtgttagctagtggtgaaatatgttttttttaatcttcaccccgtttagttatatgataatatttttggatttttcac

SEQ ID NO: 139042 - DNA, 507 bp, Glycine max
  unsure (1)..(507): unsure at all n locations
  Clone ID: PAT_MRT3847_96561C.1
gctttctttctcactttcccttttatatgctattaagtaaccctagctagcaacttggactcttgcagtcatatcattcaatagtatatatgttatatgcgcatcacattccttatcacaggtatgtcttttccatattactgttgttcttgcatatatggatatttcttgattagcatgctgtcttttccaaattagcatgctgatttgaagtatatcagtttcctaatgaaaggcattttttttttatttctgcttgtctgaggcacatgtgtgcgctttgttttcacaaatacaagtatgtgtgactctaattagttgatgaattttgattttatgctctcagttaacctacgaatctaatacctttaagaggttaaatgttgactaattaaagcacctatggaaaatcctagaaagtgatcttttggttntatactattaattaagaaacaacagctagctatgtttgcatctgatatatgttatatgaaaattaaaattata

SEQ ID NO: 139043 - DNA, 397 bp, Glycine max
  Clone ID: PAT_MRT3847_96562C.1
cgatctataacggattttatttttcgctcgatgggaattgcgcttcaaggcgtctcgtaaggctaatccgacaaacgagggtcaccaacggcacgtgcctttgggggagcccaaagcaccttttttccccccctttttcaatccaggagacccctatctttgccataacactgcaaaggggaaacaaatgcttgaaatgaaaaagctaaaaccacccccggcaaaaatgtgtaatcaaaaactacctttggagcccccttaattaagcatatactaaaaacacccttgaacacccttaaaaaatgggggaaataagtgggagggaccctgggggaaggggcgcttcccaaaggggggcaggcacaccgagggctttcacaacagggggctggaaaaa

SEQ ID NO: 139044 - DNA, 1047 bp, Glycine max
  Clone ID: PAT_MRT3847_96563C.1
tctttctgttacaccctctacttttcttaatttctctcatccttctttctttcaagtgcaaaatcgatctctcactgcctcagcaatggctgcagatgatggtgtgaaacctccaactctcgagtttctcagcatctgcaagtctctcctcgccggcggagttgccggaggagtgtcacgaactgctgtagctcctctggagcgattgaagattctgctgcaggttcaaaatcgtcaagatataaaatacaatggaacaattcaaggcttaaaatatatatggaaaactgagggttttagaggaatgtttaaaggaaacggaacaaattgtgctcgtatagtcccaaattcagcagtgaagttctttagctatgagcaagcttccatgggtattttatggctctatcagcggcaacctggaaatgaagaagcacagctcactcctattctgcgtctaggagctggcgcatgcgcgggaatcattgccatgtctgccacttatccaatggacatggtgcgaggaaggctaaccgttcagacagaagcatctccttgtcagtacagaggaatttttcatgctctttcaacagtcttccgggaagaaggccctcgagctttgtataaaggctggctaccatcagtcataggagttataccgtatgtgggtcttaatttttccgtatatgaatctctgaaagactggttgattcgatctaaaccatttgggatagctcaagactctgagctaagtgtgacgacaaggcttgcatgtggagctgctgctggaactgttggccagactgtggcttacccacttgatgtcattcgccgaagaatgcaaatggtgggatggaaagatgctgctgcttcagtagttgctggtgaagggaagagcaaaattgagtatactggcatggttgatgcattcaggaaaactgtgcagcatgaaggatttggagcattatacaagggcctagttcccaattcagtgaaggtcagttgatccatttgcttaacttccttgtcatcatgttataataataatac

SEQ ID NO: 139045 - DNA, 2102 bp, Glycine max
  Clone ID: PAT_MRT3847_96564C.1
ggataacatctactcggagtgagaatgagaaagagaggactacgtcggatcattaatggaattctaagagagatttagcaactgatagagcctacgcagagattgtctaattccagctccaacattggctgtaatagcaattaacatctaaaaagtaccaaatgctatccgattttgaggaaatcttcaaaattgaaaagggagtaccagacaagacccaaacacattcctcctttgtaatttaacccgtaaccagagaaatagacctaaaatgacccaaataaaactgattctctgaattgaacttatatatgttacaaatgctatggaaggattaagctacctgctaactaacgctgagagggccaggcacaatgacaaaacccaagcatacaacactcaagaagatttattcaatgtgattccactaggaaggaacctaatacggctacaacgttttaatttggcctgagctacctgaggcttaccaagcatgagatccacataaactgcagtaaggggggcacctggactgttgcgtaatatggaccatgcctgcccagttgccatattggatttatcccaacaaccctaactcctacccccaactgctctgatggcacccaacttgatttgatcctcctctggcttgaagccaacaatactctgagtgccttcaagagaagaattcttagcagttgtggatcctccattcacctcgtcaaaatcagcagtcctctccggttgccatttctcacagtcctctaggctgaaaggcaagtcaacattgtttcccccagacaaataaaatgacaagtgctcagctgcttcctttggtctgttcagcaagcagagagcctctgctgcataaacatggcctagaaagatgtaaattctggaacattctggaagttctaagagagatttagcaactgatagtgccttcacaggattgtccaattccagctccacatatgctaaattagcaagaacagcttgcttaaccaattgattttctcttttacggacattttcataataggagaggctctctgcttgatgaacagaccaaaggaagcagctgagcacttgtcattctatttgtctgggggaaacaatgttgacttgcctttcagcctagaggactgtgagaaatggcaaccggagaggactgccgattttgaagaggtgaatggaggatccacagctgctaagaattcttctcttgaaggcactcagagtattgttttcctcaagccagaggaggcacgagcaacaatttatgcaaattttgctgtaatgtcggcgatgcagggtgaatttgagaaatccaatatactggttgcgcaggcattgtccttattacctaacagtccagaagccactcttactgcagtttatgtggatctcttgctcggtaagccacaggaagctttgaccaaattaaaacgttgtagccgtattaggttccttcctagtggaattacattgaataaatcttcttgagtgttgtatgcttgggttttgtcattgtgcctggcccacatctcagcgttagttagcaggtagcttaatccttccatagcatttgtaacatatataagttcaattcagagaatatttttttatgattcattttccttataattctcaaatttagggttcacttacaggtggtggctgtgttttggttagtgctggtgcccccctttgaaatttgaggtgtagatctgattcggattgggtttttactttttagaggctaatttgctttatattcaagaatagaggttatgccattgtccctgtgcttatattgagaaaactgaaaagttgatagttattttggaattccattttgaatccgccagagttcgcccttcaacaaaaaaaaaaaaaaaaaaaaaaaaaaaaaaaaaaaaaaaaaaaattgaagaatccaatatactggttgcgcaggcattgtccttattacctaacagtccagaagccactcttactgcagtttatgtggatctcttgctcggtaagccacaggaagctttgaccaaattaaaacgttgtagccgtattaggttccttcctagtggaattacattgaa

SEQ ID NO: 139046 - DNA, 1990 bp, Glycine max
  unsure (1)..(1990): unsure at all n locations
  Clone ID: PAT_MRT3847_96565C.1
taaaaattaaaaatctaagaacatcgatcatgggataaacatattccttgatcccaacttccaaaagtncancaaaggaaancataaaaattaaaagaagaaaaataaaaattctaactaatgggggtctgtgggaaaaaccaaaaggacctaacctaggctgcttgcttgcttccataatccatcatggtcatcaccatggattatattcattcattcatcatctcacgttgatgttcatcatcaacctccaaactcagttttatccgtctccaacttgtcaaagaagacagtgagagccctcaaggcagcgtaatggttaagcaaagcaagagtataggcagcagtatcatcaaagagcatgtaatcaagtaatggaaagacagcaggcatagtcattggtaatgccagcatcctccatctcatattatcaaaagatttctaatggaacttggctggtgaatttatatgttatgttttacttgtgtactgcatccggggcagtcctcaacaacattggtccttccgccaatttcaatttctggagtgtcgatgttattcgcaataccaatcacttctgaatcatcatccggcagtgttagctgctgtggtatttgatcagtatcgccttggacaaaggcagcagagggcaatgctgtcttgacttcttcctctgggaactgttcttttgttgcttcgtcaatcccgggcgctttttcgggatcgaattgaccatcatccttgctcccttgtttctcagtatcattggtgtttgtttctgcagtctcctcggtatcatattgtggattcttcaagtgttccttagcaaaagtggtatggatatcatcccagaaatgcgaccaataacaataggtccactagctttttccacggatgggtatatggtaagttggtaaatgataagtgctagacctgatattgaaagaacattaccaacatcatcagttgtaaagttcaaaccccccaacctttgaggactcacagcccataatgagaaaacctcttgatatgcaatatcatgaagtgcgaaaacacaataaacaatgaccgatgacattaagggccagttcaggaggaggttttccttcttttggattatcttgtctttactggccacactgccaccgttttctaaagcttcagcattgtctatggattcatttctacaattgtggttgtgaagtgttcgggaatccagatacagccaataactactacaaatgcaactgcagatattataaagttgggcaagaagtaaggaaacttatcccagaaggaatcctttggaaatatatgtgggtacttctctacgggctgagctaaatagcctcccaatgctgggccaatgattaaacctatgccccaagctgcaagttgagagtcctagagcttggtgttcttcccgaaaaagttcagtggcataggccttcactggtccaagcaaaccatttaaacttcccagaagaaatctcatgataactgccatccaaaaacttgtgctaaggccaaatagtgtgttgaaaatgacacaacataaccagcataagaactaatgtcagcttctgttttcgcaatattaaaatcccttaccatgaaataaaggaatggaaagagagacgatataggcagcgcagcacacaacaccaccatccatatgatgaaaagatttgtaacgggtacaccctttccctcactcaactctttggcttgatccactttgcaaccagggcagttctcgtggtacttcctctccaacaatggctgcttaacattttcctcttccatgtttgtgagagaaccccaccacttgtttcactcaggtccctctttttttacaagtatcattcaaacccagaaaatggagagaaaacaaaaccggaacacaatcaaaggacaagaagctctcgtacttttccttggtataaagagtgcaataaatacacctgaacaacacaagccaaggtgtaat

SEQ ID NO: 139047 - DNA, 415 bp, Glycine max
  Clone ID: PAT_MRT3847_96566C.1
tggcctcacaaaaacaaaggtaccaaaggaaacttgcaataattctaaatattaaggtagtattacaatacatgttggaatctgttcttgcacgggtgaatttgaagaagaagctgagagctgttagatatggttgtaattggaagaatatcttatttctttagcttctttttctgtctctcttttttggtagtaaaacataattgggtagtgtttgactcttggattttagagcctatttgattcaagaagactggtggcaagaaaggttacccttaaatagagaaataaatatactctagtaaaaaggaaattcatctttatgtcatggattgaggctaggcaaaaggtgaaaaagacctgattgaaggaatagaagaaaaaggagattcatctttatgtcatgaattgggac

SEQ ID NO: 139048 - DNA, 604 bp, Glycine max
  Clone ID: PAT_MRT3847_96567C.1
ttcccagaagaaatctcattataactgccatccaaaaacttgtgctaaggccaaatagtgtgttgaaaatgacaactacaataatccctataactataacaggctttcggccatagcgatcagctacaataccccacattacagatgtcaaacatcttccaaacatgaatgcagaaccaacataaccagcataagaactaatgtcagcttctgtttttgcaatattaaaatcccttaccatgaaataaaggaaggggaagagagacgatatgggcaacgcagcacacaacaccaccatccatatgatgaaaagatttctaacaggtacaccttgtccctcactcaactctttggcttgatccactttacaacctgggcagtcctcgtagtatttcctctccaacaatggctgcttaacattctcttccatgtttgtgagagaatcacaccacttgcttcactcaggtccctctttcctacactatgttgcatgcatcattcaaaacacagaaccaaagggagaaactcttggacttttccttggtttgagaatgcaaaaatgaacatgaacaacttccccttctgtcgtcttctcgcagccgta

SEQ ID NO: 139049 - DNA, 424 bp, Glycine max
  Clone ID: PAT_MRT3847_96568C.1
ctgcgagaagacgacagaagggatcaatccctacgtcgtttcttgctccgtgttcttcgtgcgacagtcaattagttttgcttatttttttttgaaagatttatatgtgatctatgtacccttaggggtccccctttgttattttgtgcatattcatctcctccatctatcatcggtaatctcatttttttgtgaagtttaatcttaaccaatcattagcgccgtaaagttgtcttttaaagagattaaaagttaataaaacaacccaagataaaatcaatgcataactgaatttctcacaatcaaagtcacttgagatcattcaaggtccaatgctttaacgaccctttttgttcttgttaatttaaaatgaatctttcaaaagcgtaaaaccaattcgacacacaaactttttcatttaaaa

SEQ ID NO: 139050 - DNA, 541 bp, Glycine max
  Clone ID: PAT_MRT3847_96569C.1
ggctcgagcttcgtcgtctactctgcgcgacaacgacgacgacgacgacgatggggaggagaaggaagaaccgactaaggagaaggtggatttgcaattcttcgtgaaggggatcgaggtgggccgccgagacgcggcggcgctgttcttcctggtgagcttcctctccgccgtgtacggatgggtgatccttgttttcctcgtgacgtactcgtgggtgttgggtgtcgttttcgtttccgttgtgaacgatctgttgggtaggtttagctccgtcaccgttttggtttgggaaggttcgaggttaggtctgaagaggctttcggggtttattctgatgcgttgggccgtgagggacgcgttgactcagcttcttgggttgtggtacttcggagaagttgaggatcagtactcgtttttcaagctctttgttaggttaaagttgatgcccttctcggttatgtcccctcgggttaggggctttgagagggagattttgggttcctttttacttggtttctggtggatccttttgtggctt

SEQ ID NO: 139051 - DNA, 212 bp, Glycine max
  Clone ID: PAT_MRT3847_9656C.1
tttgtggtttttttttttttttttttttttgcgcgcaagccaatcattatttcatattcctgagacgggctcacgcccagcctaacgggatacatcatcgttcctttttggtacactttttaaaaacttaacttatacttgcctgcctgcttcatttacttggggggggtgtaaaagggttttgaatagcagaaattaatatatccttacta

SEQ ID NO: 139052 - DNA, 271 bp, Glycine max
  Clone ID: PAT_MRT3847_96570C.1
agctcaatcattaacggagccagcctcactatttctactatagaatcaaatattaagaggttaaatgaagagaccctaatcatgtttaatctataaagccatataccttgagtaaaatataaaacctttattcacattccatcaaaaaaaagagtagcaccttagaaattaagtattcacacaattttctacttacatcaataagccttgcttggtatgacttatcagtgataaggttataaggaagtcactccaatatttaaagaaatcc

SEQ ID NO: 139053 - DNA, 109 bp, Glycine max
  unsure (1)..(109): unsure at all n locations
  Clone ID: PAT_MRT3847_96571C.1
atctgagaggagcagagctgaagangtgaagtgaagatgatgnccggaaaatatacgtcgnttgacgcgcanagcttcnnngggatctggttcctgccgntccagattc

SEQ ID NO: 139054 - DNA, 405 bp, Glycine max
  unsure (1)..(405): unsure at all n locations
  Clone ID: PAT_MRT3847_96572C.1
cttcacttannttctccncnntatgganngtttannatcttgggtggtcccnngtcagaaggtnnttttaaannttttggtgagggggttcattnnatgaagnnaaaagggaccaagctnnntagttgtcaaggttgnnngaatcaaccttcataccctccatgnnngaatggaccttggtttggcccaatagggttacctggagtaagggcaaccgatanttctgtggttgcgattanttgttagttttgatgggtttgattacccaagcaagggttatgagccaagatgtgcagaannatgataaaccaagtcttttgtgggtgggtgatgaaaaattgatgccgtgaaaaggacacccacctgctgttggctgggtgttcaaggatggcaatttgtaagaaa

SEQ ID NO: 139055 - DNA, 273 bp, Glycine max
  Clone ID: PAT_MRT3847_96573C.1
agcatcttttactgttgccaatctatgccaagcatttaagcgtggtgcaagattctgagcaccgggaagctacacgttggactgctacgaggcatgctaggaatgattatcgaggcatcagagaggaacctatgaacagctgaggtcatattccacccacgttactgcacagagaagaattcgattgcgaatgactacacattgcttacataagatggtgagaagtggaagatgtgcactataagaacttactttaatgtgcgtcatagctat

SEQ ID NO: 139056 - DNA, 492 bp, Glycine max
  Clone ID: PAT_MRT3847_96574C.1
aaaataaggggagttttttttaaaaaaaggaatgaaaaaaataatggggggggggttaaaattttatttaaaaaaaaatgaaaaaaattttaaaaaaaccccctttaaaatggaaaaacatgtttttttcccggaagggaaaaacctcaaaatccggggggaccccttaaaattccgaaccggtcccaaaggggggaccaattttacaaaaaaaaaagccgcttaaaattgggccaaaaaatgaaaaaagatccctccagaggaaaaaaggtttccctaaacgaagccaaaaaaaaaaaaagccggaggaaaaaaaaaaaaaccctggggggaaaaaaaggggggccaaccaattaaaaaagggaagcgccaaacgcccttttaaaagaggaaaaacctttgggaccaagggtgttaaaaaatattccaacccggggggaaaaggggttttttttatttggcccaaggggggtgttttttttcaaaagggaa

SEQ ID NO: 139057 - DNA, 482 bp, Glycine max
  unsure (1)..(482): unsure at all n locations
  Clone ID: PAT_MRT3847_96575C.1
ccggaccggaattcccgggtcggccgacgcgtacggactcttgtaacatcacctttgctggtgttgttagggattgctggtaaaaatagcaaggctcgatttcaagctacagttggaaccactaaatatcctanagagattccacctttgccttggtaccgtgggacgattccacagatggcaatggcaggatttctgcctttcagtgccatatatattgagttatactacatatttgccagtgtgtggggccacaagatttacaccatatacagcatcttgtttattgtgttcatcattctccttatagttacggcattcattactgtggcattaacatacttccaacttgctgccgaggaccatgaatggtggtggagatcttttctttgtggtggttcaactggcttatttatctacgcttactgtttgtactactactacgctcgctcagatatgtctgggtttatgcaaacatcatt

SEQ ID NO: 139058 - DNA, 846 bp, Glycine max
  Clone ID: PAT_MRT3847_96576C.1
tacggctgcgagaagacgacagaagggggttgagtatattttcttttggtcataaccactttgggagagagagagagatggcttacaacaaaggggtgcatagcagcagtggagggagtcacagaggaaggccttatgtgttggtattgcttatcacatttgggattgcactgcttggtgtcatggtgcttcacaagctcagagagaggcgcatctgcacccttcttgtcaaagaggaagaccaacagattcttgctcttcagcttctcttgcagaaggaaagagatcgcagcaaagagttgagaggcaagaatgaagagatgaaggggaagctatacacactgagaagtcaaaaaatggagctggctagaacagttgtggagatgcagtccacccttgattcgctaaaagatgagcagaaactgatggaatcagaatttgaggagcagcagaatgagctgagattgatgcaagaaaaggggaaaagtgttggacaaggaagatctgaaatagaagcattaagagataatcttaagcataaggaagcagagatggaggacttgaagcgccgtcttgaaatcccggttaatgatcatccaactatctttcctgaaattgtgacagcaaatggaacaatagcagcacaggatgaaaatgggaaggatgagatttcaggtgaatctgccaaacacgaaggtgatactgataacaatgaaggcacaattaaaagtgaattaaccaagttcaaagatgaggatgtcatgccactcgtcgaataatttctctctttacttttttccccaccttgtactttcttatttgctgcttttgtttgtggtttggatc

SEQ ID NO: 139059 - DNA, 1226 bp, Glycine max
  Clone ID: PAT_MRT3847_96577C.1
gaaaaagaaaacttgtattgcagtgtttaacagaaccagcatcattgcagggataattcaatgggatcttccaatgaaggatcttcttcttccaccctaacctccggaaggtcatggtccaaccatgttttcttgagttttcggggtgatgacacacgcaaaggtttcactggccatctttttgcttccctagagagaagggggatcaaaacattcaaggatgatcatgatcttcagagggggaaattgatatcagtggaactcatgaaagccattgaagggtccatgcttgctcttatcattctctcaccaaactatgcctcctcaacatggtgtttggatgagctcaaaaagattctagagtgcaagaaagaagtttttccaatcttccatggtgtagacccctctgatgtgaggcatcagagaggaagctttgcaaaggctttcagtgaacatgaagagaaattcagagaagacaagaagaagttggaaagatggagacatgccttgagagaagttgcaagctactctggctgggactccaaggaacagcatgaggcaacattgattgaaacaattgttggacacatacagaaaaaaataattcccaggttgccatgttgcacagataaccttgttgggattgattcacggatgaaggaagtgtattcactcatgggcataagtttaaatgatgttcgcttcataggactatggggcatggggggcgtggggaagacgaccattgctagatttgtctacgaagcaatcaaaggggatttcaatgttagttgctttcttgaaaacattagagaggcgtctaagacaaatggcttagttcacattcaaaaggaacttctttttcatcttaatgtaagaagcagtgatttttataatcttcatgatgggaaaaatataatagcaaattctttaagcaacaaaaagattcttcttgttcttgatgatgtaagtgagttaagccaactggagaatttagctggaaagcaagaatggtttggttcagggagtagagtaataatcacaactagagataagcacctgctaaagacgcatggagtgcatctgacttgtaaggctaaagccttagcccaaaatgaagccctgaagctcttttgtttgaaagcatttaagcaagatcaacctaaagaagagtatctggatttgtgcaaagaagtggttgaatatgcaagaggcctccccttagc

SEQ ID NO: 139060 - DNA, 1761 bp, Glycine max
  Clone ID: PAT_MRT3847_96579C.1
ccacgcgtccgcccacgcgtccgaacgacaacgctctctctctctctaaaccaaaactgcttgctctgttttcttctggcttcgctatgagctcagatgcgagtagagaacgaggtgcatcaaccgtggtgggactgaaatttcaatacagagcacttttgtttttggcataccagagtttaggctttatgtttggtgacttgaccttatcccctctttatgtctatcaaagtatattttctggaagactgaaaaatgtccaacatgaggatgcaatatttggtgcattttctttgatcttttggactctctcaattatttctttgctgaagtatgccattatcatgttaagtgcagatgataatggtgaagggggaatcgttgctttgtactcacacctttgcagaaatgcaaaattttgtttgcttcctaatcatcaagcttctgatgaggagctatctacatatcacaaacctggttcctcaaatagaaatataccaccctcacctttgaaaagattcattgagaaacacaagagtacaaaaacagttttgcttatttttgttttactgggtgcttgcatgataatttgtgttggtgcactcatgcctgccatttcagttcgttcatctgttgaaggcctgaaaattgaagcaaagattacaaataaaagtatggtgtctcttatttcttgtgttctactgattggactctttgttatgcaacaccgtggctcctacaaggttgcattcgtgtttccccccataatcatcctatggttactgactattttcatgattggtatttacaatgtcatcaagtggaatccaagagtatatcaggctctttctccatattatacatacaagttctttaggcttacaggaaaagatggttggactaatcttggaggagtatttctgtgtgttacaggaactgatgctatgtttgcagaccttgggtactacagacaaacacctgttagggttgcatttttttgtatcatttacccatgtctagttcttcaatacatggggcaggctgcttttctttcaaagaatttatctgcagtgcctataagcttttatgcttctattccagatattctattttggccagtatttgtggtggctgctttggcagtaatagtggcaagtcaggctgtcattgcttcaacgttctcaattgtccaacaatgccatgcatttgaatgtttccctcgggttaaggcagtacattccagaaggtggatccctggtcagacatatataccagagataaactggattcttatgataatcagcttggctgcaacagttggtttaggagacatgagcaatataggatacgcttatgggatggcatatctgattgtggtgtttgtgaccacatgtttgacatcactagtcatcaaccttgtatggaatcaaagtcttatagttgctctggcatttgccttattctttggcgcaatagagattctcttcctgtcatcttattgcatgaaaatccttaaaggtagctggattccactcgtgctttctgccgtcttcatggttgttatgtacgtgtggcattatggttctaggaaaaagtatttatttgacatgcttaacaaagtttcaatgaggtcgatcattacattaggtcctagtcttgggattgttagggttcctggattgggccttatctacactgaattggctactggagtccctgccagttctacccatttcttgacaaatctgccagctttctacc

SEQ ID NO: 139061 - DNA, 131 bp, Glycine max
  Clone ID: PAT_MRT3847_9657C.1
aaaataatgggacaaggattcttaatctaacacaacatataccttaaaatccaaatctcacattttcaaaactaacattcactaattccctatgccccccttaacgattgactcacacccatacacaaaat

SEQ ID NO: 139062 - DNA, 524 bp, Glycine max
  Clone ID: PAT_MRT3847_96580C.1
gaggagttggataggattgaggagtttctcaaatgggttagctacattttcgaagatggaagcacgtatgaagggactgtttgggatgactatgctcatgggaaaggagtttatgtttctgatgatgcattggtcaggtatgaaggtgaatggtttcaaaacgatgtggagggtcatggtgtagttgaagtcgatatacctgttatagaacctgctcctgggtccaagcttgaagcaaagatgcgagctcaaggaaagataatagcaagggattttctgtccccagaagacagagaatggcttgagaaggatattgaagatatgtattatcttgcagatgggaactatgaaatccccttttatgagaatgaggaatgggttaggcaatttggaagaaagccggagaaaggtcgctatcgttatgctggccagtggaagcatgggaggatgcatggatgtggtgtatatgaagttaatgagcgtatcttatatggtagattttattttggagaatatgtagatga

SEQ ID NO: 139063 - DNA, 431 bp, Glycine max
  Clone ID: PAT_MRT3847_96581C.1
cacattgattaccaatgagaatcttctaattaacaatctctagcatctcaactctctgggtattcacatactgcagacggacgcccatctagacatatctttattgtcctcaaccccatgttactcacattaaacccatagcttttagcattatttcgatcacatgcaaaaaaccatcgtccattcccttacagtttactacaacgccagctactatgccattatcaaatgcttccattgcacgaacagctttaaatatctcaccagattgctacacctcgatcacaaattctgccaaatctaaacaatctgtctctctgaacaagcttttaatgaacagtcatctttcgtagatcatagaacagtactgcccatatttcccaagctcttggcaattatatattttatgcattggcattttattatcacaa

SEQ ID NO: 139064 - DNA, 591 bp, Glycine max
  Clone ID: PAT_MRT3847_96582C.1
ggctcgagattttgtaattttattttttttatattttttaatgctttaatcattaataaaaggtactgaacttagtttccagaattgaaaataatgcttcatcttctcactttatatttgaaaattcattctgttaaaaaattcctttctttgctatttgtttattgcaataagtttctggtagataaaagtttaaatgtgtttgatcatcaaacatcaatcccaagcaataactaagttgaattatcagacttgatcacttcatgtgttttgttgtttaggtaatctgccagtttttccatatttgaagtaaggatattcatcttatgaccaagagtgtcaatctttcggattaagagttattgctttagttctatctagagtaaaggaccagctagtgagatgctatagatccttaattcaaatctcatcaagagaagggtcagttttgaccttcattgattatattaatgtagttaggtgtaaaagaaatgtttaattatagtaatacatatttcaggagaataaatagcttaaaacgattccctaaaataagaagcttataacgtactgaatgcttttagtgacatg

SEQ ID NO: 139065 - DNA, 711 bp, Glycine max
  Clone ID: PAT_MRT3847_96583C.1
aattgttattagaaaatattgactatgcacttgacacgttcctaatttatatgctaacactgtctattttccctggattcctcttagaagatactggatcacatagtttaggcacctggtatgctcttgttttaattgctatgtataatgtgtgggatctgattggaagatacattccactcttgaaatgcttgaagttggagtcccgaaagttgatcactataacaattcttagccgtttcttacttgttccagcattttatttcactgctaagtatggtgaccaagggtggatgatagtgttaacgtccttcttggggctatccaatggttaccttactgtctgtgttctaacatctgcacccaaaggttacaagggtccagaacaaaatgccttgggaaacctattggtgttgtttcttcttggaggtatttttgcaggggtgacacttgactggctgtggttaataggtaaagtatggtgagatctcattaaggccagattagaggaatagttgttaggttcattccttgtaaaacattgataagtgtttatagtttatagcatgttctttttctacttttaagctaatgaattcgttactttctctgtttggttcgtcataaactcttaatgtaacatttgatatttatcatagagagcccaggaaattcaacatctgataaaatgacattccctttttaagattt

SEQ ID NO: 139066 - DNA, 313 bp, Glycine max
  Clone ID: PAT_MRT3847_96584C.1
gtcgaaaaaaccggcaaacacaacaccggaccaggacttaaacttaaaattgctttcccgaacatcgatataacaagtcccgaattgtgcaaatacctatatatttacaagcgcaagtctaagctacccctggcatgtgccccgtacccctactgcaatgggagtgtgtgattcgggtatcaccttccaaccctgcgctgtatgagactgtctacgtacaactaaagccttagggtcaacaacccaacaaacggccctaattttgccattcctcgcagtctcaactgcaaccatacccaatgtcatcgtctca

SEQ ID NO: 139067 - DNA, 251 bp, Glycine max
  Clone ID: PAT_MRT3847_96585C.1
attaatttgtctctcccttatattgtcaagctctgcaatattgcttctcaacatggggtatcgtctcctactcatttttactttactcaatcttggactggtggctatccatgctgctttacctcctgaagtatacttcaagtcggtgctacctactacgtcaatgccttaagtcatcactgatatcctttaccctgattgggtggattagattagtagctcattgaatgttggaggcaagtggcgtaaac

SEQ ID NO: 139068 - DNA, 446 bp, Glycine max
  Clone ID: PAT_MRT3847_96586C.1
gttcagtaacctgtcatcaggaaacttgtattagcagcctaaatccgcttggatcagcgcatacttctatccgaccgaggataaaagacgagcgagcacattcgtttgtaaagagaatctccctactaaaatccagtgcacgaatagcctttggggtgcagaggacataactctatctgactaagttaactgcaccatgaactgccgaaaagctattggcccacgcattttttggattaaacactaattacacttttctctcccaaacgctgtgagaacattatagctgtaatcagacgagcccaaacccacagcataattagtctctgcctgcgcgtttaattcacttattctcactacccggggcagattcacctgcaccggcatcgactgcaatagcctcacctgcaggagccaatgcacacagaaccgccgacccctactac

SEQ ID NO: 139069 - DNA, 368 bp, Glycine max
  Clone ID: PAT_MRT3847_96587C.1
ggggaaaaaaaagccaatgccggcttgggccgccccccgctttttaatgggtcaacccaattttatagggcccaatcccaatggcctcagaccccatggtttggtcccctaatggggaaaatttttggggaaaaaatgggacccaattttccttgcccaaaaaaaaaagaccccggggccttacccgggaccaaaaattcccccttccggggaaaccccccccctttgggggcggctcccctcccgccccattggaaaacctcggaatttcaaacagcttttgggcatcatccggggggacaaaggttatagaaacccctttttttccaaaccgcccccttccccctatgggggggggattggtttca

SEQ ID NO: 139070 - DNA, 341 bp, Glycine max
  Clone ID: PAT_MRT3847_96588C.1
aaacaaagccctgaaccaccgccataaaccaaaccttcctacatcattacatatacggctcaaatcttggcattgacaataatgcaatcttaaacacagagattttaccttgtcctatgatcatacgccaacctgacaaggaacactcggccagagcaagagaaactgatgaggtgtagaccaccttaactcttactgggagcatgtaaaaaccccgttgctgaagcattgcagacctcacggctcatactggaggaactcacatctctttctcatgcatattacctgcaacaacagaggttggacaatggcataagatttttaaaccacgggggtcacca

SEQ ID NO: 139071 - DNA, 697 bp, Glycine max
  Clone ID: PAT_MRT3847_96589C.1
cctcaacaaagcatttattactcccactcagtggttcccgggggctttgaagttaggtcatacataattctagaaattccaggaatcttctttatctcagtgaccatctttagcaccacctctacaggaatctcattgccaggtgttgcaggtacaccagtcatgaagtcactagtaataaaggttcgaataaccacagacctctggcatgaaggctgcttctgaagtggatctctatcgaaatgtaaaggggtcaaaatcactggcatctggctgattttcccagcaaacccagactccctgagaatgttatgggcctcaaaatcagcttggcgtaaagtactgagcactcctgttgtcaaaaaagttggagtaacatctgtaggaggctctttaactggtggaccaaagatatagacaactctgttaatgttatgacacattcgaggtataagtctggcaaggaaaataagagattcccagtcaggttcatctttacttgagattccacacacataactgtaagaacgacagtcaccctgtacacctacagtcttaattggcagcaagaaagcattgagtgaatgcagacttgtaatttgcatgagcttctcctggtcctcttctgttgtgcaggctttgactctttgtaacagtgtatgaggcttcttaacacttgcagaaaaatcagctacta

SEQ ID NO: 139072 - DNA, 2034 bp, Glycine max
  unsure (1)..(2034): unsure at all n locations
  Clone ID: PAT_MRT3847_9658C.1
ttctgctctctgaaattcagattccaattcgtttgaaatgcagttgccataattccaatccaactcgtgagcttccttaatcggaaggaacctcaccatgttgaaatttcacatccacagaattcttgtttgcgccaagggtttcacattcacaaccctaaaatggaaccctattgttcaactccaatttctcaaattcgagttctgcactacctcacgctctttcgtggtgccctacctcatcaacaattgtggcttctcccaagaaaacgctctcaaagcttccctcaggctccgtttccgtggcccccaaaagcccgattcagttctctccttcttccgaagccacggcttctccaactctcaaatatgccatatcctccaaaaagcaccccggctacttttatgcaacacccagaagacactgttgccaaagttccaatatttactttcaaaaggtgtttcttcccttgacattgttcgcatggtcacccctgcccctcgtttccttgaaagaagtttggagaatcatataatcccaacatgtgaatttgtaagagggttcctccaatctgacaagcgaatgattcatcttctgattcgcagtcctaagttacttaatgaaagtagtgtgacacctaacatcaaattgttgcttgataatggagttacccactcaagcattgctttgttgctccagagacggaaccagttactctggtctgctaacttgttgaagactgttgaggaattgaagcaaatgggtttcgatccttcaacttcaactttcagtatggcattgcttgccaaaaggactgtagggaaaaccaaatgggccgagaagattgacacttttaagaagtggggatggtcccaagaacaagttcttctagcatttaggaggcagcctcagtgtatgttgtcatcccgtgataaaattaatgcagtgatgagtttttgggtagaacaggtgggtttcaattctgcagagattgtcaaagctccaggaatttttctatttagtctccagaagaggattgctccaagggctttagttgtgcagtttcttatctcaaaaagtctgctacaaaaggaggcaagcttaactacaccatttattctgcctgagaagttgttccttaaaaagtatgtaaaacattttaaggaggattcttctcatctgttaaagctgtacgaggaaaaaatgagtcttgaaaatgataggggcaacccttgttcgtagccttcatcaagtgtgtaacatgatcaaattttggtgcaaatcaaccaccttgttttgtgcaatttttaaaaaaaaatagttctgcctaccaaaattttggagcaacatgcttccatatacagatatgatttgaggaggaaaaaactaggatcttaaggccttctatactctgctccgaattgagaaacgtcgtggaggaactgaagccattagggtttgaccctttcaaactgagttttgctatggtgttacaggctaaaagtgctgtttctaattccctatgggatgctaaagttgatacctttaagagatgggattggtctgaggatgaagttttcattgcttttaggaatcagcctaacgtcatgctgtactcaatggaaaaactcattacagtttggagaaaagggttgttctgaggggtttggttgtccagcatcttctctccaatggtttgataaagaagagttctagcttggttacactgtttagtaagtctgataaggtgtttctgcaaaagtacgtgagatgtttctgggacagggaacttactagcatgtggttgttgcgggttacctgatggatgctggttttggtgtgagactagccatagcatcatgcttattcatctctcactagcatcgcttctgccccgtgctaactccggactgcttcctgcgtggttggtatgtttctctgcctgagttcgaccgtctggggtgtaggccacatgtctgcccatggccagtaangtccctgtttataggtgattgctccacgacaacagaagg

SEQ ID NO: 139073 - DNA, 703 bp, Glycine max
  Clone ID: PAT_MRT3847_96590C.1
aaacatatatccaaaaaattttattaggccaatgcgtacattccccaaatgtatgggagtttatctctagcaatttaaaatataatactggaaaatgaattgtgcagccatttcagatatgcaccacctacagcgggcctgggaatgttccattctccctttgctcattccatctgtcaacctgatgcatagacaaagtaatcaaaacaagctgtttgcagatatgcacaatttcaagattggtagtagcaagaaacaatattttttttgtgaaatgtctgcataagccattaggaaaaagaagaaatgaaaaagaaatcaaaattgtgtatttgacctgatggtaactgctaatgaaaatgtattcatcaagcatctatttgaaatatcaagttactgtaaatactacccatgataattttgaacttgaggttagccaagtaactcacattttggttctaaatgtgaaacttgaggttatccctcacacatgtgggaagtgaaaatcaatttaagcaaatatataagccagctcagctcactacgcactacttgtgttaaatatatcagacagtaatcttctccttaagtgtttaaaacttcaacaacaacaacaaaaaaaactaagcattttcctactaagtggggtcaactaaatggatcaagtgacatgatgtttctcccctctacttttagctatata

SEQ ID NO: 139074 - DNA, 808 bp, Glycine max
  Clone ID: PAT_MRT3847_96591C.1
cggctcgagctcgagccgaatcggctcgagcggctcgaggtgaaggcgtgaccctagccatctttgagaattgttcagttcttgaaggaaagcagagcagagaagagaagagagtttcaagaatggggagcgaagaggagaagggtgaattctacttgcgatactacgtgggccacaagggcaagttcgggcacgagtttctggagttcgagttcagacccgatggcaagctccgctacgcgaacaactccaactacaaaaacgacaccatcatccgcaaggaggtttacctcaaccctgccgttttgcgtgagtgccgccgtatcatcgccgagagcgaaatcatgaaggaagacgacaacaactggcccgaaccggaccgagttggacggcaggagctggagattgtgatggggaacgagcacatttccttcaccacttccgagattggatctctcgtcgatgttcagagcagtgcagatcccgacgggctacgcatattttactatcttgttcaggatttgaagtgctttgtcttctctctcatttcacttcacttcaagatcaagcctatataatgtgtttgcaatattatgcattcatcctctgagaaatgtgtacttgtttaacaaccatcacttttttttttctaatggagtttgacatctgatagtgacttcataatcatgaatatgatttggttctgtattggtggttacatgaattgcaacttttagatttgagggtatagcccttgtaccaaagtgttgattggattggtttttgtgcatgggttagttattctttc

SEQ ID NO: 139075 - DNA, 285 bp, Glycine max
  Clone ID: PAT_MRT3847_96592C.1
attgaagttaaatgccttagccttccctacaactccaaacacaaagacattatcatccatggctgcctccgtcttcactgtcggagctgtcaacagagctcttttgaacctgaatggttctggagctggagcttaagcttccagctaatccttattttgggaccagcttgaataaggttattgcctctagggtccctaatagcaaggtttccgttggaagctttaacattgttgctgtagaagagaagaaagagattgaatatacccttcataccgactatggac

SEQ ID NO: 139076 - DNA, 579 bp, Glycine max
  Clone ID: PAT_MRT3847_96593C.1
tcggctcaatttcctaccccaaaaacaagctatccccttcctcatgtgcctgaaattgtgaaatccgaatctcgccgccaccaaatcgcggaatcgattgagctgagacgcccaacgccacgctactacttgctggctgtgtgggtgctttcgctcgcttccaaattctcttattcggaattgcaggattggtgatgtagactcactgagccaagatgccattcttaacaaaagataaaatgggttgttctttctgtagtcactttatctctggcatctattcatcattcatctatctttgacaaagttgtggactgttaacatagtgcagtataaagcactacctagtcttcctgaaaatttggatctgtgttgggtagacaggttataaagaataagaagctatggggttccattgagtctttggaaacattacagcctaatgccaacactagaagcaattattctgttccaaagcagcagagcaatggtttcttatatgcaaaagtttttggtgggttttcaaagatagatcatcgatccccgatcttgttgctatttctagacttttaatgctac

SEQ ID NO: 139077 - DNA, 848 bp, Glycine max
  Clone ID: PAT_MRT3847_96594C.1
gatgagggaagagtatgggtgaatgaataaagatccatgtgatagtgagtgattttggatccgcattcacacccaccagagcagctacccaaacaaaatccaaaccaccctttcggccttttccttaccccaaacaacaagctatccccttcctcactgtgcctgaaattgtgaaatccgaatctcgccgccaccaaatcgcggaatcgattgagctgagacgcccaacgccacgctactacttgctggctgtgtgggtgctttcgctcgcttccaaattctcttattcggaattgcagattgatgtcgcaactatttagttcaaagttggctggtgcaggattggtgatgtagactcactgagccaagatgccattcttaacaaagataaaatgggttgttctttctgtagtcactttatctctggcatctatcatcattcatctatctttgacaaagttgtggactgttaacatagtgcagtataaagcactacctagtcttcctgaagaatttggatctgtgttgggtagacaggttataaagaataagaagctatggggttccattgagtctttggaaacattgcagcctaatgccaacactagaagcaattattctgttccaaagcagcagagcaatggtttcttaatgccaaagttgtttggtgggttttcaaagagagcatcgtcgatccccggttttgttcttagtgcttatggctactcgacttaacctgagttgatgtgtaaatattttacatcattatgactttttttttcccactttcatatatcggttgcgtaggtattatctagtaaacagattatagattatgggaatctctg

SEQ ID NO: 139078 - DNA, 1337 bp, Glycine max
  Clone ID: PAT_MRT3847_96595C.1
ccacgcgtccgaaagaaccctctccatacccctttcttctgcattaccatattctttgtctctcctcgtacccaagagagagagattaagaaaatgggtgagggtgttgtctcttgtcgtctgcagctgttcttcttccttcttcatgggttgttgttgtcgaaagtgagaggaaagggttcttcttcggctttggattatgcgcagtgcgatgtgttcacgggaacgtgggtggtggacgaatcgtacccgccctatgatcccgccacgtgtcccttcatcgagcgcgagttcaggtgcaaagggaatggacggcccgatctcctttacacccgctataggtggcacccacttgcctgtaatttactcagatttaacgggctagattttctggagaagatgagggggaagagcatcatgttcgtgggagattcactgagcaggaatcaatggcagtccttgacttgcttgcttcattcagcagtgcccaattcaccttatactttggatagagttggagatgtttctattttcacacttacggagtatagggttaaagtgatgcttgataggaacgtgtatctagttgacgttgtcagagaggatataggcagggtcttgaagcttgattcaatacaaggaagcaagctgtggcaagggattgatatgctcatctttaacacatggcactggtggtaccgtagaggacccactcaaccatgggattttgtcgaattgggaggtcatacttataaagacattgatcggatgagggcttttgaaatagcacttaagacgtggggtgcatgggtagacgccaacgtcgaccctacgagagtgaaagtcttctttcaaggaatttccccatctcactacaatggcagcctatggaacgaaccaagtgcaacgagctgcatccggcagaagacaccggtgccgggatcaacctatcccggagggttgccaccggccgtggcggtgttaaagagtgtgctgagcacaatcaggaagccagtcactctgcttgacatcacaaccctctcactgctcagaaaagatggccacccttccatttatggtctcaatggagccgccggaatggactgcagccattggtgtcttcctggtgttccagatacttggaacgagatactttacaaccttatttgatggctaattttttattcatcatttgattgggggttataaaaaaatttatatagaaaaatgaaaaataggttggatataatagaccatatataccctgattaattggaatgtgccttgtggcctagagtgaataataataatttttttttaataataagtcatccctc

SEQ ID NO: 139079 - DNA, 547 bp, Glycine max
  Clone ID: PAT_MRT3847_96596C.1
cgtggggtgcatgggtagacgccaacgtcgaccctacgagagtgaaagtcttctttcaaggaatttccccatctcactacaatggcagcctatggaacgaaccaagtgcaacgagctgcatccggcagaagacaccggtgccgggatcaacctatcccggagggttgccaccggccgtggcggtgttaaagagtgtgctgagcacaatcaggaagccagtcactttgcttgacatcacaaccctctcactgctcagaaaagatggccacccttccatttatggtctcaatggagccgccggaatggactgcagccattggtgtcttcctggtgttccagatacttggaacgagatactttacaaccttatttgatggctaaattttttattcatcatttgattggggggggggtttagtcgattcttaatcatacaaaaatttatataaaaaaatgaaaactgggttggctataatagaccacaccctgattaattgtaatgtgccttgtggcctagagtgaataataataataaaaaattcatcac

SEQ ID NO: 139080 - DNA, 295 bp, Glycine max
  Clone ID: PAT_MRT3847_96597C.1
gggtgaaataaaagggaaaaggtaatctataagagaaggcaagaaggaactgatgaaaacgtgaaacgacgaagggatagggtggaataagaaaataatatgattcattgcaccaagagaaaaatgacagggaaaatatacaaaaggacaaggctagctcagtcactagcaaacagcgacgtaagggatgataggcggcgaagcgttatgaaccacgagtataaaataaggctcacaggcagggagaagaggaaggtttacgggtaagggacgtaacgagtggataagatgaggg

SEQ ID NO: 139081 - DNA, 454 bp, Glycine max
  Clone ID: PAT_MRT3847_96598C.1
cagtgaaggcttcaggccgaccacttagtgggtttattccaactcgtgaatttagtatattaaagaccaaaaagggaaatgtactttatgaaaattttcaaataaaaaaatagacatgatctcatttgtgcttcaatcaataaaatgtctagtcagagttgggaaggttgacaacaaattatggcgatagaataagaaaactaagggcaatgacataccactgctcgatactcgatgtccatggttctggcgtttaaggtgaatttgacacattcacaaatgtgtactgtctgcatagggacgttaaatctttaacattttctctttgttatctgccttttccgatcccatatatgcggatggcgaattcacacccacaacatacatcaggacaactttcggattgtcgcgctggaaggacaataaacaatttttgagatccacatggctagaa

SEQ ID NO: 139082 - DNA, 434 bp, Glycine max
  Clone ID: PAT_MRT3847_96599C.1
attggttctctataatgctttttgatttaagaatcttttataattaacagggaagtaaatctaatccaggggcaaccccttttttatgaaaaaattgctaaactatgtagctttacaccaaaggcggagacacaacctaaattgggaaaaaaacaaacacggtctaaaaaaaacaaacaatttgccaaaaaaaacactacccatgcaactaaagaagccagccaaaaaaaaaaaaaaaagccctaccgtccaaactcccaaaaaggcactgcttagaatcccttgacgcctgaacaaggcagggacgctaaagaaaaaggaacacttggggctggggagggcccccctacaggggcttgagccaaacgcttttctctccaagaaaaaatcctccccctgctaacctggctcttggggcgctttgccggaaactg

SEQ ID NO: 139083 - DNA, 590 bp, Glycine max
  Clone ID: PAT_MRT3847_9659C.1
acaggctaaaagtgctgtttctaattccttatgggatgctaaagttgatacctttaaaagatgggattggtctgaggatgaagttttcattgcttttaggaatcagcctaacgtcatgctgtactcaatggaaaactcattacagtttggagaaaagggttgttctgaggggtttggttgtccagcatcttctctccaatggtttgataaagaagagttctagcttggttacactgtttagtaagtctgataaggtgtttctgcaaaagtacgtgagatgtttctgggacagggaacttactagcatgtggttgttgtggtttaacttatggatgctgattttggtgtaagctagccatagtattatgcttattcatctctaactagtatctcttctactcctagctaactctggatttcttctagtttgattgttatgtttcatatgcttagttcgaacgtctttagattaagtcacaattctgatcaatagcagtaatttgacattttataggtgattgatccaagacaacaaaaggttttatagttgtagaaagcctttgcaagtaatattgatgttgattctcatt

SEQ ID NO: 139084 - DNA, 354 bp, Glycine max
  Clone ID: PAT_MRT3847_965C.1
aatgaaaaatgaatgtgctttcttggttacgcatgcacgcaaatggtttttcccgttttgaactctctctcctgccggggttttttttcggaaaacgccaacccgaaaattctgtcccccctggggcccaccttatctaaagggcagaaacctcgagaccggaaatcatcggccccccccgggggaggggggacccctaaaactgaggctgtttttgcccctggggggggcctcctgtttctttttcccctggggcaaaaaacaatggggggggaggatcatttaggggcctaaaaaaggggccccccgggggcattccgtcgggggatcccccccaggggcctccaagggggg

SEQ ID NO: 139085 - DNA, 2257 bp, Glycine max
  Clone ID: PAT_MRT3847_96600C.1
atcgatataacattctcaaaatgagagtggtactaattactttattcctgtttataggtgcagcaggctcgagggatgatcgaacgatgtgtaattggtccacgttccccacgggccctggaggcgcgtggactccatgccctcttttgatagttaccaaataagtttatttttctttgtgaccctcttctcctctcttctctgcaaacaaccttcaaatttccttttgcttcttaccaaaaagaaaccttcctggaagcttctctctttgcacttccatgatttgatctccgccgtggatatgatggaacttgctcctctttccttttctgattaatattattttttatatttaactggagagagagagagagagagagagagtcatccttcttcattttttgatacctggattcgagacatgagatgaggccgatgcaactgccaccgccttccggttccggggccaaccctgcccccaccaacaacagcaaggaccgtccccagcgccgccgcaaggacctcacgctgccgctgccgcagcgggacaccaacttggcggtgccgcttcctctgcccccatcgacggcttctgctgcggcggcgcagcaggtgatccccttctcggagctggagagactgaaccgcatcgggagcgggagcggcgggacggtgtacaaggtggtccaccgcaccagcgggcgcgtgtacgcgctgaaggtgatatacggtcaccacgaggagtccgtgcggcggcagatccaccgggaaatccagatcctccgtgacgtgaacgatccgaacgtggtgaagtgccacgagatgtacgatcagaacagcgaaatccaggtgctgctggagttcatggacggagggtcactggaggggaaacacatcccgcaggagcagcagctggcagatctgtctcggcagattctgcgggggctggcgtacctacaccggcggcacatcgtccacagggacatcaagccgtcgaatctgctgataaactcgcggaagcaggtgaagatcgctgacttcggggtgggtcggattctgaatcagacgatggatccgtgcaattcatcggtggggacgatcgcctacatgagtccggagaggatcaatacggacataaacgacgggcaatacgacgcttacgcaggggacatatggagctttggggttagcatactggagttctacatgggaaggttccccttcgctgtagggaggcagggcgattgggccagtctaatgtgcgccatttgtatgtctcagcctccagaggctcctccttctgcttcacctcacttcaaggatttcatcctccgctgtttgcagcgcgatccctctcgccgctggtctgcttccaggctcctcgaacaccccttcattgctccaccgctgcccaaccataatcagactcctcccaacctccatcagctactccctcctccgccaaggcctcttccttcctagtattctccatccatgcctagctagccctgtttgctgctttcttttctttttttattttccatacataatcaaatctctataatattggattttctgccatacattacatgccctgtttgttttgccatgcttttcttatactattatcatccttttctttttcttaatgttatgttatgccaatagtctctgtgagtagtacggttaataacctgcaggtgccactggctttcttgatttaatcatcttcttatttagagctacatcacctgaaggattcctagacattttggttgctgctagatagatagatagatagatagatagatagatagatactcatctatctctctttaaatagttaatctatttgcttttctggactcgggaatatttctgttctgccctccccattttgttcaccttccttcctggatttggatgctgttgtacgcatttccaatcttattaataaatttgattctagtccctaataatcgccattagttggtttggcagaaagctggaagatggaatttacggtagtttacttgctgcatacaatgaaagggacataataatcttgttgtcttgtgacacatttggttaggctccttttgtatctttgtcggtctcatgctattggttgagtaattctgacttcccaactcttacgttcttatcccggttatgaaatttgagcatccattgttgtcgttacctttcccaatttcacctggctcttgttctctcaattctattattcatttccttc

SEQ ID NO: 139086 - DNA, 303 bp, Glycine max
  Clone ID: PAT_MRT3847_96601C.1
gggaagggcaacctaattcataacggggaacaacctcaggggggtaaatctttgcctgttctttgggggccctttaaaaaaatcaaatgaccaaaggcaaagggaacccggaatccctttttaatgacaaaaaggggagcaccggcccatattaaaattcttccactaattgcccatttaattttggacccccttaacagctaaagcttgctgaaacccccacaaggctttttgcccaccacttgctgattttgggggggggaaaacaaccctcattcttgaaaaacccttttgcataaaaag

SEQ ID NO: 139087 - DNA, 502 bp, Glycine max
  Clone ID: PAT_MRT3847_96602C.1
gtaatctttttaaaccgagatcataggttgccgcaccttaaaaccggaaacaaaagcaatcgttacttgattccaagaatctctcaataccttactacttttttgtgtacgattgcttaagggaaagaaaatcactctctgtgctggccacagacttcgtgaatcataatcttttccatatcttagtatatttgctgaacactctcctatttgatataggacttcgggtcagatttaaacttcttctgttgctttttcagtaatctgactaattccaagtgcaagctggtgaaatattggattagagctcccactctcctatgtggaataggacttcatgggtcgactcttctatatctctcccttgtttcactctcttattctcacatgatcccgattgccgctcaaagtggtattatttgaaaaacacttgggcgtcggtgcaaatgctggcttcgttaattttctctgagacaacaggttcactgagacaacaatttta

SEQ ID NO: 139088 - DNA, 604 bp, Glycine max
  unsure (1)..(604): unsure at all n locations
  Clone ID: PAT_MRT3847_96603C.1
gtgattgaagggatatgattcagtcctaaaagaaattcccaacccaaatgctagagaggttagttttagtttcttgcttatctggttttatgcattatttggtttttttatgtgatggcttctcaatagagtaataaatgaggaatacatactaatactgctgaatattatgggggtcatgaatgcattgtaatgaaactgctggtactaaatttgattttacattgttgaatacatacttctcccaatttatataattaaaatttgtattggattgaattgaatcataaatcagtctacgagtatgaacgcctttatttaacatcgctttttttttaaacaaaaaggttagctgtagcacgaatagtgcagaaaatcccagctaggctagcatagcacctcacgtactattcagcanagacaacaggtcaggaaatatcattaaactcagaataacaacaaaagacatgaggggaccgaaaccaaactcatgtaacaagctatctgaacttataggttgtgaaaccatatctagtcttggtataatctaggactaagaagtgggggatcccacctaanaagcccatcaaagtgggaggccttt

SEQ ID NO: 139089 - DNA, 136 bp, Glycine max
  Clone ID: PAT_MRT3847_96604C.1
gcagcaaaatcatagttcataaattaagagacttcaaaatgaaatttgacgggaacattatttctagcttagcaatagttacccctcaaaggcacgttaaaattcgaccataccaaacaaccccctgaacatcccc

SEQ ID NO: 139090 - DNA, 1249 bp, Glycine max
  Clone ID: PAT_MRT3847_96605C.1
cggaaccggaaatgaatagggttttgtttctactagaagaccacagaaggggggagtagaaggagaaggagaaagagaagagaataataatttttccgggaaaattcaagttccaatcggaatcggaatcggaatctgaaatgagtagtagggtttggtttctactattccttctgctgatctcgaaatgccatcaagtgtggggctcctacgcgggttccgctagctccatcgtcaacccttccaaggtcaaacagatttcctggaagccaagagctttcgtttatgaaggtttcctcacggatttggaatgcgaccacttgatctctttagccaaatcggagcttaagagatctgccgtagcggataatctctctggagagagccagctaattgatgttcgaacaagctctggaatgttcatttccaataacaagggtcctattgttgctggtatcgatgaccatatatcgtcatggacttttcttaggcgagaaaacgggcttcccttctgcagaggaacctccacgtcgcagaggtactgaaacaagcagtgatctttctgaatgtgccaagaaaggaatagcagtgaaaccacgtagaggggacgcacttcttttcttcagtcttcacacaaatgctaccccagacactagcagtctccatgctggatgccctgttatcgaaggtgagaaatggtccgcaacaaagtggattcatgtagactcgtttgataagactgtgggagctggaggtgattgttctgataatcatgtaagctgtgagagatgggcttcacttggagaatgcactaaaaatcctgagtatatgattggatcttcagacattcccggctattgtaggaaaagctgcaaggcgtgttagaaattttactgaatgctttcctagatactacaagccatctctgcctcgggtttcaaatttcaactagttcttgattttttttcccggactgtaaagtaattctgcattattataatggttccaatcagggttctactatcacaaccccacttcaagtggaagaattgagaccttctcgggggattctgcttttttctttcattgcttatacttatcttctatgtataaaacgatataacaaatacaaattaatttattattaatggatatggttattttctatgtataaaacgatataacaaatacaaattaattttttattatctcaatttcttatgaaaaaataattgcaagttctttgtgc

SEQ ID NO: 139091 - DNA, 1292 bp, Glycine max
  Clone ID: PAT_MRT3847_96606C.1
gatgtaacctggttccacataaaagcaagaaaacaaaaccaccctcccgctcggcaacctggatttggactgaatgaaaatataaagaaggagaagagagaaataattttccgggaaaattcaagttccaatcggaaccggaaatgaatagggtttggtttctactattccttctgctgatctcgaaatgcgatcatgtgtggagctcttacgcgggttccgctagctccgtcatcaacccttccaaggtcaaacagatttcctggaagccaagagctttcgtttatgaaggtttcctcacggatttggaatgcgaccacttgatctctctagcgaaatcggagcttaagagatctgccgtagcggataatctctctggagagagccagctaagtgatgttcgaacaagctctggaatgttcatttccaagaacaaggatcctattgttgctggtattgaggacaagatttcgtcatggacctttcttccaaaagaaaatggggaagatatacaagtattgagatatgagcatggccagaaatatgacccgcattatgattacttcactgataaagttaacattgctcggcgtggacatcgcatcgcgactgttctcatgtatctcactgatgtagccaaaggcggtgaaactgtcttcccttctgcagaggaacctccacgtcgcagaggtgctgaaacaagcagtgatctttctgaatgtgccaagaaaggaatagcagttgttctcttcatcttacctggcattgcatttgcgtagtgaaaccacgtagaggggacgcacttcttttcttcagtcttcacacaaatgctaccccagacactagcagtctccatgctggatgccctgttatcgaaggtgagaaatggtccccaacaaagtggattcatgtagactcgtttgataagactgtgggagctggaggtgattgttctgataatcatgtaagctgtgaaaaatgggcttcccttggagaatgccctaaaaatcctgagtatatgattggatcttcagacattcccggctattgtaggaaaagctgcaaggcgtgttagaaattttactgaatgctttcctagatactacaagccatctctgcctcgggtttcaaatttcaactagttcttgattttttttcccggactgtaaagtaattctgcattattataatggttccaatcagggttctactatcccaaccccccttcaagtggaagaattgagcccttaaaaaaaaaaaaaaaaaaaaaaaaaaaaaaaaaaaaaaaaaag

SEQ ID NO: 139092 - DNA, 329 bp, Glycine max
  Clone ID: PAT_MRT3847_96607C.1
aaacaaggggcaaaattaatttttttttaataaaatttcaaaagatttgcccgagctacaatttgtttttttttttaaggggaaataagggcccccttttaggctaatattaaaaaaatttgtcacctcaaaaaataaaaaaatcgtcaattttttgggggggaacatgactaaattcataaattttcaccttattgtaaatatttccaccattattattacaatccttttttcccaacaccattttgggttttttttttcccccacaaccaccggggggaaaaaacaccttgtcccaaaacacttccgcggtttttttgccaaacccc

SEQ ID NO: 139093 - DNA, 122 bp, Glycine max
  unsure (1)..(122): unsure at all n locations
  Clone ID: PAT_MRT3847_96608C.1
tttaaatnctaaaaacataatgctagttaaaccaattaactagagtaaaagctcacacactaaaaataggggaagatcttcatgttttagtatgatcacgatctcaataaagctaaaacaaa

SEQ ID NO: 139094 - DNA, 407 bp, Glycine max
  Clone ID: PAT_MRT3847_96609C.1
gagacccaacttgtgattcatgttctattttataaaatataattgtttgaaacattcacgattgattcaagggtagttcgtctaattttattttagtgctgaatatatatctccgtagtacattaaggactcaccactctttttagttaataaagaacaatacaacgcaaaagaggtcaatatgtatcaccagtcatacataatgcatactttattaaagatcaagacaacataaaacaggtccatatggatcaccagtcatacataatacataagttatattaaattaaattcaggtgcttcctcatagaagtcctgatcttcaggcttgagccacctctactgtttcagaacccttgtttatttctacaccgtttacacctttgtcttgattggtaccgcatggt

SEQ ID NO: 139095 - DNA, 447 bp, Glycine max
  unsure (1)..(447): unsure at all n locations
  Clone ID: PAT_MRT3847_9660C.1
gcctcgccattcatttgcctccttccacttccaccctctatctatcttccttcatgatggtccatatccatttcgtgtttcaccacaaagacttcatttttcacactcagtctcttttttttcttttcttcccaaaatttctgttttttttttttggccttttgaagcttccgaggtggcaaagatgaactaatcctgaaatatataactcaagttttacaattcaagccaacatgaatcctgtaataccatgctctattggcaatgtttcaattattcctggattcacctattcaacaaggaagaataacactttaacaagattgaacttgtcaaggagcactgtaaaacctggatcatcatcttggagatttctattaccttcatttgttgccagtggagcatttccacanaacaaaaggatactctcttttcataagaagtcta

SEQ ID NO: 139096 - DNA, 421 bp, Glycine max
  Clone ID: PAT_MRT3847_96610C.1
gcgcgcgcacgcgtgcgtcggactgcggctcgaggtgaaattggcaaagatcacattatcgtcaacctgggctttcgaagacttcaaatcagctttatcaaaagccattaggactccaccaatatctgatttcaacttaaagctagtgtttgacgagctactagaacgggcaaaggagaaggaggagaaggaagctaagaagcgtaaacgtctttcggatgatttttttcatctgctacattctaccaaggacattactgtgtctttaaagtgggaggattgtagaccacatgttgaagatagccaagagttcaggtccattggagatgagagcctttgcaaggaagtatttgaggagtacattgcacaactaaaagaagaggcaaaagagagcgagcggaaacgaaaagaggaaaagggc

SEQ ID NO: 139097 - DNA, 652 bp, Glycine max
  Clone ID: PAT_MRT3847_96611C.1
cccactcgtccgctccctctctatccgccgcagattctctaaaccactagttctctctaaccattatctaaaacatgaaacgcatagacatgttctgtgcttctcaagcctcaacagccatatgtctgagcatggaacaagcctcatgctcctcttccaacagcattctactaggaggccgaaccatggaccgccacaaccccattatcaatgactcaagaaggagcacttccaaatccctcactgctccatgttcctcttctcagtcccccatcaaccccaagccttaccatgagctccacaaggccaagaaaaactcttcttcaaaaaatgcagcaaagggtcatgataatcatcatcagaagaaaagtacagcagaaaaactcactgaacatgtcaccaacacttctaaaccagttgatggcattgttcgtaggggttggcttaaaccacctgctaatttaatcactcctcctggttcaactagatctttgctcagtgacactgccttattggatggttcgtcagattttgatccagttttggctttaactactacggttaataacaaaacttctcaagttggtcatcaagatgaagctaatcctgtttcgaaactttcaagctcttctcatccaaaatctggttcctc

SEQ ID NO: 139098 - DNA, 277 bp, Glycine max
  Clone ID: PAT_MRT3847_96612C.1
ggggccaacattaataaaaaccaacatgggggggcccgggggggttttaaaaatcccctgggtaaattttcactggactaaactggaaaaggatagtaaatttggatccatggaaaataaaaaaccaaaagttaaaaaccctttttaaagttcccagcggaaagaggatgggaaaaccctatttggggggcggaaaaaatctcccttatccaccaaaaaaacaacgggaagcaaactatcttcaaaaaagggaatttggttcctcggcgctttaggg

SEQ ID NO: 139099 - DNA, 468 bp, Glycine max
  Clone ID: PAT_MRT3847_96613C.1
ttttttttttttttttttacaaattaacatggtaaatttattaatttttgcaataattactttaaaaattatactataatttctaattaaacaatagtgcataagaattgaactcataatatttatataaatttactaagcttttatataaatttactaagcttttaaaccataacggagaagcagtttcttggcatccaacatcttcaattctcaccggagtttgactgttttgatggatgagatgtcaaattcatcaaatgataaatatatctagagaagctaatgtggctgtttatccttatgtaccttgaccctcacaaccatgctgtccattctcttatcctataataataatcgcacattccattctttcttccaataaaaggaactgaagcagagtttagagagacagtcctttccactcgttcacataatcaatcatcatactaaggtatcatactacac

SEQ ID NO: 139100 - DNA, 731 bp, Glycine max
  Clone ID: PAT_MRT3847_96614C.1
cggaatacccgtcgaccccgcgtccgccctgggtgtgaagaatgtagaaaagcaaagaggcaaaaattgagtgaggaaagaagctcatttgttcaagctccgtctccaatactatctgatgatgaagatacttggtgggtgaagaaggggctaaaatcttcagagcatctcaaagttgatcaaccacttaagccaactaaacaggttactaagactcggcagaagactgtccgtaaaacccagagtcttgctcaactggcagcttctagaattgagggtagccaaggggcatcaacaagtcatgtgtgtggcaataaggttagctgtcctcaccatagaactgctatggatggagatacaacaaggtctggtgatggaattcgatcaggtcactgtgaagatattggttcaattggaagggcacttaaacagctacgctttgttgagagaaaggaagtaacactttggctgatgactgtagttaggcagcttattgaagagagtgaaaagaatgttggtaaagttagccagtttggtaggccttttgccactgtggatgataaaagttcaatacggtggaaacttggtgaggatgaactttctgctttactttatttgatggatgtctcagacgatttagtatcagttgtcaaattcctcttatgggtgctgccaaaggtttatagtagccctaattctacaattcatagtggaaggaatgctttaatgct

SEQ ID NO: 139101 - DNA, 569 bp, Glycine max
  Clone ID: PAT_MRT3847_96615C.1
ggctcgaggtctactgctcaccgcgaatgacttgcaactgaaccagacgaaggaagcaacttctgggaacgaacaacagtacaaccacaatccagtagacctggcaccacagtgcaagcagaacacaaccgaccagcaccgcgctccagtcgcgacgagacacacgctcacaatgtccttccccacctccaacaccacaacccgcagcagctcacccacaacgacatccgaaacccccaccaccctctccaaaccccgcatcctctgcctccacggcggcggcgtcaacagcgaagtcttccgcatgcaatgccgctccctcatcaaacacctcccagccttccgcttcgtcttcgccgatgggccctggttctgcgaagccggaccgggaatcgtccccgtctatgaagactgcgggccttttcgacgctggcttcgttggttaccgcatcagcctgaaacggacgatgagtccgctactgaggagattttctatgagattgagaggtgtaagagggaagatgatgataagggtgcgacgggagagtgggtttgtattttgggattct

SEQ ID NO: 139102 - DNA, 331 bp, Glycine max
  Clone ID: PAT_MRT3847_96616C.1
ctatttctaattattggggatcataagaggcacccacccctctatctctgtttgtcactggcccatggtttgcatcgacacccgatgcagccatggataaggaagacgcagcggcggcggagcacgaatactcacttgactccacctgacttcaggaagtcaccgccatcaagaccatcgacaaggcatggctcttgaaagcccacactcacaccgcctcggttggtaattcgcctgcgatgttctgcgtacgaaaacccaacctttgggtcaacacgaggaagaaatccaccgtctgcgccaccattgtcacacaaaacgacgcctcctc

SEQ ID NO: 139103 - DNA, 458 bp, Glycine max
  unsure (1)..(458): unsure at all n locations
  Clone ID: PAT_MRT3847_96617C.1
aaagaaagtacgagtatctcgcgtctcaaattttttgtcatcaatccaattacattgttcatgatcttcgacttcaaaaactataatattaataaaattgattcatggggggggggggggnggggatcataataatttntggttatgatccactcaactcctacttcaatcataaaaatcatattaattccactaaaaattccccctcccataacttccctccaanccatannncacccaaggaaaaaaacatnaaanccaaataaaaaaatanccantgccttancgcatatacaacttcaaagtacctcnctacttttgtgaagtaaaacccataaaatgggatacctattcccattncaattggtgagggggggctttgacgtaatatctttgcacaacccgggttacaccacggacaccattacagatcttttcgggaaacatngggaaggaac

SEQ ID NO: 139104 - DNA, 793 bp, Glycine max
  Clone ID: PAT_MRT3847_96618C.1
cacaaaagcatatttgtgtttagcagtgtgactcagtgaagtgtgtgagttagttatgcctggcggtagtaggaaccctcttgttgttgggcgtgttataggggaagtaatagatccctttgaaatttctattcctttcagggtcacctatggtaatagagaagtgggcaatggttgtgagcttaaaccttcccaagttgccaaccaacccagagtgagtgttggtggagatgacctcaggaacttctacactatggtcctggtggatcctgatgctcctagcccaagtaaccctaatttcagggagtaccttcattggttggtgactgatattccagaaactacagggcctaatttcggtaacgaggttgtaagctatgaaagcccacgacccacgatggggattcatcggttggtgtttgtgttattccgtcaacagtttagacagagggtgtatgctcctggatggcgacaaaatttcaataccagagaatttgctgaactttacaaccttggattgccggttgctgctgtcttcttcaactgtcagagggaaagtggctctggtggtagaacattttgaaagctatctcttctgttaatgtaccaaaagtgcatatttagttaatgaatactactatatagcacccaaataagaaaggtaatctacatataataacactcatgggtcacatatgaatatgtaaccgaagcactcatgtgtaccgctttatgtttttatatatgtgtacttatatcaatataaatatagaatattaaacatttgactatt

SEQ ID NO: 139105 - DNA, 352 bp, Glycine max
  Clone ID: PAT_MRT3847_96619C.1
tgaagggaaaaaagagttcggtaatacattcatatatatatttttttaccaaaacgtgaaaaactacggttattattagacaaaaatgtaattaaccactgacattgggcgtggtagattcactttcccgtttctcagtcaaggacattggcgaagctggtaacttattctttgaaattccagcttgaccccaatccggtgaagctggtggtggttgaagtacgtgtacttgttcggtggaggaagtggaagaggtaacaccaccaccaccaacatcatctcctttctctagattctcagactcataattcccactttgaattttcctgagtgcttccagaacttcaaccat

SEQ ID NO: 139106 - DNA, 1178 bp, Glycine max
  unsure (1)..(1178): unsure at all n locations
  Clone ID: PAT_MRT3847_9661C.1
cctttcagcacatattcgccctttcatcacttaccctctttcacttcaattcgcaaattcacccaaagaaaaaaagatcgtgtactcgagcaatccaaccatgtctccgttcttctcacatcatccactttctcctcaacgattcttcattttcctactcatcctggctttcagaggggtgagagtctcagccacaacattcacattcgtgaacaagtgtgaccacacggtgtggccaggtattctcggaaaaccggacatcggaacaactggtttcgagctcaagagaggaagcacgcgtaccttcgacggcccgcctggttggtcgggccgcttctggggccgaaccggctgccaattcgaccaatccggccagggcacgtgcgccaccggcgactgcggctccggccaggtaacctgcaacggtgccggcgccactccgccggccaccctcgccgagttcacgctcggcgagggagccccggactactacgacgtgagcctcgtcgacggctacaacctccccatgatggtggacgcaagcggcggctccggcgcctgcgccgccacggggtgcggtgccgacctgaaccggcggtgtccggcggagttgagggtggacggcggcgacgcttgccagagcgcgtgccgcgctttcgggaagccggagttttgctgcagcggggcgtttaattcaccggcggcgtgcgccccgtcgatgtactcgcagatttttaaggctgcgtgccccaaatcttatagttatgcgtttgatgatgctacgagcacttttacgtgtactgccgcggattacactgtcacattttgtcccttttcttctccaagtttgaagtcattaatggaatcagggccaggatcatcggttgagcaggcagcagtagctactacatcatggatagccaatttggccacaggggactccacaagaagcagaagccaaccattttcagcttccaactctgcattttttgtggctgtcactttaattctttcctatttagtctcatagactttgtgctgtgtgtccctttcagaatgacatcttcctcctttaagagacacacaactcaagtaggatanacagcatcaattaactggtgtaaaaataccatcatgattaattgttggaatctatgtaaattacaagcatgtnnnnt

SEQ ID NO: 139107 - DNA, 221 bp, Glycine max
  Clone ID: PAT_MRT3847_96620C.1
ggcctgaagattcaaagctttataaatcagctaaaattcatgaagtggtaagtctttttttttccctgatcagtttaactttaatctgaacaaatgctactgtgctatatatctactgtttctcttgtattgctcattttaagagtatgtgctttcttctctatcttatgcttaggaacatgcctaggaaaatataaaatgttgactgactctttctgtat

SEQ ID NO: 139108 - DNA, 125 bp, Glycine max
  Clone ID: PAT_MRT3847_96621C.1
tgggatgggggttaaggagcacacgtgtaagagcacacaggacagtgctgcatagcatagtgcatcttcatccatcagcatgacataaaaactggaaaaaaatccgacccgtgtagaaagccaat

SEQ ID NO: 139109 - DNA, 353 bp, Glycine max
  unsure (1)..(353): unsure at all n locations
  Clone ID: PAT_MRT3847_96622C.1
ngnangngtacgtnagctcggaattcggctcgagcctgagtttaccagcctgttcattgaaagctcttactctgtgcacaaatattaaagtcaccaaaaaagtgaactgttaatcattcttattttttaaactccattagattgactggtatcattagctctgctgcaagggcacatttttcaattcaatctggtgatatatttgctaagtctacagaaatcatgctgtcataaactcaagctggctcttctgtctttgtgtgaatgactgggatgctgccacaaattttcccaaagtcacagttatgagagaaacattgtttgagagcgttcctgtcatctacactatgtgt

SEQ ID NO: 139110 - DNA, 278 bp, Glycine max
  unsure (1)..(278): unsure at all n locations
  Clone ID: PAT_MRT3847_96623C.1
tnnaaccatatcctattggcctgcaatagcggaacccttaaaatccaaaccacatgaccctcnnnntactaaataagaaaaaacacaagaaccactaaaaataaccgaacccaagttccaaaaaatagcgcaccaattgcggtaattaaaaaggatagnngagggtaaaaaaaggagagaacctaatcgacggtctggataatatcctcaggagcgaacttggaacccttttccttgtcggcgggggggcgacccttggccttccgatcgagcaagga

SEQ ID NO: 139111 - DNA, 552 bp, Glycine max
  unsure (1)..(552): unsure at all n locations
  Clone ID: PAT_MRT3847_96624C.1
gtcaaaaccaaaacatgctattagtatatcatatcattacctaatacagagattttattacaaaatatgatattttaaataaagagaaacactaacaagctaagctaatatgcaagccaaacgttacaacaaaaaagtcctactggttttgtatccaccagaacaacaaccatggatccaacaatgtccattacacgcaatccatgttaaattgttcattattcgtactcaaaatgccacttaacgccatgatgcttcttcatcttacgcgctcgctcatcagcgcgctcttgcaacctcctaatcctcggcgccaacccacacacgaaatcctgcgcccgcttcccctcagccatcaatccttcaagcttctccaatctccaccgttcaacgagaaactccaagatgtctgcgtagtcgttggcggtgtacacgcctatgcgctgcgccacagcggagtagtgctcgaatagcctggggtcatccccatcgtacataaggtgcgccggcatcgngatcttcttctccatcatgttccctatggccaccatt

SEQ ID NO: 139112 - DNA, 1741 bp, Glycine max
  Clone ID: PAT_MRT3847_96625C.1
atcgggccaaatttccacataaattcgcataaacttcaaccatccaacaactaatttggtaaatattactacataacttaaatacccaacatggcatttccgtaaattatcaacaaaccaagggctaatcactagtcacaccctttacaaatatctccaacctctccacagttccactcaaacaacactagtcaagtacaatagacacgtaatcaaaaccatgcagatacgaacctgccactccatcaccacccaaacccttccacaacttccgtgttcttctagaaaagcccaccaccgccaccttcttccgccgttaaacgctgcggtttccgcggcgccgttcaaagcccggaaggcccactcaatgcctccagaaaagaaagaaattttcaagtccttggagggatgggcctcggagtgggtcctaccgctgctgaagcccgtggagcaatgctggcagccacaaaacttcctccctgacccctcccttccgcatgaagagttcagccatcaggtgaaggagcttcgcgaacgcactaaagagttacctgatgagtactttgtggtgctggtgggtgatatggtcaccgaggacgcgcttcccacttaccagaccatgatcaacaaccttgatggagtgaaagatgacagcggcacgagcccgagcccgtgggccgtgtggacccgggcctggaccgccgaggaaaacagacacggggatctgctcagaacttatttgtatctctctgggagggttgacatggctaaggtcgaaaagaccgtacattacctcatttcagctggcatggaccctgggacagacaacaacccatatttggggtttgtgtacacgtcattccaagagcgagcaacatttgtggcgcacgggaacacggctcggctcgcgaaggagggcggggatccagtgctggcgcgcctatgcgggaccatcgcagcggacgagaagcggcacgagaacgcgtactcaagaatcgtggagaagcttctggaagtggaccccaccggggcaatggtggccatagggaacatgatggagaagaagatcacgatgccggcgcaccttatgtacgatggggatgaccccaggctattcgagcactactccgctgtggcgcagcgcataggcgtgtacaccgccaacgactacgcagacatcttggagtttctcgttgaacggtggagattggagaagcttgaaggattgatggctgaggggaagcgggcgcaggatttcgtgtgtgggttggcgccgaggattaggaggttgcaagagcgcgctgatgagcgagcgcgtaagatgaagaagcatcatggcgttaagttcagttggattttcaataaagaattgcttttgtgaaatttcagttaagacttaagagataagagatagaggtcaacgtgagtcaacaggtttttggctttgtgactattttgagtttttgtttgtaggtggcattttgagtacgaataatgaacaatttaacatggattgcgtgtaatggacattgttggatccatggttgttgttctggtggatacaaaaccagtaggacttttttgttgtaacgtttggcttgcatattagcttagcttgttagtgtttctctttatttaaaatatcatattttgtaataaaatctctgtattaggtaatgatatgatatactaatagcatgttttggttttgacaattaaaaaaaaaaaaaaaaaaaattaa

SEQ ID NO: 139113 - DNA, 420 bp, Glycine max
  unsure (1)..(420): unsure at all n locations
  Clone ID: PAT_MRT3847_96626C.1
ttactcacacttaaatcacactattattccatttacaccccatacttaattgatttctacttcgaagaaggacacctatccaaacgtttttttttgtctcgggaagagatagatcacaatgataaaccttattctgtgggcgtggagaaaacaccacgaggacccacagggctgtgctttgatgaagtgaaaaccaagcacaccactatcatagcagcttcaaccaactaaaaagccttgtctctatcttaaatatgaatgagcaccactctcctttaactggtacattacctcctctgacttggaggactgccagaaagatccactttaatctttactaagatacctttcttcacacgggccggtccttnatgatgatcactcttaccatgctgcaatgaaaccaccacaggttgagga

SEQ ID NO: 139114 - DNA, 862 bp, Glycine max
  Clone ID: PAT_MRT3847_96627C.1
cgacgccgccctcatagaaaagaaattaattgtattgatactgtatttgagaagatgaagaatcttcgaattcttatcgttcgtaacacaagcttttcacatgagcctcgttatctcccaaaaaacttaaggctacttgattggaagaactacccttcaaagtctttgccatcagaatttaatcccactaaaatcagtgccttcaatggaagtcctcaactcttactggaaaagccatttcagtttgaccatttgacttacatgaatatctccggttgtgataaggtttctgaatttcctgatgtgtctagagccatgaatttaagaaaattgatacttgatggatgcgagaacctggttagcattcataaatcagttggacatctcgctaaccttgtttctcttagtgcttcaaattgcacacaactccatagttttgtgccaacaatctatttgccatctcttgaatccctttcctttgttctttgcacaacactcgcacactttccagatatcgaaggaaagatggataagccattagagattgttatgtcatatacagctattcagaagcttccagattccatcaaggaacttaatggccttacctatcttgagatgacaggttgtgaggaactccgatatttaccaagtagcttatttaagttgccaaatttggtcacattaaaacttgcagaatgtgctttccttccaaggtcattgagaatgtttataggaagtccttcaacgtgcgcaaaactagagacattacatttcgacaatactgggctgacagactatgatcttaagactattgttgccatttttcctaacttgaaagacttgaatgtatcgcggaaca

SEQ ID NO: 139115 - DNA, 156 bp, Glycine max
  Clone ID: PAT_MRT3847_96628C.1
tgggaccgaccgatgacaccgtatctagccatagaaggctactacgagctctgttgcgcctaccgtctccaacgtgtacccgcccaggctcaaccactactaccacgcggatggttctgaagacctctccattggcgctcataccgacaacgataa

SEQ ID NO: 139116 - DNA, 580 bp, Glycine max
  unsure (1)..(580): unsure at all n locations
  Clone ID: PAT_MRT3847_96629C.1
atttttgttgatgagaaaaattctaactcaatccattttttctcatttttttccctcaaccattaagtcaattttataattataattcctatttttttcaatgttacgctaattttctttcccccttttttttttttttaatttatagatgctataaatcatggaagagcaataaggggtcacaaaatccgtagaagctccccaatcaaatctttaaagaaactgaaaataaaatctttaagacatttaaacaagtacacaccatttgattcatttgggtactcagactttgattcatatgggtactcaaactttgatgattcatatggctctccctcttccctacccttaccacctttcaattcactagcaccacatccacaacctacaccatcaagttccattgctcctccaaatttggcacctccaagcataggtggcaactcctctctcccagcactctcaccagttccaagctcacctcatggtgctgtctttgggccaccaaacccaagaagcatgccaccacctncttatcccttaagcccaccaaagcatgctccaagcctaagcccaccaa

SEQ ID NO: 139117 - DNA, 391 bp, Glycine max
  Clone ID: PAT_MRT3847_9662C.1
tcccgggtccaggagcgtccatgctcactaggtcgcggtcgcccttttttttatttaattttttttttgtcgtttttagtttatgatttttttctttcttattgctgagtgtgtcaataccagggtcgcctcataacggatgtattaccctaccgcagatctatcaacccttttggataccctaagagtgggctattacaacatcctttccgaatcttacgtttttgtctttttcacaggtcttgatgctcgtatattcgactatgacagtggcaactgttggttcaactcccagtgctgtcacttctgaatctgttacatgatagtgaggcccttgcgacactgtatgcttgcagtgaatatttgagtggattctggatccagattccac

SEQ ID NO: 139118 - DNA, 266 bp, Glycine max
  Clone ID: PAT_MRT3847_96630C.1
ctctctctctctcacctttgttatacgtcttctccttttcagttctcagaggtcacgaccaccactacacaccgcaccataatcttggaaattagcgtctgaaagagttcaaaggacttccgtagatttaaattaaatatgaatatttatttcttctccttgtcactttcaagattatgaagaggaagttcacacagctacgggagtctatggggtttcaaacatcgcatagcactaaacggataccacagccaattttcagagca

SEQ ID NO: 139119 - DNA, 545 bp, Glycine max
  Clone ID: PAT_MRT3847_96631C.1
aaaaaaataagatatttatatatattttgatttaaaagtaaagtaaaaaatgggtaatcaaaatgaacaacatttgattgctctaaatctatgtattttaacaaaaacaaatgacttgcataccccaacactggaatgcttgatatgaaaaatttccaggggcacctaacagttctgcagtgttatggatactacaaaacttgaatactacactacgtgaaaacactgactaatcaagttcttgatcttagtcttcactatcctctggatgctctccatcttgatcttcttcatcttcttcaccctgcatctcataatcactttttcctttgccaccagcttttccatattcattgaaaaaaacttcacccgaacacagtcccttctcaattctaactagttgaagagtcattctgggtccaccctcatgcagtttgacagcactttttgtagaagcacgattaactctaccaatgtcactggacaaagtaactgtggctgcttcttcttcagcttcactttttggacccatagccgcccttaca

SEQ ID NO: 139120 - DNA, 158 bp, Glycine max
  Clone ID: PAT_MRT3847_96632C.1
cccacgcgtccgagaaggcctgggcttagtttataagcataactgggtgaggaataaatagaagatttataaagatggcgtcgagctcataccttccgtcttggagggcggtggcgatcacttacataaccctctctttcttattgacggatctagtc

SEQ ID NO: 139121 - DNA, 440 bp, Glycine max
  Clone ID: PAT_MRT3847_96633C.1
tagcacacatcaccgaatgggatggtttcaatcccttctctgccctttgaagaagctctgggatcgccttcattcaagccacaaaaagcggagaggaatatacattctctataaggatgtgaagtcttgcccttgcgaagatgtgcatgtcctctggtcaatattggttgagtcaggcgctgcccctgcttctttgccatcaaaatgattatgaatctaatttaccttacagcaagtacagagagaaaaatattgatgtagtttcatttcaagtacataatataaatgtacaacattttgaatatgctcgattttctcctgcttttctacatgtatttctaattttctatagattcttatttgaaagtggtttcggacctttacgtggccgaacgagttgtaaattgctcgtcgccttttttttttttttttcataattg

SEQ ID NO: 139122 - DNA, 767 bp, Glycine max
  unsure (1)..(767): unsure at all n locations
  Clone ID: PAT_MRT3847_96634C.1
aaatcctaagtggaccgagtgggtggtgagagcaagagcgagagcgagggtaattgactcttggagtataataagattgtcttgtgttttcttggatcagattcagttcagataatatggttatcccacccccagtgaggcctcccaggattacacaatttctcaaaccttatgttctgaagatgcattttaccaataagtatgtgagtgcccaggtgattcacaccccaactgctacagtagcctcttctgcaagctcacaggagaaagccttgagatcaagcttggaaactagtcgcgatgtcgctgcagctgcaaagattgggaagatactagcagaacgccttttgcttaaggacattcctgcagtttctgttcacttgaagagagaacagaagtatcatggtaaggttaaagcggttattgattctatcagggaagctggtgttaagctgctttgagcatgattgtttgtggatgtttaattgtaccttagagagaacaaccttgttggatcttgtcttcatttttatttttaagttgccatcataactgggagctcattactttactagaaataagatgagtgttgatggttgcttannaaaaaaaaaaaaaaaaaaaaaaaaaaaaaaaaaaaaacccccaataaaaataaaaatatagaaaaattaaaaaaagaataattttaaactaaaaaaaaaaaaaaaggggcccttaaaccccaatttttttttcctttaaggggggtttattggccccttggg

SEQ ID NO: 139123 - DNA, 1039 bp, Glycine max
  unsure (1)..(1039): unsure at all n locations
  Clone ID: PAT_MRT3847_96635C.1
ggctgcgagaagacgacagaagggggagagggattggagttgggaagaatagaatacgccttggatcttattcagctcaactcaggtatgtatgtttcctcccttcaccttctctttctgcctccttccatttcttatacttatcattcttccttccttaatccgttaagtcaagcaatttgcctttcaactgtttgatcaaagttgccaatgaaacaaatagcttttttttcatctttgcccaataattctaacttaactcatctttcactttttgggttttttaatatacaattagatactcggtcattttgcatttttacatcattttgaatgttgaaatttatatttagttgatattttgaattttgcatttactaaacatgaaatgaacttacattttgtagattcattgaaatgcttcgctgagagttgataatttcttgagttttatgtgatatgccaaaactgacacaaaaaaagtgttctttttttaattatattgtaaaacagatatggttatcccaccccctgtaaggcctcccaggattacacaatttctcaaaccttatgttctgaagatgaattttaccaataagtatgttgagtgcccaggtgattcacagcccaactgctactgtagcctcttctgcaagctcgcaggagaaagcgttgagatcaaacttggaaactagccgcgatgtgggctgcagctgcaaagattgggaagatactagcagaacgccttttgcttaagaacattcctgctgtttctgttcacttgaagagagagcagaagtatcatggtaaggttaaagcggttattgattctctcagggaagctggtgttaagctgctttgagcatgattgtttaattgtaccttagagagaacatctttgttggatcttattttttaggttttcatcattacagcaagttactgattgatcatatttctcaaagaccttagttaattacgttactagaaataagatgagtgttgatgccnnnnttggaaaatattngggggtgtaaaa

SEQ ID NO: 139124 - DNA, 250 bp, Glycine max
  unsure (1)..(250): unsure at all n locations
  Clone ID: PAT_MRT3847_96636C.1
ttcattctctttgcgcagttccctcacctctcctttcaagatgcagatcttcgtcaagaccctcancggaaagaccatcanccttgnggtgganagctctgacaccatcgataangtcnaggccaagatccaggactnganggaattcccccggatcagcaangtctcatcttcgccggaaagcagctcgnggacggcngtaccctcgcngactacaacatccagaaggagtcaaccttcacnttgtctt

SEQ ID NO: 139125 - DNA, 562 bp, Glycine max
  Clone ID: PAT_MRT3847_96637C.1
ttcagttagatatatggttttgaatttttaataaccgatacaatcaagagtcctgcaaactcttcatcttgctttaccatgttttcttgtttccccttgttgcaatatgttcctttcatgattattcttaataaattagatccaagattgatttgtgaactgatgaatctttaatctttaatatattggagaaagtgagacatgccttcaaaatttatttccatttttttgaggtgtgttattgttcttgcctttgtgtttttaatttctggttgcatttagcagtataatttctctatgtatgcttccaaccaaacttgaggatttctttatggtcatcaaagtttaaaacaagtgcaatttttaataagtgagcatgttcgtattgtgtcctcacattctgttcttccgttaatttgaccatggggaatatattgagttggagaattggtaagttatctatgaagtagattattattattcttggagcagttgaatgtttagttcactcttgttcccctcgtttagatcttaattaggaatgctatcaatcacctgagct

SEQ ID NO: 139126 - DNA, 244 bp, Glycine max
  Clone ID: PAT_MRT3847_96638C.1
gttcgacccacgccacccgcccaccaatttatacatagctatgggcactttcattctcgacgtctagtacgcctgcgaggaaggccctgtctacctggaccttgatctgtctcacggctctggtacggacgctgctgcaagtcaaagtctgcatccatagtacagctgcaaaaccgttgacatggttaggcatgcgcacggagctgataatgtaacacgagacaaataccatgacgcatgcaat

SEQ ID NO: 139127 - DNA, 295 bp, Glycine max
  Clone ID: PAT_MRT3847_96639C.1
cccacgcgtccgtatatatcctgcgtttaaattgccatataaaatggtatagtttactacattcatctatgattctaagactaaactcgtgacaaaaaaaaagactcaaatgtctatttttttttccttttcgaaatgtgcacttgggatatcatcatgatgaggtggaagatgagtcccaatttatatggcaatttaaacgcaggataaatattttatatatatttttttcttgttggtgatcttcttgaatggtatttgggctcgtaccacaatgccagatactttattcaat

SEQ ID NO: 139128 - DNA, 819 bp, Glycine max
  Clone ID: PAT_MRT3847_9663C.1
ggctcctgcgctggctagcagcttctgtagttaatttgcttcccttttttcacactcactctcactaaatggcttcctctgttgctttagttttgggtctatgtctagcactcaacatggttctgccgacacgtgcagctacccacacagtgggagacacctcaggttgggcactcggtgctgattacagtacatgggccagtggcttgaaattgaaagtcggagatagtcttgttttcaattatggggctggtcacacagtggacgaagtgaaagaaagtgattacaagagctgcaccacaggcaattcactaagcacagacagcagtggcaccaccacaatcaccctcaagactgccggcactcactacttcatatgtgcttctcctggccattgtgatggtggtatgaagcttgctgttaaagtaaaggctaaaaaagcatctgctcctgctacagcaccttcaccagctgcaaaggactcaccttctgattctgatgacaccaaagacacacccacttccacctccactaaccctaaaacttcaacctccaccaccccttcaactgaaacctccaccactaccacatcttcttatacatcatctgcaactgctgctggctccccaattgttgctatgttttttgcttctttgatcccatactttgtgttgcgtttgatgtgaatttgaggggagatgttatggagtcaggacagaggcagtgctttcggggtttccttgcctttcaatttgtttactctgttttcttcttttgatccaattgaccaattcagattttgctatgactatgagtgat

SEQ ID NO: 139129 - DNA, 556 bp, Glycine max
  Clone ID: PAT_MRT3847_96640C.1
ctcaaactccaacaaactacaactaccacttccaaacctccaaccaaccaccaacaatcaacatgtctgactctatgcgcaagggcctcggcgagcaagcctctgagaagatcacccccgactctcagaagtccaccaccgagaaggccagcgagagcctcaccggagctggtgaccggattgccggcgccgtccagcctgagggccagaagtccaccggacagaagctcggcgacgcaacccgctccggcggcgatgagggccagggcgtcatgaagcaagcccaggacgctctcggcaacgctggccagagcatctccgacaccctctccggcgccactggccagaagaagtaaagcactctcttctcgtttgcctggtagccacgatgccctcttcctcctctctattgtatggcatgaggacctgagaatggaccaacatggtattgcgatggatggaacgaaacataccctttcggcgtgaaagccgcgtatctatataccctaccaatgaatgaaataatgacttgaaaaaaacaataagaactaatagt

SEQ ID NO: 139130 - DNA, 420 bp, Glycine max
  Clone ID: PAT_MRT3847_96641C.1
ggctcgcgctccagccgctgaattttctacgcgatttttgttgacgacaaagagtcgaatgctattgggactaatctttggcaggaggagtccattctgcgtggagtggttcgacactaaacaacccattattgtttgcaacgcgaattttgtcagcattgcggccatgacaagtgaacaattgactgagcttgctatggggacttgctaatagcaacaaaaactatttgtggtacatatggacagatcttgtggctgtcgaaaatgctgttctacctccagagcttgtgacacaaaccgaaaatagaggattattgcatagggggcgcttctcatatcaagggccggctatccctccagaggggggatttttgacacaccgtcggctggaattcaaacgcttgcaagtcatgtcttgga

SEQ ID NO: 139131 - DNA, 197 bp, Glycine max
  Clone ID: PAT_MRT3847_96642C.1
cgccaccagcaccttctgcctccgccatcgacacctacgacttcctcaagatcaaactcaaccctgacggcaattccctaacccgaaactaggtcattccaacagttcccccttcggccaccacccgctcttccgaaccagctctctcaaaagatatccctcgcaacccaaccaccaacacctccctccgcctcttc

SEQ ID NO: 139132 - DNA, 1011 bp, Glycine max
  Clone ID: PAT_MRT3847_96643C.1
ccctcgcgtccgcccacgcgtccgcggctatcttatgcttaaaattgacttcgagaaaacatatgataaagtggattgggaatttcttcgggtaactttatgtgaatttggcttcccttatactattattgccttggtcctgaattgtattacgtctacattgctggctttgaggtggaataatgagattatagaaggtttcaatctaagcagtgggctttgtcacagagatcccttatctccttatctttttgttctatgcatggagaagttggcccttcttatccaacaggaagttgagaataactcttggagtccagtgagaatgacccttcttacaaagaatggccctagcatattgcatttatttttgtcgatgactcgcagatttatttgtggtatatcttggagttccacaactatagtcattggagcccacatgcttatttatttgagttttatcctaacttatatgatgctcaatttttttatttttgtctgatgtaggacttcaattcatacttataatccaacatcagacaccttatttgtgaatctgattcaacttgtgatttgacacttataaaaactggcacaattagttctcatgtgcattatcctttggtgaataagattaggagtttcctggatcttgattggcgcatccacttctagcatacatacagggaggggaataacattgcagactatcttgcaaagacaggagctggtcaagtctcgcagcttgtaatcttggaatcctgtcctgctgttcttaagcctaagttattagcagatgctttaggcacttactttgttagttagacacagctagtttttttttttagctctttttctgctttttgtccttttcgctatctgctgcataaaaaaaattaaggtgccatactggggtccactttatctgttaaatagaaaaaacaaataataagaatgtgcagaaagaaaagtatgagaaatagaaatatagtagcacaatattttgttttg

SEQ ID NO: 139133 - DNA, 133 bp, Glycine max
  Clone ID: PAT_MRT3847_96644C.1
tctgcctacgtcgcgtaaaggtggcgattctctggtgtgcatgcttacacttggtatagtctttgtttgcttaatgaaaactaaacaaatctggtctctatattagctagtgatctaaaaaacaaataagggg

SEQ ID NO: 139134 - DNA, 616 bp, Glycine max
  Clone ID: PAT_MRT3847_96645C.1
ccgcgcacgtaagctccgttttgggctcaaggcccccaacgactggctctgtattctctctgctgcttcgattcattcacacaaccatgactagccttactaatggcgatgctggctccctcaacaaggtccccacgcatcaagtacaccacgctcttcattaacggattcggtgattactctctgacaggaaagacagaggagacaatatatccaacaacaggagatgctctaccgaggataagcgagggagataaacaacacattgacattgctgtgaaagcagcacgtcatgcatggacacaacggcccatggcctccccttcccggctctgacagagcaagaatattgctgaaatgggcagaaataatagatgaaaacgcataagaacttgcagcactagatgcgattgatgcggagaagctgtaccatatgtgtaggaatgtggaagttccagcaacggcaaacactcttcggaactatgctggggcagcccaaaagatccatggagaggtgttgaaaatgtctcgagagttgcatgcctatacatgacgtgaaccacttggtggtgtgggacacattactacctggaatctccccagtaccatgctctac

SEQ ID NO: 139135 - DNA, 404 bp, Glycine max
  Clone ID: PAT_MRT3847_96646C.1
aactacggttcaatagctgagatctacacctatatctacctgacaccaagatttctcaaatagaggcatggcataaatactgtcattacaccaatcctcacattttcttgagcaatcatctggataaaactctctctcattaccaggataagcccaacacttgatttgatagctttctcccctctgatttgtcctccatcatctcccctactactttcgtacttacgtaccgatctattaaggatctctatctctatctaccctatcggcccaccaatatctatcaaagtataattagctttcaattggaaaaaccgacttggaacaagtgttacatgcttttcgctagaaatcttaaccttatattgggttacactacttattattgggaatggacaacccta

SEQ ID NO: 139136 - DNA, 174 bp, Glycine max
  Clone ID: PAT_MRT3847_96647C.1
caaaccagcaaaaacctgttttcatataatggcctcaacaactctaacaacggtgaccctccgtacgctatcggatcctacacccttctcttcttaccctacgcacctttccgccaaacccttctccctccaattccccaatctttcccaccgcgccgccaccactcgctcgcc

SEQ ID NO: 139137 - DNA, 642 bp, Glycine max
  Clone ID: PAT_MRT3847_96648C.1
caaactacacactatagcacgtccctaatgccctattgtctatggatcccaacacactccttgccactcattctggtgcttcctcttctttcttacttaacattaactaatacaagtcggccatcacctgacctctagactcccatcatcacctccaaagccaacacaagaccacgagccaccagatacaaaccaactcttgaaaatctacagacctacgccaacgaatacaaaacaaccaccacccactcctgatgacaaagcagacaaaataacacctacactagcaacatcataagctgatggcatctccatcttatactcctaagacaagaccaacaactagccatcatctcctaaaccacagacaacatgcccagactccacctatgcaaggcgaactagccaaacgccagacctcccaagttcatcacgttcgcctgcttagactcacaggtgtgcctcccccatgtactcaataaagctacatgagagggctgacatgtcagaactggtgataacatactgccgacaatatcaccatccaacgaacgctgtacctggggcaagggttgagcatgactggaagcatcactatgcctatgagactgaggtaatggcacacagctcttaataaactat

SEQ ID NO: 139138 - DNA, 269 bp, Glycine max
  Clone ID: PAT_MRT3847_96649C.1
ctgtgaccatggtctagggattgcaaactggggtgagcctacctctatatgtagttctgaggatgaattaagtgggagctataggttcaaagatgttaaacaaaaagcaatggaagaagtaatgaatgggaaattcaaggcacttgttggtcgcttcttaaatctgtgggagtttcctcttctgatgaaggtgataggagttgggtggacaagttacatctttatcatgggaagctgcttcttttttgaagcctggtgcaattggaggt

SEQ ID NO: 139139 - DNA, 359 bp, Glycine max
  Clone ID: PAT_MRT3847_96650C.1
gtacctacccgtcactattttcctgatcgacccactttcctgcgcactcggccgacacctctgacagggcgaactctatacaaacctggggttgtatacacccacttttcaaccaacaatggcaatggcaacccaagcctttctcttcaccccacccctcttcggtctcaaacccagagaccgatccacctctccatggaaacaatccttcaccctctccttctccacctttaagcccctcaaggtctcgtgaacaatcatagcagcatccaccgaccagaccacatatgcaccggttgggttcaccccaccggaactggacccaaacaccccttccccgatccttcgaggcagcaccg

SEQ ID NO: 139140 - DNA, 567 bp, Glycine max
  Clone ID: PAT_MRT3847_96651C.1
atccggggttgacaactaaatctagatgtcatccaatatggaacacgaatctgtttagtccccgtttttctggggtttgatcttccttgtatggtttgtgcactaggaaaatttgatggacattcatttcgtatttattatggaatattaacataattgacttaaaaaaaaaaaaaaaaaaaaaacaaaaaaaaaaaaaaaaaaaaaaaaaaaaaaaaaaaaaaaaaaaaaaaaaaaaaaaaattaaaaaaaaaaaaatgaaaaatgaaatggaagaaaatataaaaaaaaaaaaaaaaaagggggggggcctcttaaaagaacccaattttcccccccggggttggaaacaaaaattttttttttttgggcccccaaaattaaatccctgggccggtttttaacaacttgggggggggaaaaccccggggttcccccaataaaatgccttggaaaaaaacccctttttcccagggggggtaaaaaaaaaaaaacgccccccccaaattcccctttttccaaaatttttgccaaccttttatatggggacaaaaggggccccccccc

SEQ ID NO: 139141 - DNA, 952 bp, Glycine max
  unsure (1)..(952): unsure at all n locations
  Clone ID: PAT_MRT3847_96652C.1
cgagttttttttttttttttttgaagcaataagttgaaatatgttattggaaatatcagaaactgaattctttgatcgaattgtatccatgccaacaacatgaaatgaaaatagaaatatgttgtacattgaaataaactaaagtggtaatgcatattgttgtgctgcgtatgttaatcatcttccatcaccgaagtctattaattcaatatctctcaagctgtcatatccagtattttgttggccactactatcaccattttcatgagtgctatatgccccatgaagcaagtactgagtctcctcaaaattttggcctgcattggtccttggttgtttctccattagtcgtattccttccaactccattgccacttccttcataccaggcctttcctcccctctaagtctcaagcacttggccgcaagaatagcaacttccatgatctcctgtttattttcttcatcataaataccaatttgaagaacatcaaacaagcgatcctctttcaagcaacatagaaagtgaactgtaagacttcgtttatcttctggcttgtcaaaagagaaaggtttctcccctgttagcagttccacaagcaccaccccaaagctataaacatcacttttttcagtcaattggcttgtttgcatgtactctgggtctaaatacccgatggttccttgcactattgtggctaattcagtttgatcaagtggaatcaatcttgaagcaccaaaatcagaaactttggcagtgcaagcatcatccaagaggatgttagcagtcttgacatctctatggatgatgggtatggaggcctctgagtgtagatatgacagagctccagctgcctctgttgcgatccttagacgtgttttccaacacacatcgcctaattggccttcattatgcaaataataaaaaaggtaccgttgctncaaattcata

SEQ ID NO: 139142 - DNA, 3815 bp, Glycine max
  Clone ID: PAT_MRT3847_96653C.1
tccgaatccaatcgaaaccaatccaataatgttttccagcttcagctcctcgtgcctgccgctgcagttaatccccgtctcccgcctgagatcctccgttgtcaagaagctgccggaacccttgcgccgctccattgccgattgcctctcctcgcccctctctccctccaatgaaccttctagaacacttcaggtctctctctcgcttcgtgattcgtgtttcgcactggatgattatctgaaagcccctgcaaccacagacttggcttataatgcaattctggaacatactattgcagagagggagcgcagtcctgcggtagtctcaaggtgtgtggcacttttgaagcggtatctcctaagatacaaaccaagtgaggaaacattagttcagatagatcgtttttgttcaaccataattgctgaatgtgatattaacccaactcagccgtggtcacgagctttgaatcgacaatctggtgcatcaaccacatccacaaatacatctcctttacctgtatctacctttgcctctgagtcccttgtaaagtcattaagttatgtgcgttccctagtggctcaacacattccaaaacggctttttcaaccagcttcatttgctggaccaccttcatcaggacagtcactaccaacattgtcatctttgctgagtaaatccttcaattcccaactaactcctgcaagtattccagaaacacaaagttctgcaagtgttccagaaacactagagaaggattcaagtgctctatctgtttcaaggttatcaaaaattgaaaaagctgatgaaacggaagaactagggttcattgctcatgatgttctaaaatggcgctggcttgaggaaccacagtcatcatctatagggactgaaaatgatcgagctgtgaattctcaagacatgacagcacatagtttcttagaaataggtgctgcagctctacttgtaggagatatagaatctaagatgaaggggcaaccatggaaattttttggaaccgatgatatgccttacctggatcagctattgcagtcttcgcctgtaacaccaataactaattctgactctgctcgcccccatttgagagcaataacagcatctaaacgcacaaaaccgggctctcgtcagatttgtgagcaacaacctctgcgattgaaccctgctgaggtacaagatgttattgctgcagtttgctcagaggcttattccccaaataccaatgttactacagcatcaactagactaagtaataacagtggaaaaccatcaacggatgtggctgtgagcgtccttattaaactaattattgacatgtatgttttagattctcggacagctgctcctctcattctttctatgcttgaggatatgcttagttcttctaaaacagcatgcagggttcgtgcttttgatttaattctaaaccttgcggttcatgcacatctcctagaaccgatagttgctgatgatgcttccactattgaagaagaatattctcaagaatcctattatgacagtgacactcaagttatggtgcaaggaagcagaaaaggaagttctcagaacaaatcagacacaggctctgcaattgataagtttgagtcttggattttaaatattctgtatgagatactacttcttcttgttcaggaaaaggatgaatctgtttgggcatctgctctcagctgtttgctgtatttcgtctgtgatagaggaaagatcaagagaaaccgtttgcatggtcttgacataaggccattcattcactactttgttataaattgttaatgttctatgtcattaattatgatataactgtctaatttagttacttccaatctgcccataggttctgaaggcacttgtaagtctgtatctggcaaacccaagtttcttgtgaatcaacttgatctgattggaggagttcaatttatttttattgaggtgtgcatatctttattacagtattcccttgcaaactcaagagaagagaggaaaaatctgtattcggtgctttttgattacattctgcatcaaataaatgaaacatgcatagctactggtgtcaatgattatagtgatgatgagatccaacctcttgctgctcttcttgctcaaacaaatgcacctgaggcattttatatttctgttaaacttggggtagaaggtattggagagattctgagaagatcaattgcatcagcactgtccagatatcccaacagtgaacgactaaatatgctactggaagttgtagcagagaaatttgatgctgtaataagtacgtttactcatttggacaaagagttctctcatatgaatcagataaccaaatctctcaagtttctggaaaatatggaaggtgtggttatgagaaatggcattggtttgcaggcaaagcactcctgggctactttacattctcttcttcattctgaaagaatttcttaccgtcaaaatgggtatatctggttaggtgatctgcttattgctcaaattaatggagaaagagatggaaatatatggtcaagtatcacatacttccagaagaaaattgctcaagctggaactcaagattcttcaaatacatcagatgttcctttgcctattttacttatgtgtggccttctaaaatcaaaatacaactacattagatggggatttttgtttgttcttgaaaggcttctcatgagatgcaaatttttgttagatgagcatgaaatgcaacaaacaagcaacagagatctgggtcatggaaagaaagattggcatcttgagaaagccaatgcaattattgacataatgagtggagctttgtctttggtgtttcagataaatgaaacagatcgcatcaatattctaaaaatgtgcgacatactattctctcaattgtgccttagagttcctcctgctgcatctctgccctttggagatgatggtgataatcatgccaaacaagatacttttcactgggatggacacaaggaagaagcaaatagaagatccggctaccataataactaccacctggatcacgagactgcatcaatggcagcacttttccaaggacgagccgttgtcccaatgcaattaattgcacgcgtccctgctgccatactatattggccactaattcaattggctggagcagcaacagatgatattgctttgggtgttgctgttggaagtaaaggaagaggaaacctgcctggtgctacatctgatattcgggccacacttcttctactacttattggtaaatgcacagtagatcctgttgccttccgggaggttggtcaggaacaattttttagggaacttttggatgacacagattcaagaggcgaatgatgaccgagaagccagagaaatatcaacacatgcttcagaatcttgttgttaaggcacaacagtattgcctaatacctttttgggaacccgtatcttcaaatgtgtggcatacttcaactggcaaatgatctggggattgacctgtgatcttcaaggcatgactttctgggaggctatattatttggggtaggacatctgccttggttagaggatttgtggctattgattctgaagaaaaacttccattattcgattgactcacattgaaatgcatatccaggacatactctagtttgaatgtgtcattcctgcaacagaattgcgattgattgtcaacattgcagagtacatatgcgtccagagaaagagagccagcagaattgggcgaactctcgatattaattgatgggtttgagaagaattaacagagctaggaaacatact

SEQ ID NO: 139143 - DNA, 626 bp, Glycine max
  unsure (1)..(626): unsure at all n locations
  Clone ID: PAT_MRT3847_96654C.1
gggcgtccgtgcgagaagacgacagaagggtacggctgcgagaagacgacagaagggtacggctgcgagaagacgacagaagggggagtctttatgctttctttcaatatcgagaatccattttgtaagtacaatgtttttcctaatgatatgatcgaggcttcacaccagtaatgtggacttatcatttactaaaagaattaggattccagacaaggagaaattaccaccatatacatcttgtgtaacacccaatttttgcgtaatataaattaaaaaagattctatttaaaaataaatagagttttaggaaaataatgagattttcgtaattaaataaataagaaaaaataattttattaattaaaataatgattttaaggtaaataaaataattatatgttcttataaaataaaatgaatatttaatttattcatttgattgggagtaaaatatagtttatttttataaaataatataataaagaaaaatagagtaaataataggtggagagtgtaataggtctaaatagagagatactaggtgcaggtttacatttaccatatgtctttacgctctatcatgctctcaaattggggtnttccttcccccctttcaaaaccct

SEQ ID NO: 139144 - DNA, 309 bp, Glycine max
  Clone ID: PAT_MRT3847_96655C.1
atgaaccctagttcttccgtttcatcagctttttcaatttttgataaccttgaaacagatagagcacttgaatccttctctagtgtttctggaacacttgcagaactttgtgtttctggaatacttgcaggagttagttgggaattgaaggatttactcagcaaagatgacaatgttggtagtgactgtcctgatgaaggtggtccagcaaatgaagctgaggcaaaggtagatacaggtaaaggagatgtatttgtggatgtggttgatgcaccagattgtcgattcaaagctcgtgaccacggctga

SEQ ID NO: 139145 - DNA, 887 bp, Glycine max
  Clone ID: PAT_MRT3847_96656C.1
ggctcgagtagagttcctcctgctgcatctctgccctttggagatgatgtgcgacatggcagaaatttcaatcacgttaatttaagcaaaaggtttgatggtgataatcatgccaaacaagatacttttcactgggatggacacaaggaagaagcaaatagaagatccggctaccataataactaccacctggatcacgagactgcatcaatggcagcacttttccaaggacgagccgttgtcccaatgcaattaattgcacgcgtccctgctgccatactatattggccactaattcaattggctggagcagcaacagatgatattgctttgggtgttgctgttggaagtaaaggaagaggaaacctgcctggtgctacatctgatattcgggccacacttcttctactacttattggtaaatgcacagtagatcctgttgccttccgggaggttggtcaggaacaattttttagggaacttttggatgacacagattcaagagtggcatattattcttctgcttttcttctgaagcgaatgatgaccgagaagccagagaaatatcaacacatgcttcagaatcttgttgttaaggctcagcagagtaacaatgaaaaactgttagagaacccgtatcttcaaatgtgtggcatacttcaactggcaaatgatctggggattgacctgtgatcttcaaggcatgactttctgggaggctatattatttggggtaggacatctgcattggttagaggatttgtggctattgattctgaagaaaaacttccattattcgattgactcagattgaaatgcatatccaggacatactcttagttgaaatgttcattcctgcaacagaattgcgattgattgtcaacatt

SEQ ID NO: 139146 - DNA, 516 bp, Glycine max
  Clone ID: PAT_MRT3847_96657C.1
ttcggctttcgagtatgtaggaaggagtagatgaaaagggtgaatctggaaagagtggtggccacataaggagatgttgtggtcacgcataatggcgtcgtggttgtcgacagcgaggaaggcaaaacaggaatgaagaaggtcgacaagggggcgaactataagaacaaggagtaaccacaacgatgacaaaactccggtgcagtgacttaaggtttttgatcgtgttgggtggctttgatctgttaaagattgatgatttgaggatttttgggtgatcttatgttgttggcgacgatgccatcgtggcgaaagaggaattgatagcgacaatagattcttcaagtgggatctgtggtgggtgttgtcgtcgaaaaacatggtggctaacgtcgtggtcatgggagaaggctgtatttttaagtttatatttgtaattttattttgttttaaaaaaaatatatgctaccttttatctttgatgcaccctcacgtatttaacccttcattctcatc

SEQ ID NO: 139147 - DNA, 476 bp, Glycine max
  Clone ID: PAT_MRT3847_96658C.1
ctcatacaaaattatattcttatttttcctatgcacttggggtgcaaaagctgaggaccctttagggcgattctgcaatgaaaacaccatcattggcagtggaggaaaattatcagccaatattgataaaatattgactgaaatagccctcaaaactccctccactggttttgttgccaccacatatggcaaagaccaagacaaagtgtacgcactcgctcaatgtaggggagatgttagcacccaggattgctccaattgcatccaagatgcaacgaaacaaatccgccaacgctgtccaaaccaagtggatgggagaatttggtatgattactgctttttaaggtatagtaacaagagtttctttggtgaggttgatacatcttttggtatattctatttcaatgttgaaaatgtgactgaccctgaagattttaacaaagagcttggggctcttatggatcacattagagcac

SEQ ID NO: 139148 - DNA, 421 bp, Glycine max
  Clone ID: PAT_MRT3847_96659C.1
tgttcataaaactacggcgctacgtacatctaatacaacactccccaaaattaacaacattcattttttcccttgtttttttttttctttctttcttcctttctcaaatctcaaatctcaaatccaacaccaacggcgctacgtacagtaacggaacacaacgcagtacttggcttcgcacttgcttgctccttccaatctctcgattctcgaatcgttcaattgcattcaattcaaatgtgcaataattccttcttcgtcttccagattcgctgatgctgatgattccgaatccaatcgaaaccaatccaataatgttttccagcttcagctcctcgtgcctgccgctgcagttaatccccgtctcccgcctgagatcctccgttgtcaagaagctgccggaacccttgcgccgctccat

SEQ ID NO: 139149 - DNA, 744 bp, Glycine max
  unsure (1)..(744): unsure at all n locations
  Clone ID: PAT_MRT3847_9665C.1
tacgaattcgagctcggtacccggggatcctctagagtcgacctgcagtactttcatattagtcttctcattttaatttgtgtggttttcgccaagaaaaatattttcaatgataaagaaatgcattgtaattctgtaaataaaataaaataaaactgtggtacattgtattgtgtcagtccacgattgattgaactgaaataatcacaaaccaattaacaaaaaacataagtacctcctcttccgtagttaaatgttttttacaaataatggagtcccaaaccccaaatgcacatgattattgaatccttgaaagattatgttcataatattgtttctatatctagaaaacagcccccgaattatcccatacccattccatgcctcaacttatatatctatgacgcaattatctttaaattaaatcacctttatactagatttttttcttctttccttttgggtaaagtcacccttgctcggttgtattcactattcaatttcgatttccaaaattatggtccctttgtccatgacattntaatggcacacttaaacagataatggtntccagttccaccacaagaaaaaagaagatatttattgtagaaacagatattatatatttaaggccaataactgaatcaaggtatcgaacaaattaactactattngtattgcttgcaaatgaatgtacccgaccgattaaaattttcgagtccatgcccaaacaattaagtaacg

SEQ ID NO: 139150 - DNA, 686 bp, Glycine max
  Clone ID: PAT_MRT3847_96660C.1
ttcccgggtcgacccacgcgtccgcgaaggcacaatttgtcagtggaagaacttttaaatatgacataattggtgctggttcacattcttctgaggaactttctgaagaaaagaatcagggaaaagtaaagcaggttgatgctaggttgaggcaaagaatagatccacaatacaatgaagttcaagctcaaatggaaacaaatctattcaaattgtctcttgatgatgttgagactccaaaaggttccatgttagacctcaagatttcccaatctaagattgcacttcccaaaaatacagttggagggaccattttgcgcagtgatttgctggcaaatttcttaacagaaggcaattttagagcaagtgttgatttgcaacgtacccaccgtatcaaaggaatgattaaaatggtggctacagttggcattcctgaaaacacaggtatagcactggcttgtgcaatgaatagttccattagagggcgtgccagctctgatatctatactatttgttcgcaagattgtgaactgtggaatcctgcttgtacaaaagcaatgactatgtcatttaatccaaacccatgttctgatgcgtggagtttggaatttctgaaacgtactgtattccactgagatattagttgtgtgactggatggactgcaactccatgcaagatgttcaag

SEQ ID NO: 139151 - DNA, 995 bp, Glycine max
  Clone ID: PAT_MRT3847_96661C.1
agtgcgcaccctcctcgtgggtggtctctgacactgttggcagaatccagcaagtcacattctcgcaaacacgcgcagcacgtgtttactaaattgcttatggcatttattatcaagtcacacttgttctgtcccacttgccaccatttttgagcttcactcgcatcacaacacaacacaacgcatctcaagacaagaccaatgacgagaaaggtctcgaatttctcggatctgatccaaagggtcaccgcctcttgcctcctccaccccctcgccaccgccgccgccgccgtcaaggaagacgacaactcgccttacgagtccgaggacaaccggaacgactcagaggaagaagaaaatgagaatgacgacgagtacgaggatgaagagagattggtggggcccttgaaggctttcaaagtaaaacagatggaggcgctgatggaacaagtgtttgaaacggtgtcgtcgatgaagagagcctacgtgaggcttcaggaggcgcattcgccgtgggacccggagaggatgaggtctgctgacgtggcggtggtgtcggagctccggaagcttgccgtgctcagggagaggttccgacggagcggcggcggcgacgacgacgggaggagaaaggggaggaggagaggtggcggtggtggggttgcgtcggtgagggaggtggtggcgccgtacgaggcggtggtggaggagctgaagaaggaggtgaaggtgaaggatatggaggtgaagaatctgcgggagaagcttgatagtgctgctgctttcactactaatggaagtgctcaaaagaagcctgggaggtctctgtctaagaggaaactgggaattcaagcaatggcagcagtaccaacccctgaactctttgaagcaacattggtgcaagtgagagaagcctcaaagtctttcacatctctgctactgtctctcatgcacaatgcacattggggacataacagctgctgttcgttctattg

SEQ ID NO: 139152 - DNA, 659 bp, Glycine max
  Clone ID: PAT_MRT3847_96662C.1
aacaaaacctgtgggttggttgatttggttctctttctctatccagtttctcccaaaccctctcactctaaccaaacacaaaaccatgggcagtttctgtctgctccaacaaaaccagttgcttctaaaaactcttttctctgttattataaccttagccttaacccattctctttccctgaaaacccaatccatcaccaactcctgtgtaatcccatccttaaactcactctgctatttcgcttttctctctctcaacaaaaccttcattgatgttctcatgcttgtgcacccttttggcactgttcaaccattcgattaaagggtagtggaatgttctctgggttggtaggagtggaaaaccctttacaacaacagcagcaacaacaacaacaacaacaacaacaacaacaacaaaaccttcaccatttgcaacaccaccacccccaaatggttccctatgccacacaccatgacactgaaaaccctcatcatccacaccttcaccaatcaatcaaacaagggtaccctcccttttcatcccagaccaaacaacaacaatctcctatcagtgatgatgatgagccagggttccctgctgatgaggaccccaagagaaaggtctcgccatggcactaaatgaagtggtctgacaccat

SEQ ID NO: 139153 - DNA, 511 bp, Glycine max
  Clone ID: PAT_MRT3847_96663C.1
caactcctgtgtaatcccatccttaaactcactctgctatttcgcttttctctctctcaacaaaaccttcattgatgttctcatgcttgtgcacccttttggcactgttcaaccattcgattaaagggtaagcgcctttcatccaaagtttgctcctttttgcttattttgaaaatattggtgtttttgttgatggaacccaatgggctaggtagtggaatgttctctgggttggtaggagtggaaaaccctttacaacaacagcagcaacaacaacaacaacaacaacaacaacaacaacaaaaccttcaccatttgcaacaccaccacccccaaatggttccctatgccacacaccatgacactgaaaaccctcatcatccacaccttcaccaatcaatcaaacaagggtaccctcccttttcatcccagaccaaacaacaacaatctcctctcagtgatgatgatgagccagggttccctgctgatgaggaccccaagagaaaggtct

SEQ ID NO: 139154 - DNA, 628 bp, Glycine max
  Clone ID: PAT_MRT3847_96664C.1
ctcgagctcgtttttctctagggaattcgcggtaaacaatgatgcggaaggtggctatgctgtttgatttgcttctttttttttttttaatttgcttgttgggtttggggtgtgcttgttgtagatttgtcagtggtacggaacaaggatccagagtggttcttcttctgtccgcaggaccggaagtatccaaacgggcacaggttgaaccgagctacgaatcatggctattggaaggcgacggggaaggatcgtaaaatcaagtctgggacgattttgattggaatgaagaagactttggtgttctacactggtcgagcacccaaggggaataggaccaattgggttatgcatgagtatcgccccactttgaaggagcttgatggtaccaatcctggacagaatccatatgtcctttgtcgcttgtttaagaaacatgatgagagccttgaagtttcacactgtgatgaagcagagccgactgcttccactcctgtggctgcctattactccacagaggaaatacaatctgatctggctgttgttgcaggatcgccgtcacaagttacagaagatgataagcatcagtcaatgatccctgcacactctgaggaagcaatatccaatg

SEQ ID NO: 139155 - DNA, 481 bp, Glycine max
  Clone ID: PAT_MRT3847_96665C.1
cgggtgctttccgaaaacttctatatagaaggattctgatttccgagtccatatatgtctagtgcatgtctagtttaaacgaattgtactatcctctctctttgcatgctcatcaccaagatgtgtcattatttgttggaaaaaaagatgttgtatatcgctgttatgtcatagcaaattgtaagtgtagatggcgactttacgggaccaaccagcgtgtcctcggatctgcaatcacaactacgttttagttcatgtgtcttgaactccccgaagcagctggttaattttaagctagggaggagtttggcgcaaaattattctcatcgcatttgcaacgaggattatctactcatatactctttttacaattaatttagagactaaaactatcatactctctactctttcaatgagagatattctctaacagttttttttcttgtatcctaggtaactagccaaaaaaaatctcttaacc

SEQ ID NO: 139156 - DNA, 475 bp, Glycine max
  Clone ID: PAT_MRT3847_96666C.1
ggctcgagggagaaagtgactgagcttctgcaactcctcttgacaccaatggttcaccctgggccagcctgtgtccacgctttgggtgcgaacctcatataatccgttggcataccctactgcatcaccagaggcttttccatcgccggtaacaagatggctctgcccgacaccggattaatgtcctacggcgaaatgctagagcagggacaactcataaaccaagccgctctcattcccgtgattggccacccccactacgggtacggcgatgccatgaacctcaagccaaccgccaagggtttcattgccggcagttgcgcacgaatcattctggaagaccagattgcgcccaaagcgtgtgagcacacacgcgggagggacgtgataccgagcgaggtcggctttatgaagattagcgccctcgcggatgctaaaagagagagcgtgtctgacattgtgattgtggggctca

SEQ ID NO: 139157 - DNA, 362 bp, Glycine max
  Clone ID: PAT_MRT3847_96667C.1
gccttccctaatatttttttcttttcattatacacaacaagcgaacaatccgtgcgttttatttaaaggggagaggggaacactcaccatgccctacaggtgaattcaaccatcctgatccttatcaacgtacaaagctcagaataaaccatccatttcttccatatacttgtacttccttaataagaatattcttgaaaatctatcaatatgaacattaccaactgcaaataacctcagatcatattttattcctgcattcactagagaataatacatgaaaccaaatctcatcaatacaaactgggaagacatttgtactatcaattacattttgaatacataatcttgcccttacttta

SEQ ID NO: 139158 - DNA, 521 bp, Glycine max
  Clone ID: PAT_MRT3847_96668C.1
cgaacgcgtgggctttctttttatggctatacaatctgtgcacaaagagctcgggggctctcagaaaagggatcggaacaatggcctcacgtgacggcaacatgtgatgcaacccagcccttacacggcccaggggtaaaatatgatcaagctcacgactaaccggggggattcgaagaccgtgttcattacataggtcggacaggcagggctagtccaaaacggactgagtacacatacttctcagcagctaaggcaagcattgttagggaacttatagccctactcaccgtaccaagacagaaggagactgctgcaatctattagcatggggcgtcagcaccacaaccacctgcaagtactcgaagttatcaagacagaaggaatcgtgatggcactgcttgtgcaaggaacagatagtactgcgcagacccaacatctcgattgacggtggaagctcaccaaaagaatgcagactgtgccaaaattgacgtcatattagcacgataaaaagcggaaac

SEQ ID NO: 139159 - DNA, 242 bp, Glycine max
  Clone ID: PAT_MRT3847_96669C.1
agacgtcagacaacgcgtcagaggggttcgacaaaactaccgttcgtattctggtgaggatgcgccctctgactggaacaaagcggcacataatggtgtatgcaacaatactaatggatctcaagcttggatgcattatacagatgacaaagataggcaaatctagagtcacggaactacacatatcgaacatcctagctggaaccatcgatcgtcgaacacatcagagctggagttcagca

SEQ ID NO: 139160 - DNA, 427 bp, Glycine max
  unsure (1)..(427): unsure at all n locations
  Clone ID: PAT_MRT3847_9666C.1
catcaattgcgcctcctagactcctcaagcataaacaagactcgcccgaaacataaggcgcacatctgattcgcatcgatcggctntgcgtcacttctccgagctcgcgccctagatacggccggaaatgttcgcttcgtcctcctcgtccctcacccgggccgctacatcgacgatgtatgcgcaagctcaacgtaacttctcatcgtcatcctctgtcctggcttcgcggagaagacagctgatcgagctgctggttgaccacgaacgcttgggcacaaaaggtgtgttcgcgtgtcctacgctgtgctgaatttgaaaaccccgtgctgtgttcaccccacaggtgaccgagttctcgtcgctcctggatacgcacgacatcgtctggtcccacggcgtatcgctcgacatgtgccattctgga

SEQ ID NO: 139161 - DNA, 449 bp, Glycine max
  Clone ID: PAT_MRT3847_96670C.1
gtgtttactcagtacaaattttcattgtctagcctatcacaatgtagcaaaataaattaagaaggaaatttcagggtgttacaaacttaattttttgataatgaaagaaagaattcagagaaggaaaacttctctgcactgtggtaacagccacccacaactacctaaatgattggctacctctatcccccggccctttcccttatatcccatgcagcctctaactttaccaccatgcttcccacacttgttgccaagtatgtgagttagttatagcttgcataatcccttttttacccttacagatataggagtctctaagagcttgactagagtatttgaggtgcaattgagttgttttaggcaagtatgaaagtttcaatggatttatttttcaatgggatttatttttcaaatacatgtgcggagttttaacaacttggaactta

SEQ ID NO: 139162 - DNA, 285 bp, Glycine max
  Clone ID: PAT_MRT3847_96671C.1
ccgggatttgagtacctgtaccggctggcgttccagctttccctaatgcgtgtcgacttaaaatgaggtactgtgtacaatatacgtctagcttgccattgataccattcattcgtttatgtgtaatgaggactggattgagactactacagcttttactgaggaccttagatgctcccaatagaagcaccgcgcctctctatagagctttttcttaagacttgaacacttactgcaacaatctctcgagcgcttaaaacatcttaaaaggtcactacttaaaat

SEQ ID NO: 139163 - DNA, 156 bp, Glycine max
  Clone ID: PAT_MRT3847_96672C.1
agctttacgcctgccgcccggggtcccattccggaattgacggacgcagtccacgccattcgatttttcaaggatgtcggaacgatgggatgacgacaccaagccccaagaggctgatccgcacaagcgggtgcagtttggagagattcaagaaaa

SEQ ID NO: 139164 - DNA, 124 bp, Glycine max
  Clone ID: PAT_MRT3847_96673C.1
gccccatcagagggtaactacaatttgacttgctattgtttgtgtgattcttggatttctgttcgtatcctagttcagctgatatcgtgattaaattgtcatatcatccgaaaatttttatggt

SEQ ID NO: 139165 - DNA, 575 bp, Glycine max
  Clone ID: PAT_MRT3847_96674C.1
gaagaaatgctggaaacacagttgcaacctctattaccccattcaattggtggtatctccaggcaaattctctttcttcctggaacgatactaatagcacatggagcaaccaaccaaaccctaactcttcctcttcttgtgaggaggatatatcagtctctacatctttcactaatgcttccaaccattcaagcctcaccgttgagtcctctcgcagactcattgagccacctgctccttcctccaccgagttgatgggagaacacgcatcagataatcaactttggagtcatgttttatcaggtgttggatcagacggcgagttacacaacagccaagaaattggagagaattttctggatgcactgtcatccaaaagcatgacaagcactatgtttcaaccagtgtgtgactacttgaagaaactagatcatacaagttgggagtataatggttcaacttcactaaatagctttgagaagcacttaaatgggttcagtgaggcgatgcttgagaataatgaaaggttgaccaagttatctaatcttgtgagcacttggtctattgccccacca

SEQ ID NO: 139166 - DNA, 318 bp, Glycine max
  Clone ID: PAT_MRT3847_96675C.1
gcagactcttatacccattctcacaagaatcgtcgtcctcttcaaaatgctcaaggtttcaacagcatcatcattttataatcaacatgcagtgccctcatccagtgttgcccgggatcaaggctatctcaggaaagccagttctggcccactcaggcttcatgctctccccagaagaaggcctactccctccatctacgcaccctcaagtccgggtgcttctggggccaccattgctacgcctcctacttctacgtacgccaacgctgcgccaacagtgactgcgacgaatctctcttctgcaactgtatccaggga

SEQ ID NO: 139167 - DNA, 227 bp, Glycine max
  unsure (1)..(227): unsure at all n locations
  Clone ID: PAT_MRT3847_96676C.1
agnaattctcacccgcttgcatcgtgctctctctttctcatccacgtcatgttgacttctcttcctaacactctctgtctacgcggtanttgganccnattggaatcnatcataatcagtanccatgtgaagacacnacaccacaccacgatnatcatccctntntctcttcaatacnactnncaantcattnngntctcncaaaaaccattagaannggaaataac

SEQ ID NO: 139168 - DNA, 2818 bp, Glycine max
  Clone ID: PAT_MRT3847_96677C.1
aaaaagacaccaactttttcgctccttccttgcatttattcattcacattctcctcaaaacttactattccttcctcacaaaataaacaaaaaaaaatctttccttattgttttccgtgtttcctttgtttcatagcttctgggttttggttttcagacccacaatacaaagttcacaagtgtgtgtaaagattgaagaagaaaatgaccgtagagaagaaaatgaatgattccggcgacgagtttcccgtcggaatgcgtgttctcgccgtcgacgatgatcccacttgcttattggttctggaaactctcctccgaagatgtcaatatcatgcaaccacgactaatcaagcaataaaggcgttggcgctgttgagagaacacaaagacaagtttgacctggtaattagtgatgtgcacatgccagacatggatggatttaagctgcttgagctagtgggacttgagatggatcttcctgtcataatgttatctgcaaatggtgatacgaagctggtgatgaaggggatttctcatggggcctgtgattatctgctgaaacctgtaagaatggaggagctcaagaacatttggcagcatgtaatcaggaggaagaagtttgactcaaaggagaagaacaaaacccgcaacatagacaaacctacttcaaacagtagcaatggactagggtcatcaggaacaggaaattctgatcacaatgagaagctgactaagaaaaggaaggatcaagatcgaacagcttatgaacagcagtagaatgatcatgacaatgacgacccatcagcccagaagaagcctcgggttgtttggtctgtggagctgcaccgcaaatttgttgctgccgttaatcagctaggcattgacaaggctgtacctaaaaaaattctcgatttgatgaatgttgaaaagcttacaagggagaatgtggcaagccatcttcagaagtataggctttatctgaaaagaattagctgtgtggctaaccaacaaaccaatatggtggtggccttagggggtgccgatccatcctatttgagaatgaattctgtgagcggggttggacatatacaatcaataagtggttctggacagcttcataacaatgctttcagatcctttccacctagtgggataattaatagattgaatactcctgctggtttaaatgtgcatggatttccttctggagtacttcaattgagtcaatcacaaaatttaaaaaacaccaatgataatcttaagttccagtcagccattgttcctgctaatcagaatggtgttcatggaatgacagtatctgtagggcttgatcaactgcaaaacaataagggtgttatgtctgttcaaaacctgactactgtttttgatgccaaaacaacttttcccatctcgaataaactcccagatccaagaccaaaaataaccaactctggctctcacactccagatgtgagtttctcaaacaatgccttgatgttggaaccacgccctcaaggcacacaagggagtgtaagaattgaaactttatcttcttcagtagcctctcaacattcagaattttctttgtctttgctggatcaaggtagatatagtgataattgggcaagtactgtgcagccatctgtgatccagacaaactcttaccctccaagtgaatgttttggacagactaatatacctcctacagataacatggcttctgtacccttgcaaggtgggaatctaagtggtgcgtccatcacttcactgtccaggcaatcctatgattcaatgacagatatgcactctgaaggagtgacttttaccaacagacctgggcatataagcagtaatgtgccatatcaagggtggcatgacaataatcaggatgctactcaccattcaaatattttgtcaataaactcactgactccagtcaatggtgctgctgttccagctggccatgcagcaatgaactcagccttacacagaaacttggactttaattattgtgatcccttacaaatgaagcatgagggatttgtggagttaactgacgaggccttatcgaaacaacatcaggggaatatcatgaacctaccgaaatctcaacaaagtcatttctctaataatcttggttcactggaagacttggtcagttcaatgatgaaacaggaaaatgataagatgaaattattggatggaaacctcatttgcaataattactctggtgggttatctcgatgtgatagcaggtttagcagcacattccagaatatcatgcatcctcgctgatgaatttttttgtagttttcatcgtgttttaagggctttagcttttgtcttctcgtagttactataggatttagcttctccagattactttgttctctaggtttgttccactaagggctttctattttttaaacaaatgcattgttgtccttgccttgagtccagcaatgcaatatggagtgttattgatcactttgtttaatctccttagatatgttggccttcaaattggacctagatcttctgtcacagccacacttgcagcgaggagagagacacaaggtcctggtggagcccatcacacaaatgggatccacttgaaccctgtgtctttttcatgccttgatgcttggtgtaggtgtggcagcttgagagagatcagggattgcaaatttaaatgttagggatccataaacaagattatagtgattaagttgaatgacaataaacacgaattcccccttttatgcttggaaatgttgtctattaaaattacacattcaatattatttattgacgtagc

SEQ ID NO: 139169 - DNA, 293 bp, Glycine max
  Clone ID: PAT_MRT3847_96678C.1
ttttttttatcttaaaaatatatcttatgcttttatttagtaccatattttacaatttagctttactataatttttatgataaaaaaaaaaaaaaagggtccctaaaaaatgattaaagtaaaaaggcccaaagaaaatagggcctcccttttgaaccccgttcttgagaaacaacaagcacttggtctaaaaaccccaaatgggctcaagctcttaaaaacggggggtgatcgctttaataaaagccttgatctcaaacacaaaaaacccccccccaaaaaaagaattccag

SEQ ID NO: 139170 - DNA, 2396 bp, Glycine max
  Clone ID: PAT_MRT3847_96679C.1
gcgagaagacgacagaaggggagagaacacaaagacaagtttgacctggtaatcagtgatgtacacatgccagacatggatggatttaagctgcttgagctagtgggacttgagatggatcttcctgtcataatgttatctgcaaatggtgatacgaagatggtgatgaaggggatttctcatggggcctgtgattatctgctgaaacctgtgagaatggaggagctcaagaacatttggcagcatgtaatcaggaggaagaagtttgactcaaaggagaagaacaaaaccagcaacctagacaaacctacttctaatagtggaaatggactagggtcatcaggaacaggaaattctgatcaaaatgagaagctgactaagaaaaggaaggatcaagatgaagatgaagatgaggatcaggagaatgatcttgacaatgaggacccatcagcccagaagaagcctcgggttgtttggtctgtggacctgcaccgcaagtttgttgctgctgttaatcagctaggcattgacaaggctgtacctaaaaaaattcttgatttgatgaatgttgaaaagcttacaagggagaatgtggcaagccatcttcagaagtataggctttatctgaaaagaattagctgtgtggctaaccaacaagccaatatggtggcggccttaggggttgcagatccatcctatttgagaatgagttcggtgagcggggttggacatgtacaaacattaagtggttccggacagcttcataacaataatttcagatcctttccacctagtgggataattaatagattgaacactcctgctggtttgaatgtgcatggatttccttctggagtacttcaattgagtcaatcacaaaatttaaacaatgccaatgatcatcataaattccagtcagtcattgttcctgttaatcagaatggtgttcagggaatgacagtgtctgtagggcttgatcaactgcaaaacaataaggttgttatgtctgttcagaacctgaccactgtttttgatgccaaaacaacttttcctatcccaaataaactcccagatccaagaccaaaaataaccaactctgtctctcatacttcagatgtgcatttctcaaacaatgccttgatgttggaaccacgccctcaaggctcacaagggagtgtaagaattggaacattatcttcttcagtagcctctcaacattcggaattttctttgtctttgctggatcaaggtagatatagtgataattggacaagtgctgtgcagccatctgtgatccagacaaactttttccctccaagtgaatgttttaggcagactaatatacctcctgcagataacatggcttctgtacccttgcaaggtgggaatctaagtggtccatccatcacttcattgtccaggcaatcccatgattcaatgacagaaatgcactctgaaggaatgacttttactaacagacctgggcatacaagcagtaatgtgccatttcaagggtgggatgaccataatcaggatgctactcaccattcaaatattatgtcaataaactcactgactccagtcaatggggctgctgttcaagctggccatgcagcaacgaactcggtcttacacagaaacttggattttaattattgtgatcccttacaaatgaagcatgaagggtttgtggagttaactgatgagaccttattgaaacaacatcaggggaataccatggaccagcaaaaatctcaagaaaatcatttctctaataatcttggttcactggaagacttggtcagttcaatgatgaaataggagaaagataagatgaaacacttgatggaaacctcatttgcaataattactctggtgggttatctatgtggtagcaggtttggcagcacataccagcatatcatgcacatcctcgttgatgaattttgtagctttcattgtgtttaaccacttttttcttctcatagttactataggctttagcttctccagattactttttcctgggtaaagttttctaggtttgttccattaagggctttctaattttatacaaatgctttgttgtccttgccttcaggtccagcaatgcattatgaagtatcaatcactttgtttaatctacatagatatgctggcctgcaaattggacctagatcttctctcacagcctcacttgtagtgaggagagagagacaaaaggtccaggtggaacccacttgaacctgtgtctttctcactcctcgctgcactctgtgtagcagatggggagagatctggggttgcaaatttgtaaaatgttagggatccataaacaaagattgtagtgattatgatgaatgacaataaacatggatgcccccttttatgcttgg

SEQ ID NO: 139171 - DNA, 261 bp, Glycine max
  Clone ID: PAT_MRT3847_9667C.1
ctcgagccgctccagccggaagatgcatggctgcttcctggcgcattagatcttcccggatccagcatcgactctcactgacacggccgacgacactacatcggcagatgattctcagcctttccctgtttaggtgcaacaccttcctgatgatgatcagggcattcgtgttggacatagcactagcggcgcatgtccttctgcccgctcggtcccttatccaccgatgctctcagcagcgactgtcccttgtgctacgat

SEQ ID NO: 139172 - DNA, 366 bp, Glycine max
  Clone ID: PAT_MRT3847_96680C.1
ccccaggaaaccctttctgcttggttgtttcaatggaaaataaaaaaaatcaaacctccttaacccccgaccccctttttttttaacgtttataattgttcaacaggtctttttttttaaacaaaaaaatgaaccctcaaatttttttgcgggcccctttttgttttcataaaaactttaggcaagcttgtttttaatgaactgagctccaaaaacaggctggcctgaggatgcaatccaccttccttaaatgacaatggaaactttttttggccataaacaggccggggaaaattggaaaccaggctgtaactttgggtttttaaacctccaagggggtcaacattgtcctccaaaaactgattt

SEQ ID NO: 139173 - DNA, 436 bp, Glycine max
  Clone ID: PAT_MRT3847_96681C.1
cccacgcgtccggcttaagaagaaaaattttgaggttattttcttcacggatccagttgatgaatacttgatgctctacatttttatcttttgctttttaatatgtaagaaagtcttcatcatgttgactatttgacttttcccaaccactaaaaaaaaaaaaaaaaaaaaaaaaaaaaaaaaaaaaaaaaaaaaagggaaaccaaaataaaggaaaaaaaaaaaacaaacacaaaaatacaaaaaaataaaatattaaaaaaagacaggggggggccgttttaggggacccaattttacaaccgcggggtgggggaaaaaaattttttttttggggccccctaatttaatttcacggcccgttttttaaaactgtcgtaatggaaaaaacccgggcgttcccacacttttccccctggtagcacatccccttttg

SEQ ID NO: 139174 - DNA, 364 bp, Glycine max
  Clone ID: PAT_MRT3847_96682C.1
caagccttcagttaggtggcaaaaagacgccagaaggggaactaagtggtgaataattccggatcagggaaccatgcttataggaatgatgatgactcaaggtgtgtgggtttgcaatagtgatggtggcagtgcaacttctggtggacgtgagtctcaaagtacaggctgtgaaatgtacccctgtggatctgaatccttgtttgggggcaataacttcctctcaaccaccatcagaaatttgttgccacaaggtgagggaatcttggcaatgcctctgtggttagttaaaaaccccaattctaaggccatatgctaattctccggtttcaaaaagggttgcaaccccttttggggtcccctt

SEQ ID NO: 139175 - DNA, 120 bp, Glycine max
  unsure (1)..(120): unsure at all n locations
  Clone ID: PAT_MRT3847_96683C.1
caaaaccaccagagaaaacgcgnngaggcnccagcggcagggangcaagcacgncncgcagggcgcnancaagaggngcaagcaggnngagancggnggngacaagaagggaaaaggaac

SEQ ID NO: 139176 - DNA, 1470 bp, Glycine max
  Clone ID: PAT_MRT3847_96684C.1
aaaaagttcacctaattattgttgtattgttgtttatattgtataaaaattgtagggtttaaaaatacttaataaaactaaatacgaattaaagaataattttcatatactgttaattacatgttggattgattggatgaggggggtcggggggagacaagtgctccaacttgtccccaactggttcattccctgcttgaatgtttatatctatcatctatgtattgctatttagtttttacatgttttagcatctgaaattcaactaccttacacgatccttaggtaatttatatcgagctgcagcaaatgctttgaatttagaacagtggagactgcagaaactgaaagagctatgtgaggggaaccaaatgataagatcaagttataatgaggattgtacccgccacgagggtcgcatttcccggaatataagacaaataaggggcataagtgacaatgttaggtcaaaagcaagtgaactcactaaacttttgagtcatcctcaatcttttcaatcaatcagcattgagatatttgctaaaaaggttgttgcatactgtgcaaaccccgctaatgtgccctttgcaagtgcctatgtcattgttcttgttacatctcaggtcccacatgctatggatattttactagctgagcttcacagggcttgcatatatactgtcccaaagcacctggtttacaagaagtctgcctatcaatcaaaagaggcatacttcagaagtattggctatcgagaagatgatggaaagatggagagtacggaagattatttaaagcggttagaatcatacatgaagatgtatggtgcactggttcagactgaaattacaaactgtcaaaattttcacggcttgaaagaaggttgggcatggcttgcaaggttcttgaatacacacccagcaaatcaatacacagctgtttcgcttaatgcattcttgcaaatggctggatttgctctctataacagatataaatctcaattcttaaagatgctgaacgtcgtctctgagaactttttagttgatctgaaatcacagaatataccagaattggcgaggacagttacggagatacagacttacatagacgataagaagttccttcaagagccagaaggaagaagcctgcagtctgatttgttatcaaccaagatacttcaagaggcagacagatggataccgaagcctagttttaataattattattgaaacttgaataattttattgcttatttttttgggtagaaaaaagttcagggagatcggcgattgttttcattttaaggtctttcacaagcctcacagtttacacaaactagttgaggcagctttcattttactccgaggagtattggaaacgattatttacagtttatttagacttattttgagatgtaatacacatacagaaattcatacaacatttatataacatcattttcttttatct

SEQ ID NO: 139177 - DNA, 398 bp, Glycine max
  Clone ID: PAT_MRT3847_96685C.1
gattaatatatagaagacccatttattatccactaaacaaaaagttatcaagagaggaatcgtgctacattgatttcaattcctggagatagaaacatggagctaactgtaaggctaagcaatgaaatctatatacttaacgaataaagatgcgcaatgattactttttaataaaccgatattgcttggtcgggcaagtcatctatctaatggccaagacaccattggcttcttgtgcctatagagcttccgcacgccaggatagtaagggactacagtaacctcaatccagtcaatggcatgataaaacttagatggtgagaacgaacgtgctgctttggaattgaggttccaaatcccagtccatttgacacgcttggatttgtctgaaccagggc

SEQ ID NO: 139178 - DNA, 2442 bp, Glycine max
  unsure (1)..(2442): unsure at all n locations
  Clone ID: PAT_MRT3847_96686C.1
ggctcgagcagcagcagatccggcgggacaaggtaaggttcgaggcggcgccattggtagggatagaggaggaggaaccagtgtacgagaccgccggaatgttgtcggagatgttcaattttccgcccgcgacggaattgctggagcagcagcacgccacggcgacgttccgggcggcgaggcaagccggagagtggtacggaaacagacagcaacagcaacagatttcaggcattaatgctgactcagcagcagccatgcaactttttctgatgaaccctcaaacgaggtctccttctcctcctcaaacccacgctactccttcttcaacgcttcacatgctgcttccaaatccttcttcaaattcttccctccaaggatttactggttcggccgcgggagggtcttttggtcaattcacatgggttcctgagagtgctcatcaacaaggaggcgtggtggaagggcaaggtctttcgttatcgttgtcttcttcgctggaagcagcaaaagccgaggaactgaggatgggggatagtggttttctatattacaatcatcaacaaggtggaggtggaggaggtggttcttcttcttcttccgcggatcagtttcagtacaagaataataacaataaccatcaccaagcattgcatttgcaaggggcgatgggacacgacaacaaccaccagggacatgttgggtttgggtcatcctcggtaggtgtagttaatgttctaagaaattcaaagtatgcgatggctgcacaagagttgctggaagagttttgcagtgtagggaggggtcagtttaagaagagcaagttcaataggcagaattcaaaccctaattcaaatgccggtggtggtgcttcgccttcatcaaaagatgctcctcctcctcctcctttgtcagccgctgataggattgagcatcagagaaggaaggtcaaactactatctatgcttgacgaggtggacaggagatacaaccactactgcgagcaaatgcaaatggtagtgaactcatttgacctgatgatgggatttggggcggcagggccatacacagcactggcgcagaaagcaatgtctcggcatttccggtgtctgaaggaggcgataacagcgcagctgaagcaaagttgtgaagtacttggagacaaagatggggcgggaagctcaggaggtttgaccaagggtgagaccccaatgctgaagatgctggaacaaagcttgaggcagcaaagagcgtttcatcaaatggggatgatggaacaggaggcttggaggccccagagagggttgccagaacgatctgtcaacattttgagagcctggcttttcgagcatttccttcatccgtacccaagcgatgcagataagcatctgttggcacgacagactgggctatcgagaaatcaggtatcaaactggttcattaatgcgagggttcgtttgtggaaacccatggtggaagacatgtaccaacaagaactcaaagaggccgaaggggcagaagaagagagggaggggaaccaaagcagtagcaacaacagtggccaccaattggcacaaactccaacaccctcaaccacagcatcgacggcaacagcgccaccaccaccaacaacgacaccaccaaccggaaaaagatccgattctgaaagcgacccttcacttgcaccaataaataacaccaccagcactgctgccatgaccgtcaccgcctctgaggtgacgcaactgtcggagctgccccgaacaatggtggccgatgaatcttgtaggcatggtagccttgttgcaacggagtttgggaccgcttctgctgcttctgaaattggttccactctgatcaggtttgggaccaccgccggtgacgtgtcactcacgctagggcttcgccacgccgggaacatgccggagaaaactccgttctccgttagggactttggaggcatttaaaacttaatcaattccccctatattacttcacatgatcataaaagataagaatgatacgtataggaggttgctttattattactattattataattataataatatgattattatgatatgatatatcaaaagaaaccatttttccacccttgtaacttctctttgatgttagttcctcctctcagattaagttgcattttatggaaggaaaggaagaagggaatacgaaatgagaaaggtaggcttatatgtgattatcagctggcgataggtaggctctgtggtgatctgtgcaactgtatagtaggttgttttctacgtttttttatttatttatcacgtgtatgtacttaaggtttcatatcttaatttgataggactttatctaaataatagaataacatgtgctcactctcatcccgtatatgcacttgatgttttgtaacttataatttgacaagacttgttccntttt

SEQ ID NO: 139179 - DNA, 422 bp, Glycine max
  unsure (1)..(422): unsure at all n locations
  Clone ID: PAT_MRT3847_96687C.1
tctatgcattttattgtgtaacatattcaggtctacccatctatgcatatagatgaatatgaccttgtgtagtatgtttgaaataatatgcataggttttatttgcttatgttctttgttcaatattaggaacaaaaattctcagaaagccaataactttgttttccttcattagcatgcttaaaattttcgaatgtcagctttggagactccaactagctcttggtgaacaaactgaaattaccactactagaaaaattgcatactacatcagttaattaggccaatctacaccggtttacgaccgtcgttgtaagcggtgtcgtaaaaagggtaggttattttacatncgttctaggaaaacccgtgtagaatgtcatagctattctatatcaaattcttgaaagaccttcgtagaatgg

SEQ ID NO: 139180 - DNA, 365 bp, Glycine max
  Clone ID: PAT_MRT3847_96688C.1
gatagaaatataattgaaaggaatattcgccttaaaattcagcaaagtcctgattatgcagaagagccagattttgagactggattgcaagacttcaaaaatcgtctagaaaattatgagaaggtttatgagacagttaatgaaggatcttacataaaaatgattgatatggtcagtgggcatggtggacaaatacaagtgaacaatatcagtggttaccttcctggacgaattgtctttttcttggtaaatacacatcttacaccacgcccaattttacttacccgacatggggaaagtcaggataatgtgagaggcagaattggaggggatacctgcaatagtgaggcctgagaactttattc

SEQ ID NO: 139181 - DNA, 345 bp, Glycine max
  Clone ID: PAT_MRT3847_96689C.1
tgctcactctgtacagttttaatgggtatcttgtctctgggtagggtcacacatcttttgaaaacgacactcgcgtgtatgttggtaacttgtattaaccagtcaccgatacagagctcgaagacgaacaccgtgttttctgagctatacgcagagtccgggtcgcacgtaaaccaccatgctatgcttttattgactttgatgaccgcagatatgcacaggaagctatccgtaaattgtatggcgggaatgtgttgagggttgagctttctcacaactctataggtggacgcggcggtcgtggtggacgctctgacggttctgattcgaaatgttaccagtgtg

SEQ ID NO: 139182 - DNA, 337 bp, Glycine max
  Clone ID: PAT_MRT3847_9668C.1
aaccaaaatactacattttcataattttgtgattggagggcattctggagatgatctaacttatagacgaattaaagaccaattctattggaaagggttgcagaaagcagtaaaaaaatgggtgcaggagtgtatcacttgtcaacagaacaaaccattattaaggatgccagctggattactttaaccattatccattcctgatagggcttggaagtctatttcaatggactttatagtcggtcttcctaagtcgaatgacataactttcatctttgttgtttgtgatagacttacaaagtatgcacattttctaccattagctcacccttttgag

SEQ ID NO: 139183 - DNA, 921 bp, Glycine max
  Clone ID: PAT_MRT3847_96690C.1
tgcagacaacatttggacgcggtagagaagaaagaaaggaaagggtagggtagatcaggcaggcttcagttcagccatgagaactcacactcacacttacacttatactattttctctctaattcttctctccttatttcttcgaacccattccgaggttataacgttaacctctgatacatttaatgataagatcaaggagaaagacactgcatggtttgtgaaattctgcgttccctggtgcaagcattgtaagaatcttggttcattgtgggatgatttggggaaagcaatggaaggagaagatgaaatagaggttggagaagtcgattgcggcatggacaaagcagtatgttccaaagttgatattcactcctatcctacctttaaggttttctatgatggtgaagaagtagccagataccaaggtacaagagatgttgaatcaatgaaaacctttgttttggaagaagctgaaaaggcagcagcaaaagcacttgaaagtaacaaagaattataacaacttttgaggtgcagtcattatctggattacaactagctctttactgtgggtggtgcacatcccagataagtaatcacctttgggttcaggctgagacattcattcttctctgttctgatcaacatttgtttgtttgacgtagcagttgtgagttaagaactaatttcgtacactaccacaatttctttctgctatactccacaattttcttttttaggtttatttatactctactaaactgatagtggcttgtcatgtttaaagtttcaatataatgatcagtgaattatgaatcgtacctcaggatttgtttatataatcatttggtcttttgaatgctcattattttcatgggattataccatcccaaaaaaaaaaaaaaaaaaaaaaaaccaaaa

SEQ ID NO: 139184 - DNA, 407 bp, Glycine max
  unsure (1)..(407): unsure at all n locations
  Clone ID: PAT_MRT3847_96691C.1
gctcacaaatcaagaaaaaagtattccattggaggtgatattaatcaactttttccagctcttggaaattaaaactctttttaaaagcgcaagttcatcacgttacacaaaaaagcgctcttaaagggccaataaaagtcactatatctcacgcatcaaaaattgatatctcagaccctgtaagtttaacgcacgcacttagagggttgtgcatctctcaggcctcanaaatggctgctttgaagagactgactaagccatgcagttcatctatagtatcagaggcgggcaccatcaaaaggttgtacacggcactggtcgatgaggggaaagggaacttggttgaaatttctcttgtgccagacatatctgcaccttctgataaattgtcccgtgtaactatatca

SEQ ID NO: 139185 - DNA, 502 bp, Glycine max
  Clone ID: PAT_MRT3847_96692C.1
atagaaaaaccctataaaattcaaaatttaggagagctatcatttttaatcagacactggcaaagagcagacatcacaccttggagccgttatctgataacaggaaaactaaaacccaacttttggtttctacattatgagactcgggcacctcacagaaaggagtttacttatgatgtagctcattaaggtaacactataattacaagcgataatatttattaatcgttgtgcacagttaccgtatcaggtatgataagtattccaaagatgacaaggctgctaaaccaacggcctatacatacttatgtaccacatgctatcggggacagagacttatgcctccgagacttcgcccaaacaatctatgccacctttgtaaaaacgagatatggccatagctatatggactgttccgatcattaatgtcggcactatatgccgaatgatacccttcatattatggagtgcatagaaagctgctgacttgtactgtgcactt

SEQ ID NO: 139186 - DNA, 462 bp, Glycine max
  Clone ID: PAT_MRT3847_96693C.1
atggagttcaaggccattttgttgttgctggcttttgcggcttgctatgccgcagcagttgttgagcaggatgatggatcattccagttcgacgtaattcagcaatcagttcacaaagatgcttttaaagcacaacaactcaaacgtctcgctaaattgggaaaagctgctcgttctcttcccaagtatcatcaaaagctgattgacgctccattcaaaaatgactggatcttggccaacgtcactttcggtcagcaaggtccattcaacttggcattctcaactggcgctgttcgtgcttgggttatcggagaagatgcagagaacataaagtcaggagttcatatttattatccagatgactctgatacctcaaaagacttacaaaaaacgttcactcaatatgacggaacttacacaacaacagctgaatggttcacagacttgatgcatttggaaaag

SEQ ID NO: 139187 - DNA, 264 bp, Glycine max
  Clone ID: PAT_MRT3847_96694C.1
ccacgcgtccgaacaaagtctttggttcagcagaagaccaagatgtcagtttaccggctgctcctacgtggcgtggccgtcgcccgccccatgttttctctgacccaaacccgatcttacgccttctcctccgtcgaagaagccgcggtcgagcggcgtccaccgaagcgttggctgcgcatcgagcctccccttaacgcgattcgtactcctccgcagcagggcccttcgcgcgaaccgaacgcccctcgtctacctgactcg

SEQ ID NO: 139188 - DNA, 347 bp, Glycine max
  Clone ID: PAT_MRT3847_96695C.1
tgaaaaaaaaacctttaaatcaaaacaaaacaatcaaaaactaaaaaaaaaaaaaaaaaagggtagaatatattaatataataaataactcaaacatatgcaaccatgcctcaattttcttaaaagaataatttccataacgtatcccatgctactttacgatattctactatacactagatcattaaccaattcttcatccattgaagacttgattattaacattcgcttgcctgctttatcatccaacttgtgaatactacccattaacatctattctaagtctatatggttttagatacacgcacactaaccttcccacaaatattgtcctattagatatgact

SEQ ID NO: 139189 - DNA, 462 bp, Glycine max
  Clone ID: PAT_MRT3847_96696C.1
tacggctgcgagaagacgacagaagggaagggattagatcagaaagtaacaactgagaaaccaaggagttcttcaccttttcggcgatttagcttcagcattggctttacaggtaaaggttctggctgtaaagaggttgcacatgtgccacatcagagctccatagcagcacttaaatctagttcagaaaatgtgagaggttatgctagctcaaaaatttcaggcaatgataaacctggtaatgctgtcaaaagcaggtctagtagccctttaaggagactactggatcccctgctgaaaccgaagacatcagaccatcgctcggtggagtcatctcaaaaagattcagtggtaataaagaagaattgtaggtcagctaatgggggatttgctatggagaaagaactggacagggaccagagggttggttgacaaatacacgcaataatacagttgatttat

SEQ ID NO: 139190 - DNA, 530 bp, Glycine max
  Clone ID: PAT_MRT3847_96697C.1
tacatgtgtagcagtaccacctgcttgggggggggggggggggggggggggggggatagaagcaaatttaaaggtaagagcaacgttttgctaacggatagaaggtgtggcggatgacgtaatgatagggacggctggagagaaggggtagaagaatagtaagaaagaacagaatagtaaactagatgtattgcgacgaaagtggagagaaggaggcaggcagataaacgatttggtgaaagattcctaactgttgaggagtgggctagagatcgcaatgaagactattagtgattgaagagggcagacagactatacgcactaggggagctgcaatagtgcaacgcaaccgaaataaattggtttgatagaggggcagcatactgatgagtatacagcgagagatgtacaatgaacatgggtatatgttaaaaaataaaacgctagcttgatgctaaacaagattgcagagataataggacaggcatttagatgttaagcaggtttactgcaagcctgccaagatagac

SEQ ID NO: 139191 - DNA, 289 bp, Glycine max
  Clone ID: PAT_MRT3847_96698C.1
ggctcgaggccattcgtgatgtaggaaccgcacttttctgcttttttctagtggtctttcatccgttgaacaccttaatgtgcacacgctgcttcttcagcttgagaaagggctcaagatacctttctattcacatgtgaatttgtaaactagggacactccgactagctgtgtgaccagatctgtgatagctgtgctttatgcgtgccttgtacaagacccttgctgctaggatgactgtgagacatgcaccaagaccaacatggtcatggtctttggagagatcaca

SEQ ID NO: 139192 - DNA, 337 bp, Glycine max
  Clone ID: PAT_MRT3847_96699C.1
cttttgatattatctttggggccccaaagggaagcaatgagtcagcttgctattatcacccttacattgggaacaggaaatatgtaggccgaatactgttctgcaataactggcataccattaggataaagggtgaaaactactctaacaggcattacccagaattgcctttaagtacccatgcctaaactcatgctgttcaaaacacaaccagataaagttaagcaatctacatagccagatgtcgtatgttcacagcttaaccgcacacaagcgctatctgccggttatctgagaaaggacacacaataggagctaaattaaacagtccccgggt

SEQ ID NO: 139193 - DNA, 150 bp, Glycine max
  Clone ID: PAT_MRT3847_9669C.1
ctgaaataggcgaaaactttatgttgaccaaatagatatatatggaggctggtaaatcttatacattacaataaaaaagctgtctctgcttcaccattctgcaacattcacttacattaacacttagtaactggacacaacttttttttc

SEQ ID NO: 139194 - DNA, 422 bp, Glycine max
  Clone ID: PAT_MRT3847_966C.1
tggtttttttttttttaatcatgaaggagaaatattctaacataacacgggtgaatgacatgaagccgtgtgaaccatgatgcgaaatacccttgagagagatgttgtcttccagtgtgatatgctacaagctataagtgctgctgcccacacgagggacttatctgagccctactatgatatctgatcataacaatctctagcgatgggggttgagagcgttgtaagtgacaggcttacaaggaggggcagggggcttgttgctatgtgacccccagtgggatttacacgggacgtagcaaaacgaatactgggcatggcatgggctcgctgcgatgatgcaccggaagcattctttgggtgctactctgattgtaagcgcagtgatgtacttatttgacacgagcaaacccttggtcttg

SEQ ID NO: 139195 - DNA, 270 bp, Glycine max
  Clone ID: PAT_MRT3847_96700C.1
aaaaaaaaataaaaaaataaaataaaaaaaaaaaaaaaaaaaaaaaataaaaaaaagataaaaacaaaaaaaaaaaaaaaaaaaaaaataaaaaaataaaagaaaaaaaatttaaaaaaatttaaaaaaaataataataaaaagcaagaggaatgtttaccgataaaaattagattcttaataaattcagttaactagcccttagaattttaaaacacttgaagaacatgtttattgatgaaataaactcttatttttgggtgaatatca

SEQ ID NO: 139196 - DNA, 613 bp, Glycine max
  Clone ID: PAT_MRT3847_96701C.1
gatttccctttccttagagaaaaactgcacaacaaagcaacagattaattcattatttttcttcaaaaatggctcgtgcacgccgtgttgtggttcttgccgtggtgatgttcgccatcattggcttggcctgtgctaagaagcctgcgccaccaccagaggcctctgccgatgactatgaggacgatgattactccatcggagcccttaccgcggccagcggcgcggcttcttcacccaacagcgtcgtggctgcacccattggtggacccgtgcctcccggtgctttcgacaatgctaagggtggttctccttccagcgccgctgcctcttcctcccttggtcacttctccgccgtcgccggagctgcctctgctgctcttgccggcttcttctatttctgagttctcatcattgccgctccgaaggttgcatgcaatcatgcaaagatagagcatgcaagtattagaagtgtatttatgtatattgtaattcaatatacagaagagttataattaatattaaaatgttatttcaccgaggtctcaagcacgtaaatcaactgcatgtgagattattttagcttataaattaaaactttcaatttaaatat

SEQ ID NO: 139197 - DNA, 305 bp, Glycine max
  Clone ID: PAT_MRT3847_96702C.1
ccctcgtgtgcgcgtgagccaacagaggtgatgcaggactcatgatagttcagggtccactacaccaggacaacatgtcattggagaaaagttggcaacccataacaattaggagtgcaccacaactccaagatgatatttcaggtactcgagctcagggcaccatccctcagcccattgcacaacagacggaacagaaatcaaaaggcaaccgtgggaacaccatcgcattgggatactagctagcagaaagtttgtcaatcccctattgaccctctcggtggatgaatgttagaggacaaaac

SEQ ID NO: 139198 - DNA, 327 bp, Glycine max
  Clone ID: PAT_MRT3847_96703C.1
ggaacacacaaggcaaaaacagggtttatttggacatagagaagtaacatgtccatgttttaattttggacaagcataaccctttcttaccaaaaacagtttgttattacaaaaaaccaagtgttattatagaagccttttttataaataaaggggaaggattaacttgtatttattcaaagggctcccagttttgagtaatcactgtaaatgttggaaaagaaattggggacttaaagcttccaacttcggattccaaggcctcccaaataacagggactgtattgttaccaggattgctaaatgcaaaaaaatttcttgccttca

SEQ ID NO: 139199 - DNA, 223 bp, Glycine max
  unsure (1)..(223): unsure at all n locations
  Clone ID: PAT_MRT3847_96704C.1
cnagatttntcgtgtatggagcttaggggaancaagttgccagtaatncaccagntncagttaacaatantgagcaaaanagagganttggatggtcatcaaccantactgctggtgcnttggctggtccaagactngaaganaggcgcctgannccagncaatgctcttnnactananaatgtcaatganaggtcctatgtacacgcgtagccccaattctn

SEQ ID NO: 139200 - DNA, 397 bp, Glycine max
  Clone ID: PAT_MRT3847_96705C.1
gtcccataattatatatatatacacacacacatactggtggccttttacttgaaaatcatatgatacacaggttgatatagtggaccaatttgttaagaacattttcactctgttgaccaatttggataccgatgaaccaacctgtcaatcttctcattccttacactaccctacgcctctaatattgctcacacattacaagaattttattacactaaacaaacgtgtagtaaggaagagattgttttttttttaatgaatgaacatcatgttttcttgaaaagaagaaaatacactattgtgattattgagaatgattgtgaatatttttgcagaaattaaaaagtttcatgatgtgtttatcacggattttaattatgtttaatactcattttt

SEQ ID NO: 139201 - DNA, 408 bp, Glycine max
  Clone ID: PAT_MRT3847_96706C.1
aaaaccttcccccaacccatatataaataaaaaaaactaatttccccctaattaaaaaattaaattaggggacatactaaccccaaaaaaaaaaaaatttttattaaaatgggggggcaggaaaaaaaaaaaaccttggaaaatagaattataattagacaaaattcccttttgggccccccaatttatccccaggttgggggggggccccccaaaaatttaatttatcaatggggcccccctattttaaaaaaacgggcaggggggggcccccagggcacaatgggggggtgaccgggaggttaacggccacgggccatgtttttgggggaagaagacgggcccgggttctgattgatcaaggaaaataacaagggatttcatttttgaggggggtcccattcaatc

SEQ ID NO: 139202 - DNA, 482 bp, Glycine max
  unsure (1)..(482): unsure at all n locations
  Clone ID: PAT_MRT3847_96707C.1
gcggccgcccaaaannnaacaaacacagcgtggaaacttcccanggagganggggcacccacgaggcggncaggggaaaacgagggaagaaacgcccaccaacagcacaaanggggnacagcnggccagggncaaagcatataaggggcacaggcgngcacaggtcaaccgcgggaaagacccggggaccaacaccaaacacaatggaagggcagggaccaaccagatcagggaacaaaccgcggcaaccgagagaaagaccaaccaggaaaagacgaaccctctaacagatgcggggaaacctaagagaccagggcatgggggacaacctcaacagccactcccgttccagggaacacggacggaccttgggaccccaaaagggaccggggggaaccttggacacccaaaaacagaggggaaacccgaatgatagcatccaaccccacgggcctcccacaacgcctggggcacgccaaagc

SEQ ID NO: 139203 - DNA, 502 bp, Glycine max
  unsure (1)..(502): unsure at all n locations
  Clone ID: PAT_MRT3847_96708C.1
aacccccaactccaacctcttggatggggtaccgggctttcttttcaacccgagctatgattaagctttttaaactgaaggggaaggtagagagcttcgnaaaatcggtggggggccacctgtgaaaaaacaaattgcgtgggagaggtncgtgcttcacaaanatataagtgagcgtgagtctaccaaaatcatgtgccatgcaattccccaatggggaagatgatctgaggaactttngagtttcaattcnacctgaggatgggtattacttagggggggcatttttggtttcctttcaagtgtctcccatctatccacacgaangaccaaagggtggggggagggcnaanggctatcatccaaatattnagcttnggaangggaatntgttctgctcaacatccttacgaggaagagttgggaacctntgccttaatataaacactgggatctatggggtatgatatcttttcacggaaccaaattacgaggggccact

SEQ ID NO: 139204 - DNA, 118 bp, Glycine max
  unsure (1)..(118): unsure at all n locations
  Clone ID: PAT_MRT3847_96709C.1
aaactaanctagcgaanaganatgtccgngancggannnganaacttactncgctgtggcgcggnacatagcgagaacgctggggccacaacnacaccatgtctgatgacatattcca

SEQ ID NO: 139205 - DNA, 543 bp, Glycine max
  Clone ID: PAT_MRT3847_9670C.1
gcgaagagagggtttttgtctcgcggcgtgagcgtgttttgtctgtgttgtgagtgagagtgaaagtcagagagtaattgggaatttcaaatattggttaagaaaaaaagaataagggaccgttgggacttgctcgcgccatggagaaggagaatgagctccacgccaagacactcatctgtgccctcaaccttctctcgcgcgacctacctctcccccctcacatcctcaattccgtctcttccatctaccgcaacaaacatggtgatggagggatttccagagaggatttgatgacggatcttgaagatgcactgtcaaagcagcgtccaaattgtgtgtctggtttcaaattggagcaagcaagggataatcggtatcggagtcagattcagcatcggttaaatgagcttcaagaattgccttcaagcaggggagaggacctgcagacaaagtgcttgcttgaactttatggactaaagctggcagagttgcagatgaaggttcggtctgatgtgagttctgaatactggctcaatgcta

SEQ ID NO: 139206 - DNA, 290 bp, Glycine max
  Clone ID: PAT_MRT3847_96710C.1
taacctagcagcggaagtaatgaagaaattggtggccattgttccatcacatcgtgagctttttgtcactgagctggctgatgcagggcagaaggggacttcatctgcaatgaatgagttacgtgtctttagagaagcatagaaagctctgctaagaacctcttctactgttgtagctgctattttgagagtctagcaagccttgagttccctagtcaccttactatcggtgatatataattaaagagttactcctgctcttctgtggtgtggtaaattaattcatcatt

SEQ ID NO: 139207 - DNA, 414 bp, Glycine max
  Clone ID: PAT_MRT3847_96711C.1
aacgtaaccttgactgttttatcttcttctcctactctcacttttactctctaaaatttagtttttgctaaatcgttttataaaatagtttttaaaaataaaacacaatcaaaacaccctgtagtgtaccaattacattaaactgttttggaacgttaccatatgaatgacctagcaatctagaattattagcttgtatttttcctttttgtaatatggttatcttcattggaagtaaaagcctccagaggcaatggtttcctttatttttgtaagactgaatatgtcacgatataaagtgggagagaatatcacttacttcccctaggttatatgtaactgatgacaatagttctaaattttttagtggactagtttggttaaaattaaataaagtgttttttaagaaacata

SEQ ID NO: 139208 - DNA, 583 bp, Glycine max
  Clone ID: PAT_MRT3847_96712C.1
tttggctgattttgtgcttgcatggtcgtgagaagagatagaagggcatgctcgtcagaagatgatagaagggcatggtcgtcagaagatgatagaagggcatggtcgtgagaagatgatagaagggcatggtcgtgagaatttggtctgagtgcatggttctgagaagatgatagaagggggagcttgagcgcgagagaaattagcgatcgatcccctgagaaagaaaaataaaaacgagcccttgctaccttactacgaatgtctcctttacctcttctcctccttctcctgccctcgtaccagccctcgtgaagaaaatcggcgacgcgatggagtcgtaaaccggtgcgaagtacaaattagcactacgcgaagcctaggtatataaaggcgatagagctaaagcatatcacaggggaaaatctatcgacggaatcgcccctgacctcagtcccgaaagaaacaacttaaccgaacccgagtccggcatcggctaagcgactaaaggccgggattagggaccaccgggaacgcgctccggcgagaagtgcaagtcgaaaacattactaaaatccggtca

SEQ ID NO: 139209 - DNA, 418 bp, Glycine max
  Clone ID: PAT_MRT3847_96713C.1
tggcaccggtccggcccttccgggtttacccacgcgtaccttttattttaatttcctcttctattagaatatagcacgggcaccgtattctctgatgaaaccttttgcactgtggacgcagtcttcgccgcggggcataaccgtcactgaagctgtctcatgcttttttcaccgtccctcacatgaccaggttcgaagctattgccatcggaaattagctacttctcttttgttactgaaaaatatgagttgacaaaaaatgctcatacggaggctatctgttcttctcaacatcaatcaccagaagcttaatattatagctaacccagtctcggattcccatctatccaactcatcctttcagctccttcactctcccagtgcttattaaataatttgtcctaatgcatacccggat

SEQ ID NO: 139210 - DNA, 327 bp, Glycine max
  Clone ID: PAT_MRT3847_96714C.1
cctgtgaacaatctaaataaacgggattgagagaaccctaagaatcaaacatgctccgtgcaggccaatgcactaactgccgggcaaaattaacgatcaaaaatcttaatactgcacataggggaatgggtgggggaatcaagagccagctacaactcaacactttaaagggtggtttacagggacacttgactggcaaaggtgtcattcctacctcccaacaggagttacattgaccatatccccatcatgaccaaacggcaactgtgctttaggctctttgaaccaactccggaattcatgatggtataaaatccgagctgaaac

SEQ ID NO: 139211 - DNA, 1001 bp, Glycine max
  Clone ID: PAT_MRT3847_96715C.1
cccggactggtccctgaattcagctgctgtggttgagtcttcagtaaatctgaaaaagaagaatatcaggaatggcaaaaacaagcagaaacatgaagaaagttcatctcaggctgcactaccatcggcaataccaaaagaatccaatctttccaaaagttcagttgaaagtgataagtctaaggcttctgactttgagttagatcagggctcacttcagccagcacccttgtctaaagatccaaatcagttttcagagcaacacaaatatttagcaaatgaggaatcccatggtagaatgaatagccagtggaaatcacagcattctcgtaggatgccaaaaaatatgcaggccaatagaccggcagagaaatcccatgggactgatgctgtgatgtgggcacctgttaaacctcagagcaagagtgagatcgtggatgaattgagtgagataagtaaaattgaggcagttaatcctctaaagagtgagcagcaggtgcataatttaaaaaataagagggcagaaatggagaggtatgttccgaaacctgttgcaaaagaaatggctcagcaaggaaacatacaacaggtagcttcatcaagcagtcaggctcctactgatgatagcattgggagagttgattcggcatcactgggcccccaggtcattcagcataccaatttagttgttggaaaagtgggttctggaatggagtctaaaaacaaagatggaaggcatattaagcagggaaaagcacatggatcatggcggcaacggaatctaacagaatcaactaatgtacatgaggtgcatgatggactggaccatgatttaaactctggaccaacagagcatcatcatgatcagaaggctgaagtaagctttgtgaaaggacaaacaaagcattttaatgactctggtgatattgatggttcatacaattctaacagcaataatgcagctgctttgggctcagctcctgttattaaagattattcag

SEQ ID NO: 139212 - DNA, 218 bp, Glycine max
  Clone ID: PAT_MRT3847_96716C.1
ggtccaatggggtaatggttggtggtggtaatccgtcctcctcctttggtggtccggggttggggttggtttttcccccaaccgaaaaaggtcttgcgccggtggaaatggtggttccggaacccccggaaattgcggaaacggttgcggaggctgcaaaatgtacccaaactggaccaaaacggattcaacaacaacggaaaccttggccatggaat

SEQ ID NO: 139213 - DNA, 154 bp, Glycine max
  unsure (1)..(154): unsure at all n locations
  Clone ID: PAT_MRT3847_96717C.1
nagagacacatncnaaagcacggaattnggctcaagngaanccagagannngcacnagcagagggacanaganaagntngagancaatntanncgagactannagactntganaaaggaggaatannggtatgcanacaagntnatnnatacnc

SEQ ID NO: 139214 - DNA, 293 bp, Glycine max
  unsure (1)..(293): unsure at all n locations
  Clone ID: PAT_MRT3847_96718C.1
gttagctataggggacttatgtgaggataatgtctgtgaatccctatagttctctatatgtgaaatgtgatggttgtgtcggaaagaacagtcagctagaattaagatacacatgtggcaaggtatattggatanaatcatcaaactgatttgcctaacaatgagaatatatacttatagattcaacaanacattagatnatatatgtttacttannatacttcgataanaattaacactacanatagntactttggagtatgcgtgccatttcgcatctgggttatgtctgt

SEQ ID NO: 139215 - DNA, 420 bp, Glycine max
  unsure (1)..(420): unsure at all n locations
  Clone ID: PAT_MRT3847_96719C.1
ctctaatcctagattgccctgcattcaaggaatggacacatggaaaagaaaacanaatgcacnnagtcatatttaccnaggtcttcagaagccatnntccgcggggagatnnagtggtggtggtnntggaaattttttanngtggaccnnaanntntnnnntgganccttgtgaaaagtagcgaaaggaagttcanccttaagttcgaaattctcttatcaattttttgaagggtttattccaaagtcatattccaaaaaccgaagaatttttcacccttcgttccaccagatagaacacccctttcaagaaggaatgggaacctgtgaattttcaccgggatgggttcccaacattattcgcttgaccactatttttattactggcactggggtaccaatttatttcttaacccccttt

SEQ ID NO: 139216 - DNA, 302 bp, Glycine max
  Clone ID: PAT_MRT3847_9671C.1
ttttattttttttttttttttttttttttgaataggtacttactcattgtaaagggtacatgttatcatggtttcgtttaccgaaaaatccttattgttgttttattacagtctttattttttgattgacattccacaaggggaaacacctaaccccagattgttcttctacctcttaaaaaaatgaaattaattttttaaatgttctggcttatattttatcaggcccaatttctttaaccatagttgtaccttgtgaaatccatctttaagtttttgggcctttaataaagctccctttt

SEQ ID NO: 139217 - DNA, 610 bp, Glycine max
  Clone ID: PAT_MRT3847_96720C.1
aattctttttgtatatacccagtcccctacttggtcgagtactatttgaaggagcaggaagaatatcaagaagacctttattaccaatatataatctcatttagtagatctgttatagtttacaattaattaaatatggattcgaagacgaagatagcattacttatcccaggcatgctggccatgctccttctgttctcaaaggtggcagctagggattttaacgagggtgaggttgtcaaagagactaatgaagagggtaatgccaaatcagatggtggtgggggtaaccttcattttatgtcttgttcacatccaactccaagtggacattgcccatgtggctgttgttcggggttcacagagtcgggaggttgcgaaaagtgctgtgctagccctccaggtggtggttatccctagacgtggttcgatctgcatactaaataatatacttttatgcagtaaaaaaagtcatgaataaaatctcgtcttgtgagtggcatggaaccactagagatatttcacaattaaaaaataatgattgtacctgtgtgatcataagtttaagagctatctcaaatatatgctcttcgaatatagtcatacatga

SEQ ID NO: 139218 - DNA, 571 bp, Glycine max
  Clone ID: PAT_MRT3847_96721C.1
cacctttactcacaatggagagaccgacacctatccctactatatggaacttacctcatttcaccatataatgaacggatgtgttctcccttgacataatgttactctcgctgaacttgctgggatacatggacctgatgtgaactcttgaagggatcttctccatggatctgatgatactgctacgcatgaagatatgtatggcaagtgtgagcacgagggaatatttccaactgcattgaatactgactcaggtcaggcagctgtgatccttccactttctgaatatggtgaagtagctccaactaccgtgttcctttccatgagacataactattgctgagacaacctcgtcataccaaaccctgcggaatccgttgaagcctataaacatctccaatgcactgagaatttatcattctagtcacttgccaaccttgtgacattaccggtcgacaatctggggcttgaagatatatatatcgacgagccttacccgagaaattaggctgaagaccttcactacaaatgtacgcacactatacttgttgctctatgactgaaatcacac

SEQ ID NO: 139219 - DNA, 588 bp, Glycine max
  Clone ID: PAT_MRT3847_96722C.1
aataagcaaaataatgttcctacatcaagccagtgcttccaaatggatttttattatgagggtgagaaacaggattcacaggaaatgccccgtatcctgcatccccaaagggatttgctgggttcatcagcatatgctgctgcagtggctgatatggttggtaatgaaggaatggatttatatgctgttgagcaattgctgccatttgtacggttgacgtgggagggatgctacttgataaagcaaaaggatcttgcacttcaaatggatttggggctggcactacatatactggttgctgcgcagatctatatgctccttcatcatataagctgctaagggtgagagaattcaacccacccgccaactgtctctcattgactgaagaaatattggtacttggagtggagaccagggcaatctcccattcagttggatcaaaatctcttgcctgagcaccacttgaatctaaagcagtacttgcagtttcagcggagactattgcctaggccagatcatttctttcttctatcaaggatgcatcaggtgtactgacattcaaccccagtgagtctccggtttcaaaat

SEQ ID NO: 139220 - DNA, 156 bp, Glycine max
  Clone ID: PAT_MRT3847_96723C.1
atggcagcaccgagactacgtgcagggttaataccagttccagtgattgggattgtggccaagtgcaccaagaacacagcgaacccaattggcaaggggacgtgtgagtctctagcgttacacttggcatcggtggctgagaaaacgggtagacag

SEQ ID NO: 139221 - DNA, 1462 bp, Glycine max
  unsure (1)..(1462): unsure at all n locations
  Clone ID: PAT_MRT3847_96724C.1
tcggaatttttccgatttaagtcaaaactcaaaagctctcttgtaaatattgttataagcattttttgagcacaataaattaatccaaacacttattgccatatgtattctcaagatacattcataagaggagactaacaaagcaattttatgcaatagattggattcagtcttgtcatcatcatcatctttacggttagaggtccattcctgataacgatgaagactaccagtgaagtctgtaaagagaccatcaacgcctatcttgttgatccagaaatcatattccatatacggatcttgactgaagttgaaatgcaaaaatgggaactcatttcggtaagtatatggatgcacctgcaggttatgagcatgtgccctggcaacaagattagtaggatttgtcatataattttttaccacaggtaccactgtgtccttccaaggtccaattcccacaacatattgctttatgtactctaggtattcatcagatgtaatctcccaatatgactgattagtgtcttgagttggaacagtaacatcatcaattaagaaaaccttgggcaagtccgttttatttgatatatacacgagtgaagttggagcaaatgactgaataaatacaggttgtctcaaccaatcttttgacaggtaggaacccttgtacccatatttctgaagtgtctccacaaacttgtcctcaacttttgatccatgggaccatttaacatgttgattgataaatactggattttttatctctggatatattccaacaactctgggtgcatccagtgctatggtaatgaactcttcaaaagtgatgatttgaaactttccattaaactgttggtccctgaagctacacctctgtttcaccctcaatgactttaattcctttaatgtgaaatcaacagtaaaaaagccagtcatgttttccccttggacttcatatgttcttttacgattagcaaactctgtgcgatttgcaatgtcagtagtattatcaagggtaacatcatggaaacatacaagaacaccatctttggatgataagatatcagtttcaatgaagtctgcaccctcctcaatagctctcaagtatgcaggatgagtttcctcaggaagctctccgtttgaaccgcgatgagcaatgttataagggcgaaaagtttgtaggggcttcctatttccatcatcacctttgctgggaagtggatacaaaggccttgcattgcatccaatgacaagcaatagaaatacaaaaggagtaaaactgggtaaggaagccatggagaaggagataagataacgatgggtctggttgtgttgtgttgctcacttcatcgtttccgagtccaatatattggtttcaactgttattaaataatggggtcttggtgcctcgacgccgaattccgcagncttagcgtagcggcgtgncatgcgagcgtcacta

SEQ ID NO: 139222 - DNA, 398 bp, Glycine max
  unsure (1)..(398): unsure at all n locations
  Clone ID: PAT_MRT3847_96725C.1
ttttaaaatttttttgtatgagaaagaaataacaactttanctttggttaggattaaaaccctttttttcaacatatgaagtatcaaataatacactcgccaactatgattgaagggtccacaaattacaattgccacgaaacccctgcacttagaatgctcaaagaaacgggaggcttggcaacttttttagtatcaccaccccaagcgagcttgaattttgcaacaacattcgtcgagaaacggtcaaattcttttgacagatcaattaaacccggaggccatgaacccatgcaggtcaagaaaccatccaaaatgatcattgtttccgacacagactcaaagggtcctgggtgagcagcttcatacaccggctcagtgtggaaaaccgatgcttg

SEQ ID NO: 139223 - DNA, 188 bp, Glycine max
  Clone ID: PAT_MRT3847_96726C.1
caaaaaacaacgaaaggggattcgagtacgaatgccaatctaaagtgtatgggttattactacagggattatgcatttaaaactatacggtagaatcagacgctttacaggattctgactgacacactctagcgagctacataacaaatatattcttgtgtctactaaaaataatttacagcacatga

SEQ ID NO: 139224 - DNA, 204 bp, Glycine max
  Clone ID: PAT_MRT3847_96727C.1
gcgtacagtcagactaggatgcggctcgactaacttgctgggcacaaggggctcttaagtactgacgaaattctctagacaaataatgaagtgtcaacggatttactgaggcaaaatgcagaaaacatcgttgttgtcttggacaatttgacagagacgtgggtgacatgggaaacattctccccttcacggggaaggggagag

SEQ ID NO: 139225 - DNA, 477 bp, Glycine max
  Clone ID: PAT_MRT3847_96728C.1
agagtaatcatgaacgattaaaattaactattaaggagggtcataaggagaatagataatgaagcatacaaagtatcatctcacatacacatctcgtctcatcataaaaggatcgtgatttttagctccagttcatatctcaggtctgggctcataatttccgcagctcaagccaccaagggcgagtgcaagacaaacttcttccacattgcggatgcttcgtgcgccaaagaaagtgagcaccgcttatgccttcttccccttgacaacaatcttgccgtgctcgcacttgagactgatctcctcgccgaaggtgtagtagccgtactcgtgctctggctctggctctggtttgggcgtaggcttgggctcgggctggtgctcgacgggtgggggtgggtgaggagcacgggtaggcttgtgctccggtggtggaagtgggtgtggcacacgagtgggcttgtgctctgtggtggt

SEQ ID NO: 139226 - DNA, 300 bp, Glycine max
  Clone ID: PAT_MRT3847_96729C.1
tcatactgggatttttgtttataactcaaaaagcagcgttaatcaagaggcttggaatcccttttgattccctcactcattttcaccttattcatcttatagattcctcctttctctcctttcctttctctttcaccttctgggagttttcaaaactcgcttaaaaccgagatgggtgcccgtcagcgagtgtttacccacagttcttgcacggcggtgctgttcctgtacaccttgtcgatagggttccgtttccgtcccaccgatgagggagcctattgacttactaccctccgcttc

SEQ ID NO: 139227 - DNA, 459 bp, Glycine max
  Clone ID: PAT_MRT3847_9672C.1
aattcggctcgagtacggctgcgagaagacgacagaagggggagagaatagagatccagtcaaaacaatatctttctctctctgtttggtttggcctcttgctgtaagaagccagccacagtactgttgcgctcctgtggaaccatcgatggtgtgtttctcattctttcatgttcctttcgcagtttcaatctgtttggtgaataaccacaatccttttgtttcttctcagggctttaacaggttccacatcggttgagctttgtgtcagatatgccaatagtgttatccttattcttgtggtcagtatttctcttctttctttcttctttttcaatgagcttggatttgtataacaatatgtaattcaatatttctccatattttgctttttaatttcacttgtgacttctctgatttctattattatcatgttttagatttattttgaagaactct

SEQ ID NO: 139228 - DNA, 149 bp, Glycine max
  Clone ID: PAT_MRT3847_96730C.1
atggaaatgaattgtagtggaaaatgtagtaagttttaatgaaattttgaattggtggatagattgtgctttgtttattattgactgagttatttagaatgtgaacatagtgctggactttattacaaaaaaaaaacattttacaatac

SEQ ID NO: 139229 - DNA, 236 bp, Glycine max
  Clone ID: PAT_MRT3847_96731C.1
gacaatggggttctaatgtgctgattgtatgctgttatttcacgtactgcatctgatggtggtctgtctctgtgtttgctgtttctctcacatgatggtatcgtgctgctgtggtggctgtcagtctgcggtagctctgccggttctgcatctgctgcagatgctgcaacatgtatccatacctgagctgaactgagtcaaccaccaacaataccgtggtcatgggagtggcacct

SEQ ID NO: 139230 - DNA, 448 bp, Glycine max
  Clone ID: PAT_MRT3847_96732C.1
gccaaaaacgtaaattcggcttatagaaacaaacatgttacctatacctgacacaatgctgggcgggcacctagcattcgtggaaggaaaatggccagccaaatatttaaaggcgtgtgcctcaaaacaacataccatgtagctaaaatattcttttttgaagacacctagacatattaatccaatactacaacataaacttagcctacgtaacatatgggataaaataaaaggccggcactcttctgcaaaactttaccacgaagcgatgacccagttgccctgagccacgtgcctaatttcatgtggcccagctcgcgaaaacggaggaaaaaataacacctgctggatgcacaagactggtgcggattaaacagcgagaataccgtcccacttccttgagactttgaagaacacaatatcttgtccttggaagattacacctccc

SEQ ID NO: 139231 - DNA, 449 bp, Glycine max
  Clone ID: PAT_MRT3847_96733C.1
gggggagggcccccaaaaaaaattttttttgaaaggttttttgaccgggccttcttcaaaccaaaaaaaaaccccggctttttatttgggctttcccggggaccaaaaaaaacttcaaaaggggaaaaaatgccccccatcgcccgcttcaaaagggtgaattttacctttcccaccccttttgtcaaccgggagggggaaaaaaaattttttgggtctgaacccgtttttgcgcaggggttttaactctcccaaaaaaaaaaggggaaaaaaaacaaaaaggggccccccggaacccaaggggagacccaggggttttaaaaaaaaacaggggggttcgggccgggaaactttccaactttaaagggccaactatgcccttggccctaaataaaccccgacccaattgggtttgagccccaaaaaaaggggcacgaaaataaaccccc

SEQ ID NO: 139232 - DNA, 374 bp, Glycine max
  Clone ID: PAT_MRT3847_96734C.1
gatatacaaatattgaaaaacgatttgctttgttaatttgatggcgttgattctccttttatttcttggtatgagcatatcatactacgaagttgatgcaaggagcaaaaatctaccagatatgcaacagagttttaccagatcactaaatttgaagagcattcttcctacaatgaacagtgactttgagtgcatcggtatatacaagcaaccagcttttaaacatcgtttattgaaaaaccacaaaatccagcttaatccgactttctcaaggtacacgatgcaaaccagactgccgttcatggaaaaaacttttcaaattcataattccaacaaaggatgtccttcaggaaaagtgcctattcgcatgataa

SEQ ID NO: 139233 - DNA, 308 bp, Glycine max
  Clone ID: PAT_MRT3847_96735C.1
gctcgagctcaactacaaacaacattttatatagttttatctcttttaaacacatatcatcacctggggggtgccctttctccgtggaggggcaaattcactatctaaaaaatatattgatcaagattattgatccttcatcatctattctacaaatctacccttctgattttgagattgacataaatcgaaaacaatttttattgcacgtagttttccagttgccattcattacttaaaaaaaatttatactttccacatgcaagcttcaaaccacattaaccgtagaagaacatttcctaaataat

SEQ ID NO: 139234 - DNA, 213 bp, Glycine max
  Clone ID: PAT_MRT3847_96736C.1
gccatacttatggagactagcaatttatatcccatagactccctgaatttctacaaaagtgcaatgatttatgcatgcatggggaacactgacttggaatgctactgaatttatgactcgatcttactacatggctattgcttactgagtgtctaagatatcaactctacgtctgactactgtattgagataggtaatgtgactggacaagaa

SEQ ID NO: 139235 - DNA, 833 bp, Glycine max
  Clone ID: PAT_MRT3847_96737C.1
aaattgtttgcgcgtataatattagaaactccccaccttttcattttggttcgaattaaacaaactaattcattccatgcacacaaaattagttttacatgaccagttttatttgtttaatagcaggaccatgacgaaaattagctttgatgcacctttttaatttctgtgatgagtttatgtttttttgagctgtgccaccgcagaaagttctacttattattttgataaggagttatagtccatgattagttgggatattgctgtttagtctcaaaggaattggattttttagcagaggggagcataaatcgttttcattcgagaaataatataatctggttgtgatattatatctgattcccttgtccggttacttaattattagatctggggaatgattcaaaaaaagaaattattagatttggggtcccatcataaattgattcatgttcatcaacggattagtttcgtgttctctagcctgttcttgatatttttcagggctatatgtagttggccggctcgtatctttattcaattggtccatcgtagttgtcaccaactcatcatttatcactctgccattcttcaccaccaccagctagtgcctagtcaagtcctagtcacggttttgttacatttcataaaccaaattcacttgtgcgatccataaattccataagaccaacgtggtgatagttattagatctaccttccctttgaggatcatgagtcaaaacatgccaaatatttatcagtgatgagatcatgggacccctacgaaataaaatatccgtggttactgatgtaaaaatactttctttattatg

SEQ ID NO: 139236 - DNA, 312 bp, Glycine max
  Clone ID: PAT_MRT3847_96738C.1
ggccaaaatttaacagttttaattaactttaaaagtcttaaaaattttaatttctttaaaaaaaaaacaaaacccaagggtccaaccgggtttgaaatgggaaaggtccaccaaaaaaaattcgaaaaaaagggggggaaaggctccccaaaacaggggcccgtgggcgcaaaaggaggcaaaagaataatttattttagggaaaaaaataaaacccccgccggccgaggcaaaaattgataaatgtaccccaaggctaccggggtccttcaagcaaaaaaacccacggggaaattctaacatgaccctggc

SEQ ID NO: 139237 - DNA, 759 bp, Glycine max
  Clone ID: PAT_MRT3847_96739C.1
acagaaaaaaaagttgttatttccatattagagacgggccgaatggggttgcagaaacaatacagtatcaataatcaagacattgtatataacaataatgagggtggtttgtgggagtaagttgcagaaactcaatagttaactagagagatttctacatattatgcaagagtttttggagttggtagagtcgataaatgagagcctgtaacaatagtaatgcagaataattgattggtggtgttgagcaagatattatattgtccgcaaactagaattggtgtggtaactcagtacagacatgcagaaggtgcaggtggatttcataggtatgggtggtgaaaatgtcgaggatattcatgctttggtggtaacgtatgagctggtcaggttggtaaaaaacaaggtactgtcggaggggccttatgcagtggcggattctggtgagtgactcgcggagctggtgctggtgggtcctccgaagctccacgaactggtggtgaagttgaagaacttgctcttggttgttgtggttgttgggagttcgacgaggacggtgactcagcgtggtagggaggagcctgtggcgggtaatataatcttggagatgatcaatgtggcgaaagagccggtccacctggtggcggctctggggatgtgggtggtagcgatggaggtgggtcagccaggttgactggcgaagatggcggagcaccaccgtgatgcgctggagcggataaaacggtggcggacgcgtgg

SEQ ID NO: 139238 - DNA, 366 bp, Glycine max
  Clone ID: PAT_MRT3847_9673C.1
cccacgctttcatttcacatgggcggacgcgtggaaggcatcctaccagatctgccaaggctgaactctgccggtaaacaactcgaggatggaagaacccttgttgattacaacattcagaaggaatccaccgttaacttggagcttcagtggagaggtggtatgcatattgtagtctaaactgggaccggaatgaccatatccttgcaggtggagagtacacacaccatagacagtgtgaaagcttacattcacgacaaggaaggcctcccaccagaccaacaaaggcatatttttgcctggaaacatcttgaatatggaataacccttgcagactatatcatccagcaagcatctaccctgcac

SEQ ID NO: 139239 - DNA, 365 bp, Glycine max
  Clone ID: PAT_MRT3847_96740C.1
aaaccggacactggatttttatacgattgctattaataataccgacaaaacttaaaaatccaacttactataccgaacatagtgttgcatgggtatacaccagcagaaggcctaaaaccaagttttgcaagtgcacgctaataatggtcagtctccaagattacttgccaagtacatgaagcattacagcattctgggcatgcattcggttcttattttgggggaagactatggaatttggagctttaataactttgtcagtaacctgcacccctttttccgggggtaagcagtgcattaaaaaatgcctttgaaccggccaaatccataatattttgttcacctgaaatcctttaaaaactggg

SEQ ID NO: 139240 - DNA, 448 bp, Glycine max
  Clone ID: PAT_MRT3847_96741C.1
ggctcgagagctagatcatgataagatggcagtgtgcattggggaaattccttccattactgggaaccttggtgtttggggaattcttacttggctaaagaaccatatggataaatggataaattattctgggattgggattgatcgactaagtgatgtttgaatggagggggagaaaagattgctaacatctgctgctttaggataatctgacttatgtaaatcctagtagaccgcattaggaagaggcttgtttacattcattggagggggttagcttgttacaatggcaacatgctggatatcggttgagagacctgactgagtgagatctggtctcctaaaataatcatatatgctgtgcgtaaaaaccattggtttatattctgaccatcattaaaattgtgagataagcaaaccactcccacctaggatagagctatgaacg

SEQ ID NO: 139241 - DNA, 808 bp, Glycine max
  Clone ID: PAT_MRT3847_96742C.1
ccacgcgtccgcccacgcgttcgcccacgcgtccgctttctgcgaaccaccagcgcttccttgctactggtatccgagtggcatcgagttctaattgcaccaaggacaatgaaaaaagtcacttggagcctcctactaggaatgcacaacaagtttctgcgaaaattcctcctcaccaagtgcctagcttcacttcctcttgggctgttgatgacttattggaactaacagcctttgaatcacctgagaaaaaggaatctctgcagtttggagagctggaatggcttacagatgtgggtatttttggtgaacaatttgctcaggaagccttggctgcagctgaagtacctcagcttccagtaactcataacagtagcagtgttgcttcatacagaacttccaaatcctacatgtcccacaaaaagcctaggattgaagtcctaaatgatgatgatgatgagtattttactgtgcctgatcttggctaagtgtgtggcttgccatatgggatggtgcatgcatgattggaaaagattaattatgggaaaataatttgttttttctttttttaaaagctatttagtaaattgtcgaaaaagattattgttttctcaaaaaactattccattcagacatgttgatatgttgtatattcaattattcatacttcactaagaacaacaattttcacaagttgtgtggagttgataagtattgtacttgaggtgttttttttgctggatagcatagaatctatgcctttgggtaaaaaaaaaaaaaaaaaaaaaaactttaaatttgctggggg

SEQ ID NO: 139242 - DNA, 3679 bp, Glycine max
  Clone ID: PAT_MRT3847_96743C.1
atctcacaccatgtcctaatctttctacaccacatcgttcttatttttggctttacaaaactaccgtgtctggtaaagggttcgttaacatttccagtgaaaaaagttgttagctaaaagaagaccaagtttttagtgttgtagaaggaagagaagagttaacatgaaaattcagtgtggtgggtgtgagagagctccggcaacagtgatttgttgtgcggatgaggcagctttgtgtgccatatgatacgctgtagattttgcttatctgctggttgcgctgttggccttctgcttgactacgttttgacactagactcgtggtgggactagggactattataggtatggtgcatggacgcaactgcacccctcctccagtcacttccttttccatggcccaaacactttctccctgcatttattacctaccactgtcactatgaatgctgtcttttgtttttcatcttcaacttcatctaaacctttcacacatatcttcggcttagaacaaccaacaacaagttcacattgtaggaacctttgtcttgtcgtgtcgggtagtggctcatattgatattggtatggtctttctttgaaccccatttgcaaaaaggaagaagaagaacatgaagattcagtgtgatgtgtgtgagaaagcccctgcaaccgtgatttgttgcgcagatgaggcagctttgtgtgccaaatgtgacgttgaagttcatgctgcaaacaagcttgcaagcaagcaccagaggcttctccttcaatgtctatcaaacaagcttcccagatgtgacatatgccaagataagccagctttcatattttgtgttgaggacagagcactcttctgtaaagactgtgatgagccaattcatttagccagtagcctttctgcaaaccaccagcgcttcctcgctactggtatcagggtggctttgggttctaattgcaccaaaggccatgaaaaaggtaacatggaaccatctaatccaaatgcacaagaagttcctgtgaaaactccttctcagcaagtgcctagcttcacatcctcttgggcagttgatgacttgttggaattaacagactttgaatcgccagacaaaaagcaatccctggaatttggagaacttgaatggctagcagatgcaggccttttcagtgaacagtttcctcatgaagctttagtcgcagctgaagttcctcagcttccagtgccacacactagcagtgttgcctcacataaagcccccaaatccttggtgtcttacaaaaagcctaggattgaagtcctggatgaagatgatgatgaacactgcactgtcccggatctcggataaagtacattctcatgtaaacaattgcctgaatcaaattatgtgtcagattttgagctgtatatgcatactgggccctaggcaattgtaacctcaaaatacgcacatgtgtaatccattccagctctccagtctgcgtagatcctcgtcaaaaccatccctcagacacttccttttctgtgttcaacagtcttcccacattaaataccaactgtgtagtatagtactacttcaatgttaactatgttcttctttttttgttctcatctccacaccatgtcctaatctttctgcaccatcgttctccatttttggctttacaaaaccactgtgtctgattaagggttctttaatatttccaatatttcttgtagtgaaaaagttgttagctaaaagaagaccaagtttttggtgttgtagaaggaagagaagaattaacatgaaaattcagtgtgacgtgtgtgagagagctccagcaacagtgatttgttgcgcggatgaggctgctttgtgtgccaaatgtgacgttgaagttcatgctgcaaacaagcttgcaagcaagcaccaaagacttcttcttcaatgtctatcaagcaagcttcccacatgtgacatttgccaagacaagccagcattcatattttgtgttgaagacagagcactcttctgtcaggattgtgatgaaccaattcattcagccggaagcctttctgcgaaccaccagcgcttccttgctactggtatccggagtggcctcgagttctaattgcaccaaagacaatgaaaaaagtcacttggagcctcctaataggagtgcacaacaagtttctgcgaaaattcctcctcagcaagtgcctagcttcacatcctcttgggctgttgatgacttattggaactaacacggctttgaatcaccctgagaaaaaggaatctctgtagtttgcaagaggtggaatggcttacaggatgtgggtatttttggctgaacgaattttgctcactgaagccttggctgcagctgaagtacctcagcttcccgaaactcataacagtagcagtgttgcttcatacaaaacttccaaatcctacatgtcccacaaaaagcctaggattgaagtcctaaatgatgatgatgatgattagtattttactgtgcccgatctcggctaagtacgtggcttgccatatgggatggtgcatgcatgattggaaaagattaattatgggaaaataattgtttttttttaagctatattagtaaattgtcaaaaaagaatattattttcccaaaaaaatctattccattcagacatgttgatatgttgtatattcaattattatgagaacaataattttcacaagttgtgtggagttgattaagtattgtacttaaggtgtttttttgctggatagcatagaatccatgcctttggggaataaattttcccttgtccttatgctacactagcagtgttgcctcacataaagcccccaaatccttgttgtcttacaaaaagcctaggattgaagtcctggatgaagatgatgatgaacacttcactgtaccagatctcggataaagcacatggtcatgtaaacaattgcctgaatcagtaggcagtaggttgacgagttgtatatgcatactaggtgcagatgttaatgaactcttcaatgtgcctggtctagctgaagctcaggaccatgaggactattgcatgaatctgtagattgatgagctgtatatgcatacttctcttaggacagtaagtaatgaagtatgttaactagcttgtggagttgataaatatctcattttaggagctatgaatggtttgatttttagaatatagcataaattaaaccttaggggattaaattttccttgctctttgtgatcatcactgtgaacatcctactaggtgctcacaccacacaacaatccacgtgaacttgaatggttaattatgtatgcttgtgttgaagatcattttggcctaatagctacgatgaagacatgcggcatactacttgtagttattatgtaatttcagaacctaacagcaattcctttgggccagcggaagtcatgcattgccagcagattaatccctctgatcctgagttggaaaacacccatgatttgttatctatgacaaagaaatagaacctaacagcaattaacttcacgaacaatcaattctcgtgttccattcccgaggaacatggatcaaaagcaatgagatattgattattccccagtttccttttggctttgatattaatattatgctacaaaaagctggaaaaaaaatcatcaccaaggtttctcaat

SEQ ID NO: 139243 - DNA, 274 bp, Glycine max
  Clone ID: PAT_MRT3847_96744C.1
aggactcacaacttttaaatttagttttgttttttattttgtttatttatttttagccgggaaaaaaaagaatttgttatttgattaaggagagcaaaggggaccctggcatttaaagcccacactttttattttgcccgtccaaaaaaggccgaattaatttttaaggacatggattttttatccagtttttttcctttcacaatgctttacaaaaaaaaatgacaatgcttaaaatgggtgtataccgggtcccctatactggtggcaaaaa

SEQ ID NO: 139244 - DNA, 343 bp, Glycine max
  Clone ID: PAT_MRT3847_96745C.1
tcactttatgcgcttcactcactcccttgttgcggttttttttatttgacataactcgggcgaagatgcgtgagagttcttcacatacagggtagggcaatgctgaaaccagatcggatcgatgttctcggacgtggtgtgcgcggtgcatgggattgattccaaggagaggtaccctggggacaatgagttgcatctcgagcgagtaaacgtctattacaatgatacgagttgcagaacgttcgtgcctagggcggggctcatggctctagagacagagaccatggacagcgatagatctggttcatacggtgagattgtccgacctggtaactcagtgttt

SEQ ID NO: 139245 - DNA, 238 bp, Glycine max
  Clone ID: PAT_MRT3847_96746C.1
aagttttctttttcctccagtggtgcacgaggcaccaccctctcctctgatataccactatgaaggacagatgcctgccatcgtcccaaacgtcgtggcccttttcctccagattgtctgtcacacttgcatagacgagtactgcgtagccctcttacagatttgccacaccattttcccacaacatgcctccgccattgttatactctatatcgttcccaaggttcccgattcaggc

SEQ ID NO: 139246 - DNA, 190 bp, Glycine max
  Clone ID: PAT_MRT3847_96747C.1
gataatatcaagtcaataacttctaagacgtattttccttttcatgcacaacttcctcatgaacagggtttctatatagggttatgtgcggtcaatttacctttcatgctgctgttcttgataaccgtactgatttcattggtcgtgttgcacttgatgtaggtgctggtagagagatttagacattatt

SEQ ID NO: 139247 - DNA, 353 bp, Glycine max
  Clone ID: PAT_MRT3847_96748C.1
gctacagttttggtaacatatgaatgccatggctcaaactaccaaaagttccctccccaaatgaaaactgggtttggtgggcaatacaacaatgaagtgtgcaagtgccaatttgaggcgtttggtgtaaacacacaccgtatataaatgtcacactgtgcccgcacatttcgcagagtatatatctcactacattctctgtgaccccaatagatcatcattccacaacacattccaccaaacttattatctactactcaacccccaacctcatcaccaacaatgtcgtcgtcgtcgtcgttgtcgacaatactctccccaatcaccactattttgctaaccatccaattttt

SEQ ID NO: 139248 - DNA, 628 bp, Glycine max
  Clone ID: PAT_MRT3847_96749C.1
tttttacaaatttacgtgcatcctgaatgtcattcaaaccataattgttttcatcacaatatgttaaactaaacaaaaaatttccaagaatccaagaatcctcacaaaacaaaatcataccaattaccagaatcaaattggaaatgggtcgaaagctcctttgaccattttctcaagaggcccaaacagagggtgtgacaaatgatcccactcgtaccaatcccaaccatcacactcggtaggttcaagattttgtggaacttgttctttaactacatccacgtccaccattaccctcatgaaaatggtcacatagtgacacttttttggctgctctaacatagtttgttacggtcaaaatctgagtttcctatgtccaactatgtttcctctttcacttctcttgcagcgcattcctcaaatctctccgaattactgggaggaaccagtgaaggtgtccctggcgttgctctaggtaagaagtccagtttcgaggagtcatcccattcactgtacatgcccatatccaaatacattgtaattgcatcaatggactccgcccacctgcttgattcctgacgcaagtcaagcttcattaacaccatgccaaaagtagcaactcttcgaa

SEQ ID NO: 139249 - DNA, 438 bp, Glycine max
  Clone ID: PAT_MRT3847_9674C.1
ccagacacatgaacaggacagttttagaggaaaccatgcaataaatgagcgcaagtttcatgatcatatattaaaaagctaaaccagcaactgcaccggataacaccttcaaatctagctgacgcttagcaagaaatgttaataagggtgctgtaactaaacacacgcacattaatatctagattgataaacggagtggtttgtgccctgaggatcataaaacccaatctgtggcaacactactgtgacatatgatggatgggactggaaactctgtccgaaaaagaagctacctatgaaccaggacacaatgacaacagaccaacatttattgtgaccataataaactacattgacggagaagcctaaccacacgattgactctttacagacgctctgggtcgacccgataataccgcatcgggtcttgtacgcgtg

SEQ ID NO: 139250 - DNA, 387 bp, Glycine max
  Clone ID: PAT_MRT3847_96750C.1
aaaaaaaaaaaaaaaaaagggggggtttttgaaccttgtcagagggcaccccccctccaattttaaaatccaaattgcttttctcttttcagcaaaactttactcaccggcaagaaaaaaaaataccccagtttcgggctaacccagttaataaacatgtcggagccctgctgttttttttgcttttcccagattccccaattttttttttttttttttcagcctcaataccaatctgcaaaaaggggcttaaatcttcggtaaaacagttgacaaatcccctgggacatttgaacttgcctgaaaattttttggcaacattgtgtgagccctgaaattaaacccttgaattggttctcctttaaaaccaaatgcattaagttgctt

SEQ ID NO: 139251 - DNA, 2100 bp, Glycine max
  Clone ID: PAT_MRT3847_96751C.1
tacggctgcgagaagacgacagaaggggaaggtaggaaacccataaatttattctagtaatacatttctgggttttgtttgccttgtgtgtatctttctattgacgagaataatggaatgttcccaattctctgtttttttgcttttgtccatttttgtgggaatttgtttagcttctactgaggaacaggaaagggacaggattgccaagctgccaggacaaccagaaaatgtgctatttgcacactactcaggctatgtgactgtgaatgaagaagctgggagagcattgttctattggctggttgagacaccagctagtattgaaccaagttcaagaccactagtgttgtggctcaatggtggacctggatgctcctctattggttatggagcagctgaagaaattggcccttttagaattaattctgatgggaattcactttactccaatccttatgcttggaacaacttggcaaatatactcttccttgattctcctgctggtgttggcttttcatattctaacacaacatctgatctgtatacagcaggtgaccaaaggacagctgaagatgcatatacattccttgttaattggtttgaaagatttcctcagtataagcatagagatttctacattgctggagaaagttatgcaggtcactatgttcctcagttgtctcaacttgtttaccggagaaataaaggaatcgagaatccagttataaatttcaagggttttatggttggaaatgcagtcattgatgatttccatgattatattggaacatttgagtactggtgggtcaatggtttgatttcagattccacatataagaagctgggaattgcctgtgacttttattcttctgagcatccaccagagaattgtgtggaagctctcgaacttgcaactttggagcagggaaacattgatccatatagcatttatacaccagtatgcaatgatatagcagcaatcaaacgccgtttggggggtcgctatccatggttgtctcgagcatatgatccctgtactgagaggtactctaccttgtatttcaatcgtccagaagttcagaaggcacttcatgccaatgtaactgggattccttattcatgggcaggatgcaatgatgttattgtggaaaattggggtgattctccgctatctatgcttccaatatatcaagaacttattgaaggtggtatcagaatatgggtattcagtggagacactgattcagtagttcctgtaaccgcgtctcggtattcaatccgtgccttgaacctatctaccatcatcaattggtacgcttggtatgataatgacgaggttggtggctggagtcaagtttatgaggggcttacattggttacagtaagaggggcagggcacgaggttccacttcataaaccccgccaaggttttatccttttcaagacattcttggaggacaagaacatgccattgccaattgatagaagccttagtggcccaactgataaatcactgaacaagaacattcggttggctaggcccatacgcaagatcactatgccatcatcgacgcagggctttacttattagatttctatctttgttgttctacaataaaacaccccttttacaataaaacacccctttctgcaccgatttagaggggctatgtattttgttatataagtgatcttaataatttaagaggggtgaattaaattaaaaaatttctcgttttcttgctcctaggctaagaataattgcaattcatatatatacatatggaacaagccgagacagaataaggaattcaatcctcatgagttcactcttggttctctgcctggaaaattgataaatttgaagttagtagttctacaacttctatttgtttgttactgaaaatatgattatttgtatgaagtgttattctttatatggtttttccattgtgcaagacaatggcatatcttgtatattcaaaggatcttggcctccaattaataacgatctcttgtatctatgtacaagatcattactactagttagggcatgtttggattaaaacttgtaaacttaaatgaattttattttgc

SEQ ID NO: 139252 - DNA, 476 bp, Glycine max
  unsure (1)..(476): unsure at all n locations
  Clone ID: PAT_MRT3847_96752C.1
tttggatctaagagcaaatatatgtttgggaaagtgaccatccagctcaagcttgtggagggtgactctgctggaactgtcactgctttctatgtaagtggaaattttatattttttttttaagaacaaatttgctcatgatgctcttttgctgttttagtacggagcttatgataattactatttactagctatagtgcttagttaacaatgaacataatttacggtgtacatattcagctcaatacattgagcgtttctcaagtgcagacagccagatttgcatcaatgaattgaatattaccagagccattagtgtcagctacctactttcatttgattcttgcatttattgtctctctctgtccctgtctgcacatttgagccacgatccaatatttttagtgtaacttttatcctacaactntacactcttaaattgatggcatcttaaattactgtgatgcagatgtcat

SEQ ID NO: 139253 - DNA, 276 bp, Glycine max
  unsure (1)..(276): unsure at all n locations
  Clone ID: PAT_MRT3847_96753C.1
ctgcagcaactatgcctaaccctaaggtcttcttcgacatgaccatcggcggtcaatctgcnggcngcatcgtgatggagctctacgccgacgtnantccccgcaccgccgagaacttccgcgcgctttgcaccggcgagaagggcgtagggcggagggnaagcccctccatacaagggctcgtcttccaccgcgtgatccccgagtttcatgtgtcagggtggcgacttcaccgncggaaacggaaccgnggngagtcgattntggcgccaagtt

SEQ ID NO: 139254 - DNA, 570 bp, Glycine max
  unsure (1)..(570): unsure at all n locations
  Clone ID: PAT_MRT3847_96754C.1
ccctcttgctgaactacgtgaagtcatgagattcacccttctatatttctcagatcagctggaaatttagcttcttttcttgctctttgtgcagcaaatataacttctctttggaatggaaattaatactcactccgatattaactgagttgcaaaaatatcaagagactttgcagatttcttttctttttttgggctagaaaaagcatttaacaatttactaatatttgtaataattctgctgctcatcgttgccaaattttgcaagtttcatttcctcttataatatctgtgtacttggggggggaatagaaaaacaaaaatctttgagtggctaaatcagtaagcaaatatttcatgcattgattagttgttgtgaactttggtcatgattcctattgtctaggaattaatacaatgctatctctttagctttttgaatttgatgcagcaaggaaatgatgatttcatccttttaagaggaatgtgacactaggataatgctgaagaaggaaaaggatcatatttgnaagatttgtaatcctatggctgattcttctttcaatttct

SEQ ID NO: 139255 - DNA, 256 bp, Glycine max
  unsure (1)..(256): unsure at all n locations
  Clone ID: PAT_MRT3847_96755C.1
ctttcttttctcctgagatgatgttgtgtgtttgggcggctaagnangncanggngaaaataatnatnatcgaatgantgattctnttgtttgcttngaatcgatatttttttgtgtttggtttggtttcanttccgctcttagatcatcgcaagcttcgacctggaaatcttagtagcatgcacgcataggttcctcttatttttggtttccatcgttgaaagcatacgcatactttgaattttngttgtattcg

SEQ ID NO: 139256 - DNA, 420 bp, Glycine max
  unsure (1)..(420): unsure at all n locations
  Clone ID: PAT_MRT3847_96756C.1
cccacgcgtccgcccacgcgtccgatcctctccgagtctctttatgcatttctattttttaaccgcgttagttttattactcataaagtcttctctttttttcttctttcccatcgtactagtaaacctaaacttaacacactatgcattgtcacgaaatatattattggtaggttaagggtcgctatatctataatctatcctcactacaaaaaagccaacccatatgctctgtttctcctctgctcaacacctctcctatgttacctccccctacatcctagtactcacactcactcctctatcatgcgcaacccgtattctgctacaaaaacattcttattctgaataacaatgactgaaacagcaaggtgtcacgaaactccaagcagcagcaccagcaactcctncacctcaaaa

SEQ ID NO: 139257 - DNA, 158 bp, Glycine max
  Clone ID: PAT_MRT3847_96757C.1
actcgccttttttgtttgaatattatacctaatcgaaaggcacgccaaactaaacgatagccaatgtgtgaataggaagatccccagcttctcgaccacgctcagactctgtagataactacccgatttcactccctcagcagtgaactggatggaat

SEQ ID NO: 139258 - DNA, 488 bp, Glycine max
  unsure (1)..(488): unsure at all n locations
  Clone ID: PAT_MRT3847_96758C.1
ggaattcggcacgaggactgatagtaacatgtgtggtctgtgtaacaactaaaatgaaggggtgggatataaatattttactttgagagccaagggggtgtttggtttatataaatggaaaagaagtgattgagaattgagagcagaggggagatgtaggcagtcattttgggtagggagactgcaagaccctccccgaacctgttttattttttctgnnnangntttagaatgggttcttaagtatttgtttattcacttcgttgtgaaattttggtcttgaccatgatcaacatatgggtaattcttgttgggtttacacaaacaaaacttctgagtctggctatgaccttgcaaattatttgtagattgatgtggctaacattcacaagaaaaaggaaaaggagaaggcggtagaggagttgaaagccaaggcgcaacaaaagggaagctttgggaggttaggggctccaaaaatgggaaagaaa

SEQ ID NO: 139259 - DNA, 985 bp, Glycine max
  Clone ID: PAT_MRT3847_96759C.1
atcgatttggttacataaaaagagctatgcatggcaccaaaatgttatctactcgagctgttagtgagatgtatgggagagaactggtggacctgcgaaaggagagtcgatgggagtttctcaatacactgttttctgtgtctgaagctgtggcctacatgcagatggttgacagattggatgatgaaactataccagcagatcttgctcttgattataaagggctatataaggctgttggaaaagctctcttctgggcacatgttgaaggtcgtcttaagagtgagatcatgtctaagcctgaactatttgtggagcctgatccagaattacctttggcacttttggatcagaaggaggctggcaagaaacttctgctaattaccaactcagattatctttacacagacaaaatgatgcagcattcttttaatagattccttcccaacgatatgggttggcgagatctatttgacattgtaatagtctcagcaagaaaaccagagttcttccaaacgtcacatcccatgtatgaagtggtcacaggcgagggccttatgcgtccatgcttcaaagctcaaactggtggtttgtactcggggggaagtgcacaaatggttgaaaattccctagatattcatggagatgaaatattgtatgttggcgaccatatttacactgatgtcagtcaatcaaaagtccatctgcgatggcgaacagcattgatttgtcgagaactggaagaagagtacgatgccttgattggtagccgcagttatagagaatcattggtggagcttattaatcaaaaggagattgtaggggatctctttaatcaacttcggctggctctgcagaggcgaagcaaagaccgtcctgctcaaaccctagcagcaactaacttgaatgatgaagacctcactgatagcatgcaaaagctacttattgttatgcaaagactggatgagaaaattgctccaatgct

SEQ ID NO: 139260 - DNA, 519 bp, Glycine max
  Clone ID: PAT_MRT3847_9675C.1
aaaaaatagaaaaacaacaaaaaaaaaaactagagtaaaagaaaaaaaataaaaataaaaacaaaaaaaaactaacaaaactagaaaaaaagaaaaaaaataacaaaaaaaacataaaaaaaaaaaaataacataaaatcaaacaaaataaaagaacacaaaaaataataacaagaaaaaaaaaaaaaaaaaacaaaaaaaaagtaaaaaaacttaaaaaaaaaaaagtgctcggtaacggtaataaatttacccaaataccatttcaaaaaaatgaaaaaaaaatcaaaaaaaaaaaaaaaaacttcgggggggggccgggtcccaaattcgccttatagggagttgaataacgcgcgctaattggccgtggtttaacaacgtcgggattggaaaaaccttggggttaccaaattaaatcgcttggaagaaaatccccttttcgccagttggggtaatagcaaaaaggcccgaacggatcgcctttccaaacagttgcgaagcctgaatggcaaatgg

SEQ ID NO: 139261 - DNA, 347 bp, Glycine max
  Clone ID: PAT_MRT3847_96760C.1
ggtattgcaagttctcgtatcttgggcaccattcctcattggggttgacatcaaactgtctggaatcaaatggcaacagagagaacaccattgaattgagattctagcaagcaaagctttggtcaggtttatattgaccttctcggcggatgaatactaggggacaaaactggagatcgtatcacacttatacaaaattcttcaattagtaacttattgagagttgctgcttgtaagaaaggctgtacaatggtcaagattgcgatgtctagaaatgcatcacccaaaaagagtgattgctcctcattggtacaaagtgctgtaacaaacagcagcagctcacatca

SEQ ID NO: 139262 - DNA, 427 bp, Glycine max
  Clone ID: PAT_MRT3847_96761C.1
aaaaagaaaaacagggccctttccaaaaaaggtaaaaaaacagggggggggggggcggaccctaaaaaaaggaaaaaaaagggggggggggaaaaaaataaaaagggggccccaccccctgggccccgggaaattcccccaaggggcccccctttgccaaaaccggcgacccggccttaaagggggccctccctgaaaaaaaaaaagggggggcccgggaaaacccccaggcccttaaaaaacggggggcagctctggtttttgcccccgttcacccgggcgaacccccccggggtcccttggcctggaggggtaacccccggggggaaaaaccttaacgcggggcccacatgggtgggaacccccatgggccccggagggcttgggacccaattggggggcctttaagagcttccgcccccccccc

SEQ ID NO: 139263 - DNA, 992 bp, Glycine max
  unsure (1)..(992): unsure at all n locations
  Clone ID: PAT_MRT3847_96762C.1
gcttttntctggttcatttgatcggacaattaagatatggaatgttgaagacagaacttacatgagtactctgtttggtcaccaaagtgaaattttaagtattgattgcttacgcaaagaaagggtactgactgctggacgtgatcgtagcatgcaattgtttaaggttcatgaagagtcacgtcttgtatttcgtgctcctgcatcctccttagaatgctgttgttttgttagtaatgatgaactcttgtctggttcggatgatggaagcattgagctttggactgtaatgcgaaagaagcctatttacattttgagaaatgctcacgcattactggtggatagcatgaaatctgaccaaaaggacagtgaaaaactccccaatggtaacttagaaaatggttacaaccatcctgagaatcaccactgtttgtcagtattctcttgggtcagtgcggtcagtgtttgtagaaacagtgaccttgctgcatctggggctggcaatggttctgttcgattatgggaaattgaaagtgataccaaagacattaaatctctttataatgtgccattggctgggtttgtgaattccttggcttttgcaaaatcaggagaattcttagttgctggagttggacaggaacctcgtctaggaaggtggggacgtaaccctgaagctcgaaatggagtctcaattttgacatacgaaatgtaacattgagttgaatgtctgtccgtgatcttaattatatgaatcaattgcatttatttttacgattgtcatagataatttcttagtttatgcttgtttagataggattttgaaatcttgaaatggtttttttggcatagggctacttaaaaccaaatataaaaatttacagtgcaaaatccttttccttgacgccaataccatctgtttcaatacagttaaacgtccggctcctatcatcaacctagtattcaaaacacactagacaatttatcaaaaa

SEQ ID NO: 139264 - DNA, 477 bp, Glycine max
  Clone ID: PAT_MRT3847_96763C.1
accccccggccccccggcgggcctcttttttttcttgtcctccccctaaaatcgtttgggtccggaaatgaaattttcgaacaaaaagcgcccccttccaatccccaaaaaaaaaaattttttacggagggccccaaaattggggctttttccaaaaacccccaaaaaaaatcccggagccacccccaatacccgggggggaaatcccaacccaaaaacggctccggggggaaaaacccccggaaaaaaaaacggcaacaccggggaagcggaaaaaggggggctcgaaacccgaacttttggaggggaaaaaaaggggaaaaacccccacttttcgaaggggaggaacaatgctttggaaaaacccctgggggaattttgccaaaactgtttaagggtggggggttgtttcctggggggcaaagaacccaaccccaatttcaagcttacctacccggggatgaaaaagaaaaactt

SEQ ID NO: 139265 - DNA, 553 bp, Glycine max
  Clone ID: PAT_MRT3847_96764C.1
taattagtccttttgggccgttgtgcaaacgaaagtgaagaaagagttgcagttgcagtagagaaagagttgttgttacaatacaattaacttacatcccaatagagacagcactataatgttgcttttggggggttgggttggggtttccattttgaagaaacaacaaaagttctttatcctgaaactgcatgaggagccacagttggtgttgatgataagcaagagtgctacctggagacaaacactcacgtacaattgcatgtcatgcatggtttattgtgaacagtgtcaatccatgaagaagaaccatctgcccaatattaatgaaggatgagaaaaacactactctctgttcagatttattccctcccatagcctacaccggtcaaaatgcagcatgaccctatcctctttcattcctctccaccttaccttcactccattttaactcttaagtaaagattatagaataattccaactcagattaaataagtcatgtatgttttggccaaaaaaaaaaaaaaaaaaaaaaaaaaagcgcccgctcta

SEQ ID NO: 139266 - DNA, 334 bp, Glycine max
  Clone ID: PAT_MRT3847_96765C.1
ctgacgcgtgggttttttttttttttcattcccgcacgtctacgtctttttgtgaggaaggaacaggaagaccagatctttggggagcaaaaaaagttttaagagatttgcccaacttgcaaatgacatatggctaccccagagaagcatttttttttaatgacgacgggggtaccaacataagccatcatgcaacatgctcagctacaaccaacggagtgtttccaacattctcttttccaccatcctgagcacacccacccggtgctttcccaccaggtgctcacccaccatgctatataccaacaggagcatatccaccacctgcaacttt

SEQ ID NO: 139267 - DNA, 550 bp, Glycine max
  Clone ID: PAT_MRT3847_96766C.1
tctcctgccgaattcggcacgagagttttcttctaacaattacctcacacttttagatatcaacttttgttgttttcttctgtcatcaagaaaagcaaagagctactattgattagagaagcacaaggagatgagttcatcacagagagcttggattgttgcagccagtgttggagttgttgaggccttgaaggaccaaggggtgtgtaggtggaatcacactttgaagtcagctcaacatgtcataaagagccatgttggatcattttcacaggctaagaacctttccttttcttcttctatggtttccacctcttcaagactaaagggaaagcaatcagaggagtccttaaggactgttatgtacttaagctgctggggacccaactagagaacaagggcattagggatataaagagattccatgattgtattggttcttgtgtattaaaagaggtattgtttgtctactgtgacaaattgatgtaaatgtaatagaccaaaagtcagcttttccaaattgaaaatgccttcacttgttcatttatgt

SEQ ID NO: 139268 - DNA, 795 bp, Glycine max
  unsure (1)..(795): unsure at all n locations
  Clone ID: PAT_MRT3847_96767C.1
ccacgcgtccgcaaaagtgactgagtcaaagagatagtggaaatggaagctgagggtcaatggcagatttcagagagagagatatgctggtcagtggtgttcattgcaacatgcagcatcataatattattatatgtgaagctgtggtatagacctcaaaggatcagatcagtgcttcagaaacaaggcatcaatggaccaaaaccttctttcccctttggcaacatttctgagatgcaacagctacccaatcaattagctcctgtttctcttgaagccttagacgaatgggcttattccatcttcccatatttccatacatggaggcaactatatggtccaatgttcatgtactccactggaaccaatgagcatctatatgtggagacacccgaattagtaaaatggataggcatgcacaagtccttgcacctaggccggccatcgtatctaaccaaaacattgaagcctttgctggggaatggcatcattaggtctaatggactgcactgggcattccaaaggaatctacttgctcctgagttttttcatagcaaaattaagaattgggtggatataatggaagaatcaaccatggcaattaacaaaaaatgggagaaccatataacagaaagtgaaggggggattgcagagttggtaattgatggagatatgaaggctcttactgcagatgtcatttcaaaggcttgnttttgtagcacttatgctcaaggcaatttaatttttgcaaaattggcctctatgcaaacagcactagcaaagcctaatcatata

SEQ ID NO: 139269 - DNA, 287 bp, Glycine max
  unsure (1)..(287): unsure at all n locations
  Clone ID: PAT_MRT3847_96768C.1
cgcatgcacgcgtacgtaagctcggaattcggctcgagcttcgctcctgactggttacgcggcaaggccaaggtcncaccagnngactatccagcggctcctggaggagaatgaccagctgatccgctgtatcgtggagtatcagaacaagggtcgagcgaacgagtgcgtccagtatcagcatgtgttacacagaaatctcatttatttggccaccatcgcagacgccaacacaagcagtcttacaaaggcatggagtagtcttccagggggctgtgatgagcatg

SEQ ID NO: 139270 - DNA, 240 bp, Glycine max
  Clone ID: PAT_MRT3847_96769C.1
acgtatgcactgcattcggctctagaaacttagtagtacccatttgtttctctgcagaatctagggttgttcctactttggtctagtatcacagctctgatagattggcaccgattctgggtgtgagccaaaaaagtattaatttgtttcctctctttatctcttacgggaagtagtagatatctgtggtcagtgcggtgttgtagtttcgctccgagttccataactaatgcggatccg

SEQ ID NO: 139271 - DNA, 941 bp, Glycine max
  Clone ID: PAT_MRT3847_9676C.1
ctcactccatatatatcaccaccctaaccaaaccatagtggctcaagcactctatagcatatacttgcctttgtgaaattgaaaagatgaaaaaaccaaacactagtactagtggttcaccaaaacttgatcgcaaaactatcgaaaggaaccgcaggattcacatgaaatctctctgcttcaagcttgtttccactattccttccaatgacctcaaacccaccaaggacatgctttcccagcaggatcagcttgatctagcaaccacgtacataaagcgtctgaaggaaagaatagagaaactgaagggggagaaggagaaaatcatgaacatgatgatgagctcaaaccaaaacaacaatagcattttcaatattggctcacagttgcctctacttgagataaaggacttgggttcgggcattgaagtgatgttgataagtgggttaaataagaacttcatgctctatgaagtaattagtgtcctcgaggaagagggtgctgaagttgtcactgccaacttctctacagttgctgataagattttttacacggttcatgctcaggttaaaatatcaagagttggtgttgagcccccgagggtatatcaaaggcttcaggagttgattgcccccctagaaatctgggagtacatcccatgatcaaattaaagagcccctttcgctacccgtattgctggcccattagaaaatgcccccctgcaattttgagagtagctagttttaatagtgaaccaatttctcaagttttaccaagcttaggttgcatatgttttaggaaattttttggtttaaaaaagttttttttcttcccgtattcagccaattgttacttgtttttttatctttggtaatttcagataatgtgttccttctttcatgtgtttaaagaaatctcttcccgtgttcagatttcccccc

SEQ ID NO: 139272 - DNA, 277 bp, Glycine max
  Clone ID: PAT_MRT3847_96770C.1
tcgatccttgagttgcctttctagccccaaggattcattggtgacaagcttgataccaggtgaggtttaacttgaggaagagactatatatcgaaaaatatgaatatcgtaataataatctcatactttcacatcgaagcaatatccatttcaaacggtgctaatatcatcctatttaatgactgcctaacttatttggctttctttgtccaattgccctaattgagtgcttctaacgctattccaatttattggcccaattgagcttcgttaattt

SEQ ID NO: 139273 - DNA, 434 bp, Glycine max
  Clone ID: PAT_MRT3847_96771C.1
gaagcaaggcaagacccagaccaaagatattcttaattattagcaagagaggagaagatagaaaaccagggaaaacccttttattgatttacccaaaaaacagaggattctgatacacgacaacgatgtcaatgctcctgcttcaaaatctagaactttacaaggccctacacatgcaacctaattatgtacgttaacacagactcaaacaacatagtgttatgccgggcttaataatatttgccacttccactaatcatgatcaacatagatagcctcttgcttgaacaagccacaaaatacattcctgacctactttggagactctgcctgctttggttcttacacctttggcttaccaacacttttttgagacaggggtctaaccactgctttgttaagataaaaattccagacctcggcctgtcccccta

SEQ ID NO: 139274 - DNA, 800 bp, Glycine max
  Clone ID: PAT_MRT3847_96772C.1
aattcggctcgagtgcactttctttacaaaagcagagaaaccatagcggtttcttctataagaatccattgcttaagcttaaattcagcattacccctcaagaatcaagatgcatcatttggccattctctttcaacaacactagtcacaagatcattctattcactcccaaataccagatctttatgtttgctttggaatcccaattccaataacaaactctctctctctctcttcaaccattacgaggtttaacaattcgaattctagttctgaatatacatctgttttaaatacttcaaggagagctttaaaatcttcagaatttgcaattgcaattccttaatctttcgttcttctttgtctctcttccaactctaaaaattacaattttttccacacttttccttgcccaagcacaagttttaatcttttctcacacccttgtttgccctccaattcttgcctccaattcttgcctccaaccccacgaaaccaaagtttggatcttttcagcacccctttaatctttttccttccaagaaaacagccaatgtgggatgttttcgtggcttgcaagactagtttcgtcgtgcttgaggcctgtgaggcgctatgcccgcatgagcaaagatggtgatgatgatgatgatggtgttgatgagtctacttcatcagttgaagactctcttctgtggcgtagagaccttttgaaacattcttgtggtgaattctcctttgctgtggttcaggccaatgaagttatttgaggatcatagtcaggtcgagattggctctga

SEQ ID NO: 139275 - DNA, 504 bp, Glycine max
  unsure (1)..(504): unsure at all n locations
  Clone ID: PAT_MRT3847_96773C.1
ccacgcgtccgcggacgcgtgggatttggaatgcttaaggacttattagtaattaggactgaaaagtgaaaaaaaaaatagaaaaattttggtgcaaaattgaaaaaaagttccaaattctatttttttttctcatagacctttactccagtggatacactagtctaacatagtgaaattttgggattcttgttatgtgttgttcgtattcttgagttttctagtttgtctttccttgacatcctattttgagttgtccctttcatttcttttagctttattgcttgtcttttaaatttctttgggtttatgttagagtatttcccaaagaaatttaggagaacggcgacaaaaacgaaacgcaaaaaaaagaaaaaaaacgcgcggacaaaaaaaaaagaaccccccaaaaaacaaaaaaaaaaaaagggggggcccgtttaaaagaaccaaatttaactaccgggggctggcaangtataattttttttatggggcccccaa

SEQ ID NO: 139276 - DNA, 475 bp, Glycine max
  Clone ID: PAT_MRT3847_96774C.1
cccacgcgtccgatcatcttcattactgatctcaacatgacatgtagtctagtgttatgaatgttttaaaacacttgattatgtgtcatgtaggcattagtcggaatgatagacatcgaacatcttggattacctaataatttttccatcatctcctactttaagaatttctaattattatcgtttccttgatttgcttgtgtatttatttgttaatgatgccgttgctaggtagaagtactaaagtttggggtaagagaggtttgttgatatttaattatgtgtgatgacccttgagcgagacgtgactatgaattgtttcaacttcttttgttaaataataatatgaggaatgaggaatggcggggcatgagaactgagaagggggtcagtgaaatgaaatctgtgaatgatgtaactgatgtagacttcgaaatcaatgtctttgaattttgtttttaaaattcatcaatgc

SEQ ID NO: 139277 - DNA, 432 bp, Glycine max
  Clone ID: PAT_MRT3847_96775C.1
tgcaaattggcaaagaaaaaaaaagagtggaggaaaattgttatccacaacacaacatcatcaacgttacacaagtctctctgatggcaacctggacctctttctttccgacagcctctgtccgctccatcatcttccaaaagcaaaaccctcccaaagcccttcttcttctctcccagcagcgctccttcgcctcttccgcaagctatgcaactctcaagctccctcgcagacccctcctttccaaagggagaacgccacttgtgagggctgctactatcgaagaaattgaagccgaaaaagcagcaatcgagaaagatgctaaaagcaggatggataggactattgataatgtccgtacaaatttcagttccataaggacagggagagcaaacccagccatgcttgacaaaattgaggtggaatactatg

SEQ ID NO: 139278 - DNA, 258 bp, Glycine max
  Clone ID: PAT_MRT3847_96776C.1
ctcgagccgattcggctcgagctttccactttgactgtaccagactcacgcttgatccctctctcaaccgcttccatctgtgctctctctatctctctctctatggacacacatacttggtcttgtctacgaatgcgggtgatggagtagtgattgaggcgttgtatatcacctagtcgataaggatccaacaccgtgtggttcacagcaacatctataacactatgtataccgcaggctgcaacaacggaatctgaa

SEQ ID NO: 139279 - DNA, 862 bp, Glycine max
  Clone ID: PAT_MRT3847_96777C.1
gtctggtcaagacaaccattagaagagttatgacttttagaaaaacttaaaaaccaatttgaaaaagtcaaaaactatttgaaaagttacatcttttgattttattcagaaacaatcattggtaatcgattaccaaatcagtgtaatcgattacacaaggcttttatgtggaaggatgtgactcttcacatttgaatttgaatttcaacattcaaaggtactggtaatcgattaccaaaacattgtaatcgattacagctttttgaaatcaattggaacgttgtaaattcatttgaaaactttttcaaatcaattttgctactggtaatcgattacaataatctggtaatcgattaccagagagtaaaaactctttggtaaacatgttttgagaaaaaccatgtgctattcaatttttgagaaaaaccttttcatacttatcttgattaagccttctcttgattcttgaatcttgatctcttgaatcttgatctcttgaatcttgatctcttgaatcttgaattcaactttcctcttgaatcttgaagtattcttgattctatcttgaatatcttgaactcattctttgattgacctttgagctttttgtcatcacctttgtcatcatcttttgttatcatctttgttatcatcaaaacatctttgaatcactcttgattcaccatgaagctttgcttcagtcattgcaaatcgagcgcgaaacgacgtatacacgaacctaaaagcaattttgttcttccagaccctttttttttctgaatagagaagtgagtttggtgatacaaaactgagagcaccccatcctatttatagagtctgtccatcacagagcggacgcgtg

SEQ ID NO: 139280 - DNA, 195 bp, Glycine max
  Clone ID: PAT_MRT3847_96778C.1
atttcacagtacttaaaggtgaaagagctggtttttgattatgaggaatgcacgaatcggttaaaatgcttatggtactgtgaaacactggttaacgagcattcgtctaaagtatttttccagtttgcataacagttccttgtgtcaatctatactttttattgtgcctataggttgtcatattttttgtatatt

SEQ ID NO: 139281 - DNA, 415 bp, Glycine max
  Clone ID: PAT_MRT3847_96779C.1
gcgacgcttttacggaggcgccaaatgaaatcatgggtttgttcctgatgttcaatcatgtcagtgctatgtgagacataagcactgttgcaactgtgtgatgaaactcgtgggatatgcgcgacctcgagtatggctcttctgattcaggaagttgtgtaatgcaaggaagtaaagccaaatatacaaaccttcctccgcttgctgggtgctagtgctgctgatggccgcatataccgagtgtatgcaaccagctcgagtttagactgctgctggccagggattaaccgaggtgtgatatgctgggcttataggtcccccccataattaaacacctcttccttgtgatgttgcctgaaaagtttttgagttaaaggaaaaatccaaaatggggtcctctgttggttccaacagg

SEQ ID NO: 139282 - DNA, 798 bp, Glycine max
  Clone ID: PAT_MRT3847_9677C.1
cccgcgtccggttgtagtgttagttttgaaacttgatgggtgtaaagtttaggtatttaaaatcgctaaatgaaagttgatttgggagaacacttccaagagataaagagtaatatatcatgtccttttgtcttttgaaagtcaaacactgatgtacctattaggtattaaattggtcaactctccccgtgccagttcctattggatgtttaattcaacttaagggttcctgacctatggtgttttgtatgatggtcaaattcaattttcaagcatttgttgaagccttgaatcctgaaattagttgatgatataccatagataacatataaagctatatgtgcaacaattagctttgttctgtttaaggatttgctttgcttgtcaattctttttgcacattaccatggattttagttgtatttttactatatagttttttaatgttgccccatgtaccgagatttaaaagtatggtgtctcttgctaaaaattgggaaaacttgaatagttggattaaacaatactgatactctattatgtagatgattttcctcacaaaaactgcaaggaaatgttcaaaatattgggcatatacaaaaaacgggaaaacaaagatttaattagctgctccatccattacaactatttccctgtaatgtgtctgagaaactgtagatgttacctgtggagagaaagggtagtggagaaagaggaaaatactcaaaaaagtctccctgtttctctccccttttcttattattctgggaatgttttgcgtgacccaagtttgttagc

SEQ ID NO: 139283 - DNA, 465 bp, Glycine max
  unsure (1)..(465): unsure at all n locations
  Clone ID: PAT_MRT3847_96780C.1
nggttntggaaaactttttttttttttttttttttttttttttttttttttttttttttttttttttgagaggcggaagcccagcaatcaatcaattactagattttcggacccgtttagctaaaatccccaaagatcatttttcaaaggggggaaaacttttccaaaaaataaatttatttaatccaccattggttcttttttgggaaaaaggatgcattcctttcctttttgcaacaggggttttacaaccgggcccatacagaccaatatattactgggggactctccccaaaaaagggtctatcgggattcctttactttttggaactaggatttcaaaccactttgacctttttgaacttagggaattttttttatcaccctgaatttgaaaggggtaaggggaactcctttggaagggtcaccacgggttggttaaaggggggttggaaaggtacattt

SEQ ID NO: 139284 - DNA, 1069 bp, Glycine max
  Clone ID: PAT_MRT3847_96781C.1
cacaaatggagaattccccatctcatccttcttctcttcaatgtcctccttcaaccctttctcccctccaccacccaccccttacctcaccaacctcggcttcggctactccatcgccatcgccctcggcgtcctcttcctcctctccaccctcatcctctcctcctacctctgctgccgcaccctccgccaccgcaacaacaaccgccacaccccccgtaacaacacctccgatggcatcgtcctcccgcgcgtgatcttcgtcgccgaggacgacgacgatgacgccacccgccagaacgacgccgtcaccggcctcgaccaggccgtaataaactcctaccccaagtttccttacgttaaggaaggtgattacgacagcacctgctcgatctgtctgtgcgagtacaaggattcggagatgctgaggatgatgccagagtgtcgacactactttcacttgtgttgtctcgacccgtggctcaagcttaacgggtcatgccccgtttgccggaactctcccatgccaacgccgctgtcgacgccgctgcaggaggtcgtgccgctctcacagtacgccgatgccagggcgaggaggtgaattcgaattttcttctccggtgtggctcgggttgctgggttcagtgggaaaagcataaaggacaaaacttagatcagttatttacatgtttttgcatgctgttattatcccatcaaaattggagttttacctttaatagttactggttagttttactcagattatccaagtaaaacttcagtttttgacgagagaacagcggtaaaaacacttgaataattgtatttaagttctttgtaagtgtaaatcttctcccgtgatggttgatgatggggagtttctgttttttgattatgtggttgtatggtgtcagcaagcgtgttgctggttactgaattattattggtaatgcactgaaagtctgaaactatgcagaatgtcacttttaggggaaattgtccgcgacttcgttttgttagtaccatgatttgacattggatataatggatggtaggactattatttatt

SEQ ID NO: 139285 - DNA, 432 bp, Glycine max
  Clone ID: PAT_MRT3847_96782C.1
tcgaactgtccaaggtcctgtcactgttcgtcttcaacagcatcctcctcctctgctccaactccggtcaccacaaccaattttgttcttcgcgtccgccaccgtccacactagcgttactgtgtggagatttattataatcacgtcttcgggtactttacagttgggctgcgtaaccagcaacgcggtcctggcagccacccactttggcataaggcccaaatgcacataataagagccatgccttacgtacgtaagcaacgaggcgccagaggcactggataacgtggcatcgcattcactatttgatttcgtgaagtagcggcggccttagtgtacgcccagtggcatggggagacgggggcataaagtgatggtgatttgtggcaccgtagtgcagtaagagccgaaccgattgtgcgaggccccaag

SEQ ID NO: 139286 - DNA, 184 bp, Glycine max
  Clone ID: PAT_MRT3847_96783C.1
agtagtaggaaactatacaaaatgtaccaaggcgagggaggctcggcgtcaacacaatcaattcaaggcatccgtcctctaaaatcaatgacaaaaaacgacaccatgaatctaaaggaccctttcctgaagtctaattccaactataaagtgcagccaactgcgagaaaccataaattacgct

SEQ ID NO: 139287 - DNA, 280 bp, Glycine max
  Clone ID: PAT_MRT3847_96784C.1
ggctcgagagaaccctgatccccccccacatacggaccgttccagccttgcatggcaatctttgggcaccgagctgtctgtgctctccaagagcgttttgctctggacggtcatgaccaaacatcacggttcgccgaagccatggcactcgacgtgcctgctaccgaggaagccagcagggttgccgtttagatcgcgaacgatcccgccccacgcaaagcatgagatcaagcgccccaagctcatgcctagattgctcaggctgatccggctctggctc

SEQ ID NO: 139288 - DNA, 276 bp, Glycine max
  Clone ID: PAT_MRT3847_96785C.1
aaaaatgcaaatgtaggttcttttttgacacaaatattttacttcatttttgactgaagaataaaaatgattggtcacctaaactcattgatgtactgataatacggacacgcgaactgatggtttcgaatctagagctgtatcgacgattgcttatttgggacattgtgtgtgaatcaacaagcagaccaatcgacttaaaagatcaaaggacagactgtattgacgtacttgtaagactaaacgtacacggatataatcatatgatgatatgct

SEQ ID NO: 139289 - DNA, 747 bp, Glycine max
  Clone ID: PAT_MRT3847_96786C.1
ggatgagagtatgttaaatttctgctgcaagtatcagtacttgcccatttaaatgttaattctagtagagtgaatagtttaaaataccattctgctgttgataaattagagtattttcctagcaacaagcaaatcattgtcaaggatgacaatttctatgggacatatttacctgagataaaaatattacctaaataaaaactattacagaattcatcaaaattatgcataactaacagtaaactgacatcttggctgtcagatttgttgcttggtatcagcctagatatcaataacttggcaattgataagttcggcctgcccaaaacccttacttgcaactagtttccaaataacttcatctgtttcagttgattcttgcaacaattcatcctccatggatttgggtgattgaggtgtcgaggttgattgtgaagaatccaaattactgcacaggtcagcctgcagaacagaaatatcatgattggcatcttttgtgatgaaatgaagctttccatggaaaccttctagtagatatggatactccaattccgtaaattcatatacagggacttttcttctaacaactttccatgcatcctctccttgatcatataccttgatccttccactatccacagaatttgaaggatcaaaagcatataattcaccattcactacaacactcagtttggttcctgcttgcttaatggcaggatcatatatttctcccccaacaacactcgc

SEQ ID NO: 139290 - DNA, 300 bp, Glycine max
  Clone ID: PAT_MRT3847_96787C.1
atggattctgctacctcaaagcacatttgtagagactgggagatgtttaacactttaaaaatcgatggagaattcagccatttcaagttagggaatcgtgaaaaaataagggttgaaggcataaggagcatgaggatgaagctctatgatggtgctattcaaactttctcaaatgtgaggtttgtaccttctgttgttgtcaatatcatttttatgagggaaataactccacaagggtacaagtatgttggttcaaagtggcgatgcaaagtgtacaaggggagacacttggtgttgtga

SEQ ID NO: 139291 - DNA, 287 bp, Glycine max
  unsure (1)..(287): unsure at all n locations
  Clone ID: PAT_MRT3847_96788C.1
tagaatgtgtacctttataaagtaaattgcaacaagaaaatcagaggaaaaatattctcaagtatcaaataatgatacaacaatagcttcttctaattatttgatggaatgtctatcccacatattaactcctttcttcatatgataattgaagaacattactctcgggaactgggaatttggaaaataagttggttgtgtaaagtagatagcttatggcttagtatccattgangatatcagctaacaagctagagtagaatctcgcaattactactcttataagt

SEQ ID NO: 139292 - DNA, 435 bp, Glycine max
  Clone ID: PAT_MRT3847_96789C.1
gtaaataccatgcttaagatcttaccttcttatgactatacgggatgctttttgaccggagctacatcttaagctcaccgcacagcacgtatatatctatgtgtctcattgtgcattgctactgtaaacatgaacctcacccaatattactgactcaaatgcaatctcataaattctcactttaaggacagaaatagagagcgctaacagctctcggttacgttcatacatacgctttgttacctaatagatatgtgaaagactcacaaatatatcgtgacgctattggctcatccctcgtagaatctcatatgcttcttctaccagatgatacttgaatgtctcatacctgtaaataaaaactgcattagttttaacaaaactattgtagaccataatagttgaaccacacatccgactaatgtaaataccact

SEQ ID NO: 139293 - DNA, 343 bp, Glycine max
  unsure (1)..(343): unsure at all n locations
  Clone ID: PAT_MRT3847_9678C.1
gtcttctccaagagtgaccaacgaggctgttcagaaggctgctgctgcattgaagggttcaaatcatcaccatacaacaaatgtcantaccagactggattcccaacaaaagaagctcaaccttccaatcctaccaaccaccactattagatccttccctcagactatagaactaagaaaaatacgccctgaattcaaaactaacaagatctcctagaaagagtatatgaagtcaattaataataaaattcgcaaagttattgagcttcaagaaaagcttgatattaatattcttgttcatggagagccagaaagaagtgatgtggtttagtacttctgtgaa

SEQ ID NO: 139294 - DNA, 1693 bp, Glycine max
  unsure (1)..(1693): unsure at all n locations
  Clone ID: PAT_MRT3847_96790C.1
gcaagccgtaagcgcgagattaaaggaatccagcacaaggtcatgtcaatcccctgatgactctctcacagaagttggttgagcatggatgcaaagtcttttttgtgaacacagactttgaccacaagcgagtggtgagttccatggtggagcaactagatagccttgacgaatcactactgaagttggtctcaatccctgatggtttaggacctgatgatgatagaaacgatttgagcaagttatgtgattctttgctgaacaacatgcctgctatgcttgagaagctcatagaggatattcacttaaaaggtgacaatagaatcagccttattgttgcggatgtgtgcatgggatgggcgttggatgttgggagtaaattgggaatcaaaggagccctgttgtgcccttcatcagcagcttttttttgccctgctgtacaacgtccctaggcttattgatgatgggatcatagattctgatggtggattaagaacaactactaaaaggacaattcagatatcacaaggtatgcctgagatggacccgggagagcttttttggttgaatatgggtgacaccataaatggtaagatagtactcaattatctgatgcagtgtacacagagattgactatgacagaatggtggctttgcaacaccacatatgaacttgaacatgcgccattatcatctattcctaagcttgtaccaattggtcctttgttgagaagttatgatgatacaattgcaactgcaaaaacaatcggacaatattgggaagaagatctatcctgcatgagttggcttgatcaacaacctcatggttctgtcttgtatgttgcctttggtagtttcactcattttgaccaaaaccaattcaatgaactagctcttggacttgacctcaccaatagaccttttctttgggttgtgcgtcaagacaacaagagggtataccctaatgaattcttggggtgtaaaggtaagattgtgagttgggctcctcaacaaaaggtgctaagccaccctgctatagcatgttttgtcacccattgtggttggaattctaccatagaaggtgtgtccaatgggttgcctctcttgtgttggccatattttggagaccaaatatgtaacaaaacgtacatttgtgatgagttgaaggttgggttgggttttgactcggataaaaatggactcgtgtcacgaatggagttagaaaggaaagtggaccaaatccttaatgatgagaacataaaatcaaggtctctggaattgaaggataaagtcatgaacaacatagccaaagcaggtcgttcgttagagaaccttaataggtttgtcaagtggcttaaagaataaggattgacattttatgcatctgtattatttatgttagctgaaagaaatcagatcaaagttgatgcagtaagcttttcaagcgattaaaatgtctacaaggtgcccaaaaatgaagatatatatggccatgaaactgaaacaaaatttagtaagcttttcaagtgattgaaatgtttacaaggtcactttctttgttttagtcgtcgggatgctttaagacaaagacagataatgtaatctagtatcctttcttcttttcatttgatatatatagtcttgtatgacattgtattcaagttaagagtatctcttagtactttaaaaanaa

SEQ ID NO: 139295 - DNA, 344 bp, Glycine max
  Clone ID: PAT_MRT3847_96791C.1
aatcatcgctatcgactactgctccaattcgaaggactatcgtctttctcctacccaaaagaatataatttctatggcacccgataattttacctgatcgtgccaccatgtcgaaagacctctactatacttggccactgaaaaacttccatgggggatgcagagcacgacgaaatgtacattgatattcgtaacacatgctggagccattgtgttcgggtgtcttatcaccacgcttagaacgccgcacatatactgtggcttcgcaagcaatcctccagggatatccttacagccccacatgtagggacatgactgtgtacccactctatctctgtgtttgg

SEQ ID NO: 139296 - DNA, 149 bp, Glycine max
  Clone ID: PAT_MRT3847_96792C.1
tgggactgccgattcactacagctagagatggcccaagtgttcgtggttcatacacaagtctggaagtcagttgacagttgggtgatggctctcctctagcacctgtgatagcctatagtcgtgtatgcagtggtggatctgtggaccc

SEQ ID NO: 139297 - DNA, 479 bp, Glycine max
  Clone ID: PAT_MRT3847_96793C.1
tcggcaccagatcactgcaaaagaacaatacttcattctgggtgtattattgcttcttggactgtgaaatgtttatatgttaatatgtttttagaccgtcaaatgtttaaattggaattgatactgaatttctatgcctctggtttttctttgtgtgcgtggttgttaattatattctgaattgtaagcagtcttttgattccatgaattatagaggagtcagtttgtgaagcacatatattttctgtagtttttgttttttgcttataagaattaatcttgcgagtcatatttgatggaactgggaactgagtttctgctctaatgtgagcctctagttattttcctggaattggtggctgaaattaatctacaccataatgcagttatttgtgtgtgtgagtaaaaaatttccttttccagatggactagcataatgaaaagaaaacaatgtctatgatcaatgtgtgcactgtaaa

SEQ ID NO: 139298 - DNA, 826 bp, Glycine max
  unsure (1)..(826): unsure at all n locations
  Clone ID: PAT_MRT3847_96794C.1
aaatataattttagtttcataagttcacacttatcatttttaaaggctttcattcttgatctacataaagttcagatatcaaatttgccagctaagacaattaaaactttacttaagatttggtaacaactagtttgacagaaattctggcctatatattaagaacttagcaatacatttgtaagacgatgctctaccagtccttcagcagctcactggcaacatccttgtagctaactttctttttctttgtagtcataggctctgcttctgcattggaggtttctggtagcttctcttctctaacacttcgattcatcggttgctcgactttttgggtggcaaggctaggaatcatgtcaaataacattgcttgcagggggtcagctgaaatttctaatttctcagtcacctcattgttttgctcattgtgcctatcagacatttctatttcaggaaccaacattctttcacgttcattgtcattcaagtccttttgcttgtctaacttattttgttcagaatttttctcaatctcagcaacttggacattttccccngtttctcagttctccctgtggttcctgaacgtttcttgtaaaaatcaagacttcctgctctcgtgtcaatctcctgctcaattggtcttttgccatgagaatcactttcatctgacgattcatattcacatattttagcaggcttttttgcaatttgtggtcgtgctcttcgagcttgtttgacagctggttgttttacttttttgataccactgcctgcaggtcttcctctttttcttttgccacccttctcttgagactcgtgc

SEQ ID NO: 139299 - DNA, 254 bp, Glycine max
  Clone ID: PAT_MRT3847_96795C.1
ctagcacaaacgactgtatggcgtatctctcccattcctactatttcatctacttgactctctctctctctctctctctcacacacacacacacagagaaatgccctatttaacaacatccccagcctaatgcctttcccattctcttgtcctcttcaacttccaacacccactgacacattccctcaactctctcatgctcacggccactactcttatctctctcccctcctagttccattcattctcctcac

SEQ ID NO: 139300 - DNA, 799 bp, Glycine max
  Clone ID: PAT_MRT3847_96796C.1
aattggaaacagagttggtttacaatgggaatgctcccagagaagcatatgcaacaattctgcattcagctcatgtttacgtttgtggggctatagctgcggcacaaagcatccgcatgtctggatcaactcgagaccttgtaatacttgttgatgagacaatcagcagctatcacagaagtggtctggaagcagcagggtggaaaatcagaacaatacaaagaatcagaaaccccaaagctgaaaaagatgttacaatgaatggaactacagcaagttccgtctatggcagctgacagattatgacaagataatattcattgatgcagatttgctcatactaagaaatatagatttcctatttggaatgccagaaatcactgccactggaaacaatgccactctctttaactcaggtgtcatggtggttgagccatcaaattgcacattccagctcctgatggatcatatcaatgagattgagtcttacaatggaggggaccagggatatttgaatgaaatattcacatggtggcacaggataccaagacacatgaacttcttgaagcatttttggattggtgatgaggaagagaagaaacaaatgaaaactctgttgtttggcgcagaacctccaattttgtatgtccttcactatctaggtgtgaagccatggttatgcttccgggactacgattgcaactggaatgctgatatatttcatgaatttgcaagtgatgttgcacatgcaaagtggtggaaggtacatgatgcaatggctgagcttttgcagcaggtt

SEQ ID NO: 139301 - DNA, 106 bp, Glycine max
  Clone ID: PAT_MRT3847_96797C.1
tcgaaatatttgccatattactaagagaagaatagccgggcttgccggcttgctcagctcagcctatataataatcctttttctctagcttgctagagactaaagt

SEQ ID NO: 139302 - DNA, 613 bp, Glycine max
  Clone ID: PAT_MRT3847_96798C.1
gcaccaggtataactttatcaaattttattacatgaaatcctaatttcttaatacccaaatttatattgacatgtttttatgtcaatattaccagtaacttagtgtgataaatgtttttgtattgggtttgaacgcaatccgtaaggcgaacattgttacattgatcattgctcactttgaaataaagttacgcaaggcactctaaaggtctatgtcaacaaatgcatcttccacattttggttgtttggttgatgcacagaacaattcaatcttaaagagatggggtcaaggcttttattaactgtgggagaacaacattgtttgtttgcctttcctagaaaagcctaaacgacaccaaatcaactttagtagggcagggaatgattatcaatggtgaaagacattgaaccatgcaaaaccaatgatcaattggaaataattaaccgtactttttggaaggatatatggtctagtaaagccatggcaagtctaaagaaaagtaaaatctctaatttatcttcttttttttataacttttatttatttcattttgttcttttaattttgactaattcaataaatcattagcttcttttatctaatggacagtc

SEQ ID NO: 139303 - DNA, 235 bp, Glycine max
  Clone ID: PAT_MRT3847_96799C.1
taacagcaccaccggggtgtcttacatcgccgcctgctacgtttaattcttggagtccggtggtgcattagttattccccttatctacaatgagttacctgagaaccttaacaagaagctcgatttggtctatggagtgctcttcactggtgggagggctgtttatggtccatattttgaaactcttggaaacatatttaagaaagctttatataaaaatgatgctggggaccat

SEQ ID NO: 139304 - DNA, 426 bp, Glycine max
  Clone ID: PAT_MRT3847_9679C.1
gttgaatcctataaaaaatttcttggtgggacagcattattcgtgatctatgaattttgtttggaatgaggtctaggagaagggtgtgggggtttcatgatgacaaactcttcagttcttcatttgctaaccttttcatgaatcctttctgctttagaaaatactgagcaatcactgaattggagtactcgcctaaagatagctctcggttctgccaggggattggcttacttgcaccatgactgctgcccaaaagttgtgcatcgcgacataaaatccagcaacatccttcttgatgagaacatggagccccgtgtctctgattttggtcttgcaaaacttttggtagatgaagatgcccatgttacaacagtggttgctggcacatttggttatctagctccagagtatcttacaagtgggaga

SEQ ID NO: 139305 - DNA, 413 bp, Glycine max
  Clone ID: PAT_MRT3847_967C.1
tcccacttcgaccggttagctgaggccttgtgtttggaaacttacggtgccgtttcggagttgggaaaacaaattattatgggagatggcatccacgaacccttatgattcgatgggtgacgacgctgaggacccttctcagctcatcgctcgccaaacacctaaaggcggtggctgctgctgcggttgccaccgccgctcccatgaaggcgccagctcagtagatcaagccggctcatctgcctagcacgactcttgctgcgtgtcatgctgcgagggatgccacaaatgagtctgttcatgtaggccgtgcaggtggactatgagggtgacgttgacttacacgcgctcgttggtttagtcgtgactcttccacagacgagtacttattccctaccagcggagcgacttat

SEQ ID NO: 139306 - DNA, 420 bp, Glycine max
  Clone ID: PAT_MRT3847_96800C.1
gaaagagagatactaatacaaatcatatagagaagggagatgatgcagagaaattaatcaaaatgagaagtttgacaaaaagaaaagcaatcaagaaggaaacttcctacaatgggtatggaagtggctttttattgtgtttagtaagctaagctggctagttatgctgatgtgtacaaattagctgagctactagtgatgaagggatgtacaaattggttaactttgttacaaatagttagaactgtaactttgttaattgttatcattagtgtaaaactataaatcctttaaaaattaaaatggattgtgaattggattcgatagtgaggtattgattcagaggagttcattcctttcttgattgaggatatttaatcaaggaaaaaaaatgattttaatgacttagttcctatactt

SEQ ID NO: 139307 - DNA, 248 bp, Glycine max
  Clone ID: PAT_MRT3847_96801C.1
tccgcccacccgtccgtttggaaggatttaatccattttatatttttaaaaatgcctgggataaactaaggatttcatatttggtgaccggggacaaaaccctattggaaggctgggcctttttgaaagaaaaaaactttgaaggggttttccaatttaccaaagcatttgtgattgccagccttcgatacccatgtaccgaatccatggtttaacattgttttaaccatggggatgtttgttaattt

SEQ ID NO: 139308 - DNA, 178 bp, Glycine max
  Clone ID: PAT_MRT3847_96802C.1
gctgacattggacttgcaatgggaattgctggaactgaggtgagtgcaatgctatgcaatgtttccctttgtgaaccattcattctacccaccaaaggaaaagaaaaggaaatgttgtgctgctacattttagtcacttaactcttaattttgtactgcaagctaatttcttaatata

SEQ ID NO: 139309 - DNA, 310 bp, Glycine max
  Clone ID: PAT_MRT3847_96803C.1
tcaacataatcccctcccacaccacaaaacaatatttgcctgtataacactaccaacataaaatatattgccataaattaatccgagggtagactcattaattgtgaatttaaaaaactaaatcaaagaaggaacatgaaaccaatcatctgatgttatcggttcatgatcagattccacctaggaccactcatttatacgaatacgagctttatttacctgtttcgtcccaatcagttttttaatggcaatcagttagcactaccgattgtatttatggtccaaacaacatttcaatccaaattccctt

SEQ ID NO: 139310 - DNA, 533 bp, Glycine max
  Clone ID: PAT_MRT3847_96804C.1
ggtgtgttttttttttttttttttttttttttttttttttttttttttttttttttttttcccccaccccaagggacaggaaaatttcacatattaacaaaccccacaaacagcattcctttggggggggacggaaaacaaccctttaacctttttcggggggggccattcggaaaacgggggaagggaaaaaaaaacaatgaacaaccctggggggggggggcccccaaccaagggggccccaaaaagaaatcccaaaaaaaccaaaggggtaaaaataaaaaggccccacccctactaaaaaaaacaaaacgggcccttgggccttggtccctgggccccggcccccccaaagggaaaaaacacgccggttttgggaaggggccccccaaaaggggggggcctccaaccagggaaacaaccccatttggggccctggaaaaaaggggcctttttcccccaaaaaatccctcccccgctttttgtgggccccccccaacccccacttgaccccccaggggggacccccccca

SEQ ID NO: 139311 - DNA, 489 bp, Glycine max
  unsure (1)..(489): unsure at all n locations
  Clone ID: PAT_MRT3847_96805C.1
aagaaaaaaagagagatgcagaagtaaagaaaaattaagtacaaccctaaaattattaaattaataagaaacaatgtcatgaaaacaatatatgaataattacactaatagttctaatatgtatgattaagacgagcactatagttttctaattaatttgattgacacagacactaattgtgttgaattggataactataaataatgaaccaaaagtatgatgctatgatgttgtaactcatgtgatgaagtgtgctatgtgtagctcaagatttgcataacttcaacatgattaatgtctaaaatattagacctgtaaacaccgcatgcacatatattctaattaactaaaatataagtaacatatttggtagataaagtgtaataaaatgtgttgaatttcaccttattcggttactcctcaacctcattaccagactaccattacttagtttggnggagaaatggtaactntctttntggtagcta

SEQ ID NO: 139312 - DNA, 544 bp, Glycine max
  Clone ID: PAT_MRT3847_96806C.1
catccatccaagtttaaagatgattagaaatccattctttaagaatttccttaagtaaataactttctttctcttttttttagagaaaggaattttctttctcttaaggtatcacttaattgtccattataataatcttctgcttaatatttaatttattcaccgaatattcttttaggtctttatctagattttaagccattcctttcctttcaaccaaatattctatttgtcattggtattatgaacgttgttgttgctcttggaattattattattattattattattattattattattattattatttatgtttataaaaatctgcacatatgttcttatatatataccccgaattgtatttattattcctatgatcattcacatgtgatttaataagttggggttatatctcaagaaccaacctggcttggctgagtgggtccaatcattattattttatattaaggacttatgagaggcgaaattcctttttattatcaaattaatttaccattaatcattttttttatctttttta

SEQ ID NO: 139313 - DNA, 923 bp, Glycine max
  Clone ID: PAT_MRT3847_96807C.1
gccttagtgatccaagctagtattttagggatcagggcatgaagtctattcaaactgggcaaccagcaccagatccatttggtttgcttggcctgttaagtgtgatcaggatgagtgatcctgacctgacatctcttgctcttggaattgatcttactacactggggttaaatttgaattcatcagaaaatcttcacaagacctttgggtctccatggactgatgaatcagctaagggagatccagagtttacagtgccacaatgttattttgccaaacagccacctgctctacatcaaggttatttttccaagttttcggtggaaacattgttttacatattttatagcatgcccaaagatgaagcccaattatatgccgccagtgagctttacaacagaggttggttttatcacaaagaacatcgtttatggttaataagagttcccaacatggagccgctggttaaaacaaacacatatgagagaggatcttatcactgtttcgatccaagcatatttgaaaccgtccgcaaggataattttgttcttcattatgaaatgttggaaaagagaccacatctgcctcaactttgaggaggaaacaaaaacctttttattgtaaagtttcaattatggatttaatgccttggagtcattttgcagtattagaattcttcaatttggcgtttcttcctatctggtcgccttagtgatccaagctagtattttatttttccttgccttaatataaacaataattaggatacataggataacctagctgtctgacaaacatgtttttctgcccattagctaatgcacaggaaaaacacctggatcgaaaatggatgtactgtctaggagttatactccaccttccgaaataattatcttaatctgaatctgttacaatcagagatc

SEQ ID NO: 139314 - DNA, 253 bp, Glycine max
  Clone ID: PAT_MRT3847_96808C.1
cggctcgaggcagagctggtagagtcttggtctttgtaatgggaaaagaaggggtccatggaggcggattgactacgaaggcatactcaatggcaaaatacttgagagactctgggttctagctgctaggcagactgttaagtattaggggaaaattgctcttaaactttcctagctataagcttaagtcttaattctggaaattgtattagcaatgcagggtgatggggtatgaacctgtgtctccgttgta

SEQ ID NO: 139315 - DNA, 586 bp, Glycine max
  Clone ID: PAT_MRT3847_96809C.1
ccacgcgtccgctccattcttcaactccattttttctagctggagctctccgcttcttgagttgccctttttacgattctgaatggacaattactagctcccctaggatatacgatctggcaatttgggtgtggtctgtactcatgcagcacaaatacacctcagagctagcttgcatgctttaccttgaacggtgccacaggattgaagaatatgttgacaggcaaatcatagaccattaaactcttccctgccctaatcttatttagctcagggaggcgggactgacttcatcacatttgggtattgttatcgttattcctgctgagggagagctctttgagatgatatgccaggctggaagattcaacaaacactagggtcgatatttcttccagcagatcatctcatgcgttagctcctggaatttccttctattctggcatcgctacttgtagctggacatcaccttattggatggcatccctggcccactagctcaaaatttgagagtctggttattataagacatctctgctatattctaggcctatgtcaacggtgggaaccccatcctactttggac

SEQ ID NO: 139316 - DNA, 812 bp, Glycine max
  unsure (1)..(812): unsure at all n locations
  Clone ID: PAT_MRT3847_9680C.1
aacactaatcaaggacccatcacatctatatctatacaagaaccttatagcttctttacattataatgaatgaaaaaatagctaatacatctagggacccaagaaaataaaatataaaaaaaaaaaaacacatacaaaataaaatgacgaacaaaactaaaatgcgattttagtattattctccaatcaaaattagaatttcacctcaataatctatattaacatttaatgcaaatactttattagacaatttattgaggtaaaactctaactgtgattcaaaaacactaaaagcacctaaaaaactgtatctaaattttgtcccaaaatgaatttacctcaacaaaaataagtgggatacatcccagttagctagctagtagtagtgttatatgagattttaaccatgactgaaagtggaatgttgaccacatgaccttgattcccaaacagcccaattctcccaaagctggccacagagctgttaagggttgcattcaagagcacagacaagacctggctctcaccactgggaatacagaagtgagttggagaaactttcactgaaaccccataaggagcagtccaaccaacactgtaagattcattttgagcaacgttttggactgtcctctgcactattctagattggttcagctttgatatagtgatggagggcaagttcagatcaggaccatagacagtcgaattaataaaggcccgcaattttgannccgtgtgtagtattagcacctacaggagcgtgagccctttgtacctcctacatagaaatgagcnatgtaatcacctca

SEQ ID NO: 139317 - DNA, 2162 bp, Glycine max
  Clone ID: PAT_MRT3847_96810C.1
ttctctatatatacacacacttcacagttcacacttccctaattagccaccactcccaacccccacccgtagtttctaccaccttcagtcacggcgtaatacactaaccaacccaccatgtcgctgcctgcttgtcccgccgaacaactggcccaacttctcggcccaaacaccacagacgcctccgccgccgcctcccttatctgcggccagttcgccgccgtggacagcaagttcgtcgacacggccttcgccgtcgacaacacctacctcctcttttccgcctacctcgttttttctatgcagctcggcttcgccatgctctgcgccggctccgtccgcgccaagaacaccatgaacatcatgctcaccaacgtcctggacgctgccgccggcggcctcttctactacctcttcggcttcgccttcgctttcggctccccctccaacggcttcatcggtaaacatttcttcggcctcaaggacatcccttcatcctcctacgactacagctacttcctctaccaatgggccttcgccatcgccgccgccggcatcaccagcggaagcatcgccgaacgcacacagttcgtggcctatctcatctactcctccttcctcaccggcttcgtctatccggtggtctcccactggttctggtccccagacggctgggcctctgcctttaagatcaccgaccggctattttccaccggcgtaatagacttcgccggttccggcgtagtccacatggtcggcggaatagccggcctatggggagcgctgatcgaaggcccaagaatgggacgtttcgatcatgcaggacgagctgtggccttgcgaggccacagcgcgtccttagtagtcctgggaaccttcttgctttggttcggttggtacggatttaaccccggttcatttaacaaaatcctacttacttacggtaactcaggaaattactacggtcaatggagcgcggttggcagaaccgcggtcaccactaccctagcggggtcaacagctgccttgaccacgctattcggtaaacgggtgatatccggtcactggaacgtgaccgatgtctgcaacgggctgttaggcggtttcgcggcgataacagccggttgctccgtggttgagccatgggcagccatcgtatgcggttttgttgcttctatagtattaatagcttgcaacaaattagcagagaaggttaagttcgacgatcctctggaggcgacgcagttgcacggtgggtgtggcacgtggggggtgatattcacggcgttgttcgcaaaaaaggagtatgtgaaggaggtttacgggttggggagggcgcacgggttgctcatggggggtggtgggaagttgctggcggcgcacgtgattcagattctggtgattgctgggtgggttagtgcgaccatgggacccttgttttgggggttgaataaactgaagctgttgaggatttcttcagaggatgagcttgcggggatggacatgactcgccatggaggctttgcttatgcttatgaggatgatgagacgcacaagcatgggatgcagttgaggagggttgggcccaacgcgtcttccacacccaccactgatgaatgatctttttttcccatatgcatgtctcattagtcaaacattaaatttggatacatattccttgtaaggattcaaaccttggttacttgttacttctgttagatccaactccggttgatactcatgactttttacttcttttttttttatttgtcttgggtcttcttttttcgtagatttttctttttatgatgatgggcaattagggattttgatttgtaattgtcattggtcgtgcattggtggatgctggaagttaaagattctggtggaagatgcgtacgtttctgtggggggtggttgttgactaaggcatgttggtcctggaaatgacagatggctgtggaaaatggaaatttgtgggatttatttttgtagttttcaccaaaaaagaaggaagaagattggtatatagtagaaatactactgtttggccgtgaggcatatagtttttttttcttttccttaatttgagacttttatgttaaactttttcattatgtctaatgtaaatatatggaagtagtttttataaaaaaaaaaaa

SEQ ID NO: 139318 - DNA, 109 bp, Glycine max
  Clone ID: PAT_MRT3847_96811C.1
ctcatccatatccaccagcccatcacaaatctctcttcattgccacaaataattcacccgcagtatgcttatctctacccggatcaaggccaccagtattctcaaggtc

SEQ ID NO: 139319 - DNA, 323 bp, Glycine max
  Clone ID: PAT_MRT3847_96812C.1
cccgactctcatgaacgcagctctgaacactcatttcatgcccacacaatagcgtgacacacgacacttttgctatgatgcccagcccgaccgtgatgagacagggaaacactatcaatgcggcatccgttaccgagcgtcgttacggaggcctgttggaacagagaccaagggactccctgtctgaacggggacgggagctaccgtctgaccgaggcagcaaacagcgctgtggttgactagggaacattatccgtaccgacaccatgcatgatctcttgaacactgatttggctgccaaacgaaccttacagaggctcatc

SEQ ID NO: 139320 - DNA, 346 bp, Glycine max
  Clone ID: PAT_MRT3847_96813C.1
ggaattcggcacgaggatttaattttcatcatgtgaatatttattctaacaactatagttaagtttgttgattttctgatttgatctctgttatgaacattacatatccatttctatggcgatagtggaaatggtattaaatttgtatcgtctgattgatcatctcttttgtacatttggattgtttctgtaatatgttgcaccttattttttattttcttttttccttcattcaaatttatgactatcaggaagtctcatatcacctgtctcaattctcagggtgcagcttatatatctgttgggcaacttcagttagtgccaattggttttaagctgaaatcta

SEQ ID NO: 139321 - DNA, 868 bp, Glycine max
  Clone ID: PAT_MRT3847_96814C.1
tacggctgcgagaagacaacagcaggggggagcagttatttttcaaagagaccacaactgtctccttcttcctcctttcaaatttagattttagtcccactaatttgtcacagtctgcattttttaaaccactctcatctaaattgtggtggttcagttactttctctaccatgatcttccttcacttcttttctcattaccactactctttatatccataaccaggtgctttttcatcaggtttaataactcgtaccttttattttttctccctttggcttgcaaaacctgcttctactctaaagcttatatctttacctccaatgaattcagtaagtgccatcaagttatagatatgtttgacatatttttcggttggtccaaagcttccaaatgtaagaaggcgatcaaacgagcccggtgccggctcaggctactcaagaacaagaggcaggcaatagcaaggcaactgagaaaggacttggctgagctaatacaaagtggccatgaagaaactgcatttaaccgggtggaacagcttatgggagatgaaagcttaacagctgcgtatgaattgttagatcacttctgcgaatttatccttacgcaactctcctacatccagaggcacaaggactgtccaaatgatattaatgaagcagtctctagtcttatatttgcttctgcaagatgtggggatcttcctgagctcggtgtcatcagaaagctctttggacagcgttatggtgagaggtttgcaactgcagctgtagagctatcaccaggaaatctagtaaacaaacaattgaaagagaacctgtcagtgaaatctgtgccggatgatatgaagtacagaatggggatgaa

SEQ ID NO: 139322 - DNA, 273 bp, Glycine max
  Clone ID: PAT_MRT3847_96815C.1
ttctttatttttggttttggagagcaaaatattatcttaactgattagaacctatctgaatctaggatgatttatcattggagtcttgcttctaacaaaaaaaaaaaaaacgctctcatacatgtgaatctgccacacaactgacggtaaaaaagccttacatctctctggagggtaaaatattgggaggacaagcaaggcatggtgcctcccccatgccggttcaatcttcacatcacgagtcatgttgtggtagctgatcccccgatggac

SEQ ID NO: 139323 - DNA, 233 bp, Glycine max
  Clone ID: PAT_MRT3847_96816C.1
gcttcattgttcattctctaattttattttccaattaacgtgcatggtgtattttgataatggggttgcgtttcaatcaaggatgctttgcttggtttgcgttgctgttcccaatttggtgaatttttttatcggtaaacgttacttgataggttgacagtttttgttagtgtgagattcaacctttacctcacttgtgtcaccttttatcgctaaatcaatcttatatcttc

SEQ ID NO: 139324 - DNA, 720 bp, Glycine max
  unsure (1)..(720): unsure at all n locations
  Clone ID: PAT_MRT3847_96817C.1
attaggaggtatacatttgcatttttttttatttttttactttctcctataatttacacattaaaacttttttcttttaattcattaatcaatgcccttagggaattagttagcaaaaccctaatagtaatagttaaaggcaaatgctaattaacctgttcttaggacattgagaaaggagaaaaataaaattgtattatttatgacttttttatgtttttgtatgatttacataataaatattttcttatttcagttccttaatcaatgttagcaagatccatagttaaaagttaaaaaaaaataaaagcatacttatttcaaagcaccaaagccatatactataacttttttttcactgttgaataataatgaaatatatatatatatatatatatatatatagatataacctgtttcagtaagagacatttctcatgagctccatcaaaatgagagagagagagagaggatgatgtgatttagtttatgaagaaacttagtagacttggagaattttctggtacatgaaaaccgacagaaagagtagtgagcacacaaaagcagtgatatagatttatatcaagtgcctctttgtgctcactctcttctgtcaatttctgtccaaatagaaggaatcaaagataccaagtacacatacaatagcttcccaatatgggaaagttcacagaataaaaagtatacanaaatgaaaaatct

SEQ ID NO: 139325 - DNA, 104 bp, Glycine max
  Clone ID: PAT_MRT3847_96818C.1
ggctagtgctggtgcaagtgtcgattcggctagacagaaccttgccgcaacttgtgttaatgcatttggaaatgctggctttggccaggatccattaatgactg

SEQ ID NO: 139326 - DNA, 374 bp, Glycine max
  Clone ID: PAT_MRT3847_96819C.1
cttggatcctctagagcggccgcgattgttcgattttttttttttttttttttcccacaaataaataaccaaacttaatttacaaggggaatttggggctttctatttctggcgggggaaattacaatgtaacccaaataaatacacctttaattttcaaattataaaaacaaataataactaattgcaaatacttctctgtattaccataacatcagaaattgtcttttaacacgaacttaactctatcaaacaaattatcaatggcaaaagaatcactcctgtacaattaatacttttaaacattattaaacataaaacattatttttcttagatttgttcactatatgtataacgcataccctaccacctt

SEQ ID NO: 139327 - DNA, 279 bp, Glycine max
  unsure (1)..(279): unsure at all n locations
  Clone ID: PAT_MRT3847_9681C.1
tttgtgttttttgttttaagccaaatcgggggtngggtggggggggggtattttaagggggccaaaccctttgacattatatataaaccactacgctgggagatccagaagctgacatataatcggggcctgcatattaaaaaacgagcggaaagaaacaggcgggggatgcgaaaatatgaaaaaagaaaatttggtcccggcaccatttttcaagcaaaataatttgttcagtccctgcatacataatctgctcctattacatcagggaccccccac

SEQ ID NO: 139328 - DNA, 338 bp, Glycine max
  Clone ID: PAT_MRT3847_96820C.1
ttttcttctaattttttaggtggggatgtgggttaattcatgtgttttttttttttttggcttttgagttttattttgttgggttctttttttcagtcttggaactggaaaaggggaaaagggtatatggggttgctgccaatttaaactagaagtgaccttctttacctttcttttcaattttttattattcaattttcttatgtcgctctgttggagggtgcgaaactttgcgctctgaacttgggcatgctccctgtcatcttgattctgggtctatttctatttctttcaatctcgctaacccttaaaatttccacccttctttttctacatct

SEQ ID NO: 139329 - DNA, 318 bp, Glycine max
  Clone ID: PAT_MRT3847_96821C.1
cctttttggggtccgacgtggcggtcattgatctggacctgttatgcgtgatggtgatgtggtgcatacacggaagaaactacatggtgcaagtgaacaacgatgttatgcgctcaggggttgctgatggaggcgggaatacgtggcacactattggcattggcggccataaatgggtggatgtgttggtgcatataggattggctacttgcaatgtgggatacaatccttcgcatgtgctaaataaggctgctgggtcgagacacaaaccatcgcttgaagaggatcggggagagcataggccggtattatacatac

SEQ ID NO: 139330 - DNA, 402 bp, Glycine max
  Clone ID: PAT_MRT3847_96822C.1
ggctctcaatgatcgacattgtctacgccccaaaaagccggataatacatggggttaccaccatccactacacggtgtcacgctgacaatagaaccggtcgtacgtcttggatagttctctgacaacggtgctctatccacaaaaagacctaacgctaactcaccgcagactaaaaatgaagtacaaaacaatacggctaccaataatgcagccgcgacagctaaagccgatgccactgctgcatcaggagaaggttacaaggccgaacgggcatcgacacataaataggctgtttcaccatacgttgagacggcaagagagaggagagtcgcatctggcagaaaaaggaactcactagatcctggcacagttcgaattgtgtctgcactgcatctcataag

SEQ ID NO: 139331 - DNA, 429 bp, Glycine max
  unsure (1)..(429): unsure at all n locations
  Clone ID: PAT_MRT3847_96823C.1
cttatcttgacagggcccttggatttgagatgacagaagaggtattatccatataccagtacatgcattcagttttcttctgacttaattgaattttgcaacttacaatttccgacgatgatttccgatcgttgttgtgaggaagggagccatccgtgtctctccatgtccatgatagctaaagctaactttcccctggccctcctcttttattgttttattttacatttacctgtggcgtgtggttattcttcttcttattcagctttagggagtcaatttcttgtcatgaaatccaaaataaaatttagcgttgcattggtggcttatgtttgttgtgccttttgttagagttctgttgcatttctaatagatagataacctgccgngtcatttcagcaaattaataaaatgatagaagatgtggac

SEQ ID NO: 139332 - DNA, 287 bp, Glycine max
  Clone ID: PAT_MRT3847_96824C.1
aagagatactactctgagtctgactactttaagcaagcacttcgccaaggtgcaccagcaaagcctagggtaccaaggattccaagaatgccgcacttacatgatttccagtttttcaataacccaaggctaaatgaattgtatgaaaaggaagtgcggtaccttatgcaagcgaaccagaagaaagataccattgatggtgaagacgaagatcagttggacgctttgacagcagaggagcaggaagagaaggacaattatagaggagggtttgcgtcatggacaag

SEQ ID NO: 139333 - DNA, 138 bp, Glycine max
  Clone ID: PAT_MRT3847_96825C.1
tcacaagatacaggggaactcggtgattatccgcaagaatgtgttggatatcaacatcactaccactgttaagggcgtcattgcaaccggcattaacatcattgcaggcgtcgtcgcacacgttactcctctcgcgtc

SEQ ID NO: 139334 - DNA, 536 bp, Glycine max
  Clone ID: PAT_MRT3847_96826C.1
atagtcctcacgcaaccgtgaactggcgtttgtgtgtattggacattgaagattggattgcttcattttgatggatcttaacgctgaatccatctggggttgttacaaacctcctcctcaattgggtgttggtgtttccaattctcattctactctgattggaaatctaagatatgattatgacaaatgccgcaaatgggagtgctgttgtttgggtgttttggctcagagagctaccactgctgtggaagatgagggccccagtgtcccacctttggttgactcttcaggggctgctgatggtgttcaccaaaatgagtcaaagggctttcacaaggacttaaacttacttcctaagccattaacagcaattgacatttcttcttatccaagagatggatcaaaggtgcgcgtggcttatcaaggacttccgggggcatatagtgaggatgcaggttttgaaagcctatccaaaatgtgagactgtgccatgtgacaattttgaagcttcatttaaggcagatgaaattatggtt

SEQ ID NO: 139335 - DNA, 421 bp, Glycine max
  Clone ID: PAT_MRT3847_96827C.1
ttttatttgaacactgcatagcatcattattctctccgcggtgatcagtgacaggtcattagtcgctcggttatatatttctgaggaaatttgaattcttgttttgtggctagattcttcttaccagacaacagtcttcatatgatcagtggttttgaccacatgatgttcttaatggaagataatattgcatatttgtgtgaaatatgaatgtgctggaatcttattgatatattgtagttttgggggctagtttggcattgattcagaaaccaccgtttttaattttgcacgatttatttttgcatatgcgttgcatggttgcatatgttggcactaaactttgagtaacaatgagttgctgaaaattagttttaaatttcccgaacaggtcaatggtttgattgggggtgctgtagca

SEQ ID NO: 139336 - DNA, 2801 bp, Glycine max
  Clone ID: PAT_MRT3847_96828C.1
cctaatattgcgaagataaggaggcatgtccgccagtcaaaatgcttgcaggacaagatgacagcaaaggaaagtgcaatttggttgggggtattaagtcgagaagaagctctcattaggcagcctagtagtgataatggtacatctggaataactggagtgccacctggtgttcctgttgagaataagcaagcagctactagtagtgctagcaactatgatgttgatggtactgatgatggcattggttctgtttcttccaaagaaaataggagaaatcattttatggttacggaaccatcagataacttgcgtaggggtaggaaacctgtccaagatacagatcaatctgagaagcaacccaggcccaaaaagccacgaagggccaatgacaaaccaccagcacaagctgacaatgaaattttacatgttgagccaagaagcaaagggatcaatataaaccagacagaagcacaagtagttggagtccagattcatggaaatgaacaaagtaatgagacagattctgctgcaaggccactggaaagaggacttgaggtgcctgcacaattaccagtacctgaggttgatcagtactcttatttacatacaaacaacttagtttcctcagaaagcatgtatatgagtggaaaaccaatgcactatcctgagttgcaaaaccctgacatgcatcatgagaccacttataatctttataatccagcagcaggatatgagcctggtcaggatgggcagcagctacattctgcaaacaatgaagcagttaggctagagaatgatgcagtttctttacaaggagtacatatgaaaggggatggaattaatggaggagacttgcaatattttggtaaagatgcatttcaaaatgagcttgatagacctatggatcactccttctttggatcaccccttagcatgtcattagattttggagcactcggcagtccgttccatttagatgatttcgtgtgtgaggatgaaatgatacagtactttggagcataaattattgaaactgctagctcagcagagatcgttagtgctatttttattattattctctccaataatgctgtgaagatgttgacggtactgatgatggcattggttctgtttcttctaaagaaaataggagaaatcagtttatggataccgaaccgtcagataacttgcgcagggttaggaaatctggccaagatacagatcaagctaagaagcaacccaggcccaaaaaaccccgaagggccaatgacaaaccaccagcacaatctgacaatgaaatttcacttgttgagccaagaagcaatgggctcaatatgaacccgacagaagcacaaatgggtggagtccagattcatggaaatgagcagagcaatgagacagattctgctgcaaggccactggaaagaggacttgaggtgtctgcacaactaccagcacctgaggttgatcattactcttatttacatacaaacaacttgatttcctcagcaagcatgtatatgagtggaaggccaatgcattatcctgagttgcaaaaccctgacatgcatcatgaaaccacttataatctttataatccagcagcaggatatgagcccggtcaggatgggcagcagctacattctgcaaacaatgaagcagttaggccagagaatgttgtagtttctttgcaaggagtacatatgaaaggggatggaattaatggaggagacttgcaatattttggtaaagatgcatttcaaaatgaccttgatagacctatggatcactctttctttggatcacccctcagtagcatgtcattagattttggaggactcggcagtccattccatttagatgatttcatgtgtgatgatgaaatgatacaatactttggagcataaattattgaaactgctagctcagcagggaccgaactagaaaaattccagcacctgttgcttctctgggttatggttcctagattggtattagtgtttatggagttagagattgaaagatataatattaagaacgttaacaagtcataagcacaggtccagaagaactgaagcatgaattccgttttattgattaccccatttccatatcaataaatatgttttggggttgtatgtaaacttgtcaattgatggattcactgaactgcacatatgaatgtctagctaaatatttttggaatagggttccctccaaatttaatagattatcgttgtttcattctcctgactaatggcgacacgttaaattgcagttcggatatagaagttgatgatattagatgccccaatatagcagagaaagatgtcagcgatgaagagattgaagcagaagaattggagcggcgaatgtggaaggatcgaatcaaactcaaaaggctgaaggaaaaacagaagctagaagcgcagcaagctgcagaaaagcaaaagccgaggcagtccagtgatcaagctcgtagaaagaaaatgtctagagcacaagatgggattcttaaatatatgctgaagctcatggaagtctgcaaagctcgtggatttgtgtacggtatcattcctgagaagggaaagccagttagtggttcctctgataacattagagcttggtggaaggagaaagttaggtttgataagaatggccctgcagccatagccaagtatgaagcggactgtcttgcaatgagtgaggccgataacagccgaaatggtaactcgcagagcattctccaagatttgcaagatgcaacgcttgggatcactcttatctgctttgatgca

SEQ ID NO: 139337 - DNA, 650 bp, Glycine max
  Clone ID: PAT_MRT3847_96829C.1
ggaaaggattaaaagtgaatctttatgtataatatatagactagtgtttcatctaatgacattcacttacaaaagtcataataaaagatggtacttaattaattatacaagtcaagatcgagggatgatgatagtggaagcaagatgaatgtcaaacataacttcatttttagaagtggaaaaacggattattccacccaacgcaagtgactccaatgtaggttgcatattattgtgagttgaaccaaaaaaaaaaaagattaaatttgaacctctaaaatgaagttcaaatcctataaaaacctaactttttagggcttttaattaatgggtttttgcaagacaagtctgttcattttgtgacctctaattacttctactgactatatatcttgaagaaatgggtaatctgtgtatccaagcacagggtcatgggtggaaaaggtggtggcatcgggttcgtttaactgagcatcgagctggaatcttgtggggagatctggatttgccagaaaaaggcgcccataagcaaccaaatcagcagcactgctggatatggctaggtttccctcactcctatcgtaaccaccagccacaatgaaagttcccttgaaggccttcctaattggctctagggacaaatatctcgt

SEQ ID NO: 139338 - DNA, 381 bp, Glycine max
  Clone ID: PAT_MRT3847_9682C.1
aattgcaaacccccacccccaataaaataaaaaaaaacgaaaaggggagggaaagggaacccggaccccataggcataatttttattagtaaccagcaccgggaaagggaaagacacccacaaaaactacaaagaggggggaggggggaagagaaggaaaaagaacacccggtcccgttacctttaacccatatccagggcaattggaatgggaaagggatatccaaaaagaaaaaaatttttgtttcgccttgcccaagcccaaactgggggagggggggcaaagtcctattcaaagctaaagggccggggaagggaaatcctctttataaaaacgagaggggctcgggtcgagcccaaacccaaattcaagctcacggg

SEQ ID NO: 139339 - DNA, 372 bp, Glycine max
  unsure (1)..(372): unsure at all n locations
  Clone ID: PAT_MRT3847_96830C.1
cgacattcccaaagacgttcatcagcaactcgccctgcctaattttgactatcccgttaacctcccctgggaccttgtcaaactatccagggggggtgtctatacccaattctaacacctatcttttttatcataanttcttaatttatttttatattaactttgttccttatttttattttttattttattattcttatcttttattttttactatttttaattttcaataatcatttttctttttattttaatatttcttttaatatttttaaacttatttatatatttttttcatatttttattatttttttattttttattctattattatcttttttttttttatatttcttattatttattaattt

SEQ ID NO: 139340 - DNA, 361 bp, Glycine max
  Clone ID: PAT_MRT3847_96831C.1
gcttatatcaaggccacacatggaacctgacatatatgctatgtactgtaacaggaagaggtagtaatctctcatctcttgtttttttaaaaaaaaaataaaaattgcattgcatggcagcatcgttttctgctgtttctactctatcttcagcttcaattcaaacttatgataaacgaatttgcatttcaggttctgcacgtgagaagtcagctacagtttctcaagagatgtcaagagagtagggtagatgaggatcttggtgcgcctctctcttatcatgatctccctcatttttaaatcattgatctcaaggctaagtcagtgagccagggcttctttacagtgtaaatttatatta

SEQ ID NO: 139341 - DNA, 510 bp, Glycine max
  Clone ID: PAT_MRT3847_96832C.1
agattttaaggagcagcccggcactaaaatactggtgggtcaacagctcttcccttctatttctataatactgacagctcggaaggcgaatttcggtggccttgttcctgtcatgttgacgagtcttgggggtgagactgaggcctgatctggctgctgaggtgactgactggcagcctgtcatagacatgtctcaccccgtgcatcccccggcgaatactccatcagccccagcacagcatgatgtggatcggcacagctacttctcctttagacttggttgtcagagcaccgattgttgtggggatggtcagcggcgaatcagacagccttgtttttggcgctgagatcatttgtttcactcgtattctctacacagaggtaagcgggtgccctgatgtctaatatgtacaacctaaagtacaggatataaaagggtctggccgctttgacaagtcgtatagtgcatcacagcaacatctcaatctacaaattattcgaaataacaac

SEQ ID NO: 139342 - DNA, 192 bp, Glycine max
  unsure (1)..(192): unsure at all n locations
  Clone ID: PAT_MRT3847_96833C.1
ccgggccggnatacccggggcgccccacccgacgccggctgcgagaaacacgagggggaccgaaacgaacccacaacgctgaacgcagaaggggaaaaaggggaaagggattaggaagcagcgacaacaatggaattcacagcggtagaagaaggagtcagagagcaacaccgaaaatgcccatccaacaac

SEQ ID NO: 139343 - DNA, 464 bp, Glycine max
  Clone ID: PAT_MRT3847_96834C.1
ggccttctgccaagggagaagaatgcaatgtcagtgagctttctttctatgttgctaagggcagcaatatatcttgagacaacggttgcttgcagacttgatttggaaaagaggatggccctgcagttaggacaagctgttttagatgatcttctaattccttcttattctttcactggggacacattgtttgatgtagatacggtgcagcgaatcatgatgaatttcctacaatctgaaaaggaagatcgttcaccatataatgcagatgatgaatgtttttctcctccccaaagtgatgtttatagggttggaaagttgatggagaactaccttgctgagatagccacagacagaaatttagctgtttcaaaattcatcactgtcgctgaactaattcctgaacaatcaagaccaacagaagatgggatgtatagagccatagacatctatcttaaggctca

SEQ ID NO: 139344 - DNA, 154 bp, Glycine max
  Clone ID: PAT_MRT3847_96835C.1
gaaaaagcacgccccggcgaagcaccacgcgcagacattcttaccctggcagccgaagaaagtggggtactggctcaaggaacaggaggggaaaaacaccacggaaaggaggatagcctaacagcaaaaagaacccgagggaagcaaaaccgag

SEQ ID NO: 139345 - DNA, 253 bp, Glycine max
  Clone ID: PAT_MRT3847_96836C.1
aaaacatcaagatcttgatggtgatgatgatgaggaggaggagaaggattcctacttaattgagcttcatcttctagctaaacatgtttaaagttataatgttttggttactaatcactagttaattgtggattttcttggcactctatttcaggcaatacgcatgctatcttggcgattgttttgggttgatttatgtcaaatagagcaaaatgggccaaacgaatggtttgtactttgtacttcttaggtt

SEQ ID NO: 139346 - DNA, 449 bp, Glycine max
  Clone ID: PAT_MRT3847_96837C.1
tggtgcctagagaggaagggcttgggaagggaaaatctgtgctgtccccatttgtgacactttatgcgttagtgcagtgcactagggacctgtctgagatatcctgtgctcagtgtttgtctattgcagtgaacaactttcccaatttttgcagcaatcgtaaaggatgtagagtactgtacagttcttgctatgttcgatatgaactctacccttttttcttccctcttgattctaacaaaacaggaccttccaatactgcaaaagtcagcgtttatacttaattaaaagctatgctgccatatatgccaaaaatggcattcttgctcaatgcttggatggtttcaaattatactcttttgggaactattgctatctccccttgaacatagaagttgcatttgaaaaaactgtgcaactaaaaataaaagagaaaaatacgtcaacga

SEQ ID NO: 139347 - DNA, 208 bp, Glycine max
  unsure (1)..(208): unsure at all n locations
  Clone ID: PAT_MRT3847_96838C.1
aggatagagatttggagagatcagagaanagctatgtaaacatgttggtttaccaggacatacatacaggtgatgagcttatatcaggctcattaagttgcaaggaaattgaggatgggatgatgtgggaagttgaggggaagtgggttgttaaagagcagttgatgtagacattggtgcaacacatctgatgagggtggaggagaag

SEQ ID NO: 139348 - DNA, 523 bp, Glycine max
  Clone ID: PAT_MRT3847_96839C.1
tgaaccatgtcggacgaagagcaccatttcgaatccaaggccgatgccggagcctccaagacctatcctcagcaggccggaaccatccgcaaaaacggctacatcgtcatcaagggtcgtccctgcaaggttgttgaagtttctacttccaagactggtaagcacggccatgctaagtgtcactttgttgggattgatattttcactgccaagaagcttgaagatattgtgccctcttcccacaactgtgatgttccccatgtgaatcgtactgattaccagttgattgacattgctgaggatggatttcttagcttgcttactgaaaatgggaacaccaaggatgacctgaagttacctacagatttgtgcactgaaggatattgggccaaagaactagcctcaattgctggtagtttgctgttttcatttatgcaaaagttatatatttttgtatgatcttgttaaaccccggagttatggagactctaagtcaaactagttttatcaactgtgtttatgg

SEQ ID NO: 139349 - DNA, 563 bp, Glycine max
  Clone ID: PAT_MRT3847_9683C.1
cacgacaatcaaaaacacaaatccatatgattccatctcactatcagttctaaattctgtctcctctgcctctctgccaagtctctgtcaacactacaagtctatctccttaatccttactttttttctgaaaaagggttgggactcatttcatttcatgtgaagaagaatagcttatattacacatccatatacaagtgatgtgtcacgtatgagcatttcacatttggggtgctcttaaccgaggtaaaggaacaatgagtaagagctgttctgttctgctttttggctttgtacttgtgctttgtctcttctctccaacttcagccacaccacctcctgctaaagttgttactggggttgcttccaacgtggtttctgctcttattaaatggctatggccactaagtgtaaagtccacaaccaaacctggtagagtgcaacacagacgctccatggataaatttgagagtggctacagcgtgcaaaccatattcgaccgaaatcagctaggaattgagccacactcagtgaacatatctccaaatggtgaatttctaata

SEQ ID NO: 139350 - DNA, 294 bp, Glycine max
  Clone ID: PAT_MRT3847_96840C.1
actgattaccagttgactgacattgctgaggatggatttcttagcttgcttactgaaaatgggaacaccaaggatgacctgaagttacctacagatgagagtctgcttactcagataaaggatgggtttgctgagggtaaggaccttgttgtgtcagactagttttatcaactgtttatggatgtgacagaaactgtttaacatttctctgtttcgatgttgccttgatatttttttgataaaatacgactattagattagaaaaaaaaaaaaaaaaaaaaaaaaaaagcttgt

SEQ ID NO: 139351 - DNA, 339 bp, Glycine max
  Clone ID: PAT_MRT3847_96841C.1
aaccataagatgttcgggtttaattagcatgcgcattattatagtatgattgatgtagtttcatggtggagatggatcatgaaatgtataactttgatagactggtaccagctggtaaatactctccctactaaagactagaaagcacgctccatctagttgagcagcagtaaccttagcctccttctgatatatgttgcacaacacagactaatgcaaggcgtgattagcagtcttgacacccactgcgaagtacaatcatctcttatattttccttaagtcactggattacttccattaaaacgaggatcaaatgcttcttgattatcattatcagt

SEQ ID NO: 139352 - DNA, 357 bp, Glycine max
  unsure (1)..(357): unsure at all n locations
  Clone ID: PAT_MRT3847_96844C.1
gagaagcgtacanactcgcgaacgttaacggctgtggccactcacacctttgcaacatccctgattgtgttacgattcacgacgggtgctgaacctcctgcttatcacctatctcgctatttcacttgcgaacatcataccctacacatcagaccgcgctaaggctaacatcgttgaaccacaaccctctgcatgcacagccgacagatcccccgactgcgccactacgtgcaagcttataccctttcggacaggacacagctttgacctccacccattcgaacccagatatacactaatgatcagaagaatcaacattccccacaatagaatgtgcaaggctcattccgatggtga

SEQ ID NO: 139353 - DNA, 533 bp, Glycine max
  Clone ID: PAT_MRT3847_96845C.1
attctttctggataagaataattgaaatttattttgtctgcaattctttgtctgcttgttttcattattattatagcttcttgggggacttcattattaagtaaataaattttatcatccatttttcctctccattttccagttttagttgttgaaaatgcacatttagcatttgcttatggtcaaataatgtctcttttctgatatactcagtgcataaatcactacagccagatttatctccacttcttgcttctattaaaattttgttttagtaaatatgtactggtttatgacttatgagagaggaagggaaagagcattttttttcccatggtgggagagctaggggtgcatatattctatttaacaatgtaaagtattactatatgttaacaatctttcccttctatactgttttaagagggaggaaggggatggttttgttttgttttctttggtgggaaagctgaggtgcgtatcttctatttaacaatctggaattctgaagtattaagtattatatgttaaca

SEQ ID NO: 139354 - DNA, 609 bp, Glycine max
  Clone ID: PAT_MRT3847_96846C.1
tcccgattctagaaggttctccgcagaacaagtcctaagtatgttatgaagtttcggtctttcatcatgcatgaaggaaattaaaagggattttaagaattgctaatttagggttttaattttaatttttgtttgtttgttacagggcacccatggtttagcgttgctgaacagagtgagtaatcttatgtgcgtggaggtggttgatctctctgtatatactactgcaccctactatgccttttgggggacagagatgaattttatattctctgactaaggttgaagaaaaccccctttttcccctttggcttgaggattcggcagagtatagagtacagaggagtgtgtaaagaaacgcaacttgggggttgggttgttcttttctttgttattgttttttttttttttaatgtatgttgtgttttgaaataacttgccatttggcaactctagttagaaacaatgtttgatgtataagtattagtgtataacttgaatgttctctttttcatgaatccaaaaagctgttggtttgttgccaaaaaaaaaaaaaaaaaaaaacaaaaaaaaaaaaaaaaaaaagggcggccaacgactagtgagcaa

SEQ ID NO: 139355 - DNA, 458 bp, Glycine max
  Clone ID: PAT_MRT3847_96847C.1
actcactgtatctctttgctacagcagcaccaaaaccacccaacactcgaactcaatatccattattaccaaaaaaaaagaaaaaaggatatcatacactcctttcattattaaaactcttaacaccctctatctatatgcaaaacactaataccacaacactactcactcacagacaagaaactctatttcaatttggtgacgacaacacacacacacacacatatatatatatatagcaaggccacgttgaatcattcttctgaatcgaccatgactagactaaactctcatacttcttggacacataacttgctggcttaggagagctctcctggagtggcattttccgacgaggaggggcggctggcgctgagacacccaacaaagcgggcacgccgaaacaagtgccgaaagacacgccaacccgagtaccctggggagaggaggaagaactc

SEQ ID NO: 139356 - DNA, 352 bp, Glycine max
  Clone ID: PAT_MRT3847_96848C.1
gggaaaaaaaaaaccccctctcattaaaggcaaacagggcccagggggggatcccccaaagttcttaaaaccttattttcttagagggccaccaaagggggctaggaacttttggtacctagggcattaaatgggcccagggaaggaagcaataaaattttgggaaggccacatttgaatttaaacaagttaaagctcaagggccctggggtcctccttccttgggcttccagatgttgaaccaaggacacacatttttattaccataataccccgggggcacacacaggcattggctgtaaaatttttgaaaaaaaaaacacccgggcttgtggaattgggaacggctaca

SEQ ID NO: 139357 - DNA, 226 bp, Glycine max
  Clone ID: PAT_MRT3847_96849C.1
gatggggggggaaattttaaaaggggaaaattttaaaaaacttttaatttcaaattataatctttaatttctgaaatgggttattttggaacaaaggaaataaaataaaatgccggggcttaaaattttaaatccggggagccttattggcgagttgaataaattaattttcttgaactccaattacggcttttaacacctggaatatgagggcggcttttctttt

SEQ ID NO: 139358 - DNA, 217 bp, Glycine max
  Clone ID: PAT_MRT3847_9684C.1
ggcagcaccacctgcgagggcacgggccgactacgattccctttttttgcttcgtcatatcggagatagcggagcgggccacagctgtccgcccttgccattttctgacggttccttccccaccagttgtctccccaccattggcatcgaggttaccacaacaaccactgaactggaagcggcacgccctaagtccgccatctgcgatacagatggc

SEQ ID NO: 139359 - DNA, 586 bp, Glycine max
  Clone ID: PAT_MRT3847_96850C.1
ggtaaccgaacttcctaaccctaaacgctacgtttttaacattttttcctgttttctctttcaaatcggtgcttccaccggcggcgcgtgagcatttccaacggcgcgtgagggatttgttcccgcgtggcttattgtacagcactgactaatgctttgttcgactcgcattggaaagttcgcgccggagagacggtggattctcaccgtacggccgtgatttcgcacctccatggcttccgccgtcctagctaaccggaacgaacctaattggccgaagcatagagtcggtggtgcaggattcatgggaaaagtacctttctctaaccctaaccctaaatctaaatctaatcctaaattagcgaatagcaagaggactctatcggcatcggacgatgcttcctctatcaataggcgatcgaacgacttcgtaacattctcccagtacgtctccttcaacatcgcatcgtacacgaataaggagatcaacgacctgaaagatcggcttacttcggagctcgaacggactcagaggatcagaaatcgaatcgagtccggtgatttgcaacctggacagagctttaac

SEQ ID NO: 139360 - DNA, 1677 bp, Glycine max
  Clone ID: PAT_MRT3847_96851C.1
aggtccggaagcccgggtcgacccacgcgtccgcccacgcgtccgccctcgcctccggaaaaaccctaaccctaaccctagacatgtcaatcttctctcgcctccgccactactccaccacctccatcctctccccgaactcatccacccccctaacctcaaagcaaaaaacccgcagcgccatccacctcctcaaatcggagaccaacccggagcgcatcctcgacatctgccgtgccgccgccctcacccctgactctcacatcgaccgccgtgccttctcccttgccgtctccaagctcgccgccgcccaccacttcgccggcatccgcaccttcctcgacgatctcaaaacccgccccgacctccgcaacgaaaaattcctctcccacgccatcgtcctctacggccaggccaatatgctcgatcacgccatccgcaccttcaccgaagacctcccctcccctcgctccgtcaaaaccctaaattccctcctctttgctgccctcctcgccaagaactacaaagagctcactcgaatctacctcgaattccccaaaacttattcaattcaaccaaacctagacacatacaacaccgtaatcaaggcctttgccgaatccggttcaaccagctccgtttattccgttctcgctgaaatggataagaataacattgcacctaatgtcaccactctgaataactcgctctctggcttttaccgcgagaagaagtttgatgatgtagggaaggtgttgaaattaatggagaagtatagtgtttttccttctattagtacttacaatgttaggattcagagtttgtgtaagctgaagaggtcttcggaggcgaaggcgttgctcgaggggatggtttgtaacgggaggaagccgaattcagttagctacgcgtgtttgatccatgggttttgtaaagagggggaccttgaggaggccaagaggttgttcagggacatgaagaggagaggttacttgcctgatggggagtgttattttacgctcgtgcattttctgtgttgcggtggtgagtttgaggccgcgttggaggttgctaaggagtgtatggggaaaggttgggttccgaattttactaccatgaagagtctcgtgaatgggctcgctggtgcattgaaggtggatgaggcgaaggaggttattaagcagattaaggagaagtttgctgagagtggggataagtgggatgagattgaagctgggttgcctcagtgagaaagagtgtggtctcctttgtattgtacaattctttgatcaattggaggggagcactgaaaattgaattaactatggaatatcagctttggaatagctttattttgttttgccatttcttctagccattggcctttttgcttgctcgaatgaattcatcggtgactggtaattttgccaggttagtttaacatgttcgctgttgttaggcatgctttgttttccttgattgagtaataaatagatttggaaatggttttgcagccagttttctgtttgtttccatctgttttgcctctttaaaattgtattaccccctttttttccgaagggagaatgatcatacactgcatgggagctcttatggacctgtatatttcatttctgtattaatttattactttctggtttggtttcttggtctgct

SEQ ID NO: 139361 - DNA, 851 bp, Glycine max
  Clone ID: PAT_MRT3847_96852C.1
gagctgttgaataagcctttcgagaggttccacaaatctctggagatgcacgtcgtgctttggagatatgcagacgtgcagccgaaatagcagattatcgtgttaagaagctaatttctaatcctgattgtgttactgcaggaaagggacttgttggaatggtagatgttgaggcagccattcaagaaatgttccaagcacctcatattcaaatgatgaaaagctgttccagagttggcaaaattttcctgaccgctatggtgcacgagctttataattcaggaatgggggaaaccacttttgaaaagttggcaatgagggtttcatgcttctgtaccagcaacggagaagtgtttcctgggtatgatactctcctgcaaattggctgtaggcttggtgaatgcaggattattttatgtgaagcaggtgccaagcacaagttgcaaaaattgcagcttaatttcccgagtgatgatgtcgcctttgcgctgagagattgcaaagatctaccttggttgtcaaagtatctaatgtagggatgagaattacattatgtacaccaattgtttggtggtgctagtgatttaacattctcatcccttacccaaggttatggaattgattcccctctaaatacaaagtcacaatgtttaaaagcactttactccctagcgagcaacctggtatgaaaggagattaatcatactcacaagtttaccacctgattatacaaaaaaaaataaaaaattacattatgtttctcaaagaacaattttgcccacaacttttatttaaattctttgacttgaatgatttaaaatactttaaaataatatatcatttgatgttgc

SEQ ID NO: 139362 - DNA, 367 bp, Glycine max
  Clone ID: PAT_MRT3847_96853C.1
caacacaatacagaagaagcttaacgtctcttccacacagctactctaccagtctgctccattccaagcagcaattctttttgtttcaggccctgttgtggatcagatgctcaccaagcaaaatgtcttcgcctacaaatattctcctgtggtcttggtaatattcaatcctcaccatgtattatatttaaattaatatgcatgtcatatgcgagtattggagcagaaccactgttgttacaactaatttccacgtgaacctgtaactgaattttattaattctttcatctaaaatgagaatctcagtttactatcacgtaaagaatggtcatgacatatacacatggtgattccagaccatgtaat

SEQ ID NO: 139363 - DNA, 1058 bp, Glycine max
  unsure (1)..(1058): unsure at all n locations
  Clone ID: PAT_MRT3847_96854C.1
ggataaaaagaactcctgtnangttctagacatgtngcttctaaatcctcacaggagttctttttatcctctaattcaacttctaaggaaaaaaactcctcctgtgttcatttagtgttgcttcttcttcctcacaggagttctttttatagcattgcaaagcttctatgtccaacatatggcccaatacggttgaattagggtatatcaaacaccctcggggagctttacaacctccttgtcgtgggcttcgaccccagcagccatcctttgcaaagaaggaatctccaacatatggcaaatacgaagtagaaaagatatatcaaactggctgggagatcacaacagcttcatcaaagttggcagagtgcccagaaaccatcctaaaccttaggaaacaactcaaggcacttgcttcatcggctcgagtagcaatttttgacaaggttgtctccacaactaatactatggccaatccaactcagaagaagaacttgatcaaacgatcctctctacgcaatcaaatgcaagcagaggatgaagctaaaggagggatgcataagtctgtccaaactgaagaaactaaaagcgataaagatgtgcagaggccaccccttcttcaatctgaaaccgaaaaatctctgccaagtcccaaaagtctcacttcggagcaacatgatagaagcaaaaccacaggctctttggcaattgtgccaggtaagaagcaaataggctttggttttctgaggaagctgctgtcgagacgaaagaaaggaaggggtaagggaactaagttattagccaaagcatgaataagaatgatcttggagagaatgcgaaacatgcttctggtgtaacatgcttttatcttttattggttggcaatggtttcttttattggagatggttgaagttcggagttaagacagtgagattagaggtttggtgttgtaaatatagctggtgtaaataagttcattgcttcattggcatttgaaaaaaaaaaacgtctcttttctatctagatgtgtttaacttggtgtcttttgtgggtgatg

SEQ ID NO: 139364 - DNA, 294 bp, Glycine max
  unsure (1)..(294): unsure at all n locations
  Clone ID: PAT_MRT3847_96855C.1
tctcgagccgaatcggctcgaggaagacgacagaagggggaacctatgcattctattcattacagattcagcaagtgcgtactggaggcagagaccgaaatacttcgagatggcccgtacaaagcaaactgctcgtaagtcaactggaggaaaagctcccaggaagcagcttgcaaccaaggctgcacgtaagtctgcaccaacaactggtggtgtgaagaagctcatcngtatcgcccctggactgtgccttcgtgagttaagaataccagagagcatgagctctaaatcaga

SEQ ID NO: 139365 - DNA, 429 bp, Glycine max
  Clone ID: PAT_MRT3847_96856C.1
gcgggccggcgtatttttaaggaccgttccgtaacgtctagatcgcgagcggtcgctctatggagccggcctacaagcgtgcagcaaaacaaccacttaatagagaaccaacaacaaaaaacgggcgagttacacacccaaaaatgggggggccggcaaaggggccaagttaccgacccgggcatgccagttcagccccttaaagggggccccaaagcaaaatacggggggccgttcacaagttgggaccgggaaaagccccgggggacccccttaaacgcttggaaaaaaccccctttagcccgatggcaaaaaggaaggggccccccgaacgccctcccacaattgcccaccccaaaggcaaaggggacccgccccgagggggccattaaagccgggggggggggggggtaccccccaggggggccc

SEQ ID NO: 139366 - DNA, 399 bp, Glycine max
  Clone ID: PAT_MRT3847_96857C.1
ggctcgaggaggaaaccagctaatctaacggaaaatggctttatacacattgcatagagaagtcatgctgcctgtactcaaccattttgacagaaaactagaactaatccaacatctccagctacaacagtttcagctgttgcacccacaggtgctgcacatcaatccaatggcaacgtcaggtcatgattctggaggcgcaatctcccataggatgtgtacctaaaagtactgcagctgctcaggacactggccataaataaaaatgcaacctcaacagctgctgctgccacagcatcctcctctactcaaacctcatgctcagttaccagctctgaccaaggaatgtttgcagaaagctctgatcaactatacactactgtatccgatgttgattct

SEQ ID NO: 139367 - DNA, 607 bp, Glycine max
  Clone ID: PAT_MRT3847_96858C.1
ttttttttttttaaatgtaaattttcatttccattgcattattgattcatagtaattggggtgtccaggctgtaaaatatcagagtacagtaatgacttccctcccaaatgattacattctgattcaattataggaaaaaaggctgtaacctcagcaaatcctgcttatgcctcttcaacttttcaaattattttatccaaaaccacagaaaaagaggggcaaaaaaatgaataacccatcccaccgttttttgcctttcccaagccattaaaacaaaagttactgatatcactgccaccatcttctgctgctcctaccgccatcaatggctttatccatagaccccccaaatgttgttattttctaccgattaaccaaagaaaaaaaaagagctataattccttttttctcccaaaccaaacaaaatccctacttcttaatttcttccacccttatataaagatattgctattcatcctggagaatataaaatgaaataaaaactaaaaactgttacccatttccccaaccccaaaaaaatgtaggaagtaaaaactacacccattcccccaaaaccaaaaagtaaccgtaataaaaagactagac

SEQ ID NO: 139368 - DNA, 970 bp, Glycine max
  Clone ID: PAT_MRT3847_96859C.1
gcttgacatcttagcaaacaaggttaaggctattaggagactcagagaacttttgacactaaacttcctcttggaacctttcctgttaaggtagctatccctatagtccctaccatacgggtccttgtcacttttacaaaatttgaagatcttcagccagcagaggagttttcaactccaccctccagcccagcatacttccaggatgccaaatccaaggaatcagaagggtctacgtcatggatttcatggatgaaaggaagtcgtggtacgcagtccagtgattctgatagtcataaatttaaggatgaaatggaccctttcagtataccttcggactacaaatgggtagatgccaatgagaggaaacgccgtatgaaggcaaagagagccaaaagtaagaaacataagaagcagacagttgctaaaggaggagatggaatgcaactagggagtgacgatgtggaagaatactaatagcatgttatctctgtaattgctgcttttgttaatcgttgtcagagacaaagtgtaagagtcattgtgcacagctgactttacttttcacattggatcatctagccaagaatttacttgaagctttttgggcgatcgattgttactctttaagaaaagggtgccactatgtttttcccctttcgcgatgttggattatgaagactttgcgtcatctggaaataattgtattgtcatttgaagagaaagcgaagagaaagatatagccttcatttacttgacttcattctgattttgcccaagatacattacctgtatttgtatgtacatctgtatctctgattgttggttttgcatttttgtgagtggtatttgtgttttcattgttcgttcatgaagtttttggctattcttttgaactgactttggcctagcgaaatttgttgaaatatgtatctacatcattgaatacaaggaacctctttcttttttc

SEQ ID NO: 139369 - DNA, 590 bp, Glycine max
  Clone ID: PAT_MRT3847_9685C.1
ctttatcctttttttttttctctttaaatgcaaagggtcaacatctcacatttttatgctaagcaaacatttacctcacaaaggctctaacggaggctggtagctatcccactaataaagcccatccacatggcgaaaactgatcggtcacggctcacagaagggggtaagaactaacatccttcgcgtggcaccgagataaaaacaccgcccgagaacacaataagaatgtggggggtgaggacacagaatcatgctcccgcctgaacaaaaaagtgtatcttactatgtgcccctccagacgtatgctggaagaggggccaaacttccaatgagagggagaaacgatcgtggaccatcagagaaatacggaacccaccccggctggtgataggccctataccccgaacctgattttggtgtgaaccctgttggcttccaaaaggaaaggaaacttgggccaacacatgacgacctaggccttgaggtcaccaaccttgcgaacctgattaggcactagggaactataccctagctggatatgatcgatcgcatgatgcggtggcacctgaacttgacggtgatgactt

SEQ ID NO: 139370 - DNA, 312 bp, Glycine max
  Clone ID: PAT_MRT3847_96860C.1
tccaggatgccaaatccaaggaatcagaagggtctacgtcatggatttcatggatgaaaggaagtcgtggtacgcgggccagtgcttccgagtgcccttaaggttgggtcgttatggacccggtctgttgtccccctccctgcattggggtggttgccagggtgacccatcgccgtacctaggcttagtgtgccacttgtaagaaacataagaagcagacagttgctaaaggaggagatggaatgcaactagggagtgacgatgtggaagaatactaatagcatgttatctctgtaattgctgcttttgtta

SEQ ID NO: 139371 - DNA, 307 bp, Glycine max
  Clone ID: PAT_MRT3847_96861C.1
tatgggtgagtctcttaaaaaaaatgatacttttaaccccaattgcacagccctgcccaacgatcttgaactagatggaagctgaggaaatattactattatacaggcccttggacatggaaatgatggaaaaaaggactttagcaactttgattacaccgagtcaaattaaagccacatagtggggggaaataaacaaactcagcctgcaagaactacctctacatgtaccctaccctcaccccaaaagttcttttgttcagagcctctttggacatcaaccccaatttgagcttcacctttctcc

SEQ ID NO: 139372 - DNA, 300 bp, Glycine max
  Clone ID: PAT_MRT3847_96862C.1
gtgcaagggaactataatacattttgggatggaacgtgacacctacattatcatgctgttcgttttgcactgtttaaagaattcaagatttgatacggacatactatgtgtataacaacatcataaaaacatgtttacaaatgacagtcttatgtaccattataaaattttaatgctaatcttaaaccgaagattgttcctagacaaactatgattcactaggcctaggtttgacttctttaattgtttcacgtgcaggtcgttcttgactttttgtgttcaactcacgtttttttttaa

SEQ ID NO: 139373 - DNA, 407 bp, Glycine max
  Clone ID: PAT_MRT3847_96863C.1
aaacgacacttattttcatttcgtactccttccaatatatcacaatcatctgtcatagaaaaatacctgccatacataccgagtgaccagaacaatgttgcacacaacagggaagagacgcgactgaaagggaaacacgacgcctatcatcatgtactggcccacattaatctatccacagcactatgtggttttaaagagacctatgatactgactagcgagtgaatctctcccctttgacataccaccacccacttactactggacgacggccctcacatgatacatgaagttgaaaacaggaaggcgactctcagtgaccaaccccgcccatagtatttctaaactgatgcacacagtcccttcgtagttgttgccagcagctgcatgaacagcaccatgctgc

SEQ ID NO: 139374 - DNA, 463 bp, Glycine max
  Clone ID: PAT_MRT3847_96864C.1
cttatactcctcattactataatacattgagtaaaaactttaactttaaaacataattaagttcatatttgcattgtaaaggttatgtttactttagattttaggctattgtactgcagtataactataaaataatatttacttacgcataaaataataaggaatttcttcaatccctcaacttttaagcaatgtatgcacttcaggatccatcatattgaaataattaatgtaactcaatatatcgttatgcgtattctgatgcaaaactgcaatgcccacggcgagtgtgtgacatgcagagcaaaacacgtcgtaccgaaaaactggcacgggaatttggagtgccacacttgcgaagtacgagttgcaaaggcaccgaaattcgagttgcctataggcacaactatacattattcacaactcacaaaagcgggtgcggacatttcgactgacgatgcac

SEQ ID NO: 139375 - DNA, 279 bp, Glycine max
  unsure (1)..(279): unsure at all n locations
  Clone ID: PAT_MRT3847_96865C.1
gagaaatagtacatatgtaatgtatgattttncatgattacagaacctactgccttccttctgaggngcgcctttaatgtntgtgcttttgtatgcttgagngntttttagtaaattatttttggncactcccnaggtnattcgggttcaattgtantttnaanggncnanaggatgattataagcacagtccagatgattcaaccngtnaacaantcctgtnattggntncngcnccnatctnaggaccccttnacatancgccttggggttttcnag

SEQ ID NO: 139376 - DNA, 1876 bp, Glycine max
  Clone ID: PAT_MRT3847_96866C.1
cccacgcgttttaactaactacaacacagttataatattttaaccattatcttccatgaataaaacaaagaaatatctataggaatatgacattttcttcctgtgttgcaggtgtactagtggtatagtgactggaatgagtgatttggatccctataaatggcccaagtcaaaatggaggtgcttgatggtacatttgctattttttctttacaaactacgcagaatgttttgaccttatattgtacatttagcatttgctctggattttatcttcaccgactttgccattgaagatatgttatgcttcatcaaccttttattgaagatgcattttcatgcaggctgccacacccagtcacctcaccactggtatgaatcccaaatcctaatgccgagacagccaaagtaaaataaatcagtaaacttcgagatcctaatcatcctcttgggagaaaatacgggttttatgtcactatattatggatgtgacacagtaactaagcacttctgcatctgtgtcagcaggtgcgctgctcctgcgttggggtgggttcgcccttctgggtttgcgggccccgcgggctcctccaccttgccatgggcctcccgaggccaattcggctcgacagagttattatcccaatttcctttcttctgtggctaatgctatatcagcgaaaagcatgtttcatgttttctacagtccaagagcaagtcatgcggattttgctgtgccctaccaaaaatatatcaaaagcatcaagaatccagtgaccatcgggacaagattcaaaatgaaatttgaaatggatgaatcttccgaaagaaggctcactttctccgacaggactggaatgagtgatttggatccctataaatggcccaagtcaaaatggaggtgcttgatggtcagatgggatgaggatattgagattagtcatcaagatagagtatctccatgggagattgatccttcttcgtctcttcctcccttgagcattcaatcctccagaaggctgaagaaactgaggccaggtctgcaggctgccacacccagtcacctcaccactggaggcagtgggtttatggactctgaggagtcagtaagatcatccaaggtcttgcaaggtcaagaaaatacgggttttatgtcactatattatggatgtgacaaagtaactaagcagccagaatttgagatcagatctccaagtcatcctaatcttgcatcaactggagtgagaaagatttctgctgctgagtttatgagggttcacccttctagttttgcaggcttttcggaaactaacatgtttccaagggtcttgcaaggtcaagaaatatgtccggctagatccctaacaggaaaggctgatttgaactttggttcttggggcaaacccaatgtcagttactcaaataacaacctgcatcaggcaaccaaacctagctttcactctttaggaccagaagttattcaaactgcatatttcccttatggtgatattcacaatgctggtcaaggtagcagcatcttgtgctccaaaccgaccaatttccaacgagagaatatcccatttaacactccttctactcagtcagggatcatgagaaatgaagttggacggtcagacatcacaattccaaatgagcagaagctgcaggacaatatttctggtactgcttctttaggggcaaacatgaggattccaaaggatgacaatttcaaggggcaggtaaaagcttgtaaactatttggaatttccttgtccggggaaactaccgcccaaaatttacagaactctgctaaaagaagctgcacaaaggtgagcgacgatagcaacagagttatattgtgaaatatgcctttttt

SEQ ID NO: 139377 - DNA, 267 bp, Glycine max
  Clone ID: PAT_MRT3847_96867C.1
agggagactgatcgtgggagtgagagtgtgatgttgtaaatcgttcgtcttcttttgttgttctgtgtttgtgtttgtttttgtctcgcacctgagaatgtcgtgctgcggtgggaagcgttgttgctgtagctcctgtaagtgctggaagggctgcggacgctgcatgatgtatccagatttgagctatagtgtgtcaagctatcagctgataccttggtcatgggagtgggatctgttaatgttcaatttgagggtgctgaaatg

SEQ ID NO: 139378 - DNA, 158 bp, Glycine max
  unsure (1)..(158): unsure at all n locations
  Clone ID: PAT_MRT3847_96868C.1
aagnaccgnttcacagagaacnctgaatgncgagggtaccagcggagggcttntcnntntcctgctgcatgcatatctctatcgcgntggaagattgttagagngnatggggngngagatnngtgttagcgagcgtganaactgagcgagagntatnc

SEQ ID NO: 139379 - DNA, 1424 bp, Glycine max
  Clone ID: PAT_MRT3847_96869C.1
atttctgtttacattcaagagagagaagaagaagcagagcattggcagcaaagacagagagcgcaaaatacgagagataaagttaaagaaattaaatagcaccaatttcgcccacgaaaccctctctcttgtctcgtcgcttcaaactcctctgcggtttccccttcttgttcttcttcacagaaatggaggtagcagtggccaaagcgttgaaaccgagtttaaggagagagttcatcgttcagcaaatgctctgcgaggatattttcagcctgaacgccaacaccgtcgccgccggcgaagatttctccgtcgacgacctatttgacttctctaacggctctcttcacaacgaacaacaacaagaatacgacgaagggaaacaaagtttatcggcttcagaggaccgcggagaagacgattgcaactccaattccaccggcgtttcctatgattcacttttctccaccgaattagccgttccggccggtgatttggaggacctagaatgggtttcacactttgtggacgattcactcccggagctgtcacttctatacccggttcgttcggaggaagcaaaccggtttgttgaaccggaaccctcagcgaagaaaacgccttgttttccgtgggaaatgaaaataacgaccaaggcgagaaccgtacggaataggaagcccagcaacagtcgcatgtggtcgttgggtagcccgttgctctcgctgccgtcttcgccgtcttcgccgtcgtcgtgttcttcttcggtgagggagccgccggctaagaagcagaagaagcaagcccaggtccagcccgttggggcccagattcagcggcggtgcagtcactgccaggtgcagaagacgccgcagtggaggaccggcccactgggcgccaaaaccctttgcaacgcgtgcggggttcggtacaagtcgggtcggttattttcggagtatagaccggcgtgtagtcccaccttctgcagcgatattcactccaatagtcaccgtaaagtgttagagattcggaagaggaaagaggtggctgaaccggataccggcttggcccagactcaaatggttcccacctgctgatattttattagagttagggaaaaatttgcagtttaggaatacaaacccggtttgaaccggttcggtttttgtatgatatttagttagttttagttagtgctaggcagtagtcacaagtcaggtaaccaaccataatattaggaattactagtaattaggcattgattgtttgtatttgtaaggttgtattgtattgtatcccatttacttagtgttgttgattttatttaatttaatacaatagtttaagttaactggaggaagcgcggtgtaattattttgattatttaaagtttgggcattaagttaaattaaaaaaaaaaaaga

SEQ ID NO: 139380 - DNA, 753 bp, Glycine max
  Clone ID: PAT_MRT3847_9686C.1
cgtgacacaccacacaacattgttttctttctttttgcatcgctattatggtttgcagagttgcactttccatttcttcttattctttcttttaattttggattccctctctctatctccccaatctaccccgacaaatcccaccgagtcttttgacgcctcatattggttctaattgatgcatttacatgattagttcccgcgctccgatgctcggctctgagcaattctcactctgaaaatcatgatgaagctactgtggtgggatttgaagttccaaaatctcctgattccagttacaataatgtctaccctggaaatgaagatgaggcaagggatccacctatggtcccttcacatttgcaacacactttgctcaattatcctgctaatagagacactgcaggaactgttccattgcctaagaatgtgattctaaatcatctttacatcgagaatagagagtcaccaagatctgtggtggcgttgggattcactcatcgtttcccctctaaatatgtcactatcttgctttccaacgcggtctaaagaaggggaaatacaagcatttagtgtgcatattaaaaaccttgatcaccgatggtttgtaatgatttgttgtagactcgatattccaattactggagatgatattttaatgaattctagattgtttcttggtaacttagctgtatatttatttgtaaattcgttttaacgttatgtggcacaaggttataaaccatttttaaa

SEQ ID NO: 139381 - DNA, 1148 bp, Glycine max
  unsure (1)..(1148): unsure at all n locations
  Clone ID: PAT_MRT3847_96870C.1
attnncggctcgnagnctcgaagccctgaaatcggctcgagaaaatttaaaaagatagaggaacagagatcctgataagatagaacgaaaagcggacgcgtgggcggacgcgtgggcggacgcgtgggcgcccacgaaagcctctctctcgttcgttgcttcaaacttcaaacttcaaactcctccgcggcttcccttctcgttcttcttcacagaaatggaggtagcagtggccaaagcgttgaaaccgagtttaaggagtgagttcatcgttcagaaaatgcactgcgaggatattttcagcctgaacgcgaacaccgtcgccgtcggcgaagatttctccgtggacgacctatttgacttctctaacggctctctgcacaacgaacaccaacaagagtgcgacgaagagaaacaaagtttatctgcttcgtcgcagtcacaggaccgtggagaagacgatagcaactccaattccaccggcgtttcctatgattcacttttctccaccgaattagccgttccggccggtgacttggaggacctagagtgggtttcacacttcgtggacgattcactcccggagctgtcacttttatacccggttcgttcggaggaagcgaaccggtttgttgaaccggaaccctcagtgaagaaaacgcctcgttttccgtgggaaatgaaaataacgagcaaggcgagaagcgtacggaataggaagcccaacactcgcgtgtggtcattgggcagcacgttgctctcgctcccgtcttcgccgcccacgaagaagcagaagaagcgggccgaggcccaggtccagcccgttggagtccagattcagcggcggtgcagtcactgccaggtgcagaagacgccgcagtggaggaccggcccactgggcgccaaaaccctttgcaacgcgtgcggggttcggtacaagtcaggtcggttattttcggagtatagaccggcgtgtagtcccaccttctgcagcgatattcactccaatagtcaccgtaaagtgttagagattcngaagaggaaagaggtggctgaaccggataccggcttggcccagactcaaatggttcccacctgctgatattttattagagtctagggaaaaatttgcagtttaggaatacaaa

SEQ ID NO: 139382 - DNA, 832 bp, Glycine max
  Clone ID: PAT_MRT3847_96871C.1
atctacgtctcgtcgcttcaactcctctgcggtttccccttcttgttcttcttcacagaaatggaggtagcagtggccaaagcgttgaaaccgagtttaaggagagagttcatcgttcagcaaatgctctgcgaggatattttcagcctgaacgccaacaccgtcgccgccggcgaagatttctccgtcgacgacctatttgacttctctaacggctctcttcacaacgaacaacaacaagaatacgacgaagggaaacaaagtttatcggcttcagaggaccgcggagaagacgattgcaactccaattccaccggcgtttcctatgattcacttttctccaccgaattagccgttccggtaactctctctctctctctctctctctctctctctctctctctcggtttgctcctgttttcaaaccctaattttgttttctaatgattgaaatttgtgtaggccggtgatttggaggacctagaatgggtttcacactttgtggatgattcactcccggagctgtcacttctatacccggttcgttcggaggaagcataccggtttgttgaaccggaaccctcagcgaagaaaacgccttgttttccgtgggaaatgaaaataacgaccaaggcgagaaccgtacggaataggaagcccagcaacagtcgcatgtggtcgttgtgtagcccgttgctctcgctgccgtcttcgccgtcttcgccgtcgtcgtgttcttcttcgagagccgccggctaagaagcagaagaagcgggccgaggcccaggcccagcccgttgaagtcagattcacggttgtgcagtcactgcca

SEQ ID NO: 139383 - DNA, 626 bp, Glycine max
  Clone ID: PAT_MRT3847_96872C.1
ggctcgagctcaactgaattttatcgaacgttttaattgaaaatcatggttgaatttgtgcgtagaaatggaggtagcagtggccaaagcgttgaaaccgagtttaaggagtgagttcatcgttcagaaaatgcactgcgaggatattttcagcctgaacgcgaacaccgtcgccgtcggcgaagatttctccgtggacgacctatttgacttctctaacggctctctgcacaacgaacaccaacaagagtgcgacgaagagaaacaaagtttatctgcttcgtcgcagtcacaggaccgtggagaagacgatagcaactccaattccaccggcgtttcctatgattcacttttctccaccgaattagccgttccggtaactctctctccgtttgttcctatttcaatctctaattttgttttctgataactgaaatttgtgtaggccggtgacttggaggacctagagtgggtttcacacttcgtggacgattcactcccggagctgtcacttttatacccggttcgttcggaggaagcgaaccggtttgttgaaccggaaccctcagtgaagaaaacgcctcgttttccgtgggaaatgaaaataacgagcaaggcgagaagcg

SEQ ID NO: 139384 - DNA, 317 bp, Glycine max
  Clone ID: PAT_MRT3847_96873C.1
ggctcgagcaatacataccttggcccagcgcatttcaacacaacccaaattaaatttttggctggggctaaactaagccccattcactttctggatatcgacaacatggatcgggtaactctccctgcctggaagaaaaagactacacaccgttacaactccagactcaccattgagaggagccacattcatgttactacggggtgcaccgaagaggagagacttcctcaagcttttggacttacaccctggataccaagatgccctcgaagatgaaaaccataagggctaccgataggctgctgtgaagaaccagc

SEQ ID NO: 139385 - DNA, 249 bp, Glycine max
  unsure (1)..(249): unsure at all n locations
  Clone ID: PAT_MRT3847_96874C.1
cagcacaaagcgggttactgtctgttcaagctaccntctaactctctctttcttagtgcctccttgccagaagttaaaatggcccaagaaactttcctattcncatctgaatcagtgaacgaggggnaccctgaanaagctctgtnacagatctcccgatgngtnctcaaatgcagatnggnncnacnncnccanacancncggnnccncnaaanaannggaancaacaaagncggnnccntttaggaa

SEQ ID NO: 139386 - DNA, 296 bp, Glycine max
  Clone ID: PAT_MRT3847_96875C.1
tttttagaagggtaaataatcccttgtttggtgtttatttataagcccaaaggataaaggtgccgtggcacaacgatacttgattgtgagatcaatttattgatgaaagatgactaacagagtaccattcgacataatacagaatttttaaaccaatgaccttcccaaacagggcttactctactatacctaaggcttaataacgcttatccactgcctggacagctttttgggaagctaactacctattgttgctactgaatttatacatttaagggctatcgaaactatccaat

SEQ ID NO: 139387 - DNA, 439 bp, Glycine max
  unsure (1)..(439): unsure at all n locations
  Clone ID: PAT_MRT3847_96876C.1
acccttcgttagncggatcaagccttgaaggccggcgaaccaagccttccgatttaaggccaccaaaccaggtaccatgaagggagggcccctgtgggtgtgtgtgctgatgtttcctgggtgccctggctccttgcagcagggctgggcctgcgagacccaaggctcactgcagcgcgctcctgacccctccctgcaggggctacgttagcagcccagcacatagcttgcctaacggctttcactttctctaatgttttaaatgactcataggtccctgacatttagttgattattttctgctacagacctggtacactctgattttagataaagtaagcctaggtgttgtcagcaggcaagctggggaagccagtgttgtgggcttcctgcttggactgagaaggctcacgaagggcatccgcaaatgttgtttcac

SEQ ID NO: 139388 - DNA, 447 bp, Glycine max
  Clone ID: PAT_MRT3847_96877C.1
atcagaatccaagctttgggcttcattttagggattttacatatatttccttgtttaatctgtgataatcatgaaaaaatatgcaataaccctgatcagaatccaagctttgggcttcattttagggattttacacaattttttccaaaaacatgccaggccctttaaactcaatcacatgatcttagattggattagggaattgtatactcctttgcttgtggtggagggaggaaagataaaaagaatacgtatgagtttaatgaatgatttgttttatcttgactaatttactcaaaattctttccccatgttgtgttgcttgtcatgagcttttagttcatacatcacgaatgatgtgcatgttgtaattgattaatctttattggtagaagagcgatacagttattagatgaatccaaggaaagtgtaagttaacaacaaaaa

SEQ ID NO: 139389 - DNA, 559 bp, Glycine max
  Clone ID: PAT_MRT3847_96878C.1
atcacttaaaaatgtttatttcaaaatgacctatagaagtttgtctagacaaaggtctttagctgatgagtaattgcttgattttacttctaggcaatcagtcaaaggggactaaatctctttgcccaaactgagaatggccaggcagggaaagctggagagaccagacttcctaagtctcctcactatttgcaggaaggctttttagtattcccaaagcctctaccttgattcctaatatcaaagctggctttggttttctgtttgttaaaaatgatatttacactgtgtagaaacagtactgtaagtcgtggctccctgtcctggcaggcacgtccaagcagagctgctgataaccaagcaaacccactatcctatctatgctcaaatcgtctgcctctgcgggcaggagagcccgctgcgtctcccaggccccgcttttctcaggatccacacatcaggcactcctctttgttctccaaagagcacaccatggctgctgtgttcctttccttctcctcctcctcctttaaggccttttccttatctttcagttttt

SEQ ID NO: 139390 - DNA, 427 bp, Glycine max
  Clone ID: PAT_MRT3847_96879C.1
acccaggcgtacgcatacgagagcgacagtgtcatcgagagattatgcgttcttatggcttaaccgtaccgtgaggcgacgaccgcttctgcgtgcccaccgtctctcacctgttctttaggcccaacaggcccattaaccgaatctcgtttcccaaggccaccctcaagaacgaccgcttccttctggacctgagcttctacaaccttcttggaatacctgaatccggctcgctaactgagatcaagaactcctacaaactactaccccgaaagtaccacccggacgtatctccttcgggtctgttccaggagtacacaaagaggtttattcacgtgcacgaggcctacgaaaccctgtcttaacctttcacaatagctattgactacaaggacattttcaagggcattaactttaccttcaacgc

SEQ ID NO: 139391 - DNA, 1002 bp, Glycine max
  Clone ID: PAT_MRT3847_9687C.1
ccggctcgagcaatcccacacgcttcttactcctctcataacttttctgctccccgttgagaaagatttgaatccaaaggaaaaataacgctaatggctccaagagacagccgagccaccgcgctcattgggcccggcccaagcctatcaccggcccacaaagagatccgctacagaggcgtcaggaaacgcccctggggccgctacgccgccgagatccgcgatcccggcaagaaaacccgcgtctggctcggcactttcgacaccgccgaggaagccgcgcgcgcctacgacaccgccgcgcgtgagtttcgtggcgccaaggccaagaccaatttcccgacaccctcggaactcatccttaacaacaacaacataaacgctcgtagtcccagccagaccagcaccctcgactcatcctctcccccgccaccgccaccgctagaccttaccctcacccctctctcctccgctgtcttcccggtggcgcgtcctgttctattcttcgacgcattcgcgcgtgcggacaccatggtcgccgtctcgcgccgcgagacctgcggcttcgaacgccccgccgccgatttccgccgcggcgactccgactctgattataaccgccgcatactcctggatcttgacctgaacgtacctcctctcccggaggttgcctgattcatgcagggagttctgtttttttcgcaattattgtttttttggttttttaagcatctgggaggtactactacgcatcttttttgacgaaagtgccctcgagggagcagcaaagtgagtagtggatgacatgatgctcggatttgttgaccattttgtgatgatgaagatatataaccggcacgttatgtaaatacacgttataaccgaaagcaaacgtgcttttgcttggttgctttttttttttgcaactgaggactcttattcagagtatctcatggttgtttctgcaatttctcaaaatatataaatattccaatttccatc

SEQ ID NO: 139392 - DNA, 633 bp, Glycine max
  unsure (1)..(633): unsure at all n locations
  Clone ID: PAT_MRT3847_96880C.1
ggctcgaggaaaaaacttcacatctttccttccacaaacataaacactctcatcatactgtgattgtcacacacataaaccctattcttctttcatcatcatggatccctctcgccgtgccccacgcgccgtgatcgaccccgtcccgaagatccggcaagtggggttcttcgccccgcccgagcgctcccagtcgggtcctctcgacccgacccactcctctcccccaatctccaactccctctcccccgtcatgatcccgcccccgcgccacctctccgacaacctcctcctccatgacccccgccctgccgcctctcccctctcctccgcctccgccgtcgccgctgccggaagcggaaactccttcgactccgcggacttcttccccgccccactctctcctgcgatgccgtcttcttcgtactccagcaggattgccaccggcggcgccagcgacggtgggtacttcaaggggaacggcgccggcggaaagttggcggcgtcgtcgtttcccgcggaggattcgacttgaccgcgatgaaggcggcgagccttgtgcccgcgagcgagttgactacggtttncgtggtgaatgattcgctcgggatccttgaaaaagaaaaggaaaca

SEQ ID NO: 139393 - DNA, 480 bp, Glycine max
  Clone ID: PAT_MRT3847_96881C.1
tcgattttaataaagtttaaattaaatatattaatttattttatatgaccaccataacaaaaagtgaaaagcacaaaacaaaatgagtaagcgaactgttgaacaacaacgccagcaacagaacatgcagaaaaagcacaacaaattggagcagtttcgttcaaagttagatcagattgaaagcgaattgatggaagtgagtgatcagctgaaggatcaattggcgcgaaatgatcaatttcgaaaagggaaaggggaaattgaaaaaatgccaattgaaagggaaggcgaaaatagattaattaaggagagaatttttgtaaatgccgccaaaatggagcaaaatcatgcgcaattacggcagaaccaaaaagaagtcaattacgaatttgctgagattatcaaatttttcgacatttggctaagggagagccaaacgcatttcgcttcttccccattactccgacaacggaaaattat

SEQ ID NO: 139394 - DNA, 893 bp, Glycine max
  unsure (1)..(893): unsure at all n locations
  Clone ID: PAT_MRT3847_96882C.1
gagaatncaancttaatttttatatgcaacaatctcaaataacagagtccatagattgaggtttgtgaatttgatgtaaaaataaaatccctgtagatagtttttttctgcagcttgtcaagttgcttttttttatcaagcattgctgtttgtgttttttcataaatacttcattggattattcagtgcagttgtgcttttgcttatgtattatatgcgagtatttactaactacgcagcaatgaattggtttgttgacaccatcattacataatgagttagctcttgcattcttcatgttcttggcatttgattctgtcttgggtgcatgtgaacattcagctttacattcaagggccagtgtactttcatacgtgatacaatataaaagtgactcaagtggctagaggaaacttgataccttgatttaaatcaaaatcaattttcaagcaagacaatgttggaatgttttctagacaccagcatggactttgtagattctttataaagctgcctttgcctgcattttttaagtatgctaatctgggttttgacgcatggtgcagggaatatggtagataataatcaatatctcttccagggcagttctgattaggtttacttggttaacagcccctagaactagaagtgtttgttgccaccacctgcaataatgttagtgttagtttgtattctatattgctcaagtgcgcctcgtatttctgtttttatagaaaaacttgtacatcttgattgttattgtggcttgaacgtatctatcttgacttgacataaatacttttctatttttttgacgtatatgtattgtttgattatttctgctgcaaccttttatttatttatttgttcatgtaaaaaaaaaaatnnaacat

SEQ ID NO: 139395 - DNA, 349 bp, Glycine max
  Clone ID: PAT_MRT3847_96883C.1
aacgaacattatgaacttattattgacttatctttgatgacaaactatacatgttaccgcagaattttacaaacaataactatacacatactaattcatatagatatcaatactttaatttatctccgtttatctattccaatctctgggtaatctggcaggaccaaggtgttgatggacgaacaaccaccgagatctgaacacgtaaaacctcaggaacagtaccctccgggaaacactcccaaaacaagccaataatcttttgtagccaaatccgtcaaaaaaaccccccccgaatgggacccatgcctaatgccggagccctagtaccatcttccaatttttcacc

SEQ ID NO: 139396 - DNA, 422 bp, Glycine max
  unsure (1)..(422): unsure at all n locations
  Clone ID: PAT_MRT3847_96884C.1
gatgaattgaacccaaatactaacgtggtttctcttcaccgattccctttatatacactttttcaattacagttacaggtaatggattaaacaattattagtcggttaataaacacactctctctctactaattctcatcgcattccttttcctctttctccttccaattgagaattcgtttctctaattgacgcanagttcacagtgaaattagtgcaatggaagcggatttcgtcaccagtgacatgctcacactcacgcaggacgctttttacgccaacgataatgatgatgtagctgttgaaggggaaagatgtggaatatgtatggatatggttattgacaggggacttctggattgctgtcagcactggttctgctttgtatgcattgacaactgggctactatcactaatctttg

SEQ ID NO: 139397 - DNA, 288 bp, Glycine max
  Clone ID: PAT_MRT3847_96885C.1
caacaatctatcactaacgaacgtccctccattcaatatgtttgtgcagcaatgaaacccagtgttactatccattcatacgcattatcatcagtcaagtcgcttgacaaaggcctatggttctgcctatgtaacgcaccgctcagtttggcatgtttaactatcctgtcaagctcatgcttgtttaaacattggtttatttcacaaacggtggaccaattcatttttacagcttgtaaactgtcctttatgagatactagtttaccacgtttatggataattaattg

SEQ ID NO: 139398 - DNA, 376 bp, Glycine max
  unsure (1)..(376): unsure at all n locations
  Clone ID: PAT_MRT3847_96886C.1
tcgagccgacgctccctctctcctcagtatctccaagcnnntccctcgcaaggctcccttcctgcggatgtgctgctatcacaggaccgaccgcggtgtggcccttacgcacgcccgcccttcttgatggaccctaatctcgaagggacccttgttgataccactntngggtagtcaccgaaatgatatggcaacccattgtattggattattccccaatgaaacccatgtcagttgtgtcaccatccccggatttgaccaaaaagttacctgttatgtggacaatgccatatgaaagaaagaactttcttnnaatgtttgagaaagtctaagatgcccagaggtggaccctccatgnntctgtctcttggaattt

SEQ ID NO: 139399 - DNA, 377 bp, Glycine max
  Clone ID: PAT_MRT3847_96887C.1
gggggggggggaaaaaaattccccccgggggtttcccaaagaatacttcgggccggagggggaaaaaaaaaaaagggaaaaacactctttgtctaacaggcttgcccccaaaagttcgcccccacaaaaccacttgttgtgtggaagctcccccccccttagggaaaaaaatgaccgcggcccaaaaaaatgggggccaaaaaaaaatatttaaaaccccccccccccccctctgttcttgacacacgagccgcaggggcggggatgaatctcgcttaaaaaagggggggggagtaaaaaaacgacgccggggaaaacctggtaatcccccccccacaattgtcccccgggaaaaaagtaaaaaaaaagttttcccc

SEQ ID NO: 139400 - DNA, 549 bp, Glycine max
  Clone ID: PAT_MRT3847_96888C.1
gatataaatgctctcattgtctggctactccgaagatgttcgctctctttgtggttgcagttgttctggaagcgtggccttgctgtgcggccggctactgtaaggtgtcctctcttgcgaaagagaacctcgcgtatggtggatctgtttttcctgtggtacactgcgcatgttttaggcttgctgctgtagcctctgcttccgaacaatttgattccatgcctgactggcgcgttaaaccatctgggggcttccttattggggagcatggagatcggacgactctccacttatccaacaagcatgctttgttgctagtgctcgcgacgctcattacctggatgtattcatcttcgccatctagggccacggactctctactctctcttgcgctgactaacattgagatggcgtgcaggcatataggtaatctttagttgaggaatgggtttacaacctcactgccccttcctggcctggaactcttaagggtaacccaagctgttgtttgttgtcttctaaattgagttcttgtctggctgctatctg

SEQ ID NO: 139401 - DNA, 270 bp, Glycine max
  Clone ID: PAT_MRT3847_96889C.1
ggctcgaggtcatacgctgcgtgcttcatttatattgttagagccacgcatcgatctgtggttattgggtgcattgaacctaagcctgctcctcctgttcatctgagcggattcaactaccacacattagcggctggcagaactgtctggcgattcatctttcacgtaacaagttgctggcgcagccaaagtatttgcaccagcagcggacgtttgtgattcttctgtcaactatcagccaagtaacttatatgctgcagacaatgggga

SEQ ID NO: 139402 - DNA, 490 bp, Glycine max
  Clone ID: PAT_MRT3847_9688C.1
ttattatatatctgttttttcgcgagataaaaagatattgttgattgtgccctcctcttgtgagacaaaacccacgattcctaatctaaaaaggtcgcttggcaattcatcatgagaatacgccatttggtaaaccggccttcttttatatttgaaatggacgctcggacctccgccgtaacttatgatgggaactggcgggtgcaatctagggggcacagcggccccctctccggtgtcaaggtgcgacccaaaattctcatatgcttactaaggtctcccctgggtttatatttgtgtgttccgctcaatctgaccacggatgctataaccacgggtagaaggcgcctgcttttttgtggtcacagacaaaactatcgggaatccctgactttatttttatatccaacttggccattactcactgaatagatgaaaaacatctcggctttgcgagggcgaatccctaacacataatgtaaacaacctt

SEQ ID NO: 139403 - DNA, 313 bp, Glycine max
  unsure (1)..(313): unsure at all n locations
  Clone ID: PAT_MRT3847_96890C.1
cgtcgcangcacgcgtacgtaagctcggaattcggctcgaggctgaaganaacctaagcttagaattagnaacananancagnagnnangaaagnnttgatcgttgnaaatgcagggnggannnanncgcgggagagtccatnnaggcaacagcnncnaacattggtgcttctgccaaggctggcatggcgaagaccaangncactgtccnagagaaggcatccngnatgacagcacgtgatccggtgtcanaangagttggcnanccaaaaganancngctcgatganccaggcgnacnngcacaaacangc

SEQ ID NO: 139404 - DNA, 678 bp, Glycine max
  unsure (1)..(678): unsure at all n locations
  Clone ID: PAT_MRT3847_96891C.1
ccacgcgtccgctcctctgttttttctccatggctagggttttgatgctactagtcagcacgaatggtacaactactgtctagtcatctcgcatgaaacagagagagcaacaaaatgtggaggctgaagatagcagatggtggaaaagatccatacattttcagcacaaacaattttgtaggaagacagacatgggaatttgatcctgaggcaggaactccagaggaacgagctcaagttgaagcagctcgtcaaaatttctataacaaccgtttcaagttcaaggcctgtggtgacctcctttggcgctttcagattctgagagaaaataacttcaaagaaacaatatctagtgtgaagatagaagatggagaggaaattacatacgaaaaagtcacagccacgatgacaagggccgcacattatctatgtgcattacagactagtgatggtcattggcctgcacaaattgcaggagctatgttttttgttcctcctttggttttttgtatgtacattacaggacatcttgattcagtattccccgaagagtataaaaaagaaattcttcgttacatgtactatcaccagaatgaagatggaggatggggactacacattgagggtcacagcaacatggttntgtactgcactaactatatatgtatgcgagttctt

SEQ ID NO: 139405 - DNA, 459 bp, Glycine max
  Clone ID: PAT_MRT3847_96892C.1
ctcgagccgcggctgcgagaagacgacagaaggggggtgccactctctcttactcctctgttttttctccatggctagggttttgatgctactagtaagcacgaatggtacaactactgtctagtcatctcgcatgaaacaggtgttaatcaacatttatttggggtgatcatatatttttttcctaaaataaatttagagagagcaacaaaatgtggaggctgaagatagcagatggtggaaaagatccatacattttcagcacaaacaattttgtaggaagacagacatgggaatttgatcctgaggcaggaactccagaggaacgagctcaagttgaagcagctcgtcaaaatttctataacaaccgtttcaagttcaaggcctgtggtgacctcctttggcgctttcagattctgagagaaaataacttcaaagaaacaatatctagtgtgaaga

SEQ ID NO: 139406 - DNA, 2182 bp, Glycine max
  Clone ID: PAT_MRT3847_96893C.1
cgaagagtataaaaaagaaattcttcgttacatgtactatcaccagaatgaagatggaggatggggactacacattgagggtcacagcaacatgttttgtactgcactaaactatatatgtatgcgagttcttggagaaggccctaatggaggtcatgacaatgcttgtgctagagcaagaaaatggattcatgatcatggtggtgtaacacacataccatcatggggaaaaacttggctttcgattcttggggtatatgattggtatggaagcaaaccagtgcccccagagttttgggttcttccttcatttcttcctatgcatccatctaaaatctggtgttactgtcgattgacatatctacctatgtcttacttatatgggaagaggtttgtgggtccaatcacaccacttatcttacaattgagagaagagctctttactcaaccgtatgaaaaggttaattggaagaaagcacgtaaccaatgtgcaaaggaagatcgttatcatcctcattctttgatacaagacctggtatgggatagtttatacatatttattgagccactacttactcggtggcctttcaacaagctagtaagagaaaaggcccttcaggtaacaatgaagcatatcctttacgaagatgaaaatagtcgatacataaccattgggtgtgtggaaaaggctttatatatgcttgcttgttgggtggaagatccaaatggagatgctttcaagaagcatcttgcaagggttccagattacttatgggtttctgaagatggaatggccatgcagagttttggtagccaaggatgggatgctagtttggttattcaagctttgcttgccactaacctaatggaggaaattggtcctacacttgcaaaagcacatgatttcatcaagaagactcaggtgaaggatgaccctttaggagattttaagagtatgtatcgtcatatttctaaagggtcttggacattctctgatcaagatcagggatggcaagtttctgattgcacggcagaaactttgaattgttgtctacttctatccatattgccatcagagattgtaggagaaaagatggaacctcaaaggttatatgattcagtcaatatcctattgtcacttcaaagtagaaaaggtggtttagcagcatgggaaccatcaggaactcaagaatggttggaaatactcaatcccacagaatttttagggaacattgtggttgaacatgattatgctgagtgcactggatctgctattcaagctttagttttgtttaagaagctatatccaaggcatagggagaaagagataaagaattccattgccaatgcagttcaattccttgaagatacacaaacagctaatggttcatggtatggaagttggggagtttgctacatttatggcacttggtttgcacttcgtggtcttgcagcggcgggtaaaacttacactaattgtgctgccattcgcaaaggcgttaaatttctactttcaacacagaaagaggatggtgggtggggagaaagttatctttcatgcccaaaacagatatatgtacctcttgaaggaagtcgatcaacagttgtgcacactgcttgggctcttttgggtctaattcttgctggacaggcagagagagatactacttctcttcaccgtgctgcaaaattgctcatcaattctcagttgaaagagggtgattggcctcaacaggaactcactggagtattcaatagaacgtgcatgctgcattacccaatgtacagaaatatttatccaatgtgggctctagctgaatatcgtaggttggttcccttgccatccactgaagtttaatttgaaaagttgtgcccataaaaaggcaaagccatgtcaacaaacattaagacattgtttttcatcttatggctctttttagttttgtaaagacacaaggcttaactcttttatgttatggtaatggatattatgcgatcgaatgcttgcatatcttacgtattttcataggactttaaagtatcggggttgtattagtataataaacttgtaatgaagttgggttgttacaaataattattggtatgatttttttatgtaattattgtaaaaattaataaatttattgtaaaatatagtatatataatcttttttcttatagt

SEQ ID NO: 139407 - DNA, 513 bp, Glycine max
  Clone ID: PAT_MRT3847_96894C.1
aaaaagaggggaatggtttggggacttttaatcagccctcctcttaatcattttgactttccccaaattaggagggaggtttaggggaaaataaaccaaattacccattaacccttgttcaagctgcaaaagtacaactttgtgatttagtgcaaagactcagccatggtagaaacccatttttctctcatcactctctcttgatctcttggagggtttatgaatttgcaaatctgtcatcaccatagatgcttgtaaagattttgcaaaattcttgttcagctttgaattgaagagagaaattgagacagagggtgagagacacaaatgcaaaggaatgaggagctcgtgaagccttgaagctgattccgatgaaggcctgaaacactaaatgcgagaactattcagtattcaatacattgacaatgatgttaaagatgcaactcaagcaaatggagaattgttaccattttttgtaacaatcaagcacttatctctgggctctggctgtgg

SEQ ID NO: 139408 - DNA, 374 bp, Glycine max
  Clone ID: PAT_MRT3847_96895C.1
aaacgttgctttctctttctcattgggtgcttcatacttatcctccttcgacagtcaggggcatccccggcttcattgtggccttcgccctgttgaggtacactaatccaacctttttttttatcctatggtctacccgtcaatgacattggtccccacgagggcatctgaccttagggcttggggatgcagaggcttattcatttaagatcctggggccaacttttgggcttatacccaccctttgttacccacacgcttgttcagggggcccaagaagttctccaataggccttttcgcacgcctttagcttggtctctgactcccttctttgtgaacagggcccgccttctcttgttgttctcctcgggct

SEQ ID NO: 139409 - DNA, 314 bp, Glycine max
  unsure (1)..(314): unsure at all n locations
  Clone ID: PAT_MRT3847_96896C.1
taagcatctgctaccctaacctcnncttcctctctcctcatttcanatataaccggcgaacctnnnnntnttccanatcccacccanatcnatttcaagctctttaaccgctggaacttcgaagatatttaagttactgacatttcacttgctgattacattggagtttcggcatccaaacacgccacatatgttcctcacaccgccggaaattactcctttaagcttttcatgaaagcgcaatgccccattgtttaaaagctcaccaactctctcattatgcacggtagaaacaattgcaagaaactcttttc

SEQ ID NO: 139410 - DNA, 157 bp, Glycine max
  Clone ID: PAT_MRT3847_96897C.1
cgctcgaaaactcaattgcaatagaatccaacccgaaacttctgtagtgcggtgaaactaattataactccaagagggactgagccatcaaagatgagacacaagcataataccaaagatcaaccagagcctggggaagaggtggaatggggggcat

SEQ ID NO: 139411 - DNA, 524 bp, Glycine max
  Clone ID: PAT_MRT3847_96898C.1
ggctcgagatacaataaaaaagaatcgtataatgtccgataattccctattacggttagggttacttactcgaatatctctggaggtgtaggtccgatccgaaatctgcatatctgtgattccattggcgaccttgtcggcagctttggaagacgtggcggccataacagcagcggccttcttcttgctggcgttggacaccatcttcgatctccaacggtagatcagataagagagaagaataaaaaaaaaggagatctgaaacgagccgagggtttcgcgctgcacgaacccaagcgagtgcttagtgttttgaaggagggtagagttcgatgtgtgagggaagtttgggatatttatagaagagggttgttgggcttcttccgctttggttgcgtgttggtgtttggagttggactcagaaaagaaaaaaaaaaagacaattgggctagtgaaatagaaagttgtgaaggaaagataaggagatgaaagaggaaatatttgcatgcttgctggcttatctc

SEQ ID NO: 139412 - DNA, 141 bp, Glycine max
  unsure (1)..(141): unsure at all n locations
  Clone ID: PAT_MRT3847_96899C.1
aaatncgatacttggggggaattncgaaatcccctgaaccatccagtgctttnaacccgactggcgccccaanccacttangggcggggggcccctgcctgggggtgacacatcgtttccccaacgcaaacatgtgacaat

SEQ ID NO: 139413 - DNA, 379 bp, Glycine max
  unsure (1)..(379): unsure at all n locations
  Clone ID: PAT_MRT3847_9689C.1
anctagaattattgtttatattaatgaaattttaattcatnaaaaattaatttttatggaaataatgatgaantagaaatatatattcttaacattaaaaataagaaacaagtgaaagtaacaagaaacataagaaagaacagaagaaaaaagaaaaaaatatgacacaatagctcggtacatcaacacgattagaatatgacatactttaatgtttatgcattggcctggaatgtttaataatgtgatgcgttcttgtatttagaaaagaccaatcaaggattataactgatgctcttaataaaaaaaaaagtgaaactttatcgtaaaaagaagaaagcactttagttgtgtcactttatgcgttaggattaaaacc

SEQ ID NO: 139414 - DNA, 451 bp, Glycine max
  Clone ID: PAT_MRT3847_968C.1
cagagtcctgtcacactgcgcggccgtttaacaacacccgtaggataggctcgtaagtttgttggaactacatggtgtcgcggctgtggcaccacagtaaatgtaacgggagtcagattgtggtaaacgggccctagccgtctggttacattatataccacaactacaacggtgggccatcttgtaaactagaaggagcggaaggccagccaaagctgccaaggtgagggccggcttagtatggagaaatgggcgacgccgggtgcaggggcagaggaagccaggtggtcccgacgcacggggggggtggttgaaccgcccttaattggggcgggtacccaacatgcagtcggcagggtaaaggggcgggagcacgggagtgaaaaaaaaaaaaaaaaaaaccctcgctcttcatgacgcactgtcgtcatttcccaaggaaggttccatt

SEQ ID NO: 139415 - DNA, 289 bp, Glycine max
  unsure (1)..(289): unsure at all n locations
  Clone ID: PAT_MRT3847_96900C.1
gcgtcttcgatgctgagaaggcaaanaagttgaagcaatctctnacccccaggtttgaccgtcgaggaggtctgattggatacatggcaacgccgagttgaactacccaagcttctttatcagtagcagagcatgctactctatgtacttttggaacctaagctattagacctgtcagtgttggatgtctgatcttgcatttttggagaaataccaatttacctcgttcaaggatgcaagtatatttcttgtttaactgcacattactttatatttatgcctgtttcat

SEQ ID NO: 139416 - DNA, 1242 bp, Glycine max
  Clone ID: PAT_MRT3847_96901C.1
cccactcgtccgaacactcgtacgaccactcgtacgaccactcgtacgctttttcttttcaaagggaggaatcataaactgagcaggctggctggctagcctttggtcaaccaatcaatgaacaaagacaactttcacagaactgcctctattacttccatcttcttctttgatatacttgagagagagagaaagaagcataagaaaattaacatatgtaaaccttcagaaatctcaagcttctcgaacgtttactgtatcctagacatgcttctctgcgttcttacctgttgatcagagactgtgcacatgaatcatagctgattgtttatgcattgaggtgcttttactatttcagagacaaatctaggagcagtaagcaaaggtcagcacctgaactgaaagagcaagagaaactcgagttttcagggcctgaaagggtcaccaagtcttcatgctcatctacatctcctcgcggtataccagaactgtatgaggagaagggtcacaatttgagggacttctccttcacagagctcaagcgtgcaacgagtgatttcagcaggcttcttaagatagaaaaagtgggattgggaagtgtgtttaaaggtacaatcaagcctgctgatgggaatcggaattctgttttagttgccatcaaaaggcttaacaagaatgcattgcagggtcataagcaatggttaactgaagttcagttttcttgggtgttgtgcaacacccaaatctagtcaagcttattggatactgtgctttggatgatgaaagagggatccaaagactactagtgtatgaatacatgccgaacaaaagcttagaatttcatcttttcaataaagcatatgatcctcttccttggaaaacaagacttgaaataattcttgaagcagctcaagggttatcttatctgcatgaagaattagaaattcaggtttcatttatagcaacatgtttatatattattcctgcttctctcacaaagtggagttatatatatatatatatatatatatatgatcattcatgtgccatcacttaacattataagctcttaggagaaatggtccataacattatattgttgcctctatggccacatgatctagagtatgatcctcattgcccccattcttctgattgaattggggatttagcacaagggtatggggcacgtttgttgtccgtgtttcaagcccaataaatattttaccatggtgagaccat

SEQ ID NO: 139417 - DNA, 1670 bp, Glycine max
  Clone ID: PAT_MRT3847_96902C.1
tggtagaagcaactcaggtaaagtatggaaatgaaaaataagttgcggcagctgcagctgcagctgcggttctgctgttgttgcatcttctattggtagtagctgtaacaaagtcgaacgctgaccgaatcattgagattcctgtagcagcagctgctactgctacagctgttgtagtggcaaccactgctgcttatgagcagatacagaagggaagtgtagttgtgattggtgagcataaagcaacacaagaaaatcatcataagctgattcagcgttagatgaaaaatcgggagttggaatcaatggaaggaaagcacattcggttggtctattggctcatgctcgtatgcagagtggtttcgcggtgtatgacatcgttccggatttgatgttgctgagtatctgtgccacgatataccggtgggatgaatatagctatggggagatcgtattggacttgtgtcatatggggaaaccatggggaggaatgaatggcatggaactgaagttgctgtaaaaaagcttctatatcaagatatctctgacttgaagaattcaaaacttgaaaagattgaggctacaaatgttgatattctcttcatgggagctgtatccaaatcttagactttcaattgtttctgaatttcttcctagagggagtttgtatagattaattcaccgacctaacaatcaattagatgagcgaaggcggttgcggatggcccttgatgctgctcgaggaatgaactatctgcacaactgcactccagtgattgtgcatcgtgatttaaagtccccaaatcttcttgttgacaaaaactgggtagtaaaggtatgtgattttggcttatcacgaatgaagcacagtacattcctttcttccagatcaactgcaggaacagctgagtggatggctccagaagtgttgagaaatgaactttcagatgaaaagtgtgacgtttttagctatggggtcatattatgggagctctctactttgcagcaaccctggggaggaatgaatccgatgcaagtagttggtgctgtgggttttcaacatcgccgtcttgacattccagataatgtagaccctgccattgccgatattatcagacaatgctggcagactgatccaaagttgaggcccacgtttgctgaaatcatggctgctttgaagccattgcagaagccaattactgtttctcaagtgcatagactaattgctcagtcatcacgaattgctgaggaccccgcaggataggagacaattatacgactaacattttgttttcattttactgctaaaaatgtgagggcaagttgtagagtatttaccatttgggattgacaaaagtgattgattccgctaacttacattctcattcaaggttttcactcctctagttccttctctttcttttgtttttgtccatttcctggtctcttctgtaatccacagtgcagtcattgtgctgataaaaaaaaaaacagtgcagtcattgtccaggttgtaccatttgtttgtacaaaattctttggaaaatgttgtaatcagtgtctaaattttgttgtccataaatagttatggaagttgcatctgtaatttgagcagaagaaaggattaacgataattgaaaattgcttgttgctgtaattagtgaccatgt

SEQ ID NO: 139418 - DNA, 270 bp, Glycine max
  Clone ID: PAT_MRT3847_96903C.1
tggggcgaaagaaagatcgttctcgatgacagaggggagcggtgacaaaactctgcgaaagatcgcagacgcattcaatgatcttgcaaacgtcttcaccgattctcagagcgtataagcagaggtcaaggttgctcccttctctcatgcatgctctctcgtctcccctctcgacggttgcctgggcgtctccttcaagttcggcgaaatggattacgtcgcgaaggttcatgatctggcacaggcgtccagctctagtcagaatctgca

SEQ ID NO: 139419 - DNA, 335 bp, Glycine max
  Clone ID: PAT_MRT3847_96904C.1
aaaccccccataagaaggatttattaaaaggccattttttttggcaattgggacccatggggtaaacattccaactcaatttaaggaaaaagaaatgccgaacatttaaaaaaggttgaataatcgggagaaaaaaattattggtttcaacaaacagaaaggtttttgtttgattcagcaaaacagctaatttaaactccaaacataaagtccatgattttggacaccaatgattttgggggggaagcaatggttcctccaatctgccgggcaattgagttgccattttgccaatagtaagggcaaaaaggagctttcaaggggctcacttttgg

SEQ ID NO: 139420 - DNA, 401 bp, Glycine max
  Clone ID: PAT_MRT3847_96905C.1
aattcggctcgagatctgataaaatatttattttctcccaaattgctattatttttgctgccacatgttgtggataagtcactgtcaaatcccttgtattttttcactccatgtataaattggatctttagattgtaatgcaacaaaaagtgcatctttataggtgtgtcagttaggaaggtttatgcctggatacactcatacacctatgtagttttctcttatcattgattatgagacactcctatgttataataatgattgaggaatatcctctaaaactccagatgaatgttaattgtagtttctttattttttaaatggggaccaattgttgttattattatctgatagaggaattgagctaataagatggaaagtagagctaggatgtatgctag

SEQ ID NO: 139421 - DNA, 157 bp, Glycine max
  unsure (1)..(157): unsure at all n locations
  Clone ID: PAT_MRT3847_96906C.1
ggaaccttaacaacgttgatgttgaggtgctaattttgtaacaatttttcagaacttgggtgagaatnctncnanccgcatgnatcactnnncactggatgtttgctnataacatagcttcaaatacctgtcaaggaccagacacatttcaaactaa

SEQ ID NO: 139422 - DNA, 372 bp, Glycine max
  unsure (1)..(372): unsure at all n locations
  Clone ID: PAT_MRT3847_96907C.1
tgggaccccaagtcaacatatgttcgtgttacctacatacttcaagggcgtgactatgggggctcgtggagctgacggtgtgaaagatcgcctatcgtctgctgatattatggtgacatgtataactgacacgatcacagtttctaactgcgtggcaaacatgtaacaagtgatagtatctgcatgcaaagatacactaatggatgcgaggtagnggaacagaaagagacttcagactcttatggcatgtcagaaagagcaagtgatgatagtgatggcataggggagacttttgccaacatgtcgtcttgttaacaagctcttgaatgtagaaccatgtgccaagacagctcacattacgaccgtcgagaa

SEQ ID NO: 139423 - DNA, 783 bp, Glycine max
  Clone ID: PAT_MRT3847_96908C.1
acgagaaggcaaacccagagaacaaagagaaaccgagcgaacaagaaagcagcgaagaaagcaaccagagcggcgacgacaacaacaacgaaaaggaagctattaaggttgtcgttcaagacccagccaaaaacaacgaaggattttttaacgtaaacagagttggtgaaggaagcgcaaccggcttaaccggggtgcagttccaggatccgaggatggaggtgaggcaaacggtgatggtaccacccggttaccagtcatcggtgatgggcgagaaaagggttactatcaacgtccctggcatgatggatgagaacgagggtggcagtggagggaaaaggacgaaaagcaaggggcaaaaagggaatgttgtaatcaacggcggcaacgagggtgttactgtggtggaacacgctggtggagattggaaccagatgcctggtggtcatggacatgggccacccaatgagagtcccccacggcatcagtacccaccgcactatcatgcgcccgcatctccagtatacactggaacctaccacacagcgtatcccactgtcacccgctacggtgctgcgtattatacgtccccgcaaccgtattcgtattctcacgtgtatcggtgcgttgggtccgagtcagactcagaaacttatacatcaccttcaccaccgtcttgttccttcgaattattcagcgatgaaaatcctaatgcctgctttatcatgtgagtgttgtcacgaaatttcaaccaccgtaactaactttctttttcttaatctc

SEQ ID NO: 139424 - DNA, 512 bp, Glycine max
  Clone ID: PAT_MRT3847_96909C.1
atccaattaaagaatgaagaattatttttggtggagttcgaacaaaaattcttttaacataggtgacattaattatttaataaatcttcttttataattttgtattgttttaacaaattaaaattaaataataaaaagtaggagtgaaaaagcttgtctctatccaattgattaaattcaaacaattgtatatcaatattattaatttgcgtactttggtgttatattttgtgtgcgtgtgagattgtatatctttgcattgaactttaattttatactacattaaagaaaattagtggtggtggtggtaaggagcgcaatccaagagtgggagggacgtacgcatgcgaaatctggcatgatctactagtgaaaaagcttgtctctctgcattaaactttttcattcaggtgtccatgttggagggtcccaccaaatttcaattttttttcttcttctttctaatgggtaaagagtaaagacatggaagacgagctttgatcaatcagtca

SEQ ID NO: 139425 - DNA, 248 bp, Glycine max
  unsure (1)..(248): unsure at all n locations
  Clone ID: PAT_MRT3847_9690C.1
ctntnagntcgagnntgctgtttangtctctgtntttgangctgaggantccgaatgagnnannttcttacgtttctngcaaagtttaagtcatcatgggtaaggnaaagactcacattcaacattgtcgttcattgggacatgtcgactctgggaagttcaattancactggtcattgatntacaagcttggaggtatgacancgtgtgattgnacagttcnancaagnggtgtncaaatgaacaaa

SEQ ID NO: 139426 - DNA, 236 bp, Glycine max
  unsure (1)..(236): unsure at all n locations
  Clone ID: PAT_MRT3847_96910C.1
gattaaattatgtatccacgtgcnncgatcttttattatacngttatnngttttgtagattntcccaagatctggtgcaacaataattagacatggcaatggggtgggatagagtgaatattatttttctaaaaaaaaacacnaaaacacannaaacaancanaaacaccnacccaacannacncaaacaccaccncanaacananncncccanaangggggnggnnccnccctnc

SEQ ID NO: 139427 - DNA, 175 bp, Glycine max
  Clone ID: PAT_MRT3847_96911C.1
ggttcaaaccaagaatggaactgtttcagtagcttctgcgtttgctggacataacgaagctgtacggcggaggcaccgcttattgttaagaaatgctgttgaagaagcgtatagaggggtagactgagaagatgggggtccctgtggtgctattataggtagtactgatgaaatt

SEQ ID NO: 139428 - DNA, 1465 bp, Glycine max
  unsure (1)..(1465): unsure at all n locations
  Clone ID: PAT_MRT3847_96912C.1
tcgcggtcttttcccgcttgtgttgtggctatggagtcggcattgatatttctagcggatgagaattgagtgaggattccgagtcttcttggaaacatttttctttcattttccgttagtgttgtggctatggagtcggcattgatatttctgggaacgggagtttcgggaacggttccctccatgaggtgcctcatcgacccttcagatcctccatgtctcgtctgcactcaatctctctccctcccacctcacctaaaccctaactacaggtgcaatacctctctgttaatcgattattactctcaaagcgacgccactcacaaatatatattgatcgacgctggcaagaccttcagggagactgtacttaggtggtttgttttccatcacattccaagaatagattctattcttttgactcatgaacatgctgatgcagtccttggattggatgatatacgagctgtgcagccgtttagtcccactaatgatattgatcccacccccatttacttaactcggcattcaatggatagcatggaaaaggtgtttccttatttggttcagaaaaaacacaaagaagggcaagaaatacgaagggtagctcagtgttgctggaacataattgctgatgattgtaatctgccattttctgcatcaggcttaaaatttattcctttgccagtaatgcatggagaggattatatctgtttgggtttcctttttggtgagaaagatagggtggcttatatatctgatgtttcacggattccagctagtacagagtatgtcatttcaaaaagtggggctggacagttggatcttcttatattggatacactgaaaaagactggatcgcataatgttcacttttgtcttccacaggctcttgaaactgtgaagaggttatgtccaaagcaaaccctattgattggaatgactcacgagtttgatcaccacaaggacaatgagtttttaatggactggtccagaagggaaggactattggtgcagcttgcacacgatggattgagagtgcccataaacttatagtaaggtaatactcatggacctgaatatgagtctcatcaaaagtagcacatacagactatgaactcttcactatggtcagtagaatgcatttgcgtttgaggtctcacccttcttcgagggtgcacttcctaaattatcacatttctgaatactgttagcttttgtttttgttttctttttcttcaaacaattttcctgatctccttaaacaaggtcaccttaagttatacttggccatagacatgtaatactttgtctcctcccccaataccttttcctgtggatcatgtttgtatttcaatgaaaaattgattctcgtgttcttgccaaaaaaaaaaaaaaaaaaaaaactcgaggcggggcccctccccaattccccctaaantgatccntttncaatccctggcct

SEQ ID NO: 139429 - DNA, 558 bp, Glycine max
  Clone ID: PAT_MRT3847_96913C.1
gcgagaagacgacagaaggggtgcagtgtgacatccaaatgctcccttgtaagtatgagtttcatcaattaccacaaacctattggttaagatagagtaaacctcaacacaataagaatccattatgcaatattccatataaataccaaatcaatatggttgatcaaatactccatataactaccttaggtttgatgaaatccgacaaaattgttgatggtggggcaagattgatatgtgtaacatatctggatttgtgatcaactgcagcagcataatataaaatgaagcacatttcactggaatctatttggtctaaaggaaaaattagttaataaattaccaatctagaattatcacgtagccacatcctctcattgtgagaagtgtccccatcatatattccaatatttaagtcaatatctaatccttttgtcatgtgtaacaaagctcttagttgatcttgagccaatgcctgcattcatgaaatattttagctatctaattacgacaatccccatcaaaaaaaaaaaaaaaaaaaaaaaaaaaaaggcggca

SEQ ID NO: 139430 - DNA, 661 bp, Glycine max
  Clone ID: PAT_MRT3847_96914C.1
ttactgggggaatttcctaccatttttaggtttttaaccttttaaggttttaaccaccatttcccaagttttggctgaagcctattgttttattaaatttcatgaggctgtcaagttattttttgagtccttccatggatattgttgtcgtatctatctagttgtctaccatatggaaactttagcatagatatgtgtgttgaatgaagaccatattaagtttaatggctctgtagtcatacctatgtttgacatccatctatctttaacaatgtgcagatctccataatagagatcatgctttattgaaaactgtgctggtaatcaacttggaggtaaaagataaccacgatgaagcagccgtgggagcaaggcttactttagatctctgtcgggagattgaagctgctgaatcatgggaagagtcaattgatgaaattattgctggttttgagaataaacatcggcggaagcttttgtacagcatctccttctactaaaattaccccagtctcccaagaaaaattagtgacccatttttgtaaatttgacatgtagatctcgtttgaaaactaatgtattggatgttgtgcattaaaatttagtaggattaaactaccaaacgataaaatgattgttgcctacctgttttatctgttct

SEQ ID NO: 139431 - DNA, 516 bp, Glycine max
  Clone ID: PAT_MRT3847_96915C.1
ggaccgaaaaaaacatgtcaattaaacttcacattgcacctgctgcctaaagttgcataaaaacacaaaaagagggctaggacccacatacattactaggcatgttctaccaacttattttaggggcaaaaaaaaaaaactacctaactccctggctacagtttaaaacaatacaaagtcttcaagggcaacaaataaaattaaagagacccgggggaaagctagagccatgcccatagctagaactaaaaaagtccaactaagggtacccagctagccaatagcccataatagatccatataataccccccccccctcaaaatattgcaggccacccctccaaaagcataaaccctaaaagggttaatactgcaaacttaattcacaaattacctcctccgggtccgggtccctcaatgaaatcccccgggggggtttggcgcccaggaaaaccttagggaagggaaaaaggcggggggggggggtggggggggaagaaacccccttggttgggg

SEQ ID NO: 139432 - DNA, 245 bp, Glycine max
  Clone ID: PAT_MRT3847_96916C.1
gaagtctggacccaaagtgaagatgctccgctcttaacaacgtcatgattcaagaatctatcatatcttggcttttgctattcacctgttgattagcatatagttcagtgtctgctagactcatttatattctaatcctgtgagaatgagcaaaaaggatccaggagaaaagaatcctcactggcgtttcggcttttattggatgtgtgccagaattatccgtggccccacgcgacttctaagaa

SEQ ID NO: 139433 - DNA, 233 bp, Glycine max
  Clone ID: PAT_MRT3847_96917C.1
aagtatgtgtcaggaggaagctataaacacagtcgcttacatggcacgaagaagggtgtgaaaggttgcatcaaactctcatggtctgacatgtaccaatccgccaattgacatcgcacaggcatgtgcggattctcgtaatcgctacatagacatgcgtggaatatagccacgatttcatctgaagacgttcttgctcacagctaagagatcttcaatgtatgtgataatga

SEQ ID NO: 139434 - DNA, 884 bp, Glycine max
  Clone ID: PAT_MRT3847_96918C.1
gcacaaaacaaaatacaaacaacaacaaaaacaactacaatataatatacatatacacgtttggcaaaggaatcaatcgggaaaataacaaagatcacatttcccagtaaagaggatccactcttgacgatgaaaaactttggagaatggaggattgcactagagggtcctcactaacaatcatgaagcacggctccaaactctttgggtggaggatgcatgaacgaaaatgtaattcatggggctccgaaaaaaaaaggcgaggatggaggattgcactagagggtcctcactagtcaacatgaagcatagctccaaactttttgggtggaggatgcatgaacgaaaacacaattcatggggctccgaaaaaaggcagggatggaggatttcactacagggtcctcactagtcaatcatgaagcatagctcgaaactctttgggtggaggatgcatgaacgaaaacgcaattgatggggctccgaaaaaaggtagagaatggaggattgcactaggcagtcactacgcatgaatcatgaagcatggctccaaacttgcatgtggagaaagcatgaacgaaaatgtaattcatggtggtttcgagaaaaaaaaaaggcgagaatggaggattgcactagagggtcctcactagtcaatcatgaagcataactccaaactctttggtggaggatgcatgaaggaaaacgtaattcatggggctccgaaaaaaaggtgagaatggaggattgcactagagggtcctcactagtcaatcatgaagcatagctccaaactctttgggtggaggatgcatgaacgaaaagcaattcatggggctccgaaaaaaaggcgagaatggaggattgcactaaagagtcctcac

SEQ ID NO: 139435 - DNA, 521 bp, Glycine max
  Clone ID: PAT_MRT3847_96919C.1
tcgttgacgcgtgggcggacgcgtgggggagaatgtactcaattttccctcagatgctttactgcctggtcctgtttctcagattcaacaggggtcatgggaatggaatttattccgaaatgaaatagacttgtcaaagatagatggtgatttttccaatagaaaagtttccattgtttatgctgttgagcatgagttggcaagtcttaattattcaacaagcatctttgagaatggaacagaggttccactgcgagatgaactaacccaattggattgggatattttgagagaaattgaaatatctgaagagaatgaaatgtttgaagtggaagaggctgaagagagaagggagaaaggtgttggcgatgggatgatatatatcgtaatgctagaaatctgaaaactgaagtttgaagtcaagagagggatgaaggggagcttgagagaacaggacaacctgtgtgcatttatgagatatacaatggtgccggagtgtggccattttggaccatggttct

SEQ ID NO: 139436 - DNA, 454 bp, Glycine max
  unsure (1)..(454): unsure at all n locations
  Clone ID: PAT_MRT3847_9691C.1
caggaggtcgcggcattggaggtttgatcaaggatggtggtttnntaatggtcgttggaagtagtacaggaaagtagnnnntcttggcccaagttagagtcatgaggtacttgagtcctcgcaatgagctcagttgggnnaagccaagcgtactctcagcatttatagcaaggttcagcagatggagatatgttaggtagtggtgctgctaaatatttcattcattcaattgtgctgggctagcaaggggaccacaaggatttctgttagtagagtttatggattataagatattggattataagataacatctggactgtaggtcattttacatatttcnnnntnnnnctaagggatattttaggtgtatgtaatataaaaacagnntactaggttagttatgacatgacatgtttccatagtttttcttgtataactctattagtatttgta

SEQ ID NO: 139437 - DNA, 751 bp, Glycine max
  Clone ID: PAT_MRT3847_96920C.1
ctcgagccgcgaaaaatacaccatcgtcgccagcttcgaccgattgcccagcacacagcaatcatggccaccgaattgactgtccagagcgagcgcgctttccagaagcagccgcacgttttccagaacaacaagaagcagggcggcaagaccaagagggctggaaagggcggcaggagatgggtgaaggacgtcggtctgggcttcaggactcccaggaccgccattgagggcaactacattgacaagaagtgccccttcactggtctcgtctccatccgtggccgtatcctcaccggcaccgtcgtctccaccaagatgcaccgtaccctcgtcatccgtcgcgagtacctccacttcatccccaagtactcccgttacgagcgccgccacaagaacctttccgcccacgtctctcccgctttccgtgttgaggagggtgacaaggttaccgtcggccagtgcaggcctctcagcaagaccgtccgcttcaacgtcctccgtgtgcttccccgcaccggcaaggccgtcaaggctttccagaagttctaagcgtctcgcgcgcacgacgatgaatcggagaaacggacacacatgggagtggtaggcgcggctttgctttaagagaaagagctctaccacggacggcgttggtcatgcaaaattagcgaaggtcgagagacgggctggcaatgtaccatgctaaaactccgatcgcccaaacgctttcaagtcaatgtcacatttcgcc

SEQ ID NO: 139438 - DNA, 183 bp, Glycine max
  unsure (1)..(183): unsure at all n locations
  Clone ID: PAT_MRT3847_96921C.1
aatattcanaccttgctctatactacacagtacacacactagaagaatattggcttccatcctccactacttttgtagcctctctctttcttgatgctttcttttcttcttatccgactcagtcacacctagaaaatcaataaaccttgttggtctacacgttcaaaatgatggttccacagg

SEQ ID NO: 139439 - DNA, 378 bp, Glycine max
  Clone ID: PAT_MRT3847_96922C.1
cccacttcgtccgttacctaaaaaaaaaaaaaaaaaaaaaaaaaaaaaaaaaaaaaaaaaaaaaaaaaaaaaaaaaaaaaaaaccccaaaaaaaaaaaaaaaaaaaaaaaaaaaaaaaaaaaaagggggcggccgcccaaaagaaccaaagctaacgaacccgggaatgcaaagaaaaaactcttaaaaagggccaccaaaatcaaattaacgggccgccgtttaaaaacgaagaaacgggaaaaacccgggcgaaaccaaactaaaccgcctggaaaaaaaacccccttacgcaaggggggaaaaaacaaaaaaggcccaaaccaaaggccctaccaaaaaaaaacaaaaccaaaaaggaaaaaggaacccccccag

SEQ ID NO: 139440 - DNA, 678 bp, Glycine max
  unsure (1)..(678): unsure at all n locations
  Clone ID: PAT_MRT3847_96923C.1
agagaaatactaccaacacagtttattataacactttttttttgccactctctactattgcctgaaaattataaaaatcacaattttatgggtgtctcgtgtgttcttctcttgtctcgatcctttttaataaactttaactaatagtagagtgctacaaggagtgtattaaagaatgttgctagcacttctcatcagacaatcaaagcaaccagaaataaaaattctgcttctacactacacagaatgctagctcgcaaatagttctattttgagagtgatttggttgtgcatatatcatcactcttttacatgagtggtttagatataattatgctaatggatggaatgctgagtccttatgtaatcctgtgaggtgaaatggatcattcaatgaagctataagcaaatccactggcactggcattgtttctaaccacttgacgaattgtgatggttctatcaagttcatttgagccccttgcagccaaacttgttattgtcatctcacatggctagctatttcataatttaacaggataaaaacttaaaccatatgagtgaaattactttactttggcatttgcttcaagtttccgaatgtagtctctagatcttatgtcagcctgcctaattggctcnnncacacggtacttgcatgtcatttgaacaatcata

SEQ ID NO: 139441 - DNA, 453 bp, Glycine max
  Clone ID: PAT_MRT3847_96924C.1
tatttttttttttcactcatttttttttttactcccttttctttttacttggtccgggtttccttataatcactttttctttctttttatctttcccttcttttcaaaaaacaacaaatctacttcccacccacacccgaacatcaaaaaaccatctccctatacgctacataaaaacaccccatctttgttccctccaaaacaataaccaaaaaaaattgtgttccccccttgggatctaaaaaacgcccgtgaaaaacacctttccccttgtctccccaaaaaaaaaaaatgcctttccaatatccccccctccaaggaaaatttctggcttcactagaaatcgaatccccaaaaaaaaatggctggtgcaacacttaaaaacattatggcgcccctaaaataaacacccccccttttatgtctcaaggaacgggggtaatctatcgcccc

SEQ ID NO: 139442 - DNA, 325 bp, Glycine max
  Clone ID: PAT_MRT3847_96925C.1
tttgctccttcgcgtggcttttaagacttcttcgttccctattaaatcctctcattaaattaccatagccccacaaaaaacgtatcctagttaaattcattcctacaaacaccaccgtccgttcttgttcttccttttccttcttctctccctctttccataaggctatgagtctaacaaaatcctaactctataacctaatcatttcatacctttcaattcaacacctttcttaaggtatagccattaaaacaaaattgtataataattctcattaaccatgagtagtggtaacgggggtggtggtagtagtagtggtactggt

SEQ ID NO: 139443 - DNA, 910 bp, Glycine max
  Clone ID: PAT_MRT3847_96926C.1
ggaagcagtacaagggtgcaccaaaactttgacatttcaaacggatgtgctttgtaatgcttgtggtggcagtggtgttccacctggtactaggcctgaaacttgtaagcgatgtaaagggtcaggagtgttatttgtacaagctggcatattcagaatggagagtacttgtggtacctgcaagggaactggaaaaattgtatcgaattactgcaagtcttgcaggggtgcaaagattgtcaaaggaacgaagtcggtcaagttggatattatgcctgggatagacagcaacgagaccataaaggtttttagaagtggtggagcagatcctgatggagatcaccctggtgatctttatgttactatcaaggttagagaagaccctgtttttcgcagagaaggatctgatattcatgtagatgctgttttaagtatcactcaggcaattttggggggaactattcaagtccctactcttactggagatgttgtacttaaggttcgcccaggcacccaacctggtcagaaagtggttttgaaaaagaaaggggtcaagacaaaaaattcttacacatttggggatcaatatgttcattttaatgtcaacatcccaacaaacctgacacagagacagcgagaattaattgaagagtttgccaaggaagagcaagaagaatgtgataaacggagagctgcttcggcttctggttgaaaacatttgcagaatctccactatttgtttgttgccaagtcatgctcaactaggtggatatccacttgttagaagttttgtaggagcattaaagattttttttttttttttttgccccatccatacatagtgtatgtaattttttttttcataagtgatgttaacaattcaaattttaaatgttagtatttagaagac

SEQ ID NO: 139444 - DNA, 746 bp, Glycine max
  Clone ID: PAT_MRT3847_96927C.1
tagtattgcatcaagagtaggtgtgtacgaagcgtatggattatatgtttcacaattcgtaaaattatagctagagctagctactatttttttttttagacatttcctctctacttgttaatttctcttgattttccctctctctctcccaaatctgcaggcccgaaaaatgtttctttgactagttcaacaactgagtcaactccagatcttgaagacaaagacaaattgctaggtggacttttaaccactggatttgatgaagcatcatgcataagtaggatgcagtcccaattgtaccgcaaagcttctcctcataaaccttctccatatttgatatctaaactacgtaactatgaagatattcacagaaggtgcggacctaatagtagagcttacgacagaagcatgagaaagattgtacgctcaaagaacaaaggtgctgcagctacattgtgtaagtaccttatctggacacctgctaatggtttggggaatcaaatgattagcatggctgcaacatttctttatgctatgctcactgatcgagtgatgcttgtaaaatttgacaaagacaagcagggcctattttgcgagccgcttctcaattcaacttgggtattgcctgagaagtctcctttctggaatgaaaagcatatagaaacatatcagaccatgctagagaaggataggaataggactagcaattaaaggatgatttacatcaggtctgttattcatctaca

SEQ ID NO: 139445 - DNA, 1710 bp, Glycine max
  Clone ID: PAT_MRT3847_96928C.1
cccacgcgtcctcccacgcgtccggcaactagaaccttccaattgctattagggtttttggaaggggttttagggcattttttcgcaaccagaaaacccccaattttctttccaaggcttcctcatttctcttctaaagagctcccaaatgattcgctccaatggcgtcaggctccttcgatcgctgcccgaaaaactcctccgccacgccaacgaacgcatatacgaaggaatgtgccaatggggttataggacattgagttcaggtctttgtaatccatccagagttattgggaacttatctccaaatgttggaaatggtggtaatttgaagaactatttgctttttggagccgcaaatacatattgggggacatctagatccattcatgggtcagcatcattggcaagggactattacgaagtgcttggtgtgagtaagaatgcgagttcttctgaaataaagaaagcatactatgggcttgcaaagaagctccatccagacacaaacaaagatgatcctgaggccgaaaagaagtttcaagaagtttcaatggcatatgaggttttgaaggatgaggaaaaacgccaacagtatgatcaggttggccatgatgcatatgtaaaccaagaaagcaccaatggttttggaggcaacagtggctttaatccatttgagcagatgttccgtgatcatgattttgtcaagagcttttttcatcagaatattggtggagaggatgtcaagacttttattgaactatcttttatggaagctgtacaagggtgcaccaaaactttgacatttcaaacggatgtgctttgtaatgcttgtggtggcagtggtgttcctcctggtactaggcctgaaacttgtaagccgtgtaaagggtccagagtgttatttgtacaagctggcatattcagaatggagagtacttgtggtacctgcaaaggaactggaaaaattgtatcggattactgcaagtcttgcaggggtgcaaagattgtcaaaggaatgaagtcgatcaagttggatattatgcctgggatagacagcaacgagactgatctttatgatagaatcggtggagcagatgatgatggcttccgtagtgaagatcctaatattcatgtagatgctatcttaagtatcactcaggcaattttgggtggaaccattcaggtcccaactcttactggagatgttgttctaaagattcgtcctggcacccaacctggtcagaaggtggttctgaaaaagaaagggatcaagacaaaaaattcttacacatttggggatcaatacgttcattttaacgtcagcattccaaacaatctgacagagagacagcgtgaattgattgaagagtttgccaaggaagagcaaggagattttgataaacagagagttgcatctgcttctggttgaaaatattgcagagttattatcaaatcatatgctcaactaggcaggtgttgaagttttgtaggattggtaaaaaaatttattccttccactttttcgagtgtatttaatatttatttctcatcgcaagggatgatcacaattcaaaattttattgttagaacttaaaggcaatcccctcatgcttctctaggctagtattctagtcagtgctgtatatagtttccttataacataagaaagggcgcaagtcactaaatgtgattctttttcctactatc

SEQ ID NO: 139446 - DNA, 593 bp, Glycine max
  unsure (1)..(593): unsure at all n locations
  Clone ID: PAT_MRT3847_96929C.1
ggctcgagcatcatcatctctcgctctttctcttcctcttcctcctctctttcctgttttatctaaattatgaacttttttcggagtgattatttcggagttggcaacatcgtatgttgtcgaactctttgtctccctcgatctgtttcctatttcgtcgaaattctcggaattatcgctttcatctctcacctgtgtactctaaaaattttctctttgagggtatccgtaattttacctcacatacctatttaagcgccagtgatgcgtaaaaaagaagttttctctcagccaaaaattattcggaactgatgccgtcattcacctgtgttgccttgaataacctttaaaagccatgttctcccaagtaaatcaatgtaaaatataaagccattcatcttctacctggcaacaatgtcattcactgaacaatcgatcagtcgtatcattggacgaatagacatttcttataaatcactgtatatcgtagtatgaagcactgtatcaaatgcatttgacctcattgcaactctattcatgtattatanatttctatagaacccgtcatttatnnatattttatttcgttctct

SEQ ID NO: 139447 - DNA, 255 bp, Glycine max
  unsure (1)..(255): unsure at all n locations
  Clone ID: PAT_MRT3847_9692C.1
agtgttcggattgcngcgacgtgagcnngttcgctgcccgcnacgttgtgagaagtccactgaaccttatccatttagaggaaaannaannnnnnnnnnnnnnnnnnnncagcatgagaggaagtttgaaacgaaagttgaagagaagaagggttttggggaannggctgaactcgagggaataacaagagtggtggtgggaagagagtgcagcaaagangagaaacaaggaagaacaagagngaaagtagaggc

SEQ ID NO: 139448 - DNA, 2832 bp, Glycine max
  unsure (1)..(2832): unsure at all n locations
  Clone ID: PAT_MRT3847_96930C.1
cggctcgagtacggctgcgagaagacgacagaagggggtgagggacatgaaccacacactcagagagttccatcaacgtaggagcatattcaaagctcatcttcctgctcttactagaaccttccaaatcaatttcctctaattagggtttatctagggtttaattactcatcccaattcccaaaaccataatcctactttctccttctcaatacccaaatgctttgctcccatggcgtcaccctcattaatcgccttgctcgtcgatctttctgtcacgccaacgattctgtttatcaagcacttttccaaaagggttatagggcattgaactctgggccttgcagtccatctagagttgttggtacttttgcatccaatgttggagatgccgttaatttaaagaaatggttgctattgggagcggcaaataaatattggggggcatctagatcaattcatggctcggcatcattggcaagagactattatgatgttcttggtgtgagtaagaatgcaagttcttctgaaataaagaaagcttactatgggcttgcaaaaaagctccatccagatacaaacaaagatgatcctcaagctgaaaagaagtttcaagaagtttcaatagcatatgaggttttgaaggatgaggaaaggcgtcaacagtatgatcagcttggtcatgatgcttatgtaaaccaacaaagcactggttttggaggcgagggtggcttcaatccttttgagcagatattccgtgatcatgattttgtcaagagcttcttccatgagaatattggtggagaggatgtcaagacttttattgaactatcttttatggaagcagtacaagggtgcaccaaaactttgacatttcaaacggatgtgctttgtaatgcttgtggtggcagtcggagctcgtcccgctctcgagccgctcgagccgattcggctcgagggtgtgcctcctggtacaagacctgaaacctgtaggcgctgtaaagggtcaggagtgacatttgtacaaactggcatatttaggatggagagtacttgtggtacatgtaagggaactggcaaaattgtatcgaatttctgcaagtcatgcaaaggtacaaaggttatcaaaggaacgaaatctgtcaaattggatattatggctgggattgacaacaatgaaactataaaggtttatagaagtggtggtgcagatcctgatggagataatcctggtgatctttatgttaccatcaaggtcagggaagatcctgtcttccgtagagaaggatctaatattcatgtagatgctgtcttaagtatcactcaggctattttgggcggaaccattcaggtcccaactcttactggagatgttgttcttaagattcgtcctggcacccaacctggtcagaaggtggttctgaaaaagaaagggatcaagactaaaaattcttacacatttggggatcaatatgttcattttaacgtcagcattccaaacaatctgacagagagacagcgggaattgattgaagagtttgccaaggaagagcaaggagattttgataaacagagagttgcatctgcttctggttgaaaacattgcaagagttattatcaaaatcatatgctcaactaggcggttgttgaagttttgtaggattaaggattggtaattcttttcttaattccttccactttttcgagtgtatgtaatatttatttctcgtcccaagggatgatcacaattcaaaatttttttgttagaacttagaaggcaatcccctcatgctcctctaggctagaattctagtcagtgctgtatatagtttccttataacataagaaagggcgcaagtcactcaatgtgattctttttcctactatcacgtcacataaaggaggagcctttatcattggaccatgggtaaactagaatataatttctgcatagtgtcaacatgaaactatatatatattcatctgtttattgatcagtggaaagtaatgagaccgttaaggttgttacaagtggtggcagggatcctcctggcgttcgtcgtggtggaccttatgttcctatagaggttagagtaggccttgttcaggcaattttgggtggaaccattcatgtccatgctcttactggtgttgttcatctaattttggggggaggcactcaagtccgtcagaaggtggttctgaaaaagaatgaggtccgcccaggcacccaacctctcgagccggtcgagtcgaatcagctagaggtcaagactaaaaattcttgcacatttggggatcaatatgttcattttaatgtcaacatcccaacaaacctgacacagagacagcgtgaattaattgaagagtttgccaaggaaggacaagaggaatgtgataaacggagagctgcttcggcttctggttgaaaacttttgcagaatctcctctatttgtttattgtcaagtcatatgctcaactaggtgggaacccacttgttagaagttttgtaggagcattaaagttttttttttctttgccccatccacatatagtgtatgtaatatttttttttttgtcacaagtgatgttaacaatttaaattttaaggtcagtatttagaagacaattcccttgtggttatccatcggtggaattctagtcatgttgtatatatttttccttttaacataagaaagtgtgcaagtcactagctgtcattcttgtaccatggatagaagagcttgcttaaaccctactttcctaggtctataacattgacatgcatcttaatctatgtcccnnntcgcgcctgttagtgtttacgtgat

SEQ ID NO: 139449 - DNA, 550 bp, Glycine max
  Clone ID: PAT_MRT3847_96931C.1
ggctcgagtagaattcccagcatactatgaatttgaacatacatagagcagagttgctacagtaatcggtgaagttcaggaaataaaattagaattcttgaaaagataataaatcctgcaaaatttgttaaaaagaattactgaaaagataatacctcgattgaatgtttcttttgataggtaaatacaacactaaatattttgtgtttaggactacatggattttgtgctctgtttcttaagaatttttccaatggttagaagttgcttttatttctatagtcttgtttagtataccaataggatggccttatggctaatcccgtccacaattaggttgtatagattctttggtagactattccttccaagttgtttttgagtgacctatttagctgtttcagattttgcttgtgttaaacttcatgactatacctcaatgtgatgtagtgtgagtggtttgctgcagtagctttatcaaggtattatccacattcttatgaggttttcaaggaaaaactgatactgatgtgaatgtgataaactgatt

SEQ ID NO: 139450 - DNA, 450 bp, Glycine max
  Clone ID: PAT_MRT3847_96932C.1
cgctttctgatccttgaatgtattcgatgagaaagatgatggaaacagtactgttatggcctcgtctgaacgctgattcagtgtgtatagcacaacatgggtgcatcgattgattagcatggatgatttgtgctgagctacacgctgaggaatcaatagacagtttcattccagacacagtagggactgttgcgaagaaagggaattccggcgtgacctatgctaccaatcagttctttaataacaagaatgaacaaacttcaactgcacagattgtggatagaaaactcacaatgtgtacgctgcggaatctctctatttgagtctgtgtatgggcaatgctctcattaccacttgccaaatgatatcagaatcttgctagaagccctttgcagcacaaggtattgcttttctacttgattctcttgagactgaaacgaagtcttagat

SEQ ID NO: 139451 - DNA, 312 bp, Glycine max
  Clone ID: PAT_MRT3847_96933C.1
gcgtaatgcgtaaggaatcaaattctattagactgctaataccaataagtaggtaaattgacatctcatcattcgaaagaaagacattgcaacaatactatttttatacatgactcgatgatatgccacactcaagcgacatagagaaaacattcaagactgacttgaaaaaattgaaacgcattatattttgtgtccattcatagtatgagacttgactggaagaacaaaagggagcagcaacagtagatgcatgcttggctatggcggcacgaaggtcattcttactagcaccagccacattgtgcacta

SEQ ID NO: 139452 - DNA, 1031 bp, Glycine max
  Clone ID: PAT_MRT3847_96934C.1
ggagcacggcatcaggttcctttgtccagacaggagcattcccagtttgccttaaacaaagataaacaaacacgggcatgtagcagacaggcacatacataccccaataaccccatcatcgttgaagaagatgggacgagccaggcttctggtttcagacttcgttctgtctttcatgtgggtatggtccggtgttctccttcggatcatcgtcttcaaccaccttggcttcgctcatggccccctcggtgaggttatcaaaactaccttctccatcgccaacatgttcttcttcgccttcctcgtcaaggttacacgtggcggcgcctacaaccccctcaccgttctggccgatgctatctccagggattttaacaacttcctctactgcgctggtgccagaatcccaactcaggtggtttgatcgagtgttggagttaaacttcttattgataccattcctgaagtaggactgggaccacgtctgaatgttgacattcatcggggcgcgctgacagaaggattattaacatttgcaattgtaaccatttcacttggactcgcctcaaaaatccgtgaaaatttcttcatgaagacttggatctccagcctctccaagttaacacttcatatacttggctctgatctgactggtggttgcatgaaccctgcatctgtaatgggatgggcatatgctcgaggcgatcacataacaaaggagcacttccttgtatattggcttgctcccatagaagcaactattttagcagtgtggacattcaaatttctagtgcagcctggaaaagaagataaatcaacctcaaaaagtaaatcggattgaaggagctttattttgtgtgctaagtgtatgatttcatcttgctttcaaatattatttctacagttggtgggatgaatgcatggcaagccaagaacttgtacatataaatcattggttagtgtattgtgctatcaacttttggggtttgtgtaatactacatcatacactactaattgtctaattccattc

SEQ ID NO: 139453 - DNA, 319 bp, Glycine max
  Clone ID: PAT_MRT3847_96935C.1
ctcgatatatattgggagcggtcgccctgaccaccggcatttgggctgatagggacataaagaccatccgatcgtgaggcaaactggccaacatgcccatttatgcatgctatgcctgacaaagtgagagaagatttaagggcaacccaacatgtaaggctacggatggtgactcctgctaacaagcttgatgttgactgaagagatctatacccgactagttttatgatagcagctgctacaatggactctggcgtaacatctaagacgacaacatcgcctgctctgctactgacaaccactgtgacaccaatgcgac

SEQ ID NO: 139454 - DNA, 117 bp, Glycine max
  Clone ID: PAT_MRT3847_96936C.1
cggttgtagatcgggagcgaaatcgaagatccgaacggaagatactactaacatctgtgtaataacgacggaactagcttcttctgatgtggatgaggcatcagatgacgctgacaa

SEQ ID NO: 139455 - DNA, 459 bp, Glycine max
  unsure (1)..(459): unsure at all n locations
  Clone ID: PAT_MRT3847_96937C.1
cnaggcgtttgtttatgcgttcgttttgtcatttcacttaaacccaggtggtaaaaatgtcagcagggaacatgtccatatgagacttccaagaacttccttgttgggaccaccaccagctcggatatcttgagctcttacaaagagtttatcgtcttaaaccctgtgggagagacactaccgtgtttggattgaaaccatcttcctggccagtgttaaaaggggcgatatataaagagacggctgaaagaagcggacccccaccacaatgaatttgaagcccttgatgacacccacatcctgtattcggctgaaaaagctggagaggagctaccctccccatgcagagcaggtgcctgctctaggggggctgaccaaaacaattcaggctctggggaaaagcagatcaaagggtgcccgttgaccattagatggaaaagggaaacggtttgacttgtg

SEQ ID NO: 139456 - DNA, 647 bp, Glycine max
  Clone ID: PAT_MRT3847_96938C.1
ggcgtaagatcaacaataatatctgcaattctgaagagactcgtagagagtctttggctgatcattcagttaggttctggactaatggtggattattaggacttgagccatcaaaacctcctgactttaacaagtcaacttctttaagtcaagggtctttgagcactaaaagtgaaacagatggtggttcacatcataattcaatgcaaaagagcaatggttataaagaggaatgggaatcatcagaagacgttgctgagcagattctaaaggaaccaagttctagattcttaacatcaggccataatgatgaccaagcttgtatctctgaaaaggccactggcaattctcagcagagtaatggattttgtcagattgagaggaacaatttaggggaaatcagggtaactgcacctgaaagtattctcccatcgatccttgacacaaaggacattactgaacccaaccagggaaatggtgaaaactcatcgcgtgtgtttggacttagtcgtagattactaataaatagctttcagcggaaagtttcttttgatgaaaaatctgaacattataattctctgaaatctgttatattggaccagagtggacaaaatggcattgtaggaccatcacttcctgagacaaca

SEQ ID NO: 139457 - DNA, 326 bp, Glycine max
  Clone ID: PAT_MRT3847_96939C.1
gcgcaccatttttaacacaaccgcaagtaccaaactgttcaccgaagctgcataaatgattctttagtttcaattgtgacagctcggctgctatgaaataacttgtgaaagcccactgaccatgtgggattgatgaacataacaccggaagagaccacagtgtttgtcaccaacgatacttatgcacaagtgggtttgcacttgttcgacggcaactatactgtgcctaatggatttgttatttcacatgtggatacttacatgactctatattatttattaggtcaatgcttattcttaatacactggataccgatcatgggaca

SEQ ID NO: 139458 - DNA, 154 bp, Glycine max
  Clone ID: PAT_MRT3847_9693C.1
attggtgctaaaggtaacatctataaccggatggagaaagaaactgatgctaaaattgtgggttgtagtataggatcagtgaaagactttaaacttcaactaaataggtatttgaaaccttatcctttaaagaatgtacatttgcatgcgttaa

SEQ ID NO: 139459 - DNA, 408 bp, Glycine max
  unsure (1)..(408): unsure at all n locations
  Clone ID: PAT_MRT3847_96940C.1
agcgnngccgccctctgattttatttttacgcgtgcgtctttttttcggatcttgcctaaatcagaagccggaacgttgcatcccactcttgtctattaaagagtctgattttggttagacgtgaacgcggacatagctataacttgtggctaattataaatgacaaacaatcacatagaccctctaaaaccaagccggaagctgtaagtgctcacaaggttaaggggaaagcatacgcacaataatggaggtgggattactgtgcataaccccctgagacaacttgtagagccaaaggcaaatcaaattttcgatgaaaacaaaaggggggggcgaaaaaaaatggtgcgagagcgctttccttgttcgcaccaatgtcaccgagacgattggccggacacgagctt

SEQ ID NO: 139460 - DNA, 2141 bp, Glycine max
  Clone ID: PAT_MRT3847_96941C.1
tgaacaccgggttgtcttgtctccgattctttaatcaacttcaacctgaattcatggtggtccaaagcacaagacttagattagtgttcatgcaatctattatgcctcgttgcttctaagctctcacctttatttcattctcaagttggtcgcaaaagcttggtcaaaagcttctgttgagcagtgacgaggttggaacataaggcacggtttgccaaggatattggaagtactagtacttatctgttgcaaatagtactcgtttccataagcaactactcagccggtactttgaaatcacaccaaactttttttgccttcacctttttcggctgcgatgaaccacccaaaatagtgtgtatcaatcacaagtccaaactaaccttctttattgtgctttagttatcaacttatctagctatatgtcaagagggtgtcactcggttgaatatggtgcgtgagttgttgtaaacctcctgacgacactgtcttcgattcccataaataaaaaaacttgtctgcttatatataaggattccaaattctttgagttcaacattcagtactaccacaagtgagtgttagaaagtacaaaccaaaatggatggtggttattttccacctcgcaaaattggttcatggcatggattggaattagaggatgtgcaagaaaatgatgaactcaaattggttacatcgttatctgccatacctcagccacctaccccacatgagcctatggagttcttatccaggtcttggagtctctctcctgcagaaatttcgaaggctcttttggaaaaacaaaagcataacttccatgacaagaatcaagccacctttccagaagctattttggcacctcaattagtaacaagtaagatcataccttatccttatagcaaaaagatgggcactattggaaaatggtttcatcagaggcatcatgggaatactaatatcactgtaaagaagaaagatcgggcacgtttagaaaatgcacgtgtacattctgctgtgtctattgcggggcttgcttcggccttggctgctgttgctgcagcagagaactctagctgctctcaaacgaagttgaaacttgctctggcttcagccacacaactcttggcatcacattgcattgaaatggctgaactagctggagctgatcatgaccatgtggcttctactataaagtctgcggttgatattcaaacccctggtgatctaatgactcttacagctgcagctgcaacagctttgagaggagaagcagctctaagagcaagattgccaaacgaagcaaagaggaatgcatctataagtccctatgatagggtacaactaccacaatctcattggttttctgcttttgaaggtcagagttgtgaacatcatcctccatgtgtgggagatttgtggcagctcacaagaaaaggtgtattacgatggaagcatgtttctgtttacatcaacaagaagtgtcaggtcaaaatcaagatcaagagcaagcacgttggaggagccttctccaaaaagaataaatgtgtggtttatggaatttgtgacaaagatggggcatggccatacagcacatcaaggaaaacgtcagaagagttctattttggtctcaaaactgcacagggtcttttagagtttaagtgtgatagtaaactcccctagcaaaaatgggttgatggaatagggtgtctacttcgtcgagttaactctattgaagcaacagagcgttctctagatcttctaagtattaacagcgacacatgacggatttgaattgcattgtatcactgtttagagaaattttaagaaattgaaaaatatttgagaagacattttgtttgttttttaaatcaaaaaggagtgtatgaagtcacttaaggtttcaagacatgtagagttgtaaagaaaaaggatcggaatgccatttcaaaaagatattaggacttaggagaagccaaggttgtaaaataatttcttttacgccagtacattatgtatgtgtgtaattgtgttatgtatatttatgtgtctagcagagtagaacagaattttgccaaacgcgtttattcttaagatggttgtaccactatgatacaaaagttaaggaatgatgtttattt

SEQ ID NO: 139461 - DNA, 452 bp, Glycine max
  Clone ID: PAT_MRT3847_96942C.1
cattatctaccataatcttattcccacgatcatggacatacttgtttccaccatcggcttcagcgcttcatgggggaacatttatgacagtgtgatggtgctaccatgtccgagcaactttattcgaaactaatgaataatatagagagtgactgtcgcatatttgcacaggcccgacaagactgtgggggtgcagataccatgcctgggcaacctgcgttgaatactctgtggaaagaaagaaaccaatatcgatgtatttgcagaggcaggagatgactatggggatggtgcatagagctgcttaacattccctgtaagaaccatcggctggattgtactaaacgactcacatgtccacccatgtcaagttggtggtctaaactcactatatgagagggagggctatcttcaaaaacagtgtgtcttgacagatgcatgctaggaaatgc

SEQ ID NO: 139462 - DNA, 389 bp, Glycine max
  Clone ID: PAT_MRT3847_96943C.1
accatgctcttggtactttctccttataatttactcatccactgcgaggcaatcattaatatggagaactcaagcgaaaaatgcaattttgaagggaacaaagagttgaatgcttcaaccattactgttggaggaatctatgacatgttgttggacagcatcaaccatgaagacaccagatccgttgttcgtcttggtcgtgtagatcccactgataacccattgtttcggactaccactgtggctgttgatgctattacaagagccgttcattcctttaacttcaactgttaccctcccactgttggcttacctgaagctaagagggctgttgcagaccatcttaactctaatctttcacacaagatcatatcaccagagaaacgttt

SEQ ID NO: 139463 - DNA, 296 bp, Glycine max
  Clone ID: PAT_MRT3847_96944C.1
ccacgcgtccgacactgactatatgagccttagagagtgctctccaatggcccccttgctcgaaccctcttctttgttgctctctcacattctttctgtccttgatggctctaccaacgcacacctatctaccaactattatgaaccaactggagctatccttcacaccatagggaaaaacgcagtgcaacatgcggtcaatggagaagacattcttgaagcctctatactcagagtgcacttccacgactgcaacgagatcggctgcaatagcccaactcttattgaaagacact

SEQ ID NO: 139464 - DNA, 2055 bp, Glycine max
  Clone ID: PAT_MRT3847_96945C.1
ctacgtgaagaaatggcatgtattttcttttcattactcatctctgaattggtaaaaccaaccatttgtttcttaggcagttgttcgagaatagctgggcccttttatcctctctcctttaactcattcttttcctttcagccttagtatcataatctctatcgaatcacaccatatacacccgtttttcccatctcttctattttcctccttttcatcattccttttctctgctccacactgcaacaattctttagccacttaccccatattctgataataatcatcatcggcctttcccccggggttcttttcctaactttaggccagtgagtgctctcattgggattcagtgtgatctaccacgcccggctggcaccaaactgggtatccttgtgaacggttctcctgccgcttttgtagatgctgactgtatgatgtgtagggagagcaattactcgtacctccatttgctagcatctacaaatcatcaaactataaatatatagaaacaaaggaaccatgtaactttcatcttcaatatactgatcgtatatcgacgacagaagggagatattattccacttaaactcaccaacggaactttaacacattccatgctcgctttcgggtgtggatatgatcaaaagcatgttggtcataatcccccaccttccacagcaggggttcttggccttggaaatggcagagcaagcattttgtctcagcttcattctttgggtctaattcgcaatgtggttggccactgcttaagtgcaagaggaggaggctttttattctttggagatcatcttattccctattctggaattgtttggacacccatgttgcagagttcctcaaaacactacagctcaggaccagcagaactgtttttcaatggaaaggctacttctgtgaagggtcttgaacttatctttgatagtgggagctcctacacatacttcaattcccaagcccataaagctcttgttgatctggtaactaatgatttaaagggaaagcctttgagtagagcaactgatgatccatcacttccaatttgttggaagggtccaaagcctttcaaatctctacatgatgtcactagcaattttaagcccctagtactgagcttcacaaaatcaaagaattcgttgattcaagtaccaccagaagcttatctaattgtcactaaacatggcaatgtctgcttggggattctagatggcactgaaattggactaggaaatactaacataattggagacatctctttacaagataagttagtgatttatgacaacgagaaacagcagattggatgggcctctgccaattgtgataggtcttctctaatgtaattttttcttaagttgacttgacatggctgatagggctttctcataaggaaatcctagcaaaataatgccctgcaacttatgatgttatagattgtcaatgagttgttaggcaaggaatgttaggatgtaaaatggttgggatagcatatataatcccatatatatggtacaacataatctatatataaactttatttttttgcaccttacaatattttatgcttcataagctacattttgtgaatttgtaaatgataacttccaaacgatacaagctacagttactgatccttgcttgagaaaaaatcatgaagctgaggggcctcaattcccatcagtagcaagtagttattcgcctaaactaactgattggccttcactgcttccatgcaccagcacaaggatgattgagagaagattgccagtattttgtgaagttacaaagtataatgtacctgaaataatagtgcatattaagttaaaagaccctggattaggtacataatttcatgactgtacttttaggaattgataccaacttcagaaaccccgtgtacgacagtcacagcagccaacagcatgatgctacaagttttgatttgcatactgcaagttgtaaaatgtaaaataacattaatcagtcatgacagtttgttcgcaagagattataatattaggcagaatataacag

SEQ ID NO: 139465 - DNA, 435 bp, Glycine max
  Clone ID: PAT_MRT3847_96946C.1
aaaaaaaaagggaacaagggcaaaaaatttattaaagccgggaaaaaacaacaacggagggccggggagggttttaggggacttccccccaaaacaaaaagggacattaacaaacaaagctaaggcccctatttgaaaagggcaaatcagcataccttattacataaagaagggagcaaaccctacctaaattggggaaaaaggggaaggccccacccaagggaaaacaggggataaggaagctaaaagggcctgctttcccctttgggggccccaaaaaaaacgctccatggggccccaaagaatccaaaaattttggatccccgcccaaaaaaaatctctctcattggggatttgaaaaaaagggcatttggagggaaaaaaaggggacccttgaaaataaactgcccccatggggggaagccaacccttttt

SEQ ID NO: 139466 - DNA, 184 bp, Glycine max
  Clone ID: PAT_MRT3847_96947C.1
ggaagaattggcaggggaggttgggaccatcgccagcttggctcttcgattgggtcaaagcgatttctcttcttcttcccttctcttcatgtgattggacgccggcttctactcttacactgctttctgctatttggtaacctgcatgggcttggcaattccatggaacataacattggtggta

SEQ ID NO: 139467 - DNA, 112 bp, Glycine max
  Clone ID: PAT_MRT3847_96948C.1
gttttatcaaattttttgtcggatttacaaggaaagctatccataaaatgtttttattagacaagtcacggagagaatcttgaaaacattttatggatagctttccttgtaa

SEQ ID NO: 139468 - DNA, 778 bp, Glycine max
  Clone ID: PAT_MRT3847_96949C.1
tcgatgacccaggtttgattattgaggatattgattttagtgataaatacttagcactcattgtaagggaaggtcgaaaagttcagctttgttcagttggactgccattgccctttgggaaggtaatgaaaagagaatttgctatatctcttacagataaacacttgattttataatcttattgaattatatcaatcatcttatttttgtgatagggagcagttaaactgaggaagctggacctacagtacttgcccattccaagacatgtttgccaaattacgcctggaccaaactatgactttttctcatctgtcatgcgctttataatatcatcacctgtggtatgtgaatgattttttttattatttatttataatttctgaagatggtttcttttcatgattctgttaatatctgtttaccttcatatcatatcaactctgaatggcattcactggccctgttaaatattcatccaaggaaattgagaagttgaaaaacaatttgtgctttcaaaaaatacttcatgatgtattttgccagtaatcctcgtagaattgatttcggtattcaatgatcccaagttttctcttcctcttactttcctccttgttaggtttttctgcctttctttccaaaacatattgttcccttacaatgagtgcttctttttatatatctatatctttatctctatatatgtatatgggctctggaggttacgttttgttcaatcttatagcacagcttccatatatatatatactactagact

SEQ ID NO: 139469 - DNA, 539 bp, Glycine max
  Clone ID: PAT_MRT3847_9694C.1
ctcttccaccctttttttttttcttctttttgcttgcttttggttaaaatttcaccgaatcctttccttccaaaaaaaaaaggggccccccccccctcttttttgttttcccccccccctacccccccaaaatttcctacccctttaaagacaccccccggggggacccggccttagggggcccggcccctttgaagaacacccccataaatttccccctttaaggggtaaaactcagtggaccctccccccccggaaacccccttcccccattttttttcccggtgaagcccaaaaaaaaacccccccttttaaaaatgggcccggggttttacccaaggggtctaaaagggccccccttggccccccattttgggaaatcccccagatcccccaaggacgagcccggtcccttggggggggaacccccacggggaacccccccccccccccctcgtgaaccacgggccagacccctccccccccctggggtataaatttccccccccctcaggggccctaaaaacccaggggcgccc

SEQ ID NO: 139470 - DNA, 3018 bp, Glycine max
  Clone ID: PAT_MRT3847_96950C.1
tttttttttttttttttcattttgtaaaaatttgtaatatttttcttctatgaaaatattacatatttttccccgctacgccagtgcatgaatattgcaataaggttcgaaacttcccttaaaacttagccagcaataatgagaaggtgagatgacatgatgcagggcacctaaactcattcaaacttagaaagaaataatttaaaaaactcaaacacaacggatactattaaaactccaaagccaaagacctcacattaagtttagacaaacaattcataaagctcaagacttcacagatatagtagtctaaacacactggaaggtataatgcgtcaaccctttatttagtaggtaattatgggatgattttgattcacacagcaagcactggcattttgattactcatcatcataactcttgtactggtgatgcttgtggtgatgcttcttcctcccatcatcatcatctgagtcatctccatatttcttgcgtccatagccttcctcatcatcatcatccttcctctgataggagggcttgcggtacccctcctcctcctcctcctcctgccgaggtggacgcccctcataaccatactcaacccctcctcctcctccctggctttcatagttgctcctcccatagctcggtttctcctcatactcactcctccctccatacccggatccatattcagattcttgcttccttccaccatacccggatccatattcagattcttgcttccttccaccatacccggatccatattcactctcctcctttctcccatcataccctgatccatattctgattcctccttccttcctccatatcctgacccatattcagactcttccttccttccaccatacccggatccatattcagattcttgctttctcccaccatacccagatccatattcagactcctccttccttccaccatacccggacccaaattcatcttcttgttttctaccatacccggatccatattcagaatcctcctttctcccaccatacccggacccatattcaccttcttccttccttccatacccggatccgtattctgattcctcctttcttccaccatatcctgacccgtattctccttcttccttccttccatacccggatccgtattccgactcctgcttcctaccatacccggatccggcggcgggattgaagcctgcaggagcgggcctgggcttagggcgagagtaactgctatactcagtggccagggcttcatcgccataagcagagggttcagcgtaagaggtgtactgggggcgatcgtaatcgaagttttcatcggaagaggctccgagtgggtagcaggtttcttctgaaggagagacgacgacgacacggtggacgactacgacgagtacgaccccaccccttacggcggcggctacgacatcgccctcacctacggccgccccatcccaccctccgatgagacctgctaccctctaggagcctcttcttctgatgacaacttcgattatgatcgccctcaatacacctctaacgctgaaccctctgcttatggtgatgaagccctagctactgagtatagcagctactctcgccctaagcccaggcctgctcctgcaggcttcaaccccgccgcagggtccgggtacggagggtccggatccgggtatgggaggaagcaggagtcggaatatggatccgggtatggtggaaggaaggaagaaggtgaatacgggtcaggatatggtggaagaaaggaggagccggaatatggatctgggtatggtagaaggaaggaagaaggtgaatacgggtcaggatatggtggaagaaaggaggaaccggaatatggatccgggtatggtaggaaagaagagggtgaatacgggtcaggatatgggtccgggtatggtgggagaaaggaggagtctgaatatggatctggggtatggtggaagaaaggaagaacctgaatatggatctgggtatggtgggagaaaggaggaatctgaatatggatccgggtatggtgggagaaagcaagaatctgaatatggatccgggtatggtggcaggaaggaggaaccagaatatggatccggatatggtggaaggaaggaggaatctgaatatggatcaggatatggaggaaggaagcaagaatcagaatatggatccgggtatggtggaagaaaggaggagagtgaatatggatccgggtatggagggaggagtgagtatgaggagaaacctagctatgggaggagcaactatgagagccaaggaggaggaggaagggttgagtatggttatgaggggcgtccaccccggcaggaggaggaggaggggttccgcaagccctcctatgagaggaaggctgatgatgatgatgatgagggctatggtcgtaagaaatatggagatgactcagatgatgatgatgggagaaagaagcatcaccacaagcatcaccaatacaagagttatgatgatgagtaatcaaaatgccagtgcgtgctgtgtgaatcaaagtcatcccataattacctactaaataacgggttgacgtattataccttccttccagtgtgtttagactattactgtgatgtgaagtcttgagctttatgaactgttggtctaagcttaatgtgaggtctttggctttggagttctaataatatccgttatgtttgagtgtgttaaattatttccttagtttgaatgagtttatgtgccctgcatcatgtaattttaccttctaattattactggctaagttttaagggaagattccaaccttgatatatgcatggtaagttcgatatgataatcatatcctacaagaacacccgtgttcgtataatttacacaccggaaggtataatacgtcaaaattggttgcacaagtataaactttgtattttgggttgagtagaatttgagtgagttatttatccattgtttttaaaaaatacatttgatatttgctcagtaaa

SEQ ID NO: 139471 - DNA, 409 bp, Glycine max
  Clone ID: PAT_MRT3847_96951C.1
ggctcgaggacaaaacctaattctcattttttcattgcccgattcttctcctactaaagggggggatcttcaaaaaaacttggagccgctaagaccatcaccctagaggtggagtcctcctacaccatcgatattttgaaagctaagattcaagacaaggaatggatcccacctgaccagcaaagacttatcttgacgggttaactgcttgaggatggtcgaacccttgccgactacaacatacaaaaggaatacactctccacctcgtgcttaaactcaggggccacatgcatatctttggcaaaactctgaccggcaagaccatcaccctggagggcgaatactcggacaccattgcttgtgtcaaggtctggatccatgactaggagggtatccctccatatcagc

SEQ ID NO: 139472 - DNA, 1464 bp, Glycine max
  Clone ID: PAT_MRT3847_96952C.1
ggtgaaatggcaatgtgcacaaattttttgcagggtcaagcctctgaatgggcattggtaagacgtcattcatctgaagatttatttggtgtacaaatctgtggggcatatcctgatactgtggcacgaacagttgaactaatagagcaagagtgtacaatagattttattgatataaatatgggttgtcctattgacattgttgtgaataagggtgctggatcagctcttctaacaaaaccaatgcggatgaaaagtattgtagaagttgcttcaggcactgcggaaaaaccaataactatcaaggtacggactgcttattttgaagggaagaatcgcattgattctctgatagcagacattggctcttggggtgccagtgctgtgacaatacatggtaggtcacgtcaacaacgctatagcaagcttgctgactgggactacgtataccagtgtgccaggaaagcccctactacattgccagtagtggggaatggagatgttttttcatttgtagactggaacaaccacagaactgaatgccctgaacttgctacggacatggttgctcgtggtgcactgattaaaccttggatatttactgagatcaaggaacagagacattgggacatcagttctggcgagcgtctaaatattctcaaagattttgtgaattttggtcttgaacactggggttctgacacaaaaggggttgagacaacaaggcggttcttgttggaatggcttagctacactttcaggtatatacctgttggtcttttggatgtggttccacaacgattaaactggcgtccaccatcttactatgggcgtgatgagcttgagacactaatggcctcagactctgctgccgattggatacgaatatcagagatgctacttggcaaggttccagatggctttacatttgctcctaagcataaatcaaatgcttacgatagagctgaaaatggttgattctggagttaattttcgataccgattctgatgagaaccgttttcttctcaactgctgactaatgaagagacaagctgaagagacatttgtcagcattcttatctatttgttccattgtgagaattgttcatcattgaccttggacttttcagtcctccactaggaaactaaacatttaataaaacatcgacatttgaaatgtaaacattaaaggtttttagagtcatgccaacttgcatgctcgggtcaattaaattttctgcttgcaatagtaattttgctacactattaattaataattttaaaagtatgacacgaatgaattaaggtattgatatgcagacaaaccttactaacagctagaaaaagcaaaatcgaaagtagtttttttgtagtttttcttttctctattgatgagggcatttcgcaacagggtttttttttaatttgggataacttcacgctctgtaacacgtgagagaatt

SEQ ID NO: 139473 - DNA, 338 bp, Glycine max
  Clone ID: PAT_MRT3847_96953C.1
tgagaagatgatagaagggaatggtagtgagaagatgatagagtggggtagagagagggaaatgggtaaaaaaaaaaaagaaaaaaaaaaaaaaaaagtggtagaataagaggaattaagttaatgaatgtgagtaagttatgatagaatataagtaagagggatatttaaagataatatataggttgatgaagaataatgataaaatagggaaaatttagatgagatttaatgaaaaggttaagtaaaataatttataaaggatagaaggtataaaattaaaaaggtttgtattgaatgaataaagaaatggtagtataaatagaaaggtgaaagga

SEQ ID NO: 139474 - DNA, 1260 bp, Glycine max
  Clone ID: PAT_MRT3847_96954C.1
ccgaatcgaacaggagcaagcaaagtcaaagaaaaagagagaggagagagagaaacaacaatcatcatcggccagaagcgaacacgacagacacatctgagaaaccaaacctgatagagatgtcgagtggaggaaaccttagttgcgtgttggtagctgtggatggcagcgaggaaagcatgaacgcgctgcgttgggcactgaacaacctcaagctccgatcccctgcacccgattccaccgatgctccttccttcaccgtcttccacgtccaatccccgccctccatcgccactggcctcaatcccggtgccatccccttcggtggccccagtgatctcgaagttcctgctttcactgcagccattgaagcgcaccaaaagcgcatcaccaacgccgtactcgatcacgccctcggaatttgctccgaattcaacctcaccagtaaggtcagaacccatgttcttgtaggagatccaaaggagaagatttgtgaagcagttcaggatttgaatgctgatgtgcttgtgatggggtctcgtgcttttggccccattaagaggatgttcctgggaagtgtaagcaactactgcgcccaccattctccatgccctgtcattattatcaaggaaaaggacattgtcaataagagaaactgatgcacttctactatgctaccatgattcttgtctcttgatcagtaggttctttaggtgggttgtcagtgccatatttcagttgctgacgctgcatccttgcttgccaaattaattatgtcgaaggctttttcgtcttgcaatttgcttgctttgttagaccagtgttgtacctcagctttgaagcttgtgtcttttgttgagccaatgctggccagaccctgcttcaagtacgtgttttcactttctgtggacaattctgctgtgtgtgtgaaattcttggagttaaagagtgctttataactgtgctgtcacaacgtcaattgttgtcccaaatggttcaaagagatatttgcctccaggtttgtattcgttctgaatttatacaatgttgtacagaaatgttgcattactattgctccttggtcagagccagttctagttgtgattgtgatatgcaacaaactggccatttgacatttgtcatgtacaaattttcaaattgagaatccagctagtgttggctgcagtgtgtcttactgttgcattattgacagtgtcctgcttaaataaatatttatatgatttatgacaaagaaaacac

SEQ ID NO: 139475 - DNA, 155 bp, Glycine max
  Clone ID: PAT_MRT3847_96955C.1
atccgttcattttagctgtttaacgcctaagaattctctaccgattgctcgtgggggcttcaaacatgcgacaacctgtagacctatacactctttacacaatacctggtcaatcatcacgcatgttcatacttgaatgactcctgtgtgggcca

SEQ ID NO: 139476 - DNA, 305 bp, Glycine max
  Clone ID: PAT_MRT3847_96956C.1
acgagtttgcctcttcatcctctttgtccaacttcatccataaccacaaccaccaccctttgggtcgcactttgtccacaaccaccactcaccacactaccttgcctccacaacccactcaccgcacagcaccgcattgcaccccaacaaccatcactcaacacttccatcgattcgagttttaccttggacaacgtcttcttttatgctcgctcgtgcactactaaccttgcctcatgcgtgttcactgcgttcaacaacgttccaagaagaggaagagtcttgtagcctatgtctgggttagg

SEQ ID NO: 139477 - DNA, 196 bp, Glycine max
  Clone ID: PAT_MRT3847_96957C.1
ggctcgagctaaaatgctgttttctcacatcaaatggcattcctgcatctcctccattgcggatgggatgcaaactatgctgtcgattccatgtgacttctgccctagagaaaaatgggaagagctcaatagaggcctggccggcttgatgactgatacctaaagagtgtgtggcttaacgcgaaggggacgtacc

SEQ ID NO: 139478 - DNA, 289 bp, Glycine max
  unsure (1)..(289): unsure at all n locations
  Clone ID: PAT_MRT3847_96958C.1
ccattggtccttaaacantcatcagtcatcaccatggccaagcnagttntttccctttgttttctngcttttcagtggctgnngcttcgcnttcagttccagagagcagcctcagcaaaacgagtgncagatccaaaaactcaatgccctcaaaccggataaccgtntagngtcngnaggagtgntcattggggcattgaaccctannaacaagccattcnagtgtgccgttgttgccctctctcgntgcaccctcaagcgnaacgcccttcgtagacnttntgacacc

SEQ ID NO: 139479 - DNA, 187 bp, Glycine max
  Clone ID: PAT_MRT3847_96959C.1
ttaattcccgcgactcgacacagtctcactagtacatgcggcctgcccttgattcttgtgttttactcttgaggaatatgaggttcatgattcacgtggttgctgcttacgcagcgttggcccataataaataggagctgaaagacaaactacttttacatggtctagacattaccgcctggggggg

SEQ ID NO: 139480 - DNA, 284 bp, Glycine max
  Clone ID: PAT_MRT3847_9695C.1
atgaaatcatattttatatttaggcaaaaaaactatttactcaaattttattatattagattaatagcattattggttaactttatgtgcacttacaataataacattttattaatgggctcccacaccctacccttaaataacttcttccaattcttagagaagaatcaacacctttactggtgacacttgcaaagaacctagaaatttttaaatgggtttggggaataatctaagttttgttggggagcattttccctctttgggcctcaatttaaactgta

SEQ ID NO: 139481 - DNA, 328 bp, Glycine max
  Clone ID: PAT_MRT3847_96960C.1
cccttcccattaccccctacttgggtaggggtaaatttacaacttcactccctcccaaatcttctctcccatctaaacttccttctctcctcacatcaaacacaaacgacaaacttaaccacaaaaatctaaccccacaaaaaaactaaattcaaataacctccaaacacaattgaaacaaccctacacctcactaaaaacctactaacaccataacaattatatccacaacttaaataatatccacaaaataacgcaacatatgatttacatactccttccataacctaagaacacaacgcatgattattttcatgcaagcacctaa

SEQ ID NO: 139482 - DNA, 545 bp, Glycine max
  Clone ID: PAT_MRT3847_96961C.1
aaaatccttttttttttttttttttttttgttttttatgttatttatgttttattaattaatattaatttttttttttatggtttaaatttaaatgttttatttttttttttgggagagggggggaacaaggaataaaaaaaaaaaaaaaaaagaggatcgaaggaaaaaaaattcgggtccgcatcggaaaaaagaaaaaaagagtgcaaattgaaggggggggaaaaacacaccccccccggtaataaaaaaatgggaccctctcaagggacccaggcttggaaggaaaaaaaaaaaaaaaaaaagggggccagaaaagctttgttaaattccaaaagggacctaacccaaggaaaaatggggggaaataaaaaccaaaaaggggaaaaaaagacaagccacaataagtaaagttttccaaccccaaaaaaagaaaatggggggggaccctttgccacccccaaggggtctaagggaacacccagaaaaaatttgatttccaaggacaggccaaaaaaaattggggaatgccccccccccccc

SEQ ID NO: 139483 - DNA, 152 bp, Glycine max
  Clone ID: PAT_MRT3847_96962C.1
caatcaatcaacatggcttccgctaaagtctacgtcggtaggtctcactcatccactcgcacaccctctctctctctctccaaccctctcgtcgtcgttggagtgcctcgctttgcgtgtctcaaacgatgcatcttcatgtcatacttaaa

SEQ ID NO: 139484 - DNA, 127 bp, Glycine max
  Clone ID: PAT_MRT3847_96963C.1
tcctttttctagttaatacatctcatggcttatacttgtataaggttgtagtctccaaaattacatggtgtttgtctgcaaaaggataaaacaccatgtaattttggggactacctcctttttctag

SEQ ID NO: 139485 - DNA, 986 bp, Glycine max
  Clone ID: PAT_MRT3847_96964C.1
ccacgcgtccggttattgatcatttttgtatatacattttcgatttttctctcggttgttcctttggctctcgtcaaaagcaacaactgcattcaaagggagggctaaaaaacaatgttgccatcattaacacacatggtttcgctctccattttgaatctcctccacactcaaaaatcatagtacatagatagatagctcctttattatacacaaacaatcacacaccgtatcccttgttttgagtttccgaggtcagaacatggcctgcgccgaaaacagacaaccgaaggttcctgttttcctctgtttcttctcatttacgtttgttgccagcgttttgctgaattgcaaccgggtttcggggcagacatccgctgtttttgcctgcgatgttgcgaagaacccggctttggcgggttatgggttctgtgacaagtcactctcggtggaggacagggtggctgatttggtgaagaggctcacattgcaagagaaaatcggaagcttggtgaattccgcgaccagtgtaagtagacttggcattcccaagtatgaatggtggtctgaggcacttcatggagtctccaacgttggacctgggacccacttttccagtctggtgcctggcgccaccagttttcccatgcccattctcactgcggcgtcattcaacgcttcgctctttgaggccattggaagagtggtttcaacggaagccagagcaatgtacaatgtggggttggccggtttgacttattggtcaccaaacataaacatattcagagatcccagatggggaagaggacaggagacaccaggggaagaccctttgctaagtagcaaatacgcaacaggatacgtgaaaggtttgcaacaaactgatgatggagactcaaacaagctcaaggttgctgcttgttgcaaacattatacagcctatgatttggattactggaaaggcattcagcgttacaccttcaatg

SEQ ID NO: 139486 - DNA, 272 bp, Glycine max
  Clone ID: PAT_MRT3847_96965C.1
ggatctttttgaacacaaagatcccttaaaatttcaaccatgtccggttacccaaaccagcctccaagttacggttacggttacggggcgccgccgccgcccaatccttacggggctcttaagccccggaattcttacggggggccgccgcccgttaagccatactccgaagggccctacgcccagccgtccgccccctacattaaacctccgaagaacaagtcccactccaccagggggggaagcggggggggttactcggaaccgccggt

SEQ ID NO: 139487 - DNA, 529 bp, Glycine max
  Clone ID: PAT_MRT3847_96966C.1
agtttccgtcatcactgtatgacgtcctccttctttgggggggggggaggggggggagaccaatataacctgtataaatctgcaggaaggaatagccaaaatgataggcccacgggatctaaatgaaccgagatacgccgtattaatccgtaatatggaagaaataatataaacgcacagactcttaagcaggtgataattatgattaaaaaggaaggtaaatatgcctactactacagaacggggtacgaggtgacaatatataacacgagttagggatactagctggagcgcacacaacctaattgatcgaacaaaggtattccactacgtcatattgcgtgttcaagtaccccacattgtagtaacgaaaagttacgtacaacaagacgtacggccaacccgcgcatagataatatgagagtacttataacgtacaagattagcaatagcatccacgtatcaccagtatcttaaggtataacactggccagttgtgtgttgcacgactgaaagtgctgataatatg

SEQ ID NO: 139488 - DNA, 284 bp, Glycine max
  Clone ID: PAT_MRT3847_96967C.1
agcgatgagaggaagacaaggagcgggagcacggaggtaggatagaccctatacgtcttgctctataacttttggtgaaaatagaacggtggtatgattccgaatattcgttcgttcctgtttgaaattccaggacgatgccatttgagacctctctggtgtttcatcctaatactgttgatgtcttgtccaacagatatgtaacctaccgtttgagagacaccgcccatgatgccgatttcctctctgcacattggtaattattcttattctgtgtgtgaatg

SEQ ID NO: 139489 - DNA, 237 bp, Glycine max
  unsure (1)..(237): unsure at all n locations
  Clone ID: PAT_MRT3847_96968C.1
ccacgcgtccgctatttccttgcacaacacaacactgaactcaggctcaggtggttaattccaagtctccatcacgtttctgtttcagttattctcttcgttcgcgacgcggatcactttatctgtttctgaataggttcccgacgtattttgacagaggatggcttcaagattctggacccagggtggaagtgattccgaggaggaggagagtgattatgatgaggaggntgatac

SEQ ID NO: 139490 - DNA, 307 bp, Glycine max
  Clone ID: PAT_MRT3847_96969C.1
acggctgctgagaagacgacagaagggtcaactactctcagcatcaatcacaaaaccctgattagctgattccctaatgagttggaattaaatggtcatacttcagatttattttatgtacgagcatgtgtgatgtctcaaatgaaatacagatttgatatttttttaaaagaggtgtattccgaaaattagatagcaaattatctagacgaatgtcctaacccacaaagtccaattgattaaataacagtataagttaacaataacattaattaaatgaattttatagaaaagaaagagtgaacac

SEQ ID NO: 139491 - DNA, 525 bp, Glycine max
  Clone ID: PAT_MRT3847_9696C.1
ttgacgcgtgggggagtgcctatggccatggtgttaaactgtccaagggaaagcatgtaccccaaaatctcctatcatgatggatggatgaatactttctctgctataatggccggagatgacatgagatcagggataccttacagtgaaatattgcttgaagctgatatgaggataaacatggatccttccaactgtcttgttattgaagactctataactgggtgtactgcacgaaagactgattaaatggcagtcaaaattgtacgatgacttgcagaacagttgcatctatatactgcggtaaatgaggtgatcaataccgtacttgatttgccactcgaaaagtggggtatgcctacattggctgatagagtggtgggaactctgctggtagacacttgcgatataggtgtggctgttgtccagggattgatacatagctcaatggtacttgcgatccctacatccgatttatctacagagggctgtccagatctactttcatagtatgctgcaggtgtt

SEQ ID NO: 139492 - DNA, 436 bp, Glycine max
  Clone ID: PAT_MRT3847_96970C.1
ctcgcatctttttaaattaattttattttctggctgtcaaatgcttttcttcgcccgacttttctttttgctaattttctttctctccaccacaaatggcacaaccgaaacaacaaaaaatgcacaatcggcgccggaaaagaaaaggctcaaaattctcgtctattcggtaatccccgcgcacagtcacatgcaatttatgggcgcaattgccgactcattggccgaggcggggcacgaagtgcatttcatcaaaacaatgaacgacgagttgcaatggatgagcaaagccgagagcaacgagaccaaactgtccgtcaaagtttatcgggttgagctcaagtcgcgcgaagcgactgtagcgagttcggatgtgctttatccgaccagtgggggcaatgcgtggacaatgctcaacgcatgggacaacagattc

SEQ ID NO: 139493 - DNA, 192 bp, Glycine max
  Clone ID: PAT_MRT3847_96971C.1
ctttcccattcgcattcctattcgtcagttacattttctatacgctcctgcaaatacccagaaacttgcatgctgcggcagataagcgccttctgtagtcgtagggctggaacgtcgcagtcgaacgcgcacgccctggtccaaaaaaaaggaagcttctcgcagaaaggcacgaggatagggaagaccccc

SEQ ID NO: 139494 - DNA, 301 bp, Glycine max
  Clone ID: PAT_MRT3847_96972C.1
gatacgcgtttgtagaatagagaagcagcgcgcattaggattctcaaaagcttttaaattctgacacggctactatgaagaaaaggcaccaagcttagttggcaagaacagaatcaacccatactccatggaatggactggtgtggccaatagattactgagtaagggcaacgatattgtgagtcgcgactatgctagttttgagggttagatgaccacgcaagctatgagcaagatggcatacaagattaacagcctctgcgggggtgatgaaaaactgatgcgcgaaatgacacacctg

SEQ ID NO: 139495 - DNA, 114 bp, Glycine max
  Clone ID: PAT_MRT3847_96973C.1
gaattagatactcgcttacaccagttgtactcagatacgttcgtcaatcactgtgcatggcacggcaccacctctgcgggatctatggttcctatgacacagaggtcgctcagt

SEQ ID NO: 139496 - DNA, 798 bp, Glycine max
  Clone ID: PAT_MRT3847_96974C.1
acgaaagggaacaagggcacacaaaaaacaattaacaaggccttttagagataaatttttcttgagggaagaaaaacattagaacataaccttttagagctagtacatacaagttctcatttgcaagctcatattttcttttaaataaccctttctcttaaaattagaagcaaaaatggatagggtaagagagttggcatcaaagaaggcagcagttatattcaccaagagttcatgttacatgtgccacagcatcacgcaactgttctatgagcttggagcaagcccagcagtgcatgagctagacaaggatgcatatgggagggaaatggagtgggctttgaggagcatggggtgcaacccttcagtgccagcagtgttcattggtggaaaatttgtaggctcttcaaaggatgtcatatccctccatgttgatggctctctcaaacaaatgctcatggctgcaaaagccatatggttctagtactcaattatatgctccttaagatatatatttacatgaaggagctcttatatatatacaatgttttaagtcaagggacaccccttctttttcttgagtgtcctctttagcttgtgatgtatcaaagaggaagtctgtataaaaaaaaaaatgtagtcttgcttttttggtatgtatgtattttatataaggctggctggcttactatatatatagctaatgcctaccatgttatgaaacttgatcatgtgggaggaaattaactgatgctcctactttacttaatgcaactttgaactttcttgcctttatct

SEQ ID NO: 139497 - DNA, 704 bp, Glycine max
  unsure (1)..(704): unsure at all n locations
  Clone ID: PAT_MRT3847_96975C.1
ggccttttagagataaatttttcttatatttctttcattattagtagctaaaatggatagagtaagagagttggcatcaaagaaggcagcagttatattcaccaagagttcatgttacatgtgccacagcatcacgcaactgttctatgagcttggagcaagccctgcagtgcatgagctagacaaagatggctatgggagggaaatggagtgggctttgaggagcatggggtgcaacccttcagtgccagcagtgttcattggtggaaaatttgtggggtcttcaaaggatgtcatatccctccatgttgatggctctctcaaacaaatgctcatggctgcaaaggccatatggttctagctagtactcatccacactccaataatataatataagaagctgctagctccttaagatatatatgaaggagcatcttttatatatatatatatatatatncaatgttttaagtcaagggacaccccttctttttcttgagtgtcctctttagcttatgtatcaaagaggaattctgtataaaaaaaaatgcagtcttgcttttttggtatgtattttatatataaaagggtggctagcttactatatatatagctaatgcctacaatgttatgaaacttgatcatcatgttggagaaaattaactgctcctactttggttaatgcaactttgaactttctggcc

SEQ ID NO: 139498 - DNA, 230 bp, Glycine max
  unsure (1)..(230): unsure at all n locations
  Clone ID: PAT_MRT3847_96976C.1
ctcttctcttctcttctctangagtgtaatattgttgctgtggttagnccctccgtgacactcacttgtttgtaacacgtggaggtgaggtgtataggtacataattttgagggagacatttcagttccattaacgttacaaaatatctgatgcgagcgcgtctgttaaagtcactaggtctaacatattgtatacaccaagttaaatcccgcatttcttatatcatgat

SEQ ID NO: 139499 - DNA, 279 bp, Glycine max
  Clone ID: PAT_MRT3847_96977C.1
tgagccgggaatcgaactcttggttcattgggttcaacaccatatacaatgcaaaaaaaaatgcaaaagttaattgcatcacttcacataatgaaacagatttttacagagtactatataattaagtgttatatgtataagtgccccctatctactacacattgacaatcaatcaactcgatacggtatgtctatgtctcaaacttgggatgatggggcacgttcaggagaacaacaatatggcagatcttccattctgaaaattaccggacgcgtggg

SEQ ID NO: 139500 - DNA, 493 bp, Glycine max
  unsure (1)..(493): unsure at all n locations
  Clone ID: PAT_MRT3847_96978C.1
gtattccttatctgctacgtgattatgaacaacaaaacagtaatattttatttttgtctcttgaatcagcatattattattttatacacaagtggatgaaatttgaatgataagcgagcaagtgatgagagtttacttgggattatgagaagctcgtctatttgcgagcgatgtttatcctcatacttccatgactctgatgctcttatggattgttctccttcatccaaacacatatccgtagcgtagcactctattattttattgttagcaaaatccagtagatggaattttgaaatttggattcttttgttatgcgggtcggctgttaagatggctttcgatgaaatcgtagtcctgtgactgtttcagctttcgcaaaggaagaatgagccaacaccaagataggtcttttgggatcaggccatttgaattgacttttcgattcacaagctctttgactntacatcaaacataccaattaccaaaatta

SEQ ID NO: 139501 - DNA, 108 bp, Glycine max
  unsure (1)..(108): unsure at all n locations
  Clone ID: PAT_MRT3847_96979C.1
aataatggtaancatccaaaggctcatcagagcacttgtagcccagcccccggcatggggcacctcattcccatgctggagctaggccaaacgccttccttcactcac

SEQ ID NO: 139502 - DNA, 240 bp, Glycine max
  Clone ID: PAT_MRT3847_9697C.1
tttgacgtcgcttgcccccttccttaacctcggattccggttcagcctttgtttccctggatttcttgcattttccaaaatttacttttgggggcaccaccctttcaccaggattcctcttcttttgttgcccattaccccttttccaaggccttgtttgtgacctccaaaattttgtttccaaagtctttccctaatttggtaaaaatttgaatttgatcccaagggattgggaaactt

SEQ ID NO: 139503 - DNA, 424 bp, Glycine max
  unsure (1)..(424): unsure at all n locations
  Clone ID: PAT_MRT3847_96980C.1
ccacgcgtccgcaatgtcttcacacccatcattctttttcctcttcttcttcctgcttctcaccctcccacattattcctccgagtacctcaaattacccttacttcctcccacccccctcccctctccctcccagctccttgccgccgacctccgccggctctncgtcaaggcccccctcacctccggcgccggcactgggtcangccagtacttcgccgacctccggctcgggtcccctccccagggcctcctcctcgtcggcgacaccgggggggacctcctctggggcaaatgcgccggctggggncggaactggtcctcctccatctncggctttctnccccggcagtggggctgcttttgcccccaccactgctacgactcggcggggggacctcggccccaccccccgaggggcaaa

SEQ ID NO: 139504 - DNA, 254 bp, Glycine max
  unsure (1)..(254): unsure at all n locations
  Clone ID: PAT_MRT3847_96981C.1
aatctttctgtgtgttatggggtacacatctcattgtcattaatttgttcatattcataatgtcctatctttgtatttacattatgaattcatgtttctgcaattagtagttgaggagattgccttgattgtnntatcataactgaaacttggaaattgtacgaggttacttctaggactgaaattcaaattaatttatgtttctagntagtcctcaggatggttggaaggatattaggnatttagggcctgtt

SEQ ID NO: 139505 - DNA, 257 bp, Glycine max
  Clone ID: PAT_MRT3847_96982C.1
tagctctcacattatgtgctccttgttaagatctgcggggcgagtcatcttaaccaaccggaaaaccatcaaatgatgaacacctaccattactatcgacaccattagacgaacaccttcacacatctcacaacacacaatcatctcattaccgatcgctatcaaaccataccgattaaggctcatcacccactcttgcattaacacaaaattccgattctccatgcaccccaacatgaaatctcaaccttaattaa

SEQ ID NO: 139506 - DNA, 120 bp, Glycine max
  Clone ID: PAT_MRT3847_96983C.1
cgcatagcacgcgtcacgtaaagtctcggatattcggactcgacgggtctggtacgcagacacctgtctgatatgctcttgtatgggtcggtgcactaagcatgtctgtgttagtgtaac

SEQ ID NO: 139507 - DNA, 1330 bp, Glycine max
  Clone ID: PAT_MRT3847_96984C.1
tcgtacggctgcgagaagacgacagaagggggccacactcatcatattccataagcatcttcttccatcaccgcattattcatcttttctcttctcattcaccaattcacaattcattttatttcttaagatgccaactgacacgtcatcagtttccggcggcgaaatcgtgtgtgtgaccggtgccggcggtttcatagcctcttggcttgtcaaacatctcttagagaaaggctacactgtgagaggaaccgtgagaaacccagatgatccgaagaatggtcatttgaaagagttggaaggaggcaaggagaggctaactctgcataaagttgatctcttcgatattgactccattaaagaagctcttaacggttgccacggtgtcttccacactgcttctccagtcaccgacaaccctgaagagatggtagagccagcagtgaatggaacgaagaatgtgatcacagcagcagcagaagcaaaagtgcgacgggtggtgttcacttcgtcaattggcacagtctacatggaccccaatacgagtagggatgcgttggtcgatgaatcattctggagtgatttggagtactgcaagaacaccaagaattggtattgctatggaaagacggtggcagaacaaacagcatgggatgtagcaaaagagagaggggtggacttggttgtggtgaacccagttttggtaattggaccattactgcaacccaccattaatgctagtacaattcacatcctaaagtaccttactggctctgccaagacttatgtaaatgcaactcaggcttatgtacatgtgagggatgtggcattagcccacatacttgtttatgagaagccttcagcttctggtcgatacatatgtgccgaaagctcgctgcatcgtggtgagctagttgaaattttggccaagtttttccccgagtacccaattcctaccaaatgttcagatgaaaagaacccgagagtaaaaccctacatattttcaaatcaaaagctgaaagatttgggattggaattcaccccagtgaagcagtgtctatatgacaccgttaaaaatctgcaagagaatggccaccttcctgtccccccaaagcaaaaagattcctattgaagttagatcctacctagctaggttgccataaattaattaacaagtttaattctggtacaaattacaattgtagttgttaatcaatttatatttaatccttagaagtacgtattttcagtttttaagacacacaccacacaaattgttgccttttgtaaaagtataaccgataacattaatggattatattttgtcccc

SEQ ID NO: 139508 - DNA, 194 bp, Glycine max
  Clone ID: PAT_MRT3847_96985C.1
ctcaagccgaagggagagaatacacaaattatttcaatctggggttgaaagtggtgctacactactgcttgatggaacaaatatggtgctcccaggatatgaatctggcaatattattgttccaaccatcttatctaatttcaacgccaacatgcattgctacatcgaatatacttctggcccacttcttcttt

SEQ ID NO: 139509 - DNA, 450 bp, Glycine max
  Clone ID: PAT_MRT3847_96986C.1
aattcggctcgagctgcgagaagacgacagaggggaagacgaaactgtgctgtggatacattactttttcgtggagtagattaattaatctatgatatctaacatatatcccttttgtagtaattatgagaatttgtggtaagtattataagtattataagccgcagttcttatttattccagattaatacttgacaacctcaacaatatatctatatatacaatctacatagatatatatataatcgaacgtgaaaataaacaatgaattgttgattgaataaggagcatgtggattatatagaaagtgacgggcaactgtcatctttgtttaccatgggtaaggacaccatcgctgacatattatcctatgtaggaaatgctgacatgaataaaactggagtgggtcataaaccatttactaacgtaacagaagacattggcaaagta

SEQ ID NO: 139510 - DNA, 116 bp, Glycine max
  Clone ID: PAT_MRT3847_96987C.1
agctgaaaaagctgctgcagatgcaaaggacagggaaacacgggaaagagctacagctgcaacggctgaagcagaagcatgagtgacaggaggacgtgcctccgtacaaagggctg

SEQ ID NO: 139511 - DNA, 178 bp, Glycine max
  Clone ID: PAT_MRT3847_96988C.1
gttaccttcgttcttttgtattgacccaagaactcttgttgccgagttgggcttcacacacattgggcatatgcctgcatgttttgagatatagatgccattggggcccaattgttcttttcatgactgaaaaaaggctaccgtcatgagaaggttttagatttttgaaatgtgccca

SEQ ID NO: 139512 - DNA, 228 bp, Glycine max
  Clone ID: PAT_MRT3847_96989C.1
ccacgcgtccgcacatttgtacggtgtatacaaatgttggtggattactcagaaatgtagcaaacagggtgggtcaaaagacttcctgactgtggtctatcatcaatctccccatcgaactttttgtgacttttatgatatctttaactaaaataatctgtactattgtgctacttttatatacattacacttgaatatgtgaaaagcttcttccaacgggacacata

SEQ ID NO: 139513 - DNA, 309 bp, Glycine max
  Clone ID: PAT_MRT3847_9698C.1
ttaaagccgactttcattctgttgtttttatagtacacgacgccaggaatgcaaccaggtgatagtcaaaacagtgaacgggagtttaagggacactgcagacgcgcatgaagaactaggcggcgctctaccttcggtttaggctaggagttattcaactggtcgggtggggccacatttcagatcgttgatcgaatatcctccgtaccctacttactgtgcgaattagcttgcttgccttgctcaggatcactctggaacccggcgacgtagttgccatactcgggcagggagggggtctgaagctaa

SEQ ID NO: 139514 - DNA, 706 bp, Glycine max
  unsure (1)..(706): unsure at all n locations
  Clone ID: PAT_MRT3847_96990C.1
agaacaggtaattgaaatattgaggtccgattgacctgtgctgaactaaatatatatatatatatcctccaaccatccatgttgtatatacatggttagacttgattcattatataatcaatcaaacgacctaaataagagtgggaacatccaccttataaggaagtcgtcctacttttttcactcatttccttgactctcttctttgtgtctagatccatgtccatcagattccttattccgttttgtatcttgtccgcactcaaaagagtgttaggtccagccatgaactgcaccctgtaatccaacgcaatctccacagccatgttgagctcacggaccagtaaaaatgcattggtctgctgttcggcgtagagcggccaggtggcaatgggcacaccaaaatatatgctctcaagggtagaattccaaccgcagtgggaaacaaagcctccagtggccgggtgggccagtatttgggcctgaggggcccatccgatgacctttccgattcctgccgtccgatctaggaagcccgggggtaaaatttcaacgaaatcggagggaaggtaatcagagggcatggccatgaaactggaatcacnnnngggagnnntccgcagggaccataggaagnnnannnnnctntcctgaagagcacgtgcnntctccctgacctgncnntctccaaannanccttgctccc

SEQ ID NO: 139515 - DNA, 389 bp, Glycine max
  Clone ID: PAT_MRT3847_96991C.1
ttactcgcccggaatttcctatcaaccgcgaccacaggttgccgcaccttaaaaccggtaacaaaagcaatcgtttcttgattacaagaattgctcaatttcttcctacttcttcggccgatgcttgagggtacgaacccactctctgtgctggtcacagactgcgtgaaccagctactcttccactcttagtttatttgctgaacactctcctattcgatgtaggactccgcgtcagatttaaacttgcctgtggtcttgctcagttctctgctcaatttcaagttcaagctggagaaattctggatgagtgctcccactctgctatctggtctaggacgtcgtgggcagactgtgctatgcctctcctttgtttcactcttctcttc

SEQ ID NO: 139516 - DNA, 463 bp, Glycine max
  Clone ID: PAT_MRT3847_96992C.1
aggaaggagagcttattttcattcttgccttgctagatttatctatcatacgctatcttgtacatagtgtgtactctaccgaaaattggcatattatgcttgcaagggaactaaggtaatcaaagttaggattgtttcctactaccatacatgcgtaaagcggggaaaattgcaacgcttaaattacaaaggttaattcccatctgaccctcaaacgtattctttcaggtcacatggtttgatgactgctctattggccctagctcctaatggcaccctctgctataggcgatgactctgcctattcatcctgctgtggagcctgagtagatgccatcggggcaccttgagcatgtgatgccgcttgaggaggggggggctgccttatatcgcctagcagggatggatcccctgtatcacactctacgggatatcacacatgctgctggaaagctctctctgc

SEQ ID NO: 139517 - DNA, 878 bp, Glycine max
  Clone ID: PAT_MRT3847_96993C.1
tttggatttcagtttttcagtttcttcctcccttttctgcaaaattatctaaatctatttctgatctcagcttttcccttgaaagatgggaggtggtaaggacaaacacaatgaagaagagaaaggagttttctcacatcttgctcatggggtagctcaagctgctcatgggtaccctcctggggcataccctcctcaccaagggtacccacctggtcatggctaccctccacaaggcggctatcctccggctggttatccccctgctggctatcctcctgctgctggtggttaccctcctgctggttaccatccacatggttatcctggttcatctgctccacatggatctcatgcgcatgggcatggcggtatgggggcattgcttgctggtggtgctgctgctgcggcggctgcctttggggctcaccatgtttcccatggccaccatggatatggtggatatggacacatgcctcacgggaaattcaagcaccatggaaagttcaagcatggaaagttcggcaagcatgggaagtttaagcatgggaagtttggcaagggtatgttcaagaagtggaagtgatgatatttttctgtacatacaaaccgcgattctagatgctgctgcggattgcttttataataaactctacttttgttcgatgtccatctatactatactttggtggaactcttctagtatttttttagacaaagatgtagcaccccgttcatattctagaaagtgaacggcaaatagatgatgcactagatattatgtgcgagcttgtagttgctttagcaaagcatagacttgttcatgccttctctttttttctgctgtgtatacccttttaattttagcctttgttgaa

SEQ ID NO: 139518 - DNA, 341 bp, Glycine max
  Clone ID: PAT_MRT3847_96994C.1
ccaaagaaaagcgggcatttaataaaccaaatcaacacaggcgcgatgaatgtcctgaaacttcgttgcgcttaacaaaaatgtaatcaggggtgccttccatcacatccctttaatggcacccataactctaagcacttttcgccccggctatcaagaacccagttttggaaacaaccgttttgagatgatggcggaaacttcaaactttgggcgaaaaaccagctccctccaaaagaagacccttgagctcagaaaagaaaacaacatttattgtgacctacatcctctgaagaaccacgccgtacgaatcaattttttttttgggcaacctttgtgac

SEQ ID NO: 139519 - DNA, 470 bp, Glycine max
  Clone ID: PAT_MRT3847_96995C.1
agctcggatgcggctggagttaattccaaattagaatcctcaaattccaaaattgaaaaggtcaagatgactggtacaggatctccttgtggagcctgcaagttcttgagaagaaaatgtgtgagaggctgtgtttttgcaccttacttttgccaagagcaaggtgctacccattttgcagccattcataaggtctttggtgcaagcaatgtctcaaagctcctcgctcaccttcctgtgagtgatcgttgtgaagctgctgtcacaatctcctatgaagctcaagccagacttcaggatccaatttatggatgtgtctcccatatttttgcactccaacaacaggtggtcaatttacaagcacagctagcttaccttaaggaacaagcagctcagagttgtctcaatggcactatcaatgaaaaccctaatgaaaaattattggaaaaatcttctgctgctttacccca

SEQ ID NO: 139520 - DNA, 219 bp, Glycine max
  Clone ID: PAT_MRT3847_96996C.1
gcttagcaagcctacatataagtggaaacaatttctgtatactgcccaccctcaaggagcttttcaaactgttacatttaaacttactacactgaaagcagttgagacatctgcctgagcatcattcatgatacgacttgccatcagctacttacatgctgccatggataacatatctatctagtggcagagatgcatgattatacatggtcaactgct

SEQ ID NO: 139521 - DNA, 359 bp, Glycine max
  Clone ID: PAT_MRT3847_96997C.1
gagctcatttagtggtggccgcccttcttttttttttttttgggtttttttaactttattgtggggttatacaaccaaccccgccacaagaacccaagggtggaaagtaccataggggtgaggttaacaaaaagaacgcttataaaagagtcggccttgtaacaaccgaagagaggcccggccaatacacaaacaggggaggttccagagcaagctgacataagttggcccaacaggaaaaggggggttcatgggcgatctatatgaaggaccatcccaaaagattgtaggaagccgaatggaaaccaaagcgaaggggagcattaaatcctaaatatccctaattggggccaatgggg

SEQ ID NO: 139522 - DNA, 341 bp, Glycine max
  Clone ID: PAT_MRT3847_96998C.1
aagggaaggatgggccgtacatatctggtatgaaaggcccaaaaacagatgggacccctatctgtacatgtgccatatctggcaaactaagggaagattttatgatctacccagggacaagttagccttgaaagggttttgggggcaaaaagattttaaaatacaatacccccaaacaaacacacaaattttttaataaccttttttttttagtttgcaggaacaatacccggctgaataaaaaggtgttcaaacaaagatgagaggcgagcaacttttgcttttaccttttaaaaacattcagggtaatgggggccggggataaaacggggggcttttta

SEQ ID NO: 139523 - DNA, 304 bp, Glycine max
  Clone ID: PAT_MRT3847_96999C.1
caccgattaataaaccaatagatatactgtctatggcggagaatcataccggtagtccagcaccaactacattagtgtatctcctgggatcacatgaaaggaaactacattgtctactgacaccaacctaggtccaatacgcttacagaaactttgttatgcaaagctcacgcgagtaaatatgtcctacatcaacattcattaataaccctgatgttatgagtactgtgcacttcgttttcagactgatatcttgatgctccgaatcttatattattctacgcatgatctaaccttccacctc

SEQ ID NO: 139524 - DNA, 622 bp, Glycine max
  unsure (1)..(622): unsure at all n locations
  Clone ID: PAT_MRT3847_9699C.1
cgaagatgacttaaaagaattaatttgtactacctgtactaacaagatgcatacattttaagaataaaatattttaagaatgacaatatgacatatctatggtatattttaagcataatgtaagaatgacagtgtgatatggaaagtatacatccgtttcagtttcagagggtaaatgattgcatgtagcaactcagaagcctacccccatctctaacattctaacccaatttggaaatattattcaatattgtagctgtttgtggaagctgaagctgaggtattgttgactggtgaaattttgtcagcctctgaagttgtactatcctgcttggatgttgaatttgttgaattcttgaggaatcatgtttgctggccattcaagccaattaattaataattaaaacacatctttcaagccaaattgttccataactaccaagtattgagcaagcatgatggtccattgtaaactaggtaggctgaataaattccaaattctgttgacccttgaaacttgcatagtgcgggacaatcagaacaaaggggtgaatgcattcctttttttttccttcactttatcatggatgagggctagatgnactttcaaattattctttaa

SEQ ID NO: 139525 - DNA, 470 bp, Glycine max
  Clone ID: PAT_MRT3847_969C.1
ttttttttttttttttttttttttttttttttttttttttttttttttttttttttttttttttttttggccaaaaacttcccttccaaactattataaaaacattaaaccaagaaatattataaatccaaaaaaaaaatccctccctccaaagttttataaaaaaggaacaaaggggggggcaaaaaaaggggcacctaggagctacgggctaaagggttacaaagggccaaaaggaatttttaacaggaaataccccctttacaaaaattggcaggccccaaaagccccaacaaatgcaggttaaaggaacaggtttttacggaaatctccccctgctcccgggaaagccatgcaaagggaaaaaatggctttaagggaaacccctgcacctttaaaaatataccccacatctacccctgggaataaacagcttttacggggggttacagccccaggagaggcagagg

SEQ ID NO: 139526 - DNA, 345 bp, Glycine max
  Clone ID: PAT_MRT3847_96C.1
agataacactgagcatcgtctagctatctcgatcgaactgtccaaggtcctgtcactattttgctgagcgagcgacttagttacctgcggtgggtatgggagctaacgcgcgtcgataatgccgaggcacggccaggtgccacagccgcagtacttatatgcggtttgagtgagcacccggagctttgtttataggttagttggtcgtggcagtgcctgccgtcgcattgtatacagggtggcaggaaaagtggcatgcacatcgccggaggttggtattattgtacttcagtcccaaaggcgaacccagcgcaaacaaacgtgggtggataggctttggcatga

SEQ ID NO: 139527 - DNA, 506 bp, Glycine max
  unsure (1)..(506): unsure at all n locations
  Clone ID: PAT_MRT3847_97000C.1
aaaatattttgttgtcagaaactgcctgcctaatgtcaagtcagatatgcttttgtcagcatggaatcctccatccgaatggggaaaatagagatttatccccttaagatccatttaacagagacgatgtacagaatgatgtgggaatatttcttcccagaagaagaacaagattcccaacgtcgtcaggaggtttggaaggtttcaaccactgctggtgcaaggcgtgtaaagaaaggttcatcagttcttgaagcttctgcttcaaacagtcacacaacaaaagagtctgaggcttcatccaaatctggcatatctgcaatgctatttcccacatcaagtcagcctccagcccatgttgactcagctcaagcatccaaaacacaaaatgtcaaagcaaaccctggcaatggtgcaacccccgagttgagaaggacatcatcttttgacagaacttgngaagagactgtggcagaatctgtagctaatgaacttgtgctacaaag

SEQ ID NO: 139528 - DNA, 2528 bp, Glycine max
  Clone ID: PAT_MRT3847_97001C.1
acacaaaggttactacatgatgatattcgaaaattgtctctttggtgtaacccttctgtggatccacatcaagaaaaggaaagtgaattatggatgatatctggtgggagatctttgttggtccagggactgaagagagagcttgtaattgctcaaaaatctagaaaggcagcatctgtgtcattaaggatggctcttcaaaaagctgcgcaactacggctaacagaaaaggagaagaacaaaagtccttcctatgctatgcgcatatctttgcaaatcaacagagttgcttggagtatgcttgttgatggtaaatcctttgctgaagctgagattagtgacatgatatatgactttgaccgggattacaaggatgtcggcattgctcggcttacaactaaatattttgttgtcagaaactgcctgcctaatgtcaagtctgatatgcttttgtcagcatggaatcctccatctgaatggggaaaaaaagtgatgcttcgagtggatgcacgacagggagctccaaaggatggaaattctccccttgaactttttgaggtagagatttatcctcttaagattcatttaacagagatgatgtacagaatgatgtgggaatatttcttcccagaagaagaacaagattcccaacgtcgccaggaggtttggaaggtttcaaccactgctggtgcaaggcgtgtaaagaaaggttcgtcagttcttgaagcttctgcttcaaatagtcactcaacaaaagagtctgaggcctcatccaaatctggcatatctgctatactatttcccacatcaagtcagcctccatcccatgttgacttggctcaagcatccaaaacacaaaatgtcaaagcaaaccctggtaatggtgcaacccttgagttgagaaggacatcatcttttgacagaacttgggaagagactgtggcagaatctgtagctaatgaacttgtgctacaaagcttttcttcctcaaaaaatggccaatttggttctactgagcaacaagatgaagctgctaagaataaatcaaaagattcaaaaggtgtgaaaggtggtcgttcatctcatgaagaaaaaaaggtggctaagtcacatgaagagaagagatctaggccacggaagatgatggagtttcacaacatcaaaattagtcaggttgagttactggttacatatgaagggcaaagatttgttgttaatgatctcaaattactgatggatcaatttcatcgaaccgagtttactggaacttggcgaagactcttctcgcgagttaagaagcacatcatctggggagtcctaaagtctgtaactggaatgcagggtcggaaatttaaagacaaaggtcagagtcagccccctggtgctggtgttcctgaaattgatcttattttaagtgacaatgaaggccaggcaggaaaatctgatcaatatccaccatcttggcctaagcgtccaagtgacggtgcaggtgatggatttgtaacatccattagaggactgttcagtactcaacgtcgcaaggcaaaggcatttgtgctccgaactatgaggggagaagcagagaatgattttcaaggtgattggagtgaaagtgatatggatttctctccttttgctcggcagctcacgattacaagagctaaaaagcttattaggaggcacactaagaagttccgttccagaggacaaaaaggttctacttcacaacagagagaatcgctaccatcatcaccacgagagccaactccatttgacagtgattcttcaagtggatcctcaccatatgaagattttcatgaatagaaatgttgtcatctaaaggatttcttacttttccgctgagcatgacgcaggttacatctagttcttaaatactctgaaggtagggcctcggttgaaagctatagacatcttgaacagaggggcgcttggaatggaaagagaacttggggctatgcatgcatggttgatgttgattgctattcattgtgtattttctgtcgcaacccaagtcatgagtgaaaaagagccttgcttgctttcatctcacacctaacatctatgcaacatcgctcgcacatctaacatttctattccttgacaacttcagtcaccggtgaagagccatgcgttcatctcttaacgtgttttcgggttgtatattcctgtagcttctggtcaatgttcaatttttggcttcttaatttatgagaaaataggagcctagaggttgacatgattatgtatatacatttgattatattttggaaaatagaataaaagcaatatctttttcgcagagatccttatttagaattaaaataaaattgatggacacaaaactttgtataatgagagattattctaaaccatttcccaaaggaataatgcttgtgtagaaaatactgagctgcaggatatttattttagtacattttttttgtgtgaatatttagtacattatcctatcaaaccaatacagagcattatccattatcttctcagag

SEQ ID NO: 139529 - DNA, 187 bp, Glycine max
  Clone ID: PAT_MRT3847_97002C.1
gcttaccaaatagtgaaaggaacatttcacctagtaaaagaagttacaaactaactcaaatatcttgttgaagaggggaggggtgagttaattctaacaacacatcgtgtgttattcattgaaattcacaaaaaattacaactttacatcgctctcatttctcatttaacgctcaccctcttacctt

SEQ ID NO: 139530 - DNA, 315 bp, Glycine max
  Clone ID: PAT_MRT3847_97003C.1
ctctgcgctctttctctccgtctcctacaattcgagttgcggcttttgttgccctaatgtcaaccatgcctcgccgtagctcctgtggaagatctgcccatactgctcatcgggctgctcctacgaatgctccaattcaccatgctccttctacagccactgctcatattggtggtggatctatgctagttggcattggttcaaccatagctcaaggtatggcttgtggcaccatacgtgcagtggcactcttgtctgcacatgcagacatggctccgcttatcagctcacgtgcatcagttactacataggctg

SEQ ID NO: 139531 - DNA, 368 bp, Glycine max
  Clone ID: PAT_MRT3847_97004C.1
ctaatccccaaacagatgtttttctttttccggggccccgggagcaccggaggaatcaatattgaaaggaaaccacaaaaaaagaccggggccccctaaaaaccccccccccccaataaggaaccccgccgccatgttgtcctttttcggccaaaagaaaaagtgggccccggggtttattttttcaaaattgggcatttttggggcaggattcgcccgaagtctaaaaaaaaaacggggagaacccatttggccccaaacccaaaaaaaaacaagttgttgaatatttttaaaatccaaggggacatgtttgaaaaaaaggcaaacaaaggctggagggccctcaaatgggggaaaattctcctctc

SEQ ID NO: 139532 - DNA, 398 bp, Glycine max
  Clone ID: PAT_MRT3847_97005C.1
gggctacgacctacgcgtgcgtcgaggaagtcagaccgcctgatggcgagtctcgaactgggcagcgtggcgattgggacgtgcgccatggaattggtcaacgaggagatccacgcgcgactgagcccgatcatggtatcaaccgcgcgtggtgaattaaactgcggctgcgttcaggctttgcacgatgtactacgaagattctcgttctgcagcatatgctgattctagttcgggctcggccagcgttgtctcctaccggatctcccaatcgcggacctcgacgtcgcgtttgacactggactcatagctgtgcgacgtacgcgccatgaacgcgtcgtcgcttattcggaagctgaaacgactcctcaacataggatccgagaggaaactgagag

SEQ ID NO: 139533 - DNA, 580 bp, Glycine max
  Clone ID: PAT_MRT3847_97006C.1
ctaagaaaaaaggtaaatatagaaaatgacctatatggccaaaagtcaagccttccaaatatcctagtaaaaaaaccaatagcttacatcttcaataactgagactcttggcatagtagaagtagtagcaccatcagcagaagaagaaactgagaaatattcaggtccaactaatccgcgatcaaaagtaaaatgaaacggcaacataatatttagttaccacaaaaatatcttttttcagttaaaacttaaaagagagaataaaataaatgtctacataaatggcccttcaggttgctaaagagattaaaaaaatccctgcacacaaaattaggaagaaaacagcatgcagaaccaccaagtctttccatagaatgcttccagaaaacaattcttattgttgcccacgcgtccgatgccctccttgtgtttgctgttgttgtatctgctggagaaggttggcagcaaactgtagtgttgactggtacctctggttcttatcagcctccaattctgacactccctggccaactccaaataaagcaggttgaggttgctgatttgtgggcactgaattatc

SEQ ID NO: 139534 - DNA, 242 bp, Glycine max
  Clone ID: PAT_MRT3847_97007C.1
ggctttcacttcgaatctccttcagatctttcagaactgcagccatcttgttagttggggtcttcacgattggatgctagtggtactgttggttgacacttacagctgtacccgcctgtgttctgactctgaggaacatgacttgtgctactattttaacgagtgaccctggtccttaccgtgttttgtttgctggaagagttatctctagaggtggggctgccgcctcattgtgagctcag

SEQ ID NO: 139535 - DNA, 605 bp, Glycine max
  Clone ID: PAT_MRT3847_97008C.1
aacaagagcataatgactgaatacaaattagttatcgtcggaggtggaggtgtcggtaaatccgctcttactatccaactcatccaaaaccactttattgatgaatacgatcccaccattgaggattcctacagaaaacaagttactatcgataacgaaacctgcttattagacatcctcgacactgctggtcaagaagaatactcttttatgagagatcaatatatgcgtactggacaaggatttatttgcgtctacgccattacttcacgctcatcttttgacgaaattagttctttcagagaacaaattctccgagtgaaagatgaagataaagtccccatggtcgttgctgctaataaatgcgatttggaatctgaaagacaagtgaccaccgctgaaggacaagacctcgcaaaatcttttggatgccccttctatgaaacctctgctaaagccagaattaacgtagaagattctttctaccaattagtccgtgaaattagaaaatacaaccaagctaaaaatggtggtgttgctgataagaagggaaagaaaggaggcaaaaaagctggttgctctcttttataaacgttcagcttttc

SEQ ID NO: 139536 - DNA, 594 bp, Glycine max
  Clone ID: PAT_MRT3847_97009C.1
aataagagtttcgtgccttctgaagggcggagattcggttccaacggcggcgggttcgagcgagagaggagggttgttgggttcggctccagcggcggcgcggattccgacaattggaacacaaagaagggcgagtccaacgttggtagcgagagtgttggtgggaggccgaagcttgtgttgcaacctcggacagtgtccgtgagcgatgaaggggttgatggcaataatgcggggaagcctaaaggtgttaatccgttcggagaggcgaggccgagggagcaggttttggcggagaaagggcaggattggaagaagattgatgagcagcttgagagcgtcaagattaaggaggcaagtggtggtgatgggtatgcaaagaggggttttggctcttccaacggtggtggaggacgtgctactttgcctgaaagtcgcactgagaggagttggaggaagccccaatttgatgatgatcgtcctaaaaggtttgtcattgataccaataccaacccaacacggtagtagtagtggtagttccctctatttcttcggacgcgtgggtcgaccgtggaacccggaaacggtacctgc

SEQ ID NO: 139537 - DNA, 460 bp, Glycine max
  Clone ID: PAT_MRT3847_9700C.1
gcaggtgtaaggctgtgtcgagtcgaaatggctgaagcagagagtgtgcagattcgtcaagtgacacttggaactgaaggccttgtggttacaaagttaggattgacgagtatgacccttattcgacgctataatgatacacttactgactaggaaagcatatctggtattaagcatgctttgatccaaggaataactctctttgacacatctgaagcatatgggctagaccatgctaactaatttttgctagggacagctatgtagcagttatctacaaataagatccaggtagccattatattcttcgcttgagcatcaaaatttactaattttaaaatcaaagacacacctgactatgtgtgtgcgtgacacgtagcacgcttgaaaccctttgatgtggaatacatagatctgtattatcagcacagggttgatcatgcacttcctatagaggaaa

SEQ ID NO: 139538 - DNA, 470 bp, Glycine max
  Clone ID: PAT_MRT3847_97010C.1
gcgtgaactactggttcaagctgttcgaccagcaccataaacaaaatgtagcacagattgccgccgaagcagtgatgcaacacaatttccaagcagagaatatggaagaggaagtgcagaaaatggaataggccagggttaatggaaacgatcagcagacgataatgacgactatggcaaatggaaataaccactgatcctcctcaactgctatcaattcctatggcattgtgccgtcagcggtggccggcgtgccgcaattgcaacacaacgcccacttttattaccccccgcctttgtccgccggtgcctcgcgttcgtgcgtcgatttgtattggtgcgctaactcagctagcacagcgaacctttaggacatcggtcaaacgccccaatctgtggaccaacatgaaacaccggccgaaggcatggggaccacaaatggcgggacgaacaacgcgatgtttggcaca

SEQ ID NO: 139539 - DNA, 762 bp, Glycine max
  Clone ID: PAT_MRT3847_97011C.1
ttgtttgatagggacgagaagaaagagagaaaacaaagggcggtggtgagtgcttctgcttcatcatcatcagagaatggcggctactgtgtcttctgcttggtcaaagcccggcgcgtgggccctagattccgaggaacacgaagccgagctccttcaacagaacaacaacaaccccaacgacaagccactcgccgacttcccctcccttgccgccgccgccgccaccaagcccaagaagattgatgagcagcttgagagcgtcaagattaaggaggcaagtggtggtgatgggtttggaaagaggggttttggctcttccaacggtggtggaggacgtgctactttgcctgaaagtcgcactgagaggagttggaggaagccccaatttgatgatgatcgtcctaaaagtgctgagaaagtggaagatgaacctgatcaaaaaaaggaagtggaagatgaacacgttgaaaaaaattgaagagctattaatttcttttggtccctgcagattgatcgataagagagttggaaacgaacactgaacctctaaaacttattttttgtttcccattgaagttttgtccgtctttatcttttcatgttttattgtgagagattaatactgaaacagttaagagacattttttgtagcagtgttggtagcttagtaagtcgttattatgaatatgtttgttgctaaatgttaccgtaatttcctccccacatcattcataatctatataagtaagcttggtaatg

SEQ ID NO: 139540 - DNA, 2670 bp, Glycine max
  Clone ID: PAT_MRT3847_97012C.1
ctatttcttcttgattacttgtttttgtgtttgagattgggttgtgcatcttttataataattaggaacttagggagattgattcagtgtctcctcttagctgataccagaatgggaaagtaaatgaactaagggctcagaactgttatcagggatgttaatttgctctttctaaccagttcccatatgttgtttctgtgtgcgcaatgtggtactttatctaatgcggatgagatgctagttataaccttcacctgtccgatgttatgtaccttttgtcagtagtattttcaactaatttagagtactgatttttggatattattttaaacagtttcttaatgacacttttggttactgacctttctttattctttatgccaaaatggtttttaagcatatagtggtgctgtctgtctctcctggatgagtggatgagaagaatgttattattattaggctgagtcatttagctagcctaagacttgattgattgttggaagatcttctgatggactcagtacacatttccatatttatcacttaagccttggtatatagtaaaaaaataacaacaacaataaaaatgataaatgtgttggtggtggaccccatcattaattaagcaagcttgaaatgtcatcatttgaatggaacggagcataatcctacctggtgcttagaacatgccataatttctatcttctcataatggagtatgtttgcgacttgttatttttaaccccagttgtaatgctgttgagcctgtttgctcttaaatacatcaccatattttgtctctaggtttaaaattgggtagttttcattaaaaggaaataatttttattaattaacaaaacaagaggtaattcgcaccgttaaaaaacattatggtctgatgtcatatatataagtgtccaccgcgtggccgtggtttgccgaggaaaaacgcaagctgcttgtttgatagggaagagaagaaagagagaaaacaaagggcggtggtgagtgcttctgcttcatcatcatcagagaatggcggctactgtgtcttctgcttggtcaaagcccggcgcgtgggccctagattccgaggaacacgaagccgagctccttcaacagaacaacaacaaccccaacgacaagccactcgccgacttcccctcccttgccgccgccgccgccaccaagcccaagaagaagaaggcccagacctactccctcgccgaattcaccgccaagcccgactccgccttcgccgaccaagatcccgtcgtcctccccaccggcccccgccagcgcaccgccgaggagctcgaccgcacccgtctcggtggcggcttccgcaactatggcgaccgccccaacaggaataactcctccggcggcgacgagtcttccaattcccgctggggttcatctagggtttctgacgagcccaggagaaacggttttggggctagggattccaatcgcgagcttcccccttcgcgcgctgacgaaactgataattgggccgccgcgaagaaaccctccggggggtttgaaaggagggagagggacaaaggagggtttttcgattcgcagtcgcgcgctgatgaatctgacagctgggtttcgaataagagtttcgtgccttctgaagggcggagattcggttccaacggcggcgggttcgagcgagagaggagggttgttgggttcggctccagcggcggcgcggattccgacaattggaacacaaagaagggcgagtccaacgttggtagcgagagtgttggtgggaggccgaagcttgtgttgcaacctcggacagtgtccgtgagcgatgaaggggttgatggcaataatgcggggaagcctaaaggtgttaatccgttcggagaggcgaggccgagggagcaggttttggcggagaaagggcaggattggaagaagattgatgagcagcttgagagcgtcaagattaaggaggcaagtggtggtgatgggtttggaaagaggggttttggctcttccaacggtggtggaggacgtgctactttgcctgaaagtcgcactgagaggagttggaggaagccccaatttgatgatgatcgtcctaaaagtgctgagaaagtggaagatgaacctgatcaaaaaaaggaagtggaagatgaacacgttgaaaaaaattgaagagctattaatttcttttggtccctgcagattgatcgataagagagttggaaacgaacactgaacctctaaaacttattttttgtttcccattgaagttttgtccgtctttatcttttcatgttttattgtgagagattaatactgaaagagttaagagacattttttgtagcagtgttggtagcttagtaagtcgttattatgaatatgtttgttgctaaatgttaccgtaatttcctccccacatcattcataatctatataagtaagcttggtgatgaatttcgtttcaaaggatgttcatgttcaactccaaaaaaaaaaagggcccttcccgctggggttcatctagggtttctgacgagcccaggagaaatgtgtttggcgctagggattccaatcgggagcttcccccttcgcgcgctgacgaaactgataattgggctgcgtccaagaaaccctctggaggagggtttgagaggagggagagg

SEQ ID NO: 139541 - DNA, 523 bp, Glycine max
  Clone ID: PAT_MRT3847_97013C.1
gttagaagaaataaattttatattacataaataagttatattttttagaaataaaatattaataaaaaaatgactaagtcgtgattaaatatgatttcaagttttaaattttattttcgagtaaattaaaaaaatatcaatttcagttgaacttaatcattttcaatttgcaatacaaatataattttttttatcttgattcatcactttatccgtaattaatctttatcaaaaaatttaattaaatatttttaatgagatttttttctttcgatcatattttttttattcataatattttaaaaatcttgcttaaaacaactaaatttaaaagcatttcggatcaataacttgtttgtaatataaatagaatatgattatttggttgatagaatttgtgtttatgtgttaattattttaaccaagtgaaaggtttatatacagtactaatcacttttttatatttaatctaaaaactccactattgtcgttaaatttaaaacgttacttctttgacttttga

SEQ ID NO: 139542 - DNA, 588 bp, Glycine max
  Clone ID: PAT_MRT3847_97014C.1
atctcttttctttccaccctaccaagtataagcttagacaaatgtaaactacatccaaaatgatttaaaaatcatccagctttagatggctcacttgtagatttcggacctatgttcttcctcacaaattcagacaaacttgcacaagcagcacgccctctttctaggcagtgaagataatcattcactagaaataaaaaaaattaaacagaactaattagatcattgtgaaaccactgaacactgtatttttcaccttatcattttctttattattttattatttataagtcaccaggtctagcccaaaaatatataataaggaaagaggaaacagtcagatccaccagaagttctttaatagattcatggcccaagcacaattagatcttgcacattttattgagtttattctgcatatctcccattaaaaggaaattttcttcaaatcaggggaagaaatctcactgattcgatctcattccatttctttcccaataacaagtaaattaggatggcaagtgatttgaggaagcatgattaagggggaaagaaattcaataattaaatatagttagggaaatttct

SEQ ID NO: 139543 - DNA, 319 bp, Glycine max
  unsure (1)..(319): unsure at all n locations
  Clone ID: PAT_MRT3847_97015C.1
gagattgattaagggattgagggtctcttaagttgtaaggatatctgaacacaagggaagggttgtccctgtgtggttcataattttgcaaaaggctttcacatgttcgtggtcggggcatgctcggttctctgtggcattatctactctcttttctactaattgttccttttatacaaaaatcctttctatttatctttcaagtnctccgtttttttttcctttttcctttttccaaccctcaatcggttatttctcccttttcctttattttttcatgccttcatagacagttgtggcatttcttcccccaaactta

SEQ ID NO: 139544 - DNA, 304 bp, Glycine max
  Clone ID: PAT_MRT3847_97016C.1
tctacggtttgtgtgaagacgctgactggggaaacgacggaaaagggacctttacccacctccgatgcatgttttgtgttggccagagagagtctttagtccctctaaggtgtataaaaaactagagcagcccttcactgaatgtgtcaaatccttttttttaggggagtggggcttctaaacatttgccggaaaaaaacggcccttgttattggacacaaaattcacattttttgcgcaaaaaatgatggaaaaacctcggtgggctaggagtaacttttaatttataaaccttgacttttgc

SEQ ID NO: 139545 - DNA, 158 bp, Glycine max
  Clone ID: PAT_MRT3847_97017C.1
gcatcttaaaataaagcttcattatgattgataaatagtattttctttaactcctactttacatgttggagcatttataaccataccaaaaaaaacattgataaaccacaccaaactaacaatttcggaacaaattcatgcaccacatgagatatata

SEQ ID NO: 139546 - DNA, 325 bp, Glycine max
  Clone ID: PAT_MRT3847_97018C.1
gggggtttttaaaactgcttaaatcattattgccattcagattaggtacgtaacctgaacaacgtggcataaaagcaatgcattcaaattaaaatctcatcgtgactggtacacattcgaacatgatacccaattttatatacaccctaaaaacctgaatcggggggagattctagaagtctaatatcctgtgcctggccctcatcagactaagcgcgcgctttttaatacaccctctcaagggctgaaagagtgcttgcgggcttcagaatattctcctttttcgatatcctgacagaactactagtggacaaaaacacgcttg

SEQ ID NO: 139547 - DNA, 356 bp, Glycine max
  Clone ID: PAT_MRT3847_97019C.1
cacacgcatatttttggttttcacacatttttctatgtctgatcttcaagatccactgggtgtttttcaaggcagcgaggggacttatgcttttcgattgatcaaacactttaccctgatgctcggacaagaaccaacgcagacaacatccaatctgtgacctacttttctttcagacacccaatcttaaaaccggggctcaatccttccttacacccccataggccttatttacaagatgaaatatcttgaggagaatatgttgcttaatcttcacttgaacaaatgcactgatggctcgactcttctccatttttgtacacactcccaaacttatgaacattctgtacaggaaa

SEQ ID NO: 139548 - DNA, 540 bp, Glycine max
  Clone ID: PAT_MRT3847_9701C.1
taaacagcgacatttaaagcaatgactgctacatcaacgtaatgaggactatgccgcttgcttacgggcacacacttattgttcaccgaaaacatgccacaacagcccctcagctataaactccctgaatgctcacaagggacgacggataatgcgtggctgaacacctaatgatccaagctgcctgagagaagcacctatactgaggaatttagaggctgctagagaccaaaattcagtgcctgtgcgtgtagcataccaacttgttgtaactggacatagacattaggacgtaaggactccacaagagatcaatgctggacacgctcatggcgccattaacataccttatatgtacacagacgcatcacggatgactaataatatcaactatattagaaagacgcctccatattttaggagataagatgaaacattcgtggggcaagagctagcataaagagctatgaaagggcgcaaggacttgctacatgatggaaccactgtactcacatacatggcagatgggatgacccatgg

SEQ ID NO: 139549 - DNA, 491 bp, Glycine max
  Clone ID: PAT_MRT3847_97020C.1
cgcgcttcttctggctctttttcagatctctgattaattccaagttcaagccggcgaaatcttggattagggctcccactctcctatctggtaggacttcgtggggagactattgtattactctcctttgtttcactctctccttctcactgatccgcattgccgatcaaagtggtcttatttgaaaaacacttgggcgtcggtgccaatgtttgcttcgctaattgtctctgcagacaacaggatcactgggacaacaatttgtaattgcagagatttgcacatcttgggtgtatattatacaatagcacctcaatttagaaaatttctaccacattacattaggtgggatctgtataccccgctgatctacattctgccatcttttgtgactgctggaattaaatataagcggcatcagagtaatattcaaatttgcggcttattttacgacggcagatacatattcttgactaaacacgacaaaaatc

SEQ ID NO: 139550 - DNA, 233 bp, Glycine max
  Clone ID: PAT_MRT3847_97021C.1
ggaccacattccaaaacacaaacacatacattgtagtatcacttttgtctcggaatttgttcttttgagtcatcgcaagcttaaaggttgcatgtgtggttttgacgtcgctggctgtgatcagtgcatcactgatggtccaagccgtgtcatgcaatgatctctctgtgaacctagtactgtgcctatggtacctcatgccaggtgtagatgtgccacaagctttgaatttc

SEQ ID NO: 139551 - DNA, 346 bp, Glycine max
  Clone ID: PAT_MRT3847_97022C.1
gaaacgcatcagttgacccaatcagttaatggaatcataataactgacttgtggttcgtaagcttcctggatcaaaccttgctgatcaaaatactgcattgagatcgaaagtgcgtagtgcacagtactttgacatattctacatacttacacttattacacagatctgcctatagaaactgggacttcaatcagctgcgtacgaactctgaaactgagagtgctaaccatttagtgggtggactaaatgagatctgcaatctattaaactgcaaactatagacatttaacgatctctctatctcatcacagtataatacacatacatgaggcttaatttatatgc

SEQ ID NO: 139552 - DNA, 357 bp, Glycine max
  Clone ID: PAT_MRT3847_97023C.1
ggggccccggggccggcccctgggttcaccccggaatttccggccgggtccctgagggggaccaagttttccttatggggggtggtttaaaagttgggggaaataagggcaaaagttgttccttggggaaaatggtattccgttaaaaattcaaaaaaaaatacaaccggaaagaaaaaagggaaaagccggggggcccaaaggggggacctaactaaattaattggggtgggcctaactgcccgttttcaagggggaaaacttgtgggcccagttgattaaataaatcgcccaccccccgggggggggggttttgcttttgggcccccagggggtttttttttttaacaaggaaaa

SEQ ID NO: 139553 - DNA, 286 bp, Glycine max
  Clone ID: PAT_MRT3847_97024C.1
actcatacgacacctacaccacacaaatgccttctctaacatgtagaaattgtctccaatggatgttagcgaatttgaaaagagttgacagtctctgatcgtctattcgatcatacacttatttgcccttactcgcgtcatcttaaccacgcacttctacttcaaaatcagcgatcacatcttttcaaaatccccgtctacggcttctctgtcagtttaatcgatgaaaccaacattttcgaatggagcgtgaccataaatggaccgtccgatactctttacgaaa

SEQ ID NO: 139554 - DNA, 566 bp, Glycine max
  Clone ID: PAT_MRT3847_97025C.1
cacatatcaagcaagctcctctgttttgtcattaaagcccatggctaattttgatgatcctagtggtcaggccagctcttccaattgttcggcttgccacaaccaagaatctatatctcaaagtcatataactgagattgttgaaagttctagaagaaaagcaagaatgatggttgttcaagctacacaggctatgtcaaatttaagaaagacagaaagtaaggttgaaagaattgaggatgcaataaattttatcaataaccagctttcagtggacgaacctactgcttcagccacaacatttcttcctacagattctttttctctggcttctcaggatcaattgactgccagcgtattaaaccccttggcaagttgtcatgtacaagatgctgaacttaacagttcatctgatcaaaatgaaatgaaaattccctcagaactcatatctcattgcctagctacattgttcgtgattcaaaagtgtacggaacgacaattccccccagctgatgttgctcaggtactaaattctgctgtcaccagtttgcaaccattaactttaa

SEQ ID NO: 139555 - DNA, 139 bp, Glycine max
  Clone ID: PAT_MRT3847_97026C.1
ggcgaagaagatcacactgaagagttcggacggcgaggctttccaggtggaccaggcagcggcgctggagtctcataccataaagcacctgatctaggacgactgcgccgacagcggcatccctctgccgaacgcgact

SEQ ID NO: 139556 - DNA, 147 bp, Glycine max
  Clone ID: PAT_MRT3847_97027C.1
ggctcgaagctgttggagatttcttctcgatgaaagggtgctgaagcaagatatgactctctggagcagagattttctctatttgaggtggggagcaattttggctctatgcggtaacccttagctcccttgaaaagcgatcttctg

SEQ ID NO: 139557 - DNA, 1382 bp, Glycine max
  Clone ID: PAT_MRT3847_97028C.1
atactgcacagctagagttaagagaggagatgggagaaatagaaagagaggagatgtcgtcgacaaggtgggagaaggaggaggaagaagaagaagaagaggcccaaatggatatctggaagtacatatttgggtttgtggaactggcagtgataaaatgtgcgattgagcttggcatagctgaagccatagagaagcatggaagtcccatgacactatcggagatatcatcaagtttagggtgtgatacttcacatctgaagcgcatcatgaggttcctggtgcaaagaaagatattcaaaggcgacgggtgcagcaggggctattctcaatcagctctgtctcgtcgattgatgagaaacggcgaacacagcatggctagttttctcttgctggagagtagtcctgtaatgctggcaccttggcacagtctgagtgctcgcgtcatggccaatggcaacccctcatttgcaaaggctcacggtgaagacgtgtggcgctatgctgccgcaaatctcgatcacagcaacctcatcaacgaagcaatggcatgtgatgctaagcttgttatgcctatcatcattcaaagttgcagcgaggcatttcatggcctcaagtccttggtggatgtcggtgggggcaacggcaccgccatgcgcatcctggctaaggcttgcccttccattcgacccatcaattttgatcttcctcatgtcattgccctctgcgatggcgatggcgatggcgtccaacacgtgtcaggcgacatgtttctaagtgttcctaaagctgatgctgcttttcttatgtgggttttgcacgattggtcagacgaagagtgcatccaaatcttaaagaagtgtagggaagccatatcaaattcaaaggaaaacggaagggttattattgtggaggcggtgattgaaggagaaggagaaggagaaggagggaagcatgacggattgaaggatgtgggattgatgctggacatggtaatgatggcgcacactaacttcggcaaagagcgcacactcaaagagtgggaatatgtcatcaaaatggcaggatttagctcatacactgtcaaacccattcatgctgtgcagtccgtcattatggctttctactaaaatatatccaccaaaaattacccttgcaagtttgccactaaaatgcattaaataatttaataaaaaataaaacatattgtgtgatccatcttgcacgtgtaaaacagtgtatgttaatttgttgtaacaatatgaaagcatttcattttctgtatgtttgttcgagaggagaataaaacgtatctttaaatcaaaaaaaaaaaaaaaaaaaaaaaactcagactagttctctctctctcgcctcgtgccgaa

SEQ ID NO: 139558 - DNA, 959 bp, Glycine max
  Clone ID: PAT_MRT3847_97029C.1
ctacgcctgcgagaagacgacagaagggggaagctgaaccctaactagctgagcagacggaggagaactcgactgaagctgcctctgcgacgccgtttcgattcagcctcagacatttccgttgcagtcatggtgcaagaaaatggcaagaggaagaaaccaaacattctggtgactggcacaccggggacaggaaagacaactgtgtgcactgctctagctgaagccacccagctctgccacatcaatgtcggagaattagtcaaagaaaagaacttgcatgatggatgggatgatgagcttgattgttaccttcttaatgaagacttggtttgtgatgaacttgaggatgttatggaagaggggggaaacattgtggactaccatggctgtgatttctttcctgagcgttggtttgattgcgtggttgtacttcaaactgataacaccattttgtatgaccgtttgagtaggagggggtacaaagattcaaagctttcgaacaatattgaatgtgaaatcttccaagttctgcttgaggaggctaaagaaagttactcggaggagaaagtgattgcaatgaagagtgataatatagaagacgttagtagaaatgtggcaactcttacagattgggtcagaaattggtctttaccctcacattcttaacaaaaaaaatgagtactttgtatatacctttctgcttgagtatggtgaaagtatcacgatgaactgctacctgaagcagatctgcagtgtggttgaattctcttgcaaattttggtgtggcatgtatttgtggcattttatgtgatgggttttaaatttgacaattgaaaggtaacttttaccaagttgtgataatgagtttcaaatagttaagggttaattaaacaagatgcaatatagtatcaggagttgacgctatatagaatgatgggttgatggaaacattatcc

SEQ ID NO: 139559 - DNA, 343 bp, Glycine max
  unsure (1)..(343): unsure at all n locations
  Clone ID: PAT_MRT3847_9702C.1
tgaactcatgaccgatattgacaggcgatcctgcaaatatctttacgaggatccgaaatttgtgaagaacggtgattcttcttttnttaagatgattccaaccaaacccatggttgttgaaactttctccgagtatcctccacttggtaggttttctgttatggacatgcgtcaaactgttgctgtgggagtcatcaataactttgagaagaatgatcctaccgtagccaatgtcaccaatgctgcccataagaataattgaatcgtgcgggctggttcatcatgggatgttggttacaataaatgttggttttcttttctttactcttttgtcttcttttct

SEQ ID NO: 139560 - DNA, 147 bp, Glycine max
  unsure (1)..(147): unsure at all n locations
  Clone ID: PAT_MRT3847_97030C.1
tccagtcttcggcgacatcatgacgccgaacaagttcgacaatgcttacttccaaacccttgggaagggggnnncacatgnctgggtctggaatgacaccggccaagataggagtacctgcaaagcaaagaaaattgggccctcaga

SEQ ID NO: 139561 - DNA, 153 bp, Glycine max
  Clone ID: PAT_MRT3847_97031C.1
tcaagatgcgaagatacaaacatgggaagcgtcataacctaccactaagaagaaagcacggatctattttatcattggcaaacgctaacagagttagtacacttcatcgagaacgtatccgcaggacattgtcatataccaagtacttaacga

SEQ ID NO: 139562 - DNA, 257 bp, Glycine max
  Clone ID: PAT_MRT3847_97032C.1
atctcaccaatctgacagggatcatcaatggcaaagcaattaattcccttcataatctctcttctcctcttcattttcacagaagtggaaggggctaaaaggtcttatggggtatacaacagcaaccctgtaaaactttttgtttttggggactcctatgttgacactgggaatttcgtgcattcagaatcatacaagcctcccagtggaatcacttttcctggtaaccctgcagggagattctgcgacggtcgcat

SEQ ID NO: 139563 - DNA, 341 bp, Glycine max
  Clone ID: PAT_MRT3847_97033C.1
agcccaactaaacctaaacgggataaaacaggaaaccccatttaccatgggcttacatatgccatttgaggaggaaaaaaacattccttaaaggtccacaatcaacaatgctaaaaactaatattaaccccatcaaatcattcagatttcggtaaacccctcttttcttcccccttaccctcatttaacctggcatcaaaagaaacatgttccagggcttggtccaaaaaccattccttgggctttacacaaaattcttccacggacctggaaggtgaaaacccagcgcctttaaaatgatcaacgagattcacaacttgaatcccactaacaagaaaata

SEQ ID NO: 139564 - DNA, 253 bp, Glycine max
  Clone ID: PAT_MRT3847_97034C.1
ataaaatcccactccaccctatcatagtattataaaatgtcaaactttagagccacaatccctttcctccctttcttcttttgtttcatatgatgaaaacattcaaaagctatgatagtattatctatattaacttatccgacactgaagtactttgagattcaccaatcaaagagggcacaacagttttcatcctatttgcaaaagcctctgtaatgaccttgaaaattacattacaaaggcttatggccta

SEQ ID NO: 139565 - DNA, 436 bp, Glycine max
  Clone ID: PAT_MRT3847_97035C.1
ggggccaaaaaaaaaactaatcagcccataaaaaaaatatcttttgaaacccttatttaaattatccaaagggggaaaaaaaccttaaacaaaacgttcgatagttcccccaaatttattttaaaaagaacccgaaacgatctgaaaaaagaccaaagaaaaagagagaaagagagtaacaaagccttcctccttaatcgagaggggccttaacattcccatggggaatctcctggtgaaagtccttgggaacctttccattaacggggcatccgacggaaacccccgtcccgagaatttccttaaggctgcccctgagggccttcgccattgacctcgggcttaaaaccctagggatctcgatgacgtcgtctagcgaaaagttgcccgtgggcttgaaggtcttcggtttcttgggggcaccctcgggctcctt

SEQ ID NO: 139566 - DNA, 402 bp, Glycine max
  Clone ID: PAT_MRT3847_97036C.1
ctttcgcgtgggcttttatcaaacactatcttctgtatggatttgattcactctacaggtaaagcagatgagttcaaggacttggtgaccaatatcacaaagctggttggaacaccaaacttggcagattttattacagcgttgaagatggttgatccacagagcatcaaaagacgacagagtatgaactcgaagaaggtgtaggacatgttaaaccacttgggtagccaaaggttgaagcaaatggaggaggggaaagttcacaatgacgtgttatgatgccatgctgaacattgcaaatgatgacaagtgcatggactataatatgagtgatacatctctcacatgatgtatttgttgtgggaacagatacaacaagcatcacctttgaatgggcaatga

SEQ ID NO: 139567 - DNA, 3249 bp, Glycine max
  Clone ID: PAT_MRT3847_97037C.1
gatccagagggaggactgggaaatgcatggaggcaaagggggatgattcgagccaaggtgaattttggttgaatagacctatacagtaggattacaagaacaggattgtgaaagaatttaatagatttttcaaaaacatcgtttcattttccaaatcctggtgaaaatgattatttgatagttttctgtcataaataagaaaaagacgcatacaagtgaaaaggcacattaacttactctgaataggttgaaaccttatcaataattgaatttcataagccgattcaaactataattctctcaaaaaacattataatgaagaaaagacatcaaggttccaaatttattcaatacaattgatgtgcattctaattcagagactgaaatacaattaactttcactgccttcaactaacctaaaaatagtgtttatggaagacccagaggatggctatattttggaaattgtaatatatggtgaagaattaacagcatcttgatacatagccagaatagtaaatcttaaggatgctaatgcttaaggatgctatttaggggttcttgatgatgagcataaagtaccatttaatgctatgaaagattgttgaacttgaggggtcataacttggttaagacatactactcatgttctaactagtttggataacctcaagttctaggtgaagacacagggcagctatggtatggtataatagtttcgttggggatagatgtgaggcatgcagtgcagaaagatcccaacgagtcgtaatcagaaaaattatgaggtggaagacttcattaaattgtcaattacatgtcagaagtagaggaaaattcttatgagaacagccactatgtccatcccatttatggatggacgggaaattacattggctactgctgatgggaaaaaggaaaattatgaacctaaaggttaatagacctcaactcctgaggcaaatttagtgattgatttgtccaaaaaggatgttgcagatgatgttggcaagatgcaaccaattcctgttactgaaaccgtcaggaaatcttcagttactgagggatctccttcaacttttgggcgagaatcctggtaagtcaaatctgttggagaggtaatctgatgcccagagaataaagagaactgttctccaaaaagaaggcgcaaatgtaatatgagggctggaaaggactcttctaaaagaggaattcatgcaagggacactacattctggctagacagactgatagaggtgataaatcaaccaaagtttccctgagcccatctcctggttttcagatgatgcagtcaaatgaggtgcagcagtttgggcatattgactcaaatagtacaaagtcatttgctgttgtaaatacttcaacatctagccttccagatttgaacacttctgcttctccacctgttttgtttcatcagcctttcacagatcagcagcaagtacaattacgtgcacagatctttgtatatggagctttgattcaaggcatggtaccagatgaggcttatatgatatcagcttttggaggatcagatggtggaaggagcctttgggataatgcttggcgtgcctgcatggaaaggcaacatggtcaaaaatctcatcctgctaacccagaaacacctctgcaatcacgatctgttgctagaacctctgatttgccacataagcaaagtgctgctcaagcgatagggaaatcgctttcagtgggtctccactgaaatcaacatctgaaccccaagagcctcccagataatacctctgtcttcaccactttggagtctatcaactctaggtctaggtagtgattccctgcaatctagtgccattgcaagaggttctgtcgtggattatccacaagcaattactccattacacccttatcaaactactcctgtgaggaattttcttggacataacacaccttggatgtcccaaaccccccttcgaggaccatggattgcttctccaactcctgtaactgacaatagcccccagatttctgcatcacctgcctcagatacaattaagctaggatcagtcaaaggatctctgcctccttcctctggcataaagaatgttacttctggtctctctacttccagtacaggtttgcaaagtatctttacaggaactgcctctctgcttgatgcaaacaacgtgacagtatcacctgctcaacactcttcagatccaaagcccaaaaaaagaaaaaaagttgtggtctctgaggatctaggccagagggcttttcaatcactggctcctgctgtcggtagccatacatctactcctgttgcagttgtggtccctgttgggaatgtgccaataactactattgaaaagtcagttgtgtctgtatctcctcttgctgatcaatccaaaaatgatcagaatgttgagaagaggattatgtcagatgagtctcttatgaaagttaaagaggccagggtacatgcagaggaagcttctgctctctctgctgctgcagtgaatcatagcctagagttatggaatcagttggataaacataaaaattctgggttgatgcctgatattgaggctaaactagcttctgcagctgccaatgttgcctcaaatgctgctcttcaagcaaaactaatggctgatgaagcattgctttcatctggttatgataattccagccaaagtaatcaaatttctctttctgaggggaccaataacttaggaaaagcaacccctgcttccatcttgaaaggtgctaatggaaccaatagtcctggttctatcattgttgctgccaaggaagctgttaaaaggagagtggaagctgcttcagctgccaccaaaagagctgaaaatatggatgccattgtgaaggctgctgagctggcagcagaagctgtatctcaagcaggaaaaattgtaactatgggtgatcctttgccaataagtcagttggtagaagctggcccagagggatgtttgaaagcaacccgagagtcttctcagcaagttggattattcaaagacattaccagagatatggtgaacattaatgtgagagatattcctgaaacttcttatacacataacagagacattttatctggtggcatttctgctagtattaagattcaatgaaagagaattccagagagaccagagggacccaggtttgtttctaatttattcgacctatcagtttgttcccggattgtggacctgaattcccgctcctttt

SEQ ID NO: 139568 - DNA, 159 bp, Glycine max
  Clone ID: PAT_MRT3847_97038C.1
atctaatccgtacggtcacaactgggacagtttcatgatgaggctaagctaccaggacatggcgtgaagagctgccaactacctacggtcctgcgacaacgtacgcagctgcacagcgcatctgtcgaatcatggactggtcatcagcatatataacac

SEQ ID NO: 139569 - DNA, 1610 bp, Glycine max
  Clone ID: PAT_MRT3847_97039C.1
gggagaatgcttggcgtacctgcatgaaaaggcaacatggtcaaaaatctcatcctgctaacccagaaacacctctgcaatcaagatctgttgctagaacctctgatttgccacataagcaaagtgctgctcaaggaaaaggtatctcttcgccacttggtcgaaccagcagcaaggctactccaccaattgtaaaccccttaatacctctttcatctccactttggagtctatcaactctaggtctaggtagtgattccctgcaatctagtgccattgcaagaggttctgtcgtggattatccacaggcaattactccattacatccttatcaaactactcctgtgaggaattttcttggacataacacaccttggatgtcccaaaccccccttcgagggccatggattgcttctccaactcctgtaactgacaatagcccccagatttctgcatcacctgcctcagatacaattaagctaggatcagtcaaaggatctctgcctccttcctctggcataaagaatgttacttctggtgtctctacttccagtacaggtttgcaaagtatctttacaggaactgcctctctgcttgatgcaaacaacgtgacagtatcacctgctcaacacaattcagatccaaagcccagaaaaagaaaaaaagttgtggtctctgaggatctaggccagagggcttttcaatcactggctcgtgggctggtgttggtagccaaacatctactcctgttgcagttgtggcccctgttgggaatgtgccaataactactattgaaaaatcagttttgtctgtatctcctcttgctgatcaatccaaaaatgatcggaatgttgagaagaggattatgtcagatgagtctcttatgaaagttaaagaggctagggtacatgcagaggaagcttctgctctctctgctgctgcagtgaatcatagcctagagttatggaatcagttggataaacataaaaattctgggttgatgcctgatattgaggctaaattagcttctgcagcagttgccgttgcagctgctgcagccattgcaaaggcagcagcagcagctgccaatgttgcctcaaatgctgctcttcaagcaaaactaatggctgatgaagcattgctttcatctggttataataattccagccaaagtaatcaaatttgtctttctgagggtaccaataacttgggaaaagcaacccctgcttccatcttgaaaggtgctaatggaaccaatagtcctggttctatcattgttgctgccaaggaagctgttaaaaggagagtggaagctgcttcagctgccaccaaaagagctgaaaatatggatgccattgtgagggctgctgagctggcagcagaagctgtatctcaagcaggaaaaattgtaactatgggtgatcctttgccaataagtcagttggtagaagctggcccagagggatgtttgaaagcaacccgagagtcttctcagcaagttggattattcaaagacattaacagagatatggggaacaataatgtgagagatattcctgaaacttcttatacacataacagagacattttatctggtggcatttctgcta

SEQ ID NO: 139570 - DNA, 254 bp, Glycine max
  unsure (1)..(254): unsure at all n locations
  Clone ID: PAT_MRT3847_9703C.1
catttttgctttaaggagttcagtcctattttgctcctcttccttgtcttccacacaacatacgaggcgacancngtcgnagntcgggtctgagagttcgcaggcatgttaccaagcctttaattaagccgccaattagaagaggcaattttctcaagacagagagagaagaacatcttggtatcagtgttgcatccactctctgatggggggaggtgagggcggtagattggatgaatcaggatcgtgggctg

SEQ ID NO: 139571 - DNA, 385 bp, Glycine max
  Clone ID: PAT_MRT3847_97040C.1
ccccctggcgcaaaaaaaaaacattgaacccaggcctttttttcctggttttttttgggggcaagactccaatgctccctacctcctttttgggggggaattttccccggccccggggggggggttaagagcccctttttctttctgaaacgaaccaaatttggccccccctccaacaaatttaaaaggaaatggctggctggctgggttaacaaatcccaatttgggggcccttgcatagatgggaattggaaacataattctgcctgcatagcatcataatttgataatttgccggaaaaaagggtttttaccaagacacaaaccccttctttgccacagccccaaccaaaaacatgggcccaggccactcttaactgggggg

SEQ ID NO: 139572 - DNA, 376 bp, Glycine max
  Clone ID: PAT_MRT3847_97041C.1
catcattgtcacttctgttctcctttgcatttggtttaggttcaaccctggcttcttcctcatcttccataaacttaatatcatcaacagagtcaactcgatttatagtttcagaagccatttccatcaatctaatgcacctgtagttaacaaagaaaaggaaagaaattaaactcagattcaacttggttcacagttagaagccattcaactcagattcaatacatcaagaataattaacatttaacaaagaaaaggaaagaaattaaaagcatgaaaataggagagaaattaccgttttggaggttgaccacaacggtgtcgtggtgacgggcaattgagcgttcggaggtcaccgtcaccgttggtggctcgt

SEQ ID NO: 139573 - DNA, 159 bp, Glycine max
  unsure (1)..(159): unsure at all n locations
  Clone ID: PAT_MRT3847_97042C.1
cnncactgtcagcaagcacgatgtcatcgtcgtcnagttctacgccccatggtgtnnctcnctggnngangcntgctccngngtagggngaaagctgcttcnatctngngtagtcatgatcctcctantgttttggctaaagtagatgccaatgnggag

SEQ ID NO: 139574 - DNA, 148 bp, Glycine max
  unsure (1)..(148): unsure at all n locations
  Clone ID: PAT_MRT3847_97043C.1
tataggtctgtaacgttgttcacatagtcgnaaataccgaaaggaaacattgctggaatgctggtattgaattacaacataagtctttagcataacaccatatatttaccaacaaacaatttaaaataagctactaaactaccatctt

SEQ ID NO: 139575 - DNA, 308 bp, Glycine max
  Clone ID: PAT_MRT3847_97044C.1
gaaccattgagctgatttaagtacctcactatgtcaaatattaatcgtatccacatctaggacacaatactaatcacagggttcaataggtatcatgtgacgtattaaccaagacgttaatcacagtggaagactaaaggatcgagaaacgtacgttaagttattaatacctccgtcgacagaactttcagtacggctaccacatagacaacgatctcgtcaaactacggcgttaccacaacttatcccgacgaaacgtccaccatacatatacatccctcggacttcctaaccatatgaatcccata

SEQ ID NO: 139576 - DNA, 669 bp, Glycine max
  Clone ID: PAT_MRT3847_97045C.1
aaggaaggcactggagacactgccgagtgccgtaaaatgcagattttcgtccgcacggatcggactcacctcattgaggtgagtccggcccagaccgtcgccgatgtgaaggccgccgtcgaggcgctgcagggcctggaggctggcgagcagcgcattctgttcaacggtgtccagctggaggatggccaggtcctggctgaggctggcgtgagcgacgatagcacgctcatgtgcctgctgcgcctgcttggtggtgccaagaagcgcaagaagaagacttacaccaagcccaagaagcagaagcacaagcacaagaagatcaagcttcgcgtgctgaagttctacaaggtggacgactccggcaaggttcagcgcctgcgcaagcagtcccccaactgcggccccggcaccttcatggcgacccacttcgaccgcgtgtactgcggcaagtgcagcaacaccttcgtgtacgagggtggcgctcccgcgggtgcccccaagaaggctgctgccgcccccgcggctgctgccgctgccgcgcccgaggcccccgccaagggcaagaagggcaagaagtaaactgcctgggcccgccgccgcgagccgtggtcgtggctggggctgcctagcagcgtcggctttgctgtaatgatcacttgggaaaaa

SEQ ID NO: 139577 - DNA, 444 bp, Glycine max
  Clone ID: PAT_MRT3847_97046C.1
gatcccttttagcggtcggttttttttatttttcttataatttccccaggccagagaattgacccgaaggggtacttttattcaatattcccgaaagtttcacatccaaaaatttggaggaacaaatctagttcttcaccaatatatgcatctttaattataagactatttatatgctttttagatccttgaggtaaacaaagcttcttattttttgggggcaagctgtccttgattaatggattgctgggcaaactagtcttccatgcagtggcggctggaaaatcaaatgggtctataatctccaatagatccaactctcttcaaaacaggtatcctgttagagatccctccaagtgctattgttaagggccccaatattgcccacttcgaaatatttatttcccccttaacctttttttttattttttccataactctttc

SEQ ID NO: 139578 - DNA, 334 bp, Glycine max
  Clone ID: PAT_MRT3847_97047C.1
ggagcaataccctaaaccctattgttcttcctcagtagtgtcatctacgcatctcttcactgcaccatctatgccgaaccctaaggtcttcttcgagatgatgatcgggggtcaatctgctggccgcatcgtgaaggagctctacggctacgtcactccccgcaccgcagagaacttccgcacgctttgcaccggcaagatcggcgtaaggcggagcagcaatcccctcgactacaatggctcgtgcatcgaccgcgtgatcccgagtttcatgtgtcaggttggcgacttcaacgtcagtaacgggatcggaggcgagtcgaattaaggcgcc

SEQ ID NO: 139579 - DNA, 317 bp, Glycine max
  unsure (1)..(317): unsure at all n locations
  Clone ID: PAT_MRT3847_97048C.1
tttttttttttttttttttttttttttttttttttttttttttttncgttactaaaaaagaggggtgcgttggagatatttctttgggaccaaaaatacagaaggacccgcccccccccttttttggcaaagaaatatagttaattttccaccccggaatgtttggagagaagggaatcaaaaaattaaaaagggganccagnatggtccccccagaccctggattatacccccttaccatataacctcccccttcaccggaaataaaaaagggggggggaaaacacaattttttttttccaccaaaaagcgggggg

SEQ ID NO: 139580 - DNA, 339 bp, Glycine max
  unsure (1)..(339): unsure at all n locations
  Clone ID: PAT_MRT3847_97049C.1
ccacaacagcgcccgcttattttttttttttttttttttttttgnggttttaaaaaaaatcatataaaatcataaacgggttttatcttacacatctctatcccccaacattctaattacccaaaaacccacataaacaccaacccatatattttctacataagcctacatactaaaccacacaatctcctctaaattaaacacccacaacagtacaaacatcgaactttatatccaacttcaccataacaacccaaacttattattctattaaaccaaattcaaaaatttacatccttaaccatactaaaaaatttctcttcctcataaatctcaccc

SEQ ID NO: 139581 - DNA, 395 bp, Glycine max
  Clone ID: PAT_MRT3847_9704C.1
cggctcgagggtccatgtcgttatcaggcatagagaacaagtgcaatgaagtacatggagatgatgagttatccgatgatggggtcttccagagtggggagaagaagaagaggttgaatttggaacaggtgaaggcccttgagaagagttttgatcaggggaacaaacttgagccagaaaggaaagtgcagttagctaaggctttggggttgcagccaagacaagttgccatatggtttcagaatagaagggctagatggaaaaccaagcaattggagaaagaatacgaagtcctcaagaagcagtttgaagcagtcaaggctgataatgatgttcttaaggttcggaaccagaaactacaggcagagttacaagctgtaaaaagtaaggattgg

SEQ ID NO: 139582 - DNA, 209 bp, Glycine max
  Clone ID: PAT_MRT3847_97050C.1
ttacagaaaagaaattttccatttacaaagtccgcttatacataaaacaaagctatataaccatgttatcaatttctatacaaaaggattcattacttcccgttaaaacatctaatcgaaagagtcccacttctaattggacatttgtgatgaacgctattatataactgaataccaaagagatttgagttgaaagcgaaaaaatttat

SEQ ID NO: 139583 - DNA, 254 bp, Glycine max
  unsure (1)..(254): unsure at all n locations
  Clone ID: PAT_MRT3847_97051C.1
gggcaacacaacaccttcatagnaccaactgcatctttgtntgcgttgagaaggttccaattnccagatgaaacttagnccttactctgtcancgctctcangtgatgtnctntnacacanacaaaaccggtcnccacagcatggacaaaacgnccnagatgcaaattcacagtgngnttctnnatcatanttccctctcccttgncttgatnncctttggcgggtgaancgcgccgagananagggggaaang

SEQ ID NO: 139584 - DNA, 312 bp, Glycine max
  Clone ID: PAT_MRT3847_97052C.1
actaggccaccgttcttagcaccggcactggcttacaccatgctcaaagtcaaggagctggtatcatttataacctgggccacaggatgagatgatcacatgactcttctggcaggctccttacattggtgctagacttgcatctctctaactacatggctccatcagggccagtcactataggtacaagagacttaatgcaaccgttcacgcttaatactatctggtacaacatatgagatgatatcaaagtttatgctgatcggggtcataggatcgagatgatctgattatggatttctggccagaata

SEQ ID NO: 139585 - DNA, 589 bp, Glycine max
  unsure (1)..(589): unsure at all n locations
  Clone ID: PAT_MRT3847_97053C.1
ggttataaaaaaattattaggaggaatatttagtattgtcgtatctaaccgtgaattttacaagtatagttaagtatgaatatatatatatatatagtagtacttacatattcctttttttatatgtataattaataattacaaaaaaaatccgtttgttttcaatatgttttaagtccaaaaaaaaatattgacgtatgaaaagaatgtgcgaacgtattactactgtctaattcattatgatcaagaaaggttgttattattatcagtgcttgtacggtttaactggtacaaaactgtcgtaaaggggttatcatttatattctgaattaaaacaaagttaataaacaataacgtgtttttttttattcagaaataataagtgtctaattattagtaatagatatcagtactgatacagtaaaaaaaaaaaagatatcagtactgatagtgcatatcaatatatttttttaattatattttcagtaccaaaagttttttattcttgagggaaaaaagtgaaattcggntttgttcataaattttaactcagtaaacctttcaaagtaatagcttgatgcaatctcgt

SEQ ID NO: 139586 - DNA, 362 bp, Glycine max
  Clone ID: PAT_MRT3847_97054C.1
ggaaaattacaaggcaagcaacaccatcaacgcttataattacataggcgttctaaagctggggaggtcaattccagaagccataataagacaagcaaaaggccaagcaatcatcacatgtggccaaagtaagagtgggaggcactaacaaaagcgaaacaggacttgtggttgcccggagggaagacagttcaaggtctcctacatctgctaattccacctacggtgtacggtggggggctcaagctggaggcgagttgacaaacttcatcaatggcttaaagacaaaagatgctctcaagacatttggtggcaataatcatttttcaattggagcaagattaaatgctgcagtaagcttt

SEQ ID NO: 139587 - DNA, 196 bp, Glycine max
  Clone ID: PAT_MRT3847_97055C.1
aaagaatgacccctagcatgcaaaaaaacttgcctctctggcagatctgtctgtgaatgatgcatttggtactgctcacagggcgcatgcatcaacacagggtgttactaaatacctgaatccatctgttgctgggtgtcttttgcaaaacgaacgtcattgccttgttgaggcagtatcaaacgcccaaaaggcc

SEQ ID NO: 139588 - DNA, 531 bp, Glycine max
  Clone ID: PAT_MRT3847_97056C.1
gtgattggaaccaagaactctcgataatacggacttcaaaagtgtagattgtagccaaacaagaagcgtttggtcttgaacctcccaagtttcatatcctagattaactcgatcagcgatcatctttggtgaggtaacgcagaggaacgatgggattaaccacaaatcgttgtagcttgtgcaatttgatctctggctctatgtgttgatgccagtgcagataattggagtcatcgagtttctctgcaaccgaattgggaaatgactaaaacagaattggaaggagcggaagccatggacgcactgtaggaagcttcgcagaagcacaagtgctcgaaaaaatggctctagataccattttcgataaactgagtgaaagtgggagagaaaatgaaaaagataaagctgatattattgctcagaagaaaagactcaatgagttagatacaacagaggtatttagagagttctgacttgagaaactaaccaaaactaactttaactacttctaacagaatgtaactacttggg

SEQ ID NO: 139589 - DNA, 284 bp, Glycine max
  Clone ID: PAT_MRT3847_97057C.1
agtggctcggggttcggggcgggaaaacgcaattcctcatttttttccctaaaccaaacttttgggaacttgggtggattctcaaaagatttatttatggtcccataccctcgcggggaaaacaatcccccttttaaaataaaaggggaggggtccctttcttttttttgcaaaaaaagggtttaaatctccccttcgggggccatgggaaaacccaatttttgtggtataggtcctttggcgtgttataaccccccaaacctttttgctggattttttttttt

SEQ ID NO: 139590 - DNA, 284 bp, Glycine max
  Clone ID: PAT_MRT3847_97058C.1
ggcacaaaactggtttttttttctttctttaggggggaaaatatagggcaccgattctcgattttaaacaatggagggatttaataaaacattccgagacgggtttgggcaaaaataattggttacataaatgcttaaaaaagttaggattccccctttgggtttccctaaaactgaaagttatctcccaaaaaggttttccacaccaaaggttggggaaacccctgctattttataatacacgccccacccacccccaaaagcttaaaacaaaaggaaatttt

SEQ ID NO: 139591 - DNA, 405 bp, Glycine max
  Clone ID: PAT_MRT3847_97059C.1
atccaatgcaccaaatcgactgagaggctattttccaaagctaaaccacctatctgaagttgaaccattcactcctactatatacaattgatcttccgttaaaatggaccggaaatgcccgaagccgctaccgacatatacttccacaacctccgcggcgacgatcgcatcaaccagactctatcgagacgatggctggggaaatatctgaggatgcttgtacgacccatatcatgcaaacaaatgagcacgctacttgcccactgaggcagatggggggatgcatctatgttttacatgaggatcagtaatgcctacattgacattgagatcagcaacaacgccaatgtcgaaagaactatcaattttgacgttgatgcttatgtatagacccgatcatgactt

SEQ ID NO: 139592 - DNA, 305 bp, Glycine max
  Clone ID: PAT_MRT3847_9705C.1
ggggagtagatatcatgggggttatgccagggggaggcctttttttgaaaacaaacgttaagttacataaagcaacctttaattacctagaccgatgggtgcctatacttttcccttcgacgaaaaaagaaaatcacgggggactcctgggactgttcaagaaaaaacctacttccccaagggattggaggaggtccaaagagaggaggtggtcattaagacatgcatcattaatttggcgcgagtgtttcaagctgggggtggctgtgttaattgcaaaatgtaaaaaaaaaaaactggggggg

SEQ ID NO: 139593 - DNA, 219 bp, Glycine max
  Clone ID: PAT_MRT3847_97060C.1
ggttggttcatagattcaataacccaatgtgccggattggtgatatagtgataggcacactataacatgttagtaacaacatatcgattattatgaatttccctaatatcataattattggattaataaggaagtgtgtcatttaagtgtttactatcaattttaggttccacctctaagtctaaggaccaagtgaagggtagattccttctgaatgtt

SEQ ID NO: 139594 - DNA, 490 bp, Glycine max
  Clone ID: PAT_MRT3847_97061C.1
ctgggactagctttactaaaccaagcaaggaacatgatttcatcgggagataatccgatgaaagctcttgaattatctcttcaagcaatgaaattgtttgagagagctgctgcttatgggaaaccaagtttggatttggccatgtgtttacatgttactgcagcaatatattgcagtttgggacatttcagtgaagcgattccaattatagagcgctcaattgagattcccactattgaggaagaccaccaacacgccattgctaaatttgccggtcacatgcatctaggagacatatatgccatgttaggccatcttgagaaatcaattaagtgctacactgaagggttgaaagtacaaaggaaggctttgggagaaacagatccaaaagttggtgaaacttgccggtatgtggctgaggctaactttcaagcattgcaatttgatgaagcagagaggctgtgccaaattgcccttgacattcatagag

SEQ ID NO: 139595 - DNA, 449 bp, Glycine max
  Clone ID: PAT_MRT3847_97062C.1
ccacgcgtccgaattcgagcggccgcttttttttttttttttttttttttttttttttctctcaacacttttctgagttctttctttgggggttgggaaagcaaaattttaggtcaaagttggttaacagttcacttgtatctgtaccactcactggaatcgttgcagctgtctattcttttccattttaggttccgtgaccttacagataattaacatatgccaaatcattatttggttttgaactttggtttaggtagtattttttcactcactttatatttgtgtttatctttcttttttatccatcttataattttattcatttaccttaatataaatggaatataattaaagagtaaatactagtgtatattctgaaagcaaaaaatatatatatattacactactatttgctatttagtcacaaactatatatcatttacgat

SEQ ID NO: 139596 - DNA, 390 bp, Glycine max
  Clone ID: PAT_MRT3847_97063C.1
ataaaagaaagacggatttttaaatctattaacaaattgaagccgggacgtcgttttcttacaaactgttttacaccgatcccctttttccatacttaatactaaaaagaatgttcgaaataaaaaaatcctttcgcgtctattcatgtacgagaacgccccttgtaccaaagattaattcattatcaggttgatttattcatattacaaataaaccatttccaactttactgttcgctttcatcaataccagtaaaatctgtgtcctctgccacatactaaacataattaaaaccaatattgcaacatacaccttggtcatccctttgcttgtccttagcattaccgggataggcacgtatattgtattcacgttcgcactcaacactg

SEQ ID NO: 139597 - DNA, 222 bp, Glycine max
  unsure (1)..(222): unsure at all n locations
  Clone ID: PAT_MRT3847_97064C.1
ctattctggaagcatagtattccactatactcgaagtacagttctagttcaggaatagtggaatactattcctgaaccaaaactatgcttccagatgactttgtgtgtgaacaaatattttaccttatccatcttcgcaactggattagctttgctgaaagatggagtgatattagcttcatgtcctcanagtagagtgatccatgtggaaatattatattg

SEQ ID NO: 139598 - DNA, 438 bp, Glycine max
  Clone ID: PAT_MRT3847_97065C.1
acgggttacgagtgcgggtgaggcttaacataggataggagtggaccttgataaagggggtgacaccccgaatgagattgattgttcccaggttgaaaaacttcacttgcgcaaaatatttgactaacctaagacccgctggttaactattctccccatggagtgtaatcttgtggttcgtcagaagcttatgaactctgggacgctcattattgaagaaaagggaccagcttagttggcaagttggaatcaacccatactctatggaatggactgttttggccaatgcattacaaggggaggggaaatggattctgtgttgggactattgctaggtgttatggtgttgataccaaacaagttttcagcaacatgggaaaaatgatcaatagtagtgtagggtggtgatgaaaaaattatgcccgaaaagacacacct

SEQ ID NO: 139599 - DNA, 487 bp, Glycine max
  unsure (1)..(487): unsure at all n locations
  Clone ID: PAT_MRT3847_97066C.1
aactagttctagatcgcgagcggcccgccctttttttttttttttttttgcaacacaacgaattgcctttatttcagtatgcatccacatttcaacatttagtggtcctgaacagagtggggagcgtggcaatgagccaggagccaggcccaccgatctgcaaaaatctgcgaacgtggtgacacagagctcctctgggtccctgccgagggtctgaggaacaacactgaaacccgactcagacgggccagcgctcagggtccttggatatatgcctagagaaaggccatgcggagagtcctcggtgcccatgggtctgaattggttccttttcccataattgctttggttttacacattgaagaggtttgaacagggctctcagtcaccctgaccacccatcgggtctggggtggagcctgacagctggagcaggaagccctgaccctgcagactcgggttttaangttgttccttagaccctcgg

SEQ ID NO: 139600 - DNA, 373 bp, Glycine max
  Clone ID: PAT_MRT3847_97067C.1
gaactcctaacagatggagtactgcatatagagacaaaacatcagggccccgttggctgctcgaaaagcaggttaatatcatggaggtgcacttattcatgaaaacaagcacgctggctagaaaaaggaaaggcttattaagggcttataaactacaaataggaagtccatctcaccgttgtgaaacaagggacaataaggagtccttacgcccgatacagaaaagcttcgttgtatggtttgtcacgttattgagtaatctaaagaccccacaattggtatcccagtgcataaatttcttgggtcctcacagtctgcgtagttatcacaaacgccgctagagaggctctgaatggggacagaattaacaatc

SEQ ID NO: 139601 - DNA, 543 bp, Glycine max
  unsure (1)..(543): unsure at all n locations
  Clone ID: PAT_MRT3847_97068C.1
ctcgagccgctcagcttacccaactaaactatgtgattaaataacttaagcagagacattaaggcgcacaataatgacagcgaaacaagggaaggaagggataattgagtgtgtggtgtgtagtgtggcagctccgtcagcgtgagatggacgccgcagcaacaggttcggagctgaacaagtccggaagcggaggttcggagcgaagtgaggacagcggaggagggatatttgagtactctggctgggtttatcacttgggagtgaattccattggccatgagtactgtcatctccgattcctcttcattaggggaaagtatgtctccatgtacaagcgtgatcctcacgataaccctggcctcaaacctattaggcagggagttgtaggacccacgctaatggtggaggagctaggtcgtcgaaaggtcaacaatggggatctttatgttttacggtttttcaatcgattagatgagaccaacaagggagagattgcttgcgctacagctggngatgccaggggatggatggaagcatttg

SEQ ID NO: 139602 - DNA, 1035 bp, Glycine max
  Clone ID: PAT_MRT3847_97069C.1
cccacgcgtccgcccacgcgtccgatagcgaaaaaaggaaagggagaagaatccgataattgagggtgcggtgtgtggtgtgtagtgtgacagagatggacgccgtagcaacaggttcggagctgaacaagtccggaagcggaggttcggaacgaagcgaggacagcggaggagctggaggaggagggatatttgagtactctgggtgggtttatcatttgggagtgaattccattggccatgagtactgtcatctccgattcctcttcattaggggaaagtatgtctccatgtacaagcgtgatcctcacgataaccctggcctcaaacccatcaggcagggaattgtaggacccacgctaatggtggaggagctaggtcgtcgaaaggtcaacaatggggatctttatgttttacggttttacaatcgattagatgagaccaaaaagggagatattgcttgcgccacagctggggatgccaggggatggatggaagcatttgatcaggccaagcaacaggctgagtatgagctgtcaagaggagttagtgccagagacaaactaaacatggaagccgagatcaatcttgaaggacatcgacctagagtcagacgatatgcccatggattgaggaagcttaggagtgaggcgatatgcccatgggttgaggaagctcataagaattggccaaggcccagagaaactgttacgacaatcatcaaagttggctattaggcctgatgggtttgaaggggacagtggagatgcagttgaagcacatcaatggaaatgcgttctaatctgtggctggtattagaatttttgaagatgtttctgatcacaagaatggtaaggctgttcttgcaaagtctgttggtgttattgatgcaactgcagatacggtttttgaagtgattttgagcactgaacaacagaaaagatatgagtgggatacattgatgtgtgacttggagctgatagattcatatgatggacactacgatgttgtttatgggacatatgattctaagta

SEQ ID NO: 139603 - DNA, 181 bp, Glycine max
  Clone ID: PAT_MRT3847_9706C.1
cttcaggaggtagaatcggaatgctaaagaatattgagtcaaatctatttttgtaattgagaaatgataatgatcaaaatcatataaaaaatagatggctttattttattatgcgcttggaaatacttgtagccaaatttgttttagagcaaaaaaggaaatcaaaattttcattccacca

SEQ ID NO: 139604 - DNA, 628 bp, Glycine max
  Clone ID: PAT_MRT3847_97070C.1
taagaaatgtgatattatattgtcaggttaaacaattttacattgttaacctatctgagataattgttgaaataacttttaagaaagttattataaaaataaacaaatttttcataggtgataacttttttttttggtgaattaatatgtgataacttgtgattaggtaacataaatctttttatagtgtcccagcatgtattatttaccctattttatttttgttttatctcatgttagagtaataaattgaaatagctatgcatttttccattcatatatttaaagaagaaaaaagatttttgacacctagagagagtgaaaaaagagaaaaatataggtataataagcgatatgacgtgataggaaaataaaaataaagataaatgaaaattattgatgagatgtttaaaataagtgactgttgaaagattatcctctttaaagaaatctaagttagaagtacttgacgtaatgtacgtacatggatcacgatcctctgcagtttttttaatccgcatggatcgcaactattacttttacttacataaaatttgaatgaaaaataaaattaaaaaagaatgaaaggtgtaagatttaattaaaccagtgaaccccctgcagttat

SEQ ID NO: 139605 - DNA, 479 bp, Glycine max
  Clone ID: PAT_MRT3847_97071C.1
ttttttttttttttttttttctttttttttttttttttttttttttttttttttttttttttttttcccaagcccaaaaaaggaaggccagggccttatttttttttttgaaagggttttaaaaaggcccaaattaaacgggggggggagggggcccgggaaaaaaaaaaatggtttgttggttgggacccggaaaatggccaataccgggcccatttccccccttaaggacccttaacaaaccaccctggtaatcttgggggggttaaaaaaccttttaaactttaacagggggggtcccgggtttattaaattgggggaggggctttttattccacttccccaaataaaacaaaaattctttaaaggtcggcaaaaggggcttaaggggcttgggggaataaggaattcttcttcttaacccaaccaaaaactttttcggggggttgagaaaaaaggggacgggttctttttccttt

SEQ ID NO: 139606 - DNA, 468 bp, Glycine max
  Clone ID: PAT_MRT3847_97072C.1
atggttgttagcgcgtcggaacctgtttccagtgcggctgtggttgaggcatgtcgggactaccaaataaaaactccttctatcaatattgcccggaataaatcatataagaaaccgccctataatctagaaaacacgaataacttctgtgcaatcaccgtagcacctccggtagtaaccgcccctatcgtacaccccctataccccgcggcggagggcaagaaagaaactacaactctacctaaacgtaaatagaaactagaacgtccaataaataccgtccgttaagttccgcgccgaccgttgacgtgacaacggaaaacgcaaacgctacggccctaaagaagaaactgtgaacttaatggccctcttaccaggactccgaccattcaaccaacccttcacgcaaatacaaaccccaccgcgacgtgtaacacccaccccaacaaaaacaccaaccccggttcc

SEQ ID NO: 139607 - DNA, 423 bp, Glycine max
  Clone ID: PAT_MRT3847_97073C.1
gaattaaacaccgcgcccaacccttttcctctcccttctcccacctcaaacgccgtcgtttcgaccaccttcttcggtcgcggcacaaccaataaccatgtcgctgccagattgtcccgccgtccaacttgcccaactcctgggcccaaataccacaaacgctgccgccgccgcctccttcatctgcgaccggttcaccgccgtggacaacaagttcgtcgacacggccttcgcggtcgacaacacttacctcctcttctccgcctacctcgtcttctcgatgcagctcggcttcgccatgctctgcgccggctccgtccgcgccaagaacaccatgaacatcatgctcaccaacgtcctcgacgccgccgccggcggcctcttctactacctcttcggcttcgccttcgccttcggctcccc

SEQ ID NO: 139608 - DNA, 371 bp, Glycine max
  Clone ID: PAT_MRT3847_97074C.1
gcttggaaccgttggacggatttatgtgcttgcatggtcgtgagaagatgatagcaggggactctaaaaaataaaaactaacatggcagagagaatataagtataggactgaaagaagagcctccccccgagagagaccgggacggtcccgatgaagaagactatatcgaagagcctggatggtgaggttcctgaggcggaggaggtggcggtagcggagctttagatgactaagtatacgactgacgatcatcgtgttgatagtggaaccttctcctttaacgccattagtaagacctcggctaatgccactgagcaccgtaagaagtatgccgaggttaaccgtgtcgacgagaagtttagctaggacg

SEQ ID NO: 139609 - DNA, 234 bp, Glycine max
  Clone ID: PAT_MRT3847_97075C.1
gccgttcctctcttcttcattattagtgttttcgctcaatcattttgtttttgtctatatgctttcagcttaatatgccaaatgatgaatctttcgaaattgttgagaactcaaacttcgatttgagtgcaagaatatcatttcattgaataggaagatctgatgctgcttagtcacattctcaatttctcattaccacttttttttaattatcgatatttatatttttatagt

SEQ ID NO: 139610 - DNA, 308 bp, Glycine max
  Clone ID: PAT_MRT3847_97076C.1
ggaagtcgagaagaggaagaagacgaagatggagaagtatcaaatgtggtgcaggagaagagtcttagtaacgtttgcgtatgcgctgctgttctaatcagtctgagcagacgacgtcgttgtgctctcttaagataacttctagaatcgaactttgtcaggacataggagctctcgttgagttctatgccccttggtgtggtcactgctcaaagcttgctccagaatatgtgaagcttggtagcagcgtcactatggccaaagctgtgttaattggacaagttgactgtgatgagcataatagtttg

SEQ ID NO: 139611 - DNA, 108 bp, Glycine max
  unsure (1)..(108): unsure at all n locations
  Clone ID: PAT_MRT3847_97077C.1
cgcaccagtcttcacctcacgaatatttcttgttgtttggagcggatccgtataaaaactnctgtaagacatggttggtattaccaggaccctctcttacagtgtgat

SEQ ID NO: 139612 - DNA, 265 bp, Glycine max
  unsure (1)..(265): unsure at all n locations
  Clone ID: PAT_MRT3847_97078C.1
ctgatatggccttcaattcaattgattccacaatacatgatangnanttcttgaacagtggtccgtgggctccaccaccagncccgccacctctgccaccagcacagtttcagcggatgaggacatataccaaggtatataaacgcggantgtgggaaggtccatagacataacacgatattccaggttatnaggncccttaaaaaggatcnagccccctaagntttgcnataaagggnanantgnggnnccncaaaaggaagtt

SEQ ID NO: 139613 - DNA, 1488 bp, Glycine max
  Clone ID: PAT_MRT3847_97079C.1
ggaaacgaaagcggaaaggaaggaagaaagaaagaaacaacactgactgaacagaactcaagctcaacactgtctgtagaaccaggttaatagaggtccaaggccaaacttgcctttaaggtttgaaccgactgactacaatacactcctcacttacaaatttcttatacaatccatgattgtgttacacctttttgctgctccccttccttcttgcactaccattacatgctccaaacatttttcccatgacaaccactttgtgcgatcttcaacggttccgcggctatccctgagccatgtcagaacaaggatattcttatgtagtgctagaaatcgacagaaggatttgaatggtagggacttcagtatagacattgttaaagaagatcaagagcttgaggatgatggtgacgatgggtttttggctcaaggaatgtatgcaagaagggatgcaaaagacattgatgaagaagaagcacaagaaaatgaagatgatgatagtggatattcaggtcgaggaccatatacaggtaggccagggaaggattatgatagagatccagaacttggtaacattctcgggagttttctagaggacccccaagcagcacaatccaaattggaagacagactaagaaagaaaaggagcaaaatattgcacacaaagactggatcaggaaaaccaatgaaagtgtcatttaacaaatttgatttttcaaactcatacatatggtttgaattttacaatgttccattgacaaaagacgtatccttaatttgtgatacaattcgagcgtggcacattatcggacgtcttggtggatgcaatgccatgaatatgcaactgtcacagtctccaatggatgcacgaccgagttatgattatattcaaggagcaaatgtggaaccaactacattttacaacattggggatctcgagttgcaagacaacttggctcgaatatgggtggatattggaactgttgaaccattgcttctggatgttttgataaatgcattgacacagataagctccgattttgtggggatcaagcaagtaatgtttggtggatcagaatttgagaattggaatgacagtttgaaatcagaggatgcaggttatggtgttcacaagatctagcagccaattttatagacttatgaggattttgaattgagcgcaatgaagaggaagccatcaaatgtatcactttttcgtaacagttagtattagactgaagaataagcagggttgtaagcatttatcctagttgtatatttttttaacggcaggtactaaagcttatgtcaacttggtggagtgtatttttatttataaaaatgctggttctaagagttgtgcaaattgcaataaatgtaattagaaaatcaaaaaaaaaaaaaaaaactaaataatgcttggtggagtatatttttatttattactagtcggtaacccgtgcgcatgcacgggtcttttatcta

SEQ ID NO: 139614 - DNA, 361 bp, Glycine max
  Clone ID: PAT_MRT3847_9707C.1
tttatttgtcagcgatcatatctcaagtcctgactgcaacatattaggcgctaagctgcaggatgatactgatcataccaattctgaaaatgcagatagcagtcttcttgttgcgcctttcaaaggcggatggttcattcgggtggtttcattttcaaaaacaatcgagcagattgtaccacacatgaatacaaggactcagcttttgagtaccactaccaatggtgattaagtccaaggcaaagatctctccatggttaaaggtaatgtatgaatgtgccgatgatggcttgacatcaattaacactccaactccattgatggaatcttgtttgcaaaaagacagagggttaattgtgga

SEQ ID NO: 139615 - DNA, 268 bp, Glycine max
  Clone ID: PAT_MRT3847_97080C.1
aaataaaatagccattttcattcagagcaggagcatgtaagatcatattcatccattaatttgatgccaatggacagctggcctaacagccttcctaagctaaactaagaccctggtgccattttgttaaatgaccagcaacttctaacttgataccagtaactgacccaattcttttatggggaacacacatgtatgttgaccggttttacaagggccaaatttggataggcattcttcaccttctctagaatgggttagaaatata

SEQ ID NO: 139616 - DNA, 412 bp, Glycine max
  unsure (1)..(412): unsure at all n locations
  Clone ID: PAT_MRT3847_97081C.1
gctgtttactgcttctgctctctacacccccacatctctctctaaattttatacgagcctctncctacctccaagccttgtgtccaatctctccagagccccaggagacgccctctccgacttggaaccacacgcgacgcccaccccatgcaactaggaccagccgtcaacgtgcgatcgccgcaacacggaggtcgtcgccaactctcagacttctccaaacctccaacatctccggccccgtgccccggcaccacacctctggcgactccctcgctcgccttcctcaacttttcctacaacaatcctaacgccaccctccccgccgccgcgttctccgcctgcgccgccctcctccacctagacctttcccagaacctcctctccggcgccattcccggcaccctccccg

SEQ ID NO: 139617 - DNA, 770 bp, Glycine max
  Clone ID: PAT_MRT3847_97082C.1
tacggctgcgagaagacgacagaaggggaccaccctcctaaccaatcaaaattcatgcatacccgtcacactcactctctactcattttccctcaacttagcaaacaagttaggttctctctctctctcaccaaaaacgcttcagatgaccctcaattgaaccaagagcactcatatcctcttctgaaacacacaaattcgttaaccaccaagtaggaaggaagagtcactctaaaatctttgcactagttttgtgttgtgcttgcaaggcttggaagcttacataatcttaaccacctcttcctctaattttcatgtagcagtgaaatctatggtcagcaggtctttttggtgaacgcaaccctggaaaccatggatcatactacgggtaaagagatgacactatctcgaggataagtgcacttggaggtgatggatacacgatgtgattagaggcgtagataacttccttgggtatattggttaattatgctcaaacacctactgacttatgcttgggtgtagtttccaaattggcttgggtgttagagattactactctaagtccaagacctttatctctcaatgtatttgttatgggtaggcctaggcttcagacttttatttctatattcaaccatcagattccattatatgcgccttgactcactcatgcccttggatgtatttaacactttcaaaactcagtatgcttgtgtatttatgcactctttacatgtatttcagcagttttaagtcatttaaaaaag

SEQ ID NO: 139618 - DNA, 725 bp, Glycine max
  Clone ID: PAT_MRT3847_97083C.1
cgggaatgctgttttcaattttgttgttacggcgtattcgaaggctggggaaatggggaaagctgtggagatgatgaggttgatggaaagtagggggttgagaccagatgtgtacacttatactgttcttgctagcgcttattcaaatggtggggagatggaagaggctcagaagatcttggcagaagcaaaaaagaagcatgttaagttggggcctgtgatgtttcacactctgattcgtggatattgcaagttggaacagtttgatgaggctttgaagttattggccgagatgaaagattatggtgtccgtccaagtgttgatgagtatgacaagttaatacagtctctctgcttgaaggctttggattgggaaatggcagaaaagctacaggaggaaatgaaagagagtggtttgcatctcaagggcatcacgaggggtttgattagagctgtcaaggagatggagaaggaggttgtggaggctgagagcattactgcagtggtgtaaacattgtttgctctttgaggttgtgtatgatgtgagaggccttgtagttataactcttttctgattagcataccattttgttaggaagttgccatcttaatgcagaaataattgtgtggaggaaatttaagaagtgattgttgatgtatttgatgtcttttacatgcattttttttcttccttttataatattgaatcaagttggcagtgtttt

SEQ ID NO: 139619 - DNA, 198 bp, Glycine max
  Clone ID: PAT_MRT3847_97084C.1
gaacaccaacagggcggattttataccaaaaacccgtctgatgcaggaccttatattcttcatgtgctctaacgcacctgttgtggtgaaggatctgttgtcagtatacaggctcatctcctactatgattgcaacttgtcgtgtcaaaaacaagaagctataacatatgtaaaaaaaaaaaacaagggcagacgact

SEQ ID NO: 139620 - DNA, 563 bp, Glycine max
  Clone ID: PAT_MRT3847_97085C.1
gcatctatctgtattttgcattattggtttttcttgtaacagttgacctcaaatcttcgatcaactcctttgatggaattcgcgtcttcttcatcacccttctcaaaatccaaaacccaatggatgtacgatgtgttcatcaattttaggggagaagacatccgtaagaatttcgtttctcatcttcattctgcccttttacatgctgaagtcaaaactttccttgacgacgagaatctactgaagggaatgaagtcggaagaactgatccgagcaatagaagggtctcagattgcagtagttgttttctccaaaacctataccgaatctagtttgtgtcttcgtgagcttgaaaaaatcattgaaagccacgaaactcgtggccaaagagttttacccatattctacgaagttgatccttccgatgtacgtcagcagaagggtgattttggagaagccttgaaagcagctgcacaaaaaggattttcaggagaacatctggaatctgggttgtcgaggtggagccaagccatcacaaaagctgcaaacttgcctggttggga

SEQ ID NO: 139621 - DNA, 336 bp, Glycine max
  Clone ID: PAT_MRT3847_97086C.1
tttgacgcctgcgtttttcttatcattgatccgaccactggaggctacgaagctggaatttacaaggatggacagactcgtgaacatgctctgatatcattcaaccttggagagaaactaccgatttgctgttgtaacaaactggatgcttctacacccaacattttcaaggccaggtttgatgatataatgaaggatgtcccttcctacttgaagaaagtaggatacagccttgtctagaaccgtttagtccctatctttggttttgagggagacaacattagctgatagggccacaaaactagactggatcaaggacacaactatgcttgatgc

SEQ ID NO: 139622 - DNA, 486 bp, Glycine max
  Clone ID: PAT_MRT3847_97087C.1
ccacgggcatctgtgcgtttcacgaagaattgtcatgcctagtcgagcgagaggcacatgtgcgattcccaagcttcattgccccgttttcatttggggacttgccgttagaatctgtgggactccgttttacattaaaaaatgtcacacattataaaaagaatattatttatataagcaaaatactataaacccttatatttatggtacgtgataatagcctgtgcttttgtgacttacgagatattacttatatatatgagaattgtattctatatttccttatcagcaaaatactattaatctttgcattgatattatacatatgataagtcccgagaatatataagtaaacatttatttacacagagatatggagactcttgcgcggcgtggagcatatttctcgtacatggtgtgccattcctatccctgcgagaaatacttccttcatcacatatcctcaaatggaacagcccccgctga

SEQ ID NO: 139623 - DNA, 371 bp, Glycine max
  Clone ID: PAT_MRT3847_97088C.1
tgatattcctgccaagcgcctgtactgcttcttctcttctctttactctgtgctggttcgtggaggccgagctgtcctgcagttgtaccctgagaattcagagcagttggagctgatcaccacccaggccaccagggccggcttcactggtggtgtggtggtggactaccccaacagtgccaaagccaagaagttctacctgtgtttgttttctggaccttcaacctctctaccagagggcctgagcgaagataccgaggaggagaagcctgccgagtccacgttcacggctgataggatcccgtacaggatagcaagacggggtgtggtgaggaagagccgagaatgggtcctggagaagaaggcacgcc

SEQ ID NO: 139624 - DNA, 193 bp, Glycine max
  Clone ID: PAT_MRT3847_97089C.1
ctagagggggatatggtgtgaggaaggcgtatgcttggatggatttgcctggcgcagacctaatgggtataatatcgcttacttctgatcccagatacgtttaatggcatataacgtgaataaagacttagggcctatgaaatctactgttcactcctataatgtctatatctggatatatgcagaactggct

SEQ ID NO: 139625 - DNA, 704 bp, Glycine max
  Clone ID: PAT_MRT3847_9708C.1
cccacgcgtccgcccacgcgaaaaacaatagtcacagtcgagtgtggttgcgtttctccgttctgagaaggttttggtcggcgaagtgaagtcttctccttcaacaacaacaaggggttgccgtgaagcatggatgaagctgaatttcaacgccttctccaacttttccccgttgttcgttctcgcgattacaccgcagaagcaacatcatccagacaaattgcatctgggtcagcacagaatgagataaaggaatggcaagatgcatgggacgaaagggataaggattttgagaagcaaggaattaatcaacaagattcattttggagcaagctaaagtcagaggctgctaggaaggtgggtgcagaagaagcggagagattttgcaaggcattccaacaaatccataagaaactagtcaatgaagagttgagtttagatgctgctcgaagcttcttaaattcatcctagagttctaaagaatcacgcatgctttcgacatttcttgtgattaaacaatcagccgttgtaacattgtaattcttttgtactgtatcaaagtattttataatttaatatctgcgagattttgatttgtagttatttattattattgtattagtaagaactaatattcttcccccattaaccctcgcccctttttcttcatttcaaatgaagctgaagtttgcatcaaaaaaaaa

SEQ ID NO: 139626 - DNA, 602 bp, Glycine max
  Clone ID: PAT_MRT3847_97090C.1
ctatatttgctgcttccttacctacatcacatcctagctttgctccacagatgcatcttgaattgcttcctcagtggaaagctcctcctcttcagaatgtgaatgtggagcttttcattggtatcctttctgctggaaaccattttgctgaacggatggcagtgaggaagtcctggatgcagcataagctaatccaatcttcacgtgttgtggctcgattttttgtagccttgcatgcaaggaaggatataaatgtggacataaagaaagaagcagagtattttggtgatattattatagtcccatacatggatcattatgaccttgttgtgttgaagaccatagctatctgtgaatatgggattcggaccatgacttctaagtatataatgaaatgtgatgatgacacgtttgtcagagtggattctatcctaaacgaagcaagacaagttcgaagtagaagtctgtacatgggaaatatgaattatcaccataggcctcttcgccatgagaaatgggctgtaacttatgaggaatgggtagaggaagaatatcccatctatgctaacggtccaggttacatagtctcagctgacattgct

SEQ ID NO: 139627 - DNA, 260 bp, Glycine max
  Clone ID: PAT_MRT3847_97091C.1
cacgattgatgtcttgtatgaatctggtattgatagagctcaacctgatgcatttttggaagttggggattctagagaataccctgttagtctttcagtgtttgatgaacttgaaaagaggtactctgattggactaattgttcaaggtctgaaaggagattgctttttgatcgtataaatttgggaattatcagtatatacgagcaattcacgagtgtacaaccatgggtaagctctactacatccttaaatctttgtt

SEQ ID NO: 139628 - DNA, 212 bp, Glycine max
  Clone ID: PAT_MRT3847_97092C.1
gttttcaaaagatttttcaaactgcttctcctgcttctcttgtcacatatttgcggatttcctcttgtgactcaaaaagaattctccacactctaattgtgtatcaaacttactacggtgctgaagtggagggaaaagagagtctggggtcttctgcggagagggaaacctcttttgcgggacacttttcttcttgaatattggaaggaacc

SEQ ID NO: 139629 - DNA, 710 bp, Glycine max
  unsure (1)..(710): unsure at all n locations
  Clone ID: PAT_MRT3847_97093C.1
cacgcgtccgtccctccaacacttacatagttacatacctccctactcactccctctctcttttccccaaaactcaaactttttcccttctccaaataactatttcttcccttcaacctcaatcctccaacttctttattactacctcaccccaaacacacatacctcaactccaacatcacatttttattcatccccatattattattattataacataacttttttttgcatatatgctcgccggcgatgccgacgccggttagcaccgcgaggcaatgcctgacggatgaggcggcgcgtgctctcgacgacgccgtctccgtcgcccgccgccgcagtcacgcccagaccacctccctccacgccgtctccgccctcctctccctcccctctgcctccctccgcgacgcctgctcccgctgccgcaactgctcctactccccccgcctccagctccgcgccctggaactctccgtcggcgtctccctggaccgcctccccaccaccaaatcctccggcggcggcggcggtggcgaagaaggccctcccgtctcaaactccctcatggccgccatcaagcgctcccaagccaaccagcggcggcaccccgacagcttccacctgatgcagatgatgcagcagcaacagcaaacgacgtcgttgctcanagtcgaactcaaacacttcattctctctatcctcgacga

SEQ ID NO: 139630 - DNA, 1201 bp, Glycine max
  Clone ID: PAT_MRT3847_97094C.1
aagctctcagcagagacagagagaaggaggattaaccgtacaaaaaaatgacgctgctttcttctctctgttcctgtcctcttattcctttttcctcatcgtttccgttgacatcatctaatctctatggtttctccaacatattcaggacccaaatccaatcctcagctgccaccaacatttgcacccaaaaaatcgacaccactctcttaaccatcgctgaatccttctacgaggatgagctctgggccgctgcctgtctccgcgttcgttccttcaatcaattccgccccgacgccttcggaatcctagatcatacgaggtacttggctgagcgcgagttcgaagcccttaaggagcgcgtttcagggaaaagaatgggcttcagaagagtctcttgcataaatgcctcccttcctttgtcccatattgccaccctctccgatgatttgtgctcttcatgtaagttttctaccaatggagaggaccggattgtagttggtactcttgatcttaatcagtgcttgagccttcccgatgaaattgtaggggcgaagcctgaggtcattggagctgatatcacaagggcatacctcagtaatgtatgtgttgctaaagaactgcacagaaatgggttggcttatgcacttcttgaaaagtcaaagttagttgcttatgattggggcataacagatttgtacgtccatgttgctgtcgacaatgaaccagcgaagaaattgtatataaagagtgggtttgtctatgaaagtgatgaacctgcgtggcaggccaggtttctagatcgaccccgaagacttctcttatggtcagggttttcaaggacctaatttaacagtgttgtcctatatcttctgttaatttgattttctgtctattcttgttcagttattttcagaacattcctaccttggttcatatagttctttttcctttcattccaaagcccaaatgtaacgtgttttgccattttagcaaatctggcttacaaggatgctttaagatatgatgacatgaaatggctccccttgatgattgtattttgataaatatcaagcatacattgttaggctcaaaaagttgctcaagaaaacggaactcgcacttgcctagcatattcgtatgttattcagtgttgacaccattggcgccccggtgcattataagaccaaaaaaacccaaa

SEQ ID NO: 139631 - DNA, 406 bp, Glycine max
  unsure (1)..(406): unsure at all n locations
  Clone ID: PAT_MRT3847_97095C.1
cccattcgtccgttctggccctgttgnagaaaacaacggggaggggaagagtgtaattacaaaaggcgaaaatattatagcaaacacaaactcagtataatttaagcccaaaacaatatgcaggcattaatctattgacaaagtaaagaatgcaatgcatagaactaaaataaaagacaattgatacaactaaatccaaaaaaagctagttgatagccaaccctaacacagaagcaacgtgagatgttcgattgaagataaaaaaaatcaaagaacgagtaaacaaaaataaatcagaggtgcataataatagaaagagaaaccagaaaccaaataaacactaaaaagataaaaaaaaagaaagccaagaaataaaaaaaaaaagaaaaaaactaagaaaagcaca

SEQ ID NO: 139632 - DNA, 597 bp, Glycine max
  Clone ID: PAT_MRT3847_97096C.1
acaacagatttcaccattaatttaggagcggaatctgcagacgagagtctataacctacaattctgcaaaaatactgaaaatctttgaaacatgttgaaactcagcaactctggaggtatttgagatcgatacatatatctttcatcttatatatatctagatctttgttaagactaacacgggaaaattaatgcaattcctcatataatttcaagagatttgaataaagtgggtttcctaataagaacacatacattaaatttatgataataacatttcacacttttctaaacatttttctacgataattttatatctagcttaatgatattttatgttttacttttgaatgaaataccataactttctgttcattcaaaataaaatttatcgttgtgcatttatgctttggtaaaaaattaatacaaattactgatcaaaacaattaattcaaattaagactcttatttaatataatggatagaaccactcgtgacctaattagctgaatattaatattttaaaatattcaaataagctctcttttggtagaatactcgaataagtttgcgttttggcatggaagttaccaacta

SEQ ID NO: 139633 - DNA, 1883 bp, Glycine max
  Clone ID: PAT_MRT3847_97097C.1
tgggattctccttacggacgcctctcctaagaatcaccacagcaagagcaagaaaaaaaaggaaaaaaaaaagactttctcttgaatcatcatgaccatgaaagactccatagttctatattcagctttgggaagaggacaccttgtttcaatggtggaactaggtaaactcatactaagccaccacccttcactttccatcaccattcttttcctaaccccaccccccaaccaagacacccccacctcccccaccgccttcacctgcgacgccaccgccaaatacatcgccgccgtcaccgcctccaccccctccatcaccttccaccgcatccctcagatctccatcctcaccgtcctccctcccatggccctcaccttcgagctctgccgcgccaccggccaccacctccgccgcatcctcagctacatctcccaaacctcaaacctcaaagcaatagtcttggacttcatgaactacagcgccgcacgtgtcaccaacacgcttcaaatccccacttacttctactacacttccggcgcctccaccctcgccgttttcctttatcaaaccatctttcacgaaacctgcaccaagtccctcaaggacctcaacacgcacgttgtaatcccagggttaccgaaaattcacactgatgacatgccagacggagcgaaagatcgtgaaaacgaagcttacgaggtttttttcgacatcgccacgtgcatgagggacagtgacggggttatagtaaacacgtgtgaagccatcgaagagagggttgtggaagcgttttccgaagggttgatggaaggaaccacgccgaaagtgttttgcattggacccgtgatttcttctgctccttgtagaaaggatgataacgggtgtttgagttggctcgattcacaaccgagtcatagtgttgtgtttctgagtttcggaagcatggggagattctcgaggactcagttgagagagattgctattgggttggagaagagtgagcaaaggttcttgtgggtcgtgaggagcgagttcgaagagggtgactcgggggagccaccgagtttggacgagttgttgccagaagggtttttggagaggacaaaggaaaaggggttagtggtgagggactgggccccacaggcggcgatactgagtcatgactcggtgggtgggttcgtgactcactgcgggtggaactcggtgttggaggcggtgtgtgaaggtgtgccaatggtggcgtggcctctctacgcagagcagaagctgaataaggtgatcttggtggaggaaatgaaggtgggtttggcggtgaagcagaacaaagacgggttagtgagttccaccgagttgggggaccgagtgatggaactcatggactcggacaaagggaaggagattagacagaggatttttaaaatgaaaatcagtgccacggaagcaatggcgaaaggtggatcttcaatcatggctttgaataagttagtggaactatggagggagcactagtagtatagaattagagatcgatagaatattattaagttcagaaaaaagtgtgattcattataaaaagcttaatgtctttctcaaataaacaacgagcacgagatcagttgttgttaattacgaatgcatgtttgcaagattaattatgaattgcgtctaaatttggttgtatgatgcttaaaagagtattattttttttcctgcttttattttaagtcaactgggtcaaccagttcacaagttgctacttctcattgtgtatcaattaaaaaaatagcattttaatattagggtatgtacaagtttgaacaagtaggagtcaaccatccatacgaaaatgctattgagtatatatacgaatatgaaattt

SEQ ID NO: 139634 - DNA, 899 bp, Glycine max
  Clone ID: PAT_MRT3847_97098C.1
agatgagcaaggatcactaatttgaaacaaattcaacttaaaaaattaagtctacaagtttaaagtttggaaaccaaatggtataatatttagaggacaagtcaatgtcaaactgagaatcaactctgtttccacagcttagccaacttatccaacgaagcacgtgatgttccgccttcagccattgcttccgcagcactcattttcatcttgaaaatcctctgacgaatctctttccctttgtctgattccatgagttccctaactcggtcccccaactcagtcgaactcacgaacccatccttgttctggttcaccgacaaagccaccttgctttccttcaccataaccatcctgttcatcttctgctccgcgtagataggccactccaacatctgcaccccttcacacaccgattccaacaccgagttccacccgcagtgagtcacgaacccacccaccgagtcatgactcagtatcgccgcctgtggggcccagtccctcaccactaaccccttttccttggtcctctccaaaaacccttctggcaacaactcgtccaaactcggtggctcccccgagtcaccctcttcgaactcgctcctcacgacccacaagaacctttgctcactcttctccaacccaatagcaatctctctcaactgagtcctcgagaatctccccatgcttccgaaactcagaaacacaacactatgactcggttgtgaatcgagccaactcaaacacccgttatcatcctttctacaaggagcagaagaaatcacgggtccaatgcaaaacaagggtggtggtactgtcgcatcctcacttaacgctctgatggcttcttcttcaatggcttcaaatgtgtttactataatcccggcaccacccatcat

SEQ ID NO: 139635 - DNA, 255 bp, Glycine max
  Clone ID: PAT_MRT3847_97099C.1
aaagaagagaagtgagagtatatatatatataaaagtgctagctgaaggaagatgtctggagaagcagatcgaacgagcattgaggaagagatggacacaggaaaggcgactgcagagaagaacctgaagctcaaagaccgaaaggtatcatgggcaaagctacgccgcgtagattctctcaatttagaagctggaagagtttctacggttgctcacaacccctaccagatgggttggaggacgacgctgatctt

SEQ ID NO: 139636 - DNA, 287 bp, Glycine max
  unsure (1)..(287): unsure at all n locations
  Clone ID: PAT_MRT3847_9709C.1
nngtgnntgancngaggttttangnncgnnggnncggctcggggntgagntacncnatgttgnnggnagcaangcataagtgtcggaccttaaanncatgtctgnntaannttgtcgtntgacattttggnantgtagccnntgaanttntattcntctatggntgcctcatnttangctatncantcaatccttgngaancctatgatccgnatttccaacgggngctagggagaancattttggtatncctnnntgtnacatgggaaggggtgtggcctnagagt

SEQ ID NO: 139637 - DNA, 668 bp, Glycine max
  unsure (1)..(668): unsure at all n locations
  Clone ID: PAT_MRT3847_970C.1
gagaaaaaatatatacgaggangnnnnnatacaatattatttttatagtatcatccgatcttaaaatatcgtattagatttattggtgtttatatatnnttaccctaattaaaatcgtactaaacatatataattttcgattagtacgttaaccgggtaaaaactttttcactaattaatagttgcatcatatgatatatacagctatgaaaatatcatagaagttcacataatttaatattcttcaactgttgtcccccacacctctataataaaatattctttttttcataaaatatctccaatccaagacatctccctaaaccttgctttcttttgcgatatatatagaaatgctaatcttaattgatgtgcattagtatttaataaaaaattggattatcatgattgaatattttgtttttcaaaatttaatttataaacaatatcgtattttatcatttagttttgtttaaaaaatcatatatattagagagaatagtggaaaaaggatgggaaagaaaaaaaaaatacngagnnnanntaaataaatggtggnnnttaaacaaacgaccagaataaaaatgntnnnagggtanngaggttggtggaaaaggtacactaaacattaattttctgcnnntttatgatcgtcactattgtatgct

SEQ ID NO: 139638 - DNA, 225 bp, Glycine max
  Clone ID: PAT_MRT3847_97100C.1
cttctgcattattcatcatagcatgaggtgcagaggtgaacggctccaacaaaagccacaaagttatatgaccttacaagcattctcatcatatataacacaggagctcgcatccggaatcacgcgcgagctgtccacttaggatattgaacgtcatatcctatcgactgagttgattgaagagagcatggcagacaccttactagactgagacatatagattga

SEQ ID NO: 139639 - DNA, 560 bp, Glycine max
  Clone ID: PAT_MRT3847_97101C.1
ccttgttgaaagcagaagatagagttcagcgactattgggcaggaacatattgctatctaactttcctagttttctttccctctgaattctaaattgctcttgcggttggtacaataatatcctcacaaattgctttaacgataatgctgtgcttcacctatcagtgtcctataggcacacatatttaccatatgatgttgcaaacatagtatttatttaatgcgttgagctttatagcaaatcaaatttcaaccgtccgggatagtgtggttagtcagtgttagcaatgaaatgaaacactttgtcagctactatgctacaacgtctcactttttagtacgcttatttgatttgttagttgattagtgctttcagcctcagcttccattcattatatgcttcattgactgtataaagtacaccactttgatttttgcttcctttttcttaatttcttttttttccttggtgtctagttagaaatcaagagccggaatatggagacattaattattcatactgcacagagccgcgatacctccaaataatatttttcttg

SEQ ID NO: 139640 - DNA, 451 bp, Glycine max
  Clone ID: PAT_MRT3847_97102C.1
gttgatcgcaactaacattatttaaggcttgggatagcctctgtagaacaaatcatatcgaagcaataagcacctactaatacttgaccaaacacaagtcggaaaactattgaacgtccacaagtcgggcttagattatatgattattcgcatggtgctgaacttgggggatctgcccgatcatcgtatttggatggactcgtctggtgaccttactgatcatacgcggtcgaatatccttggccctggggtgccttgaccttcctgttatagagtacttggacagccttacccttttgatgttttttaccatactttatcattctgcgatcaactaagacttttggccttgcgggtcttacctggacaccttgttttggagtacatgatctttttgaggcgcctcgggaacagcccttatacttagttgtgcactttgcgatctcttggg

SEQ ID NO: 139641 - DNA, 903 bp, Glycine max
  Clone ID: PAT_MRT3847_97103C.1
cttcatcagttccaccacctcatcctcatccacacaacactccgctccgtttcctcttcactcctctttccccacacacaacacactcagatctctcaactcagatctctcaactcagatctctctctgcttccattaatttcacaatggtcactctcttcgactccctcgccgtcgtgcgtctccccaccgccgccttctccccggctgccaccagccggacctccgttttgctcccgcactgcgccggcctcaggctcagacccgccgccgccacgcgcttagttgcgtcccccgctcgcagaatcgcttcacgcgccgcgcgcgtcgtatgtgaggctcaggataccgccgtcgaagtggctcctattactgatgcaaattggcaatcccttgtccttgaatctgaatctgctgttttggttgaattctgggcgccatggtgtggtccctgccgaatgattcaccctataatagatgaactggcaaagcaatatgctgggaagctcaagtgttacaaactcaacacggatgagagcccttcaaccgctactcggtatggaattcgaagcatccctactgttatgatcttcaagaatggtgagaagaaagatacagttattggtgctgtgcccaagtcaacattgactgcgagcatagaaaaattcgtatgaggtggtaagtaaagaaggcctttgctggaagtaaagctgttttttccccattagcttcttttcttctaagccccatgtctcaagtttcgataatttgtttactcaaatgctcatttatgctcctgtacagttattggatgctacctaattttatgtttttagattattcgagttaccaatatactaagtgaatttgctattgaaacatagcacgttttaaattcatttt

SEQ ID NO: 139642 - DNA, 263 bp, Glycine max
  unsure (1)..(263): unsure at all n locations
  Clone ID: PAT_MRT3847_97104C.1
tgaaatagataaccttgtatcatgncagttgnnctnaancngancttagagggtagaacgttgcangagcccataggnagtanngnanaaganttttcntncttgntatctnanggtaatcnggancggnattnaaanangttncccttttatcagaaatgcaagctccatctcatcaccatcaatttcaatacgacaagcaataatgcctntgactacntaatagttngaggangcacagcaggtgtctttngctgaaacct

SEQ ID NO: 139643 - DNA, 525 bp, Glycine max
  Clone ID: PAT_MRT3847_97105C.1
ggagactgctggtggtgataatatctactcagtcagcacatacctacagcgaactcttaaacagaaataataacatcttaattttcattcaaaccgttttgttaggaaaaatgggtccgaaattggcgaaaacagggtctttccgtcacggtttggcggagaagaaggacaagcttctctctgcgtcggcgaagagtagtagtagttattctgagataggtattgacataaccacgcgagaggaagacgaagagcaatcgtggtggaacacgtttaagcgcgtggctgggaaggcattggaaatgggtcgctctgatccaaggaagattatcttctctgcaaaattgggtcttgctttgaccattctctcccttttgattttcctcaaagaacccttcgccgatttgagcagctactgcgtctgggccattctaactgttgtcgtagtctttgaattcaacataggggcaactctgagcaaaggggtaaacggtggaatggggaccatgttggctggaggacttg

SEQ ID NO: 139644 - DNA, 216 bp, Glycine max
  unsure (1)..(216): unsure at all n locations
  Clone ID: PAT_MRT3847_97106C.1
ttctcgctctctgtcacaggtgtagcggcgaaactaagatcttttaaagaatggcgagaacctaccccnttgttgctcttttcacagctcctcctctttaccttatctctcattcaatctaataatatcttttgagttttctttggattatttccctctattccttcctcttactttttcctttctttctttcttattctttcttttctctttctt

SEQ ID NO: 139645 - DNA, 350 bp, Glycine max
  Clone ID: PAT_MRT3847_97107C.1
cagttcagttgtgagtaaaggaaagaaagggatcagtagcgtgatgacgatttgttggggcttatgtgatgatttcagttgcattgatcaaaacaaagtttctggtttgtggtcaatctgcgttgacaccgatgcattctcatgagtcgccattgatggattacctctatttggcttatgcaataccaccacatgaattataagactttcacagtcacatcttgcatcatcaattcagcgtacgtccagttacaaagttcattcactgttaattctatgttcgccgtctacagagaaccacagtttcacaaccttactcgcgatcgctagacaactacatcctcagggaa

SEQ ID NO: 139646 - DNA, 795 bp, Glycine max
  unsure (1)..(795): unsure at all n locations
  Clone ID: PAT_MRT3847_97108C.1
agtgtattcaagtatccatatctaatgatctgtaagcaattattccttaaaaaagaaatatgttacacttaaacaaaaagtaccctgcttccttggaactatatagtagagtttaattccatcatgtttacaatattgaagaacttagaacaaataccatcaggaggaaaaaactaaacaaaatgatggcacaaggtgttgaaacctttttttttttaagtccaacagagaaaatgcatagtgcatagttgcattcaccaggaactcaagatatgtaacttcaaattcaccgcttcccgtattagatggaggcctcaatgcatcgggaatccgaggcacctccaatggtggcaactgtgacaaattcccagctgtcttcacagtggttttctcaaatactatctttatctttgaagatcctatgagttcaaatttgtgagctaatgtggcagtcgcttcaaggggtggtaggggccacggagcacctagttgaagctccactatgttatcaaaatctttgctcaagatgtcaattcgttgaaaaacctgtccaagagtaataggaaggagtcttcctatgggaggaccaggacggcttccaccaagggttcgagacgannntgcgctgctataaatgagtttccatcttccttgcaaattgtcaagaccaagcgagagatccacaagtcctccagcagcttnnagttccttagcagcatcatctnnntttcgaagatcgtcttcgcntgcagcnggnnntctatttagcccnnnaacagcactcagcagattgag

SEQ ID NO: 139647 - DNA, 792 bp, Glycine max
  Clone ID: PAT_MRT3847_97109C.1
caagtgcaaccaattaaaaagttactaagttaaagtatatccagatgatcaatttcacttctgacctctgtatgcatccaatagtagtggctcatttctctgaaatcgggtcacatatctctccaaaaacattttctcacttatcttaataaaggaacttgttttcagatcactctttatcaaaccccttgacttcaaatttttaacaactgcaaatctaggaataactgtcttctccaagttgcatccaagaatttcagggcatctagcaatgtcttctgggggcaaactcatatctttcaccaagaagttcaacattttcatcatcttcttttccgacgacatcataaactggggttgctttttgacagccaaaagacagatatctctagaaaagccccacctcccaagaacctctaattttgatttccacgttgcttcatttatcgttgcaaacaatttaagtgccataacaaaatttgatttcaaaggatcaaaccccatttccttcactttctccaaagcctcaacaaatcttgaatgcttcataaatgttgcaccaggatgattagttactaacaaggaaacggaacgttgtggcaccccaagctgtctcaaagcccctacatttctaactgaatggttaattaaccttcgactgctacaggaccacttataatgctttaaagtggaaactacttccttatcactgcaaactagacctttgataatctgataacatgggataatggatttattcaagctaaaataaaatcggacgcgaagaacgac

SEQ ID NO: 139648 - DNA, 449 bp, Glycine max
  Clone ID: PAT_MRT3847_9710C.1
aacaaaatgtgccttttcctcttcctgttttttatggaatgctatctggccacggcaaggggaattgtggtgctacaaaagtcagaagctgcaatcccagtgacaacattgtcaccacctgaaggcaacactacattcattgatggcacaacttggtgtgtggctcttgctggtgtttcccaagctgacttgcagaatgctcttgattgggcttgtggacttggaatggcagattgcacagccatccaacatggtggaccatgttttgaaccagatacactagtttcccatgcatcctttgctttcaacagctactatcagattaatggcaattctgatattgcatgccaatttggaggaactgctgctttgacaaagcataaccccaatctttagttgcttctgccccaccttcactgaggaagcataaccaaaacctggtttggtcg

SEQ ID NO: 139649 - DNA, 1183 bp, Glycine max
  Clone ID: PAT_MRT3847_97110C.1
gaaggggaattctctcaacagagtattcaagtatccatatctaatgatctgtaagcaattattccttaaaaaagaaatatgttacacttaaacaaaaagtaccctgcttccttggaactatatagtagagtttaattccatcatgtttacaatattgaagaacttagaacaaataccatcaggaggaaaaaactaaacaaaatgatggcacaaggtgttgaaacctttttttttttaagtccaacagagaaaatgcatagtgcatagttgcattcaccaggaactcaagcaatcacaaagacccttagctcgcctctgtctcctcttgtgatgcgagtatccgagtcaagatatgtaacttcaaattcaccgcttcccgtattagatggaggcctcaatgcatcgggaatccgaggcacctccaatggtggcaactgtgacaaattcccagctgtcttcacagtggttttctcaaatactatctttatctttgaagatcctatgagttcaaatttgtgagctaatgtggcagtcgcttcaaggggtggtaggggccacggagcacctagttgaagctccactatgttatcaaaatctttgctcaagatgtcaattcgttgaaaaacctgtccaagagtaataggaaggagtcttcctatgggaggaccaggacggcttccaccaagggttcgagacgaaaatgcgctgctataaatgagtttccatcttccttgcaaattgtcaagaccaagcgagagatccacaagtcctccagcagcttcaagttccttagcagcatcatctgcctttcgaagatcgtcttcgcttgcagcaaggcctctatttagcccagaaacagcactcagcagattgagcttcaaagaagagatggaatcagaggtatccccagcgtaggaagaagaagatggagaagggtcagccacacccacagtagatttgaccacaagagaaggccttcgttgagaaggttttggtgtgagaagaagatgggtgttgcagtgtggtctgtgaaggaaagaagagaaaagtggagggtggggaaggaggttcagggaagccatggattggagggtgggtttgggaaatggaaaagtgtggaatttggaagagattttttggagaaaggaggaagttgagtttgtgtgtaacgagatttaaccta

SEQ ID NO: 139650 - DNA, 861 bp, Glycine max
  Clone ID: PAT_MRT3847_97111C.1
gatctgaaagcaattattccttaaaaaagaaatacgttacacttaaacaaaaagtaccctgtttccttggaactacatagtacaatttaattccatcatatttacaatgttgaagaacttataacaaatactatcaggagaaagaaaaaagacaaaaagatgacagacacaggtgtggaaacatttttttaagtccaacagaaaaaatgaatagttcatagttgcattcaccaggaactcaagcaatcacaaagacccttagctcgcctctatctactcttgtgatgcgggtatccgagtcaagatatgaaacttcaaattcaccacttcccgtattagatggaggcctcaatgcatcgggaattcgaggcacctctaatgggggcaactgtgacaaattcccagctgtcttcatagtggttttctcaaatactatctttatctttgaagatcctatgagttcaaatttgtgggctaatgtggcagttacttcaaggggttgtagtggccaaggagcacccaattgaagctccactatgttatcaaaatctttgctcaagatgtcaattcgttgaaaaacctgtccaagagtaataggaaggagtcttcctatgggaggaccgggacggcttccaccgagagttcgagacgagaatgcgctgctataaatgagtttccatcttccttgcaaattctcaagaccaagcgagagattcacaaatcctccaccagcttcaagttcctctgtttagcccagaaacagcactcaggagattgagcttcaaagaggagatggaatcagaggtgtttcctgcgtagccagaagaagatggagaagagtcagccacacccacagtggag

SEQ ID NO: 139651 - DNA, 775 bp, Glycine max
  Clone ID: PAT_MRT3847_97112C.1
attcaaacaacatccaatccttgttcctgtcctggctaacgttaccgactactttcatatttcgtgtaacgagataaccaccaaaactcgattttttttagtttttaatcaacgaacacatagcctattgttggttgcttctgtttttaattttcatttcagaataggaaccaatggctcatttgctgacaccaactcctaccactgctgcaacagctctctccgccagagcccggaagagccccctctattcgttgaaaaatgtttactttccaacttcaagagtgtgctgcgttggtcaccaatatcaacaatctcacccctcttccctctctgatcttgatcaagtccctcctcccggtggcaatcactctctgcgtcgcaggacattgatggggttgagtggtgcggcaacgttggggttgagtttgagtgatgagcaaagtgcaaggggtgcagcaaggcgtccaccacctccaccaccgacggagaagaaggacccgaatgtgagtggtgttcaggctaaagtgttggctagcaagaggagaaaagaagccatgaaagaagaagtggcaaggctaatagagagagggaagcccgttagtctcctcctgcatcatactcctgctgcacctgaatagtttccacatgtttaacctttctattgtgatcacttacaattggttggtgttattgttgtattactatatcactgttggattgaataagaccgttttgtttgacagtttatgtagtgaaatgacactcttttcaa

SEQ ID NO: 139652 - DNA, 435 bp, Glycine max
  Clone ID: PAT_MRT3847_97113C.1
atttgaccatgaaaattattgaaataaaataaaaagagcttattttgacaaactataccaagaagcccattaacaagtcataagcccttccagactggagaaagagcgcttcaattaataacagaagtgaacaattgctatggcttaccactcacaatgatcatttaaacaagtagtaatattatatctacacacagttacttacatgtaaattattagtttgcctcgtttatcgtttgcttaatgttttatgttcattaacatctcaattaccaagagaaatcctggtgtagatataacattactgttcaacaaatagatagtgggcaatatgagccagcttcaaaaccacatacgcacagaacattctatcatcaacccaaactcaaaatatcattttccccaaaagattgaagcctcataatccctttatag

SEQ ID NO: 139653 - DNA, 272 bp, Glycine max
  Clone ID: PAT_MRT3847_97114C.1
cggggaattgattgttgtcagactttgtaactgacgtgctgcaatggcttcaagtcaggaagacgtgactcttttgggagtaattggaaacccatttgcttgcagggtgaagattgcccttaagttgaacggagttgactacaaatatgccgaataaaatttggccaacaagagtgatttgcttctcaaatccaacccagttcacaagaaagttccagtttttattcacaatgagaatcccataccagagtctcttgtgaccgttgactaca

SEQ ID NO: 139654 - DNA, 316 bp, Glycine max
  Clone ID: PAT_MRT3847_97115C.1
ggggtgtaataagaacataaaaatttatctcattgctgatgtggaaaaacagacaaaccaaatcatttcttgaacgacatgttctgccaggcatgagtcaacattaccgtaacttgacgaagaaaaacattctagctatggaagtacacctcgacacaaaagaatgaattctcgaacatttaaatatgatatcaaccactatacaattgatggcatcaaaaagccatctacagggcgaaccttacatatttaacccggatcatgcctgatttggaacgagcttatggacaatcaaccgtttacccaatctgcattt

SEQ ID NO: 139655 - DNA, 347 bp, Glycine max
  Clone ID: PAT_MRT3847_97116C.1
gaaggtttttgaatgctgtgctgttatcctaccattctcttctgcaactttcgccgtcagcttcattcaccaaggttgtccttcacgatagcgcatttttcctacaacgattattgtatctcagctcgaatatttctgagatcggaaagagatgcgaaaggggtgagaaccgcttttggtaatacactcgtcttggatttaagactcccagggaatccatctcacgaagatacattcacaagaagtgacccttcactgaaattgctcctaactgtggacgtatctagccttgaacatatcatagtgctaacatgtccaagtgtattaatgatcagaagaattatcgc

SEQ ID NO: 139656 - DNA, 215 bp, Glycine max
  Clone ID: PAT_MRT3847_97117C.1
ttcccggtcgaccacgcgtcctgaaggctgttaaagcgcttaactactatatcaccttgtttttgttatctgttgcatgataaaaaggattcccagtgggtttggggttattgcaatcctgggaggacacatatgatagaaatatttagtatagttgaaggataatttctttctttaattttatttaaattttatacattgtaaaaccctcgttg

SEQ ID NO: 139657 - DNA, 950 bp, Glycine max
  unsure (1)..(950): unsure at all n locations
  Clone ID: PAT_MRT3847_97118C.1
gggttgatgatattgaaggatctgcgtgtagccatcccatggttctggttcagattcccatgtgtaacgagagggaggtgtatgagcagtctatttctgcagtatgccaaattgattggccaagggaccgtttactcattcaagtacttgatgattctgatgatgagagcatacagtggttaattaagactgaggtcagaaaatggagccaaaagggaatcaacataatctacaggtatcgcttagtccggactggatataaagcagggaatctcaagtctgcaatgagctgtgactatgtgaaagactatgagtttgttgcaatttttgacgcagatttccaaccacatcctgattttcttaagcaaactgtgccgtatttcaaggacaatcccgaattaggtcttgtccaagctagatgggcttttgtgaacaaggatgagaacttgttgacacgtctccagaacattaacttatgcttccattttgaagtagaacagcaggtcaatggggcatttctcaacttttttggatttaatggaactgctggtgtttggagaatcaaggccctggaagagtccgggggctggctcgagaggaccaccgtagaagatatggatattgccgtccgagctcatctcaatggctggaaatttatctttgtaaatgatggttaggtactctgggaagttcctgagtactatgaagcttataggaagcagcaacaccggaggcattccagtccaatgcaacttttcagatggtgtcttccagcaatgatgagatctaagatatcaccatgtgagaaagggaatgtaatactgctattctatctgttgagaaagctcattctgacgtgttactccttgagctgtgtgtgcatagagcgtgctatanccatgatacgtcatgaagccaagcttcctgtatgggtgatctgctatatacct

SEQ ID NO: 139658 - DNA, 445 bp, Glycine max
  Clone ID: PAT_MRT3847_97119C.1
gctagctaaaccaaagagttccttggctttagacttgggtctttctaccaataaaaaaaaaaggaaaagaaaagaaaaaggtaagagggaaggtcatcgaaacaaataaggattgatttgatttttggtcaaagaatagttttgaatgattgagaaggacttacctaaaaagctcattctaaatctgcatgatgacttttgccatgttcatatcgtccagcttttggtttgattttgaaatttcctactcttaaactaaatttaaatgttgattttgtcctggtaacaaccattgttttatgctatggatttgagcatcactaattttattggaatgatatatagttgaggtagatttctttttcaattaatacaatttttcctgcatgatttccttttttgcagaacgtattattttatgtataactcttgtcgtacttgttgg

SEQ ID NO: 139659 - DNA, 557 bp, Glycine max
  Clone ID: PAT_MRT3847_9711C.1
gcaatatataacaattaaaaggaaaatataagccattagtattattcagtaacaacaagaatcattgaaccagtcaacgcttacattcgaatataatatatattgtgtgtattgtgttgcatattttataacacatcttcaattatttacatataatatcattcctgtctaaagtcttctatagcacatgatgattaaaaaaatgtccgagactcaccctataacaatactcataatttccgttgacatttcacatactcaactcatagattaaaggagaggagatgtatggtgaaattgaaaggttcatcaaagtatggatttcagccatcttaggtttatgttattgttattacatagctgcaagaataccaaagggcttcttgagactactgtcccttctccctattctctacctcttcatcatcctttccttgaacatctcttcacctagcttagttggatacactttcttcttccttgttcaacttggcatgttaaagcttatacttttttgctttcacaaaggccctcttgccctatcaccccgaacattg

SEQ ID NO: 139660 - DNA, 246 bp, Glycine max
  Clone ID: PAT_MRT3847_97120C.1
ctcttgctctgctattattaacctggtctaccagggccaaagctgagtttctcccatcaatacaagtgcactcttggccatcaagcaagacttcatcttctcgtcacgctcatagaaagaatctttctaagcagctggattccagtttccgaaggatacctccaagcaaatcaaatccctcacaaaataagtaactcttactattagcagtttcaagcctttccatcatacgcagctaccctactg

SEQ ID NO: 139661 - DNA, 271 bp, Glycine max
  Clone ID: PAT_MRT3847_97121C.1
ggctgcgagcagacgacagaagggtatatcaatgttttaagaggggcggaaaaaagaagaaatagaagtgggctcacatgtatgacattggttcatgtggacatgatatagtacaaattgtttggttcaacctaaaataattggttttaattagcattaatatacatatttaaaagagtaatgatatataaatatttatatcataaacatacatttatatatttaacctcattattttctctttatcttactttttatcaaatatatcata

SEQ ID NO: 139662 - DNA, 470 bp, Glycine max
  Clone ID: PAT_MRT3847_97122C.1
gatgattgtttatttttttattgagaatttattttttacttaatttgtttttatttttttaggggaaaaaaaaaaaaggggagttatcaaaaaccaaagagcgggcggaggccttaaaatttacaggtaaaagacggcccccaaaaaaaaaaagaaaaccaagggggctccgcaccattgaaagggcaaaattgcacatacagcgattggggagtaagaaggagctaaaaaacatattgctaggaaaaaaaaaaaaatttgcactctggaccgtgccggctcgcacaaaacaggcatgaaacaggagacacaaagacaagcaaaaatgtttaccagaagcaccttaaaaaaactgagatctagacccaacactaagaccaccacgggggggggaacctcttacacataaattttgggacaaagcacctttaaaaacaaacaactttcgaaggaccacagggccccccccc

SEQ ID NO: 139663 - DNA, 615 bp, Glycine max
  Clone ID: PAT_MRT3847_97123C.1
ttcggaaaccttctcctgacaaaattacgatgtcaaattacaggagactaaatatccaattccaatctaaaggcaaaaaaaggcatggatggtaggggacttcatttacgactcctggcttcctccttttccttctctcgcttcttgtaaagcctctcaagaacacgcttagcttcacattgtggaaaattcgacaaatcatagtaatgtggggctacatccactaacctgtaaagttgagcacatcttaataacatctaccaaagaaccacccggtccacaaagataaatttgacagttcatcttgcaactcttctcacagataaatcaaagagtggatggaatttataatgacgtgttgggtctatatctctgcttcatagcattcaaaggtaatttattgatgacagaaatatcatttcaatcacaaaaacagatgtttctggaatttataaagagaaaactatatatatttaattgattttcagcgttcttttactcaaaaacaaaaaaggcttccctttaaataccatacatgaaatgcgtttacgtttcaccatttcaaagttgtcaaactcaatcatagctagagcatgccagatatcaaataaaaat

SEQ ID NO: 139664 - DNA, 373 bp, Glycine max
  Clone ID: PAT_MRT3847_97124C.1
ggggagtgatgaagagattcgaaaggggcaacgagcagaaggccgtgacactgccatggctattgggaccgacactactcccaagtggggggagcagagcacctatgctgacgattatgaccgaatcattttttttttgcacaagacagaggcgaaagaaaaaataaaatgtatgtgtgacaagcggacgaggaagaagcgatacatggaatgaaacgaagagatcctgaaggagaatcgaggtgaggggggataaatggaaccaggggtggatgcaaggcaagacaaggaggatagggagggacaaaaggggggaaaaaaggaagcaaataagggaagcaagggagagtggatgaaacaagggcaagagaaa

SEQ ID NO: 139665 - DNA, 442 bp, Glycine max
  Clone ID: PAT_MRT3847_97125C.1
agaagagatggcaagagaatcataccaagaatccatcacaagtctgaccaagcttctcagtgagaaagctaagctcaatggcattaccgccgcaaaaataaaggagctaacggcggagcttgataccaccggttcgaagccgggtaacccggaagagatgatcagaaccaggtttattcactttaagaatgagaaatttaagaaaaatccttatctatatggtaagcttgccaaaagccagagcccaaagtttatagtatttacatgctcagactcaagaatttatccatctcatattctaaatttccaaccaagtaaagcctttatagtccgaaacattactaacatgattgcaccatattacaagacgaagtattcagcagctataacgtccattaaatatacagtattacatgtaaaagtagagaatatggtagtatta

SEQ ID NO: 139666 - DNA, 485 bp, Glycine max
  Clone ID: PAT_MRT3847_97126C.1
ggctcgagcgccatgtctcactgcatgcttggactcgcgaccgagatcactctgactgtgcgctacctgacacagatgctatactatgccttacactatggagcagcaactatgtattccggggccccgaatgtcatggggtgggtaccttcacatacagtaacgggtggatgaatgtacaactcgtcggaagagtaggcttggaacgtgacggttgcagatagtgatccagtgacgctggcgcagtaccatgcttggagaaggtgtggggagcttgtgcactatggagagacatgcgctgtgagcctggactcgttgacatgccgatgctgcgaggctcgaagcacataatggggctgatatgcgggtcgcttggttgagtagagagctgaagccgtacttgtgcatgatgaatgttgacgcagcgaatttacgttagctgactgcatagacattgctagctgcattgagctcatgggcatatg

SEQ ID NO: 139667 - DNA, 436 bp, Glycine max
  Clone ID: PAT_MRT3847_97127C.1
ggtggggtgcttttcttggtgggggaaaaaacccccccctttttaacatagctttaaaattttaaaaccccgggttgggttcccggcccccccttaaaaaagtccaaggggggggttttttgtgtttttttttaaaggtttaaaactttttttaattacacccagatccggtgttttttttttctcacaaaatgatttttcccctgaatttaaagcttcccagtcggggggtgttgaaaatacttgttcgaaggccttttatttttgcccgttaccaaaactttaaccaatatttggagccccttattaatgaatatttggccatagcttttaaaataccatgttattttcaccgggggtttttggttttataaaagtccaatttttaagggccacctgttttttttctaagaacaaccaccttaactcttttttt

SEQ ID NO: 139668 - DNA, 1880 bp, Glycine max
  unsure (1)..(1880): unsure at all n locations
  Clone ID: PAT_MRT3847_97128C.1
cgacccactgcgnntccgattcattcctgaggagagtgttggnnnaacccacgcgtccgctcctccctgtccttttcttcatcttcagttttttttgcctataaatacacaaaattgcttcgaactaaaccggaactcataatattcatcactagaagtgttggatgcatttctatttctaactaattattgtgcttattattattgttgagaaagaaaaaatggccaaatcaatcaaattctttgagttgaacacaggggccaagattccttctcttgggttagggacttggcaagctgaacctggtgttgtagctgaagctctcaccacagccattcaggttggatacaggcatattgactgtgctagtgcgtataagaatcaagcagagattggttctgctcttaagaagctttttgatgatggtgtggtgaagcgtgaggacttatggatcacttccaaactctggtgttcagatcatgcaccagaagatgtgccaaaagcattggataaaacattacaggaattgcaacttgactatcttgacctctatctgatccactggccagtccgcatgaaaagtggaacatttggactcaataaagaatatcttgagcaaccagacattcccaatacatggagagcaatggaggcactctatgactcagacaaggctagagccataggagtgagcaatttctcttcaaagaagcttcaagatttcttggatatagcaagagtgcttcctgctgttaaccaagtggaattgcacccaggatggcagcagccaaagttgcgcgcattttgtgaatctaaagaaattcatctatctggatattctccactaggttcaccagcagctctcaaaagtgatattcttaagaatcctgttgtcacagagattgcagagagattggggaagacaccagcacaagttgcccttcgatggggcttgcaagcaggtcatagtgtgcttcctaagagcactaatgagtccagaatcaagggaaattttgatatctttgactggtctattcctcaagatttgatgaccaagatctctgaaattaagcaggaaaggctagttaaggccagtttttttgttcacgagacctatggtgcctataggagcattgaagacttctgggatggtgaactctgagcaatatgcatctttgagacgttgaaaaatacattgctcctagagcaaatttattctgccttatacccactagttgtagtgattcaagtgagattttgagaagtgttactattgatggtaacaccgaataagtagccaagagttatttttcatttaatgattgtatcttttattcaatataataaagtgagttgagtgaatttgactgtgcttgagattaaaataaatagctaattgttcataataaacacaaagtaaccgagacttatttttcatttataattgttgtatctttaattcaatctaaagaaaccagtgcagtgaattttaaaggtctggtagccgaaacctatggtgcttataggtccattaaagacttctgggatgaagaactctgagcaatatgcatctttgagacgttgaaaaatacattgctcctagagcaaatttattctgccttatacccactagttgtagtgattcaagtgagattttgagaagtgttactattgatggtaacaccgaataagtagccaagagttatttttcatttaatgattgtatcttttattcaatataataaagtgagaanaaaaaaaaaaaaaaaaaaaaaaaaaaaaaaaaaaaaaaaaaaaaaaaaaaaaaaaaaaaaaaaaaaaaacaaataaaaaacaaaaaaaaaannnaggggcggccgttttaaaggatccaagttta

SEQ ID NO: 139669 - DNA, 435 bp, Glycine max
  Clone ID: PAT_MRT3847_97129C.1
gggagacatcccgtcatcgtgctggactcgcatgcaacaccaagacaaagaggagtttcacggggagttgacaggagaagctacgatgttggggccaaaggagacagcgaggagatcgccggaaggaaacacacctcgcgacggcaactcaagcaaggtcgggccgttacccaaacaaggaagtgcgaagggggaggagagcgcgaaggagacgaacccacatgtcggagagacgcaggtgatggcggcaatcccagtcgcggacggtctgtccgacggtactagggaaacgttgcagacgacggaggagcaggagaagtcgtcgtggtcggaaaacctggaccagagtcagaatttcggcgccgagagggtcgaaccggtacggctaactccaggttggcatgctggatcagaaccgagggacaaagctagtga

SEQ ID NO: 139670 - DNA, 441 bp, Glycine max
  unsure (1)..(441): unsure at all n locations
  Clone ID: PAT_MRT3847_9712C.1
attcatattcatcttgcttttagaatctctttcataaaaagtcaccgggtaatacatatcgtcatgtttctaaatgtatttttttncatntacaacatataatccattacaacaactcatattcgaccatatatccatcccattctcttttttcgatcgctacataccccttcatcacatcattaatcaacgtttctctctcgttctacactttttgcctatctctcattttataaaattattttattattttaacctatgtacttaaaaaatatttcattttacaaatttttctattaattccctcaaaaccctttttttttttttctttatttaatctttaataatttttctcatctcaccttttccataacatttccgctttccatttcatcatcaaaaaaatttaattaaaaaaattttttttttttttcttataaa

SEQ ID NO: 139671 - DNA, 522 bp, Glycine max
  Clone ID: PAT_MRT3847_97130C.1
gtcaaattcactcaactcactttattatattgaataaaagatacaatcattaaatgaaaaattactcttggctacttattcggtgttaccatcaatagtaacacttttcaaaatctcacttgaatcactacaactagtggggataaggcagaataaatttgctctaggagcaatggatttttcaacgtctcaaagatgcatattgctcatagttcaccatcccacaagtcttcaatgctcctataggcaccataggtctcgtgaacaaaaaaactggccttaactagcctttcctgcatgagtaaactccatgtgtgaactagcatttatgttgatgtactaaaagatgtataggaaatagtacgactcacgaaaaagaacacaactgaatctcatacgacgtatgtaactactcgcctgcttaaatctagagatcttggtcattaaatcttgaggaatagaccagtcaaagatatcaaaatttcccttgaatctggacttattagcgctcttaagaagcac

SEQ ID NO: 139672 - DNA, 262 bp, Glycine max
  unsure (1)..(262): unsure at all n locations
  Clone ID: PAT_MRT3847_97131C.1
agggcccgacccacgcgnggcgaacggaattttagggagcccaaagaaagggaagcggcggcagccccaaaccaaagacnggagagcgcagaggacacccgnncnnccggggggnncncannccgggccnnncncagacaacaccancncncncncncgggggcccnnnnnagggnnnngggaaggggncncggnaacgacgaagaagagggggggganaacaanggttttttttggangacggagangnnggaggaggaaa

SEQ ID NO: 139673 - DNA, 180 bp, Glycine max
  Clone ID: PAT_MRT3847_97132C.1
gacacaacccgattaaatactcacggacgataacctccaagtccatgtttgctccaagctgctcacacactgtgcaacattatctcgtctaccatgaggccctcattacttattctataccaaaagaaactcaattatcgtcgcgaattctcaaacctacatcttgtgaccacatatata

SEQ ID NO: 139674 - DNA, 579 bp, Glycine max
  Clone ID: PAT_MRT3847_97133C.1
cgaagatgagtctgagagggttcagaagccgagaagagtaaaaagaagcgtgttggagatgtctcttccccctctccctcaaacattcaccaccactactcctgatactagctcctgtgaggtgaatagcagcaaaaatgcaacattgaaggtttgcactgttttgtaaccccagagcaagaagagggttttgactcacactccatcaacgagaaggagcacttgtgggaaatatagaggtgttaggcagagaaaatggggtaaatgggctgcagaaattcgtgacccgtttcagtgtactcgtatatggcttggcactttcaacactgcagaagaggcttccaaagcctatgaaaccagaaggcttgagtttgaagccatggcaaagactcaaactctaaaaactggttctgaacctttgtctacaacttctgataagagtaactgctgtaactcctctgctgctgccgccgccgatgtgtctgtgtctgaaaagttttctactacttctgatgactcggaagagagtatgttgtcacacaattcaccatcctctgtgcttgagttggatacctcggc

SEQ ID NO: 139675 - DNA, 583 bp, Glycine max
  Clone ID: PAT_MRT3847_97134C.1
ggaaagttggtttcaatgggaatgggaatgggcatggagtgtctgcagttgctcctgtgaatgaggaaaaggagggggaggagggaaatggggatgttaaggtcaatgtgtttccagaaggggaggaggttggtgatggagggtggcagggaccgttgggattgaagtgcgggctcaaagaaaatccggggattgtatctcttatctattatggcctgcagcactatctatcattggctggttctcttgtattgatcccattagtcatgatacctgtcatgggtggaacagataaggatactgctaccgtaatttctacaatgctgtttctttctggcatcacaactattctgcactcctactttggtactcgactgcctttagttcaagggagctcatttgtgtatttagcacctgcattagttatcataaatgctcaagaatatcggaatcttaccgaacataaatttagacacataatgagggaactccaaggagctataattgtaggtttcagtattccaatgtatccctgggaatttaggtggtttaatgttctattctaactgaggttaaatcaaac

SEQ ID NO: 139676 - DNA, 123 bp, Glycine max
  Clone ID: PAT_MRT3847_97135C.1
ggtagcgtgggcgctgcttgtttgtgcctgcgtggctacttagtaaaagaggggcttgtacaaaagcttgcggcagtgaccatgtcgagcacttcgttgaaggagatgaggaacggtggtgag

SEQ ID NO: 139677 - DNA, 141 bp, Glycine max
  Clone ID: PAT_MRT3847_97136C.1
ttcttttatcggtgtctcatcaacttgatgcgaagccagttcacctgtaatataacacgtctcccatcctgactagaccagggcagaaccacacggaaccaaacaaggtgccactgtaaacacctatgctgctatacagag

SEQ ID NO: 139678 - DNA, 553 bp, Glycine max
  Clone ID: PAT_MRT3847_97137C.1
caaactttgactacgcatttgcacaggctctctggggtatggtggcagccattaaagccatcgagttcagatctcgtacccaaaattaaacaacacccacttcacatctcaactttcaattgatccacaatggagaagttctccgattttgttgctgttggtgatgttggatcagttcattttcactgtggaagcggctcagaaggctccatggaggattcaggtgcttttctctgtggaatgtcagaactactttgactggcaaacggttggactcatgcacagttttagaaaggcaaagcaaccggggcacataacgcgtcttctcagttgcactgaggagcagaagaaaacttacagagggatgcatttggctcccacttttgaggtgccctcaatgagcaaacaccccacaactggtgactggtaccctgcaataaacaaacctgctggggttttacattggctcaaacacagtaaagatgcagaaaatattgactgggttatcatcctggatgcagacatgataatccgtgggcgaattgtaccttgg

SEQ ID NO: 139679 - DNA, 403 bp, Glycine max
  Clone ID: PAT_MRT3847_97138C.1
ggctcgagagcttacatacactctactttacttcatctcaaacttgctttgttgtgtctctgacacacatgattgtgggaacagcttcgtttgggctttggtgtgacggagaaccgcaatctctctttgccaccccacgtagtcgcatctcgaccgtccattgcatcacattggtgcgctgtgcttctattgatcatcatgttgacactcaatggcatgctgtctcgctgctaccatcgctatagtgtactgtcctctcgtcgttttttctactcatttggaccaccagatgctttcctgtcccatcaatttttagcttctcatggaatcctctgatagcatgtggcacagcttgccagtgttgataccaatgaaggaggtgccatagttcataatcatgccg

SEQ ID NO: 139680 - DNA, 2260 bp, Glycine max
  Clone ID: PAT_MRT3847_97139C.1
gacatagatgaagtgaaaaatatcttaaaaaactgcggttatcatcccgaaattggaattgacattttgatcgaaagatgtttggtaactctggataggatgaagaagttggggatgcatgatttgctacaagaaatgggaaggaatattgtatttcaagaatctccaaatgatccaggcaaacgtagtagattgtggtctcaaaaagacattgattatgtgttgacaaaaaacaagggaactgatgaaattcaaggcatagttctgaacttagttcattcgggtgattatgaaggacgctggagcactgaagccttctccaagacaagtcaactcaagttactcatgttatgtgatatgcagcttccccgtggcctcaactgccttcctagttcactgaaagttcttcactggagaggatgtcctttgaaaaccctgccacttaataataaactagatgaagttgttgacctcaaattgcctcatagccgaatagaacaactttggcgtgggacaaagcttctggaaaagctaaagtccatcaacttgagcttttccaagaacctaaagcagtccccggactttggtggggctccaaatcttgaatcattggttctagaaggttgcacaagtttgactgaagttcatccatcccttgtacgccataagaaacttgctatgatgaatttaaaagactgtaaaaggctcaaaactcttccaagtaaaatggagatgagttccttgaaagatttaaacctttctggttgctctgaatttaaatatcttccagagtttggggaaagcatggaacatttgtcagtgctttctttagaggggactgctatagcaaaactaccctcttcactgggatgtctagttggccttgctcatttgtatttgaagaattgcaaaaatcttgtttgccttccagatacctttcataacttaaactccctcatagttctgaatgtttctggctgctcaaaacttggttgcttaccagagggtttaaaggaaatcaagtctttggaggaacttgatgcaagtggaactgctattcaagagctaccttcatctgtcttttatttggaaaacctaaaaagtatctcatttgctgggtgcaaaaagccagtatctaactcagtaagtggatttcttctcccctttcagtgggtatttgggaatcaacaaactcctactgcatttagattaccaccttctaaactgaatctaccctctttgatgagaataaatttaagttactgcaatctatctgaagagtcattcccagatggttttcgtcacttatcttcattgcagtttctagatctcactggcaacaattttgttaccctaccaagttgcatttcgaacctcacaaagcttgaaattcttctcctaaacttgtgcaaaaaacttaaaaggttgccagagctcccttcaagaatgaaacatttggatgcaagcaattgcacttcattggaaacttccaaattcaatccatccaagccatgcagtctctttgcatcatcaccttcaaattttcatttttcgagagaattgatacgctatcttgaggaactccctcttcccagaacaagatttgagatgttaatcccagggagtgaaattccatcatggtttgtccctcaaaaatgtgtttcattagctaaaataccagtccctcataattgccctgtaaatgaatgggtgggatttgctctgtgcttcctattagtaagttatgcaaatcctcctgaggcgtgccatcatgaagttgagtgctacttgtttggacctaatggtaaggcgattatcagttccaggaatttacctcccatggagctagattgccctcacctttatattctctacttgtccattgataaataccgtgacatgatttgtgaaggtgttgtcggcagtgaaattgaatttgtattgaaaagttatggttgccaatcattggaaatagtgaggtgcggatgtcgtttggtatgtaagcaagatgttgaagatatttatgaaaatagtatcatttcttctagtgaagagatcggagtggccagtgagaaggtgcgaattatctaaaaacttgtcatgtaattacgtatgtcttgttatttgtatagaaacttctcattctccatatttgcagtttgaaacgattgtcttgttatttgtatagaaacttctcattctccatacttgtggtttgaactcaacttttgcatgttttgttgagatgatccatgctaat

SEQ ID NO: 139681 - DNA, 1099 bp, Glycine max
  Clone ID: PAT_MRT3847_9713C.1
tacggctgcgagaagacgacagaagggggtcccataccagagctatctattcatctggactcaacagtttggtggatggcttcttcttcttcttctttttctctgcttcgttccattcccatttcttttccgcacacccaatgcgctctcaaatccccgcgcctctcgcttcgtgcttcggccactccgagccagaaggctcggttcgtcgctcgccgcaaggagtccctttcggttcggcaactccaacgccccctaattgagtacatgcggttaccggcgagtcagtattcggtgttggatgcagagaggattgagcgggtaaacgaaaacacgtttaggtgttacgtttataggttcaagttcttcaactttgaggtttgtcctgtgttgttggtgaaagtggaagagcaacctgatggatgttgcatcaagctcttgtcttgcaagcttgagggctcgccaatggttgctgcacagaatgacaagtttgatgctctaatggttaaccggatatcatgtgatagcaatgctaacaggtcattgatgcagcaactcacatcagacactataattgaggtaagcattgaaattccttttcctttccaagcaataccaaagcaagcaattgaatcagctgggactcaagtccttgaacaaatactcaggattatgcttccccgttttatgtcacagcttgagaaagattatcaagcttgggcctctggagatacctcaaggcagcctcttgggacaggtgaaatctgaaataatgcgtcatggcaattgccactggcgctgaccttaaattgctgtatagtttgataggttctacaaatattgcttgtagtatgtgcattaatgaattcttggtttgttaactgaatatatattattattattattattattattattattattattattattattattatgtgagagagagacggtttttaagaaaattattgtttgttacaatattcctgtgatgttgctatgtataggtaatgctgtctcaatgttagaattaaaaggaatttgaatgattcaagaattttgtatttgggtactcaagggtctgattatgtttttc

SEQ ID NO: 139682 - DNA, 743 bp, Glycine max
  Clone ID: PAT_MRT3847_97140C.1
ccacgcgtccgtacggctgcgagaagacgacagaaggggacaacgcaactattgacaatctctctttattctattcactccctccatttcttcaaactaaatttcctgagaatggcgaaggctgcggagaaaaagcctgcggccgagaaggctccggcggagaaaaagccaaaggcggagaagaaggttccaaaggaaggcagcggcggagagaagaagaagaagaggtcgaagaagagcgtggaaacgtacaagatctacatattcaaggtgctgaagcaggtacatcctgacatcggcatttcgagcaaggccatggggatcatgaacagcttcatcaacgatatattcgagaagcttgcgcaggaagcagcgcgtctcgcgaggtataacaagaagccgaccattacatccagggagatccagaccgctgtcaggttggtgctgcccggggaacttgccaagcacgctgtttcggaaggaaccaaggctgttacaaagttcactagctcttagggttaggggttttttcgtttaggtattttttttgtaaagcttagtcgtagttagtggcttcatttggtattctatatgctaatgaaaatttttatttaaaagtattcgtgcctcctgacttagttgatttgacaagtgaataatgctcgcataacacgaatagcattaggtggcgttcttacgcattaccacgttaacgaatgaattaaaccatcacattctagccc

SEQ ID NO: 139683 - DNA, 337 bp, Glycine max
  Clone ID: PAT_MRT3847_97141C.1
cttaagcgcccgagtacttatgcaccgccaccaggaaagtttagagggaaaatattcatgaatggccaaggaataacctaccaaggggaataacggaggggaaattatgagacactaacaaagagtcgttggcgataacaaactttttattagaagcaagtacatgaaggacaagtataaatactgcatctaatcatggacgctagggaacattactgtgtcacagatacacgacaatgaagacacgaggaatattgtgacttgtacatgcaagatatttgaacactgcaacgctgaggagaaacagtgggcgtcaagctactgtaatacaagtggg

SEQ ID NO: 139684 - DNA, 459 bp, Glycine max
  Clone ID: PAT_MRT3847_97142C.1
gacatgaagccctattccgtagagctgagttgaaaacactcgtaaatttgcatggtaatgaggtctgtatcagagcaatgtgatgtttttagttgaagtaatggcatctatctttattgtataatgtttttttatcgctattaatttgctcttgtagttgagctaaacctttgttatgtattccacaagtattctgctcttctagcttttctttttcaatgaaaatatgttgtttctgtgaaatgtcactaaggactatcttatctacttctcttctggttatttggaatcctgtgctcggacattcatgcttctgtttgtttgttgttgctgcttatggctgaattgtattaggctggaaaagggggggaactgacacatgatgaaacaacgatcattgctggggcacttgaactcagtgagaagacagcgagtgatgccatgactcctatatctgaa

SEQ ID NO: 139685 - DNA, 317 bp, Glycine max
  Clone ID: PAT_MRT3847_97143C.1
aatgcttgaacaaccaaacaaaacattattaaattacattaaaaacaaaacttttacaacactccttattactaacaacttttacacaattattttatttacaaaagcatcctccctaatttcagtttttctacccaaataccttgttacttaaactaaaaacattaaacactctttattaacacagtacaaaggtcaaaatgcttttttcccttcaactataaagaatttctcctaccaagcattatcaaaagtggaatcttaaccaatatccacatcaataaccactttcttatcctatgaaacaaacgaaattt

SEQ ID NO: 139686 - DNA, 1450 bp, Glycine max
  Clone ID: PAT_MRT3847_97144C.1
atcccacccacagcaacatctcacaaggcccatccattcatgccaaccgctcactaactccccccattactttctattattttctcttctcaaacagagtaacctctccaatgtccaatccatcaaagcaatttataaccaagtctttctctaccctataatgaagaaagatctatgccactacaccatcacctcttcttagaagaaactaaaatggcacatcgttacccaaaaccccttctagacaccctctactgcttagaagatcacattcattgggaggaagaagaacaagtagactataatgagtacagtaacacaacaaccacaaacactaattcctccaatgtggtcttgttagaacacgacctcttctgggaccacgaggagctaccttctcttctcgccaaagaacaccaaaaccaactctcgaatactcttctccaaaacaacctcgttttagcctcatctcgagaagaagcagtggagtggattctgaaagtaaatgctcgttattccttttctaccctcactgcggttctcgctgttaactacctcgataggttcctcttcagcttcagattccaaaacgacaacaacgacaacaacaacaacaacaatccttggctcacacaactatccgcagtggcttgcctctctctcgctgccaaatttgaagagacccacgtgcccctttttatagacctccaagtggaggagagtaagtacttgtttgaagcgaaaaccgttaagagaatggaaatcttggttctttccacacttgggtggaagatgaaccctgtaacacctctttcatttcttgattacatcacaaggaaacttgggttaaagggctatctctgttgggagtttctcagaaggtgtgaaaccgttcttctctctgtctttgcagattctagatttatgggttatctaccttctgtgttggctactgccacagtgatgcgcgtggtcaatacagtggagcctcgtctaggagtggaataccaagatcagctcttgggtattcttggaatcgacaaggagaaggtggaagaatgctacaatctgatgatggaggttgtgtcagggtacgatgaggaaggaaaacgatccaagttgaagaaacgcaagttagagtcgattattccttgtagtagccaaaacggcgtaatggaagggtcgtttagctgtgatagtagttcgaatgagtcttgggagttaggtgcatcttctgtttcatcctccagcaagaagactagaactcaagatcagcttctattgaaccattcaaactcatcagattttataagcattcctcgctagttattaattccaattttcactttctctgcctctttcatctttaaattaattgttttttttttttgtggaaagaaacatatattttattctctatatatttataatatttataatagactagttc

SEQ ID NO: 139687 - DNA, 390 bp, Glycine max
  Clone ID: PAT_MRT3847_97145C.1
gtttactgctattaaataactatttaatccagacagtgacttaatagtatgcttagaaactccactagcacaaagggctagaagggcacacaaagatgtttcatggttgtgtgaccatgcaaaaggaatgctgcccacaaatcgttgtgcgcaaaggctgtataaactagttgatcatgccatcttatcagaaaggaatcaatatgccaatgccatgagctcactccacgaggctactgggtcaaacgtatagcaggggtgctattatgaacctacacactgatggatcggaccaccgtctgtcagcgacagtgcgagccttggtagaccctgcatgcagaaggatatctaacacattgtacacatcagtgagtgcgatgtgcttccaga

SEQ ID NO: 139688 - DNA, 963 bp, Glycine max
  Clone ID: PAT_MRT3847_97146C.1
cggctcgagctcttcactcccatcttccagaacacaacacaaaacaaagcatcttcaataattcatcgcctctattattaagtatagtaaacacgctagtctatggggaacgctaattcttgttcttgtatttgtatccctaatggtgctattttgaaaaagataagaaaaggaacgaaaacagcgatgctgttggacagtgatgagaaccctcgggagatcaagctacccgcaacatcgggggagctcatgatccaagaattcggccatgtcatcactccggtcgacgaactccgtagaacgggacgggtttcggctttattggccgacgaggaacttgtagccggtaaggtttacctgctactgccggtgaatagggtcaattcgaaggcttcagagtttgagatggctcttgcggaaaaacagagtggccacacaaagaggacgaggggtaataatatggcgaaggtttcaccctctgtgtgtccgaggtttgggaaccaagtacgatggaatcccgttttggatcctatctttgaataatagaatcgccctcatctctcaaccaatttgtcttcctcctgcacttcacacttgacactattgtgtgttcattttttattaactttcaattaaggctttttctacactaacatggaaagatggatggatcaaattcatttagaatttagatgtcgaccaatatttgttaaactcctggtttattctcatggatttcgattttgttcttgccaactatatatagtttgtttcttctcacttcccagcaccttgtagtttgtacatcacttttcttctctttggtttcctccctagtaggtccaagttcatatttaaaatgtggagcgatgctaataatacattttatgattggttaaatttattaaattgtagcatgttaatttcgtttcttattgattgaattctactagcaatttcctt

SEQ ID NO: 139689 - DNA, 320 bp, Glycine max
  unsure (1)..(320): unsure at all n locations
  Clone ID: PAT_MRT3847_97147C.1
gcacncgtacgtaagctcgggaattcgggctcgagntctgcagcagcagcagcagcatcatcatcttcntcttcttcttcntcnnccaacaacatncactgctggnactanganagctgctgccgntnctnttgttnnnaatanccgtnncagtnaagtagtnggatggccaccactncgaacatatagngtgagnagcatcantngcnatgcaaaancagctgnagtattcnactcngnggctgaganaagtaanaccgataatactgtggccaggnngataatgacaatggcaatgataataanatnaatgccnaagc

SEQ ID NO: 139690 - DNA, 286 bp, Glycine max
  Clone ID: PAT_MRT3847_97148C.1
agacaaagcagtgatgtgtcataggctaaatgacagaactgcagtattgtactgccatgaagtccgtgaaacaacgggtttgatgggtacattgacagctggtgatggaaccaaaactcaggcacttgctatctgccactcgaatacttctggaatgaatcatcaaatgcttcatcaactgatgggagtcgatcctgcaactaaccctgtatgccattcccttggaggcgaggccatcgtatgggtgcccgatctatctgtggacactgtctatcagaccaacatt

SEQ ID NO: 139691 - DNA, 318 bp, Glycine max
  Clone ID: PAT_MRT3847_97149C.1
tttttactgattaaccgtgaccgcagggtgtcgccccttaaagccggcaacagcggcaatcgctacttgattggagcaaacgtccgatttcttcctactttttggggaccgcaggcttacgggaaagacaatcactctttgcgctgaccacagcctttgggaagcactttatacaccactatcagaatataggctgaacactctgctatacgatatgggacttcgggatacattgaagctttacatgcttccatctcagctcactggttaaattcaagttcaagctggtgaaagttaggattaaaggtcccgcttttc

SEQ ID NO: 139692 - DNA, 141 bp, Glycine max
  unsure (1)..(141): unsure at all n locations
  Clone ID: PAT_MRT3847_9714C.1
gctggatatgggactcagattggagcaattcngtgatcactaacaccagtgcantccttgatggatatggacttcaaattgnactgcactggtgttagtgatcancggattgctccaatccgacgtccatatacagcactc

SEQ ID NO: 139693 - DNA, 163 bp, Glycine max
  Clone ID: PAT_MRT3847_97150C.1
aatcgttaatcattcatatactgcttctcatatacacacacacacaaattctactaaccagtaccttttaaactgcataggaggaatcacataacaacaaacatcttgacacaacctcttctcataatggtgaaacaactacttataacatgaacaaccacca

SEQ ID NO: 139694 - DNA, 413 bp, Glycine max
  Clone ID: PAT_MRT3847_97151C.1
ctgttatgataattgacgtaccttgcttctaaattgagcttctaaagtttttgaccaattcttggatgatgttatggaaacaaaagctacagctatttcaacgccaccagacaaagttcctttgtacagtataccaatgggtgaattaccaattacattgctaaaatcttcacatgctgcttcaagatctgatctctttaacttttgcgcacctgaaaatgtaaaacactgtcatgcatgtacataggcagaaaacatacatatataagcatgagaaatatagctcaaagacatgggaaagcaatcattcaaagctaaatcaattggatgaccaaagggccgaaagaaaacaagttaaataagttcctattatttgtcatgtttcaggtatcctgagtcaatatgcagtatga

SEQ ID NO: 139695 - DNA, 277 bp, Glycine max
  Clone ID: PAT_MRT3847_97152C.1
gctgcaatgagttgaagtgaagataagatatgtctctgagtctgagtcaatgtgttgttcactgtatttcccttcaacactaaccgttaatcgctacaccaatgcacgttgttgttgttgtgatggttttctttccttgtcttttcgccatatactgttcctttgcttctactctctcactctcgggagtttagctctttgctgtgatgtgaagtgaagcctctgggttggttccttcacgttgcaaagttttcatctttgttctttgtactatatt

SEQ ID NO: 139696 - DNA, 429 bp, Glycine max
  Clone ID: PAT_MRT3847_97153C.1
tcgagaacgtgatgtttatcatgccaagagaacacaacctaaagcgcagaagcggcgtcccaattctaacgactcgatttccaaagaattgcagacagaggctctgtgattcggatatagcatatgagcgcaactaacacccacagtctgcggctacatgaggaggatcatgatctcggactgtacttacagacggcgatcttggtgatgactgaatttgacctagaggaagaccaactataggaggaggatgcacccagccagctctacaccattcacagctctgatgcgtctatgcaagcattcacacacaacttgatcgtcaatgcaccactgcaacctgctcggacgccacatgagctagattcagggcaactagcatgctattaccaagcgccttatataacataaccagacccatgcccagga

SEQ ID NO: 139697 - DNA, 609 bp, Glycine max
  Clone ID: PAT_MRT3847_97154C.1
aaaaaaaaaagcaaaaacttttttgttaacccccccaaatttcacgtaaaaagttttgggccccggggggccacccggaaattcgggcccgggcccggggggggaaccatttttccaaaagggggggcttttaaaagctgggggaaaaaaggggaaaagggttttccgggggaaaatggttttcccctcaaaattccaaaaaaaaaacaagccggaagaaaaaagggaaaagccgggggggccaaaggggggggccaacccaaataaatgggggggccccaacggcccgttttcaagggggaaaacctgtgggccccggtgaataaaaaaaccgcccaccccccggggggggggggtttgctttttggcccccaggggggttttttttttaaccagggggacgggcaaaagggggtggcccttcaccccctggccctaaaagaggtgaaaaaaggggcccccgttggttggccccaaaggggaaaaaacctttttggggggggaaaacgggggaaaaaaaaaagggcgggtttggggatcgcctcccccacccccggatatttccgccccaacccccaccccgggtctggaaaggggcccactttggcc

SEQ ID NO: 139698 - DNA, 446 bp, Glycine max
  Clone ID: PAT_MRT3847_97155C.1
acgaggcgggttcctcggccacctaccccatgcagtgttccgctctccgcaagaacggtcacgttgtcatcaagaaccgcccttgcaagattgtcgacatgtccacctccaagaccggcaagcacggtcacgccaaggtccacttggtcgccatcgacatcttcaccggcaagaagctcgaggagctgtccccgtccacccacaacatggacgttccccacgtctcccgcaaggagtaccagctccttgacatccaggacgatggtttcctctccctcatgtctgaggacggtaccatgaaggacgacgtcaagagccccgagggcgagattggcgccaagatcgagaagctcttcagggacgaggagaaggacaccaacgtcatcattcttactgccatgggtgaggagaccgccatcgaggccaaggaagctccccgcggtgcc

SEQ ID NO: 139699 - DNA, 505 bp, Glycine max
  Clone ID: PAT_MRT3847_97156C.1
cagctgtcttaatatcaacacccacataattgctcattaccaccatattttcactagagattttagatcgtacccatttgttgttttatgcaaactaacatatggtctatggagttcaactaatgaacaaattgggtaaataaaagttaggggctcttgttttatcgatctaatagagatgcaaggcacatcactaacttggagaatatggcatctaaaactgatattttagcacacctacgtgactaccccacccggagaaaaaaggcctttatatgcattatttaccttcccagtacttttcttttacgccatgacttatgagctccctaaatgctgccttgtgtgaacacccaagtcattggacaccttcttacctaactgtctatatggagaaatcctctccacaagacttacttaactcttctacatacatggacggacttatttggaacacctgtgcttgcagtgagaagctacctggacatttgtggactttgatctg

SEQ ID NO: 139700 - DNA, 133 bp, Glycine max
  Clone ID: PAT_MRT3847_97157C.1
acaaaaataactgggattaatgttaaaggacatcctcttagaaaccattaccataaagagtaccgtgtcaaaaacacttaaactatagtgtaaccatatgtggagatagcatcaaccactttctaccataaaa

SEQ ID NO: 139701 - DNA, 446 bp, Glycine max
  Clone ID: PAT_MRT3847_97158C.1
cccccggggaaaataaaaccgatttacttggccataaatcccgaagttactttgggaatttgatttcactactttacacctccccaattaattacaaggacttttatttccgcctccttcattttaaataaaacacacttttaccccttattaaaaaaaaaaaaaaggggggatcttaaactataaaatgggggggatttgggggttgcaaatgggagtccttttaggggaaacatctttcagggccggttggggaactcaaaccctttcaataaaaggtcaaatccagggggaagctgggacacaaatagcagcccgttaaatgtattcaaagcaaggggaaaacttttggctgttccactccctctttgcatggagggcaccaaggctgttgaaagggcccacaacactgaaatagctgctcctccaaacaaaggggggcctgg

SEQ ID NO: 139702 - DNA, 178 bp, Glycine max
  Clone ID: PAT_MRT3847_97159C.1
tccacgcgtaagaggaagagtaagcagacgcgggggtttttaagtgcagacacaaagaacaacgcacggcgaggacaacaaatggacaaggtgcaacaacacaaacgagaagatggatgaacataatcgtgtcaaacggtgcaagatgggacaagaactacagtagcacaagacagag

SEQ ID NO: 139703 - DNA, 492 bp, Glycine max
  Clone ID: PAT_MRT3847_9715C.1
tggaacctttgggctgatttatgtgcttgcttatgtgcgtgcatagtcgtgagaagatcatagaagggggaggtaagaagccgcaccccggtgcttgtgcggtcctaagaagagaactctaacggaggtttacgagtcgaagtgtgcgccttagacgcctgattgtaatggtgatgggagaacaatgaagaaggagtcgaatgatctgtcggagaattcgggtactcctactcacgataaggattcgagttaaacgacttagaggactgatgctaatggtgatagccgtgcggatacggatgagcccggggagtcgcactagattacaacggatgaatgtgataacgacgaggatacgagggaggttcctaatgctcctgattagaatgttgatagtcctactattgctgatgagccgaagattgctccgcttctttctggtcagaagtcaggaagaattgcctaagatcgtaaggttacgactcttaaagc

SEQ ID NO: 139704 - DNA, 424 bp, Glycine max
  unsure (1)..(424): unsure at all n locations
  Clone ID: PAT_MRT3847_97160C.1
agattcttttttttactacngagnnnaggaannngaaggcactctcaactcacaagactgcagtgacgacagctcaatattcaaggctctcacttctgatcttaatcattacgctgatgattggccagctctcaagttgctgcaaggccggcagatggatgagtaaagaaattaagcaaaaagaaaatagcagctcttctcagcagtcctcaatctcatggcatttctataccaagacacaacaggtacccagcacagaggaggtccacccaatttatggagcttctctacgagatgttccagggggtccaaacccgcttcataactgataaactatctagcaatctgctgcctatcgtgttatacaagcttttgccggcttttagtggaaaatattttagttttccatttaagatgcagagca

SEQ ID NO: 139705 - DNA, 255 bp, Glycine max
  Clone ID: PAT_MRT3847_97161C.1
cctaatctaatttttttttttgggccgaattttcttttaaggtttgaaaaccttaaagattttaggtggggctttggccggggttgttttggctgttaaacctcccgtttggaactaaccgatccagagtaactttaatttacaactactctgatacaccgggaagccaacggcggccaaaacttgtacggaattagtcctgggggggtttaagctttaggggttatcaattatgggggggtttacaattaaaat

SEQ ID NO: 139706 - DNA, 440 bp, Glycine max
  Clone ID: PAT_MRT3847_97162C.1
ggctggaggaagacgacaggggggggaagggattttaataaacggcacttacactatgcgaaagaattggggcatgggtgtacaaaacacaagcgtggcacagacatgcggagggcctgtgagcacatagatttacagtgctttcaaggggaccacagtcgccatacgccgtactaagacgacggggctaatggcatcagtcgccgttcgagccgagctacctttaccaacatgatgtgcagagcaacatcaacacgctagttagttttcggtccatcagacaacttgtaggtgcatgagaggtacagcctttacgccgacgccccgggttagactcctggcaagtcaatttcacggagcgaagcaaccaggcgggagcgtgtgacacgatagtcaaccactagtgggaactaagagcaattcactgctcgaatggtgac

SEQ ID NO: 139707 - DNA, 1012 bp, Glycine max
  Clone ID: PAT_MRT3847_97163C.1
ataaaatattatttaacaattttaaattaaaaagaaggggaaaagcaaagaaacaaaaacaaggcaaaaacctgagttgcggaggaaagaaacataatctggaattcgagaagctaatcaatcgtttgcggttgctttgttcctcctctcgcagatggttaggggaggaaggtttagcggcaaacgcaatttcaggaaaagggttcggtcaaaggagggaggttctgatgattcggatgaggactatgtggtttcagatgaaggtagagaggcatctgactattactgctcctccttagatggatgcgcatcagaggagggttttgatagttttatggaagaagaggaggagcaatttcgaagagtgaggagtatcaatagatccaagtcaaaaaagggcattgctggtcggcggaaaaatggcagtaaaagctcacacaggaggggaaggattacatatgcagaagaagaagacgtagaagaggaggaggaggaggaggaagagtttgaagacgaagaggaagaggacgaggacgaggaagaatacaaagaggaggaggaggaggaggaaagtcaagaagcgaggaatttcaaaaggtcaaaggccaaaaatggtgtttgtggtaagaaaaaacgtgcaggtaaaatctccccaaagaggggaaggaaaatacgtgcagaacaattggaagaagaggaggaggaggaagaagaggagaaacaggtggaggaagaggaggaggagaaggtggagagaagtggagctgaggaagaagaaccggagggagatagagatggagaggatgaagattttgaatatgatgatgaggatgatgaatttttgccagaggaagaagaatattcagatgaggaagaaatgggggggagaaacaagaaaaacgagggcgtgaaaatggagaagaaggttttgcagaagaaaagggcctctgtggtttctaccaggggtcggaaaaggcggagttctagagcatcaaagaaacccttgggaaac

SEQ ID NO: 139708 - DNA, 357 bp, Glycine max
  unsure (1)..(357): unsure at all n locations
  Clone ID: PAT_MRT3847_97164C.1
tatacttccaatgaatttcaagaattaatgcatgttttaaaaaatgtctattatgagacttctcttcaagtcaaaattggaagtagtccaagatcaatctataggaaaatggaatcatccatcatttgaagaatagcctttcatggtagtattagcatatgtgtcataaaaagcctgatttgttcttggtttggtgctaagatcgcagagggcatgttgccacctactgcacttttaagggtattaaatcttttgtctaaggtgatgccaaaggcaaaactgtttccacacaaagatctatctgcgctgactttncgagaacctggcaggagaaaagtggttgtttgttccgggccc

SEQ ID NO: 139709 - DNA, 878 bp, Glycine max
  Clone ID: PAT_MRT3847_97165C.1
tcctgcggacgcgtgggcggacgcgtgggctggaattcgagaagcaaattaatctttgttcctcctctcgcagatggttaggggaggaaggtttagtggcaaacgcaatttcagaaaagggttcggtcgaaggagggagtttctgatgattcggatgaagactatgtggtttcagatggagggggggaggcatccttttattactgctcctccttagatggatgcgcatcagaggagggttttgatagtttaatggaagaagaggaggaggaatttcgaagagtgaggagtttaaatagatccaagtcagaaaagggcattgctggtcggtggaaaaatggcattaaaaactcatacaagaggggaaggattacatatgaagaagaagaagaagaggaagaggtagaggaagagtttgaagaggaggaggaggaggaaattcaagaagtgaggaatttcaataggtcaaaggccaaaaatggtgtatgtagtaagaaaaaacgtgcaggtaaaatctccccaaagaggggaaggaaaatacgtgcagaacatttggaagaagaggaggaggaggaagaggagaaacaagtggtggaggatgaggaggaagagaaggtggagagaagtggagatgaggaagaagaaccagagggagatagagatggagaggatgaagattttgaatatgatgatgaggatgatgaatttttgccagaggaagaagattattcagatgaggaagaagaaatgggggggagaaagaagaaaaacgatggcgtgaaaatggagaaggaggttttgcagaagaaaagggcctctgtggtttctactaggggtcggaaaaggcggagttctatagcatcaaagaagcccttgag

SEQ ID NO: 139710 - DNA, 1304 bp, Glycine max
  Clone ID: PAT_MRT3847_97166C.1
aataaatacagagttcccttcccgtctctcacacttaggcgtcttcagcaattagcagcaatcaaatctgtaacctttcagaactcaaaaccccctttcaaatttcatcatgtccggctatcccaaccagcctcccagctacagctacggcgcgccgccgccgccccaaccctacggtgcccatccgccatcgcaatcatacggggctcctccgccatcgcaatcatacggggctcctccgccaccgcaaccctacggcgcgccgccgcccgctcagccctactccgcctccccctacgcccaaccgtccgccccctacgccgccccctacaacaaacccccgaagaacgagtcccactcccacggcggcggaagcagcggcggctacccggctccggcgtacgcgagcccgttcgcgtcgctggtgccatcggcgttccctccagggacagaccctaacgtggtggcgtgcttccagatggcggaccaggacggaagcggatttatcgacgacaaggaaatgcagggagcgctttcttcctataaccaaagcttcagcctcagaaccgttcatcttctcatgtatcacttcaccaattccaacgtcaagaaaataggaccaaaggaattcacttctctattttacagtcttcagaactggaggtccatttttgagagatttgataaagacagaagcggcaaaatcgattctactgagttgagagatgctctactgagtctgggctatgctgtttctcctgtggtattggatttgctcgtctcaaagtttgacaaaactggtggaaaaagcaaggctatagaatatgacaatttcatcgagtgttgtcttactgttaagggactgactgacaaattcaaagaaaaggatactgcgtattctggctctgcaaccttcacctatgaatcgtttatgctgacagtcctgccattcctaatagcttaggaaattaatggtgtgtgtgtggttggtagggtttgtaaatggccaggctgtatttggtttgaaaatgtgtggtcgaattactttactattgccagcctttaatatgctagtactccctgttgttttactctataagtaaccagatccaaaatactatggttttcagcttgttgataattatctttgggttatgcatgtgaatgaagcgttgaaaatgagatttcctggtaatggtaatccatgactggataatgatttgggtatatttctttcaaaagataaatcttgtataattttctttatacagaattaagaatacttctcattgttaatctgtgaa

SEQ ID NO: 139711 - DNA, 1443 bp, Glycine max
  Clone ID: PAT_MRT3847_97167C.1
ggattcggtgaactatagaaggccggccgggcgcgaataattcttcattgctctcaattatcaatggctccccaaaccatttccattctcaacctcttaccagaacctgatgtcttcattcacacttcccatggaacacgcattccagcccacgcacccattctggcttctatgtccccggttctggagaacttgatagatcgcccacgtaagcatcggagctccgagagaataatccaaatccacggcgtcccctgcgacgctgtcaccgccttcgtccgattcctctactcctccaggtgtacggaggaagagattgaccagtacgggatgcacctccttgcattgtcccacgtgtacatggtgcagcaactgaaacagaggtgcatcaagggtttgacccaccgtttgacgacggagagcgtcgtcgacgtgctgcaactcgcgcgtctctgcgacgcgccggatctccacctccgctgcatgaagctcctcgccaagaatttcaaggcggtggaagcaaccgagggatggaagttcctcgtgaaacacgacccctggctcgaactcgacattctccgcttcatcgacgaacacgaaacaaggaaaaagaaatcgaggaggtataggatggaacaggggatatacgcggagctgagcgaggcgatggagtgtttggaacacatatgctatgaggggtgcacccacgttggaccgtacgatgcggaggtgaagagggagaggacgccgtgtgggagattcgccacgtgccagggtcttcaggttctgatccgccactttgccacgtgcgagaagaaggttcgcggtggctgcgtgcggtgcaagagaatgtggcagctctttcgactccattcctatgtttgtcacgacaccgattcctcctgcaaggttcccttttgcaggcaatttcaattgagaatgcagcaagagaaaaggaaagatgatgctaagtggaaactactagcgaggaaggtggcctcagccaaagtcatgtcttcattgtcactgccaaagaggaagcgagatgaagaaacaagagtgacgatggacaatcccgggattagaagttttaaattactatgaatattcttataaataatgatgtataggacagtgtgttccgtgttagatacttgatagagcagtttctatagggagagagtattctgcttgccggtttgttctgtgtaaaagcagggtttttgatggtgtgaacttcttgtacttggctcttttacttgagaaaatggcaaattgagtggtaccttgtaagttgtaacggtaaattttgtttgtttgaacctcattttgcgttgtctgagcatttgagaatattgtaaagctagtgttcaatttgatgaattatttgtgtagaatattcaaatattcattttaaatagttatatttatccttggaatggt

SEQ ID NO: 139712 - DNA, 1444 bp, Glycine max
  Clone ID: PAT_MRT3847_97168C.1
ccaagctaagactcaacaatttgccattcaggtacaagaagttgttcacactatccaaacctgcttttacacagaacaaaagcagaatattctctccctgtagaaactgctctatcaagtatgtaacacgaaacacaccgtccttcctatacatcattcatcattcatcattcatggctccccaaaccatttccattcactaccacaccacccgcttcttacctcaacccgatgtcttcattcgcacttcccacggaacacgcattccagcccacgccggcattctggcttccatgtcccctgtttttgacaactttatagatcgcccacgtaagcatcggagctccgagagaattatccaaatccacggcgtcccctgcgacgccgtcaccgccttcgtcggattcctctactcctccaggtgcacggaggaggagatggacaagtacgggatgcaccttcttgcattgtcgcacgtgtacatggtgccgcagctgaagcagaggtgcatcaagggtttgacccaccgcttgaccacggagaacgtggtggacgtgcttcaactcgcgcgtctctgtgacgcgccggatctccatcttcgctgcatgaagctcctcgccaacaatttcaaagcggtggaagcaacggaggggtggaagttcctcgtcaaacacgacccctggctcgaactcgacattctccgcttcatcgacgaacacgaaaccaggaaaaagaaatcgaggaagtataggatggagcaggggctatacgcggagctgagcgaggcgatggagtgtttggagcacatatgctatgatgggtgtacccacgttggaccgtacgatgctgcggaggtgaagagggagaggacgccgtgtgggagattcgccacgtgccaggctcttcaggttctgatccgccactttgccacgtgcgagaagaaggtgcgcggcggctgcgtgcggtgcaagcgaatgtggcagctctttcgactccattcctatgtttgtcaccacaccgattcctcctgcaaggttcctttttgcaggcaatttcaattgagaatgcagcaagagaaacggaaagatgatgctaagtggaaactactagcgaggaaggtggcctcagccaaagtcatgtcttcattgtctctgccaaagaggaagcgagatgaagaaacaagagtgaatataaacaatcccgggattagaagttttaaattactatgaatattgtaatgaataatgatgtataggaaggacggtgtgtttcgtgttacatacttgatagagcagtttctacagggagagaatattctgcttttgttctgtgtaaaagcaggtttggatagtgtgaacaacttcttgtacctgaatggcaaattgttgagtcttagcttggaaaattgcatatgaagccttgcttaattttcgtcaattccgtt

SEQ ID NO: 139713 - DNA, 485 bp, Glycine max
  unsure (1)..(485): unsure at all n locations
  Clone ID: PAT_MRT3847_97169C.1
ttttggtgttttttttttttttttttttttggaaggaggtcagtgaggtctcagtcggaggtcagttttctcaacctgtaagagtcttgggtctcccagcacatgaagatcaatgatgtaactgatttcatgatcttccttggccatccgacatcaatctcagaaggaatgatgattacatccatgttcatcaataacagaacatccacgtaatttgtgtgcctaatctgaaccagttcctatcattgtcctaccaaaatatgataaaaggaatgatgattacatttcattcccagttcctttccttcagaagtcatttcattcacagtgccacacatattctgatattcatcttaacctgcttaaatagcccccaatgagttcagaaattaattatgcattttaaaattttgataattttgttgagtgttaaataacttatgcattaggcaattnttttagatggataaaaaacatatagaatt

SEQ ID NO: 139714 - DNA, 431 bp, Glycine max
  Clone ID: PAT_MRT3847_9716C.1
gtcattgatgcagcaactcacatcagacactataattgaggtaagcattgaaataccttttcctttccaagcaataccaaagcaagcaattgaatcagctgggacccaagtccttgaacaaatactcaggattatgcttccccgttttgtgtcacagcttgagaaagattatcgagcttgggcctctggagatacctcaaggcaacctcttgagacaggtgaaatttgaaataatacctcatagaaattgccactgcgctggccttaaattgttgtgtagttaataggttctagaaatatcgcttgtagtatgtgcattaatgaatttttggtttgttaactgaatatacattattattaggcaaaattgtaaaattggtctcccactttatctccaattacggatttggtccccctataatttaattccc

SEQ ID NO: 139715 - DNA, 762 bp, Glycine max
  unsure (1)..(762): unsure at all n locations
  Clone ID: PAT_MRT3847_97170C.1
gacagtttatgaagcagtgtagtggtaactcttgtcaatctttccactttgacattgccgacgcctccagataaacaaccttaactttcccacaacaccacccatcattctttttctctctctagatttcatttagttgttgctgtcttcttctgtttgtgtgtgccaacacagagcgaaaaacatggctctgaaccaatcaaaagccgtgttgttgagggtgagtttggtggtggtggcgctcttcatagcagggtacatagtgggtccccctctctactggcatttcgttgaaggtttggctgcggtcaaccactcttcttctacttgtgccccctgcatctgcgattgctcttcacaacccattctttctattccacaaggtctttctctcctctctctctctctcagatctgatttcgttagtttctcaattactcatctcatgatcttgctcaaaaactaatattttcttaattgggttgtccaatctgggttttggatgagtttttaagatctgggttgtgttggtatttttattttatttttttagttatgtaaaatgggaatagttcaattgtgaaagttgaatcatgactccttccactgatataagcaatttgatccctttaaccttctgattcatgtgctctggcattagtgatttgatgagaagacactgttaatagaacgtgtcaatcgatgttgcagaattggtttgcttctttgacattattatacctagggttntgggggtttttc

SEQ ID NO: 139716 - DNA, 193 bp, Glycine max
  Clone ID: PAT_MRT3847_97171C.1
gacccatgctatgcattaacaccgtacggtctgaggaagaattgcacattgaagtgcctctcgtaaggcataatggattctcatgagagtgatcaacacgacgttcctattggggaacccggcttctgactgatgattggtcgacctactgccggcgcaagagttgtttgtagcctgcctgatgactgacaga

SEQ ID NO: 139717 - DNA, 222 bp, Glycine max
  Clone ID: PAT_MRT3847_97172C.1
gcacgagcctttgtctacaatctccccctttttgatgatgacaatacctgaaatcaagacaagctatatacaagatgatagcacgttcacacaaccattactccccctatcttttggcatgtatgcctaacttttcttaatgataaatttctaaatttctaattgatttctaacccatgttctctcccaagttctctccccctttggcaacataaaaaaaaa

SEQ ID NO: 139718 - DNA, 454 bp, Glycine max
  Clone ID: PAT_MRT3847_97173C.1
cggacgcgtgggcggacgcgtgggcggacgcgtgggttccaaatgattgtcgttcattgcattgttgccaaggttggaaatcacaaacatattgttggatttcatgttgctggaagcaatggaagactggaatatgcttcattgataccatatgttgagccagttgtgcaagctcaaagtgctgaagtttactttgacttattgcctgaggaggttgatcgccatgagggagttgctcacattggtgaattgaaatctgatgactatgatccactgtctacaaaaactaatctggtgggaactgcaaaggaatggcaactggatctaccttgtgacataatttctagtgttttgactacaactgatgatagattggtaggcacataacatgatggatatgatccttttattgagggcattgaaaaatctgccactgccatgatgcccctagatg

SEQ ID NO: 139719 - DNA, 243 bp, Glycine max
  Clone ID: PAT_MRT3847_97174C.1
cttagttatcatcctctctttcaaattatgtgctgtcttgagattgattcttataaacaaagatgaatagatatgtttagcttcgtttcgtgttcattccactttgattggagcataatcattatagttattgtctgttatctacccgatttcagaggatgaccatataactggtaactccatgtcaaaactcagatattcttgtttagttgggatgatattcatatttagtatgacggcaat

SEQ ID NO: 139720 - DNA, 149 bp, Glycine max
  Clone ID: PAT_MRT3847_97175C.1
cttttccggcactcacactgttgtcaattcaatcgttcatgctcgcattgcattttcgccttgctttcgtctgcttccatcgtgctaacatagggttgcttctcttctctctgtactctggtcgagcctgtcggcatgtcgagcgctgg

SEQ ID NO: 139721 - DNA, 215 bp, Glycine max
  unsure (1)..(215): unsure at all n locations
  Clone ID: PAT_MRT3847_97176C.1
ttttatgttctctcgtgaatgtttttnatgattgacagtgacagtgtttttgcgtccctcctcgagttctttgtttacttgttgtttctgctttggtttggggaacccattttgtctaaattttcactagattctgtttttcgatcatccatggttgttatttgttgccttttatgttattttggtggtggtggcggtgatacgagggcaaagat

SEQ ID NO: 139722 - DNA, 367 bp, Glycine max
  Clone ID: PAT_MRT3847_97177C.1
gactcgaaaaacgcaatcaactggaatgaaacggatgctattgctgttgaattaacggccatctttagtcaggtttcggatagtaacgttgatgagttcacatcgacgatcgaaaagttgagatactaccttcaaatcgcaaaaaaagttgatcgtaagcaattcacggaaggctgcattaaagaacttgatggcctcttgcaagactacaaactacttttggagaagttggcaaaatctaaccgcttagaacgttttctatcgtcttataggttgagaactcccctggagcaaaccaacattcgcattgacatgcttaccaacgtggccttttccattttgccaaaaccagagaaagtgggtggaa

SEQ ID NO: 139723 - DNA, 355 bp, Glycine max
  Clone ID: PAT_MRT3847_97178C.1
gcggccagcagcacaccttaaaaaagttcccggctcctttcttgaatttcactgaagccataaagcctagcacatttactacaattggttattttattttcacaaatcacgataaaccatctccaattccttacgttactctgtgcttcaatggcgtccaaccacgagatggatcaagacgacgacggaggagcaaccgacctcagcaccagcgacgccgaaaccaccaccaccaacctcaatggagtccccaaacagcacaacgcgtttgaagaagaaacaacggggtttcaagtcttgccgctgaaaaaggaggagccaacatattcggacccgaacatggggattactcccg

SEQ ID NO: 139724 - DNA, 247 bp, Glycine max
  Clone ID: PAT_MRT3847_97179C.1
gagaagctgaggcaatctcttgttaatgaggggaatgaaactggtggaacattttttaactctgaagctgacaatgatgacaatgaatatgatggtggaaatcctgattttgatatgccggacaatgcttacatggaagaagatctaccatctttcagtaatgagcatgaatttgatgatgctcatgtcaaccctgatgaagctgtggatctttctcagactagtttggaagatctttgccgctctc

SEQ ID NO: 139725 - DNA, 466 bp, Glycine max
  Clone ID: PAT_MRT3847_9717C.1
ccttgacacaccggacaacacccctaaacttccatgggaatttacctgggccaatcaatcgatggtttaggagattttgtcaaactgatcatacaacaattagccgtctgctccgataacgtcttgggagctcgccgagccaccggatggtggctggctcgctgtttctgcgataggggccgaggctaacatagcggaggttcctgctatacggggctatgagggcgccacatctcgatccttgtacaaccgagctcaggttgggaaatagcatcagttggtttgtggacccacacgatgtatcatgagagggacgccaggagttgatgacgccgaattgaaacgctagagagtggagcagcttgaagcatcacgctatggtgggtgttctgttggtagaatggaacgcataggatgctgtgtgaaagctcctatgattgctgtggccgatgatgtcaatggagcg

SEQ ID NO: 139726 - DNA, 267 bp, Glycine max
  Clone ID: PAT_MRT3847_97180C.1
aaaagaggaacacttttttttagatttggaagttaaaaaacacattgtggggggctacatccaaacagagggctcgtgtttttcggggaccccggaaaaatttgcaaaagatcctccaaatcccaattgggggggggggggggagaaacccccagcgttggaaacgtggaaagtttgggtttttaaacttttttttgggggaaccttcaaaaaatttccaatgatgagcggggggatgaattcttttggcctgtccccattgggggg

SEQ ID NO: 139727 - DNA, 396 bp, Glycine max
  Clone ID: PAT_MRT3847_97181C.1
acaagctggtgcagtttgcagagatacaggaaaaagcgggattgaatttttcacaatatgcatttcttactgctagttcaactcacgcccgtgctgtagcaactatgaaggctgatgggtgtccatatctgattgcagtggtgcattatattgcattgtctacgataccaattgatgttgtgattgatgtcatcgtatgcatccatgaccaatatgcgtgcatatctgactcgatcctgatataacctgaacttggctattgggcaccatgcctaagctcatatacacgctaactgtatggcatcatatatcgccggacagttacacgattgaattttgattctagcaagcaaagactaatgccattgaactatcgacccactcggttgcagaatg

SEQ ID NO: 139728 - DNA, 453 bp, Glycine max
  unsure (1)..(453): unsure at all n locations
  Clone ID: PAT_MRT3847_97182C.1
cgggattgagtgatcttattgcttgttggatcgtttatcaggcatatacttatttaaatcactgcaatattataatgtatggtttcttcaatggagttagcgcaattcaattgttggctgttgttggtgttgctattcagaattctgaatcattattttataattcacattacaagacaggaagcgcttttcttccatcaattgaatatttaagctttttcttatatattgcttcgctatactttgcattccatgcatatagagagtttaaagcaataactctggaaatgatgggtggtgctcaaggaggtggaacggaattacctcaatacagacctccacaaagattcngtgaacaaagtggcggaggaaatcaaaaccaaaaccagcaaagaggattccaacaatttacaggaaaaggagtcacaattggctagataattcatttgtttt

SEQ ID NO: 139729 - DNA, 601 bp, Glycine max
  unsure (1)..(601): unsure at all n locations
  Clone ID: PAT_MRT3847_97183C.1
agaagaaaaaagaagattggtgagtgaggaagtaaatagnaatagnannggganngtnannattgnnagtgnnattagnaanagnagaatgggaantttgggnagagttttttaagnngttgtattttggatnngngagattgggggggggatggatngnntnggtttttgtntnnaaggnaattantttttttaagaanagntgtntaggnatnganttttgatgaatntgttnganaaagtttttttggttnanagggatgnatttgtggnnnttagtgntttttttttnggngatgtngangttggnnnngtttgttttatttggtatggatgngttttgagaggtgatgttaanaggattattattggatgtggaattaatatanaagaaaattgtgttgttgatgttgggaagtgtaatttgagtggaaaagtgttgggaattatgattggagataatgagattgtaggtgataggggtgggttanaaggatgganaggtgaggatgagggatttattgggatggaggaagagtaggttgatggggggtgtggtgggaaanattggatggagtggtggttggagtgttgggggggg

SEQ ID NO: 139730 - DNA, 261 bp, Glycine max
  Clone ID: PAT_MRT3847_97184C.1
cgccttcctttttttttttttttaacacgaccacaaacataaaaactcatctatatgcgggatagaggtttattagaaacagtggtgaacgccactattccgtaagtaaacaaaaacattcctctaggtttctcttcaaaaatattacactatacaacatctttagatattttgaggtaccagacttctacacctttctatttaacgttgtggcatcacccttcttaataatttcctcccctttgccatactgacgcttat

SEQ ID NO: 139731 - DNA, 453 bp, Glycine max
  Clone ID: PAT_MRT3847_97185C.1
gatagacagcgttgttctggttgaacccgtgctcactgcatcggacaaatatagtccacaactgccgcgccaatcttgaggccttctctcctaaggcgagcgcccgtatatccagcggaaacctgtttcattataggaggaacactgaagtcatgctatcatttctgtgaaaagactctatgcggctttgatcactttgagtgcatactcctcttactgaagggcaggaattgctccattatgggtagtacgtattgctgcacatgctttagagggcttgaatacttttataacccttggctcatgcttctagaatggactgaccatcgacaatattggactatttagctcctacagaggaatgaccgggcccaactgtatcagctcgtttaacatgaaatgcatttactgatccttcgaaagactcggaggactatctggaaccatgctttc

SEQ ID NO: 139732 - DNA, 406 bp, Glycine max
  Clone ID: PAT_MRT3847_97186C.1
tcgagcatcctagacgcgagtgtcttattacacataacttttttcacacggctagtagaacactcaccaaagcgacaacgtctagctatggtgaatcggatgcttgaggaaccacgcgcatctgaatggcatccttcggtgttattcactcactcgcattgatactatggaaagccctcttttgttctatcaccacaagcagggctgaagtgcaccatctgtacgtagatgcaaatctgatagttccagcgttgaccacatggttatcgatccgttggtcaaggtcattcatgggaagcatcaatgccaatctaagaacaaatgaaaatactatggcggttccaatgattggaaataacattcctgtatatgcattgtggactatatatatctgtgagaaaataga

SEQ ID NO: 139733 - DNA, 797 bp, Glycine max
  unsure (1)..(797): unsure at all n locations
  Clone ID: PAT_MRT3847_97187C.1
ggctcgaggaaaaaaagatgttgatctacaatacaacgaacaagctacaagcttttccaatgtaatgtggggtctgatcaataaagttttaatttctaaccctggttggaaaccaaaaaccttggcaacgatgacgaaaaaatgacaatgccatgtgtaaggtaaggaagacatggagaacaagaataatagtaacagtctgatcaacaatgtttaaacttctaaccttgacttggaaaccatgaacccaagcaaggatgatgaaagagtaacaaagccatgcttaaaagataaggagaccacagactagcctaactgtaacagtatcatttgcagaggacgagattaaagaaagaagccaaacagaagtactgaaagaaaaagcagagatgtcatcagtacaggagcgtgaatggaaggcctgagtcaatcaggtgaggtccagcaactagtatatacatgtttgcttaaactgaagactcctcacaatatatgttggagaaaatagtgatggtgaagctaccttgggaaaatggatgagataagttgagtttgaaagaaaacccattgagaacagcaggagcaagaganaaagtggttgcnattgagaaagtagaaactctgtaagatatctgtagaagcatttccaccagttgntggggtggncccccataaattttagtgggccnccatgtatatggaagnggagganacaactcncntggggctcagagactattgaaaaaaaatccccacttattcagaaaaacatgatagagacaacagattcatggcag

SEQ ID NO: 139734 - DNA, 1303 bp, Glycine max
  Clone ID: PAT_MRT3847_97188C.1
aagcaaggggctcgaggtaccatcttataactaggtatttattttctcatatgctcttcttaaacttctctttggtagtgtgttcacatacatatctacttattgttattattattgtcaccacatacaataatgggttccattagtaacaccgaggttcataatcatcacaatgatgatgacgacgatgatcatcgtcatcgggtgaatttctcgatccagagaggatttgggacaaaattgaaggaggcattgaaggaaacattgtttccggatgatcccttcaggcagttcaagaacgaggagaagccaatggggagggtgatgaaaggggtgcaatacttcatcccaatctttgagtggctccccacttacaattttcgcctcttttgctctgacttgatcgctggactaaccatctcaagccttgccatccctcaaggcattagctatgccaaacttgctgaccttcctcccctcattggcctttattccagctttgtcccacctttgatctatgctgtttttgggagttcaaggcacatggcagtggggacgatagcagcagcatcgttgcttattgctcaaaccatacaaaccgtggtagatccagtagaagatccaacgttgtatcttcatttgattttcactaccacctttatcaccggtgttttccaggcttgtttgggtttttttaggctgggaatattggtggacttcttttcccattctaccattaatggcttcatgggagggacagcagtaattctcatcctccaacaactaaagggtgtatttggcatgaaacatttttcaaccaaaacgaacttggtggcagtggtgaagagcatagtcaacaatagacaagagattaggtgggaacctaccattcttggcgtgatctttgttgctttcttgcaatttaccaggcacctgaggaataagaatccaaaactcttttgggtaccggctatagctccaatggtgactgtagtagttgctgccgttttcacctacgtccccaagggccaacatcatggaattcaaattgcggaccatctatataaaggactaaatcccttgtccattcactattcgaactttaatggtaaatatatacgaacacatgtgcaagctggtcttgacacaagcgtgtagccattagcgaaacgaataccaataggaagaagctttgctgtagctgacaatacaccccatgatgggaacaaagaaatgatcgctttccgacttatgaactagttcggttcatctacttcatgttacttgactagaggaccatttt

SEQ ID NO: 139735 - DNA, 428 bp, Glycine max
  unsure (1)..(428): unsure at all n locations
  Clone ID: PAT_MRT3847_97189C.1
cccatctctcccctgcaccagaagaaagagccaancgccgatgacgccaccgcaatcatcacagcgacaacatcaacggaaaccaactacagtgacaacaaccacgacaacaccgcaacaaatcttcctttctagccaaccaccacaccggcgacgacaatgacaacgacgaaatcgccaccacaacgactcccttccaagccaacggtggcgacaccgccataaccaccctccctttctcagatttggaaaccgcaaaccatccccttttctcaaatctaaaaaaaattgcaatcccaaaacctacaaccacgacatagtagcgcatccaatcaccacaaccgtcgttgaccaagcttgcattgtacgaccgtcatgctcccatgcttggagccaccagcgttgatttgcaaaagttgttgatttca

SEQ ID NO: 139736 - DNA, 318 bp, Glycine max
  Clone ID: PAT_MRT3847_9718C.1
gtttaacattatacaagagaaagtgtgtgtgtgtgtgcatatgttgtccctgcaagatggatccaaaaactgatggcggtgtgattgatggcaggactggtcgccgtaaccaggcctatctgaacatcaccctccttttctggcgaaactgtaaccaacttgtgcgagtcccattagtggagctatgttatgtgcaggaatgtggatcctcattagggagagtatagtgctgtatgattgaggtgttggagtttctatagcggtgataggatatatgggcacaaccttttatgtaggacaagtggttcagaagaaatg

SEQ ID NO: 139737 - DNA, 266 bp, Glycine max
  Clone ID: PAT_MRT3847_97190C.1
ataattttcaatgtggttgtggattaggctgaacttttcatttttcgcctttctacagctgattattgattattgcctcactttcagagatcaaatcgccccgtgtgatttaatgttgggctagtgtatctgattgtttaacggttgaggtaggcggccactgcaactcctttatgtggtcttcgagctctatgctgaaacttgcaatttcctactgcgattttctggcgactgcggcgatgaatctccggtctatcaaggcttgc

SEQ ID NO: 139738 - DNA, 485 bp, Glycine max
  unsure (1)..(485): unsure at all n locations
  Clone ID: PAT_MRT3847_97191C.1
atctcctccaccttgcacgagcttccgccaccgtcatcgccgtcgtcgacaacctccgccgccatgccaacaccgtccgcatcctccgatccaatcctggaccgcctcgcctcctccgattgcgcggtgaaattcaaagccatccgcgaggtgaagaaccacatcatcggaaaccgaacgaagaagcattcctacatcaagctcggcgccgtccccgccgtcgccgccgcactcgccgactccgaccccaacctcattgtccagtcggccgccgcgctcggcagtcgnccctgcggcgtcgacgacggcgtccgagccgtcctcgacgccggagcttttcctcgtttgatcggactcctctccgctcatgacgagaaggtgaattcaaatgttcaattgtttgcaaccgtttttttataactttttaatgtttggtttatcggaaaattgactcatgctgtgatcggtgctattgattcatgatt

SEQ ID NO: 139739 - DNA, 358 bp, Glycine max
  Clone ID: PAT_MRT3847_97192C.1
ccatgaaaaaggcatgtgaaaattggaaaaaaaggactggaattgcaccgaggcactctgctgcatgaaactgatccctcagttgatcctgattaggccatgtttctaagggaaaaaccatgtaatgctattctaataaccttgggtcttgaactcgaggcaaatcataaactaattaatgctggacactacaaactgatgcaaaagtgaagtagctaaacagccacttttcaggaaaaaacaaatactgtcaagcagattcagtccttaaaaaaaattctggtagtccagctttcattcttacactattccttcagtacagaatcttgcatccagggactgatgctactgcactttg

SEQ ID NO: 139740 - DNA, 189 bp, Glycine max
  Clone ID: PAT_MRT3847_97193C.1
ggattgggtttggttcttagggaaccctaatacaggggcattaggacgaagaagcataataagatgaaagacagtaaccgagtgatctacagataattccctagttatgctcactgatagactcactgagtctatgcatcgtgataccgatattcatttttgccggaacaaactcatgctacgatcata

SEQ ID NO: 139741 - DNA, 322 bp, Glycine max
  Clone ID: PAT_MRT3847_97194C.1
aatcgatgcaagcctacaattatggtggatagcgcggctgcgttcgagaatccagacacgatggacgacggttcataatacacggaattcgatgtgcgtaatctactatccttaagcacgcgctgcagtggattgcctcgtggccaaagctgtgcaagacgccactgttattgtcacacttgttacacttgctgttacgtgtatgcactttcatgacagcctggtgattgggtgagacgcctcttcgctgatagcttcatatggaatcgtcatagcgtagtgagctattccaccaaatgaaacttggcaagcatcccatgat

SEQ ID NO: 139742 - DNA, 244 bp, Glycine max
  Clone ID: PAT_MRT3847_97195C.1
attgaaatggggcacaaaaatattagctctatcctgaagccaaaagacatgacatcactattcctacaccaactgcaattccacatttccaagatatacagctgcacaaatgtacatatatgaatagcaattacctgttttctatattatgcctatcctgaacccaaactaaatgatatctgaatctctcggtgaattacaattccacatttccaagaaataaagtggcatatatgttcatata

SEQ ID NO: 139743 - DNA, 438 bp, Glycine max
  Clone ID: PAT_MRT3847_97196C.1
tgtgcggcgctttaatgttttagtacacaaataagcattaagaataaacctcgttgtgggtgatactatagttgttagagatggctaagctttctttcgcacaaatatttatggttacccttatcattttagttatttcaaagacaagcgaagcggatagatgtcagaaagtgatacagccaagcaactgcaatctcggaaaatgtcaggcggattgcagcttccaatatagagactatcgcggcattggaaagtgtattggcggcagtaatgcaacttttcaatgtgtttgcttctatgactgtggagctccatcaagtttagtgtaaacttatagagtgataatatatatctactctattttagagcgtacaacctttttgattaaataattagtttatgaaacttttattcacatttaaataatcttcttctagc

SEQ ID NO: 139744 - DNA, 890 bp, Glycine max
  Clone ID: PAT_MRT3847_97197C.1
ccacctcctgcttaacacagacaaacagaggaagagagaaagacccaagatgggcctttgctttggttgcttcggcgtagacaaacgcatgtgttaggaagaaaagagattggcctctgaagaagccccagataacagaagcagaggaagagagagaaacaccaaagatgggtctttgctttggttgcttcggcgtagacaaacgcatgagcaaggaagaagagagattggcctctgaagaagcgcgtgccaaagctgctgaagccgcacagaaaaggcaagagcaatttgagaattctgcagcaggacgagctgctcgtgcacagcaacaagcaatggcaaagcaatctgcaaataccaacaaaggcgaaccagttctaaagtggcaaatgagttgaggttagacattctgtcagttggagttaactttttattacgtgtaagtatcgatgacaggtccaaccagaattatatgctctgcatgcttcccttgttccgaagatgtaaagatctttattgcaataattgtatcacaagcgcgatttgttgttttccagaccaagaaataatgtttgaatgtaaatttgtaaagaaatcgtggtgaatggaaaccgggataaatagagattgtagtttcatttgattttttttaaaaaaaaaagcatgacaagtattttcagcagaactccattttctttctaaaaaaaaaaaaagaaagtaaaataaagagtatataaaaatgtgaaaaaaaaaaaaaaaaaaaagaaaaaaaaaaaaaaaaaaaaaaaaaccagctttaagagccttgcatgtgcgagtgagtgaagtgtagcccatagaatgatatactctaatgtttattttaaacgagtattttcagtagggagaga

SEQ ID NO: 139745 - DNA, 662 bp, Glycine max
  Clone ID: PAT_MRT3847_97198C.1
tggcagagacgcgtgggcggacgcgtgggcggacgcgtgggcggacgcgtgggagtaaccaaaggaatgggcggtttattttcttattcatcacttcccgaggaggagagtcctgacgtgaaagcattccactccgcggagagctggcagagccacttgaaagagatcaaagagtcccctaagctagttgtgatatatttcacggcgtcctggtgtggcccttgcaaattcatcactccagtgtttaaccagatagccgcagagtttgcaaacgctgacttcgtcaagatcgacgtggacgaattatctggtgtggcgaaggagtttaaggtggaggcgatgccgacgttcgtgttgtggaaggaaggaaaggaagttgagagggttgtgggagccaagaaggtagagctcgagaaaaagattaagcaactttctcaatcgtgaaagcatgtatgatagtaatcttttagctattcaaaccaaacctatgtatgtatgtgtgtatgaatctttgttttcaagggaaaataaaaataaaaaccagagttatggccttaggcttgtgatgatgatgatgttgtaaaatttaaactcattagctgtatgtatgtttcttccccaagatgatgtctgtttcaattatatgtagtatattatatttg

SEQ ID NO: 139746 - DNA, 512 bp, Glycine max
  Clone ID: PAT_MRT3847_97199C.1
gcaaaggaatgggcggtttattttcttattcatcacttcccgaggaggagagtcctgacgtgaaagcattccactccgcggagagctggcagagccacttgaaagagatcaaagagtcccctaagctaataaataaaaatcaggttgtgatatatttcacggcgtcctggtgtggcccttgcaaattcatcactccagtgtttaaccagatagccgcagagtttgcaaacgctgacttcgtcaagatcgacgtggacgaattatctgtgattttctcttccatattctctcttttctttattcaatccaattacttttgttagtttcccttggctcagttcgatagagtggaaagaagactaatgaaattttgaattaaaatatactgtaaaagcatcgatctcatcagattattttacttcatttctctcttcttcttcttcttctttttgccttctttttctgcaaacgaagaggccttaatgattgatcaatttttcttaaaatatttt

SEQ ID NO: 139747 - DNA, 408 bp, Glycine max
  Clone ID: PAT_MRT3847_9719C.1
gaaaaagaaatcctgccactgctttaattaacaaaacccagcccaatacaacgattatgaagcaacggttcactccatagctaatttattaaccctttaaccggagaggaggggtttatgcatatcctataaaaacagtatgacaaacccttgcagcccctgccctgatttaccatgctcgagaccacatgaggttgataaagaactaacattttatccaaggacgcttggatgtcttaacccaaaagggcccccaccctacaacactatgttttgaaataggctgtgaagccctagctctacaaaggtttgcacattggacccacagtttctttaaaaagtttcacaggcaggagcaaagttggcctgaggaatgctacggaggtatactgggagtccattcctatt

SEQ ID NO: 139748 - DNA, 232 bp, Glycine max
  unsure (1)..(232): unsure at all n locations
  Clone ID: PAT_MRT3847_971C.1
gtcaactcctgctaggaagaggctgatgagagacttcaagaggctgcaacaagacccgcctgcagggatcaatggtgccccccataataacaacataatgctgtggaatgctgtcgtattcggtcctgaggatactccatggnatgaagacgcgttcacgagtacgcgtccattgccagacgacgatgcaaataagaccaggaatacacgagggcgtggatgcatatatcac

SEQ ID NO: 139749 - DNA, 381 bp, Glycine max
  Clone ID: PAT_MRT3847_97200C.1
ggggctacccgctgagtttaagcatatcaataagcggaggagtatgaggtgaagaagatgccgacgtttgtggcttggaaggaaggaaaggaagttgagaggcttgtgggagccaatacggtggagctcgagaaaaagattaagcaactttctcaatcgtgaaagcatgtatgatagtaatcttttagctattcaaaccaacctatgtatgtatgtgtgtatgaatctttgttttcaagggaaaataaaaataagaaccagagtatatgcctataaggcttgtgatgatgatgatgttgtaaaatttaaactcattagctgtatgtatgtttcttccccaagatgatgtctgtttcaattatatgtagtatattatatttg

SEQ ID NO: 139750 - DNA, 1530 bp, Glycine max
  Clone ID: PAT_MRT3847_97201C.1
tgccaaacaaaggtttgacctccttcagatctatacccttctctctctactcccccccctctctttctttttcttcccatttcacccctcgtctttccttgtttccggtgagggccaaccacaacatatgttaaacaaggaacaacctccaaaacataacatcctacgccaaacaaaactttgacctccttcagatctatacccttctctctctctctcttctattttcaaattctacatccatgggcacggaggttctacggcccacaagattgtttcacccaacgccatcggtgttccaccgcctggccatttcccggcgaaggacctatggtaccccggcaacccgacccgaacacagaaaacgggttgtggagaaaaggcccagctcgatgattcgaggttttcgaggttggagatggagaaggtcacgaattctacggaggggggagtcgctcgattcgaagctgaaaaccggggctttgaagaaggaaggtgacaatttggtcgtggttggtacccagaggctcggacctgacccggatatggttcagaagcagatccggatcgtggatttcagggccggacgccaggtttacgccggatcggcgttctcggtgtcgccatcgccgaccgcgctgcccttgacgtcgtttccgggcgcgaggtttgcgcgtgatccgcgttcgcggtgtcgccgtcgccgagcgcgctgcccttgccgtctttttcgaagaggcagccggcggtggcggttgccgactctgcgacccgtgatcttaggcgtcttctccggcttgaatgagccgaatcggtgccgtttccggatttcgggtcgggtctgacccgactctaacctatcttgtgttcctttcttcgttctcttccttaatctagaatcttctgcttctcctttacgcccctctgattttggagttatgacccgaccgtgatttttttaaacgggaaggcagatctggaattgggaaagtttgggggcgaaagtgttaataaaagaagtttggagtaatttatgacatcttgtaagattgtaagatcttgtggttgtggtggtggaggatgggttgtgaagggtatgtttaggttgtaatttcaggtaggaatggaaaaaataagctatattaaaaaaacaagacaaaaaagggaggaagatggggggttgatttgtaaaatccggaagtgtatggggttctttatgtgggctaaaatggattctgcttgtaggtctgtatacccttttgtaatgtaaagtgaaaaattaaatagggaaatgtggccaggttcagatttgaatattaccgggacgggtgggggggattcaaaaaaaaaaaaaaaaaaaaaaaaaaaaaaaaaaaaacaataaaattataaatatagaatctctttaccaattcaatatcaatcgtttgaatatctgtcaacgtacatagttattcaaaacattgatgaatctaataaggttcacacctttatcttctccaatatctgagtcaaacgtttaatgttaac

SEQ ID NO: 139751 - DNA, 1214 bp, Glycine max
  Clone ID: PAT_MRT3847_97202C.1
atacttggctccctctctcttttcttcccattttgccccttcctcctttccttgtttccgaggagggccaaccacatatgctaaacaaggaaactaaattctaacctccttcagatctacaccacccttctcttttttttccagtttcataaattctacaccatgggcacggaggttctacggccacaagattgtttcacccaccgcatcgctgttccaccggcggggttttcccggagaagaacctctgggacacacaacaacaattacttcaggggcacgcggaagccggttacccgacccgaacagagaaaacgggttgtggagaaaaggcccagcttcgatgattcgaggttttcgaggttggagatggagaaggtcaccattctccggaggggggagtcgctcgattcgaagctgaaaaccggggctttgaagaaggaaggtgacaatttggtcgtcgttggtacccagaggctcggacctgacccggatatggttcagaagcagatccggatcgtggatttcaggtccggacgccaggtttacgccggatcggcgttctcggtgtcgccatcgccgaccgcgctgcccttgccgtcgttttcgaagaagcagccggcggttgcggttgccgactccgcgacccgtgatctcaggcgtcttcttcggcttgaatgagccgattcgcgtccatttctgggtttcgggtcccaattttaacctaccttggcttcctttcttcgttctgttcattaatctagaatcttctgcttctccgttacgctccctctgattttggagtcctgacctgaccgtgatttttttaaacgggagggcggatctggaattggggaaagtttgggggccaaagtgttaataaaagaagtttggattagtttatgacatcttgtaagattgtaagatcttgtggttgttgtggtggaggttggttgttaagggcaagtttaggttgtaatttcagattagaatggagtaaataaataaactaaaagtaaaaaaaaaaaagaagaagaaagaagggagggagatggggtgtttgatttgtaaaatttccggaagtgtattatggggttgttaattatgtgggctaaaaagggattctgcttgtaggtctgtgtacccacccttttgtaatgtaaagtgaaaaaattaaaaaaaggaattttgaaccaaaaaaaaaaaaagaaaaa

SEQ ID NO: 139752 - DNA, 475 bp, Glycine max
  Clone ID: PAT_MRT3847_97203C.1
tacggctgcgagaagacgacagaagggggggccccccaacttgagggaggacagattgatcgatgtctaactctaagcagtactgtaaagccacggggtacttgggcacaaaggaagggtaaaaaaatgaaaaagaaaagtgtgcgttggatgatgaaaagaccaaagctattgaattgaaagtaccctttgtgacactgtgctttcaaccaaattttatttttaattctaatatctaatgatgcgttggtaattagtggggatatgtcttaaagcattttgttgtgattatgagttagcgaggatagtgggcgtggcatcctgcaaagatgattgattttattatagacactgtggattggattggctggacggcagatcattgagccttgagcgaagctcgtgttctgtgttgtgttctgattctgatttatttctgattcgaacgcatatatgcggtttttactagcaagcc

SEQ ID NO: 139753 - DNA, 130 bp, Glycine max
  Clone ID: PAT_MRT3847_97204C.1
aaagggaacgtgggcaacaagcatggcaccaagcattggagtgaatgtcacacaaatggatatgacgagctattataaattctacggacacgaagtccctgtcactgtcgcggctataaaagaagagaac

SEQ ID NO: 139754 - DNA, 937 bp, Glycine max
  Clone ID: PAT_MRT3847_97205C.1
ctctcaccccgaccccctctctttctttttcttcccatttcacccctcgtctttccttgtttccggtgagggccaaccacaacatatgttaaacaaggaacaacctccaaaacataacatcctacgccaaacaaaactttgacctccttcagatctatacccttctctctctctctcttctattttcaaattctacatcatgggcacggaggttctacggccacaagattgtttcacccaacgcatcggtgttccaccgcctggcttttcccggcgaagaacctatggtacccaccacaacaacaaaaacaataacgttaacaattatttcaggggtaaccggaagccgacaacccgacccgaacaaagaaaacgggttgtggacaaaaggcccagtttagatgattcgaggttttcgagtttggagatggagaaggtcacgattcttcggaggggggaatcgctcgattcgaagctgaaaacagaggctttgaagaaggaaggtgataatttggtcgtggttgggacccagaggctcggacccgacccggatatggtcccgaagcagatccggatcgtggatttcaggtccgggcgcgagatttacgccggatccgcgttcgcggtgtcgccgtcgccgagcgcgctgcccttgccgtctttttcgaagaggcagccggcggtggcggttgccgactctgcgacccgtgatcttaggcgtcttctccggcttgaatgagccgaatcggtgccgtttccggatttcgggtcgggtctgacccgactctaacctatcttgtgttcctttcttcagtctcttccttaatctagaatcttctgcttctcctttacgcccctctgattttggagttatgacccgaccgtgaattttttaaacgggaaggcagatctggaattgggaaaggttgggggcgaa

SEQ ID NO: 139755 - DNA, 473 bp, Glycine max
  unsure (1)..(473): unsure at all n locations
  Clone ID: PAT_MRT3847_97206C.1
gaattcggcaccagctgccgaatcctctgcccttgaaaagtcatacgaattacccgacggtaatgtcatcactgttggaaatgaacgtttcagatgcccagaagtcttgttccaacccaattttatcggaatggaagccgctggtgtgcacgagaccacgttcaacagcataggcaagtgcgatatcgatatccgtaaagatttgtacggtaatgtcgttttgtccggtggtacgaccatgttcgaaggtattgccgaacgtatgaccaaggaattaactaatttggctcccgcttcgatgaagatcaaggtagtcgctccccctgaacgcaaatactctgtctgggattggtggttccattcttgcttcactctctaccttccaacaaatgtggatttcaaaggacgagtacgaagaatcgggtccaggtatcgtccacagaaaatgttctanntcgactctgatcaacgca

SEQ ID NO: 139756 - DNA, 153 bp, Glycine max
  Clone ID: PAT_MRT3847_97207C.1
gcctattgctgcatatcttccctattttttatgtctctttatttgggaaggaccaatataataccatgcctcattaaggggcctaaggacgggaatatcgccttatacgggtgaaacctgttaattagggttaatgatcccaaagggaccatt

SEQ ID NO: 139757 - DNA, 1057 bp, Glycine max
  Clone ID: PAT_MRT3847_97208C.1
gtgttactgtggcaaagtggattttgaagaacagggcagagtctgaaaacatgaactggatacttgctaactcaaagccatgtcccaagtgtaagcgaccaattgaaaaaaatcatgggtgcatgcacatgacatgcactccaccctgtaaatttgaattttgctggctatgcgttggtgcatggtcagaccatggtgaaagaactggtggtttttatgcttgcaatcgttatgaagcagctaaacaagaaggagtgtatgatgatactgaaagaagaagggaaatggcaaagaattcgctggagagatacactcattattatgagcggtgggccagcaatcaatcttcaaggcaaaaagctcttgcagatctacagcagatgcaaactgttcatattgagaagcttagtgacatacagtgtcagcctgagtcacagcttaagttcataactgaagcctggctacaaggtagtagaataattcggcaacacagacccaaaaatggcacatatgccattgtgaacatgtccttcctagcatgggaatgggctctccacaaacaccaattggaaggcgttattgcaggattacgacttgggagacctgtggtagtcgcgtttggcatagtcggcctccgcgccgtctgccccccacaaatgtgaacaccaccagtaagatgaacacaaattgttgccagatcaagatgaatcattataattatgctcttgttccctttttgcctaaggcccatgccccaaaaactgaaatggaggccttactttggttatatcataagctgggtcccttttgtaaagctatttactgtgaaaagggcttaagtcgcttaaaaagggttatcctgcttgccctcctattgaatacatccccatttaatgtaaataaagttttatccttaaaaattttgtatgggggttttgcaacagggttttgtaaccgaatattttatcaagcccatgccggagaagaacccaaaaggggttgtttggaacccgattttttttagtaaatctttaagcagcttctttaattttccctg

SEQ ID NO: 139758 - DNA, 270 bp, Glycine max
  Clone ID: PAT_MRT3847_97209C.1
gaggacaaaaggaaaaggccccaaatttaatttaagtggacacttttacttaaaattttagaggaggacatgtctatgttaaaaatatagcacaatcctttcaaacttggcctcttattttttgacctaacacagtgagaattctaaaaatgttacacgcaagtaccatcacaacttaaaccattttgatcagcacaaccttgaggaacaaaaatatttacttgcccggtttgttttgcgtgcgaattaagattgggagaaagatcccct

SEQ ID NO: 139759 - DNA, 438 bp, Glycine max
  unsure (1)..(438): unsure at all n locations
  Clone ID: PAT_MRT3847_9720C.1
gaaggagcnttggacgaanaaatagtttgtcttctaacaaatgtctttcgaaagngccngcnaaagcngnccgtcnttattcctcccccngntggggaancaccccnatggnagccnantttncccanntangtggttgttngcagaatcattattaaggttgctnccaattaaaaaaangttttttaagttnaatttccatncgggtgggtccccccttctttctggngtgggtttctacntanttcccnccccccaanaattnncctccgggcggggctccattcccntcccncctncccccgncnnnncnancnaaagganggncggcctntttcttgtttctttaattccntcntccntggccgncttatttcttgnaataaattgctcccccccttttttataagggcgggnttttttttttgaaagaantca

SEQ ID NO: 139760 - DNA, 618 bp, Glycine max
  unsure (1)..(618): unsure at all n locations
  Clone ID: PAT_MRT3847_97210C.1
ccacgcgtccggtggcaatccaattacccatattttctccacccgtttgcccgaacccgactcgcgatcgttgttccacggagctccgtttctcgcgctggaacaacgccaacgccgagaagttcaaccggcgccgccgaactatccaggaaatcgaagacgaaatctgccgcactcgccgcttcacggccgccgacaacatcaccaacaccgctttcgccgccgattccgccgcagccgccgaaacgttcaaatccctcggaactccctccgccccgtcacaaccttcaattccggggaagaaatcgaagtactccaagccgccgccgaagccgaaacccttactcgattcgcaccccgtggtttcgcgagccgcgagcctcgaatttcggccgggaccggagaacgtcagaatcggcgacgacggagtttcctacgtcgtcgacggcgcgccgttcgagtttaggttcagttacactgagactccgaatgcgaagccggtgaaattgcgcgagccgccattcgcgccgttcggaccggcctccttgccgcggccatggacggggcggaaccggtgcccccgagcaagacgacggtgaaagacttncacgcgctggc

SEQ ID NO: 139761 - DNA, 426 bp, Glycine max
  Clone ID: PAT_MRT3847_97211C.1
gacatgattaaactaactagtgattggatagggaaaattgctggcatatgttatcccgccaactaaaggaactttgctgtatactctaaatgctataacattctcttcctaaattgattctagacacggaaatgcttatgatctcgtacgtgttccatactatttatatatctaccgattcttggagcagcaggtcgccctaatggtatcaggaatgggaacagcatcaattgatgttttcagaatggccagctacatatgggaaaagaggcaatcaaacgtcttgggtagaactcttatattcaatgccttcattctttgggtaatatgtgaagcgtgacttatttacatgcaatcaaattttatgattgtggcgacttatctctggaatctgaattgattaatatcgatattcctggattggct

SEQ ID NO: 139762 - DNA, 368 bp, Glycine max
  Clone ID: PAT_MRT3847_97212C.1
ctatggggtaatctttgttgggttcacacgatgcttgtgagtgtgggtaattttatctgtgagagcattgattatctaacagaaattaactaaatggttgtatgaaaacacaaaagaatctgagtaaagtatgctgacaagttatgcagctgcatatgttcgaaaactgtaatggtatctgaaaaaaaaaattatccccgcaaatcctcttataaactctcgagcaagccatgggataacacctcagtaactcttttctagaaagagaatagagtcttcaaggtctgtgactctgaggatgaagtttgtacaagcatcattactctatatttgacagggtagatggtggtcaggatgacaatttcaaa

SEQ ID NO: 139763 - DNA, 236 bp, Glycine max
  Clone ID: PAT_MRT3847_97213C.1
tttttaatgaactcaattgtatatatacaatcacctgcttcatcaatggtaatgtactattgttcgacacaaatcctgtcttgtcattcattcttgctcgtttaccatttctaacaagctggttggttgtagcctaccatttacaaattttcatgccacacacggaaccgagcgaacaaggatctcttattttgatgcactctcaaggatacaataactggacacacaaaagctca

SEQ ID NO: 139764 - DNA, 808 bp, Glycine max
  Clone ID: PAT_MRT3847_97214C.1
acgattggtgcaaaaacaaaatgctgctgctgtttggctgatgatgcgtccaaggactgatccatccgctcaataattctagatattgccgccagcaactgctttttttgttagatctcaaagactgagttagaggaagagttactttggttggaaaagctttaacatcatgtgcaaaagaaagagtccaggctcagaattgaggccgccgagcaggcccacatcgcctgagttatcatcgtcgacatcatcaggtgagtggccggaattctcatcatcatcaccatctgcttcctcggcatcatatacatcgaagatgccgaaggagggtatatgtgtatatttcccagaggcagaagaggagaacgtgcaacgtgcaaatgctgctccagaaacaaaggccatggatctcgttggttgtcctcgatgcttcatgtacgtcatgttatctgaggcggatccaaagtgccctaagtgcaagagcacagtgtttcttgagtttttcaaagctgaaaacttcaagacggacaattgagctatggggagactttatgggaattaataaataaattaaatccttgtggttctaggacgtttatttatgcctgttttgtttttgaaatctgaagcttcaattcataggactatctgtatcttgtttgagagtgaagttaagtaaagaataaagattacgggagatatatggtagtgtaacgtgatgcccctatatatgaatatgggaacggaaccaggaatgtgtgcttttgttaaaaaaaaaaaaaaaaaaattcctgcggcgcgaattctt

SEQ ID NO: 139765 - DNA, 272 bp, Glycine max
  unsure (1)..(272): unsure at all n locations
  Clone ID: PAT_MRT3847_97215C.1
ctcattcattgtggagtncanncatnagttagngtttgaaacnattngtctgtgtcaatcttgtctcaggcgcattagccaacatggggatagatcatacaggaggcaacttctcaaggtagcaaatgctgcaatacacccaaaatccaaggggatgttaaccaaggganactnaaacaatcagccatcncatttccgtttttcattaccannccgatttngagcnttctcancntcaccancngnaagtcttnatgttcnnnggatcagcc

SEQ ID NO: 139766 - DNA, 207 bp, Glycine max
  Clone ID: PAT_MRT3847_97216C.1
acgcgtccgttattcgcacccgggccaagacaggcgcgaccaggcgtattacttgaaacactaggccccgcttttctctatgccggggagaatggtccacgagatgaaaaacagcccggggatcatgtcgttgatgaatgctaaagcacgaatccctgtacgcttgaaaatcctctcaatacaagatggtactagtatgaggtcatc

SEQ ID NO: 139767 - DNA, 133 bp, Glycine max
  Clone ID: PAT_MRT3847_97217C.1
gtagcgtttttctcgatgcaagaaagcaacaacaacgctcaggaatcgaaacacagtttctgttaacactaaacacttctgtgactgaggatacaacgggatattcaagcatctctcaataacatcactgacc

SEQ ID NO: 139768 - DNA, 358 bp, Glycine max
  Clone ID: PAT_MRT3847_97218C.1
gggaggatctcgcgctgtgtgaggatatgtttggcactcaaagcgactttgaaatcttcaccatatggcctactggttgatattgagatggaccccccttgctactacaccgtcgagttaattggcggagaacgctggagtgggtgtgcagctctataccttatacaactaagaccgtcctcaccgcgccttttgtgggggacagacagagggttatcctgtagaggaaggtagaatgacttcttatacggaatgatgaaaacttgattgcaaagacccctccatcgatgaaggcgctttaccagcatataacagcacgatccacatacgttatattccacccgtgcctcttgcaaaa

SEQ ID NO: 139769 - DNA, 444 bp, Glycine max
  Clone ID: PAT_MRT3847_97219C.1
gctgaagataactgattatatttatgtgtcattgtgtcagttcttacacaattatgtgcagcatgtagttttctttttttgcaaatatttattgttcttggtcctttgcatgacatgtagtgaatcctaatgtgtgatgtggtcatgcgcctgtattattatgtgtataaatttttatccagttggaagacatgaatatggacgaggaatcagagaaagtggcagtggagttggctgcacaaggagttattggaaagagagttgatgagatggaatccgatttcatgatggcccttgactacatgatccaacttgctgagaatgaccaggatgataagcgtaagtcactgttggaagttatcaaagagacagtattatcacatctaaccaaaaaatgtccaccccatgttcaagtaattggtcttctatgtagaactccgaaaa

SEQ ID NO: 139770 - DNA, 278 bp, Glycine max
  Clone ID: PAT_MRT3847_9721C.1
tcggatcggctcgaggtgcgcggatcctcacctatgtcttatggctaaagtgacttcctttcttctgttgatgataggcctcaactcaatccatggccccacaacactagtgggcctctttctctttctcatgctatacacctatctctgtaccgcacatagtagagtggggagcttccgaatggttaccacgagctataactgggctcataccatcactcacactcacacctgtaactccttcaaggtccaaaggtaccatcttttctcatacccat

SEQ ID NO: 139771 - DNA, 361 bp, Glycine max
  Clone ID: PAT_MRT3847_97220C.1
atgctaagagaatagcttctggaaattttggaagctgccctatctttcttttcttttctgttaatgcaagtggtgcaattttgtcgtgttgcagagatgatgggacctgatcactttaataaggacatggacttttggcagcatgataaatggagtgggagcttacctgtcaagtggcacatcataaaatatgtacctaatgctgattataggcacattatactagagaacaatgctaacaaacctgtcactaatcgcatagacacacaccagatggtgaatatgtattatgtttggaaatgctgaaaacattcaaaaaccatgatgtgaagacatttttgcttgatgactttatgtatta

SEQ ID NO: 139772 - DNA, 209 bp, Glycine max
  Clone ID: PAT_MRT3847_97221C.1
aaaaaacaaaccgcatggaatttttttcaatcaaaattcaaccaaccaggttgtaggcaccacagcccgcacccacaagagggggcaggagtcccatttatagctaaaagttttagctattttaagcattcatacaaccccaggttacacaaaagagattacttttagcaggctttctgttataacaacattcgttagaaaagataagc

SEQ ID NO: 139773 - DNA, 427 bp, Glycine max
  Clone ID: PAT_MRT3847_97222C.1
ccctctattaacttttcatttacaaaccatttatttaccccacagttccgggtatatttttttcttcttttccttttctctctttatccacctcacaaatctctatccctccaacccctaaatatcccccgactaccacatccttcaacaaaacaaacatatcaccaaccacacacactctatctctcacaccaaacaaaacgctcactggatcaattcacacagctatagcaactaaaaatactagcaaagcttccgcaaaccccaaactaccttttcctcccttctttatggatatgacaaagtgatcagatcatgaaacattaatcaatccattgaatctgaacctgataatccgcccgcaccgataccaccattctccaccctaggaagggacaacaaataggccaaagcctactaattaacc

SEQ ID NO: 139774 - DNA, 233 bp, Glycine max
  Clone ID: PAT_MRT3847_97223C.1
gatagaaaaaaataaaaaactttgcaaagattttatccaattggaattttaaaaatgactgggataaacttaagaattcaattattgaaattgaataaggtaaccatttaattggattggtccaatggtattaaaaaatggagtacttacttccaattcctatttattattggaatacccgaccacttggtttggtatcggaccattttttttggatttcaaaaattttccgg

SEQ ID NO: 139775 - DNA, 770 bp, Glycine max
  unsure (1)..(770): unsure at all n locations
  Clone ID: PAT_MRT3847_97224C.1
aaaataaaatgttttatttgtaaattatgtacagaatacatcttatgttatgacaaggagatggggaggaaggaagagcctcgccgtccagtcagcgctcctcacttctgctggagatgaccgcctttctctggattgaacgcacagggcagttgggatttcctaagctggaaaaggagaatctgtagctgaattaaaagggttgctgcactgttactagctggcttgtttccacaaaatgctcttgatccctgctaactcaaaaaccttaaaaaaggaatttttctggtataagtttatgaaaacaaaacaaaaaaccaaacaaacctaaaaacccaaaaagagcataactagcaagaacaatgagtttaagcatttgatcctaaagaaactgccaagtggctatatacttatgcataatctgaaatgctgcagtttctttagcaatttccattagtctaacagtaaaaagccatacaactatcaaaaatgcccttattctaagtgtcattgtggacaatgtacctctgatgactatcaaaatgaggcctacttactgtaaaattatcagatggataaaacttattaatggctntaaactgtaccaataacagtaccaacgttctacaaaacaaaaggctgactgtaactgaatgtcaaatacatttcagaaaatggatttatagaatgctacaaatgccatctgtacatcatggatgatcggccaacacagaaaaccccacctgctgtacttatttaaggcccccagc

SEQ ID NO: 139776 - DNA, 135 bp, Glycine max
  Clone ID: PAT_MRT3847_97225C.1
gtctattttatttggtgttgcaaatatgctagtcaggatggtttgataaccaagcaggttataatcaaaataccataaattataaacagtctatgtggtggttattaataatattatgcgtataaatgactcacc

SEQ ID NO: 139777 - DNA, 382 bp, Glycine max
  Clone ID: PAT_MRT3847_97226C.1
ttcttttttttttttttttttcgggcttacaaattttcattcattatggttcataaaataaacattacagtacaaggcgcatatctcagtatgtatcattacatgatttagagtatacaatgacaagttccaaaaaaaatgtagcctaaaaaacaaggtctttggttgtaaaaaaaacaacccatcccccaaagggaaaagattatgtctacagacctgtataataacttgctgccatgaccaaagctcccgatgacaaaggctttataaaacttttatgacttgccaaagttaccaggacaacatcaccacataaactggaacttaaacatgccctttgactaaaacttatacccaataatcgcgttcagagcataacctc

SEQ ID NO: 139778 - DNA, 434 bp, Glycine max
  Clone ID: PAT_MRT3847_97227C.1
agccaaaaatgcataatttcatttaaaaaaaaaactcttccatattaccaatatataattaaatgttggttgagaataattaaatgctaacttctaggaaccacctaattttaaccacaaaccatcaggcactatattttgatgttgaaataatctgggtcgaagtggtgcaaccgtacataaccatcttcacctccacttgaaaaactacaaaagaaaaaagatgaaagacatgtaaagaagtaaaagaaacagcctgaaagttattcagaaaccagtaaaactaaagtgcagtaccaaataaacactactagacatgagacatacaatttcaaaaacaaaataccaatcaaatggagatacatttgcaacataggtttgcaataatcaaaatagatgtgtcaatttactacattgaatgaaactcattctaa

SEQ ID NO: 139779 - DNA, 1420 bp, Glycine max
  Clone ID: PAT_MRT3847_97228C.1
aattcggctcgagaaaatattaataagcgaatgttgaaccctaactgaggatacactcgcaccggtagctgctgcagccccttgtgagtgagtgttctgaaagatgagaccaattttgatgaaaggtcatgagaggccattgacgttcctgaaatacaacagggacggcgatctcctcttctcctgcgccaaggaccacaacccaaccgtctggtttgccgacaatggcgaacgcttgggcacttatcgcggccacaacggcgccgtttggacctgcgacgtctcaagagattcggttcgtctgatcacgggtagtgccgatcagaccgccaagctatgggacgtgcaaagcggtctgcaattgtacaccttcaatttcgattcccctgccaggtccgtcgatttctccgtcggtgataggctggccgttatcaccaccgaccccttcatggagttatcctctgcaatccatgtcaaacgcattgctgacgatccaaccgagcagagtggggagtctctgcttctcattaagggtcctctgggaaggataaacagagctatttggggacccctcaacagtaccattattagtgccggggaagatgctgttattcgtatttgggattccgagaccggaaaactgcttaaagagtccgacaaggaatctggccataaaaagactgtaacttcgcttgccaagtctgccgatgattcacatttccttactggttcccttgataagtctgctaggctttgggatactaggtcattgactcttatcaagacctatgtcacggaacgccctgtcaatgcagttacgatgtcacctcttcttgatcatgtggttattggaggtggtcaggatgcgtcagctgttacaactactgatcatcgtgctggcaaatttgaagccaaattctttgacaagattcttcaagaagaaattgggggtgtgaaaggccattttggaccaattaatgcattggcttttaaccctgatggaaaaagtttttcaagtggaggtgaagatggttatgtacggttgcaccacttcgacccagattatttcaacatcaaaatatagtgcctgatggtttgtggttaaaattaggtggttcctagaagttagcatttaattattctcaaccaacatttaattatatattggtaatatggaagagtttttttttttaaatgaaattatgcatttttggcttatgttgtattaacattattatcatttttggttggagtggcactcttaattaaggagtttttcttcccacgtcacaggattttgacaatattagaagtatggcatattttaggcgtgaattggaactctttttgtatgcacaggaactcattttgtatctatcggaaaatgttatgagctggggcccctgtgggagacttgcat

SEQ ID NO: 139780 - DNA, 2244 bp, Glycine max
  Clone ID: PAT_MRT3847_97229C.1
gccgataaatttcaacatttggttatacggatcaatatttacatgaaatttaaccttgaatgaagatccttatagttgatatatagtagtttgtgttgagatatcattagagatgtaggaagaatgcataatgatataacatgaactggttctgattttgtcattgatcatgaattgatgaaattattaatattcacttgtttggtgcctagtaatatctcatttgccctttaaagtagatggaacttttaaatttatgctaaacaatatatttgttctctgtatgtaataactgttttagaatgagtttcattcaatgtagtaaattgacacatttattgtgattattgcaaacctatgttgcaaatgtatctccatttgatatatatacatttcattgttttttttaaaaaaaattggatgtcactatgtctcaatgtctagtagtgtttattggatactgcactttagttttacaggtttctgaataactttcaggctgtttcttttacttcttacatgggggtgcattttttttcttttgcgggccttacctcgacccacgcgtccgcccactccgtacggctgcggacagaggggacaggaagaatacaccgccacacgctgcaggccctttaccttgtgcttcctgcgttcctgtgagaacccacgttctctaacgcgcttctccttcaaagttcaaattcctatacatgcgtaatcgcttctcaaatctcaacaaaagtattccaaaaaaccctaaggaggatacactatactccggtagccgctgtgttggtgagtgagttgtggtgcttttgaaagatgaggccgattctgatgaaaggtcatgagaggccattgacgttcctgaaatacaacagggacggcgatctcctcttctcctgcgccaaggaccacaaccctaccgtctggtttgccgacaacggcgaacgcttgggcacttatcgcggccacaacggcgccgtttggacctgcgacgtctcaagagattcggctcgactcatcacgggaagtgccgatcagaccgccaagctatgggacgtgcaaagcggcctgcaattatacaccttcaacttcgattccccggccaggtccgtcgatttctctgtcggcgataagctcgccgttatcaccactgaccccttcatggagttgccctccgcaatccatgtcaaacgcatcgctaacgatccatcccaacagatcggggaatctgtgcttctcattaagggtcctcagggaaggattaacagagctatctggggaccccttaacacaaccattatcagtgctggcgaagatgctgttattcgtatttgggattccgagaccggaaaactgcttcaagagtccgacaaggaatctggccataaaaagactgtaacttcacttgctaagtctgccgatgattcacatttccttactggttcccttgataagtctgctaggctttgggatactaggtcattgactcttatcaagacctatgtcacggaacgccctgtcaatgcagttacaatgtcacctcttcttgatcatgtggttattggaggtggtcaggatgcctcagctgttacaactactgatcatcgtgctggcaaattcgaagccaaattctttgacaagattcttcaagaagaaattgggggtgtgaaaggccactttggaccaattaatgcattggcttttaaccctgatggaaaaagtttttcaagtggaggtgaagatggttatgtacggttgcaccacttcgacccagattatttcaacatcaaaatttagtgcctgatggtttgtggttaaaattaggtggttcctagaagttagcttttaattattctcaaccaacatttttgtaatgcgatgctccctatattggtaatatggaagaattttttttaatgaatttatgcatttttggtttatgttgtataaacatgttattcaattttggttggagtggcactcttaattaaggagtttttcttcccagggcaaaagaagttaacttttaatttctttcacctaatgtttttgtaatgccgatttgatttcaaaatgctgttatattggtaatatggaagaatttaatgaatgaaattatgcatttttagtttatgttgtattaacattatcaattttggttggagtggaactctcaattgaggattctttttaaaaaaaaaaaaaaaaaaaaaaaaaaaaaaaaaaaaaaaaaag

SEQ ID NO: 139781 - DNA, 511 bp, Glycine max
  Clone ID: PAT_MRT3847_9722C.1
ccacaaagtttaatttttttttttaaatggaaaaaaggttcggaccgccctgtttggaaatcccggggggggaccccaaacaacaattttttgggggggttccaaaaaaaatatccctaccaccaaaccttgggattcccatttatttacatatatatatatatatatgtatgtatatatatttggggggggagccccttctccccaatttttttaagtttccaccaaaaccccaccaaaaggcccataaggcatttttattggggaaaaaaaggaatggaacccccttttggccggcttttttaataggggcggggttttaaccggctgcaaaaatgttggggggcttgatcttcaaccgggggaagctagactttcgattaaagggtgggttaaccaaagccctttcaacattttaggcgggagttgtaggtttttcctcaacaaaggcccaaaaagcaagggaaaaactctttgtatcaacattttccaaaggggtactttaatgggt

SEQ ID NO: 139782 - DNA, 953 bp, Glycine max
  Clone ID: PAT_MRT3847_97230C.1
gcggggctgcctggcgggtcagtccggagctttatggtgacagcaggcccagattattcacttactggacgagtgactcatatcaagcaaccggatgctacaaccttcttgttttggtgatggcacattggtagggtattggccagaagagttattcacacacttggccacacacgccaccatggtggagtggggtggcgaagtggtcaacacacgtgccaatgggcaacacacgtccacccaaatgggctcgggccactttgctgatgatggctttggaaaggcaagctattttcgtaatcttgagattgtagacaccgacaatagtcttagctcggtgcacaatatcttaacactagctgagaacaccaattgttatgacatcaagagctcctatagtaacgaatggggcacatatttctactatggtgggccaggcaacaatcctcagtgcccataatgcatgatatcatatcatatttaatatcttcatcatgacgtacctggctagcttttctttctagcactattgttttgagttagttcacgtccaagtaatatcttcgtgttgttgcattctttgcttgtacgtaattatagaattattgttgtagagccatttccattcttgtttctgccttcacttttttgttttgtttcctttggaagggatcgaaggaaaatgtatgtgttcacgttctagacttgtagtcaataattaagcaattaagcaattattgaatgactttcatctagtaaatgtcaagcttaattctgttttttttttctttttggaagggatcgaaggaaaatgtatgtggttgacgttgtagacttgtagtcaataagcaattaaggaatatcaggacccatgtattgtatatggatgcataaacacgattggaaaatggttagatatttaaaaaaaaaaaaaaaaaaaaaaattaaccccc

SEQ ID NO: 139783 - DNA, 622 bp, Glycine max
  Clone ID: PAT_MRT3847_97231C.1
ggtcagtccggagctttatggtgacagcaggcccagattattcacttactggacgagtgactcatatcaagcaaccggatgctacaaccttctttgtgcgggttttgtgcaaacaaatggcaggatagccattggagctgccatttcccccatctcatcttatgaatccaaccaatatgacatcaccatcctaatttggaaggacccgaaagtagggaattggtggatgagttttggtgatggcacattggtagggtactggccagaagggttattcacacacttggccacacacgccaccatggtggagtggggtggcgaaagtggttaacacacgtgccaatggccaacacacctcaacccaaatgggctcgggccactttgctaatgatggttttggaaaatcaagctattttcgtaatcttgagattgtagacaccgacaatagtcttagctcggtgcacaatatcttaacacttgctgagaacaccaattgttatgacatcaagagctcctatagtaatgaatggggcacatacttctataatggtgggccaggcaacaatcctctgtgcccataacgcatgatattatatcatatttaatattcttcttcatcatg

SEQ ID NO: 139784 - DNA, 370 bp, Glycine max
  Clone ID: PAT_MRT3847_97232C.1
aggacattaaggggtgcattctgatctgtgcttacgcgtcacggtgggctagtgaaaattgataaacaaatctttatgtctttttgagttgtgcgttgtgatagtgtgtgagtacaatgcaagacattatagagggagtattcttcattgacatttctgtttcgtcataataaaaatcgtattcctgtctctaacccaggaagcccttattattatacgcaaatttggccaagagatatatactacaccctgttgtggtcacactctcacatctacgagtgcctattgactcagtacgtactgttgctggatttttgtaaaacaccagacttgctgttgaaaaaaaaatcaggacattaactgtttacat

SEQ ID NO: 139785 - DNA, 178 bp, Glycine max
  Clone ID: PAT_MRT3847_97233C.1
aaaagatcctgctttgaatatacgatctcatccattttaagtgccctatcctactgtatattaaaccatgcaaatactgactggacttatagagcgatatgaatttcaccacaagctccgatctactgctgaggctcttgttgctgctgcccagctgtcgtaccaatatatcagagat

SEQ ID NO: 139786 - DNA, 257 bp, Glycine max
  Clone ID: PAT_MRT3847_97234C.1
agagaattgaagctggatcgaccatctggtccaccaaagccagaggaaattggtgatctttcttcccttagcagtaagcagtcaggagctgtgaatcagaatgctaggccacagacaaaacccatactttctccaaatcaacccaaaaaagatgaaaaggattttaactatgcaaagcaagcagttattctaggaggatctatggaatccagcaacagacttgtgcagcctcttaagagaatcttacccaagcccga

SEQ ID NO: 139787 - DNA, 2737 bp, Glycine max
  Clone ID: PAT_MRT3847_97235C.1
aaagcttaaatggatcgcgagcttgaatgaatatgcttattatgctcaggttgctggtttatattacagcataagtcacacagatggtggtttcgaggtgactctccgtggttacaatcacaaattaaggattctacttgaaactatagttgaaaagattgcgacatttgaagtgaaaactgacaggttttcagttatcaaggaaatggtaaccaaagaataccagaatttcaagtaccaacaaccttatcaacaggctatgtactattgttctttgatcttacaagatcaaacctggccttggatagaacagctagacgtacttcctgctcttcaagttgaagatcttgctaaatttgtaccagcaatgctctccaggacctttttagagttttatatagcagggaacattgaaagccacgaagcaccgtcaatggttaagcacatagaagatgttctctttaattgttcaaaacctctgtgcaagcctttattctcatctcaacatttggcaaatcgggttgttaaacttgaaagtggcatgaattacttctacccttcagaatgtcttaatcctgaaaatgagaattctgctcttgtgcactatatacaggttggtcgagatgactttaagctgaatgttaaacttcagctttttgcccttgttgcaaagcaaccaacatttcatcagctgcgatcagttgagcagctggggtacattactgtgctcatgcagaggaattattgtggtatacatggactacagtttattatccaatccacagtaaagtctcctggaaacattgagcaaagggtcgaggcatttctccaaatgtttgagaccaaactcctcgagatgacagttgatgaattcaagagtaatgtaaatgctttgatagatgtgaagctagagaaacacaaaaatttgtgggaagaatcatcattcttctggcaagagattaactatggtactttgaggtttgataggaaagactatgagattgaagcattaaggcagctcactcttcaagaattgatagatttcttcaatgaatatgtcaaagttggtgcacctcgataagaaaatctttaagctgtacgatgtacctgggaacctccaactgaatgtgattacaaaacggaagtctcagaaccacacttggctaaaatagataatatctgtacttttagaagatcacagtctctttatggttcatttaaaggactttctgggcagatgaaattatagcgagcagcatcctccaggtttataatcctcccaaccttaacagcaatatttttaatgaaatatcttgattatacaagatcactctcggatttggattgaaaacttagacaaagtgttccccttttcagttcatggacgtgctaagtgctattgatctgtgcttgaaatgagtgataactaacatgatcaggcagggaacaatcccagctatggagcacaaaaaaaaaaaaaaaacatagaagatgtttctctttaatttttcaaaacctctgtgcaagcctttattctcatctcaacatttggaaaatcgggttgttaaacttgaaagtggcatgaattacttctacccttcagaatgtcttaatcctgaagatgagaattctgctcttgtgcactatatacaggttgggcgagatgactttaagctgaatgttaaacttcagctttttgcccttgttgcaaagcaaccaacctttcatcagctacgatcagttgagcagctggggtacattactgtgctcatgcagaggaatgattgtggcatacgtggactacagtttattatccaatccacagtaaagtctcctggtaacattgagcaaagggtcgaggcatttctccaaatgtttgagaccaaactccacgagatgacaattgatgaattcaagagtaatgtaaatgctttgatagatgtgaagctagagaaacacaaaaatttgagggaagagtcatcatttttctggcgagagattaatgatggtactttgaggtttgataggacagactatgaggttgaagcattaaggcagctcactcttcaagaattgatagatttcttcaatgaatatgtcaaagttggtgcacctcgaaagaaaactttaagtgtacgagtacatgggaaccgtcattcatctgaatacaaaacggaagcctcagaaccacacttggctaaaatagacaatatctttacttttagaagatcacaggctctttatggttcatttaaaggactttctgggcagatgaaattatagctagtgcatcctccaggtttataaacttccacacgttacagaaataatttaaatgaaatatcacctgtaatattgggcactctcataatagcttggacaaaatgttcccttttcagttcatggacgtgctaagtgctattcatctggatttgaaatgagtgataacttacatgagcagaattatatgaatctcatttctggtatgagtggcttatcaaatcattttgtaatattatataatcgttatacggttataaacacttttatttgctctatatgcaccgacttactgtgatttacaagttaaaaatcagtttagacaattatgagggccatgtaataaagaatgccaaacatttctgtaagattttgtatttatattttttttacatgcttttctgagcaactgtggcatattaaatatttatggccatttcataaatattttgagctc

SEQ ID NO: 139788 - DNA, 333 bp, Glycine max
  Clone ID: PAT_MRT3847_97236C.1
gattttaacattcctcgggatatttttaaaattttaaataattgaaataaaaaatgagagttggaatgggagttacagttgggttagaacataacttcccacattcccatgggaatagaaatgacttaagtcttggtctataactactttccagagaatacacagtatcctggaatattttgtcaaaactcataatgatcatggaatactgcatttccatgttcacattactgggaatgagtttttaatttgtgaaacaaacacactcttataatcaacatttacttatattttgaaaagtatattatacgataaaataaagttgattgatga

SEQ ID NO: 139789 - DNA, 343 bp, Glycine max
  Clone ID: PAT_MRT3847_97237C.1
tgctgagtcatgacagaaggggaaagctgaactcctttcagactcgattacaatgctattagctagatcgccgcgttgtctctcacacatatgtcactgggtcgttgttttcgctgctgtcgctggtcctgtggtgggcttgtaccagggatcatggtcgcaagttgaactgctcgcaggtgagcacctgacacttctctactggcgctaccacaacgcttcatgcccctgactgtggctcttctgcagatcatattgtgctacaagatcactgaccttctgatccgcttgactcccaatcgagaggctcttcctacgaatgactcaggttttcactttaggt

SEQ ID NO: 139790 - DNA, 730 bp, Glycine max
  Clone ID: PAT_MRT3847_97238C.1
atgaattcaagagtaatgtaaatgctttgatagatgtgaagctagagaaacacaaaaaattgtgggaagaatcatcattcttctggcaagagattaactatggtactttgaggtttgataggaaagactatgagattgaagcattaaggcagctcactcttcaagaattgatagatttcttcaatgaatatgtcaaagttggtgcacctcgaaagaaaactttaagtgtacgagtacatgggaaccgcccattcatttgaatacaaagcagaagtctcagaaccacacttggctaaaatagataatatctgtacttttagaagatcacagtctctttatggttcatttaaaggactttttgggcagatgaaattatagcgagtgcatcctccaggtttataaacttccgccccttacagaaatattttaaatgaaatatctcctgtaatattgggcactctcgcatgtcgcataatagcttggacaaagtgttccccttttcagttcatggacgtgctaagtgctattgatctggatttgaaatgagtgataacttacatgagcagaaatatgtgaatcccatttctggtatctgagtggcttgtcaaatcattttgtaatattatatagttgttatacggttaaacacttttatttgctctatacgccaccaacttactgtatttacaagtgaataaacaggttaggcaatatatatatatatattacg

SEQ ID NO: 139791 - DNA, 262 bp, Glycine max
  Clone ID: PAT_MRT3847_97239C.1
tattattcaatttgattgccctacaatgatcgctccgtaaacctattatatcgctagctattacaaaacgacataccaaaagtcaatagagctcttcctaactctttattctcaaatgacgcttctcccggcttataagatatttaatcagttcaacacatctagtcatatttgttaatatgatattatatacaacgtctcttcctttagtgatccattctctcaagcataatacttagtgatagaaaaatataatttcact

SEQ ID NO: 139792 - DNA, 390 bp, Glycine max
  Clone ID: PAT_MRT3847_9723C.1
taacacgactacttgcgtacaataaatgtatggaggaaaccaaataactgtgctatctgctatcctacatttagcgattttggggagcatccactccacaccactatttgggactgggtactatgcatactgggtttatggttcttgaccaatattacaactgtggatggacttgtttcattgtcatggactgcgggcagtatgcattcccttgcattaagctactttggatcattaattcaattgggaaaaaatgttgctctaagaagaacattaatatgcatgcgattactgttgacctcagtttacccactttatagctgatatcctgaggtctatatcaaaggtagcacaaactaatttttccttggcagctgagcctttttctag

SEQ ID NO: 139793 - DNA, 814 bp, Glycine max
  Clone ID: PAT_MRT3847_97240C.1
ccacgcgtccgcagtttcttattatgattttgtatggaaaactagcaaacaaaagagaagagggtaagaagtacatttagtattaatgcaaataactaagttgaaccatcgaaaatgatctataattatgctttctagttgtttgtcttgtttaatgatagagaggtcaatcagtaactgtccaaggacataggtctaagatgtggagggtaggatttacttggtttaacagcagaagaaacacaagaatagactaggccacaatatgtagcctattctgttattttctattttgtatgtgggatccaccaatagtggaggggtagttacattggaggaatgacctatgaggatcatgattttcctttctgttattcctttcggcttctagcttgggtaggtatagttttctctgttgagcatagctctggggatagggagttgaatcattttctggtgtaattctcctacattcctatcttattgcaagttcaataagactgttcaagttcataccgcgagactttgtgttactcatgttatgcacaaggctgttaaagataatagatatcaaactgttacttcaatggggaggtcaatgctcctttttgtaccaagtgctttgtttaaatgtgctacctcctactgaagttgcagccttatgttttttaattaaaagctgatttcatttgaagtgcatgcatgaatgtgagtagcctctgtagtgattaatacatatttcgtgcctaaaaagataatgaatttaagagaaggtacatgagatccgtgttttgtcaatatgtttcctttgctg

SEQ ID NO: 139794 - DNA, 203 bp, Glycine max
  Clone ID: PAT_MRT3847_97241C.1
aaagtaatattttttttataggggcaccaaaattcaattcgcgggccggggttaaacaacgtggggacgggaaaaaccctggggtaacccaactaaatggccttgaagaaaatccccttttcgcaaggtggggaaaaaacaaaaaggcccccaccgatcgcctttccaaaaagttgggcaccctgaatgggaaagggaacccc

SEQ ID NO: 139795 - DNA, 641 bp, Glycine max
  Clone ID: PAT_MRT3847_97242C.1
cggctcgagctggtttcatcaaagaacgcaattccaggatatctaactgatgcttccagccatcagcagagtccttctgttggtgaggatgatggaggggtgacaatgtctgatgagatggatcttcttgtcgagcaagtcaaaatgcttgctggggatattgctttcagtactagcactttgaaacgcttaatagagcagtctgtaaatgatcctgaaagctccaaaatacagattgagaacttggaacaagatatccaagaaaaaaagaagcaaatgatggttttagaacaaagaataagtgagagtggtgaatcatccgtagctaactcatcactggttgaaatgcagcaggcaatcgcaagattagtgactcagtgtgatgaaaaggcctttgagctggagataaaatctgcagacaaccgtgtccttcaagaacagttagataataagtgttctgaaaacagagaattgcaagaaaaggtgaagctgctagagcagcaactggcaacaattactgggtggtacctcgttaatgtttactgatcagtgtccatcctgtgaacacatttgatgagttgaaaaggaaaatacaatccccaggagattggaaaatgaaaaaatgaagctagagcaagttc

SEQ ID NO: 139796 - DNA, 721 bp, Glycine max
  Clone ID: PAT_MRT3847_97243C.1
agtagaaatatatgcctcacgtaataagattattgacgaaaaatctctaattaagaaataccaaagagaaatttcagtcctcaaacatgacccacgcgtccgcccacaggggatgcaacgtggtgtcaaccatgaagagattatgaccttaaagcaaaagttggaagaaggtcaagtgaaaatgcagtcaagattggaagaagaggaagaagcgaaggttgctcttatgagtcggatccagaagctaaccaagctcattctggtttcatcaaagaacgcaattccaggatatctaactgatgcttccagccatcagcagagtccttctgttggtgaggatgataaatatgatgccctacgtgatggatctcttttggttgaaaatgagagtcaaaaagatgtttccactgtgtcatctgatccgtctcatgatgttagacatataatatcgtcaagtagacggaacgaagaactctccccaactagctgtatcatcactgaatcaacacggctgctaccagcgggaggggtgacaatgtctgatgagatggatcttcttgtcgagcaagtcaaaatgcttgctggggatattgctttcagtactagcactttgaaacgcttaatagagcagtctgtaaatgatcctgaaagctccaaaatacagattgagaacttggaacaagatatcccagaaaaaagaagcaatgatgttttagaacaa

SEQ ID NO: 139797 - DNA, 267 bp, Glycine max
  Clone ID: PAT_MRT3847_97244C.1
tttcaattaatattctcccttttcttcatctcatataatcaagatcttgttaatttaaaatgcccatcacaaacatctccttcataaaacctcaataatctactcacccctacacttttataacttctttttctcatttcatctcaaccttcatctttctcttctcctcctcatactccttcatctcctacaacaatctcacccacaacttctctttcaccccttccttcctcatctcctcctccatctcccattcattctccctct

SEQ ID NO: 139798 - DNA, 720 bp, Glycine max
  unsure (1)..(720): unsure at all n locations
  Clone ID: PAT_MRT3847_97245C.1
atttgatccaagttaacatagctgcacctggagctgaccagtctgtctatttcccttacacagacaaagtcaaaagactcactcaattttttcctgccattgaagacctgttgtacagtaaagtggataccaatgagcatattggatatctagaaaacaggagaaaacctataatcttctcaatggcaaggtttgatgtttttattaacttgaccggtttagttgagtggtatgggaataaccaaagactgagaaagatggtgaaccttgtcatagttggaggcttctttgaccctttgaaatccaaagatagggaggaaatgacagagataagaaagatgcatgatttggtagcaaagtatcaactcaagggtcaattcagatggattgctgcacaaactgatcgatatcgaaatggagagctataccgcttcattgctgacacaaagggagcttttgtgcagcctgctttgtatgaagcatttggtctcactgtcattgaagctatgaactgtggtttgcctacttttgctaccaaccaaggaggtccagcagaaatcattggtgacgggatctccggcttccacattgatcctcacaatggagaagaaatcaagcacanaattgctgatttttttgaaaatgcttacaagattcagcacattggaaatagatttcagcagccggattnggcacgcataatgaatgctatacatggga

SEQ ID NO: 139799 - DNA, 381 bp, Glycine max
  Clone ID: PAT_MRT3847_97246C.1
cttccagtagaaattatgaccccttgcaaccacctgtatctggacttgattctgcatgctgtataggtgcagatcaacccagtccagtctcggtgctagaaccttcttttacagatgatctgtcaccttgtttagattattttgaaagtctcaatgttgacatacaagggcttcgaatgcaactccagttgctgaagctggaatctgaagattttgtggaagaacccgtgctaattcaaagtgatgaagatggtatggaggcatctactggaatttcagaagacagtggattgcttcagactagagatagctgggagtcttcctacaccattgatgtcttgtatgaatctggtattgatagagctcaacctgatgcatttt

SEQ ID NO: 139800 - DNA, 478 bp, Glycine max
  Clone ID: PAT_MRT3847_97247C.1
cacccaacaaggatagacacaccccagctacataaacatatggttcttcatatgaagctgccttttgctactcatcttgcacattcctcactggtccatttcatatcataataataactattgattattgatattgtgtgtaaaacaggggcagttgctacaattgcaccaaatgttcacagctccagcactgttccagtacggagattcaaccgtggacactgaccgcaacaacatctactagagaacaaccgctctgagcatttacctaccataaggctaagattctaaggtaggcaaaccaactgatcacttgatcaacggaaaggacccatctgactttctagctccagaatactgcattaaagacaatgcaccaccatacttatatccacatgtgccacctgatgaataggccactggtgagtgctttgcatactgtggtgcaggatatgatccttttacatcgaactcattg

SEQ ID NO: 139801 - DNA, 144 bp, Glycine max
  Clone ID: PAT_MRT3847_97248C.1
ccaaccaaacacattttcattaccattttgtatttgaagggaattatgatatcagaaaacagtcaacccaaacatcccttattaaccccatacccagtttaacactaattgagacatttatttaaaggataagccttgatacca

SEQ ID NO: 139802 - DNA, 145 bp, Glycine max
  unsure (1)..(145): unsure at all n locations
  Clone ID: PAT_MRT3847_97249C.1
ntngcatgcacgcgtacgtaagctcggaattccggagccttggnatcntcctaanaagcaggccgccgcacncagtganctccgtcgaacccgggaattacattcccggaccacgnacctgccaggncgtaaccaggctttccct

SEQ ID NO: 139803 - DNA, 131 bp, Glycine max
  Clone ID: PAT_MRT3847_9724C.1
tctagaatacttctcctcttgtctctgttcaagctttaatattgcatcccatgcattttaagatggagctgtctctaataccagtaactatagctccccgggggcaagtgcaatgcccacttgaggtcatt

SEQ ID NO: 139804 - DNA, 287 bp, Glycine max
  Clone ID: PAT_MRT3847_97250C.1
aaaccactaacagtttaataaacttcggtataaattaaatgcaacttaaaacatcccttagcagcaaagggaatggacctaaaccctattgctgcttgggaaattcgaaatatctcaaacttttcttaccactcaaaccaaaaacaggacctattaaaaaccaacagcaatgaaaattgaccaccggccatcaagaaccttattttgaaaggtacgggttcctgaaatccggagaaacttaaaaatattacttaaaccaaacaccttagaattttgcagggttaaac

SEQ ID NO: 139805 - DNA, 292 bp, Glycine max
  Clone ID: PAT_MRT3847_97251C.1
aacacaacaaaagaaaagcagacattattttaacctaattatcactgcctttttgacaagatgaaacttgctgtgcttagaaaatgggatcaagggttccgacgaacacttctgtattaaagacacaaggaaaataaaggcgactaagagagattgacaagcaccctagcattcgtgtcaaaatcacaaataggacagttgcttactgaggacccgcacattgagcaaaggccctgaagccggaggggcaacaacacagccactgactcccttatcctgagatcttaacaac

SEQ ID NO: 139806 - DNA, 412 bp, Glycine max
  Clone ID: PAT_MRT3847_97252C.1
aggagagcttcgcaaacttgcaggggtcataggtgtatgtaaacaatacaagctcacatgattggagctgtgggcatgacaggaagaggtgtaggagagctatcgcgtgtgggtactgagaatgttgtcagtatgatggggacactcaccaaatttttaggctcctgcggaggatacatagcggaatctaaggaccatatccagcactacgaagtacacgtggccctgatgagctctaggcaactttgatatcaccaccgggtgggcaacaaatggttgcatccataagagttatacttggtgaggatgggtgcaatagaggtggcccgaaacttgcacaaattcgcgaaaattgctacgttttgaggtcaaaattgctgaataagggtatttgccgttgttggagataatg

SEQ ID NO: 139807 - DNA, 334 bp, Glycine max
  Clone ID: PAT_MRT3847_97253C.1
ggctcgaggtaccctgcactctgcacattatagttcttctctcgtcaccgttacatggttgaacgaattcaaagatgaagtcagggaagttgggaattttggttctgctcgtcttgttcagctcttctacttgttccgcttggtttggtagtaaacacaaaagttcaagtggaaggagctcctttcgtccaaatgaagcatcgtcatcgtcatcgtcgtcgtcgtcgtcaccatacatactaaaccgttttcgtgctggctcatcggtcgtgttcccggttcacggcaatgtttacccagttgggttttataatggtactcttaacatcggcca

SEQ ID NO: 139808 - DNA, 175 bp, Glycine max
  unsure (1)..(175): unsure at all n locations
  Clone ID: PAT_MRT3847_97254C.1
gtggatggcaagtggcttcttactctcatctattcacttccatcttttctctctccatactgcaanactttagaatggggctntcataaaccctagagggtactatttccgaagacaagtactgcgttctcctctattacaagtacgccgtaatttccaaacttgacgacctcct

SEQ ID NO: 139809 - DNA, 601 bp, Glycine max
  Clone ID: PAT_MRT3847_97255C.1
gcgagaagacgacagaagggggggttaaattttacttgacaaaataattctaaacccccctgtttttgagtactttgcatctgatcgtagttcagaaggaggagttctgatgaaaccagcagacctaatgcgggcagtggttcctgttttcctccatctgaatcccaccttgttagagatggatacttggaaggagaaaggaggccaggccatttacgctgccctccttccaaattttttatgctttttgatgtaaacaatgatggtctgatatcttttaaagagttgtctcctctgtcttaatgttgtgttctctgtcaagtttttattttttggtgattggggagttgggcaaattgctaatttgctatttattgtatgcagtttgtgtgttaggtttcacaaaatgtgttgttttcgtgttttttttttgcagccttttgaaaacattaaacaaattataaatgaggtgatgattttgtatttgtttgtgaaaatatgaaatggaaagagaaagtgttttctcaaactaaacatgtcctttcttttcttcttctccttcctttttaattacaaaggatgtctaagacctgttatggga

SEQ ID NO: 139810 - DNA, 274 bp, Glycine max
  Clone ID: PAT_MRT3847_97256C.1
catttgacttacaaaaaaaaaaaaaaaaaaaaaggaaagcggccgctctacaggatccaaccttactaactcctccatcctacgacataattcttctataatatcacctaatttcaatacactagtcgccgttttacaacatcgtcactactaaaacaatgccgtcaccaaacttattaatcttgtagcacatcatccttttttcagctgctgtaatagtaacgaagacgccaccaatcatccttcttaacaactgctcagcatgaataacgaa

SEQ ID NO: 139811 - DNA, 721 bp, Glycine max
  unsure (1)..(721): unsure at all n locations
  Clone ID: PAT_MRT3847_97257C.1
agcgggcagccacaggaacgnngagggaggaanngaagcannnaacagngganncaancancaacaaaggggaggcanaaancanggcggcaannnnnnnaanaaaaaaaaaaaaaaaaaaaaaaaagggggggggggaaaancaaaaaaaaaaaaaaaaagggggcccnggagcnccagcnggggggcccnngagggggggnaaagggggcgcggggggnanncagggncanagcgggggccggggggaaaggggganccgnngacaggggcgcacaggaaacgagccggaggganaagggggaaagccgggggggccnaaggggggagcngncggacanganggggggggggcngacggcccggngggggggggggaaacgggggggggccgggggggggagggannggggcanngcgcgggggggggggggnggggnnnggggcgcngnaccgcngggngggggagggacnggnggagcngggngggngnggngggggggggggggngaggggggggggggggggggggggggggggggggggggnggggggggngggggggggggnggacggggggggggnggggggnnggnnnggggggggggaacgggngggggggnnggggggggggggggggggnggnnngngnnngggnggccgggggggggggnnggggggngggggggnggggngggngggggggggggggggggggggg

SEQ ID NO: 139812 - DNA, 201 bp, Glycine max
  Clone ID: PAT_MRT3847_97258C.1
attcacatactcataacatctgaccaaatagtggcagtcaattgcacttagataccctctaatatattagcatttcagtaactttgccatttagcacttgtagggaccacagcattcaccagatcgacaacttaattcaacataattatacccctaatcccaatgtagcatagatatggagcgatattatgcataaaattt

SEQ ID NO: 139813 - DNA, 1096 bp, Glycine max
  unsure (1)..(1096): unsure at all n locations
  Clone ID: PAT_MRT3847_97259C.1
ggttccaccattgttttcttgtgagaaaaaagtgtaaactgaagactgaagagagccgcgggaccctattccagccaaatcccaggattgtgaacactgactgaacaaacaccagagacagtatttggggcagcaattttcttttccagattccaaacctattttattttttctatttttcagttcatccttttcaaagttctgttttattgaaaacatttctcacaccgtccaacttcaattcaacaaccgccccttttgcaaatttggttcttttctctttctctgtcaccactttccttcgtcgtaggtcacagcgtgcgcttccgcatcacccgcttctctctgcaaatgtacagttgttgttgtggtcctgttattactgaagattgagggggaaatgggaaaaatagctcttgcagtaatagtgagcctatgggttattcctaccactgtaatggttaatcgcatagttcctgagccatatatggatgaaatatttcatataccacaggcacagcagtactgcaagggaaaatttggaagttgggaccctatgattaccactcctcctggcctgtactatctttcacttgcccatgttgcttctttgtttccaggcttttactgtgtagaagctgcttcaatttctgacttgtgctctgctgcaattcttcgatcaattaatggtgttttagcagttgtctgtagtttaattctatatgacatagttactcacttgaagccaacacttaatgataggaaggcgatgcttcatgcagtggtcctatccttgtacccccttcactggttcttcacttttctctattatacagatgttgcatctgttactgcggtgctggctatgtatcttgcaagtttgaagaaaaattactggtttagtgcattgattggcgcatttgcagttgttattcgacaaacaaatattatatgggtgctttttgttgcatgcactgngatcataaatatttctgtggctcatgcaaagcacagtacanaaactgatgagccggatgtatctatcaagcatgggttggcatatgctactggtacaaatacnngaggtttcaatctg

SEQ ID NO: 139814 - DNA, 600 bp, Glycine max
  Clone ID: PAT_MRT3847_9725C.1
caaaaacccaagggggccttaaaaaaatttaaaatttgaaacaccctttttgggggcgaaaaacctttttttaaccccttgggccggaaaccctacctccccccacaaggggcccatttttcttacccccaattaaaggggaaaaaaaaaaggagggcaaccataaaatcaaattcaaaaaccttggggaacggggacccccttttaaaaagccttggccggcaccacccccctgggaggaccccccccccttttgggaaaaaaaaagggggggatggttaggcaaaccccccccgttggcaggggaaccctccccaaaaagctggcaaaacttttgggggtccccccccgccattgggggggggggggaaaaaattggagttttttggttttctctcgaagggttcccacccattcccaaaccctcgggggggatattttcaaaaacggggggaaggaaaaggggggctccggccccaaccccctgggggttctttccggccttggggacccggggaatccccccgacgggaaatggggggccggttttgcggcccctggagggggcctttttagcggccctcggccccgggggtcccc

SEQ ID NO: 139815 - DNA, 464 bp, Glycine max
  Clone ID: PAT_MRT3847_97260C.1
ctcaaagttttcttctttcaaaacatttctcaaaccatccaacttcaattcaacaaccaccccttgcaaatttggctcaaagggggttcttttctctttctctgtcaccgctttccttcgtcgtaagtcaccgcgtgcgcttcgcatcacccgcttctctctgcaaatgtacatgtactgctttggcacccttttgggaaaaggctttagtgtgcaattcagcttgagcatgcggagtcataactgttgcacatgacattcagacattgatatacactttttgacatctacaattacagttgttgtggtcctgttattactgaaggtagagggggaaatgggaaaaatagctcttgcagtaatagtgagcctatgggttattcctaccactgtaatggttaatcgcatagttcctgagccatatatggatgaaatatttcatataccacaggcacagcagtact

SEQ ID NO: 139816 - DNA, 350 bp, Glycine max
  Clone ID: PAT_MRT3847_97261C.1
cttccaagggaccacttaccattggtggttaacccttaaggtccattaggaaagtgattttgggcctaattaaaccccaaaggttagttaaggggttaagagaaggaatattttcttcccctctttatattaacggattagttaggctaaaaatactaatagaatatcgtatcatatattatatcagtctcaatcgatggctttgttatatgttagatattgatacgcttcaagcgctctatagatgtgtgagattaatcttatttgaagatagccttagattagttgagatgggatttggatggatgccgtatacggtggacttttatgctttttgtttgagtgatttg

SEQ ID NO: 139817 - DNA, 253 bp, Glycine max
  Clone ID: PAT_MRT3847_97262C.1
gtgttggggttttttccacctttaaccataccaatgtatatatactttccactcggctctttttcccaaccccaaaaacaaatacactaccttaaatttcaataccaattttaacaagagcgcgaaaacaatttcttcatttgactaatttccaattcaggacccaaaaaattttcaaccttttgtccattgaaagaggcaacaacattgttggaaccatttatcttccaaaaaccaaattccaaaacctttt

SEQ ID NO: 139818 - DNA, 308 bp, Glycine max
  Clone ID: PAT_MRT3847_97263C.1
attaggcgctgcgttgtccttaacagttttggttgagagcggatctcacgattggctttctactcaatctagaataatcaaggccacaacccatacgcacctgtaggccagatcaaccaaccacacgacaacctttgtctgggtggactcgcccataaattaagagcagatgactcacagcaccagtaccgacatctttaatgagggccggccaatcagaacttatggcgttaaaaacgttacaaggtacacggcttgatcaaaggggcctgccactgagtgaattctcggatactttttgagactga

SEQ ID NO: 139819 - DNA, 326 bp, Glycine max
  Clone ID: PAT_MRT3847_97264C.1
ggctcgagctcgaattgcagaaaatggcaattcgagggaaagccgatttcagggcggacgtacgcgaaccttactcgccaaagcaccaatttagagttcacaaaatacatatcaccgaaaatcgtttacctcaaccttttttctgaaaaagaatatacacatgaacattaataacaccccgaaatatctgttaaacgaaagattccaccccttagacattttccaccaccattcatctgtctacattaggttctataattggctatccctggaaatatttacaagtgctgccatgaaaaagtcaaaaaataagtcttactaaatta

SEQ ID NO: 139820 - DNA, 215 bp, Glycine max
  Clone ID: PAT_MRT3847_97265C.1
aattcggctcgagaagaaacacgaacggaacaacatggacgaggaggagcctcgtgactaatgacaacaaggaggttctggcggggaaagcccatagcagctggtttcccttgccataacccccggcatgaaggagtttctccttcctccttccggtcgctctttctcttcaaacgacgggttttccattcccaatgttaacatcatgacctctg

SEQ ID NO: 139821 - DNA, 1074 bp, Glycine max
  Clone ID: PAT_MRT3847_97266C.1
aaagcattaaaggtcacactgccacctttcagatttgacttactctccggcgctgccattctcttccacggcagtgttctctttctctctctctctatcttcaatttcgagaagtagctccagtattatatggcctccttcagagcattctggaacagtccagttggtcccaaaacaactcacttttggggacctattgccaactggggatttgtagcagctggattggctgacctgaacaaacctccagaaatgatctctggcaacatgacaggagcaatgtgtgtctattcagcattgttcatgagatttgcatggatggttcagccacgcaactatctactttttgcttgccatgcctcaaatgagactgttcaactctatcatttttcccgatgggcaaaggcacaggggcttctgtcggaaaagaaggaggaagcttcatcccagtgatttgatgatgctaacacattcttgagtggagcgattttaaagattttgcatttgaacttggtgatgtatgaataattgattactgattgtaagaaacggctcgtggaaactgtaaaagattgtggctgtaccagagtattcggattagaaaggatttctcagaagtctaaactatttgttgaaggcatatgggtggttttaatatgtctaacattgggctttaatatggctaaaatttaaatgaaaccaaaagtctttaaacttataccataggcaaaggatttgtctattatatctcatactgaaattccgctcaattactctacacagttgggcgttaagaattgtactgtgactatttattcattgaaacttggatgtcatgttaataatttttaatgccctattctttctaaattgtaatctgagcatgaggaatgaataggtttctcggcataaccaatctgctagtcttctagatcctccttcagttgcaccttacttaagcaaaagcggccttgaaaagatgattattcggttactctcatttttcttattaatatcaagaaaaaaaaaaaaaaaaaaaaaaaaaaaaaaaaaaaaaaaaaaaaaaaaaaaaaa

SEQ ID NO: 139822 - DNA, 699 bp, Glycine max
  unsure (1)..(699): unsure at all n locations
  Clone ID: PAT_MRT3847_97267C.1
catacacactgcactataatagtttcaactccacaatcaatgatcaagatctcactctcatttgatcgctgtctacttcacttctcaatccctatgttccatttcgcatgcgcgcgcttttctgaaccgttaagggacagagaataagagcttcttggtctctcccctgttgcaggttcatgcgaggagacaatggacactttgtttttcgggataaagcttcgtgctcctttggaagttaacaacactatcaaaagggttttccctagaagcaagaggtgcaatgtttctgcaaaacatgttcgttacccatcgaggcatgcttttaggttttgtagccaaaatgtaaacttgttgaggaaaccccatgtttctgcaagtgggtcgaggttgaaatgcttcaaggaaaaggaaccacccttttctctcagtgttagttatttcacctcattgtggaaagagggtgttcttttgatgagggcctctgtgttcactgttgttatctctggtttgtgtcttttggttttggtttggaaggaacaaagccaaaggtttntgttgaaacaaatattttgccttctgtttgttcagtgatcagtgagtatgttcagcgcgatgtttgctttggcagggttgtgagaatctcacccttgagtgtaacattggagtcatggncatttgggccaggtgaagaggaat

SEQ ID NO: 139823 - DNA, 115 bp, Glycine max
  Clone ID: PAT_MRT3847_97268C.1
gtgaatagaaaatcttgttttgttcactcatttggtaaaagccaatataccaggcacatgattccacaatgtcaagattctgatctactcatcccgcaccaggcattcaattaac

SEQ ID NO: 139824 - DNA, 418 bp, Glycine max
  unsure (1)..(418): unsure at all n locations
  Clone ID: PAT_MRT3847_97269C.1
cccacgcgtttttgattcttgacagnggaaaggcgagaaaaccaggggcgggggggaccgcaccaaaatgaggcgcacccccacgagagtaacaaccaaacaaacgacaaaagccgcaccagggcaggggaggctcctccgaacagcaagaatcactgcccctcgcagagactaaccgccagagaaacgatgaaaccgaaagccggcaagtacaccgccccaacgaaaaaacgctccacagaccacaacaccactgaaccaaacgcgcctagacgactggcgcagaagaacaagctaccacaaccatcaaaagccatcaccaccaccgcccagacaggatcaagagccgctcaaccatggccagaaccagcaatccaggagcgaccgccacagcggacaacacacggagaaagcgaga

SEQ ID NO: 139825 - DNA, 143 bp, Glycine max
  unsure (1)..(143): unsure at all n locations
  Clone ID: PAT_MRT3847_9726C.1
tgtgtggtcctctaccaccaaagtggtatctgcgctggcttagcctgatcacgagttagtgggaaacancttctctagtggagcacaagcttttaatgcaagcagaaattgagctatattaatgtgaagatgtttagttattt

SEQ ID NO: 139826 - DNA, 159 bp, Glycine max
  unsure (1)..(159): unsure at all n locations
  Clone ID: PAT_MRT3847_97270C.1
actctccacnctatctatctcttcattccttcttcttanancngtncttctcatnggtaagctttacttttantcatctnnttnnntctcgccgttgnaacagaatatcacgatttncggttcgccaattcgtgaaatcgnaagannnccacagaantg

SEQ ID NO: 139827 - DNA, 1628 bp, Glycine max
  Clone ID: PAT_MRT3847_97271C.1
cattagaacttgaagaactagaagcggtggtattaactgaatttacaaagatgctttctgcaacacttccaatgtcccttacgtctgcaaaggccttctccagccgcatggttcctttcggccaccgtctctctccggcgacactcaccggcgtttcactctcacgctctcctctcacgttgaggtgctctccactctcaagcaccccttcctatgttgaggaaggagcaaagtttgtagaggcttcaaagaatgggaacttgattcctctttgtcagtgcatattctctgaccagcttactcctatccttgcttaccggattttggttaaggaagacgatcgggaatctccaagctttctttttgagtctgcagagcctagttatcatgcttcgagtgtcgggcgctatagtgttgtaggagctcaacctacaatggaggttgtggcgaaagaaaataaggttacaataattgaccatgaatctgggaatttaactgagaaaattgttgatgatcctatgatgattcccagaaaagtctcagagggttggaaaccctatctcattaatgagcttccagatgcattctgtgggaagagtcctacagtcataactatgcatatgattaagatgatagtgtttgtcatttacgcttttatagtatatgatgttgaaaatcctaagatgaaagagaacattaaatcctcttgtcgtttacacttttatggttatttctcatatgacactgttcgttatgtggaaaagaaaaagctaccattttcaaatgctccagaggatgacaggaaccttgctgacatacatctgggcctctatgagaatgtgattgtgtttgatcatgtggaaaagaaagcatatgtgattctttgggtgagggttgatcggtactcctcggctgagagtgcttacaaggatggaatggaaagattagaaaaattagtggccaaattacaagatggccaacccccaaggctggctccaggttctgtggatttacatactcatcattttggtccatctttaaagaagtcaagcatgacaagtgaagcatacaaagaggcagtccttcaggcaaaagaacatattaaagcaggggatattttccagattgtattaagtcagagattcgaacgaagaacatttgctgatccttttgaaatttatagagcattgagagttgttaacccaagtccttatatggcctatttgcaggtttatttctgcgtaacatctgaaacttcttccttcattcaagaaagttttatggctaggggatgtattctggttgcttcaagtccagagattcttacacgtgtaaagaagaataagattatgaaccgtcccttggctgggacagctagaagggggaaaacacctgaagaagatgcaaggttagaagcaatattgctgagagatgaaaagcagtgtgcagagcatgtcatgttggttgatttgggacgcaatgatgttggaaagttgatgaacacctccccttcttgtgtccattctcaattagcttatcacaaaatagaaaaacttgcattgggtttaggaataactaggcttgcattgatgacttccactaaagtgacattgactctttactgctga

SEQ ID NO: 139828 - DNA, 1036 bp, Glycine max
  Clone ID: PAT_MRT3847_97272C.1
atgacaagtgaagcatacaaagaggcagtccttcaggcaaaagaacatattaaagcaggggatattttccagattgctaggggatgtattctggttgcttcaagtccagagattcttacgcgtataaagaagaacaagattgtgaaccgtcccttggctgggacagctaaaagggggaaaacacctgaagaagatgcaaggttagaagcaatactgctgagagatgaaaagcagtgtgcagagcatgtcatgttggttgatttgggacgcaatgatgttggaaaatggttgcaaaaagtggttctgtcaaagtggaaaagcttatgaatgttgagcgatattcccatgtcatgcacataagctcaacggttactggagagttgcaagagcatttgactagctgggatgccctgcgagctgcattgcccgttggaactgtcagtggagcgccaaaggtgaaggcaatggagttgattgatgaattggaggtgacaaggcgggggccttacagtggaggatttggatacatctctttccttggtgagatggacattgctcttgctcttaggactatggtgtttccaacaggaactaggtatgacacaatgtactcatacaaagacgtcgaccaacgccatgagtggattgcttaccttcaagccggagctggtatagttgctgacagtgtccctgatgatgagcaccaagagtgtcaaaacaaagctgctggtcttgctcgtgccattgatttggctgaggcagcttttgttgataaatgaattgagatatctcatgaatatagtcaaagtcatatacataaagtgaagctactgattgtgtatacaagtcagatggatcttcaagtttaaacttcattcagatagggcatatttaaaattcaaattccattagtggaatgaacttagtttctcgtttgaatatatgaacatcattgtcttatataccaatattaaatcattactgtggagagatatatgattaaattaatagtctattttataaatattaattttgc

SEQ ID NO: 139829 - DNA, 415 bp, Glycine max
  Clone ID: PAT_MRT3847_97273C.1
caacgccgcgagtggattgcttaccttcaagccggagctggtatagttgctgacagtgtccctgatgatgagcaccaagagtgtcaaaacagggctgctggtcttgctcgtgccattgatttggctgagtccgcttttgttgataaatgaatttagatatctcatgaatatattcgtagtcatagtcatagtcatatgcataaagttgaagctactgattgtttgtacaatccagatggagtttcaagtttaaacttcattcatgtaggtacaaattccattagtggaatgaacttattcttgtttgaacatatgaagatcattgtcttccataccaacattaaatcatgttaatgtggagagatatatgattaaattaatagtctattttataaatattaattttgcattttaa

SEQ ID NO: 139830 - DNA, 246 bp, Glycine max
  Clone ID: PAT_MRT3847_97274C.1
ctgatgccgcccgtagtgcttctggtattgacctaacagaacctgcactgatgggcattattatggctgtgttgacaagccgagccgtgtcttctagaatgaaaagatctacaatttttgcaatttctatttcaagtccgatctcgcttgtttcaatgctgcctggctctgattaggaagtttgactttccactctttatggagcttattatacgcttacatagtgagaactattatgacaattta

SEQ ID NO: 139831 - DNA, 510 bp, Glycine max
  Clone ID: PAT_MRT3847_97275C.1
tggaagaacaagattgtgaaccgtcccttggctgggacagctaaaagggggaaaacacctgaagaagatgcaaggttagaagcaatactgctgagagatgaaaagcagtgtgcagagcatgtcatgttggttgatttgggacgcaatgatgttggaaaggtttgctatagatacattttaatggatattcctatttatttatcttgttcaaggtgtcttgaagcaatagcttgctcaattatattgtttatttaaagaaaatacggcctctcttttatttcttatattatatttactactctataatctcttttattggagttgaagttgatgaacacctccccttcttgtgtccattctcaattagcttatcacaaaatagaaaaacttgcattgggtttaggaataactaggcttgcattgatgacttccactaaagtgacattgactctttactgctgagttacacagttatatcccttcccttgcctccatcaagaaattgaattg

SEQ ID NO: 139832 - DNA, 291 bp, Glycine max
  Clone ID: PAT_MRT3847_97276C.1
cggggaaggtatagaatcaattgacgcgagcggccattcatggattggcttcatgcccatacactcacactagcgcgccctttgaccgcatactctacatactaccgttttctaacatgctccctaaattctgaccacatgcgaagaagaagcatctccattactgcttcttggcacgagcagctagcgatagttttactattctgcgcgaatcctattactgccgtgaaagctatagctaaaagtacgctaggggagacgctctataggaaaacggctgagagaaagaca

SEQ ID NO: 139833 - DNA, 581 bp, Glycine max
  Clone ID: PAT_MRT3847_97277C.1
gttatttctcatatgacactgttcgttatgtggaaaagaaaaagctaccattttcaaacgctccagaggatgacaggaaccttgctgacatacatctgggcctctatgagaatgtgattgtgtttgaccatgtagaaaagaaagcatatgtgattctttgggtgagggttgatcggtactcctcggctgagagtgcttataaggatggaatggaaagattagaaaaattagtggccaaattacaagatggccaacccccaaggctggctccaggttctgtggatttacatactcatcattttggtccatctttaaagaagtcaagcatgacaagtgaagcatacaaagaggcagtccttcaggcaaaagaacatattaaagcaggggatattttccagattgtattaagtcagagattcgaacgaagaacatttgctgatccttttgaaatttatagagcattgagagttgttaacccaagtccttatatggcctatttgcaggtttatttctgcgtaacatctgaaacttcttccttcattcaagaaagttttatggttcagctctttcatgttctatga

SEQ ID NO: 139834 - DNA, 728 bp, Glycine max
  Clone ID: PAT_MRT3847_97278C.1
ctattcattcagtgaatgcataaatttctcagcattagaacttgaagaactagaagcggtggtattaactgaatttacaaagatgctttctgcaacacttccaatgtcccttacgtctgcaaaggccttctccagccgcatggttccttccgggccaccgtctatctccggcgacactcaccggcgtttcactctcacgcgctcctctcacgttgaggtgctcttcactctcaaacaccccttcctatggcaaaaatgacaattgggtagttgaggaaggaagaaagtttgtagaagcttcaaagaatgggaacttgattcctctctgtcagagcatcttcgctgaccaactcactcctgtccttgcttaccggattttggttaaggaagacgattgggaggctccaagctttcttttagagtctgcagagcctagttatcatgcttcgagtgttgggcgctatagtgttttaggagcaaacccaactatggaagttgtggcaaaagaaaataaggttacaataattgaccacgaatctgggaatttaactgaggaaattgttgatgatcctatggtgattcccagaaaaatctcagagggttggaaaccctatctcattgatgaactaccagatgcattctgtgtttctgatgttgaaaatcctaagttgaaagagcttgtcgtttacccttttatagtatctgatgttgaaatcttgtggttttag

SEQ ID NO: 139835 - DNA, 206 bp, Glycine max
  Clone ID: PAT_MRT3847_97279C.1
actataggagataatgaagatgatccccttctcagaatgcctgctttcctttattgaattaaatacttcttatgccactataacgagggtaagagttggagcataattaatcaaaatgggggccatatcgcacaaagattttgctcatccaccttaatagatgaacgggtggtggatcttacaaagggggccagaagcctaaaggc

SEQ ID NO: 139836 - DNA, 331 bp, Glycine max
  Clone ID: PAT_MRT3847_9727C.1
ttgttaggattcaagccagtgctgcatagaccgctaactacagcgacttacgcatactgcaggggagaccttgagaaccagaaccttctgttgtggtgaaaaagcataccgttgtgcttagccacaagcaagtgctagagttcttgcattgtttcagaacatagccattgagggggacactgagatagtaacagtctaagatggtgttgatgcctatctgtgtgttggtggcttgtcttgtggaactcgagcacgataccatgaagtatctgacatggtgggccccctttagggccaatgggcttgcgacaaagacctcaatagtaacatg

SEQ ID NO: 139837 - DNA, 223 bp, Glycine max
  Clone ID: PAT_MRT3847_97280C.1
aaaataaaacacaccctctacgtgtccacactctatgatcacacaacaccagattaattaaatctctatatataaaccccttcaggcaatccactatgaagggcaaaaccatttttcataagatgaaggaaaaagttttgggatcatctgatgccgattcaggtaaagggaagatcaagatgaagaagcacataggtcatggagttcacttggttaagggaag

SEQ ID NO: 139838 - DNA, 168 bp, Glycine max
  Clone ID: PAT_MRT3847_97281C.1
agaaaaaaaaaaaaaaaaaaaaaaaaaaaaaaaaaaaaaaaaaaaaaaaaaagggtctaaagtcaagtggctcaactcttaagcacgcgggcagtcgacctaaaggatcgaccataacgtgcgcatcccttcaatgcatatgattctcctataatgacatcaaaactg

SEQ ID NO: 139839 - DNA, 692 bp, Glycine max
  unsure (1)..(692): unsure at all n locations
  Clone ID: PAT_MRT3847_97282C.1
cccgcgtccggaatttcgaaattggcgctctgctacgaatccatcttcttctccaacttccatttcaccgatcaaattcaattcaatgggtgccaatcacagtcgcgaagatctgttggaatcttccgattcagagcaagaggagcatgaaaccttcgaagacgccaccgaaggaagcgccgaacggaaaccgtcaacgccgtcatccctcgatgacgtggaggccaaactcaaagccctgaaactcaaatactcctccaactccacccccgccgtcaataacgccgtcaagctctacgtccacatcggcggcaacacccccaaagccaaatgggtaacttctgaaaaactcacctcttattcattcgtcaaaacccactccgacaccgacacagacgaagaaatacaacgactccgacaacgacaacgacaatgacgactacgacgaaacaaacgaaaagcctttctgggttttaaaagttggttccaaaatccgatcaaaggtgggcccggagatgggcctgaagagcttccccgagcagcggcgcgtggacttcgtggtgcgtggcgtctgggcgatgaagttcttcagcgaccagaaccagatcgacttcatcgattccttccaggagnggctcttcgaggacacgcacggggtcgaggccccgggggccaacgaactcaaatctacg

SEQ ID NO: 139840 - DNA, 300 bp, Glycine max
  Clone ID: PAT_MRT3847_97283C.1
gcaccagattttacacatctcttattgttggaagctgatctctgttgaagatggttatgaattaggagtgtatttatttatttatttaactaatcacttcatactcttctcttttgtagctgattaagtatggcattggcatctgaagtttcacaaggcttgaagagattgtttttgcaatatgtatcatgcttaatgtattttggacatgtatctgtattattattagcgagactgactgcaatttaatttagttacaccctaaaaaaaaaaaaaaaaaaaactcaatggaagacccca

SEQ ID NO: 139841 - DNA, 247 bp, Glycine max
  Clone ID: PAT_MRT3847_97284C.1
gatttgttcattctttgttcactatgtttgtagtggaatccatacggctttgtagtgttgttaattcagataaagtttgcattgctatgctcctttccaatagtgtgatattgagaagtccttagtatcattgatttttgtagtttttctctaatatgaactcatttggacataggtctagatgcttcccatgtgtgctttgttgcctgattttgttggttgtaagatgttgcatctaaaattcatg

SEQ ID NO: 139842 - DNA, 125 bp, Glycine max
  Clone ID: PAT_MRT3847_97285C.1
tcctgtatagcggccgccctgtttttgttttttagttcaccttcaatacgatcggatgaaacacctatttggttagctccgtcaggctttctacatcgaaaccgaacaggggtagaaggttttac

SEQ ID NO: 139843 - DNA, 295 bp, Glycine max
  Clone ID: PAT_MRT3847_97286C.1
ccggcctgtctttttttttttttttgaaaacagccttaattaccatataataccttattgatgggagtggactatgtaccatcaaccatataacacaatttcgaccactctatacgaactgatacagatctccaaaaaaaaactgagggaactgcactgcccgaaccttgcaaaaggaacacaaacaatattatgtatccttggaactttgaagcctactctctatacaaaactaacttttttattcactacgctttaacaattaaggttgagggcacaactattacccgtttaa

SEQ ID NO: 139844 - DNA, 355 bp, Glycine max
  Clone ID: PAT_MRT3847_97287C.1
tacggagctattgctcgtgcctatacggatatcatatttacatttccattttctatctataagtgttcgaataatcttatgctatgggaaagtctcacatatactggagcgctgattaccagaaagcctaatataaggcgaagaataagctcatagctctaattgctagtaatggatgcgctactctaatgctacgtttggcatggacatatgctggaacttacgacctgagctctaagacctgaggtaccttctgaaccataaagcacccctacgaactcgctcacggtacttaccacggtctttacaatccttgtaggcttttggaaccactcaaagcggagtttcctatttt

SEQ ID NO: 139845 - DNA, 256 bp, Glycine max
  unsure (1)..(256): unsure at all n locations
  Clone ID: PAT_MRT3847_97288C.1
caagcgcaggcaaagagagngccgcagnnaaaggcacagcaccccaagccacaaggnngggcancaaggcnncgcngaaagacgnnggagacgcacgcgnggccacngccgcgagagcagngcaggcaagcaacgccanggccagngaagngnngcagcgnggagaagacgggncaaaggccnacgcacccaacaacgncnccgaggccgcaggggagaagaccgngcncaagaacaacgcagggngcccccacaa

SEQ ID NO: 139846 - DNA, 379 bp, Glycine max
  Clone ID: PAT_MRT3847_97289C.1
ggggaaaacagggcaaactcccctcccccgaagggtacaaagaaagtatccgacgaaagggacccaaaggagggggaccccgcccaccggaacacaaaaccgagcagctctcatggggggggggcaggattttttttttgttcgcgcgaaaaaaacccactctctagggagagaaccatttgccacctgggccagcgcgggacgtttaaaggggaagggtggagggaggcccccccacctttagcaagcccagcaagttttcctgcagtcccccggaaggccgggggctcccccgaaataagggggcccagaaacagcctggttccagggcggccccggggccacggtcctcctgctgtaaaccgcaaaccccgccagg

SEQ ID NO: 139847 - DNA, 602 bp, Glycine max
  Clone ID: PAT_MRT3847_9728C.1
acacggcgagaagacgacagaagggggtgttaagacatgagatacaagttcactgttgctgaataactcagacaacagtaatggcaacgtttttctgcctatgcaagtttgctacgttcagcaacattagctcacgaaccttctcttcgttcttaccctccaaaacttctatctaccacagcttgtcctcttcttctgcaacattctcattcacatggacgatgcctttcgcatatctcaacctcaaactgccacacaacaccgctcaacttatctccaagccttcttccacaaagttcaactgtgcaaccgtgctcctgagaaacaatctgaattccttccatttatcattgaggaccacgttgttggattcattcacaatgggtttgttgagcatttgagaggctttgggaatgtgttcattttccccaaagataaatataatggaggcctctacggagactttgtttctttgcatccaatgctaaagacagctgaggaaagaaccagtgcagttggatatgtagtagaacgtttgggagaggagcatattccagggatacggaatgagctttaccctgtgatatcatcatttggggcac

SEQ ID NO: 139848 - DNA, 2428 bp, Glycine max
  Clone ID: PAT_MRT3847_97290C.1
ctcttttcctttcccatttgcttagctttttcatttaccagataataataaatttcccttttcacaccctccccttctcaaattgatcactccattccaccctataatataatccattcttaaccaactttttttttcggcctgcgtaacaaaagaatcatcattcttttttaacccactttagccctcaccaatatgcttgtccaggctttatcatttcgatctgatttaagccaatctccaattagggtatgtgggagaaaatcagtaaaaccatgaagcttctctaagatcatcaccctcgtgtgcattatgatcaccggtaaagaactaaggcctgatgattgtataaactatgtcaactgagctgaacgccaattccaccttcaagaccatcaagtcatgtgatattaacaccgagcaggattttagtatggagaatcgaatcttaagtgatatactccaatctcatgaagccttcaattacaacatgtcccggaaggattttgtcctaccggaactcgatggattcggctcgagcattggtgctggctctgatgagattgagatctcacctcattctcagcctttggttggtgcatcttcctacatcaattgcaataacaacagcaccaacacatcatgttatagtacccctttgagttcttctccaaaggtgaacatgaacaagatccccacaatggtgaagcacttggtgaaagagggcatgcccctaagtttggggacatcaacgtcctcgaattcaaccgtgacggaattctcagctgatcctggctttgctgagagggctgcaaagctttcttgctttggaagtcggagtttcaagttgcaggaacacgcaattgagtctcaacaatgctgaattggggctgatctcttctccattggtggaaaatgggaagaagcagctccctagagtctcaagtagtccatcactcaaagtgcttggatctcaaatgggtactcaggagaacaagaattctccattgcaagacctaatggaagtggccaattctcaagaggagtccgcaatctctgaacaaacaccaaatggagacactggggagaaaccttccccttatgtgaattctaggaaaagaaaaggtccatccaaaggaaaagccaaagaaacttcaacctctaccaacccccctatggctgctgaagctagcgatgactctaatgcaaagcgcagcaagcctaacgaaggtgaggggaatgaaaatggccacaaaaaggcagaggaagccttaaaaggaggtaatataaaaaatgcaaatgatttctgtattctctggtgcaaattcttattattattctggcaccaactgtacgatatattgctaattaaaagaggtcaagccactgatagtcatagtcttgcagaaagagttcggagggagaaaatcagtgaaagaatgaagcttctccaagatcttgtcccaggttgcaacaaggtcacgggtaaagcactaatgcttgatgaaattataaactatgttcagtcattgcagcgccaagttgagtttctgtctatgaagttggcttctgttaacaccaggctggattttagtattgagagtctaatctcaaaagatatatttcaatcaaataattctttggcacacccaatattcctgatagattcctcagcgccacccttttatgggcaacaccctcagccaaacccagcagtccacaataacattcctaatggaactatgacccacaactcagtggacccattagatactggtatgtggattcctgggtttggcatgcatttaccacacctaaatgattttaatgaaggtggctttcagtatccaaaaccattctctgaagatgacctccacaccattattcagatgggatttggccaaaatgcaaataggataacaccaatacaatctcagagtttcaacggctcaaatcaagtacccctatgaaaatcaagctctgatcaccattcattacgcctgaattgaagcttggaggaataggaagactactgctgtacacaacaagaagggatttaatttgaacgaccccttgaattattaagccattgttatcactaggtctaatagaaccttcttttgtccttatgtatgttagccattttcttttcttaccctttccatgagtttaatttttaatcatcaggggcagttcttttcaaatttttttacaacttcttcactgtaaaatctttaggaccgattctgatttctcttggtgcaaattcttatttttacggcaccaattgtaagatatagtgcaaattaaaggagtttttctactacccagccattatgattatccctcctcactttgtctattattgtacgctttatataattcatacatcacatcaacccacaaagatttttcgtgggactttatt

SEQ ID NO: 139849 - DNA, 578 bp, Glycine max
  Clone ID: PAT_MRT3847_97291C.1
ggctcgagaaaattctttattgcaagacctaatggaattggccaattctcaagaggaatccacaatctctgaacagaccccaaatggggacactggggtgaagccttccccttatgtgaattctaggaaaagaaaaggtccatccaaaggaaaagccaaagaaacttcagcctctattaacccccctatggctgctgaagctagtgaagactggaatgcgaaacgcagcaagcctaatgccggtgaggggaatgaaaatggccaagttaaggcagaggaagagtccaaagggggtaatagtaatgcaaatgatgagaaacagaacaagagtaactcaaaacctcctgaacctccaaaggattacattcatgttagagcaagaagaggtcaagccactgatagtcatagtcttgcagaagagttcggagggagaaaatcagtgaaagaatgaagcagtccaaagggggtgtccgttatttaaatgaagagcacgggttcacgagtaactgaaaacctcctgaacctacaaaggattacattcatgctagagcatgaagaggtcaagccactgatagtca

SEQ ID NO: 139850 - DNA, 394 bp, Glycine max
  Clone ID: PAT_MRT3847_97292C.1
gggagtaaaaaaactcctttaatttggactatatcttacaattggagccgaaaaaataagaatttgccccaagagaaatcagaatcgggcctaaagattttacacgtgaagaagttgctaaaaaatttgaaaagaactgcccctgatgattaaaaattaaactcatggaaagggtaagaaaagaaaatgggtaacataaggacaaaagaaggttctattagacctagtgataacaatggcttaataattcaaggggtcgttcaaattaaataccttcttgttgtgtacagcaatagtcttcctattactccgagctttaattcagccgtaatgaatggtgatcagagcttgagtttcataggggtacttgattttagcccgcgaaactgtgaga

SEQ ID NO: 139851 - DNA, 295 bp, Glycine max
  Clone ID: PAT_MRT3847_97293C.1
ccttgttattattttttttttggcgaggaaacaaaacttttcatacactggcatgctaaacaagtggaagtatagaaaaataaactattggctaaccggccaaattccaaacaatttaaaagccgaacatattgaccaaagtggcaaaagggaaaaaaaccgagataaatgggaaggaaataaagttcatatggccgcataatcccgaatagcagcgaatgttaatcagggatgggataaaccggtgcccggcgttatcatcccccccttggtaattaccatgagagcattgccc

SEQ ID NO: 139852 - DNA, 419 bp, Glycine max
  Clone ID: PAT_MRT3847_97294C.1
aaggaagcaataaaagagagacaaggacaaagattacgagaaatggctgaggcaaagaggtcatctagaataaacgaattggaaaatgaattgcatggtttggaatttcttttaaaacagcttgaacaagttgaagacagtaatgttccgtctttcctagcagcaactggttatgtctctaggcaggagatagaatctgcccgcgctaaagttacacaatccttacggaaagcaaaaggtgaaccaaagaacgagcaagctgaaactgataatgccagccctgatgctaatgaaaagtattctcttataaacatccctgatgacatgctcacaacagaccagctcattgaaaagaagaaacagttatcactgaaatccatgtctgaagggcggcagcgattaaaacagaagcgttatga

SEQ ID NO: 139853 - DNA, 702 bp, Glycine max
  Clone ID: PAT_MRT3847_97295C.1
acgagccgccgatggctccatgttcaagacttcaaccgtcagtcactgcaatttgagtgttcaagcactgcattacgtcctttatcttcatccaccaagggttttgacattcacacgttccatctccataggttgcttagacgatttcaacatttaaaatctttatcgctatctaattgctcagagctgagtgattcaggattgacccgtttgctaagctatggttcaaatttgcaaaaacttaatctggattgttgtttgaaagtcactgattatgggctatcactggttgcttctggttgtccctcattgatgtcaattagtctataccggtgccccggtattaccgataaagggctagatactttagccagtgcttgcttatctatgaaatatgtaaatctctcctactgctcacaaatatctgacaatgggttaaaagctattacacattggtgtcgccagcttcaggcaattaacatatcacactgtgaaggcttaagtggtgttggctttggaagatgttcaaaaacactagcttatatcgaagctaagtcctataagcttaagcaagaaagggtcatagaaattattaacaatagaagaataaagtatctagatatttcttatttaaattaatctattttaaaagatcccttacctagaataaactttacctcatacctcaaaatccttaacttc

SEQ ID NO: 139854 - DNA, 266 bp, Glycine max
  Clone ID: PAT_MRT3847_97296C.1
gtgtattgatgatgttatcttgttttaataaggcaaagctttatgaattctacttggcaaattcaacctatgagccgcattgctattcttccatcaactaccttattgatgaacatttaatatctaagcaccttactggtactatattgactttacaaatcgaacaaagttcagtgtaactccatcccttaaatgaactgtggcgacccttttctatgatgaatacggctttccaccaactcctatactgactgcatctttggaag

SEQ ID NO: 139855 - DNA, 301 bp, Glycine max
  Clone ID: PAT_MRT3847_97297C.1
cgtacgtaactcggctcgagtggagaaggaaatggagctttgtacaagtgaagtggaaatggcttctcaacacagtccacaaccacagaagaaaaagggtggtattgttaccatgcctttcatcatggcaaatgaagcacttgcaagcgtggcgaatatcggtcttcagccgaacatgatattgtatttgatggggagttacaggtttcatttagccaaagcaactcaggtgtttctgttatcctctgcaacaagcaatctcacgccactcataggtgctttcattgctgattcttgtctt

SEQ ID NO: 139856 - DNA, 492 bp, Glycine max
  Clone ID: PAT_MRT3847_97298C.1
cgcgagagaggagtggcggaatctttctgaaaaatcgccgcaaagcgaagcgcaatctcatattaactgcaactgcaactacgaactacgaacatcagggtagtgattaagaaaaaccctagcaagtagcaatggggaagaagcagcacagcaaagacagaatgttcatcaccaaaacggagtgggcaacggagtggggaggcgctaaatccaaagaaaatcgcactcccttcaaacgtcttcccttctattgctgctcgcttacgtttacgccgtttgaagaaccggtctgcacacctgatggcagtgttttcgataatatgaatataactccctatattgtaaaatatggcaaacatccagtcaatggagctcctctcaagcatcaggatctcattccactaactttccacaagacattcagaaggcagaatatcattgtccagtgctaaacaaagttttcactgaaattacacatattgtggcagtgaa

SEQ ID NO: 139857 - DNA, 460 bp, Glycine max
  Clone ID: PAT_MRT3847_97299C.1
gggcaggattccaaatgtaatagccaaattaatggggctggacatccttcctgacaaagtggaaaaggaatcaaaacgggcaatgctccagaaaagagaaggaacatctcccaagcatgctgctaaaggaagcactaagaagactgaactgaagagcaaagaaacagataatttgatgcctatgaaaaaccaaaaagtgatagaagccttcaaagtgcctgcaactcagggtaaagagatgatattcggagcaaataaaaagttgcttgtcgagaagaccagctctgaggtggcggttcggaatggaataatagcactgaaaggatttgacaaacccagcataaaagcagacaagcctactaaaagttcccctcaaaagaaccttaccagagaaagtcaaaaggatgttcaggagataggaagaaaacagaatcacccaaataacaataacagggaacag

SEQ ID NO: 139858 - DNA, 417 bp, Glycine max
  Clone ID: PAT_MRT3847_9729C.1
gtacaggttactggcagaaaggcattttttttcattaacatcacaagcgtgacttcgacggcgcactgaactgctcgtatatgcaggaccattacagaacttgacggaaaacacagctgagaggtttacgttatgttacgtaaaataccacaagcagggcaattgagccacttttaagccgatgcgtattgcaagggataaaacagacaccctttgtctgatgccgctcctgggggttcgtatagaagccttgcggacgcaggaatgcgaagacatcagctaagattcttagcctcacaatcctattccatggcaggctgtgaggtgaatgcctagtctgtacatagcctgacaaagctcaatgacagcggttggcaatgccaaaatcctcacgcatactgagtaagtgccaagaga

SEQ ID NO: 139859 - DNA, 348 bp, Glycine max
  Clone ID: PAT_MRT3847_972C.1
gcgcgcgtgcgcggaatttggctcgtgacagaacaaccacccttctgtccctagttcaacgttgccgatctgatcagtgggagtaaaaatgccaaatgagtcgggcacagggtgcacaccaatcattctgccgttttggaagtcctgtcaggatgatgtcagctaaaagccctaaaatatcttgacagctgggggaaagtctacatgctaatgaagcaactctggaagagaggctgcaaaagcttatatgcaagagcaaggctgagatcctcagatagggtagcatgactttggcgatgcacttactctgcgagagccatgatggcatggaaaccatcataacagaac

SEQ ID NO: 139860 - DNA, 395 bp, Glycine max
  unsure (1)..(395): unsure at all n locations
  Clone ID: PAT_MRT3847_97300C.1
gnnnaaggnncctgagaatatattgatatttccttcttttcactctaacatgttggattacaagtgtgaggtgaagtcccacatcgagtagaagtggaaaggttgagcaccatataagtgaggagaagacctttttacctgagccttaaggttttgggttagagtgtggggtcaggtctccttatgtgatgactcctggtccacaggcgtacccctagaatctccccaacataacaatattgtatccaacctagaataaaaagaggaatctatcctaaagcatgtgaatcacacaccccaagtttttgtgatcttatgggataccatggtcattcagctttttccgtcaccttaacgcagaaaacacatcgatattgaactctcaaaactaacat

SEQ ID NO: 139861 - DNA, 456 bp, Glycine max
  Clone ID: PAT_MRT3847_97301C.1
cccacgcgttcgtaccaatatgaacagaatctcctctcgacacctttgctttgctgcagatcgcaactgcaacttcccacaaatataaatatatattacttcatggtcacacatagttaattttattaattactactaggtagctgggttttaataggcagtatgtaagtgtaatccttgacttcctgcaaatatggaaaaagcgcgcttaggagattgttgtttctctaatacgactattacgaggaaaagcgagaatcgaaagctgttgcaccaacaacattataagccatacctatgaataaagattatgaaatggggcaagtgggtggccgtcattatataacccaacaagagggcgaggatctggtttggtgtttataccacccccctaaacggcgcaggcgcctattaaaccggacgtttttaacttctagggcctttccctcggcttaa

SEQ ID NO: 139862 - DNA, 242 bp, Glycine max
  Clone ID: PAT_MRT3847_97302C.1
cagccttcttctgatcccgtcgccttttttagggttcaagtcggtgcacaaccttccccaaggaagcaccaagtgctcgactattcctacccggatattagcgatttccggaaatctcttttcgctcaactggaaaaaggaactttcgcctacaaagatctggcctccccctccccccgggaaagatacctcagaattaaaaaagtacacacttgagcatggaaagacgctcctccttttta

SEQ ID NO: 139863 - DNA, 1378 bp, Glycine max
  Clone ID: PAT_MRT3847_97303C.1
cccgtcccgacccacgcgtccgcccacgcgtccgtacagctgctagatttttctccaagggggcagtttctataataatggaagggcaatttctccttcattaatttatatgcctatgcctaagttttttcacaattggaatagccttgtcttctacactcccccaagctcttagattctaatccactgtggttttccaacctcagaatttcctcaaaacttggtgatgctggctagaacatctgtaacttcatcaaacaaaggaaaaagaagaagaaagaaagtacttctccaattgctattactgcttttctgacagcagattatgtgaaaccagaagagagaaccttgagaagtcaggactatatctgtttccttggcatcagtatcaattaacagctttctctaggctactattgtccattgttgtgcttctacatataatctgttggaagagatcagttgaagtactacaacacagttgagtcccggcaattctataatgcaggcatcagagcaacatagaaattcaagtatgtactatcaaccattacaacaaattgaagcgtactgcttgccgcagtatcggacactaaatccgcagctatactaccatgatggaggccatggaactcagttttcaactccaagttcttcagaactttactgcactttggagtcatcttctgtagctggcagtttcactctatacaactccccttcaactgttagtttctcacccaatggtagccccatatcgcagcaagactctcagtcatatccacctgaccagtatcattcccctgagaatacctatggctctcctatgagtggctcctgcataactgatgatttaagcagcttcaacttgaagcacaagctgagagagttggaaagtgtaatgcttggccctgactctgataatcttgatagttatgacagtgccatcagcaatggaaacaactttgttccactagagatggacggttggaaacaaacaatggtggcaatttctagcaaaaacctaaagcatatccttattgcatgtgccaaagccatttcagacaatgatttgctaatggcacagtggctgatggatgaattaaggcagatggtgtcagtttctggcgatccgtttcaacggttgggagcatacatgttggaaggacttgttgcgcgattggctgcctctgggagttcaatatacaaatctttaagatgcaaagaaccagaaagtgctgagcttctctcctacatgcacatattgtatgaggtttgcccctacttcaagtttgggtacatgtctgcaaatggagccattgcagatgccatgaaagatgaagacagagttcacataattgatttccaaattggtcaa

SEQ ID NO: 139864 - DNA, 1495 bp, Glycine max
  Clone ID: PAT_MRT3847_97304C.1
ctatgatctaaggcttcttccacattttgtttgagagaaagagagaatcagaggccatccttcctgaggattaaaccacattgctttctaaagtataaaatctcaactcgttaatattccttaggaattgggtttggaggcaccccaattccaacgccaaaaggtttgaactttgggcgcctctgaatctctcaatcgtgggactcacaatctaagttagtttccacggtttgtgttggtgggggttcaaaatgttgggggttttcattaatcgaatccttattctcgttctggggtatgcataccctggattcgaatgctataaaacagtggagaaaaatagggttgatattgaggaacttcgcttctggtgtaaatactggatcattgtggcacttttcactgtacttgaaaagttcacagatatatttgttggatgggtgccaatgtatggagagatgaagctggtgctttttgtttacttgtggtatcccaaaactaaaggcacgggatatgtttacgagactctattgaggccttacgtatcaaagcatgaaaatgagattgacagaacaatacttgagtggaaggctagaggatgggattacgtcatattttactggcagtattgtgccaaatttggacaaactgcatttgttcacgctcttcagcacttggcttctcaatctactagattttctgccaacccgactacacagaagaacgacatgcaaggtcaaagtgccccaccacaagcggctccaacccaggcccaagcctccttcatgaagcaaagcagcaccctaagcaagagcaagaagtggcctccaagcccccccaacgccaccacagaaaccgtggaggttcaccacgtgtcccaaaccgaatacgtggacgaggaagacgaagagccatgccaacccgaacccgtcaccatcatcgacggccaagatcagagtgtgagcgtcaaggacagaatcaaccgcgcacgcgccaggctcaggcgcttagactcacaacaacaacaaagtcctcgtactcctcgaaccttgccgtcgccgcatcgacaacagatgtaagaaacaacaattgtacatatttacatattcacctcaaacaaaccaatccctgtgagaaaaaaaaaaaaaagtaacatgggaattgaaattgaagaaattagactctgctttctctttcaaaaattgtcattcatcgatttgtgtacaccttatcctagtaataaaaataatatttgctgttggaatttgcaacaattggataatactaggcagttatcaacacatgttaatccagttattaagaaatagactcattctcaaggagagtttaagttgatttcagagataagtacttattgaatcttgaggtttttcatgatcttgataaactctcgagattcaatttatctgaattttttttttatgcgagaacaaattggatgatactttcgaaagaaaaaaaaaaacgtgttatt

SEQ ID NO: 139865 - DNA, 375 bp, Glycine max
  Clone ID: PAT_MRT3847_97305C.1
ctatgatctaaggcttcttccacattttgtttgagagaaagagagaatcagaggccatccttcctgaggattaaaccacattgctttctaaagtataaaatctcaactcgttaatattccttaggaattgggtttggaggcaccccaattccaacgccaaaaggtttgaactttgggcgcctctgaatctctcaatcgtgggactcacaatctaagttgtaagttcatttggtccttgttaaacagcagagtttccacggtttgtgttggtgggggttcaaaatgttgggggttttcattaatcgaatccttattctcgttctggggtatgcataccctggattcgaatgctataaaacagttgggaaaaataag

SEQ ID NO: 139866 - DNA, 221 bp, Glycine max
  Clone ID: PAT_MRT3847_97306C.1
agggtgtcttacgttgctcattacgttaatcagccccaagagaaagatttgttggaggggaatttttcctttgatattaaatctcgctcttgattggaaaaaggtttctctaccaaagcaccatttggtagtgggaaaacctctaaatattatattaatggggcctggtcacattctttaaaagaattttcttgaaagggaggttcaggaaaaccccaaaa

SEQ ID NO: 139867 - DNA, 376 bp, Glycine max
  unsure (1)..(376): unsure at all n locations
  Clone ID: PAT_MRT3847_97307C.1
gaagtcgtaaggcttcttaaagttgacccaacaaattgtgttttcgtagatgacaggttccttctctctttatacactagatcatttatcagaatgaaaccacagtatcatatcatttatctgttccacattcatatataggtctatatgcatgtatgtgtgttttatgttctagcatcttggcatccaatatcaatttctctctcaagaagcagacatttgtgatccagcagattatttctttttcctccctgtcacaatcttgggnttaatcttttgtgaaaatgatttcttgggccacaaaatatgtttttaatgtgattctctgtggttttagtcctctaatttttttccttgattttgcttcctcgttcaa

SEQ ID NO: 139868 - DNA, 2116 bp, Glycine max
  Clone ID: PAT_MRT3847_97308C.1
attctctttctctggctcgacctctctctctctctctctctctctctctctctctctgttgttgtgtttctctctccaccactccttcttatcactctcttcctcataatattgtgatctctctcagttagttccctttctgaaacacatacatagaagttttctcctttctttagccgagacaaatcaatccaaagggagagagatgcccattacccaccctctctaaagataagagcttttttctttttttttttctttctcttcatatctctattttccatatattatgaggcggcttaaagggttggttattgtgagtgtgaggatcactttttgagcgtgttttctgtggattcggtcttgtgtattttgctatacagaataagagaggaagaacaaacatgactgaaagtaataatgaagtcaacctcagtgaatctaagagtgttgttccactcaacacttgggtgcttatctccaatttcaagctggcttacaatctactaaggcgtgctgatggaacgttcaatcgagagttagcggaattcctggaccgcaaggtcccggctaataccattcctgttgacggggtattctcttttgatcatgtcgaacgaagcaccgggctcttcaatagggtgtatcaagtagctcctgaaaacatgggaaggttcatagagttggagaagcccttgagcaccacaaagattgttcctgttataattttcttccatggtggaagcttctctcattcatctgcgaacagtgctatatatgacatcttctgccgccgccttgtaagcaattgcaaggctgtggtggtttctgtgaattacaggcgatcaccggaatatcggtatccttgtgcctatgatgatggctggtctgcacttaactgggttaaatcaaggacatggcttcagagtggaaaggattccaaggttcatgtgtacttggctggtgatagttcaggtggtaacattgctcatcacgtggctgtgagggctgctgaggaagatattgaggtgctaggtaatattcttcttcacccactgtttggtggggagaagcgaaccgaatcggagacgaaactggatgggaagtactttgtgaggctgcaggaccgtgactggtattggagagcttttctccctgaagggaccgatcgagaccatccggcttgtaacccatttggccccaagggtaaaaatcttgaagggctcaagtttcccaaaagtcttgtttgtgtggctggtttggatcttctccgactctggctgcccaaaagtcttgtttgtgtggctggtttggatcttctccaagattggcaactggaatatgtggaaggtctcaagaattgtggccaagatgtcaaacttctatacctaaaggaggcaactattggtttctacttcttgcctaataatgatcatttctataccctcatggaggagataaagaacttcgtcaaccctaactgttaatatactatttaaccttacttaaaggatcccatacataactaaaagcctgacatttcacctgggtaatgtttcttttttttatttttgtatctttttttcttttcttttcccaactttataggggtggtgtgtagttatataaatgtgtagtgctacttactgtgataacatctatggtggtaaatctggagctttctgtgatcggtgtggtctactgcttcctgtgctgtgttcatatctttttgaagggtagcaccagtttcagcagtttgaagtgccagagttcagttctttagtggggtttggctgaagcaacgtaaatgaagcttgccctatttaactttttcaacctcaatagtaggaggaggggagatacaagatatggcttggcttatcgctttggttcagtgaatgcatttatgttgtataacatatattattgactgggaactggagcaaatgccatcctgttatgaacttttatgtctatatataaatgtcttgtttgtttacttttcagttagaattttcatcaggaagaagctaaggttgtaatatatttcatcctgttaaattaaattaagcagtttcatcttctaaaaaaaaaaaaaaaaagcccgccgccgact

SEQ ID NO: 139869 - DNA, 585 bp, Glycine max
  Clone ID: PAT_MRT3847_97309C.1
acgaggaaacgcagcattagcgtccgctgtggcctgtgggtgagcacccagcaacttggaggaaaaaaatttacaaatttgcgacacaaaacttcctcattgttgagaacagagcaacatttgagttagaaaaatttgttttttccctctcttctaagacctcccgaaatggcttcctcaatattcagaagcctccaagttcaccccttcatgctttatccaacaacattcctcagacgaagaaatggggtttttcatttgacgaccaaagccacacaatcccaaacagacacccaacagaggcaacctcagacaaaggtttcatcaagcaacagcacacagtccaaaaagctcgacaaaattccaaaagactatgaagccatcattggcattgaaacacatgttcagctctcgactctgaccaaagccttttgtggttgcccttacagttatgggtcttcacccaacagcagcatttgccccatttgcatgggcttgcctggtgctttgcctgttctgaactcaaagataattgattttgctgtcaagttgggccttgctcttaattgcaacttggcgttcaaa

SEQ ID NO: 139870 - DNA, 675 bp, Glycine max
  Clone ID: PAT_MRT3847_9730C.1
ctctctactagacagaaaggaatcaaccacattataaatataaatgcattgggcttgaaactacctaaacattaacaaataaagaacagagtgaaagaagatggagaaattaaagacatgggtgcactgattaataggaaataggatattctaatattaagcaggcttaaatatgtttaaggtccctaataaatgaccaaattttgttttgggtccctcataaaatttttcattgttgagtccttgatatattaaaacttttgttttgtgtttctgtcatcaattaagtgatgacgtggcaccatcacaaccattgatagtattggggagatcaatttgtaaggtaacacatcatcacttaattgatggtagggactcaacaaaaatttcaatatatctgggactaggggtgttcaaaaacactggtttggattgaactggattgtaaccgaacctaaaccgaattagttttttcccgaactagttcaagaaaaaatgagtgcattattttataaaatcaattcgattaaccaaattgtttctaaaaaatcaattcggttaaccgaactggtttttatttaaatattttttaatttgaaaaaaatagttcaaaaactagttccaaaaccagttcgaaaatggttcggttcttagaaccagtttaaaactagttca

SEQ ID NO: 139871 - DNA, 241 bp, Glycine max
  Clone ID: PAT_MRT3847_97310C.1
agagggggggatagtgaatgttgacccaacacccttcactggtttcacctcaaaagtggttcatttcttccacaagctggtggtgaagtttttatctaattcttccctaacccttcactacttctcttctaattttactcctgtttctgatacctctccccccaatgaccttcctgtcaaagggtacctccctgattgcttgattgtgcagtttgtcattagtcaaccatatccaatattt

SEQ ID NO: 139872 - DNA, 247 bp, Glycine max
  unsure (1)..(247): unsure at all n locations
  Clone ID: PAT_MRT3847_97311C.1
tttgaatcttattatatgtaacatttanaatatattcattttgaatcttattatatatataaaaagattcaaaatgaatatattttagttgttacatctaatatataaaaattgtacggatataaagattaaataagtaattaaatcaatatatataaaagtatatctaatgacactctagaagtaagaaaatgttaaacatatatatcttagccttaaccatatacaattctatatggttaaaact

SEQ ID NO: 139873 - DNA, 286 bp, Glycine max
  Clone ID: PAT_MRT3847_97312C.1
tggtactgctccgtcaacacgatacgacaatgtggttgcgatcctcctagacactggtatggctgctacaggacgacagatggcgttgaacggcctcaattctgctgcggtcgctctcaggggtctaaacttcagtatgcgtgcatcacacgttgtaacttgtcgaatctgtaacccctattcgattcacaggtcgtcgatgtacactaccatcatcgttagcatgctgtggtatcgcagcataatcccgcgtgcaacacccttccttatcgagtgcgattattca

SEQ ID NO: 139874 - DNA, 471 bp, Glycine max
  unsure (1)..(471): unsure at all n locations
  Clone ID: PAT_MRT3847_97313C.1
aggaaggtttcccgtcatcactgtatgacgtcctccttctttggggggggggggggggggggcagtgggaaccagtgcgagagggagaaaggctagtatttaaatacggacaaatttacaggaaaatgaaaagcttatagttcgtgcgcgaggcgcaggtagaggggaaggggaagaaatgaaaaatggtaagagtggcggggcgcgactaaagggtagtaccgtagtacaggaatgtgaaaaataaagtggtgcgtggcgccggacgttaacggtagttaagcggtaccgcatgggtgttagtatgaaacgtatgttgacnagagccgtgtattangtgggaatgcttgccgggtattatttgattaagagtgagcgacgtaaatacacatgcgacttgagtacagtggaccaagtcatcgttatcatcaggcttagtgcgtagggggattagtaacgggatactaggag

SEQ ID NO: 139875 - DNA, 368 bp, Glycine max
  Clone ID: PAT_MRT3847_97314C.1
gaagtacatttatgaagaactgaataatatataacatcgtgattgggacacataaagatgaccgcaactcgcattttttttagataaaataaataaaatccggctaatgcgcacatatgtttacctttcttgaaagagacgacaacaatattgtgagatcaaaatgcttagataactgatctataatcatgctgcaggaatcgttgtatagccacccgtttgtgctgtcacataaagtgtcggcttgtttacgcttatcatatgactgcatggccgtaatcgattttgaagtcagatcttcatgctagctccacgtagccgctacgggagggatacctgttttgcctggaacaacattgctttcaccc

SEQ ID NO: 139876 - DNA, 197 bp, Glycine max
  Clone ID: PAT_MRT3847_97315C.1
agattgcatttcagacaaggaagaactatgtctaaccattcatacagcgctaaaatttgccatgctggctaggccatacgacagaagaataaagtctatcccatatttttacatggggcctatttatatctgtttcactagaggaaattcatattcaaagcacctgttactaatagaggattatagctatctagtga

SEQ ID NO: 139877 - DNA, 223 bp, Glycine max
  Clone ID: PAT_MRT3847_97316C.1
gtcttgctgcggaggtaactgagggtgcggaagcgactgcaagagcggcaacggctgtggaggctgcaagatgtacccagagttgaggtacaaagagtcaaccagcacggagaccttggacttttttttttttccagcaaaggctgaattagagagagctgttttgtgtgttcccgctgagaacgatggctgcaaatgtggaggtaactgcacctggaaccca

SEQ ID NO: 139878 - DNA, 272 bp, Glycine max
  Clone ID: PAT_MRT3847_97317C.1
ataatgacaaaattcatacattattaagttttacaaggatgaaaaatatattttaagtcctaattggacgaaaaggctacaaaacaagacggttgaggaaaattgaaaaccatacgtttaatttttgaagtgcatggaggcctatacaaaatcttccatgtctagtccaaaaatctagggaggtagtattagtgctagcatattcttcaaacaaatttgcgtgtgcactaaacatgcactatacgcacaaaagacgaaaacgaaataaaaca

SEQ ID NO: 139879 - DNA, 2163 bp, Glycine max
  Clone ID: PAT_MRT3847_97318C.1
ttatttttttttgataagtcccgagttaaactctactcacgtgctttaagtataataattggtggtcaaagtcaacattgtcagttccgaatgaggcacaccactagcatcaaaacatcgtctaagtcagcatgtttcatttcccccttcccgaaccagttttaaacaatttctggggctgccatagaaaactttagcggctaatctagcatctgcgtgtctgcatttcaacacaaaataacggaacccttcacagcacaatcatggatcctaaatcaaatgagcactaactccagaacatacaagcagaagacacgtggaaattggggagggggggaggggagatttctatacaatacaatgaggccattcaaaaatatacatgcaaaagccacaccaaagacactttgaaatgccttcccgacacacatctaaaccctaaaatatcttcaatacaacagtgtactgaagatgaaagatgaaaaaataagcacaagcaatcccactccatcagaagtacaaccattattttttaatgtctgaaaagaagttgggagagcaggtaatgacatctcaggtgcacagagtgacatagatgcaaatgaagatgatgaaaaaggccagggtgcagcaatgttatcactcaaatcacatgtaaagctaaagcctgatgaattgtcaaatatcacatcaccaggcaagcttcgaagtaaacagccttgttgtccataagcttgtatgctgaaatctttcaaatcaacgtcacaaagctcataaatatttgtcatcactccacctccacgtaacatagatccaaaaagtgttgcacatattatagcttgcttatttgtaattaacatttgcttttgtatcccagtaatatatgtgtttaatgaactacaacaggaagggctgggggcagctacattccaacatgcattaattacttctgttggctccttaaaagtcaaaggacaaactttgttgactttgcaagcagatagtattcggaatgcagtatttgcagcctcaaatgatagttttttggaaagatatgaataaaccacacttttacaatcgttaagatagtcagtgtgatttacttccccagccatattttcatcattgttaatcatcatttgtcttccagaaatctgtagtgctgcatccattatcgcaggttggcaaacaggcctacaacactctttaagtggatcaacagtgctgcaagcctcaagtaacttacttgtgttaactgttttttcaaaagtagaatcatccttcacaggacatgacccgcctgtaaaattagatgattttatggaacaaagtgtggggattgtactatttgcccctctactggctagaatactaatgatatcagaaaaacaatgatcagcaactgcatttggcaaaaccaaatgatcagatttcatgctgaagaaaccctggaagatgtggatcaagctactaaactgaggacaacatattacattcccaacaagggctgccaaaggtccagagcaatcagatgctgttttatctaggatacttgatatatctgagtgagaaaagtttacagggcattttccagttaaaactggttcatatctagttgggaaagtagggtacattggtggccaagactcagtgggatatgggaatttcggtaatacagcaggtgatatttctatggggtcaaagagagcagattctccagaaggaggttccttagctaactctagcagagaagaaattcttctgtggtcagcatgtatttcccgtgctgtcacatcttggaaagtaggaagccagatgaaaaatagaattagctgacagcacaaagaacccttataaaaattagcatcctgagagcagcccatgactccctagccctctggtaccatggagttttacacaggataaccaggtggttgccggtgataagccaagtggcaccacatagcaatgaagcaaacttgtaatacttcgaagcttaagatcgtgtaagagcgagaagtgaaaaaatcgaagagaggaaggaatagctgcggcaacgcaatatagatcgggttgaaaaaatgaaaccctaatcgaagaggaagagcagtgaagaggaagaacagaagaggaggacgaaaaaagaagatgaagggtggccga

SEQ ID NO: 139880 - DNA, 553 bp, Glycine max
  Clone ID: PAT_MRT3847_97319C.1
tactgagcatcgtctagctatctcgatcgaactgtccaaggatcctgtcacatattgtggctggctaagcgtagagctagagctaaggaccagggacacctgaacatagaacaaggcaggggctataggattagccgataactaataagcgatggggcccaaaggtacgcattacggcaccatggcaagtgcgggccttaagtgcgtgtgcagcaggaggtaggccactaatactgatctgttaaacttgagtcacacaatggcacgaacctccagggaatatatatatgagtaactgggcacacagggaacagccccaacagattaggttaccatttgggggacttgatatatatatattggcaacgcactggaataccacacaagaggtatatatatatggtgtgattagtgaattgatatatcggcactggataccaggaggtatataagtgattgaggatatatatatatgcacatatataattgatcaagaaggaccctgtacatggggaccccacataggatatttaagctacacacatttatatat

SEQ ID NO: 139881 - DNA, 332 bp, Glycine max
  unsure (1)..(332): unsure at all n locations
  Clone ID: PAT_MRT3847_9731C.1
cnaannncaaanggaaanngcncncncaaaacagagggcaagaggaggaagaacaagnanagaaaaaccanancnacanagnnagancncncncncgagaaaacaaacgnagaganacggaacggaggaagggcnacncggangnganannggngcccncgggannncnaacaagcanngggnaccannncnggcnanggcacaaggnncgaacncagccacacacaaccancannggcancaangcnaggggcccgagaaanngggnnaaaggcangangaaggacaangacaagaaaaacanncnggcngnncaancacnaaggaacaca

SEQ ID NO: 139882 - DNA, 173 bp, Glycine max
  Clone ID: PAT_MRT3847_97320C.1
ttcaattactttcaccactataaataatttacctgccctattattttacatataccacgactctactcagcaccacctactcctagatttacttcttaccccaatccaatacaacttcaactatctcttacgactactatacttttcatcaatttaccttcaaatattaatat

SEQ ID NO: 139883 - DNA, 340 bp, Glycine max
  Clone ID: PAT_MRT3847_97321C.1
aattgggcctctcagcaacccggtttcacccacacgcccttcatcttccactcactcctcaagtcactgtcacacaccaaccacttcactgccattcactcactcctcaaacaggccaaggccctgaactttcccatcctcccttccttgttgagctccattatagcgtcccacattgctcgcaactctgcccgcgaagcctttttgctcttcagtggtgttggctctctctgtagtgaaattggaggggctacatgtaacttcctcctggctgcccttgccttggacgggtgcttgaagagtgcccacagggtgtttgatgaaatggctgagaaggggg

SEQ ID NO: 139884 - DNA, 160 bp, Glycine max
  Clone ID: PAT_MRT3847_97322C.1
cttttcttaatttaagtggctgcaaagccccacgtgttgcctcctatcactcttttggctgcccccactttttcttgttcacctctttcgtcaaccaataattcctttggaggtttagggttttgatccttgcagctctctcttaattaaaggatatttc

SEQ ID NO: 139885 - DNA, 423 bp, Glycine max
  Clone ID: PAT_MRT3847_97323C.1
ttttttttctttttctttttttttttatttttattttctattttttttttggtggttttaaactcaaaccaaagtcccattctcccttttcggactttcccggggcaccaaacattttctctaatattgaaacaagcccaaaacaccctggaaaaatatttctctggaaaataaaatcttttttaaaggctttccttgcccaaggaacaaaagtttttggaactagttggggtgaacaaaaggggcaatccttttcctaatttcaccgggagttctccccacaattttgtccccgggagtccctccccccaataccaaaaagggggggctggcttctgttccccttctggggggaaattccttaacctcatccccatccaaagtgaaaaacaaaacttttttttaagggggggcccttttttg

SEQ ID NO: 139886 - DNA, 321 bp, Glycine max
  unsure (1)..(321): unsure at all n locations
  Clone ID: PAT_MRT3847_97324C.1
agnngcgncgngaaagaancgcagaaagaangaaggcggggcaggaannagnncccagcagcgggaagacggacagagcggcgangcccgangaaanngnngaccangngaagnnccnaaggcnccaggnnaagggcccgagcangagnagaccgggaggagcnggngcagnngcncagcnngnngcngangnnccccnnncngcagnggagggggaccaggacanagaaggggnanccaangagcaagccngggacaaggggnccaanganggcacagaacaacagggggcnaagcnaaaggaagaagannggggagcag

SEQ ID NO: 139887 - DNA, 558 bp, Glycine max
  unsure (1)..(558): unsure at all n locations
  Clone ID: PAT_MRT3847_97325C.1
cgttagcttctgatcgactgtcaggtcctgtcactaataataaatgaaggaactaatatatatggaaggagactagcttgtcggacctttaaatgctaccactgttatacaaattatatttgcggccctacaacgggtgcatgcggtaaccctagtaatagaagcattatactgttaaggagcttatttaaattaacgcgtgggtttacgtacccgtacccggacattttggtattattaaaatgtaaatataagcatccggctttttaaatatagtgtacgattatgtagcatgttaatataaaacgttagcattagccttaacccacaaggaacacccagtataacacaaccagctgctacaatagtacccagtctggagctacgcatattagtactcatcgtagtcatcgtcacagtcataatcaaatggcttatacgaccaaccatgcaaagcactgngcgctgaagaagaagaggccacggtcacagtacaaggcnaatgtacgtgtcacaccttagagagagaggcgcgcgcgcgcgcgcgccccgcagcgc

SEQ ID NO: 139888 - DNA, 234 bp, Glycine max
  Clone ID: PAT_MRT3847_97326C.1
tttttgcctttcccagcaagaagaggttcttttattcatgaaactcacgcattctgttttaaatcaacttaaactccatacagaacatatgttatgtataaaacttaataaccaacatacatcaaatactctttattaggcatgaagactggggtgatagagccagtaaagtgatcaatgctacgggaactagctggtgtgaaatgctaggacatactcctagattagggactt

SEQ ID NO: 139889 - DNA, 743 bp, Glycine max
  Clone ID: PAT_MRT3847_97327C.1
tcgccctcgcgtccgcccacgcgtccgcccacgcgtccgcccacgcgttcgaccaagcacaaactccttctagcccttctccagccggtgctgtcactcctcccccacagaactctggtgctgcatctcttggagttgttggagtatttgccaccctgctttcagttgccgaacccaggtatcaaactggttcattaatgccagggttcggttgtggaaacccatggtggaagaaatgtaccaacaagaacttaaagaagcagagagtgcagaagacagagaaaacaacaacagcaacattagtggcaaccaagcacaaaccctccttctagcccttctccagccggtgctgtcactcctcccccacagaactctggtgctgcatctcttggagttgttggagtatttgccaccctgctttcagttgccgccacttttttctattagatactccacgagattattctagtcaggagcttgcgagtcatcatcatcgctctttgattgtgtttcatgaattcagtttttttcttatttttttgaggatgacaataaagttagctttaatttaatttctcttcatcggctacagttttggttttttgttatgtttttgagtaaaaataaattggtacggtgtgaatatgttaacaagtgtatttctttgatagttaacatcgttgtattacagtgcatatatttggaattggagataaaaaatatttgtgacacctttcgcaatc

SEQ ID NO: 139890 - DNA, 342 bp, Glycine max
  Clone ID: PAT_MRT3847_97328C.1
agagtgagtgagtgagtccttaagcttctgcaacgagggagactcttttgttctgcagtgcatgcacaaggaattaaatataaaagggttttagaaaaagctgtgctattaaatgttactctatattttccgttcacggtgctgtttgaaatattaggaggcatgatattataataatattaggaggcatgttattataacatcatgatccacggtgctgtttgaaaaccttgaagtagctgctcttcattacgtatagtctttattgcattattacaagatatgaaaactgtacaaaattcttccaataatttacttcataattttaccattaaaagtgga

SEQ ID NO: 139891 - DNA, 602 bp, Glycine max
  Clone ID: PAT_MRT3847_97329C.1
tgtaccaccttctgtttgggggggggggggggggggagacataaaggatgacggaggatccgaaagccgtatagatgataaacccaaagaagagtctaagtctgcaataagcggagggaataaaaccagtcattataaagaaaaataatttaatgttaagtagtagtattatcgttactaaaagataggtaaaactgagtgaaaaagggcaccaatttatacgcctctaggacaaattagcattagacaagggagcacacaaagaggagccctattcgcttgtgttaataagttttaaaatcggctggatctggtactaaatttaactgtacaaactggggccgcacttgtaatcgaagtactcaagaagctagtggtcgttcagctagagggtgtaataacaacctccaatatatccgtacataaaacgcttggcctacaaccgactgcaaactacttggtgggtgtattactgaataatgttggactgcagctaacgccgcacaatggagtgttgaaagtgaataagagatacgtcttgaaaggtgtgaacaggtacagttactgcattggggtattaccaacgtgctagtagcagcaga

SEQ ID NO: 139892 - DNA, 404 bp, Glycine max
  Clone ID: PAT_MRT3847_9732C.1
cggctgcgagaagacgacagaaggggtgtcatattaataatgccaaagtcataagtttaatttctacatgtattattaattttaaattaatttataaaatatatttttatataccaatccatatttagctttagggaaaaatggaatttactattttactttaccggatgtactaacaattatgctgatgcccgtaacaacacagcctccttttatttgctatgccaacacattttctagcaaagcccaatacacccttccctgttgactgtagtgggccatgcgatccactaacacttaccaccaacttttctgtaagattttcactatgttccaaacatggcttatttcaaatcatatttttgacctatttttccaaactaactactatttgtaaataattt

SEQ ID NO: 139893 - DNA, 215 bp, Glycine max
  Clone ID: PAT_MRT3847_97330C.1
ccctacaaaaatacagaacggggggacatcctgtatgaacaaacttttcggcggcactccgaggattttttccccaaatcaggaaattgttttagaaaacaccgccctttaactagtctagacactctactggccactttagaccctataactcacgggggagccatacgatggggcgtgtctttaaactcaggttccgtgggggtctgaataac

SEQ ID NO: 139894 - DNA, 727 bp, Glycine max
  unsure (1)..(727): unsure at all n locations
  Clone ID: PAT_MRT3847_97331C.1
cggaattcccggctcgacccacgcgtccgctctactatctccgttgtttggagatcacgcattctgaaaatccaagaattcctagcagaccaaatgcactaacataccgtgtgccaaaccaaatgcctccactttctagctttcttaccaggaaaacattcacccagatgtagatacaactgattaatgttttgtgtaacaaaaggcactccaagccattcgaaaactgttgacattttttacattttttatttctttttctctgacgctcaagaatcctaatatttacatcagagagcactagaaacgccaccattgctagcactagaaacgccaccattgctagcaaagaacgcttgaacaattacatcaaggtaagagatgagttactcacgcttagagattagaacgaatatgtgtagagattcctagataattaattttgagttatttagggttcacgcttagagattagaatgaatatgtgtagggattcctagagaattaattttgagttatttagggttgtttctttntttcttttagattcaattatgtttttcctaaatttttcgcttgttattgtgattgcatttcactcgtacaaatttgattacacaagagtgggacanaactatgtagatattgacggagttgcaagagagaagatatgtgtccttgcgggtntaccgatatttgggtcaggtagtttaattatgcatatatc

SEQ ID NO: 139895 - DNA, 479 bp, Glycine max
  Clone ID: PAT_MRT3847_97332C.1
ccacgcgtccgaactttgcttgcgatgaaatggatatcctatataacaggaccgcttggaagttcttcgaggacctaactgccatcctaaatggcattgcttcgtggcaggagatcctgataataggactgagctcatagaatactgaccatgatgatgctatctctgttcctgaacatgaaacaaaaaccgatcgagctgcatatttggcgaggcataccactgcattgtgggatgactttggagacttccaattcttgcgcattgaaccgagaggcgtacgatttgtgtcaggagctgccacacctgtgttaggatcacgagagcctagtggagatgagtatgcctactgcaaacatgatcccatagctcagatttaccagccagcggcgtctgatatgaacaaagatcatgctgaagataacacagtgaatgtgcaacattggacctcagttccagcggactgtgccttcatacta

SEQ ID NO: 139896 - DNA, 166 bp, Glycine max
  Clone ID: PAT_MRT3847_97333C.1
aggtgcagcctatgcttacacactgggagccattactggttccatagagtctgtcatttatgtagcctttgtctacacagataccgcactagagaagccagactattatgcgacagtggatgtggatccaaacatctcaacttattcctaagtcatacataggctc

SEQ ID NO: 139897 - DNA, 452 bp, Glycine max
  Clone ID: PAT_MRT3847_97334C.1
gaaaaaaaaatgtgaacatttaaaaaatttggttgaaaaaattgaaagataaaaattttttaaaataaaaaaaagggggtgtgttttttagggggtttaaaaattaataattttaaaaaaggggggaaagtttttaagggaaggaaaagaaaggaaaaaaaaaaaggggcggaagaggaaaaaaaaaggttgattataaaagaatgaaaaagaaagttaagaaaaggtaaaaacaaaaagggggaagaggtgggggtaaacccagaaaaaatggaacgggtcgtggggggggcccacttttacatataggggatcgaattaaaagcttggggaataaaagggaaaaaactgtgtgcctgtggggaaaaagggaaccccgggaaaaaagaacccacacaaaaatagcaacacccggggggcgaattaagaggtcaaaaggcgctggggggggc

SEQ ID NO: 139898 - DNA, 134 bp, Glycine max
  Clone ID: PAT_MRT3847_97335C.1
gtgatgagatcgaggaggcattgagagcgcagatgggagtgcaaagggaatgacatttgcgagtggaggcgtaagagcacttgcagattcgccagggtgcagagagtagatacatgtcgatgctcgagagagct

SEQ ID NO: 139899 - DNA, 291 bp, Glycine max
  Clone ID: PAT_MRT3847_97336C.1
acgcgtttttactaattggtgctagcagtgagtagtctggtagtgatgaatggatgttagcaccgtatatgatggtcagggaagtctgcaacatgcgctcatgcaatggaaactgctatcaatgggtacggtggaagatccttggtctattgtgtggaaggtggatttactagaaaattgaaatatccactgctcatgtgggtatttttaatttggtcttcaacatgagatgatgtgcacttttcgtgtttgttactgtggttttgacaggaagacatgtatgtgcattgg

SEQ ID NO: 139900 - DNA, 471 bp, Glycine max
  Clone ID: PAT_MRT3847_97337C.1
acggctgcgagaagacgacagaaggggggaaggagtttgaagaaaaacaatcaattatgttttcttcttcttcttcccctccatgtcgttattgtatataattttatatgcataatcctttaggcttcatcatcaatcatatattgtctccttgagattcctggcttgttcaagagcaagccagaggtcattcattggatatcatttattttgaatgaaatattgagactactagactattttgagctatgttgtgttgtggaggtgcagaagaggattttggcattccacctggaaatcaatataatgcatcacctaaaaagggtaatgcatataatggtggaggaggaggtgacagagccaggcctaggggtaatgttgtaaaaaatggtgctccacaaaaaacattgccaattgagatacccgctatttcattggatgagttagatcgattaacaagcaaccttagta

SEQ ID NO: 139901 - DNA, 192 bp, Glycine max
  Clone ID: PAT_MRT3847_97338C.1
cccacgcgttcgtacgggtgagagaagacaacagaagggggacgaacactgcgttatcagtttcagcagcgaaaactatggttcttctacagctagacccgtatcttaacgagctcacctgtatgtttgagcagcatactaagcatggctttgtttgggttactctctaacgatcatctttgtaaatctaag

SEQ ID NO: 139902 - DNA, 1002 bp, Glycine max
  Clone ID: PAT_MRT3847_97339C.1
ggctcgagcacaagtcacattttttggcttttaaaacagagagagagagagagagagagagagattacaaagatcagaatcagacaggctagcttagctccatgtctgactcactcttaactttctattctctttcagccattcttgctcttctcccaatcttcatcttcattctcatcaaaagaaagcaaagcaaacccaggctcaaccttcccccaggtaacatgggttggccatttcttggtgaaaccattggctatttgaagccttattctgccaccacagtaggggaattcatggagcaacacatagcaaggtatggtacaatttacaagtcaaaactgtttgcggggccagcaatagtgtcagcagatgcaggactcaacaggttcattctacaaaacgaagggaaattgttcgagtgcagctatcctagaagcatcggtggaatactaggaaaatggtccatgttggtcttagttggtgacatgcatagagacatgcgggttatatcactcaactttctaagccacgccaggctcagaacacacctcttgaaagaggtggagaagcaatccctcttggttctgaactcttggagccaaaattccatattctcagcccaagatgaagctaagaagttcaccttcaatttaatggctaagcatatcatgagcatggatcctggggatatcgagacagagcaactaaagaaagagtacgtcactttcatgaaaggggtggtttccgcgccattgaatttacctggaactgcataccgaaaggcattgaagtctcggtccattatactaaagttcatagaggggaaaatggaagagagagttagaagaatccaagaggggaatgagagtttggaggaagatgatcttctaaattgggttttgaagaattcaaatctttcaaccgagcaaattcttgacttgattctcagcttgctcttcgctggccatgaaacttcgtcggtagccatagctctagcca

SEQ ID NO: 139903 - DNA, 160 bp, Glycine max
  Clone ID: PAT_MRT3847_9733C.1
gaattgggaaaagttaatgaacatggtcggttctgttataactggaggaaagggtactgcgagaagatagaagaaggttgtccacaagacaacgacctcatatgaggcaaggcttcagagcaccgtgtagagaatatgggtgaatgccatccctgctgtt

SEQ ID NO: 139904 - DNA, 690 bp, Glycine max
  Clone ID: PAT_MRT3847_97340C.1
ctcggctattgcaacaccatctctccagattcgattccatgctgccgatcgactaaatacagcatgaacttagctctttattcagtgttattttgtgttcacgcagtctttgcagcaagttctaatgggcatggacacaaatcacaagactggttaaaccatggtggagatctgttcaacagaagatatgcttacaaagagcataagatcagcccaaaaacagcaccgaacctacgtttgaagtggaaattcaatgcaggcaaagacatcagtgcaacaccagccatatatgatggtaccctttattttccaagctggaacggtaacatctatgcagttaaagaagctgatggatcgcttgtgtggaagcagaacttgcagaatctgacaggtataaatgcaactggctatgttactactgtaaattggaccgtgtcaaggtcaactcccacagtagcaggggatagactgataattggagtctacggcccttgtattcttattgctgtcaataggacaactggtgagcttgtgtggaagtttactttggataaaaaaattgcagtttccatcaccatgtctgtatcatactataacagttgggtgtgcccccctttatgtggattcccccccaaaaaaacctttgagcaatgctgcacattccgtggaagtttttgtaaacttaatgcc

SEQ ID NO: 139905 - DNA, 332 bp, Glycine max
  Clone ID: PAT_MRT3847_97341C.1
tccttgcgtgcgagaaaagaagaaggaagccccaacccgataatcatactcgtgcttgagatgatattgggtaatctcaaccttaattattcttaataaacaatcacctgcactttttttctctcctgttcatttctgaactcatacccatggatccctttgatctgatactctaagggattggttgaggctgactggacatgcgctgctactacttttaaagaatgaatatgctgcaggaagtatctaccctatcttttaagtaattatgaacttaaccaagcaaggacccctaactgatgcaaagctattaagcccaaacctggcaacta

SEQ ID NO: 139906 - DNA, 163 bp, Glycine max
  Clone ID: PAT_MRT3847_97342C.1
gaagaaggagctcgatctccttcccgccgctgcacagtctagtgtctgcctccaaggatacgttgacgaatgcaaagccgcgggttacgaacaagtcaatgtggagtataatatgacgtactcctaccatgcaatgtgtgcgtactttgataaggacaacgtt

SEQ ID NO: 139907 - DNA, 212 bp, Glycine max
  unsure (1)..(212): unsure at all n locations
  Clone ID: PAT_MRT3847_97343C.1
aacanngtcatataancccaatggctggagcccgnaacactccnnnntgttagnggcttccanatcagatgnntnancacagantacnnccacaaangattctcnatcnagaggntctgattccctcanagtgtncccncntttcaatttgatcncnnccntgatggncnctcngatnaccctgntgnngatgccacnnaagacgtantttt

SEQ ID NO: 139908 - DNA, 714 bp, Glycine max
  Clone ID: PAT_MRT3847_97344C.1
agacgacagaaggggggattcgattcgagaaattcgacgttttcgaagaattggaaactggaaacttcacttctgttcgaattcagaggttaattctcgttaattagatcaatcatgagaactcgaaatgccgattccgcttccaaatccgcaacccctaagaagacgccgccgccgccgccgaggaaatcccctgcggcaaagcgcaccaccgccaccaaaaccagagccacaaagaagaacgaggtttcgcccgcacccgattccaacccctatcaatctcctctggagcaggaatcgttaggcagtgctagcagtgcaaaatttgtgaaaaagaagactccggggagaccgagaagtaaagcaattgatactccaaattcggaagagcaatgtgaggcagtaactgatggaactctgattgaagatgatactgaggtggtagagaaagtggaagatgttggagtggttggtgcaggtagtgttgagggtgagaaggaggggggacaaggtgttgggtctgttggattatctgacgagacggaaggtaagtcgatggaagtgaatgaacctgttgttgaaaaggtttgcgaattggtggaaaagggaaatgatgtaatggaagttgaagtagctgcttcccaggatgcttctgtttctttcaagcgactggggcgacccattgtggatctcaatatatctgcggataatgaa

SEQ ID NO: 139909 - DNA, 349 bp, Glycine max
  Clone ID: PAT_MRT3847_97345C.1
cttgaacgagcagatagcgtatcatagaaaacaagtgcagcagtacaaggaagtttcgctatggagccaaacattggacaaaaccgttgggatcatggctaagcttgtttgcattgtatacgctagaatatgttctgtttttggaggctacatttctaattgcaactgctatgaaatcaatgatgttgacaacaacaacaacaattgttgttgcctcttggaacaccgcgagttgtacaagaaaaattattgtctttatgaagaatcacttcagaagcgtgtcacaagatcaggtcctattcccaaggctagtaataacaacaaaaccggtgtgatacggttctttgac

SEQ ID NO: 139910 - DNA, 164 bp, Glycine max
  Clone ID: PAT_MRT3847_97346C.1
tccacgcgtacggtcacgccatcggtccaggtgtgagattgaacctaatcggaccttaactgcagtcagggaatccttcatggcagacgagccccatatcaggtatgatagctctgaggttgaggccaagaatcgtggtgtttttaactttctgggcaggaaaa

SEQ ID NO: 139911 - DNA, 812 bp, Glycine max
  Clone ID: PAT_MRT3847_97347C.1
gcacgaggatcagaaagaagagtaatggatcacaaacactatcaatctcctttagacccatcatcatcttttccgaccactacgactaacagagaccactatctgaaacaacgaggcaagctttcacataacatctccaaacccaacaacattaagaaacccacgtttgttgtctcttcttctcaaagcctcactcacaacaacaccttcaacaagcaacacgctctccccgccgagtctcagccacaagtctacaacatcagcaaggacgatttcagggacatggtccaaaagctgaccggctcacccggtcactccccgcagcccaaaccggttgcaacctctcgcctccaccgcctgcgcccgccgccgctgccgcaggttgttagccaccgccctccgcctccgaactccggcaaagtcgccgtcgcgcctccgtcgcctctgccgccgtttcccaccgtccacgcggagtcgcccgtctccgcgtacatgcgcagctttctgcggaactccgtgccgtcttcttcttcggagtcggagtttcagttaccgttttcaccggtcacttttggatgcttcaattcgttggggggtggttctccgattcccctttcaccgactgtgccggtttcgagccctagatggagagatctttgaactagtttcgttggggtatgctttatagtacgttgtcgtgagtcatgatgttatatgtagtttaataaaaagaaaatttttcattttgatttgattagatttctaaagtaagaatagttggacgtaaaagtgttgactttttaggaatggtg

SEQ ID NO: 139912 - DNA, 436 bp, Glycine max
  Clone ID: PAT_MRT3847_97348C.1
acgacgagaccacaaactgtggaggagaacccgttgcggaagaggttgaaacgagagggaaaagacagggggaaaaggcaaacgccttcctctcactcctcagtgctaaactcaagcctgattacacacctttcttctgacacacttcatcacctgtcttgcccttggctcatatcctgcaccctctatgacgtcctcgaatatgccgccactgattccactaaaatgaaggttgtcgaacaaaatgctttccggaggcatgaaagacgtctcttgactgaatcacccaatgcaaaagaatctctagccacagctatacagaagccatttcttgccacatgaatgatacatcctaataccaccctcttcatgagacaacctatgactgcagcgcgtttcctaacacatgctccacactgtcctacagactctgatg

SEQ ID NO: 139913 - DNA, 285 bp, Glycine max
  unsure (1)..(285): unsure at all n locations
  Clone ID: PAT_MRT3847_97349C.1
ctggtatttctaaggatggacagacccgtgagcatgctcttcttgctttcaccctaggtgtgaagcagatgatctgttgctgtaacaagatggatgccactacccccaagtactactaaggctaggtatgatgaaatcgtgaaggaagtctcttcttaacttgaagaaggttggttaacaacccagaacaagattgccctttgtttcccatctnctggttttgagggtggacaacatggattgnagcaggttccaccaaaccttggactgtaacaagggggaccc

SEQ ID NO: 139914 - DNA, 480 bp, Glycine max
  Clone ID: PAT_MRT3847_9734C.1
gcagaacgagtgttgttgctgatgggcattgttgctgttgtgggcagcaattggtttgtgttgatattgatgatgtggagacggagaagtttgcagggtctgttgctgccttggcctttgaaagagaggtcaaggccaattttagtgaatttcaggcctggcttgaaaagcatgcctcttatgaagctatagtggatggagcaaatattgggctctaccaacaaaattttgccgatggtggattcaacatttctcagcttgatgatgttgtgaaagaactgtacaatcggagtgggaagaaatggccgcttgttgtgctgcacaacaagcgtctaagagggctgatggaaaatccttctagcagaagactggtggaggagtggatgaaaaatggtgtactgtatacaactccaaatggatccaatgatgattggtattggctctttgctgcagttaaacttaggtgcttgcttgtgacaa

SEQ ID NO: 139915 - DNA, 575 bp, Glycine max
  Clone ID: PAT_MRT3847_97350C.1
aaatctggttcgatgtaacaaaggttttgaagaaaagaagaaagaaagggaaattatgtaaatttataaaccaaaaaagaaagggagttgtaattggcaaactttagtccacataccttcctaaactcaaatcaaaactgtattgggcccattcaaggggaaaataaaacaagcttacatgtaaaaagcctacatattaacttcttcagcgagcctatttccaatcatcacaaggcttgcatttcccgccatttaataatctccaattgaacagttgatttcatttagctaagaattctaacgagaaagaggagcacaaagagcttgcaggatcaacaatgactgtcaaagtttacattgtgtactactcaatgcttgggcacgtggaaagattagctcaagaaataaagacaggagccgattctgtaccaggggttgagtcccaactatggcaggtacccgagacactatcaactgaggagcttgaggcattgagagcaccacccaagagtgatgtaccaatcatcaccagaaatgagctccgtgatgctgatggttttgtctttggcttccca

SEQ ID NO: 139916 - DNA, 404 bp, Glycine max
  unsure (1)..(404): unsure at all n locations
  Clone ID: PAT_MRT3847_97351C.1
agcgacgcgtccgtagcgagaagaccgcagaagggggagagcaagagagacatgcgagttcgactctcgttctatccatccatgttcagcagtccgtggccatgttggaactgttgatcgcagtaccgcgcaactacgagatggttgaaagtagttgcgttgactgtattgagtgagagtgggtgtagtgttccgtgtaccgcgcaganccttaataggttgtgtgggattctgtaaggaactactccgtgcttcagttggtcaaagtaaatgaaaggaaacgtgtgatatcaggcaggttgtgagataagagatcagtagcagaaatctgaagaagagagaggtaggttttttacgtggagaagggtagtggactcttgtgctagagttgcttttttttgggg

SEQ ID NO: 139917 - DNA, 538 bp, Glycine max
  Clone ID: PAT_MRT3847_97353C.1
atgcgttgactagcacgcaggttcctccagaggctgtgctcaacaaaataatgatggcacaattatcatttcttgccgtttttttatttgtattttttgacactggggttttttcgaagattgttggcacagaagtggaggttgaagatgttgagaccacggaaattcgcatgccgggtgtctcagttgaacataatgaaacttatctttgtacatcatatccattgaacatgctcgaaaccaactatattgttggatttgatccgatcgctgacatgcatgaagttcaccacattcttcttttcggttgcgaagagccaggcagtgaagatccagtttgggattgtggcgaaatgagtattgcaagaacacagtatcgtcgtgccccaacttgcgcaacacaacctcaaattttgtacgcatggggcaaaggtgcacctaaacttgagttgccaaaaggagttggcttcccgtcggtgggaaactcaaagtcgctttgtgtctacaagccatacatgcataaactgataagagacac

SEQ ID NO: 139918 - DNA, 151 bp, Glycine max
  unsure (1)..(151): unsure at all n locations
  Clone ID: PAT_MRT3847_97354C.1
aagaaaacggttagagttccggcgattagttcgaaggtctcctntncntcnccngatgagtactacgtgggggatgtacgtacagatgcctattcaatttatcaccttacccgaggtgagtggtttgtggctcgcgatatggtgttggctt

SEQ ID NO: 139919 - DNA, 483 bp, Glycine max
  Clone ID: PAT_MRT3847_97355C.1
tacggctgcgagaagacgacagaaggggataatataaatgaacttatattgtaatgaagtgatacttgatgggagtgagagtgttaggattttttaatataagaaggctaaaggaggatttctaattagatcaagaagcttataacctcaaaaaggtacatgaaatagcattttaaacaacattataagctattgaaatgagcttctttaccaaacaaatctattttggtctaacaaacttctaagttagtcagatacactaaaagctagcttatttgccttgccaaacacactcattttcttaagaaatttcaaccgtttgtttcaaaataatatttcagtttttataacttgtagttgtatatcatcactccacaggctatatcagaagagacaatcaggaaattaaaagaagagaatgatatacatattcagaaagaggtaatattttatctgagacgtatttgtcctttgatttattat

SEQ ID NO: 139920 - DNA, 1058 bp, Glycine max
  unsure (1)..(1058): unsure at all n locations
  Clone ID: PAT_MRT3847_97356C.1
ttttcgacctttcttttgagttaggggagtgatcactgatgctcgggagtgatcactgatcctcaccttttaccacacacctacttccaaacccacatgagggataacatgaccatgactgccactactgatcaatggatgcagttctatcaacaacctctaatggatagccatggccatgatcatgatcatgatcatgatcatcatgctttggcaccaaacaccacagaaggcttctctagttctcccactcctaccatgccttcatcagagagcaatagcatcttgagccaattgagtccaaagggtaatgtatcaaaaccaataagaagaaggtctagagcctctaagagaaccccaactacacttctcaatgcagaccccaccaattttagagcattagtacaacaattcacagggtgtcctcgcacaaccatgtcaacactaggggtccataagggccctattaccttgaattttcaacaaagaaatagtagtactgaacaaaaagttcatcaccacaacacaagtagtacggtagtgctaccaagttagtggcagaagctacaacaacacatcaagcaccttccccgttccccaagtgcctgcaccgtttcctaattggcagaagcaagaagaacaacagcaacaattgcctcagcagagtggttactcttttgattatgtaaagaacaatggttttcttccaagttcgggtaactcaataaggcctaccactattagcatggatcatgtctctgatggtttgctcttagataatgactttaacttggctgatctaactgttaatggtttccccaatgatgctctttatgagagtgaattataggtatatatatattttatgtgatgaaaatatttagttataaaagggttcaattatattgaatcctgttcatatcagaatacagttaaagtggactttagttatatattcagttcatatgtatgnnngcttttataaaaacaataattcatatataaagcctttatgcattnnnttccaaatannnnnagttcagtttagtttcttctct

SEQ ID NO: 139921 - DNA, 531 bp, Glycine max
  Clone ID: PAT_MRT3847_97357C.1
atcgcctacgcgtccgagagttagggagtgatcactgatcctcaccttttaccacacctacttccaaacccacatgagggatatgaccatggctgccattactgatcaatggatgcagttctatcaacaacctctaatggatagccatggccatgatcatcatgctttggcaccaatttccacagaattaggcttctctgatgcaaccgtgactacgacaactagttctcccacccccaccatgccatcatcagagagcaatagcatcttgagccaattgagtccaaagggtaatgtgtccaaaccaataagaagaaggtctagagcctctaagaaaaccccaaccacactcctcaatgccaacaccaccaattttagagcattagtacaacaattcacagggtgtcatagcacaaccatgccaacactaggggtccaaaaagggcctattaccttggatttcctacaaggaaataggagtggaccaaaggttcaccacaacacaagtaggtgggtagtgctaccatttag

SEQ ID NO: 139922 - DNA, 523 bp, Glycine max
  Clone ID: PAT_MRT3847_97358C.1
gcagagatctgataatgatacttattttgtggatactcatagtttgctatagattatagttatattcttagagcccccatttattgtttattgaatcaagtcttgctaggaaggttttgttatctggccctttattccgctggagctgtagcagaatacaaactgcatatttatgtcttgtttatgttttaaacttgattggagggaatatgtgctgttaacattattaagaagtggtatggtgatactgtaattgttaggagttaggggagagggaagagaaaaaataacagttaagagtgattagttaagtaaataggggaatcaaagagagaggcttaattcagtcttggatcatttgagaattgagcatttgctctttgtgaagggttctaagcatactaaaagtacctgactgatggtatcagttccaaagctttgtgactgtttcaacattcacttttagatgcatggtgtaaacctatatgataggactatgactatcaaactcatttggcgtgtg

SEQ ID NO: 139923 - DNA, 168 bp, Glycine max
  unsure (1)..(168): unsure at all n locations
  Clone ID: PAT_MRT3847_97359C.1
gtctcatgcatcgtacgtaagctcggaattcggctcgagcanaaannaggnataactagaganagagantcatgnatanccntanacaaacacttgggagtttcgnagtggtannantactcntttgctgnggtnncnctgctgtacaactggtccanctactttnnc

SEQ ID NO: 139924 - DNA, 561 bp, Glycine max
  Clone ID: PAT_MRT3847_9735C.1
gagactattggtttacgagttcatgagcaatggtactcttgcagacgtcctatttggacaatccaaagcacccatctggaatacaagggttggacttgctttggggattgcaagaggattgttgtacttacacgaagagtgtgactctgccatcattcattgcgatataaaacctcaaaatatactcatagatgagcatttcaatgcaaagatatccgactttgggttggccaagttgttgttgtttgaccaaagtagaacgaatacgatgatccgaggaactcgaggatatgtggctcctgaatggttcaagaatgttgctgtgacggttaaagtggatgtttacagctttggggtgatgttgttggaaaatatttgctgcagaagaagtgtgatgaccatggaacccgaggaagaagaaaaggcaatattgacagattgggcttatgattgttgtgtggaagggaggttaccatgctttggtggagaacgatagggaagcattgtctgacattggcaggttacaaaggtgggtaaagatagcaatttggtgcattcaag

SEQ ID NO: 139925 - DNA, 517 bp, Glycine max
  Clone ID: PAT_MRT3847_97360C.1
gggccaaaaaaaattttttggaaaaaattttcttttggggggggcgggaaccccaaaaaaaccaccccatgaaatgcctgccccaaaaaaccctaccccctgctttacttgagccattaaatcaaagcccccccaaaaaaaatttcccacaaaacccaaggggcccccaatagggaaccctaaacgggatacctaaggccgcaagcaaattattacaacccccaaacccacctcaaaaaaaaaaccaaccccccggggggcccaaaaggaaggaaaaaagggcccaccccggggggagcaaaacttgcaaggccaacccaaagacccctaccctgcaaaaaccttttcaaaacacccataacccacccaaaggctgccctcccttgcaggggcgggttaacaaaacggcaacccctggccctgaagcccctaaaaggggaaccaaccttggcccgggggaacctcaacccctgagcagggctaacccccacaggcctattaggggccttaaaacccc

SEQ ID NO: 139926 - DNA, 320 bp, Glycine max
  Clone ID: PAT_MRT3847_97361C.1
aaaagacaaaacgggaagactgccttttttttaaggggattgaaggggccccccccccccaaatttaaacataggctcgctgggaggggccatggcccattctttttattttcatccaaaatttatttattgggtattatttcaaaagagggccttatcctcacaccattaggcttggaatttatgcgactttaacacggggggggccttgttgagactcagggttgaccaaaggcccccaatttccttatttcttaaactcaaacacttgactttgttaaaggttgtaaaaatgggcaaaaacctttgggggaattgcc

SEQ ID NO: 139927 - DNA, 498 bp, Glycine max
  Clone ID: PAT_MRT3847_97362C.1
ggtaaaatctttgactctaataagtacaattattgaatagggttttggaacagaaatgagaatagggtaaatgaatatatattaggaaaaaaaagttaaatacatttttagtcctttaagctatgtttgagattaaaaatctattatatttgtagagattaaaaatatttaatattttaaaatattattaagataaatatattgtcaatttacatgtaattttttttacaatatcaattaattataagtcatacaaattgatataaattaaagtaattattataaaaatgagcaaacttttatcattcagcgcaagaatttgtgattgattagacaataattgtgcattctaattataattaatagtttttttttataatttttatcttttaataattgagtataattaacatgatatgggagttttaaaaagaatagttaaagggtaaagtaaggaaataattaaaagataaagtagtgaatagtttcgaaagtagt

SEQ ID NO: 139928 - DNA, 475 bp, Glycine max
  Clone ID: PAT_MRT3847_97363C.1
ataaaagcagagaatggcagaatttttaggacagttgcttgggcagctccttcagtcaggtgtgggagaagaacctatggaggcaacacatccccgacactctccgaaccccggtgctgttgctcatcctcgccacagtcataaggagctgccaagagcctcgtttaacaacacaggcacacaaaacattagaggtcttataaacaacaccggttgtaccaagggtaatggtaatggatccatcgtctttggtggctttgactcatccaacaagtcttgttactaattaatctcttgcgcaacgcaatgatatatatattatcttctatataataaataccttgtaccatcactgaaactgatcatgtatatctctaatattaatttccggtaaaataatggggtttttatacctcctctttataaatatagatgtctatttcaaaatttgtgtcaaaaaaaaaaaaaaaaaaaa

SEQ ID NO: 139929 - DNA, 180 bp, Glycine max
  Clone ID: PAT_MRT3847_97364C.1
tattgtgccacatttgccaccttatttctcctttcttcactagctgacataccagcatttcccaacagacgtacgtgtctaggattctgaatgtaacacaactgaacggatttgtgacgacagcggtgaagaaccagattgttgcatgtgcatctccatgatcggctcgaggattcagga

SEQ ID NO: 139930 - DNA, 662 bp, Glycine max
  unsure (1)..(662): unsure at all n locations
  Clone ID: PAT_MRT3847_97365C.1
gccacccccacccccaccacntacttgtcctaatttggaaatttgcttcaatgtgcggttatcgattccattacctgggaatattagtggttgttgtaacctcttgacacctatttctaacaataatgcctctaggtgcctttgcaccactgggagggcccaattccctagagcaatagaatctgtcttaactagtactatgaggttcatgttagtcagttgtggatactctggggctagcaactatagttgcaattaagaacaaaatatgcatgacaatcgtaatcatattctattgtgttatttcgcatcatggtgtttgtttgtgtgtgtttaaagttaaggatcttttcatttgtgcccgctatatacatgtgtgtgttttcatacatattagtggacactatgatattaccaataaaggtccatacatagtcctatacaatcacaaatacaattaattatgttgtttttatgttgtggagggggattcttatttcctcctcattagctttgtttatcatcttttgttagtgaaagttgttaaataaatgtcctttgttcaaaaaaaaaaaaaaaaaaaaaaaaaaaaaaaaaaaaaaaaaaaaaaaaaaaatttataaaaaaggaaaaaaaaaaaaaaaaatttaaaaaaacaaaaa

SEQ ID NO: 139931 - DNA, 162 bp, Glycine max
  Clone ID: PAT_MRT3847_97366C.1
ctctttttttttttttttaaaatacactacggataaaaccggaatcccaagtgacagcttgggcctgaaccttggacaaaggatattctccctgtgggtgtgtcatgattgtggaaaattaaatcaggaaccccttggttggggtttaagtcccagaaaaac

SEQ ID NO: 139932 - DNA, 267 bp, Glycine max
  Clone ID: PAT_MRT3847_97367C.1
cccacgcgtccggacagtatatagtcttcactgagcacacatctaaatctggctgtctcggtggaagtggccaagcaagatgagaaacataagcttcatgtcccttatcgtgaccgtgaccttcatcgcaccatccaattatacacaccacgctgacgaatgaagcctttcgatggtactataattccaccagcagaaatatgctaatgctttactttgatttggcccttaataataccttttagctgtggaattaacataatatta

SEQ ID NO: 139933 - DNA, 307 bp, Glycine max
  Clone ID: PAT_MRT3847_97368C.1
ggtaatggggatagagcatgactctgggaaaccaccacgatcttttgcctggtctcgtacttatactcagactcgacacctcagtcatttcattctcgcatcatggaccatatgcatgggatggggaggccacatattaattcactactgaccaccctgtgcaaaactacaaaggttgatccaatgtcgaaaactacttacgcatcttggatacatccccaatgcaccacacttagacgacaacttagatgacaccctcgtaactgccatcgaagcctaccaagcgaattacaacatcgacgtctcc

SEQ ID NO: 139934 - DNA, 287 bp, Glycine max
  Clone ID: PAT_MRT3847_97369C.1
ggagtgaggagttttattctctacctttcaatctaaacaagttcttcccctctgtgtgattggattggaccatgctgctacaaagttttatatggtgaggtaaaaaacaatatgcatacttcaatgactcattgtgggtattacatgtcatctgtaactaatttagaaatcttcaatttcttcattcttaactataaccaatgtagcggcaacatgaacatctttttttcccggcggcttctttcttgcgaagctaatagcctaatatagttagttccatatcaaaa

SEQ ID NO: 139935 - DNA, 220 bp, Glycine max
  unsure (1)..(220): unsure at all n locations
  Clone ID: PAT_MRT3847_9736C.1
agaagtacatgtntaggaattgtttcacagcgttttggggaaattttgtttcacggctaagctcgttcttgttgtgttcttggcatctgccctcatgccttctattgattttaaccccattaatttgggtgggcacatagaactgttgcaccttgaatgggattcgataaagattttttacaggaaagatgggctacatacattgcggtgaagtgtttca

SEQ ID NO: 139936 - DNA, 380 bp, Glycine max
  Clone ID: PAT_MRT3847_97370C.1
aaccggctctatgggaggagatactccttattattgaacgggctgacaggggccataacaccacagccgtggtctcgtatacatgctctagctgtatattccctcactcatagctttattggcacatctttctcactggaacttatctctacgatgagactaacccattgaagaactgctcattttacatggcatcaatgctagtatgctactacgttacttttactatgcccatgaagccaatcaaaagcatgctctcgctttgacttctgagtacgtaggcccccccattgtaacatgttcttttattaaacctatcaaggcatccggatgggagctacatagagactccgcttcagcgctggttctcaacctagagg

SEQ ID NO: 139937 - DNA, 295 bp, Glycine max
  Clone ID: PAT_MRT3847_97371C.1
gattctagtgtgttaaggacacaaagagggtctggtacctataactcgggagctcatggataatctaaacattactatacgactgaagatgaacaactacggaggaacccgtgcacgagtcggcatttaatcagcggaaacgagacactgaaaacccccgacatctctgtaaaaaagatactctctgataatgaccagcaaaaacattataaggtgtgctccacctgcaacagtgtaggttctgacgtgtctaaagagaagaacataactgatcgtgttctttatgtttgtaccc

SEQ ID NO: 139938 - DNA, 253 bp, Glycine max
  Clone ID: PAT_MRT3847_97373C.1
gaaaacccggcgcgagccacgcgtacacatttcttctcattacatacacaaaacccattttactccttctttcacaaaaaaacaatatccgcgtgctatttaccagactacgagcatcatttataaccatatctttctctaccaaattgcctttgtccttttattttcatccctttttatccatacatctttagctcacatagtttgtgacgaccctccaaaagaaatatgttgctttctcattatcttcatc

SEQ ID NO: 139939 - DNA, 492 bp, Glycine max
  unsure (1)..(492): unsure at all n locations
  Clone ID: PAT_MRT3847_97374C.1
tttacgcgttcggtttgaggcaatgcaagagacacaaattgttgtgggagtggcctccgtgtgctcccttttggccattgtggccacgttggtcgttgtgccgtcattgtactcgcagatcaacgaaatcagtctgaaggtgcacgacggagtgcaggcattccgcgtgaacaccgactcggcatggaacgaactgatggaagtacaaattacggtcactcctccggcaaaaccccgcgagaatcctttcgtctccatcttccgctccaagcggcagctgcctggacattgtcaatgtgccggcgtccaacagccccaatgtccgcctggcccaccgggacccgcgggggcacccggacagcccggataccctggacaagccggagagccaggacagccgggaatgcctggacagcccggagcgccatgcccggatgttcctcacgtctgccagcattgcccagctgggccgcctggaaagcnccgagatca

SEQ ID NO: 139940 - DNA, 463 bp, Glycine max
  Clone ID: PAT_MRT3847_97375C.1
gaaagggtacttgaaggatgttggtgctgttatagagctatatagggcttcacaagccattatacatcccgatgaatcaattttggtgagacaaagtttgtggacaaaacatcttctgaagcaggaatcctccccttacagattatatgctgataaacttcgtagttatgttgacctagagatcaaggatgttcttaattttccttatcatgcaaatttggagcgattgttaaacaggagatcaatggagcattacaacacagtagaaacaagaattttaaaagcatcatatagatcttgcaatcttgcaaaccaagaaattctaaagctagcagtagaagacttcaatatctgccaagcgatacacattgaagagttgaaacagctttcaaggtgggttggtgagagaagactagacacacttaaattttgaaggcagaaactggcttattgttacttctcc

SEQ ID NO: 139941 - DNA, 377 bp, Glycine max
  Clone ID: PAT_MRT3847_97376C.1
cggcattcccttttttacccacgcgtccggaagatgatgacgaccatggagaagtctcacatctggtgtgttgaatagcgttggcagggggtgcgtccgctctgctgctccaatcggcctcagcagacgacgtcgttgcgctctctgaagataacttcgagaaggaagttggtcaggacagaggagctctcgctgagatctatgctccttggtgtggacactgcaaaaagcttgctccagaatatgaaaagcttggtggcagctacaacaaagccaaatctgctctaattggcaaggttgactgcgacgagcatcagacgttgtgccgcaagtctggagtctctgggtacccaacaattcagtggtatccaaaagga

SEQ ID NO: 139942 - DNA, 371 bp, Glycine max
  Clone ID: PAT_MRT3847_97377C.1
ccacgcgtccggtttatctgagtgctgaagataatcttagctttagatattaggttgagaaactctttgcccacactaaaacattcgagtatcacatgtggctatggcatggcttataactgtccgacactgacataatttattattaactgtgttatctagcttgttctttcttagagacccattgttgcttacgcacgtgataaatgtgagatctagaaaaagtaacacctttgattctcttaacttgtacatgttgaacctgataccttaatttacagataatgtgaactcatactacttctaaggtggtgaatggcttgaatggcagagtatctcaaaaacgtgctaacttggtgagtatgtgatca

SEQ ID NO: 139943 - DNA, 330 bp, Glycine max
  Clone ID: PAT_MRT3847_97378C.1
gactgcgaaccagtaaggactggcatggggacttttaaccgccgatctcctttgttttgcatcttctcatgtaaacagttaagaaacacacatcacggtggataatacttatgggtataaaatcccaacttataacattatgagtctgtagatttctgatcattattaatatataactttccattaagttttaagcttttttgagtttttatacggacaatttgcttttatgtgtaatttcaaaagtctccataaaattcagttgttctttgttttgaaaatactaaaaaacacatgtgatcagggcctactgatgcatatgagcatgat

SEQ ID NO: 139944 - DNA, 109 bp, Glycine max
  Clone ID: PAT_MRT3847_97379C.1
gtcaaaactaatgtacacttaccacttgctatttgctaagtacatattctctttgcatgcctaggtttgcgggctagcaggtaatacagctgacatggggatagaccaa

SEQ ID NO: 139945 - DNA, 720 bp, Glycine max
  Clone ID: PAT_MRT3847_9737C.1
aattattaattatactagtataaaactgaattcataaaaatgttctgaactcaaaattgaataaacaatagttaatacatatggaaaacaaagagtcctaactcaggacatgtagaacaactatcttaacaatgaaggattggctttgcaaaaatcaagagtacaacttagatgataccaatcttgttagctacatccaaggcatcatagtctggagtcaacctaacataggctttctttgttccatcaggcctgattaaagtattcactttcttcgcctgaatgtcatacatcttcttcacagcatctttaatcttctttttgtcagcacggaggtcaacaataaaaaccagtgtgttgttatcctcaattttcttcattgcagactcagtagttagaggaaatttaagtatctggtaatggtccaacttgtttctgggtggagcactaatacgagggtacttagggttcctttctttcttcaatgtccttggcctgtgaaatgtaacagatgtcctgatctttttagctttcttcttaaacacttggccacctgatttgacagcctttgctgtcttcaaagcctgagctttgggatcagcctttttggcattgtccgccttagcaggagccattgtaatcactcaccggcaattcttacaacctccttacaaaacggatggctgctgcagaactaggctcgagccgattcggctcgag

SEQ ID NO: 139946 - DNA, 306 bp, Glycine max
  Clone ID: PAT_MRT3847_97380C.1
gccacgcgtacgaaattaggtcattctctttgcacagttgcatacctctcctttcaagatgcagagctttgtcaagaccctggccggacagaccatcacccttgatgtggaaagctctgacaccatcgacaacgtcaaggccaacatccaggacaaggaaggaattccaccggatcagcaacgtctcatcttcgccggaaagcacctcgaggactgccgtaccctcgacgactacatcatccagacggagtcaacccttcaccttgtacttcgtatccgtggtggcatgcagatcttcgtcaagac

SEQ ID NO: 139947 - DNA, 441 bp, Glycine max
  Clone ID: PAT_MRT3847_97381C.1
agacgacagaagggctatatatgggggaaccatatattatatatagcataaaccctaggaagttggaaccatacttatataacaagcagataacgaatttcttcttttataacaccaaaaaaaagtgtttttgaaagaaccataagatttgtaacattaagaaacaaatgacaaggaatctttataattagtacgaatgttggatgaagccttaagagctagctgttaaaaggttggcagggggagagaaccaagccacttaagtacttcaccgaatatctcatactacttgaggtgggacttaggtacctcataatatctgagtccctatgagaatattcctctcttttgacttatgagctatgatgaaaacaagagaaattgaagcatgacattaagcctgaaatttgaattctagccattcaagatgattcaagttac

SEQ ID NO: 139948 - DNA, 417 bp, Glycine max
  Clone ID: PAT_MRT3847_97382C.1
tatatattattaaaaaaaaaaaataccaaaataaagcaaggctttaaaaatactggttcgctctttttcaaacattcgttcttctttttggtgctccaagttcatcttgttttatctgctccacttggttgtgcctggtgttgctgctctgatggctttctgtcgcgtcttttcctatggtttattttcttcaccactctccttcgttagctttgtttttatataatcgctcctcccgccctgctcttaattaagtccacctgctttgcgtgtcggcccttcccgtcttatcttcatatggttgtctttttttttctccggtattctctttaatttgctacgctctcgcctcccctatttttggttccttttttttttttggtgcttccgtccttctttttttcccattaatttttt

SEQ ID NO: 139949 - DNA, 391 bp, Glycine max
  Clone ID: PAT_MRT3847_97383C.1
tttttttttttgacacaagtgagcttcgcccacacgcatgtgtatagaggggggattaaataatacaaagtcttcacaaaacatccatttgacaattctacatagcttggcaacaaagatccaaaagaaaaaatctaccactagcaaaggcaaactacacgtgatgcctctttgttgacaagctatcatgcgtgtagcttagaaaactataccaggaattatttaacagattcactcttgtgggtgagctatatcatcaacagatttcaaaaaatgggttcaacattaacaatataaggcaacactacaagaatttctatactttcctcaacgaaaggttagaactcaaaaaaattatgtgagcgagctcttaccagtacttgccggcagt

SEQ ID NO: 139950 - DNA, 400 bp, Glycine max
  Clone ID: PAT_MRT3847_97384C.1
aaggcaattatgagcgtcttatttaggggctatagatcaatagacaggtggtccattttaacttttaattatatcctttaaacacatgttcataatcaaaggaagaggagaagtttattcaaacggaattatatttttattttctagccttgcttaaattgctggagtattccttttactttaacactactacatgattataagcagcagatgccatcaaaataactttttgccaaaaacctgccggctgccaaatttatgggtgtgcctatcatcaataagtagaacatccaacctgccggcacaaacattagatatctgggcggattacccaattgcgtctcctaaggaaatgtgcggattatctttcattggcaaacataatatcactggcatgtcc

SEQ ID NO: 139951 - DNA, 502 bp, Glycine max
  Clone ID: PAT_MRT3847_97385C.1
ccacgcgtccggtctccgagggaagaaaggtccacacaggacactcctccttcgtctttctccttcctcgccgctctctgctgcattcgcgaacacgcatcgaccctacgactacgagtagcgagagaggattgatggcggcgcagctgcggtacatgatgagccattattttggtaccccacctagcaaggaggtgatccaagatctgtactacgccttgaggacaaagggaggtttgacccccaaggaggaggagacgctcctggcttgcaatttacttcctggtgtttatttcatcgtgggttcagtactgggcactttcgcgatgttgttgggttcccacaaaggactcaaattgcttgggcgtccacctaattctccattaagatctttgactgtttatggctacggttttattgtcggaaaggcctgtgctaatgaaacctggcatcaattgcctgaactgcttttagacagggaagaaggacgcatgaagacaga

SEQ ID NO: 139952 - DNA, 652 bp, Glycine max
  Clone ID: PAT_MRT3847_97386C.1
tttggttagtttcttactctcaattatattgatattctcaaattcttagatccactactagaaactttaatgacataattgagagacgaacaatatttcatccttatgcccgattgagtaaatttagagcatgagcatatataaggatgaaaaaaccagggtgatgatgatggcacctcgttaatatatatataacatcaaccataatattacactgatagtgattaatacaactaggtatcctttcaacgttcaaggatttgcattagcggacatttgagatttacgaaattgcttctgttaggatagacattccgcaaaccccttgaaggcttcttcgttggtttcataagatttaacaggttcataaacgcccgtcttaaagttaacctttgaaaccggcttctttaataatgactccccaactttgacgagatcattcaaattcgtctgcgtagccatgtcaacagaagacatgtccccaattaatgtatcgacctggattcggaggtagttatgctcagaattgagtgcacgaacaagggaagagatatgaaagtcagccctgtcagcactggcttgactaaatgcatcaatgcaaggggtgcccccattggctgtggttacccaactcaagataccccattgagct

SEQ ID NO: 139953 - DNA, 1064 bp, Glycine max
  Clone ID: PAT_MRT3847_97387C.1
ttttaattataaaattctttcaattaattaacattttttctaagaaaaatagataatttaattaattatattaaatttatcatgtgtattatcatttcaacattttccttttcttatcactttatttatttaattattttttattatatttaaagaaaaaataattaatatatctaaaacttataaaaagaaacctgcatgaatataaatttttttacataatcattctatcacaatctataactcataaccataatgtataataagtttgttaatttttaaaatagttattttaaaataattcaaacaatgatttattattaaataagagtataaaattattatttaatgcataaaccttaaactcaaataataattgtcatatttagaaataaatccttatattaaattcattcaaattttgtaggacgatacattaattggggacatgtcttctgttgacatggctacggagaagaatttgaatgatctcgtcaaagttggggagtcattattaaagaagccggtttcaaaggttaacttgaagacgggcgtttatgaacctgttaaatcttatgaaacaaacgaagaagccttgaaggggtatattaaaatcccatatacgtatatatattgccaaataattattaattaatataagaaatgaacatatatcattgattaattcatcatactcgtggtaattacgttgataatattgttatagtatatacttatagtatttatacaaacaatttaatttttattatacaaaatccatacaaatagggaaaagtgttaacgattattttttcgagatttatttttgatgtgccttattttaagtcacagtttcacgattgactataatttgtttcaggtttgcggaacgactatccaaacagaagcaatttcgtaaatctcaaatgtccgctaaatgcaaatccttgaacgttgaaaggataactagttgtattaatcactatcagtgtaatattatggttgatgttatatatatattaacgaggtgccatcatcatcaccctggttttttcatccttata

SEQ ID NO: 139954 - DNA, 348 bp, Glycine max
  Clone ID: PAT_MRT3847_97388C.1
ggggggtcccaacaggttaattttttaaatccacggtctttcaaatattggccggctctaacaaaaaaaatggtgcgtccccttttttttgcaccacggggcatgattctattgtgagagaacaacatttggggtttaaataaaaggccccatttaccctttcttattaaaaaatttacaaattggcaaaattttttttcagcggcaaaattcttccatccaaaatgggtcagggttccaatcaacaaaccccaaatgggccaaacagaaattcccaggggaacataatctgatcccctgccttaaatgacttgcaaggaatttcctcccttatgggggccctctttt

SEQ ID NO: 139955 - DNA, 686 bp, Glycine max
  Clone ID: PAT_MRT3847_97389C.1
ttcagatcacctctctaagccttgagttgttcatttgctttgtaacattctggatggtatcaaaaaggcaatctggtcagaggcacgaaggcagtggcaaagttccaattcaggagcaaaaacaaacatcaatcagtggccttagaaatgtgatcaacgcgctatggatgagtgaccactctgcctatttggaaaaatttctgcgaagagtggtaaacattctttacttattgtaccctccattatatgagtatatttattaaaactttgggtctcgggatgtagatgtttggaaatattccaaagaagtcatggttagtaatcactgaacatgccaaagcctgcgtgatagatgattaccagctttacagctatcattcacaagaactgcaaataggcttgctattcaattccatctacatccttgtgggagtgacatttgattggcaaaattattactcaccagatactctcaccccaagagaaaagcatttggtggaaatagtgaagcagcaagcttataaaaacgtcaacaatttggaattgattaatgacactaaattgaaactatttaaatctagctgcatgtctaaaagcaagagaatctgatcctccagatcaagggctgcaccatattaacatccaactgtacaaggtatatttaaagatcaatcagtaacattccc

SEQ ID NO: 139956 - DNA, 671 bp, Glycine max
  Clone ID: PAT_MRT3847_9738C.1
tgcatgcctgcagattatatgaatttgttagaatacaagagccttgttactgtaaatccacacatttttgtgaaccagcacccaccaccacagcagggtgatcgcttgtgctgactgcatcaacattcttttttgacactttgtacattgacatgctccaattcaccacactcattggcttcaatatcaagatcattgactctttggaacctgtgtggagaaagggacacctcatccagaggcctctaggcatcgtcttaagacgcctaatcatcctcctttctactatttaaatccatgtggccactaatttaccacacaccttgatggactcgggtgcgcagaagcttagcgttcacttatccaggagctcgtttctgtgcgtaacactgggcatctatgctgtggaatacccccacacgactaatgatattggattatgcgaattcatttacttcccagaattaataacttagttacctgtaggtaacacattcactcgctttccacagtccgagctgataacatcgtaagcgttgtcgttgtatctgaagacatatacatgcatctgagacgactcttgatagatcttggagacttttgccgtcctcaaagaccaagtctctaaccgtgtacttcgacagttcagatatctgcacgccaccatggac

SEQ ID NO: 139957 - DNA, 276 bp, Glycine max
  Clone ID: PAT_MRT3847_97390C.1
tctttctgcatcttttattttaaatttcttatctctttcttgtaaattggatttgctttaatctaaatataacaaagttctcgtaaaaaaaaaaaaaaaaaaaaaaaaaaaaaaaaaaaaaaaaaaaaaaaaaaaaaaaaaaaaaaaaaaaaaaaacaaaaagcaaacaaacaacaaaaacacaatcttaatcgtcacacaaagaaaaaattaaacggcttcagtcgggtaacctacaacctcaacaacgccctgtggttacccacctcagaaact

SEQ ID NO: 139958 - DNA, 480 bp, Glycine max
  Clone ID: PAT_MRT3847_97391C.1
tcgcgatctagaactggacgcatgggtggacccaccagggatttaccgaccgctgccggcgggccaactatctttactttgagtaggattagtgctagctggaatcatggacgtacatggttgctgcctgaaagaaatagtaattcactatcactcccaacatgacgagcgggccgcataaataaaggagaaagccgggggtactgagtgagctaactaacataaattaattgggtctcactgactgcttgttttccagtaaacaaaccgggccagccgctttaattaatgagccaaccaacgcgcagagaaaggttgtttattgatcgccagcatggtttttttttttttcaaccagacagacagcaaataattgatttccatcaactgcctgtcctagagaagaagcaagcagcccaccctggttggcctgaccaagcgagaaaaatgcttgatggtgggtgactaacggatataaca

SEQ ID NO: 139959 - DNA, 452 bp, Glycine max
  Clone ID: PAT_MRT3847_97392C.1
gggagtctggctatctaacagtggaattttttcggaagatgcatcttgaaccggaaaagaacgcagatcaaaagaaccccaatcggagtaatcctaatccacctgtagacagttacacagataatcacctcagtaaaattggatcaaatgttaatggttatatcaacatggttttggatacactcaaaaattcaataccaaaagccgtggttcattgtcaagttagagaggcaaagagatcattgcttaaccatttttatgttcaagttgggaagagagagaaggatcaattgggggctttgttggatgaagaccctgcacttatggaaaagagagcacaactagctaaaaggcttgaattgtacaagcaagctatggatgatattaactctgtggcttggaataaataatgaatatatatcccattcattacaacggatgctataggttca

SEQ ID NO: 139960 - DNA, 397 bp, Glycine max
  unsure (1)..(397): unsure at all n locations
  Clone ID: PAT_MRT3847_97393C.1
acccgacgaaagcttgactcaaacacgaattcccaacatctttctgtgcataacggcagagctcctgcacaaggcacacgtggaggagacctatgtcatctcgttggactaacacaaagaacacatctttgtactgccctctgatagtgccgttatgattacggaagggcctaatcttgtcaagttggacatgaaggatcaaagcttgactgtagcgactatgctcatgtccaagtacaagatcaagtcccatttctacagggtctgtcctaatggngatgttcactattcgtacccttacgatggtgttaatcctgagacggctgacgcccgacgcctaggtggtggtcaaaactatcagtctattggtaataatgttatacctatgaagctcaaa

SEQ ID NO: 139961 - DNA, 203 bp, Glycine max
  Clone ID: PAT_MRT3847_97394C.1
ccatccttatcgcctctacgaatgcaccttgctgagctggtgcgctgtgatatgcactgtcatgaatcaccttaccaggtctgtacaacgtttcttctcatgagactttccctgagaaaacgtagtccgtacggcatgtatgcattcttgattgaagcacccggcaactgggaattggcctaacaggcttactcacttccttt

SEQ ID NO: 139962 - DNA, 340 bp, Glycine max
  Clone ID: PAT_MRT3847_97395C.1
caacagcgtgagagatgctgctggcgaccaaaagacacatgcatctgcacggaacgggctcaaagaacggcatccaaacaccgacatggccaaaggcagagcagacgcgcggtaggatgacaaagccttccccagagggaaggacaatcccgcggagcacgagaagaaactaaaggaattgcgcgcgcagaaaggggggccccaatcgacaaagaaaggcgacgcagccctagagaggcaagctctaccccaagggctggcggcccgcataagcaaggtggagccaccgggccgcgggaaggcgaccgaagaaccccgcaagggacccggagagaaggac

SEQ ID NO: 139963 - DNA, 1144 bp, Glycine max
  unsure (1)..(1144): unsure at all n locations
  Clone ID: PAT_MRT3847_97396C.1
attcccggnggcgacccacgcgtccgcattaatttcaacaccatggctatatggaaaaccaacaaatccctttctcttcctctaatggccttcacaatggcaaccatgttcctgatgctgctgaacagggtgaactcagcagattcactctccttcagcttcaacaacttcagtgaagaccaagaggacttgatcctccaaggtgatgccaccactggtgcatcaagtgagaacgataagaatgtgttacaacttaccaagttagacgatagtgggaagccagagttcggtagtgtggggcgagttttgtactttgccccagtgcacctctggaaaagctctcaactagtgtcaacctttgaaaccaccttcacctttaagatctcatcagcatcacctgactctgttccagctgatggtcttgctttcttcattgcttcacctgacactactcctggtgctggtggccaggaccttggtctctttcctcacctcacttctctcaaaaactcttcctcctctcatcacagaaaagttacaagaattactggtgtcaaagatcttgcatcagagccggtggttgctgttgaatttgacaccttcattaacactgatattggggatcctgaatatcaacacattggaattgatataaactctattacttcagtcacaaccactaaatgggattggcaaaatgggaaaacagtcactgcacaaataagctacaactcagcctctaaaagactaactgttgttgcttcttatcccgattctactcccgtgagtctctattatgacattgacctctttactatccttcctgagtgggttagagttggattctctgcctccactggtggtgcagctgaagcaaatacccttctctcttggtctttcagctcaagcctgcaaactaatcaaatccagaaggaggacatgcatggtattgtgatgtaatatatataaagccaagtggctaaatgttaatttacgtgtcccgtctatgatatatttgcatgcgaataagaagtaatggacaatgtatctagtcctttagtttatgcctgtgctaatatatatatatgatgttaacttgtttatgttctatttagtacatgcaacatctatatttatatatgtt

SEQ ID NO: 139964 - DNA, 1402 bp, Glycine max
  Clone ID: PAT_MRT3847_97397C.1
aactactgaattctattatccagcaaacactatctcaataccatcccgtatacactatctcaaaagtgaagctctaaaccattgtcaagtatggcaatttcttcgtgctctttgagctggatttcaccctgcttatcccataagctaaacttgccacatacaaattgtttgcctcgcaacactgcaacttcatcttccaacaccgtcttttgtgcattggagacaacccccagaggagaaagtttttgccagagaagaccactactgttgggcattggagcattaactgcaaatttacaaccaacaaatttggtctttgctcaagaaaaaccagacagataccgagcttttttagactatgaagatgggtattcttacgtataccccattgattggaaggaatttgacttcagggctcatgattctgcattcaaagacagatatctacagttacaaaatgtaagggtgaaatttatacccactgagaagaaagacatccgagaattgggtcctatggaagaggttatatacgatttggtgaaacatatatatgctgcacaaaaccaaagaccaacaataaaagtatacctttgaatatatacttacatcaccaaattattctagtgcctcctttgcaacaattgctataggaaatggttaagtaaccaacgcagtacccgctcatagctcaaggaagcagttgcccatttaaaatgtgcggtgattagtcccaattctacctaacgacgtgtgcttttacacaggaaggtactacacgttaattgttggagccaatgaaaggcgatggaaaagatttcgagatcagcttaaagtggtagcagactcctttaggcttcttgacatctgaaatgtcacgggacaatgcaaaaaatgttttaatttgccctcccatcccgtttgaaattctcgttccgcacggcaaaaaaaaaaattacaagtgaatgatatcttctactataccaatagaactctcttttgtacatcgcatgcaaagtgactttgtctgtcatttgtggtgcaaactcaattcgttgttcctcgtctactcttacattgttccactgctactcctttatggagtatttcggttgggaaattttagaaggctttaataaaagatattaataaaacaaaagatttaaaattttgtaaccaacttgcaaatattgaaagagtatattggtcaaacaagccttttgcaagacagtacacatgtcacaataatattgatcattctacatgtaccaaaacatgttttacataacataacatgtaaacaaggaaaagcataattattatattgcggcttagaattctgtgggcttgtttgtataggcagatgaaaatgaggactgaggagcagtggctgaaactggcaagt

SEQ ID NO: 139965 - DNA, 367 bp, Glycine max
  Clone ID: PAT_MRT3847_97398C.1
tcgaggaagttcgtgcgagtcaaagaagcgattctgttagtgtttatgtgtactatcataaccattgcaggttcggatctagcttcggacagagccgggttatatggactccgaagcgcggtggggggacgcactttggtatggaacgtcacccaaacaagcccgtgatcgaggaccggagtggtctgcgccagcgggagagcaatcatgctgtgtttaacagtgatgggtctctccgggtcgcattcatgcgggttgggcatgctcactcgaactgcatacgctaatttttcgttcaacgcgctaaccggacacatccctgatgagtatgctggcctgaaagctatccgtaacctatatctgcagg

SEQ ID NO: 139966 - DNA, 370 bp, Glycine max
  Clone ID: PAT_MRT3847_97399C.1
gatttgtgtaaaaagtatgccttaataggaaaaaaaatatgccatacttctatatgatcctcctttcgcgactatgcgattaagcaagttttcacatgctgaggcttttttgttaaagcgcaattactggtcagatggggcgcctttcatgaggtggtgacataagtgttagcagttgccgtataacctaaaattggtgcccacatagacaaaaaaagagcaacatattcatttccttggaccaagatgaagtttatcacacttgcatctaagccagattcttgccagagtgaaggcgataatatcaggtatgtggcagctgagtaggcatctgacatatctgttaaggggggaaatgtcaaatttaatc

SEQ ID NO: 139967 - DNA, 202 bp, Glycine max
  Clone ID: PAT_MRT3847_9739C.1
tagcgagtagacgacagaaaggggctgttgctcgtcctaaaacccagatacagatctagggtgtattttccttttcttttcagatttgacaagtttgcgtcttcaaggaattagtggagattgaagacactgaggcttcgaggagagtcatcgactacgagagcagcttaaaagtcccgttcgctaacccgtactgattggc

SEQ ID NO: 139968 - DNA, 331 bp, Glycine max
  unsure (1)..(331): unsure at all n locations
  Clone ID: PAT_MRT3847_973C.1
nngtcgcangcacgcgtacgtaagctcggaattcggctcgagcacaactccctgncannatgggtanctcnagngantcnanncncaggaggngtgccantggtggcaannaganggtanannggcanangagaaacnatgagngtgngccgacaggnctggcgaancactatngactgtcgatcnaacaattacagtccaggaggatgccgggntagangtggnaatggtagaagtggaagtgcactgatgattggntnactgggaaatanactcctgcggcgaagtngagagcttgtganantacgcagagtactacgttatgnctang

SEQ ID NO: 139969 - DNA, 366 bp, Glycine max
  Clone ID: PAT_MRT3847_97400C.1
ggcaaaaaaaattggtggttctgtttttcagtaccagtttaaaagaaaaatgaagcaccaagtgttgtaatgggagtagtcgtactaaccatccaaaattaccacggcttggggcatacgcaatggattacttacccttggaaatttggttggctctcacttccatttgttgggcacaatttcggccaaatccaccaccctttgggggttgccccattcattggagtacctagcaacggccttcacgattgggattgccattaccgaggctcacgaggagtcaacggttgtgggcccattagggctcctgaattcaacggcctcaattgggtcatatccccccgaggggattcccttgagcccatt

SEQ ID NO: 139970 - DNA, 378 bp, Glycine max
  Clone ID: PAT_MRT3847_97401C.1
ttcgtccttttttttttatgtaataatgcattctgggggtaaaaaggtatgagcaggccttgggtctaaaataacatgcttaaacaacccacttgaaaatgttcacactaaacaataaaagaaactattttttactcttctaacgcgccccaggcatcaacttactgtctgtcatagagactatctatatacaatacccttccttcattgaatacgcttaactttccgcgaagcacaacaaaatttgttttctgttaaagggattgtgcacagagattcctctacattaacaatggatgtattagcaactgaggacctacaaggagggagaaaatcaggtgtcaatgcaaaagagtttgcattgctttcttacttttt

SEQ ID NO: 139971 - DNA, 515 bp, Glycine max
  unsure (1)..(515): unsure at all n locations
  Clone ID: PAT_MRT3847_97402C.1
ccaagctcgaattggctcgagaacttctaagtcccttgacacactttctcaaagaaattcnaccaccaccaagtggacaacacttcccatcataggccacctccaccctgtgggctcagtcataccaaaatcattccaagccctagctcgcctctatggccctctcattcagctccgtttaggtgcctcaacatgcgtagttggctccaacgaccaagttgccaaagaagtgatgaaaaccaacgacctcaatttctgttaccgaccccactttggatcctccgagtacttcttgtacaaaggctctgattttatcaccgccccatatggcccttattggcgcttcatcaagaagctttgcatgacgcaacttctatccagctcgcagctagggcgcttcgtgcaccgttcgagagcaagaaattataaactcttgaaatctgttctagtgtgttccagtgaaggtaagggcattgatttgagctttgagctcacttctttgaccaacaatatct

SEQ ID NO: 139972 - DNA, 274 bp, Glycine max
  Clone ID: PAT_MRT3847_97403C.1
agatcggcttaccgatcatcagatctctgtgagcaaggaacccttcggcttgctccataaggacggtgatggctgcatcacatccaatgaactagtatctgatatgcgtccattgggtcataacccaacagaggcagatctccttgacacgattattgaactggatgctgatgtgaatgcgactattgacttccctgagttcctaagacttgtggctactaagatcaacgacactcattctggagagtgatctaattatgttttcgacgttttc

SEQ ID NO: 139973 - DNA, 338 bp, Glycine max
  Clone ID: PAT_MRT3847_97404C.1
gtgaagtttgaaggtttctgtgtttcttctagaccatacctatcttttacatctacgctatttttcaaaatttagtctcaaaataggtacgcatgtattaatttagccttccttattcatttttgctttgatggaaattcgttcatagagaaaaacaaggaataaagatttccatcaaatggtggtggtgtgctatatatagaaccttttccctacaatgtttaattagttaatttccaattaccgtcgcttaatttagttgcacgattattttctaatgattattatgagaaattaagtttatcttttgaattttttgtataatgatttttatatat

SEQ ID NO: 139974 - DNA, 203 bp, Glycine max
  Clone ID: PAT_MRT3847_97405C.1
cccaaagttcaaaaatattccaaactattaagagagcattttgatcatagatcacaccccccaaatgctagtttggttgagcaaactaactttcattacaaataaaaagttggggaaaatcatggtttggaacttgggttgtgtttgaacatgattttgtgtctcataccatggtttgagtagaagtaggggggaagaagtta

SEQ ID NO: 139975 - DNA, 251 bp, Glycine max
  unsure (1)..(251): unsure at all n locations
  Clone ID: PAT_MRT3847_97406C.1
cacngttcaagacatcgcgagaagacttgaaactcgntgacaacgagcttctgngcacggagnanaagttcanggtgttcatggagaantacgggagtagngactccanagaggaggagtatnctncncngttnggggattntcgcccagaacatggtcagatcggngtagcancagncgctgggacccnacgcggcgtccacggngtctacgcagtncnccgntctcaccgatgactagntnnnnggnct

SEQ ID NO: 139976 - DNA, 742 bp, Glycine max
  unsure (1)..(742): unsure at all n locations
  Clone ID: PAT_MRT3847_97407C.1
cgaattcgagctcggtacccggggatcctctagagtcgacctgcagagtttccacctgttaagtttttgttcttctagggttgagttggaaactatgatggctgccctgtccaggcacctgcattcatacatatgatgagaaatagtcacacggttaaagtgttacatggagaaattaatatatatatatatatatatatatatatatatatatatatatatatatatacttttcttaactttttcaaatgtgtacatatatatgtggcatggattggaattgaacgtattttttttactgatctgatttgaaaatttggctttgaattcaactaattgagacttaataatatataataagagtaagtaatttttttaataaacaatcaatttcatcctaaaaaatgtgatgtgctattgatttagtcatgaaaataataaaaagataaaaaggtcctcaaatttctctatactttaacttaatccctaagcttaaccatttattgtcacttaaatcatgtaactttttaaattttggacttaaatgagtgacaaaatatatttttaatgatgtttttatcattttactattttcaagaattaaattgataacaccttatacttttaaggatgaaattgattatttatctaattnttttatcactataaaaatggtatggaagtattccaccaatgttgcttatgaatgaatttttataaaaaatttagttgaaaatcttta

SEQ ID NO: 139977 - DNA, 288 bp, Glycine max
  Clone ID: PAT_MRT3847_97408C.1
caccacacttaattaaatttataacttttataatcacacttatcaactgggctctggctttattacaatacaccatatctatcacacaaaatttaaaaaatacacactacccaatactaatgactacatacctaaactaaatatttatattatgtaataactcaaactcttcttctctctacttattgatatactcatcatcactccatcataatacttacctaaactattaataaatgaatgcatactaccatatattacataacaactatatactcattaactacc

SEQ ID NO: 139978 - DNA, 558 bp, Glycine max
  Clone ID: PAT_MRT3847_97409C.1
tccgggctttgagaatttaattgaaattgaagggttgctcctagggttccctttcgcagttgagatttgagaattgactctgagaatcgagaaaatggccggtttaccagcgaggctccgtctccaacccaccgacgtcaaagccgccgccttgtggggcgttaccgccgccactggcgctctctacctcattcagccatggggatggttgaagaagacattcttggagaagccagaacctgagcaaaaatgagttggcttctgagaagagtggtttgaatttttggatcatgccaaggatgggtaacagtcgaatattgttaatttctgctgaggtcttctcgcacctgtgctttatgttatgaatttggatactaaattttaatgttctgcgctgattgtttttaacggagattttgttttaaatcaacttctcgcaccgtgttgaacgagcaaactctagattttgtggcaatagcattctttgccgaggatgataatacaaagatatatttgctattaaaaacaaaaaaaaaaaaaaaaaaaaaaaaaaaattt

SEQ ID NO: 139979 - DNA, 769 bp, Glycine max
  Clone ID: PAT_MRT3847_9740C.1
aacaaacctcagaagcagaaaaaggtcttctctctttctctctccttttccctcaagctcagaatctcccgaacgaaagttgaattttggtgcatattttacaaattaagaatcttgttaaaaagaagaaggatgtcaagcggagcaacacactggtgtcatgcatgcagacagccagttgtgcttgatgggagagatgctgtttgcccttactgcgatggaggatttgtacaagaacttgatgagttggaaggaattgcaccccaccataccttttgctcacaatcaggagagttccatcaaatgcctgacattttcgatgctatacctgcttttatgggacagaggggttctgaccagagatccaggcttatggatgatgctgttgataatttcatgaggcatagaacggctggaagaaactcaaactttgatgttagagggagatctggctctcgcccagttcctgaacggagttggggcgtttttagttctggtccttatttaatatttcatggtcaagttcccggatccaccttcgctgctggcagcccaagaggtggttctaggcatgttgattttggtgactactttatgggtcttggactggaagaacttattgagcaactcaccatgaatgatcggcgtggtccacccccgggcgcactatcttcaattgatgcaatgcctactattaagataacacaggcgcatcttcgcttggattcacactgtccagtttgtaaaagaaaatttgaattgggcactg

SEQ ID NO: 139980 - DNA, 361 bp, Glycine max
  unsure (1)..(361): unsure at all n locations
  Clone ID: PAT_MRT3847_97410C.1
gacgnaagctnggaattcggctcgaggtccttggtcaggcaattcaacatgaatttcccttactcatagtaactccaaagcgggtatctctattggcatatcatgaataataataatcaagacctttcggcaattgagagaccatccgaggtcacaggcatctaatggggccaacctctctataaacaagccgactttgagcaacagttacatctacgagaggcgagatagaaaggatcaactttgacatcaaacttgggggtgagatcaactacttcaagtcccaggagcccgcttgtgattacaatgataacacgtatagatcctcttctcgacacgccttacaacaacaataacactt

SEQ ID NO: 139981 - DNA, 184 bp, Glycine max
  Clone ID: PAT_MRT3847_97411C.1
cgttctcgtggggggtttaccactccattgataccataagttgcgccagttgagccagctgatagtgctaaagcatacttcgacttgttccctgctgagggcgttaaaggaaagggagatacgtacaccgcagaagtgaaatctggcgtatctgttccatcgctgacatatactaagtaggggg

SEQ ID NO: 139982 - DNA, 487 bp, Glycine max
  Clone ID: PAT_MRT3847_97412C.1
gcaccagatctgagacttgagtacgtggttgccattgagggtgttgtcaggtctaggccagatgagtcgatcaacaagaagatgcaaacaggcttcatcgaggttgctgcaaataaagttcaattgctaaactctgtaaattcaaagttgccattcttggttactacagcagatgatgcaaaagactctcttaaagaggaaatccgtttgaggtatcgatgtcttgatctgaggcggcaacaaatgaatttcaacatattgctgcggcataaagtggttaaactcattcgaagatatctagaagacgttcatggttttgttgagattgaaactccaattctgtcaagatccacaccagaaggtgcccgggattatttagttccatcaagaatccagccaggaacattctatgccttgccacaaagtcctcagctatttaagcaaatgctaatggtagctggttttgataaatactatcagattgcaa

SEQ ID NO: 139983 - DNA, 474 bp, Glycine max
  Clone ID: PAT_MRT3847_97413C.1
ggggtacgaagttttttataaattaagtcgcattattttggttgggtccctacttgaaaaatggctaacaaataagccctaactgttaaagcttaaggggggtaagttttaagttttttcatataaaaccaaaaattgtccttccggtggtagggaatgtaaaatttttcctttataacttaaatgaaaaacaatttattttggtaaataaaaaggggcccaatctaatacccgtgtaatgtttccaaacagcagggatccaatcataaatggttgttcatgtaagaactaaaatgcagaatttatgtaaggtgtaaaaactaattttttaaatttaccttcttaatattatggtggttcattttactttgacgttgatttctcattgaacatcctatcaactattctgctatttaggttcacctgataacattgcattggagggttcaattgatgaaaacttaggttcaatac

SEQ ID NO: 139984 - DNA, 293 bp, Glycine max
  unsure (1)..(293): unsure at all n locations
  Clone ID: PAT_MRT3847_97414C.1
cccactcntccggtttgtaatatggcttaacgaaatcgactaagtgtgttctttctgttagttttcacccttttgtctgcttctcttcatcatttcgggtacctcttgctgattttttcgatctgctcccctaatcaacttgtggcattgggtttcgtttggggattgttatgcttcttcccatcttaatccgattcccattgggtttctgccgattgatatgcttttaccagaatgaagatctttaagaaattgatagtctagctacttcttttacatcaattatttgaatt

SEQ ID NO: 139985 - DNA, 1191 bp, Glycine max
  unsure (1)..(1191): unsure at all n locations
  Clone ID: PAT_MRT3847_97415C.1
tgcttgggtgatttatgtggcgcattgcattgtgatgctgtgatgaatttcaaatcctctagaagcaagtgcaatccggcagctgctgcaagaaaccgtcatctatgcgagaatcttgctgacaactgttttcctataagtgagggtccatcagcaggccgccttcatgaattgtttctgcaccaattttgtgatgctcacacttgctcagggaaccataaacccttctctagaggagccaaggatccaaagtagtttcttccngcctggctgctggagcattgatcttgggtgctacttcctgtgttctatctttttctttatttggtacaaagtgatgtgaagagtcgaacccaagagcttcgtcggatctcaaaagctggatggaaatcaaaaccatcatgattgggccactaaaagactagttgaggatgaactgaagagacttttatttggtttggagcacaattacacaagttttggaagccatttaaacagccaatggtgcttttaaacgtactcagttcaacagtgttatcttcatgttagaattgaagatgagcttattggttagtgaacatttgaatgctcagcagtgcagttaaacgtcccatgctacgttgataagatttagctactgactgtgtgcatttaaatgtcgtccaacgggacatttaaacgtactcagtttacttaggttgatgcaaaaaattgttcctaactttgtagacttttgataggtggaaaacactatgtaacacacaaaacacttttgctattctccgctctgggaatacaggtttgtgcatatcaaacttgaaaacttcaaagggtcaatctcatgaaattactaatggataccacttctttatgatctcttctatcgatttttggttctttttagatgtatcactaaattcataggttggggaaagcagaatgattgattcctctgattttaattctattcttcacatgtaggtatccatattctttcttttcttgatctattacttgcattcagttaactagatagaagaactgcactcccatatcactacttaaactgggtcaggaccaatcatgttgattgtctatccgagccagctntaacaattggtttgattttttaatcatactttattttctcaatggagacgcctcgagcctcaagttctattgtgaaatact

SEQ ID NO: 139986 - DNA, 384 bp, Glycine max
  Clone ID: PAT_MRT3847_97416C.1
atacaataaatatttttctcttttccatatatgagagttcggatcaacaaaatatcggagagatttacatcaatgagtcatgagtaaccatataagtgaacctgacaccacactttaaaccaaaaccttaaggctcgggtttatgggtcttgccttcatttaaatgatgctcaaccttctcattcctacatgatataggacttcgcttcacacttatattccaacaatcttttcctcaagagcctagacccattgccaggaagggatccccaggccaaggatcctccgctgcctccattatacttgttagagctggtcaccaagtagcaccatcgactctggtactgtaataatatggttctaagacaccagagaatgagtagc

SEQ ID NO: 139987 - DNA, 970 bp, Glycine max
  Clone ID: PAT_MRT3847_97417C.1
cgcaaataatcatattctattgtaaaattttttaaacatgggctaaaaattcatttctacaagcaagtcagagttaggagtaggctataaaccccaataacataaagcagagtgcaaataaagctataccagaaaaatggttaaatctgctaacttcgctagaactttgcataaccccagtccttaatataggtgagggtaaataatttaaatgtatgaatgacaggaatgaatcttcagaacctaccaatatgattggtgtcatcctcacctccaactgcggtggtgacgatcatctggcctgtccttaactcgagatgaaagatcgcggtccctgtcataatacatactttcagaggtccgactccctggtctaccagaatctgggtccaagggtgaaaaatgcctctctgaagacgaataatgaagagaatggaaagaaaaaggcattgaggattcttcatcatgcatcggacttctactcctgtcagattgagaccttgccattgaaggacttcttagtgcagaatcatggccaccaaacctaggatgaaaactgaacttaaatgaactatgtccagggtcccctggtggaccatcatccctaagatcccctaatctatgttcgcgatgatatccacggctgccataatcagtactataattcgacctgtgctgtggcaatgacaagtttcttgatatatctgaactcgagggtccagccctagtgccccacaatctctcatccgctttttctggaataggagcatttattccaggaaatttgacagtctttttacgctttggtttggaagcatccgcttccataatttccccatcctcttggtcagcaatctccctatcagtgtatattgtaatgccggaaggctgatcctcatcatccacatcaagatatccaggtgggtatcctaattctcgcattctgttgagccacggaggtggatcaagc

SEQ ID NO: 139988 - DNA, 325 bp, Glycine max
  Clone ID: PAT_MRT3847_97418C.1
tcctgaaccaaaaccataaccataaccgtaacaagttaatattcttaaccctagatttgaaaatctagggttttgacagaggaatgcagtgtgggggtggtgaaatgggggaaaaaggggggaagaaaagacaaagaatggacttcacttgggacttgagacgaaagaggggaaattaaaataaaatgaataaataaataagaaagagcatttgaattaaagtgcgttaacattgccaaaagaaagtgggttaagcaacccaaaagtattgtcgtgtaagattattaatttttgaggcagtttagaaaatatctgatctctggca

SEQ ID NO: 139989 - DNA, 414 bp, Glycine max
  Clone ID: PAT_MRT3847_97419C.1
ccagccttaggttgtcatgaccaatgcccacaaattgttaaaagcctgtttagattatcattatgaaatacccctctggttatttcttcttttatctatccttctataactttcaattcattttgtaagtttatttttgcttaattggcaggttttctggggtttggacaaaaagcttgctcagaggaagcactttccttctgtaaactggcttatttcttattcaaaatactcaacggtatgtcctaaagttggttactttgtaactcatcctccagctttctacatttgtatgcatagtgttttggttccatgactttccccgaatttttaatattttctttttggtatctttaagcacttgaaaccttttatgagcaatttgatccagattttatcaacattaggacaaag

SEQ ID NO: 139990 - DNA, 925 bp, Glycine max
  Clone ID: PAT_MRT3847_9741C.1
ggaccagtctttgcaagattttgcaacgagtggaagcaattaattgaaaatcccgagctcctcacgctgcatttgaaatgaaattttcattacatgaaggaagaattgttgaaattgtaatttagatggttaatcactatattgattacaatgagaaatagaacaaaagcatttaaaaaaaaaaaaaaaaaaactcgagactagttcctcgtgccgaattcggcaccaggaacaacttcatatcatcaccatgaatcactctagcaacaatcagcaagaaacccctttatcatatctaccagaaggccaggccaattcttcagctccatatgtcactgccccaccacctatgggttatccttctaagaatggttctatagaacaaagggttccagaggaaaccacaagcaggggtgatggcttctggaagggatgttgtgctgctttatgttgctgctgtgtcctggattgtgtcttctaattgaatcaagatacagatttgtgtttattagtatatacattttttttttcctttctctcatttggattgtattctttgtagtggtagaagaataagtatatatatatatatatgtgtgtgtatttatccatttgatggaagctggaagctgttcttttttttcttctcatcttactttgaaattttcgtgatgtatttgttaattgctcattattatattataatttttaaaattaaaaacccccccccgaaaatttttttcccccaaaaaaaaaacggaaaaaaaacttttggtaaaaaaaaaagggttatcacaaaaccacaagggatacacttggggcccccctggggggcgccccgttattaaggaccacggttcccccccgggaaaaaccaaaccattaatggggtttaagggcaccctgagcctaattccggggcccc

SEQ ID NO: 139991 - DNA, 334 bp, Glycine max
  Clone ID: PAT_MRT3847_97420C.1
agaactggggggaccaagggtacacccgggacatgaaggcggggcccaaccggccttccaattttcgggatatgtcaaagggttgaagaacaaccaaaaaatggggcacacgggggaaaagggggaaacgattaaagccccacaaaacctcaaaacatgaaaccctaagttcaaatcccgaaaaccgggggggccaaagagggggaaccaaaacctttaggcgatttgccccaaggacaaataaaaacagggaaacccgcctgctcaaaaaattataaacccccaagaagggggggaaaactaaccacccaagggcggaaagggtttttcattt

SEQ ID NO: 139992 - DNA, 286 bp, Glycine max
  Clone ID: PAT_MRT3847_97421C.1
agcgggaaaccaagactaccattgaattttggtcttgacacggggggcttttgacaagttgctatggtcctcctcgatggaggaattatagtggctaaaactgtagactggactgcacttatccaagattctcctattcgtaacttggtgacagacgcagattggaggacaggctgtttaacgatggatcttgagatgactctgaatgcaaaagtacaaaggggtgacggagcctgaacgggacaactctttttaacatacaggtgctgtactgatgtttttaata

SEQ ID NO: 139993 - DNA, 624 bp, Glycine max
  Clone ID: PAT_MRT3847_97422C.1
ggctcgagagaagattctcctgtagatcaattctatcagatttccaattttcaaccctgaaaaagcctaaaaaatttccttgattttcattcaggaattttccctccctcctattttctgggtttcattgataaacccctctcacccccaatttttttttttttaaaagttcattctctctctctagtacatacctcacttttttcttcttcttaattttcaatatttttgagcttcaaaagcctttgaattggacagttccctggtctcaagttttgaactggtgaaatctctcctcatccttcttcttcctttttttcttcttcaattcctccaaacggtccttcctctctctagtacacagctcacttttttgtcttttcaattttcctaattctctatatctgagcttcaaaactcaaaatcctctgaatttggcacttccctaatctcaaacttcacttttcctcctcctcctccttggtcttattactacaattcttgtagctgatttgatgggaatctgccatggaaaacccattgaaacccaacaaagtcaaagagagaccaacaccccatcagaattcccaagtgaactccaaactcccacaaaaacccccaaat

SEQ ID NO: 139994 - DNA, 158 bp, Glycine max
  Clone ID: PAT_MRT3847_97423C.1
accaacgacccgagaaggggaacggaacaaagcactcccacaaacggcgagcaccccaaagaacagagaagggaatcgcacgcaaggggaacccaagaaccaaagaccggcccaaacacggaaacccacaccgaggatcgcgcccacgagctcgccaa

SEQ ID NO: 139995 - DNA, 198 bp, Glycine max
  Clone ID: PAT_MRT3847_97424C.1
ggccctttggcgacgcaaaatctgaatttgtttgatagtgggctgggaaccgtggacctccgatcattcactgttcagagtaaatcaacatttagtctcgtagatgggggtcgttcttttggaaacgctgttagattcaccttatatcaagacctaagagtgttattttgtggctacagtataactcattcttcagat

SEQ ID NO: 139996 - DNA, 1944 bp, Glycine max
  Clone ID: PAT_MRT3847_97425C.1
gcgtgagatgactcccacacatcaccaaaatagttttctctaaccaaccatacagtactcctcactagctataccctggttaatccatggagaaagaagctgttggccttgaaatcactactgagctaaggttgggccttcccggtggggaattacctgacaagaacgagaagataaagaagagggtgttctccgagattcaagctcatgatgatgatgaaaacagttcctccgaacaagaccgcaaaatccaaaccaagaatcaagtggtggggtggcctccggtgtgttcgtaccgcaagaagaacaccgtcaatgaaaccaaaatgtacgtcaaagttagcatggacggggctcctttcttgcgtaaaattgatatagctatgcacaagggatattcggagctggtcttggccttggagaagttcttcggttgctatggaattcgcgaagcgttgaaggatgcggagaatgctgaacacgttcccatatacgaggacaaagatggtgactggatgctcgttggagatgtcccttgggagatgtttattgagtcatgcaagaggttgaggattatgaagagatcagatgcaaagggcttcgatctgcagccaaagaagggtctttaaaaggatttatagaacgagtgacaatctgtttgatatcaaaaagatctttgaagtgattcatagatcactgggcacacttaacctctcttttttttccattcactttctctctctctatatatataaagccctttctattccatattcctaacaattcaattcattcatccttcactactacaccaaattaatagaaattaaagatatatcattccacaacacaaattaaagttagtgagacgtacccttattatggccaaagaaggtcttggacttgaaatcactgagctaaggttgggtctacctgatgcggagcatcaagtaagtgtagtcaataagaaaaatgagaagaagagggcattctcggaaattgatgatggtgttggagatgaaaatagctcctccggcggaggcgaccggaaaatggagacgaataagagtcaagtggtggggtggcctccggtgtgctcttaccggaagaagaacagcatgaacgaaggtgcttcaaagatgtacgtgaaggttagcatggacggtgctcctttcttgcgtaaaattgatttgggtctgcataagggctactcagatttagctttggctttggacaagctctttggttgctatggaatggtggaggcgttgaaaaatgcagacaattctgaacacgttcccatttatgaggacaaagatggtgattggatgcttgttggagatgtcccttgggaaatgtttatggagtcatgcaagaggctgaggattatgaagaaatcagatgcgaagggcttcggtttgcaaccaaaaggatctttaaagggattcatagaaagcgcggcaaagtgaaagattatgttaggcttctaattaatgtcgtgcacattttgcgatcatcaatccaagtttatgtgttatcgttttcttatatttgaggaaaaacatgcatttttagtttgatatatgaattatcagacttttgtttatgtcaagttattaatgaatgacatataggaccctatataaataatagggaaaactcgtcgttttagattaattaatgctttgccataaatgtttgtttatttgcattcaattgcagtacaagttattgtatcagtatactgttttattactgatatttcaatttgttaattacttcacctaaactctcctttttttccttttcctttttaaatagttgatatagtaaaccgccatatcaagttattcacgtaaaaagagactaaagtaaagaatttaaataataatgagaaaaatacaagtatgttttattttatttcttataatatatagcattgct

SEQ ID NO: 139997 - DNA, 940 bp, Glycine max
  Clone ID: PAT_MRT3847_97426C.1
ggagaaaataaaccaatattattccacaaaacaaattaaagttcgtgagagtttaatcaatttgatacacgtacccttatggccaaagaaggtcttggacttgaaatcaccgagctaaggttgggtctacccgatgcggagcatgtaactgtggtcaataagaatgagaagaagagggccttctcgcaaattgatgatgaaaatagctcctccggcggcgaccggaaaatcaagaccaataagagtcaagtggtggggtggcctccggtgtgctcttaccggaagaagaacagcatgaacgaaggttcaaagatgtacgtgaaggttagcatggacggtgctcctttcttgcgcaaaattgatttgggtctccataaggggtactcagatttagccttggctttggacaagctctttggttcctatggaatggtggaggccttgaagaatgcggacaattctgaacacgttcccatttatgaggacaaagatggtgactggatgcttgttggagatgtcccttgggaaatgtttatggagtcatgcaagaggctgaggattatgaagaggtcagatgccaagggcttcggtttgcaaccaaaaggatctctgaagggattcatagaaagcgcggcaaagtgaaacattatgttaggcttctaattaatgtcgtgcacattttgacgatcatcaatccaagtttatgttgtcgttttattatatttgagaaatcatgcatttttagtttgatatatgaatcatacttttgtttatgtcaagtattaatgaatgacatataggaccctatataactaatagggaaaactcattgttttagattaattaatgctttgccatgcttgttaatttgcattcaattgcaatataagttattgtaccagtatattgttttattactgatgatttcaatttgttaatt

SEQ ID NO: 139998 - DNA, 420 bp, Glycine max
  Clone ID: PAT_MRT3847_97427C.1
ttcttttttttgcgcgtgaacaagcctcaggtaagccaaaaccatggttaagcataacaatgttatccctttggaagagagaacctattcccccctataataagctgaaaacttggccagccatttaaaaaaacagcctgaacttttttttcctgccaaaaattccccaaaaaagatggttggtaaacccaccaatgtagataaaaggcccacaaaacaaaaaggggggaagatttccatgtttaagggggaacccgatctgaaaaaatctattccagaaaaaattggtttggcaacacctttttttgggggggccccaaacggaaagcttttaaagggccatcctttgtgggttccttttttggtttaaaagccctttttcagtggggcacaatatgggcgtttgtttgggcttaaaaa

SEQ ID NO: 139999 - DNA, 416 bp, Glycine max
  Clone ID: PAT_MRT3847_97428C.1
cgggctgcaggaattcggcaccagccatcaccatctcctccaccaccttactattacaagtcgccacctccacctgaaaagtctccagctccaactccctattactacaagtctcctccaccaccatctccatcacctccacccccttactattataagtccccaccaccaccttcaccatcccctccaccaccctattattacaaatccccgccaccaccttcaccatcttctccaccaccttactattacaagtcgccacctccacctgaaaagtctccagctccaactccctattactacaagtctcctccaccaccatctccatcacctccacccccttactattataagtccccaccaccaccttcaccatcccctccaccaccctattattacaagtctccacctccacc

SEQ ID NO: 140000 - DNA, 815 bp, Glycine max
  Clone ID: PAT_MRT3847_97429C.1
tgagctagatggaagaaatgattatacttcttttcgacagtatgatattggtaatgatttaaacaaacatggtgtggaattatgtgaaaaatcaggcaaaacgaagcacggttcttcattaagacgcctatgggtgtggatacatgcttctgcctttgaagaaggatatgataatctaaaaattgcctgccagaaagagatggagaaggggggcatctcaattaattgcttttcccttgagggtcaacttgcaaaattagaattaattggattagggacatttcaacttcttcaaaaagtattgcatgctgttggaagtatttcagagaattattggcaattaaagaaacatgtccctattgaagaagagtctgtttctcagaaccaaaattcatccatactgaaaagtgaggattatttttcttcttgtgctatgttatctcttaatgtcaaggatcctcgagaattgccatggaagaagactgttgttccactggagtccctttcaactaagactccaagtgatgcacaagaaactaaatacaaagagcttgctgaattgggaggaatattggaagagaataaagatttatcttcattatcaaggtcaaaacttgaagacagccagtttgatattgacgatctatggtatgctaccaccagagggttgaggcccccagtggaagacaatgtcctttccaaggagaaataccatgaacgtatggttaatttcttccttgatgatatagattctggagagatcaactcttcaactaaggtgcagtgctcgagatctagccctattcttctttaaa

SEQ ID NO: 140001 - DNA, 235 bp, Glycine max
  Clone ID: PAT_MRT3847_9742C.1
aaatgccaccaatttcgtattattgcgagagtagtgggaaaactcctttttagttaaataataacttcaagggccagactttaaaagacttttcattaagatagattgaacaaaatgaaattggcactttgaaaattaaacccaaaggcttataatccttttgttttccttttagacaaacaattttggcaattgaaaaatagttcctaacgccgtggtaacagatcattcaaaa

SEQ ID NO: 140002 - DNA, 409 bp, Glycine max
  Clone ID: PAT_MRT3847_97430C.1
ggcttcctcaatgatctcttccccagcctgtataccactgccaaccgtgccggagccggcgtggacgcgccattcacgggcctcaagtccaacggctggctgtcccaccaggaagaccagctatgacattaccctccttggtagcagcggcgaaatcagcgctatgtcatgcaggtgcggccaccacgtggacaagaggaagtttgagacggcgtcctacctgccagacctggatgatgcacaactggcagaggaagtggacgaccagctcaggaaaggatggataccacgcccataactcgagatggagcatggattctgggtccgtgagcacaacaggattccctcagaccacgaaggtcctctggagaacctgacgagacgtgccttgtacggctgccctaatagc

SEQ ID NO: 140003 - DNA, 426 bp, Glycine max
  Clone ID: PAT_MRT3847_97431C.1
aaaaccaaaaaaaaaaaccctgccttaactttcaggggaagcaatccctcaaaagggccctggtcaaaaaaactcttatttaaaaaaacggacccctagcaaagctggcttaaaccaccccctggggaggcccccgatcccttgggggcccaaaatattttggaaacaaaattttgggggtcccccccgaggccgggcgggcatgccctaaaatgggatgcccgggagcttttttttccacaacaggctttttaaactcgtaaagggggggggcccccccaggggccccatgacccccccccccaagggtggtctgagccttttccttaggcattttgcaaattaacttcaaattcggaaaacctaagggttgccggggggaaacccaatacccaccttaaaaggaccgccccctgggccgacccc

SEQ ID NO: 140004 - DNA, 352 bp, Glycine max
  Clone ID: PAT_MRT3847_97432C.1
ctcggagccggatggtctcgtggggaatgaagagggctactttgagatcgagttaccagtgccatattggcctcaaccagttgaccagcattcagggacaagttgcgaagcggacaattctaaggtgtaaggctattgatctctgtgttttaactctcccatggtatgtgagggattcaaccaattacgggtgagactggatccacattaatggtgcccatgggcatggactatggatacaatgctgctgagatgacataagaggatcctcaaatagcggtgtctactactgcgattgcgcgagattaatacgagactgtgagcaggggactttgaaagaattttggtgccc

SEQ ID NO: 140005 - DNA, 209 bp, Glycine max
  Clone ID: PAT_MRT3847_97433C.1
tccatccacacgtccgcacgaacattcaatgaaaaccaattttactcctctatgatctcttatacaactcatgcctatgtttacacgtgcctcggggctgaatggatgctacatatactggcctcaagctcatctatggcttcagcaatcaaatagaccaacaatgacattaccttcattgctatcatccctgagaagagatcaatgca

SEQ ID NO: 140006 - DNA, 564 bp, Glycine max
  Clone ID: PAT_MRT3847_97434C.1
tgcccatctttcccctaatgctggtggtgggttcagttttttggtgaggaaggataataaagaaggaagctttttttgtgtgagagaaggaagaggagaaaagaaggcatggggagagggaagattgagattaagaagattgagaatttgaacagcagacaagttaccttctccaagaggagaaatgggttgttgaagaaggccaaagagttgtctgttctctgtgatgcagaggttgctgtcatcatattctccagcactggcaagctttatgagttctcaaacacaagcatggagcataccctttcgaggtacagtaaaggcgcagaatcagattctgcagagcaacctattgatgtgcccccaacagatgttatggctgtggagcctgatactaaccttttgatggaggaaataacaaagcttcgatcagcatacttaaggatgatgggtaaggagcttgatggattgagccttaaagaactgcaacaactagaaaatcaactaagtgaagggatgcaatctgtcaaagacaagaaggaacaagtacttgtggaacagctt

SEQ ID NO: 140007 - DNA, 324 bp, Glycine max
  Clone ID: PAT_MRT3847_97435C.1
atcgcataaagtttcggcccttaacatcgatttatactaacttgcaaaagctcttaacatccaatggtctgaaaacaaagcttacacataaattggagggtcataagaacacattaagtaaggagtaccctccacatcccgacctaggagtgttcaattgcgtacctcgtcgaccgggtggacaacgaagcactcttaaggggccaaccgatcttaagggggcagctagataagatcctttggcacctacccggccgggactaagccgggagtatcaaccttcctaagtcaaccccgccagaaacattcaccctgactcttttc

SEQ ID NO: 140008 - DNA, 285 bp, Glycine max
  Clone ID: PAT_MRT3847_97436C.1
agtactttggctgcagcccaagaccacatttgtaagacattgggaggccaagatgtccatatatgaattggaagtgtatgttttcttattaggcctatcctggacccaaaggatgtgaccatcggctctctttctgaattccaattccacatttcctcgagatctcgaggcagatatgatcatatatgaattgatctcatttgtattattacttaggcctatgctgatgccaaaggaaatgctatcggaattacttggcgtatcacaatcacacattaccgagac

SEQ ID NO: 140009 - DNA, 241 bp, Glycine max
  unsure (1)..(241): unsure at all n locations
  Clone ID: PAT_MRT3847_97437C.1
accagtctctctctctctctctctctctctctctctctctctctatcactgtcctgcacataccttccaataaaaaagatgcaaggatagagatacaaggaaagagacacaatatatagtgcgtcatatatagtgtgtgagagagctggagtggagccgacgatgtggaaactaaaaaagagcaccgagctctaagagtgtgcgtctatnagttaggcgataaaaaaaaaaaaaaaaaaaa

SEQ ID NO: 140010 - DNA, 435 bp, Glycine max
  Clone ID: PAT_MRT3847_97438C.1
gatgttaaaaatgtatatataaatttatttataataaaactaacgggcataaatagtactaccaaaaaagctacaacctgggttaattaacacaatgacacataggtttatggatcatcagctacttattccttgaaaattataatcagttcagtctgaatccagggagcagataatacatgcacaatactgggcgttacaatcgcagactacctgacgaatgcatgggagtgaatttcctacagcatgctgtaactcgatgccctcactggcacactgaggcttctgcagggggggcatttcagaaggagcaataggtgaatgctagacaatgtttacgcctagctttaacacatggaggatgccagctaccaaacgtgtactgctcctaaaaggtgccaatcaaaagtcagaatatcagtgttgtacagaaag

SEQ ID NO: 140011 - DNA, 510 bp, Glycine max
  Clone ID: PAT_MRT3847_97439C.1
gcgttgactccgagagtgagaactcaaggaacaaggtgcaacaacatcagcagcatcatggttttgctcatgctaacaaggaacaccctcaagagaaaaaaccgagttttgatgagtttcggtcaacaacaccctcaaagtttgccacttctgggatgcaagaattgaccctcagctatctctgtgagaatccaaaattgggtcttgctgagagagaggttggtgatagaagcttggtgaagggcaaagaagttgttgtttatgggaattcagatcaagatgagaaatgccaatctgggttgggtctgacagaaggggttagtctctcgcagcgtgacgaattaagatttaaaacgtcgttgggagaggtgtccccgtttagtgtgcaacagtacttcgaacagaattgtcttcgaaggaagatatccgtgggaaaccaaaaccaaaagcaagatcaagatgagaaatgggtagagagggagttcttgagtttgagtgagacaagggaga

SEQ ID NO: 140012 - DNA, 521 bp, Glycine max
  Clone ID: PAT_MRT3847_9743C.1
agaatactcagatcctcgtttaggggatccggataatattacaaattaatgcgccacttgaaactctaaatggcatattcacagagttattcagcttaaagataggagtgtgggtttaataaaaatataggttacgaaaacgcccacaaaccttgacatccttaggggtcttctcttgggatctggtcagatgatatttattcactcaccgtgtgtggccacacttatacgaaataatcattcgagaggtcagtgtgtcttactaccatgagctcatgtcttcccaccgtcatgatggtcagtcgttgtagtccgttcggattgctctccgtcgatcatctgccgtcttaccatgttcatgtcttgtcatcgtcccaagatttcatattgtccaaggagattatagtccaaaactctccttcggaaggcatccccgcttcatagctggcagtgccctgcaactttatagttccacgcgatagtgcaacatagtgaagtcctaaaagagatagtccaggagg

SEQ ID NO: 140013 - DNA, 201 bp, Glycine max
  Clone ID: PAT_MRT3847_97440C.1
gacacaaggggtaacaaaaagggtcgggctgccaatccttaccggtctgttgatccagatttggctgcttcagctgcagaaataatcttacagggtattgtctcccgataagcaaaatcattggattcgtatgaagactctgtgactttggttaatggaggcaacaatcattacatttgaataaaccatctgatcctattg

SEQ ID NO: 140014 - DNA, 374 bp, Glycine max
  Clone ID: PAT_MRT3847_97441C.1
ttttgcatctttctattttttttttctttttcttttttcaaacccgcggaggggttcatttattggaaagccttacagctcttattgagaccaaaaacagtaacctttgttacaactgttaaaatcgggacactgttaagaaggcccatatctgggcgctattgcagccgggtgcaccgagaacaatgcccgccctgaaaaataagataggctacaaaaaaatatacctttgtgctctctgcctgatacaaaacgatgaaatgggcccggcaaaatatgtggcccaatgcgaccacgagccgaatgctgcgaaggggggatcgtgcacttttcatcaaagtgaattaatggccaactaaactctgtcgataagg

SEQ ID NO: 140015 - DNA, 367 bp, Glycine max
  Clone ID: PAT_MRT3847_97442C.1
ggatcctttgtattctattcttcaaaattcatgtactgcgtttcggaagcatacatacatagctcgtaggaatcaaaccgctcgtaagtccacaagatgaaaggctcctatgaagcagcttgcaaccaatgctgcacgtaagtctgcaccaaccactggtgatgtgaataagccccaccgttatcgtcctgataccgttgctcttcgtgagattaggacataccagaatagtaccgagcttttgatccggaagctcctcttccagaagctggttcgtgaaattgctcaagacttcaagactgatctgcgtttccagagccacgccctgcttgcaatgcaagaaactgcttaagcataacttgttagg

SEQ ID NO: 140016 - DNA, 364 bp, Glycine max
  Clone ID: PAT_MRT3847_97443C.1
ggttcgggattcgaccgcacgcgtccgtcttccgttaagcagaggagtctcgacgacatctccacctttcgtgagcaggccatcgggggcgagggtctctttaagcaggaccagcatcatcatcaacagtatcagtagcaattcgatcgctctgcatcgtttctgtatcctaatggagtcttcaagaagagtaacgccaacgccttgcccaggagttctagttccagggcaaggtccctcaccgaccctcttctttaaccttaccagcttttcaatcagggtgtgtatgtctatgatctcgaaacaaatcattgttgcctttgctcattggggttggttttggtgcatgttttttgttacaaat

SEQ ID NO: 140017 - DNA, 312 bp, Glycine max
  unsure (1)..(312): unsure at all n locations
  Clone ID: PAT_MRT3847_97444C.1
ttttttaaaataaactaacatccattttaagcgatttccccctatcnaaaacctcgcttttatttaacaactataaattttccccccatcancccacatatcaacaaataaaaacccaaccttacccttcctttaccnaacatccaaattacaactcccaaataattctcaaactaatctattaacaacantacatctaaactacccctaacaaattccctccaataaaatcccaaaacttatatttcttttataatcacctccaaaacattcactaattatcacattttaccaacaactaactccttcact

SEQ ID NO: 140018 - DNA, 373 bp, Glycine max
  unsure (1)..(373): unsure at all n locations
  Clone ID: PAT_MRT3847_97445C.1
agcgccgagattgggctcgagcaaacccctcaaggtcaaacaatttcgttttctcacaaggaaagaaaccaaactcggttctatttatgagatacagtcncatctaanacacantaagagggcaactaaaaatcgtataaattaccgacaatgtgaggcatcacaatcagaaacatatttgatcaaatctgataagtctaattcatcaactgatcactcaaatcccattgagaatggtgaatacattattgaaagttaacattcaaatgtcattgataatgattaacattaaaagaaagtatattatccttttccatattcaacaatttaagagaatgaacaaaaccatcctccttaaaaattaaacaatcct

SEQ ID NO: 140019 - DNA, 390 bp, Glycine max
  unsure (1)..(390): unsure at all n locations
  Clone ID: PAT_MRT3847_97446C.1
gggaaaggggaagccccagccggcaccggaccggaacccccgggncgacccaggccgacgcctccgctcgggacagacacgggaacccaaaagggaggcgggagaagcaaggacccccaaacacccaccgggggaaggcgannaaggaccggagcgcgaagaacccaagggaagaagacgggagcaccagcacgaagaaccgcagggagcgccaaggggggcggagaaaccagccccgnggcggacaggaagccaccgaaggcaagacaaaagggaaacagacagcgacaaggaacgaacgccaggaaggacacaacgccggccacgggacacaaaagggcaaggcaacgacaacacaggaacccggaaaccaccaaagaaaagaacaaa

SEQ ID NO: 140020 - DNA, 444 bp, Glycine max
  unsure (1)..(444): unsure at all n locations
  Clone ID: PAT_MRT3847_97447C.1
caccacttctacactcaccctctgaaacattcagacacccaacaactaccgaatacacacagcacacccgcaatgcatgcagatcttcgtcaagaccctcaccggaaagaccatcaccctcgaggttgagtcttctgacactatcgacaatgtcaagagcaagatccaggacaaggagggcattcccccagaccagcagcgcttgatcttcgccggcaagcagcttgaggatggtcgcaccctgtccgactacaacatccagaaggaatcgaccctgcatctcgtcctccgccttcgtggaggtatgcagatcttcgttaagactttgaccggcaagaccatcactcttgaggttgaatcatcccacanatcgacaacgtaagtcaaaatccaaacaggaggcatcctncgatagcacgctatcttgccgaaagcactcgagac

SEQ ID NO: 140021 - DNA, 233 bp, Glycine max
  unsure (1)..(233): unsure at all n locations
  Clone ID: PAT_MRT3847_97448C.1
gagagagagagagagaaancagaaggaggagacaacgaaacacgcgcacagnccagcacacgnggcagcggcgaggcgcgaccacgccgcgnngcgccgncgcgnaaccaccaacccncggcnggcgaaagccggcgaggacaacacagaagccgaaacacacgccgcggagcacaaagccgacgaggnnacagcggagaacgaacggcgcgacgnnccgggaagagaaaccc

SEQ ID NO: 140022 - DNA, 1028 bp, Glycine max
  Clone ID: PAT_MRT3847_97449C.1
gctgataatggtctgtgtacagagaacttgcttactcttgttgctgaggctgtaaaaaaatcgggagtccttgatcggctcctggatgttcagaagcttgataatgttgacatagaaggagcaatccataaaattgaagacattaaccaataagagtgcataataggtagagactagagtgaagtgcaaatgaaaaaatatacctctttgcaatcagcttcgatggatgaaaaactgagaattgagaaggactacttaatagcagcaaccactaaagaaagcaggcatatgataagttttggagcagggaaaggaagggattatggatatggatctttttgcaacaacatatatgttgagtaatcgatttataattttggcctcaagtttttttttagtgtctctgattttaagtgaatcattaatagggatgattattttgaaatagaaaatcagtttgagaactactatgatgtctaggttaaaagggaccatagaataaaatcacaaacttgcaagcctcttaaactgcgtactgagttttagcaggatttggtacagttacagatgaaacttgaggaagattgcattgaaaactctatagtgtcagtaaaactgctccgttcaaggtgcagtcaaaagcaacttgtaaaggcattaattccattgacctcaaacgggtccaagatcatggtaacagtgactagcgaagccaatgcagtgaggatcatcaaggaaaaaaaatcagcaggaattgagtagaggtgctgccggggaaaagatgatggaaaggtgctttcgtgttacagatgcaatgtatggtatgtgattgctgaagatggtcatagacttatagttactgtcccattatgtaattaacactctaatcgatgtgcttgttgtaccattatcaatcattttgccaagcaaaataatgtctatgttaattggtagtatttttttatattctaacgtgatttcataaatattttaattagaatacactaacagtatactggttaaaaaaa

SEQ ID NO: 140023 - DNA, 172 bp, Glycine max
  Clone ID: PAT_MRT3847_9744C.1
aaagagggaccgagaacacaagaaacatcccaccacacattttatattggggtgactgaagataaaacaaaaaacaacgggggttttctttgtgtgatgtcggttctggttcccactattgtgttattcaccaaaagcttgcacctttccgttgcggatcacctaaaacttg

SEQ ID NO: 140024 - DNA, 119 bp, Glycine max
  Clone ID: PAT_MRT3847_97450C.1
gcttaaagcagcaccactaacattgaggccatagtcccatatatcttctagctttatcatgcgttcagttccaaggggtcatattattgaatcatttgacttataaacattattccttc

SEQ ID NO: 140025 - DNA, 624 bp, Glycine max
  Clone ID: PAT_MRT3847_97451C.1
tttttttcagaacaagaagcattcaagttccttaggttaaatttccttccacagaagatcatgcctagtttagacactgcaataatacaactaggacaaaaacttgagttgacacatgataggtgaaccacatgaatgattctatatattatattccaaaaattccccctcatacaaaatccctttgagcctggcacgtgaataatgcgcaggtccacctgccttgtacttgcgaataagatggacctttaaaataagattccaataccatgttaaccaactacgccaaaagctttagctattagatgaacacataggaatggttgtatatcataactccatgttctaacaaattcaagatgcctttaaaagaaccttgggcaatatgcactgcactctagtgccttccatgattatgaaaaatactattgaagcatttcaaaagtccattaaaggacagttgtataacccaaaccagaaaataataaggcccagtcattgaaatagttttcaaaccccaaaaaagaaaaccgtaaaaaaaaaaattttcccccaaaaattttgttttttaaaaaaatcccctttttaaatttttttatggggcaaaaaaaaacatttttttgg

SEQ ID NO: 140026 - DNA, 478 bp, Glycine max
  Clone ID: PAT_MRT3847_97452C.1
ttttagtcacatttgcaatttaatagtaatattctggtgtcagtcatatacaaactctgctgagtattactccattataaaaaccaaaaaattgagtatcagaaatttagaatatttgaaacattgatatgtgcataaatatcctaactgcagtagtgctctacctacttaagttaaatatcctaactacagtaaatttgctttccaaaggctactaacattctctgcaagtttctccacaatagcttgcacgtaattcctgaactttgctctcagcatcactgtcacctcactaagtcgctcaccaggtgtcgtgtttccaacatgtggcaagcaagaaccccatgtcttgaactgggattcaatcctagggcgcaagctgtcgagcattctcttcaaggaattcaaaagaattccaagctcatcaggaaccacataggcacatgtagatcgtttggcaagtttttgaacatattta

SEQ ID NO: 140027 - DNA, 456 bp, Glycine max
  Clone ID: PAT_MRT3847_97453C.1
gagaaaagaagaggaggaggagctgttttgggttcatttttatttctggtgtggggagagacggaaggtgcggtgagaaaaaggacagagagaagaagaagaaaagaaaattatattaaatatgagaattagagtttagattgacatgatgaaatcaaagtctaagctggcgacattttacttgatttcagttgtcaacatctgccccatatctttgacttttgaatcaatcttcccaaaaggcaaaagaggtttctacccaagttgaagaacttgaccaacttaactttagtactctgatcctatcttatcttcgctctccatgctccacttgatgagaaaggaaatcggtgttgtttaccaagaagacatccttcacacacttcattgttctcctttatgcttggaagatctctcatcatgttcttctcatgtaacaactttcaggcatgtgag

SEQ ID NO: 140028 - DNA, 441 bp, Glycine max
  Clone ID: PAT_MRT3847_97454C.1
agaaagcaaaaactcatcgcaagctcgatcattttcctatacttcattttttatatatgaagggtctcatcattttgttctcagacttgcatctttttgtgctaaaacaaaaagggtctttggtctaatttcttcgagctgagaagaagatgcacttcacaagggtttttataattttccttgatccaaaaccactgacacatacatgatatatgcttacaaacaaaattgttttttttttattaatatttttccttgcttcaagatctttttcaatattaatttcgttttccggccagctctttttctgatcaacaaagttgttttaatttccttgagaagcatcttttatatatttacaagatctctagtttcattgactccataaaagaaaaatagaattgaaaggtaggaattaaggatctgagtctgatatcattc

SEQ ID NO: 140029 - DNA, 438 bp, Glycine max
  Clone ID: PAT_MRT3847_97455C.1
ctttctaatcccccccctctctctctcacacacatcacgcattgtgtgtaatgataaatataaacgaattttcaagtagataagttagctaacaggttaagaagattgtttatctgaacactacgtactgagatggagcttgtgaatagccaaaagctaaaacaacatgagcagcaacagcattttcatgtgttggtggtagatgatagtgtcatagataggaagcttttggagaggctcctaagagattcttcatgcaaagctacctttgtggattctggagacaaggctttgaaatttcttggcctgcttgatgatgaccttgataattcttcctcaacttcttcggaatcattgcaactaaacggaatcaaagtgaatatgatcatgacagactactgcatgccaggaatgagtggctatgatttactcaaacga

SEQ ID NO: 140030 - DNA, 380 bp, Glycine max
  Clone ID: PAT_MRT3847_97456C.1
aagcccccaaaaccctttagctttttttttttttttaaaaaaaagggggataaatggatgtttcacaacattgacatatgggtttttatacccgtacatatacccttaccatgagaatttttttaatggacccccaaaaaaaaaaaaaaatcttactcctttggagaagaaccccttttttaacgggtttttttaacctcccattgatgaaaaaaaaaaaaaaggggtttttaatccgcagtttcttctttcaacaggtttagctaattaccggttaatttttcctgggtaaaaccattgcccttaaacaaaaaaaaaaaatgggggggggaaaaaacctttggtttttttttaagaaaagggaaaccctacccccatta

SEQ ID NO: 140031 - DNA, 518 bp, Glycine max
  Clone ID: PAT_MRT3847_97457C.1
tttcttttctcgtttttttttttttttttgaattgtttctttcttatagtgctacttgaggaggagccactgcagagaacgtttcagtgattgcacttgtgtctatatgtgtttcattaaggttgttgagtaatttttttcttctagcaatgattcagcaaaaaggaaggggaaggggggatgagatctgatttttagtatgtagttcaatcaatgttgcacttctgtgtatctatatcttcaaccctcctggttaacttgtttcaaggagtgaagacaatcatttcttatgtttcacacctcctattgtttatttaatcatgctgacatatgtaattgcctaattggtaatactaagatctttctgtttctgggttgctctaatttaatcaattgcgtgtgattttatctacctattctaattataatgggggttagatgagatctggtaaggacaagtgttttcactagaaaagcactctatctccccttttgggatttaattgctgttctgtgca

SEQ ID NO: 140032 - DNA, 423 bp, Glycine max
  Clone ID: PAT_MRT3847_97458C.1
ggggccgaaagatcactttttttttcgttgaacaatgttttttaacaaaagtttcacccccaaataaaaacaacaccccattttcccaatttttgtgccgtccagaaaaatactttcaaaagctttttaaaatttggggaaccccctttgggtttaaaaaccctgacccttcatttttttaaaaaaattttttgggccccatgcctttttaaaaatcccctaaaggttgtttagggtttaaaaaacccaagcttggaaagtttttggggagcctcaccgtaatcagcaaaaaagggttttttccccccttgttttttttcaacgagaggggggaatacaggggcaaaaaaaaaaacctttttaaaagggtgtttaaggaaaactttttttttaccaattaaaaaattggggaagattgagttg

SEQ ID NO: 140033 - DNA, 132 bp, Glycine max
  Clone ID: PAT_MRT3847_97459C.1
gcaacaatatactaatgattttgtcttatactttgaccctgatacatgataaattagtaacaaatcttggagacaattactttccaaatgaagttactctctgtaaatgacacatgaatttctagcataatt

SEQ ID NO: 140034 - DNA, 336 bp, Glycine max
  Clone ID: PAT_MRT3847_9745C.1
gccgcccttttttttttgggtggtttttttttttgattccctctttttctccccaggatttttttggtttttttttttggggcccaaaaatttctgcctttttttggggttattttccagccccattttttaaacccttacactactccggggacaccgtgtttatttttctacataaacttttacccctttctatttcctccaaaaacatgaaaagacactgtgccgccgtaaggccatttgctaaaaattttttcaaagacaacaatgttttttttttgcgtgcgtgcatgatgcccaaggcccttcacttggactggggcccccaggaaggtt

SEQ ID NO: 140035 - DNA, 1311 bp, Glycine max
  Clone ID: PAT_MRT3847_97460C.1
agtgcttgtccagtcctcaatattattatcaccaccaccatctttcccctctaagtctaacctcaacaataacatggatcatcaattctcacacatcatccccacagaaagatcacctagaagagaactccaacttcaaggtccacgccctacacctctcagaataaacaaagactctcataaaatcaagaaaccaccgttggcaccacaaccttcacaccctcatcaacctccaccgcgccaacctataataatctacaccgtgtcccccaaggtgattcacaccaccccaagtgacttcatgaacctcgtccaacgcctcactgggtccagttcttcttcctctgctgaagtggtcatgtccaacaataacaacaccactcatgtcgaccctttcaacaacggcggcggcggaatggtgtcgccggcggcgcgttacgccaccatagagaaggccatgtcccctatggggaaaaaacatgttcttcttccaagtgtgaacaatattataagcgatgtggaagggatagagattagtataggtgatggtgtacttgagagatcacaacaaaatatgtttcaagggattctgtccccgggtccagcttcgctatctcccattccttcgaattttttctctccaccgtcttcttcggatccaagcatgattagcttccttcgtgatttgagtcctatgtttcaaagcggaagaaattttacggagggtggtagttctttcgtcttgcctagcccttcttcaaacttcagttttgtttcaccgcatactccttctatagacttattcaactatttcttagattagcaaattcgaccttcaattcgaattcttggcgtttattgttgaatttgattagtttttttattttactgataaaaaaattggattcgaacggagattgataaggattggtttgtcgagttatattgtgtagtttgagaggagggggaaaagtggaatttgttgctctttcggtgactatagttctagatagctgcaatttggaaacttctttgttggaaattttttttctttctttttttagggcaatgtttgtgctctcgaatttcttatggccttcgccgttgacatcattctttggcatgtattgtacattgcgtttagtttgctgatgcatgtcggcactaaatatattcaatcccatttatatcccccgtgtaagatcagataatcacatgtatgctaatctggcaacctttgatcattgaaagcatctaccttacttttttttaaaaaaaaaaaagaaactactcgagactagttcacctcgc

SEQ ID NO: 140036 - DNA, 453 bp, Glycine max
  Clone ID: PAT_MRT3847_97461C.1
tcggtgtggggaaaatcatgcaggtaaatacccctgccgtaacaggtggaacacttgaactgtgaaactgggagcacaacactgccatgatagaatctctacttgatgaaaaatgttcctgggatagatgaactggctagtatagagatgcttgagagaagagcagggacactgtgaatcctaatgaattcaactggattgctgggaagatccttaaatgattttatgacagagatttgcgatctgatataattgaatctgatctatgtggggccttgtttcctggagaattttcaatcagcgatattgttaaacattggattgagatattctctggatttgataaaggggaggcaaaggctcttgaaaagatactggagcagaaacaaaggttacaacaagagatgcagaagtatctgtctctgatgaagatgagtcaggataaaagatatt

SEQ ID NO: 140037 - DNA, 379 bp, Glycine max
  unsure (1)..(379): unsure at all n locations
  Clone ID: PAT_MRT3847_97462C.1
tttnggttttttttttttttttttttttttggcaccacaaaagtttcatataaaactgggtattctatgactttcttgcacatataactctgcgaagaaaaccttacacgccatcttttcaccaagtgacacaatacgccgtttaaccagagatttgtatcattgtgttggcctaacataatcaggctttttaaggattaaccaacataatggctgacatatttttttcaccactcatacaggggatgctgcgaatcagagaacatgaccccacgacttttttatgactaaggaactgggcccgtggtttaaccagaaatttttatgggcttaacatcagggtttttaatatcttcctttggaacagctacagggggaa

SEQ ID NO: 140038 - DNA, 376 bp, Glycine max
  Clone ID: PAT_MRT3847_97463C.1
ggttgcacacgacatgggtgaggaatggttagattgtgctgatgaggaggattcttttgaggaagaatctttaagtgcatcacttaatggtggtgagggtttggactatatggaaagaatacctcttgccacatctgacggctttcctgatgagctttcacgcacaaatggagaaaaaggcaaaacgagatttgtttctggggatggcgaagagatgacattgatctccggaaccagtgttgaaaaggctcacaacaagctaatggttgagcttgagaaaagtgttcctacatgtggctggcattgtatgtcccatggatagagaaacttgctgactgcaaaatttttgacatacctaagactcgctgcttcacta

SEQ ID NO: 140039 - DNA, 206 bp, Glycine max
  Clone ID: PAT_MRT3847_97464C.1
attttcctagcgtagattccttctccaatggctcttgccgtgtttactacttcttcctctgcagctgcagctggagcagcatcttcgagctctttgttctcgcgccttggatctttatcggacgcaaaaggaccgtcctttttttttggtagacatcccgagaggtttgagaacgcgggtgtttaccacaccgcttgtctgagatg

SEQ ID NO: 140040 - DNA, 374 bp, Glycine max
  Clone ID: PAT_MRT3847_97465C.1
gttctagatcgcgagcggacgccctatacacatttttctctatgtggcgatatacgcgagttgaaactacgattctatcaaatcgttttatggacttactttttgctttaacagaaactaacggtctaatcattaattaaacatatcgctgtttatatatatacggaccgatattctatatcgtgtatcctaattaagattagacccctgcctataacgtgttatagacttctttattttttggaacttatccattccttttctaatgagcccgacaatccgaaataattgtgggggaggggtcattgcgtttgtgatctaccatacctagagctctgcgtggtgagctgatttgcacttcccacgtgcaacac

SEQ ID NO: 140041 - DNA, 288 bp, Glycine max
  Clone ID: PAT_MRT3847_97466C.1
tatcacgcggccgcaatgccctatataggggtgctgttcgtgaacgagagaggatgttggcacatgcgggccattaaggagtggcgtacatcatggcgttactccatgcacggccttaggcacagaaacggcctgcagcagcattgggggacaaggttccatcatgagctgcaagaacggcgcctgctatggtggtgcctgcatcacccatggtgcgccgatgcgagtggactctgataccgagcatgcgctgcacagaagatggggagctggacaagccaactcggg

SEQ ID NO: 140042 - DNA, 944 bp, Glycine max
  Clone ID: PAT_MRT3847_97467C.1
cccagattctcactgcttctggtgatcaaacaataaaagtatgggatgttcaagaacagaagtgtcttggactgttgactgggcacacaggaagtgtgaaatctatgtgttctcatccaactaattctgatattattgtctctggttctagagatggatcctttcgtatttgggacttgagatgcaagtccactgctaagagtaggtgtggagaagttagcatatgttcaatgggaggcgtcaaaggagcacatatttcatctcaagcaagacgaactaggagaggaagggctgcttcaatgagcattacatctgttctttgtctcaaggaccaggtttctatagccactgctggggcggtggatagtgtgttgaagttttgggacaccagaaatttgaaaagtactgtcactcagacttctcctagtcctcagtcaactgaaaagcaaacattacatggaatatcaagcttgtcccaagatgaaatacggctgcgacaagacgacagaaggatggataatcgaatttatttgtataacactcttcaacttgaaaaagggcctttaaaatctttttctgggtgccgaattgaatcattttttgtaaagtctgcaattagccctgatgcatcgaacatagtcagtggttctagtgatggaaatgcctatgtttggaaggttgacaaacctctggaagatcctactattttgaaaggtcatgatggcgaagttacagcagttgactggtgtagctctgaaattgggaaattagcaacttgttctgatgatttcacagttcgtacatggaataaaaacagttatgtcttcagtacacaatgtgcatctgccatcctaagaagagtaatggcgattcctagtatagagtgcaaaatgctcttaaacaatggaaaaacgtactctaagacaaatgaagatgctttctta

SEQ ID NO: 140043 - DNA, 368 bp, Glycine max
  Clone ID: PAT_MRT3847_97468C.1
ccacggttgccgtttgttacaagccgccaacaaaagcaatcgtcacttgctgtcaagaatatctcaatttttgactacttcttagcgtacgaggccttaaagcaacgagcatcactctctgggctggccgcctgctgaacgaagcagatcctcatccactcttagtttatttgctgaacactatactattagacataggactaggtgtcacacgtgaacttcttctgtctgaatctgagatctctgtttacaatcaagatcaagctggtgaaaactaggggaagatctcccactctcatagtggatgtaggcattacgtgggttgcagaacatactaaattactaacgtgcactgtattcttctgaca

SEQ ID NO: 140044 - DNA, 307 bp, Glycine max
  Clone ID: PAT_MRT3847_97469C.1
gagatcaacacatacgaaacgtagttgacagggaccttatttgggacctgtctcatgtcccatttattgaaccgtttcgtaacctcatccatccttacacatcgtgttaaacaccctccttgttaacagtagaccttgtgaccgtcagatggcttcgggatgatgtactcaacgaagttccttccatactaagactgctatgaagcactaatcaacctttgctgatgacggagggaagcctttcttgcactgagtctgggccttcacatatgacgatggtgtcagatactctcatatctcaacgggt

SEQ ID NO: 140045 - DNA, 505 bp, Glycine max
  Clone ID: PAT_MRT3847_9746C.1
ccacgcgttcggcgcccgcctttttttttttttttattttcccttttcaaaaccccaaaggggcggccccttaaaaccaaaaaaaaaaaaaaaaaaaaaaaaaaaaaaaattgggggggggccccggaccccggggcccacccgaaaataccagagcgaaacccgcgggcgtcccatctttcccaaaagggagacgaataaaagcttggggaaaaccggggcaaaacgggtccccgggaaaaaatgttatcccaccccaattccacacaaaaaacaacccgaaaacaaaaagtggaaagccgggggcgccaaaggagaacaccaaacccacattatggggggggcccccacggcccccttaaaaaaaagaaaacccggcgcgcccaataaaaaaaaaaaacacccacccgggggaaaaagggggtttgggaacagcgcccccggggggtttttcctctcaccaaggaaaagggaaaaaattatttgcccttccccgcctggccct

SEQ ID NO: 140046 - DNA, 484 bp, Glycine max
  Clone ID: PAT_MRT3847_97470C.1
caattatacaaacacattcttctcttctcttcctctcaaataaatttattttctttttttcatatttttcttctaattttccctttgcataatttctcgcgtaacggaaagccatgaaattcggaaagagcctgagcagccagatcgagaaaaccctgccggagtggcgtgacaagttcctctcctacaaggagctcaagaagaagctcaagcaattcgaccctcccgccgccgccgatgagcgccccggcaaacgcctcaagtccgacgccgttcccgacgccgccgacatgtcgaaggaggagagcgacttccggaacctgctggagaatgaactcgacaaattcaacaccttcttcgtcgagaaggaggaagagtacattatcagactcaaggagttacaagatagggttgccaaagttaaggattcaagtgaagagatgatgaaaatccacacggaaattgtggactttcatggagagat

SEQ ID NO: 140047 - DNA, 424 bp, Glycine max
  unsure (1)..(424): unsure at all n locations
  Clone ID: PAT_MRT3847_97471C.1
atgaatacttaacaataatacttacatccattgatccacacaagtgagggccataactatgttttttggattgtctgcttcccaatattatatatatccatccctgcatataaatgcaacttttctatattgtgatatgaaggaccacacaccatgttccgcaacagtgatctcacgccaagagctttagttggacgaaaaatctttctagctctttgcccctataagtacaatagatctaccatgcatatatggcaattaactaccttgggtgatattttaatatcagaataagtacaaaggcatccaggccataatcacactttcactttattaattttataacaacttgcatattgctaagaaaatggtacatttttttttcttgtaccacttattaancttttaattatttttttttaaa

SEQ ID NO: 140048 - DNA, 1424 bp, Glycine max
  Clone ID: PAT_MRT3847_97472C.1
cgttttctcatcctcataaatatcatctcttcctctcatattaatctccctccgaaatacaattatacaaacacatattcattctcctcacataccaaaaataaattatttttcttgttattttccctttgctaacggaaagccatgaaattcgggaagagcctgagcagccagatcgagaaaaccctgccagagtggcgcgacaagttcctctcctacaaggagctcaagaagaagctcaagcaattcgaccctcccgcccccgcctccgccgccgatgaacgccccggcaagcgcctcaagaccgacgccggcaacgccgacgccgacgccgtttccgacgcctccgacatgtcgaaggaggagagcgacttccggaacctgctggagaatgaactcgacaaattcaacaccttcttcgttgagaaggaggaagagtacattatcagactcaaggagttacaagatagtgtggcccaagttaagggttcgagggaagagatgatgaaaatccacaaggaaattgtggatttccatggagagatggtcttgctggaaaactacagtgccctcaactatacagggctagtgaaaatacttaaaaagtatgacaagagaaccggtgctctcattcgcttgcccttcattcagaaagctcttgcaacatcctttctttaccactgacttgctctacaaggagagcctggagtgtgaaacaatgctggaccaccttttccctgtgaatgatcctgctccagtttccactgagacaactccccaagctgaaggttttgatccttcaacttcaaccactaccaagtgtgatggtttggtgattccgaaggaattagctgagatcgagtacatggagagcctttatatgaagagtactgtatcagcattgcatgttttgcaggaaattagaagtggaagctcaacagttagcatgttttcattgccaccgttgaagataagtggttcagaagaagaaacatggaagaaaatccctgttctggaacaagcagccaagtaacctgctgggttacgttgctgagtaatgtagagggatggctattttcccatctatttttcttctcttaaatcggacgcctctgttatgcacgccttagatactaacacagatgtaagatgctaaatgtaaagatggagttaattttatagaattataggttccatataataaaacctctggattttaaagaaattatgttttgacattttgctgacgcacgtattcagtaagtaatgcaattatatattccatttctgtttcaaaaaaatttggttggttagtggtatggactgcagggcgagatgatcctccggtcacctcaaatgcaaagctacaaccaaccatggatgataaactggtactaatagatggccaaggagaaaagaaggtt

SEQ ID NO: 140049 - DNA, 594 bp, Glycine max
  unsure (1)..(594): unsure at all n locations
  Clone ID: PAT_MRT3847_97473C.1
ggtggcggaggagaagagggagcaactctggagttcactccgacgtgggttgtggccgccttttgcacagtcatcgtcgccatttccctcgccgctgagcgcctccttcattatggcggaaagtttctcaaagccaaggaccagaagccgctctacgaagctctccagaagatcaaagaagcaaaccacgaatctcatttccagacatttttccctggaacagccaggcgccttctctctggggaacactccacccccgagtccgcctctaaaattggttattgctctcgcaagcacaaggtgcctttattatctgtggaagcacttcaccaccttcacatcttcatttttgtcctcgctgtcgtacacgtctccttttccgtgctcaccgttgtctttggaggcgccagaatacgtcagtggaaacactgggaagattctattgcaaaacagaactacgagactgaccgagttctcaaaccaaaggtcactcaggttcaccagcatgattttatcaggggtncgtttgctggttttggcaaagactctgctatagtcggttggttgctatcctttctaaagcaattttatgga

SEQ ID NO: 140050 - DNA, 663 bp, Glycine max
  Clone ID: PAT_MRT3847_97474C.1
ccacgcgtccggccttttgttttgtttttactttttagaacaaggtacctttattatctttggaagcacttcaccatcttcacatcttcatttttgtcctcgctgtcgtacacgtctccttttccttactcaccgttgtcttcggaggcgccagaatacgtcagtggaaacactgggaagattcaattgctaaacagaactacgaaactggccgagttctcaaaccaaaggtcactcaggtacaccagcatgattttatcaggggtcgttttgccggttttgacaaagactctgctattgtcggttggttgctatcctttttaaagcagttttatggatctgtgacaaaatcagattatgtgacattgcgacatgggttcattatgacccactgcaggacaaatccaaagtttaattttcacaagtacatgattcgtgccctcgaagatgatttcaagcaagttgttggtataagttggtatctttggctctttgtggttatcttcttgttgcttaacatcaatgcttttacttgctgtgggcactaagctggggcacgtaataacccaactagctcaagaagtagctgaaaagcatgcagccatagaaggtgatttagttgtgcagccatcagatgaacatttttggtttcatcggccccat

SEQ ID NO: 140051 - DNA, 3488 bp, Glycine max
  Clone ID: PAT_MRT3847_97475C.1
tcggaaattcgcgctcgtagggaaagtttctcaaagccaaggaccagaagtcgctctacgaagctctccagaagatcaaagaaggtttctttttctttctttctttgcactgagccttcaaatcaaattcatgatctgttggctgcactggcagagctgatgcttctgggcttcatttccctgcttctcacggttacacaaaacggcattaccaaaatctgcgttcgtcccagtttgacgcgccacatgctcccttgtaatctcgacgccggtgaacactccacgcctgagtccgagtccgccactaaaattggttactgcgtccgcaaggtcacaccctctcactccctcacttttcttttccttagatctcatctaatccaccacccctcgtcctcgccttttgttttgtttttcactttttcagaacaaggtacctttattatctttggaagcacttcaccatcttcacatcttcatttttgtcctcgctgtcgtacacgtctccttttccttactcaccgttgtcttcggaggcgccagaatacgtcagtggaaacactgggaagattcaattgctaaacagaactacgaaactggccgagttctcaaaccaaaggtcactcaggtacaccagcatgattttatcaggggtcgttttgccggttttgacaaagactctgctattgtcggttggttgctatcctttttaaagcagttttatggatctgtgacaaaatcagattatgtgacattgcgacatgggttcattatgacccactgcaggacaaatccaaagtttaattttcacaagtacatgattcgtgccctcgaagatgatttcaagcaagttgttggtataagttggtatctttggctctttgtggttatcttcttgttgcttaacatcaatggtatgctacaagacaggaagttatgtttttatgcatgtcatcatttaattggttctacctaggctgacactactttgcagtgtcaagactggcatctaaaacctggttttatgtttttgcatgcgccttgtgatcttgtttatggacgtggtagtcttattgatctccttatttgtgtgttttgtcatgaagttaatttaaataacactttttgcggtgaaaaaggaatcgagctttgagcttaagatattttttatgatttggggatgaatttcaagcatgacaattaacaataatgacatatactttttcctataaatagtagttgatctagttgcttgttttgctaattaccgaagaacattactttgaatcttgctattatgatgtctgttaatccttccaggttggcatacgtatttctggattgcttttattcccgtcgttgtaagtatcttggttaaatttttgccccttttttgtgtggagtgtggacatttccatggccatgcagtcattttactaggcttgcatacccttgtcttaattttgttcaagggttggaaaaaaatttgcaatgtttcctcaagcttcttaatcaaatcaagctagtagattgtttcaaaaactattgattttttattctattaaacttatgtcataccttggttttctgctgcatagataaccaggaaattggttcaacaatatacttaaaattcatgtaacactagtataatatcatatctattacttggtaaaattaagcaagaaaagttaccatgtcaaactatttcccactagtttatgtcatttatcattgtgaggtaggcaggtatagttttttaaaatggaagttaatcaagctcagtctccaaagatctctgaggctcaccttttctgctcaaggttaatgatgagtctcagtttgattcagaaggatagagggaaatggagagatacttgcaaaggcactttaatgcctacgccagtaacaatgtattcaaagggtgtgtatatcttgtgtctctgttagtggtctattttgtagtctttggctgtgagtcacagctacggcagccaagtgtggccattaggtaatcctcatagaatgtggattcccctatttgctgaaccccttgtgagtgaaatgtaaggaggtgctgacactagcctttttgggtcttattagtgtcctgatacatggtgaattcacttaattgggcccttgctacttaatctggaacaggaatgactcatgtcgcaggtcttgcaaaaagggtaatgagttgtgggagggaagaaggaaattttatttattttagtgatacttttgttttgcaattctaattaaatattcttgggaataagttttaagccataataatatcaattgtgagcatgatagatttctaggaatgccattcctaggtatattatatttattccaaggaatcttgctccccgaaacataaaatgttattttatttcttctgaaacaaatgccccctaagaatgacatttgttgctggttattttggaatttcctttctttttgcatttttctaaatattattattattggttatagaagagtcacatttatgcttgtgttgtcctttccatcggtgtttcttgttaaacctgtatgcatagacatgcttgtctatatttttattttctccgtgcaagttgatgtattaacaggttttcactgtctggaatatcatttgttttcttgcttgtccccacaccttgtgcctcccccttcattaatttcatagtttctgttttgcatttgttcagcttttacttgctgtgggcactaagctggggcacgtaataacccaactagctcaagaagtagctgaaaagcatgcagccatagaaggtgatttagttgtgcagccatcagatgaacatttttggtttcatcggccccatgttgtcctctttttgattcactttatccttttccaaaatgcctttgagatagcattttttttctggatatgggtcacatatggatttgactcctgtataatgggacaagttcgatacattgttccaaggcttgttattggggtatttattcaggtactatgtagctacagcaccctgccactgtatgcaattgttacgcagatgggaactcactataagagggcaatatttaatgagcatttgcaacaaaacattgttggttgggcacagaaggcgaagaagaggaaaggactaaaagctgatggcaatcctggccaaggaagttctcaggagagtgctaatacaggaatccagcttgggtcaattttcaagaaggcatctgctccaggaggcagttcttctgccaccaaagctgatgggaccaactcagtgtagcctatagaagtgaagatttacagtcttattttgtaaagttgctcacaaattgcagttttctttatattattttgtttgctaacagtgtagcattgtgggacatgtgtttgacttggtgtaggcgtaaggtcgaagttctatatgagtagatgctagtaatgccattggcatttctaacttctaagattcgtcatc

SEQ ID NO: 140052 - DNA, 1817 bp, Glycine max
  unsure (1)..(1817): unsure at all n locations
  Clone ID: PAT_MRT3847_97476C.1
ccacgcgtccggttcagagcttaagcccttctcaagctacaccagattgatgatgctgaatcatgtatatcatggattcccaaaagcaagccacatcctggttccttatcacaggcaagattttttgggatgttttctgaggcttattgcttcttcgttagagctcagattgagatggcttttggaaggtttgagaacgcagttacaactgctgagaaagctagtcagattgacccccgaactgttgaagttgctgttttgctcaacaatgtgaggatggttgctagagctcgattgcgtggtaatgatctttttaaatcagaaaggttcactgaggcatgctcggcatacggggaaggttttgaggctcgacccttcanactctgtcctctattgcaatagagcagcattgttggtttaagcttgngcaatggggaaagatcaattgaagactgcaatcaagctttacacatccaacctgattacactaaagccattcttcgaagggctgcctcaaatagcaaggnaaaatgcgtccgagaggggaagaagtatataatttaaaatttggtggtgaagtggaagaagtctcaggtcttgagcagtttagagctgcaatttctttaccaggtgtatctgttgtccattttgaagttgcatctaacttgcaatgcaaacaaatatggccatttgtcaatacactatgtggtcgatatccatctattaacttcctcaaggtggacattcagcaaagcccaacagttgcaactgcagagaacgttcggattgtaccgaccttcaagatatacaaaaatggcagccgggtgaaggaaatcgtatgccctagtcgcgacatgttggaacactctgtgaggcattacagcttttagaacctcatgacttgtaatgcttctatgttgtcttctgcacttccgtcttgttgtttccccaaacctccagttaaactctctagtctctacagctcttccagtcttttgatcccaccataaagtgatcacctcatcatatcatacctgtgacatagtcaaaaccaaataataatctctttagcagccaataccattggaacctagagatagtcttgtagttccttttgaagtttttatttattcattcgttcctcattgctctttggttccatgttcctcccaactcccttttgtcgattttctttgtcttatccactccttttcagttcaataggtcagctgttcttgtaccccccagtttcttcaaggttaaaagtaaaaaaaaaaaaaattgtttttttcttgtctgtacaattgatttaatgatgagtttaaattaccttttaagatagacaaatatagacagatatagaatgaagggagggggagggtgttgtgctagttagaggggggatctgtacaatgtatatatgtggtgatatatacaagacactggaagcctttgaggggggagagataggatgagtggtggggtagctactgagttggcaaaaggaggatgaaaatgttactattatcattgttttttttttatcctatcttagccatttaatcaataaaaagttcccatttttttttaaaaaaaaaaaaaaaaaaaaaaaaataaaaaacaacaaaaaaaaaaaaaaaaaaaaaaaaacaaaccccccccaaaacaaaaaaacacatataccaaaacacacacctgcgacaaaacacaatttaagagggcgccccctctttagaagaaccaatttttttttccccccggtcttttgcaaaacaaaataaacttttttttattggggggccccccccaaaatactc

SEQ ID NO: 140053 - DNA, 2899 bp, Glycine max
  Clone ID: PAT_MRT3847_97477C.1
ccacgcgtccggttgaaaaacattggatggcttgttttgtttttatgatgatgagtagtattatataataatttatgggagcagaaagacaagacaaaacaagagagaatgagtggcggaggaggaggagaagaggaagcaactctggagttcactccgacgtgggttgtggccgccgtttgcacagtcatcgtcgccatatctctcgctgctgagcgcctccttcattatggcggaaagtttctcaaagccaaggaccagaagtcgctctacgaagctctccagaagatcaaagaagagctgatgcttctgggcttcatttccctgcttctcacggttacacaaaacggcattaccaaaatctgcgttcgtcccagtttgacgcgccacatgctcccttgtaatctcgacgccggtgaacactccacgcctgagtccgagtccgccactaaaattggttactgcgtccgcaagaacaaggtacctttattatctttggaagcacttcaccatcttcacatcttcatttttgtcctcgctgtcgtacacgtctccttttccttactcaccgttgtcttcggaggcgccagaatacgtcagtggaaacactgggaagatttcattgctaaacagaactacgaaactggccccgcggtcgcttcactacaaggtacctttattatctttggaagcacttcaccatcttcacatcttcatttttgtcctcgctgtcgtacacgtctccttttccttactcaccgttgtcttcggaggcgccagaataccttgcgttcgcactccttggctccactatcccttcgacccctctacaatcttccacttccagtcttgcccgccgccttttacttcccagtcagtggaaacactgggaagattcaattgctaaacagaactacgaaactgacccgagttctcaaacctacaccagcatgattttatcaggggtcgttttgccggttttgacaaagactctgctattgtcggctctgctctagccggttggttgctatcctttctaaagcagttttatggatctgtgacaaaatcagattatgtgacattgcgacatggtttcattatgacccactgcaggacaaatccgaagtttaattttcacaagtacatgattcgtgccctcgaagatgatttcaagcaagttgttggtataagttggtatctttggctctttgtggttatcttcttgactagctcatagagtagctgagaagcatgctatttagttaggcagccatcagatgaacattttaggtttcatcggccccatgttgtcctctttttgattcactttatccttttccaaaatgcctttgagatagcattttttttctggatatgggtcacatatggatttgactcctgtataatgggacaagttcgatacattgttccaaggcttgttattggggtatttattcaggtactatgtagctacagcaccctgccactgtatgcaattgttacgcagatgggaactcactataagagggcaatatttaatgagcatttgcaacaaaacattgttggttgggcacagaaggcgaagaagaggaaaggactaaaagctgatggcaatcctggccaaggaagttctcaggagagtgctaatacaggaatccagcttgggtcaattttcaagaaggcatctgctccaggaggcagttcttctgccaccaaagctgatgggaccaactcagtgtagcctatagaagtgaagatttacagtcttattttgtaaagttgctcacaaattgcagttttctttatattattttgtttgctaacagtgtagcattgtgggacatgtgtttgacttggtgtaggcgtaaggtcgaagttctatatgagtagatgctagtaatgccattggcatttctaacttctaaaaaacgtcatcacccttttacttgctgtgggcactaagctggagcacgtaataacccaactagctcaagaagtagctgagaagcatgcagccatagaaggtgatttagttgtgcagccatcagatgatcacttttggtttcatcggccccgtgttgtcctctttttgattcactttatccttttccaaaatgcttttgagatagcattttttttctggatatgggttacatatggatttgactcctgtataatgggacaagttcgatacattgttccaaggcttgttattggggtatttattcaggtactatgtagctacagcaccctgccactgtatgcaattgttacgcagatgggaactcactataagcgggcaatatttaatgatcatttgcaacaaaacattgttggttgggcacagaaggcgaagaagaggaaaggactaaaagctgatggcaatcctggccaaggaagttctcaggagagtgctaatacaggaatccagcttgggtcaattttcaagaaggcaactgctccaggagacagttcttctgcccccaaagctgatggaatcagctcagtgtagctatataagtgaagatttacagtcttattttgtaaagttgctcacagattgcagttttctttatattattttctttgctaacataatgtagcattgtgggacatgtgtttgacttggtgtacgcataaggtcgaagtactatatgagtagatgctagtaatgctattgtcatttctaacttctaagattcgtcatcacctccttactacactcgtcctccctcaggtttttgcctctgatacttccgtagacaggctgacactgcctttctctctaacttgagttcctgttaaaattatgtgtcttttatttaatgtaaagttaagctactttaggttgataaagttcaagacaaacttggtagaaaaaatcttccttccttgtccg

SEQ ID NO: 140054 - DNA, 444 bp, Glycine max
  Clone ID: PAT_MRT3847_97478C.1
gatttatatctttttgtttttttgttttttttggggggggttttcttttttttgtttttttttttttttttttttttgggaggggagcgaccaattgccaaacgtttggttataagttgtttgttgaaaaaaagggatccctggccttaacacccgcgggggggggggaaaacacttgaacttggtcaaggggcgaaaatgaccactttattttaagggggttggggtagacccaaaacacgggagggcaacagagtgaaaaccagaaaattctgaaggtttgaaacaacgaacaggtttcagcattatttctaaggggacccgggggccgacgcgttcctccacgcctccgagggggggggggtcgacccggggtttccggcggggtgcctgggggggggcgcggtttgcctatgagggggggtcttagcgggtggggaaaat

SEQ ID NO: 140055 - DNA, 264 bp, Glycine max
  Clone ID: PAT_MRT3847_97479C.1
tttttatccacaatgacttggcatatacggtggggttctactatgtgggcaactgtcctcattaacatttatcgaaaagggtcccttcaattccacccccccttttcttcaaggcccttattttcccatttccttccccaggatataaaatccacaccttttccaaagaccctcattcaagaatctttgcttactcttcaataaaaaaaccatgtcccactaaaaaacttacaatttattttgttttactgctttcgcaaaccc

SEQ ID NO: 140056 - DNA, 321 bp, Glycine max
  Clone ID: PAT_MRT3847_9747C.1
cactgagcatcgtctagctatctcgatcgaactgtccaaggtcctgtcacccgtacccgtaaccagcccgtttacgagtggggttgtttagctgtaggtgtattcgtgttttgagctactaaagtggaatttgaaggttgtgtggtgttcgtcatctctataaggtagtactggtcttgttaaggtggtgttattgtacttgtccttgtaccacccggtaaacatcatcaccttattcttaccaaagtcggcctcgcgtcatcctcactgcgggtgaccgtgcctcctctctgcaggaacaattcaaatacccaactactt

SEQ ID NO: 140057 - DNA, 212 bp, Glycine max
  Clone ID: PAT_MRT3847_97480C.1
cccttaaattttggtttttcttttttttttttttttcccggatcccaaatctggttctattatagagcattccccagtttaactaaggacagcaccgattatcattttaaccatttctagatgcccattccaccaacatttttgctaaaccaatatttaagaacatgtcctctggggggccctaaaaaaattcccatcaaatacttaaccca

SEQ ID NO: 140058 - DNA, 315 bp, Glycine max
  Clone ID: PAT_MRT3847_97481C.1
ccgtcctttgccggacgtcctttagccatgaaagcgttgactccaataactacacgtgcgaggcctattctctttcttagccacagcacgcagtggccctccatgcggagctccgtgaacatgcatgtatacgctcgcctcgcagactccataatgcgcaaccgagtgcaccgaaatacttaagtttgcactgtatcgtcggacgacctgtataaaatggtttaggcgtgagaccctgccgcgggccagccctatagggccatacctcgcgtgaaattacgtatatggatgaacatagcgtaagagtattccata

SEQ ID NO: 140059 - DNA, 308 bp, Glycine max
  unsure (1)..(308): unsure at all n locations
  Clone ID: PAT_MRT3847_97482C.1
aacaagggccccaggccgacaaaaagcaagacgaaaaaattttaccccacaccgagcaaggaaaaagagaaggggccacccgggggacagggggcaaaagagagggaacaagggccacaacaaggagccaacaagcggcccaaaagcaaaggaggacaggcgnaaagcacaggaggaaacacgcgggcccgcgaaagcaccgaagaagccacaagacaagggaggaaagcaannaacaaggccaaacaacaccagaagagggccaaaacacaggagaaggcaccaaaagccgggacacaacaaacaca

SEQ ID NO: 140060 - DNA, 1249 bp, Glycine max
  Clone ID: PAT_MRT3847_97483C.1
ctttagctttactttccttttgatccttaaaattcccattttgaacagttattttgtttctgatcctcaaaaagctccaggatttgatttgtaataagaaatctagcaactagttcatgggttaatgtacattttaaatggagattgtgccacatttatcttctgctatctcgattggatgagtcttacctctttttattttttgctcacatatttgatctctcctttctggttggcttctgcttgcaggcaagttctactgacatcagaaatcatggtttgcattggactactcttaagcttccacataatgattccttactctgtgactcaatatgttggatcagcccttatcacatttgtgtctgctgaagttcttgaaggagtgaacctttcacttctgtcaaaaatgatgtcatcaaggctttcacgtggaaccttcaatgggggattgctgtcaacagaagctggaactctagcccgagtaattgcagatggaacaataacaatctctgggtatttcagtgaaagtaaactcctgaataccaccttactccctgcactcctcatctgcatctcatccattattgctacctgctacagctacaactctctttattagagtaaaagtaattagcctttcaataaaaatctgaagtgtatatagtggattttgtgaactactcacttatcggtgagtagtggttaaaaaatgctgtattagccagtgtcggaagatacctgattcaggttgacagcataacgtttttgaaatctagtactattatgtttctatgaataatgcaggagcaaatctcccttgtggaagattgttcttttccaagccactcttggcattattttttctcatttggttgctccatatttatttaacaatcgacagaactggcatgcatcgcaaggttcgctgacacctctgcattatcagatgaaaatggcgccactgaaactatgctgatgactatgaataggtacatagttagcttgtacccatcatgcaagacggtctgattatgatatcatgtaacccatcaattgttagacacgttgagtatttctgagaatggcatcaacctggtggtttactctatgtgacaatgtcaaatatcataatggtgctttatgatcgtatatgaaaatattttagatggatctgatagcctcattcattgctatataatgacttggtcaaagacttaagctggttcacatcctatgctaaactctg

SEQ ID NO: 140061 - DNA, 840 bp, Glycine max
  Clone ID: PAT_MRT3847_97484C.1
ctcgagccgaatcggctcgagttccttctaaaaattgcgtttcatgaggatgaagaatttgaaagccagtgtgctaaggagatacaaagaagaaaagaagttgaagaacaattggcaagggaaaagcaagaagtacagaaaatgaagaatcagcgagatgaaatacttgaagaattgcaaatggtccaagaccaaaattcagcacttatgaaccaaatttctgagtcccagtgtacagaaacagagttggaggagaagatcatatcagctgtggacctcttgataagtttcagggaacagagagataggcttaggatagagcatgcaaatgcagttagggaagtcaaagtgctgagaaaaattggggaagcagatacttccttctcttatcgggtagaattccctgcattttcttttgtggagataaatgaggcaactaatgattttgatccatcttggaagattggagaaggaaggtatggaagtgtttacaagggacagcttcgcaacatgcatgttgccataaaaatgttaccctcttatggttgtcagagtttattagagttccaacatcaggtactcgtcttgtctcgggtatggcgtccactccggtctccgctaacgggccgctgtgcagaggctcggtcactcccccgtgaggtctcagacattggccgccttgttacccgtcttgccctcatcgtctcgacccctcccccagggctgctgcgtatatcctgtgccactacaacaggaacacttcataacttattctacccgattcattttctgaagatgtttggataatttgatgtattttttgtataagtctccagagag

SEQ ID NO: 140062 - DNA, 567 bp, Glycine max
  unsure (1)..(567): unsure at all n locations
  Clone ID: PAT_MRT3847_97485C.1
tttctctctcctcctttctctcactactcactcaccccttcatctctttctctcattctctttgctgcttgtacagaacagtaaagtgcttaggatagcaaaaaagtttctgcaatccaaaccgatctgttctttcttaatttcctttctgcttgccttttaaccgcttcatcttttggttgttactttctgagaattttccatttgggggggagggtctctctttggcactttccatacttgttgatcttgcttttgtgtcactgtttcaccctttgttttctaatctaacttcttcacctgtggagttagtaatcttctgctatcaaatcactgtgtggttgttgaactattattattcagagtctgctattttcagtatgcatgcctggttgcagaataaaacaacaaacttgttgaaacccaggaataaaaaaaccacctttgaggtttagatttgatatatactcttacaaaagagcatagatttgntttttttttttttctattggggtttatcttggttcagttttttatggagttgatggggtgtggaaagcttagggg

SEQ ID NO: 140063 - DNA, 715 bp, Glycine max
  Clone ID: PAT_MRT3847_97486C.1
agccttccggttcgttaaaaatagaaagcacaacacataagctacgcacacgtagcttccttcatttcggaaattctaagcaatcattaaaagatggcagatggtgaggatatacaacctcttgtttgtgataatggaactggaatggtcaaggctggatttgctggagatgatgctccaagggccgtgttccctagcattgtgggtcgtccacgccacactggtgtgatggttggaatggggcaaaaggatgcatatgttggtgatgaggctcaatccaagaggggtattttgacattgaaatacccaattgagcatggcatagttaacaactgggatgacatggagaaaatctggcatcacactttctacaacgagctgcgtgtggccccggaagagcaccctgttctcctcacagaagcaccacttaatcctaaggccaaccgtgagaaaatgacacagattatgtttgagaccttcaacactccagctatgtatgttgccatccaagcagtgctttctctttatgctagtggccgtacaactggtattgttctggattctggtgatggtgtcagccacacagttccaatctatgaaggctatgccctgccacatgcaatccttcgttttggatcttgcgggggcgtgacctcaccgatgccctcatggaagatcttaaccgagcgcggctactctttcaccaccactgctg

SEQ ID NO: 140064 - DNA, 268 bp, Glycine max
  Clone ID: PAT_MRT3847_97487C.1
ccctccctcggccgagtgtgccaaaatcatggaggttattctaagcgcagctggcgatctcaaacctctaactgatgggaagaacgtttgattggcagcgcaggaatctcttgagaagataagactcaagtgcatggggagaactcatgccggggaacagccggcacaaggaccgggagaaatattgacttctagagcacgcgacttcaaaaccgcacaggggagtaaaaaaagcaagcctcatgctactggaatacgtgtgcgaact

SEQ ID NO: 140065 - DNA, 374 bp, Glycine max
  Clone ID: PAT_MRT3847_97488C.1
cggacgcgtggtcgtgggtctcgtttttgaccaatatatctggttgtatatagtcgacttagtgaaatgataatcagtaatcggagtaaaaaaaaatgaaaaaaaaaaaaaaaaacaaaaaaaaacacaagctaaaatataaaaccaaagggctgtccatctatagagaccatggttacatccgcggacatacatggaaatgactctcgtatacacagcactaaattcgatatattgcccgactgttaacatatggcaacctgagaaaaccgcttctgaacggacttcatctgcgaaagcccataacacagtttatgcaattggcgttactcagtccaggaccgaaccgatcatacgtgaaaacaggaaatcca

SEQ ID NO: 140066 - DNA, 364 bp, Glycine max
  Clone ID: PAT_MRT3847_97489C.1
gcaactcgatccttatatacacatatctttaaatgaaagataacataccattaggggatttcacagcaaaaggggcctataataaaaatccattttgcattatactgatcaaaggactgattctaatactacataaacagctagtcttcttgtagaatatttcgatccaaacgtcaccaatctcagtacaactcattagctccacacactaatcattcactcactacacacatttatacttgataatgttgaactcttgctttcaaataaacatttacattaaaattccaacatacctaaaaaaaaaaacccttaaaaacttctcatgaatgaattatataacttcttaaatctacaacatgac

SEQ ID NO: 140067 - DNA, 583 bp, Glycine max
  unsure (1)..(583): unsure at all n locations
  Clone ID: PAT_MRT3847_9748C.1
ccacgcgtccgcttccaaaactgtccaaccattttcttgggatgtaaaatatttccccttttctctgctctttttcatcatcatttacttcttcttcttcctctacccagaacgaacgaacaaatggggttcttgagcagtttcttgggggtttttggttttgccgttggaatacctcttggcctcttggttgggttctttctctttgtctactcagaaaccaaacatgtcaaggaccctgttgttaggccaattagtgaattaggcccaaattctctgcaggaacttctgcccgagattcctctctgggtgaagacgcctgattatgaacgagttgattggttgaacaagtttttgttggatatgtggcccttcttagacacggcaatttgtaagattattagaagcatgactcaaccgatatttgctgaatacattgggaagtatcagatcaaagcgattgattntgatgagttaagccttggtactcttcctcctactgtctgtggttggaaaggtttagaaacaaatgaaaaggaaattgggcatggaacaagttatcaaatgggctggtaatccaaac

SEQ ID NO: 140068 - DNA, 208 bp, Glycine max
  Clone ID: PAT_MRT3847_97490C.1
acacaatataacacaagaactagagctgcgttggttttacatgcacaaaatactaaaaaactcgagcgtcaaccttgtgatcgtaggggagacctacaccataggatcggttgcattgcaatgcaagataacgggcctttgcctcccattgcttatatagtgtagaggtagacgtacgactgggtcttgtagagaacacttttttctg

SEQ ID NO: 140069 - DNA, 200 bp, Glycine max
  Clone ID: PAT_MRT3847_97491C.1
gcccctccggaaatcagaaaaaagcattaagcagcgttggctcgccctaacttggtatgcgataatgagccacacgatgattgtacatgggactacaaaaacatttgctccggggggcctaagattgcattttaaagcgttggcatttacactattatcaacttcctttggcctcccccagaaggggtatttatctgccg

SEQ ID NO: 140070 - DNA, 338 bp, Glycine max
  Clone ID: PAT_MRT3847_97492C.1
gcctatgctttagggccgggggggggcttttggggacccggccaaaaaagcccaaacctccgccacggggagggaccatcaaacaaacaccaaaaaaagaaaggaagggggaaaaagacccccacccccacctggggctggtcctaaacacggaaaaaaaacccggacgcggggggcggatcgggaggagcaggcgcaaaacccatccctggggcggtggaaggaaacgatgaaaaaagccgaggggacgtggacccaagggggggggggaaaagggccaggggccactgtaccaagagggaggggggcaaaagccatctaacccccaaccccaaggg

SEQ ID NO: 140071 - DNA, 267 bp, Glycine max
  Clone ID: PAT_MRT3847_97493C.1
ttgaacagtcaagctaacgtagtatcatgtaggaggtttagaggtttacgaagcagaatgtctgtctcattttttcttttcaatttttttttcctaattcccttctctatcaaatagtttatagtttatttcttatcatttttgtaattatatgtccttgcaatgttcttcgaaatatagatagatttaatgttaacaaaaaaaaaaaaaaaaaaaaaaaaaaaaaaaaaaaaaaaaaaaaaaaaaaaaaaaaaaaaaaaaaaaaaa

SEQ ID NO: 140072 - DNA, 462 bp, Glycine max
  Clone ID: PAT_MRT3847_97494C.1
ggaccgtaacaatggaaatcttataagaatcgaagaaaagatttaggcttacacatgaaatgttgattcccgttcatttgggtctagtgcccactctctagggatccgaaatcaaataaaataaatcctaatcccaccccccacgagcatgctgtccattttctcatcctatattttactctgggctctcattgctcttccaataataataacaatcgcacttcccatgttttttttccaatgaaaggaacggcagcaaagtttagagagacagttctctccactcattaacataattactcatcacacagcatctgcaagaatgaagggagggagaggcatcgatgaacactatcaattcagcttttacattttttcatttcttcttgccaaattcaaataaaaatgttacacaacttgaggggaatttcatgcctgattcgtattttcattgataaatga

SEQ ID NO: 140073 - DNA, 326 bp, Glycine max
  Clone ID: PAT_MRT3847_97495C.1
aaaacctaagcttacaatctgaaactaagactagaagaagggtaagaatagatcgctgtggatgcaggtaggagagaaagctgtagagtccattatggaaacagctacgaacattggtgcttctgtacaaggctggcatggagaagaccaaagccactgtacaagataaggcacaatgaatgacatcacgtgatccagtgcagaatgaattggcaacccaactgaaagaggcatagatgaaccacgctgatctggacaagcaggctgcacgtcagcataacacggcggtcaaacagtccgacaccacggatgggcacatgtgacat

SEQ ID NO: 140074 - DNA, 429 bp, Glycine max
  Clone ID: PAT_MRT3847_97496C.1
aaaagcaaggggcccccccctcccccttaccacttttttccaccctttttccactgcacaccaagccaattttaaaaaaaaaaagtcccctcgatcaatccaaacaaaaaagggtaaaacttccctttgttaacagttttttttggaaaggattttcaataaaaaccgggctttccccctattttttttaaattgcctatcctttaaaaacaaggggttcccaaataacaaaaaccgcttaaaaaaaacttttcaagggttttgaaaactaaacggactttttcccggttagaaacccttgggggcccagggattgggatgaaattggcccgataaaagcaattcaaaccctgaaaaatcccctgccctaacccttaatttaggggaggggacttttcaatcaccctattataaaaatgtgaaaatgac

SEQ ID NO: 140075 - DNA, 693 bp, Glycine max
  Clone ID: PAT_MRT3847_97497C.1
aggcagagcttacagaattgagctagctatctaagatttaggacacgaaaattgaagcaaaactacacaagatatttatttcttgttgaattcaccaatattctttatgcaatttcaccctctaccgagtaggtcacgcgtgcaacatggaagctgaaaccaattctccagaagatgcatctgctatggcatttggtcaacaccaagtgacagaccaaacaagtgtagaaaatgtgcagccagctgaaaccctgattgaagtgaagaaccaggagaacacaaatataaagcatccaaatttggaaggagagactacagaaataaacccaactaatgacaccaaagaacaagaaaaggttccagtgtcacacactcgagaagagatagagaatgaggatgatgggaaatacaaacaaaagaaagcaaaagagacagaagaagcaaccgaaatgcagttattaaaaactgcaacagacagtccacctgaggataatgtccagtcaacagtgcccacttctgaaattgtcaaaggtgaaactgaggaaatctcacagcaacaaacatataaaaatgatgaaacagtagtgattgacactgacaagacaacattgcaacaaggaatagaggatggtggcaattttgatcaacaagaagcaacaaaaatacagttactgaatgaggaagtcggctcgt

SEQ ID NO: 140076 - DNA, 118 bp, Glycine max
  Clone ID: PAT_MRT3847_97498C.1
cccacacttgaagctcgaatataatactggttcacaatatcgctatctgcgtctcgtctgggatacactactcacgcaggtacattattgaacacactcacttactcattcactccat

SEQ ID NO: 140077 - DNA, 325 bp, Glycine max
  Clone ID: PAT_MRT3847_97499C.1
aagacacttcttatatatttggcatttaggggataaataaacgttttacaaatgggcattttttcttgacacactttttcaaaggaaatagatttgggggcctatatatatatatatatttttcggggaggttcaattaggtgaaactaaagtgggttttaggggatttatcagggttgaagagaccaaaatggccctcaatttcaacaccttgcttttggtttttggcaaacatggggaacaaggaagtttttataaactcaccaagcctttttggaggtccattcccactcgggggatggcgaatcaaattagcatagggagg

SEQ ID NO: 140078 - DNA, 904 bp, Glycine max
  Clone ID: PAT_MRT3847_9749C.1
gaacaaaatcaacaaatagttggataagaaagtgatgagatttcatagcaagaaaggaggtcattccaataaccaaaacccactgcaatgtccaagttgtcccgtgacttcttgaaggggggggacaagtggttcagacaattgactaatctattcacaattgacaaatattctgtcgcacatttgctacaaaataatccacaaagccacacagaaagggtaagaaataccaacaaatcagttaaacaaaacaagagacgcatcatatatcccttggtgcagtggaactagcaatgacatccagaataggatcatttttgtcattaatgatctgaatgagactcgtaatactcgcttgggcaaggagacatgacctcttgttccagcaactgcaacacctggttcattgaaggacgatcgtctgcatttccatcggtgcatcttgcagccagctcaagaattacttcaagagttcctgcatctgcatcagtgcatcttttgtcaaccacatcctccattctgttttctctcagtaacgtgttcatccaaccaacaacatttaaacctctttttacaaaggaaggatctgtaggcctctttcctgttacaagttccagcaatagaactccaaagctatatacatctgacttctcagttgctctcccactttgtagatactcaggtgccaaataaccaaatgtgcctgcaaccactgtggtaacatgggcattttcatcaaccaaaagctttgcaagaccaaaatcagatatatgaggctccatgttttcatcaagcagtatgttgctggattttatgttacaatgaacaacttttgggctgcattcatggtgcaggtatgccaaaccctgggcagaaccaagagctatctttaggcgatcattcc

SEQ ID NO: 140079 - DNA, 829 bp, Glycine max
  Clone ID: PAT_MRT3847_974C.1
accatcctcttcccagagaacacacacaaagaagaataacaataacacactcttctcttcgatcatctcccttttctctgagagctagcactccttcaaactttgatcctggcaaagccatggggttcctaaaagcaatattcatcatagcaataaccatggctttgtccatcacactcacaatgaaaaccatcactcatcaagaggaagcaaaaccaccctttgtgcaccatgatttgccctcatcatcatcaacccctcatcaaaagaatctccttcttccttccaagagggagagtcgcttcctcgctcaagtgaaaaaccctaatgctgctgatcactgcaggaaggaccacgagatttgtactttgtcgggtgtcaagaactcaacatgttgcaacaacaagtgcattgatgtagggtatgacaagcacaattgtggggcatgcaagatgaagtgcaagttcactgaggtatgttgtagagaggaatgtgttgataccaactttgacaagaggcattgcggggagtgtaaccatcggtgtgaagtgggtgcatattgtgtctatggaatgtgcggctacgcctaataattaagcttcatgcatgagtccccaatactatgttattattactatacgaggtttgtgatttttattaaaaatgttcaataaagtagaccacatttgtggtggttctctaaggttctctaaccagaaatacaatagcgtatagtacctcttaaagttatattgcaatcttctaagtgtttcctaaagcataattaatgctattctccaagaaaataagtatatatcatctcaaaaaa

SEQ ID NO: 140080 - DNA, 1229 bp, Glycine max
  Clone ID: PAT_MRT3847_97500C.1
ccccgtgcaggcacctgcccagtattaattcccgtttcgacgagcttattagtcggcgggcgccctttttttttttttgggtattttttaacatttcttatgctactcttctattaaataattatttcaccatgccttaaggctcgaagtcacatcaagattcatcaaatgtaaacgttacaaagtttggaactaaactacacaagctatatctaacatattcaatttgtgaaaaggaaatatctgactatacatccatatgtacaaaattttacacaataaatgttttggtactgttaagtattgatacaaggaagaccttttgccatccacaagaaccaccctggcttcaaccgttaggtatcttttttttcttcttgaagtcaagaagcactttttctctctcgagtggagtcgctgatagcaaccatttgctaaaagcaagctctcccatgcccagagactgggcaaggagcctatattgggttctcttcctttcatcaatcaaaggaactttctgttttttaggtatactatctggttttttttctttggtggtccaaatccaaagagatgcttggcttgactaggctatcatctaaggggatgctagtatctattttcccttgaatccctgggccgaagttgacaatgtcttcattgcgatgagtatagacaatgccaaggtctacaagatctggtttacttgttgcatccctcacagatttgttacacaatctggtttctgattccagtactgatgaacttgtttcttcttctgacagatttacttcttccggttgttctgtttcatgcccatgttcttcatgcaattcaatgatctcaccggcgcgtggcttatcagataaatctcgaaataaattggaaatcccaaaaagctctccttgaaattccttgcagtcctggacaccttcaaaatatcgtttttccatcttcccagagacagcaatgtttgagagctgctgcttgtacacctgacgagagtatacaagttcttcaagtgaaccagctgcaagcagacggaacaccacaacatgccgcttctgtccaaaacgaaaggacctgtcctgagcttgtaagtcttgtgcagggttccagttgggatcaaatattacaacacggtttgcactgacaaggttcaatccaagcccacccgcacgagttgatattaggaatacttgtttgcttggacttgagttgaaatcatc

SEQ ID NO: 140081 - DNA, 1099 bp, Glycine max
  Clone ID: PAT_MRT3847_97501C.1
tttctcttcttcgtttttctttatgctgattttcacccagatacctactcttttttcgatttccagttgataattatgttgagaactgagaactgagattcatctttgctttgctttactttttattcttcttatgttgcttgcagcatgaccaaaattaactaaactttaattaaattttgtgatttctttgctctgttgaccgagtaattatagagtgactacacaggatgggattatctgataataaccattcttagaagtcgtttttagtttattgaactgtaatgattcacgcgtcccttttctttctccaaccaactttctcttctcctattccctcctttccaattattcgtttcctaaaagttactattatatcttctctttctgctttcgcgcgctcatgtcagaagacaaagttgaacgaaatgaagtctttcggttctgtaactggttttgtcttgccagacccaaagaataggttgctcctttggagtgtcctcatcttggtttcattgatttctggtgcttatttcgttggtaatgcattctttgcaaaggaatacaaacaaagattagcacgatgggggctaattcatacaatgccacattcaaaatttaatgcgtgcaagagacaatgcttgccttttggaagtgaggcattgcctgaaggaattattgctagaacatctaacttggaaatgcggcccttatgggactctggtaaagataatagaattttaaaacgcccattgaacttgttggctatggcagtaggacttaagcagaaagaaatagtcaacaaaattgttgaaaagttcttgtcaagtggttttgttgtgatgctttttcattatgatggttttgtggatggatggaagagtttagcctggagcagttgtgccatacatgtatctgctatcaatcaaacaaaatggtggtttgcaaagcggtttttgcatccagacatagttgctgaatacaattatatatttctttgggatgaggaccttcttgttgataatattaaccctgaaacattatcagttagaagtattaaatcattttatccccatcaaactgtagtttaaattac

SEQ ID NO: 140082 - DNA, 226 bp, Glycine max
  Clone ID: PAT_MRT3847_97502C.1
ggctcgaggaaacaggcaaagacaaaagaacatttacgcattaaagacagcaacaaccgggaaggggaagggggggcaccgaaacgagaccgcccgcacagaacaagaccaaaccaacaacatcaacagcactggcagagggccggacatgcacaggaccggaacgaacgctattgcaacacaagcaggaacagacacgaaagtggaggaccaagcaccagaccga

SEQ ID NO: 140083 - DNA, 142 bp, Glycine max
  Clone ID: PAT_MRT3847_97503C.1
aacggctgcgagaagacgacagaaggggaattagaaaactttcaaccgtattaaaagattacgaatccataatccataattagcaacaaatcaaaaccgtatccggaaacaagcaattcagcaaaatgcgcgcgcagctacc

SEQ ID NO: 140084 - DNA, 1976 bp, Glycine max
  Clone ID: PAT_MRT3847_97504C.1
ttagtagcaaagaaagcgagtaatcttttccgtgagatcggtgtgtgaattgtatattcccatttcaatgcagagatccggttatgggtccgacggaatatacaggtcactcagaccttccatcgtttttcccaaaaactcaaacctctcactcgtttcccatcttttcaacagagtcgcagcctttccatcaaaaccagctcttatcgatgcagactcttcagaaacactttctttcgcggaactcaaattgctaactgttagggtcgctcacggcctccttcgtctcggagtgaccaaaaacgacgtcgttctcttcctcgctcccaacgacatccgctacatcgtctgcttcctcgccgtcgcctctctcggcgctgccgtcaccaccgtcaaccccgcctacaccgccgccgaagtctccaaacaggccaacgactccaaacccaaacttttggtaaccgtcgccgaattgtgggacaaactcgaacacctcaaactccccgcggtcttcctacgttgttccaacgctccccacgcgccatccagcgcgactagcttcgacgcgctggttcaactcgccgggtcggtgaccgagtttcccgaaattaaaattaaacagagtgacactgcggcactgttgtattcttcgggtaccaccggcttgagcaagggcgtggttctcacgcacgggaacttcgtcgcggcgtcgttgatgattggcttcgacgatgatttggcaggggtgttgcatagcgtgttcctctgcgttttgcctatgtttcatgtttttggtttgatggtcatttcgtacggacagcttcagaggggtagtgcggttgtgtctctcaagaagtttgagtttgaattggttctgaagaccattgagaagtttaaggtgacgcatttgtgggttgtgcctccgattattcttgctctcgcgaaacacgggttggttgataagtatgatctttcgtctctcaagcatattggttctggcgctgctcctcttgggaaagagttgatgaaggagtgtgctaaacgttttcctcatgccattgtttctcagggatatggtatgactgaaacttgtggaattgtttctgtggagaatgcaaggatgggaattcggaatagtggctctacgggaatgcttgtcgccggaatggaggctcaagtagttagtgtggatactctgaagcctctccctcctggacagttgggggagatatgggtacggggccctaatatgatgcaaggttatcacaacaatccacaagccacaagattgactatggataaaaaagggtgggtacatacaggagatcttggatattttgatgaggatgggcaactttttgttgttgaccgaatcaaagaactgatcaagtataaaggttttcaggttgcgccggcagaacttgaagggcttctggtttctcatgctgaaatacttgatgctgttgtcatcccatatcctgatgctgaagctggtgaggttccagttgcctatgtcgttcgttcacccaatagttcactcacagaggaagatgttcaaaaatttattgctaagcaggtagcgcctttcaaaagaataagaagagtgacattcatcaatgctgttcctaagacagcatcaggaaaaattctccgaagagagcttattgagaaagtaagatccaaaatatgatgatatcatggtgtaatttttttgtgtgttttcaaaaccatttcggggtttaaattcagaagtagaatgcaagtccagagcgaatccggaaaggtatgatggttgtcatagtggatcaaatatgtatctggctgggaacagtacttactgttgggtctagcatatttcaatccattttataaatgggtcaattcattctagttcacttaaggttgaatctttaaaaaaatggtttgatgtgccccaccatggattggtgagataaacaggttgccccctccttttt

SEQ ID NO: 140085 - DNA, 545 bp, Glycine max
  Clone ID: PAT_MRT3847_97505C.1
ctgggtgatacactccaccttggaaggtatggttgtgattgtattcaattctcgatatgcctttttcctataaacttggtaacacacatgctcatgcacataaagctaaccaaacaaattgacatttgtatttggttttaacttgcggttgcggtcatgattaataaaaattgcaagcaaaatgcagccatgtgaccgtaattttggtagcagttccagatacttgaaaaactatgggatgtgctttgtgaaacaaaaacaaatgatgaagttttcctttagaaaaataacatgattttcatgagactcactctgcttcaaacatttctaatcacagtctgtattccgtccccaatcccccatatttaatttccaaagcaactaagctaagcttctctacagagctgcaacaataatttcaaaactatccaaaacagataatttcaatcggttgcctatattcattatatccctttaatgatttattatagtttgcactttaaatacctatgatctttacctatgaagtacggacatctctcgtt

SEQ ID NO: 140086 - DNA, 676 bp, Glycine max
  unsure (1)..(676): unsure at all n locations
  Clone ID: PAT_MRT3847_97506C.1
gaatataaaaaaagtgacgaaccacaattgcattaatgacggaaatagaatggccaatagcaaaacatacataagggggtgcatgtctgtcttaattaaacgggtggaaaaagcttatcaagtttgcatggtaaagaatagaattcatcattcttaacatatgagctgtacaagccgaacctctcccaccactccaaaccgatggctttaggtgccgcatcatcttcacgggacagtgtgcatccaaaatgaaagcaaccaaggcagcaaccatctaagaacttcataatgttgcttcagatgataatattctgtgaaatattgtggtatggagaggcctaggaagaatgagatgcacaacactgatttgtttctgaaattgttgaggttacagaactgaagataaccaagacccgcagaagacacatagccgaataacacacaatataatgctgccataattggcataggtactgaagcaaaaaatgctccaaatttgccaaacatagagaagaaaatcataaaaccagatgatatttagacgactcttcggcttcctgcttttgtcaatgccaacaaaccagcattttccactgatgccgtacatccagttatagaaccaaacttgccactgagcanagtacttactaccatccatccagctccacgggtgata

SEQ ID NO: 140087 - DNA, 190 bp, Glycine max
  Clone ID: PAT_MRT3847_97507C.1
ttcttaaaggcttattgagaataaagacttggggatttaagagtgagatttaaagcactctctatttatttattgatgcaacaactctgtaatgcaatttttagacaaagtcaacaatatatcttttgtcaaatgcacaaatacagtagctttatttaaggttgatgttgcaccatgtcatattgtatac

SEQ ID NO: 140088 - DNA, 294 bp, Glycine max
  unsure (1)..(294): unsure at all n locations
  Clone ID: PAT_MRT3847_97508C.1
cacggttcctcccccgctgccgctgactctcacatccatattcatcccgccngtcaatcataagactcaacgaaggtgatcccattctgattcatctgaagcacagatcacctagtggaactggaatcctttcagctgctggcctaaccaggtgggcatgctgcaacaccaaacccaaggaccgtgagtcatgctcccgcagcaattggcgctgggaaaatcaggtctcctcgtcaacccccaccaaatgctaccattgctgctccgactgcttccaccggttgcgctacaggt

SEQ ID NO: 140089 - DNA, 532 bp, Glycine max
  Clone ID: PAT_MRT3847_97509C.1
aaaagtattttttatacccttcttcttacaactctacttctttcatgcttgctgagttccaatgcgaaactaattcaagttcttcagatcacaagacatggagccagaactccaaatgcttttgaatacaaaccaaacctatatcctcatactgcaggtgaattgactgctcttggaaaaatccaacaatatcacttgggtcaggaaatgcgtcaaagatatgtcaacaaatttggactcatctcaaaagatttcgatccatctgaagttgttatcaaatcgagtggcaaaaaaagggttgtagaaagtgctttatcattcattaatggattgtaccctcaaatagaaggagatttaacaatcgaaaacctttatcatcatgattcacttcttgacaaaattctcccgcattctgaaaagcataataaaattgaagctctcgatatacaaaatgtcactcttaatctagaatgggccgaaaaagttgtccaagtcattcctatggaaaaggatatgtttttccatgctgacc

SEQ ID NO: 140090 - DNA, 210 bp, Glycine max
  Clone ID: PAT_MRT3847_9750C.1
gttgtttcatatatccaattctacttccaaagtttctcgctgtctccattccaaattcactctttctaattaaccattttttttctttctaatccttgtttctgttccatatatcaatgcatttctccattatcggtgcattgatcacaaatttcagccttggaagcttcaacatagcaaatacttcaaaagacatggataattctcaag

SEQ ID NO: 140091 - DNA, 134 bp, Glycine max
  Clone ID: PAT_MRT3847_97510C.1
cggccgctcaggcggcgggcggagtactttagggtgatttattccagattttgagaagtctagctgtgggtgtggaagtagccttgccaaaactgtggcagcactgcggttgcacaagtactcttttgacttga

SEQ ID NO: 140092 - DNA, 704 bp, Glycine max
  Clone ID: PAT_MRT3847_97511C.1
cggacgcgtgggcggacgcgtgggcggacgcgtgggcggacgcgtgggttgctcaaaaaccagaaatataaaaccctcagtttcccccacatagtttaccccctccgtttcccctcgtcagaataccgtcccacaaaaaaaaaaaatgaaacatgacacagacaacaacggaaccctcggcgggtccgaagattccctcctccgttcatgtctctctcttctcacgcgccgcagcttcaccgcttgccgcgagtccgcaaaccaaatctctagatatgacccgaccgtctccctccatctggaccaaatcctcgcggtggcggacgtcctcaccgcggcggagagccgccgaggaccctcccacccgcacgactggtactccgtcctccgcctccaccccggcggcgccgacaaccgcgacctagcacgacagcacttcaagaccctcgtgcggctcctcgacccgaacaagaacaagctccccttcgccgacgaggccctcatgcgcgtgcgcgaggcctggtgcgttatctccgacccaacgcgcaaggcccgcttcgacaaagagatcgaagagtcagccagaacggcgtcgttttggacaatgtgcccttactgctggtacctgcacgagtacgagcgcaagtacgaggactgcacgttgaggtgttcgaattgccagaggacgttccacggcgcggcgg

SEQ ID NO: 140093 - DNA, 407 bp, Glycine max
  Clone ID: PAT_MRT3847_97512C.1
ctgatagaagatcattaactttctccaattcatcattatcatattctacttggtcctcggtcattcttaaatattgaagagcctccatctgcagtgctggcttctcctcctgtaaccgggtaatcatagacattgcttcatttgtagcaccagcagaaacttttctttctggctccagttccttctgtaaagaatccatgcatttcttgtaatactcaaggtgtctcctcattctatcatcagtagaatctccttcaatttcatcaatattgctttcatccagagaatcaataccagattccactgaggatgacttttgaagtacctgaactcccttagaactaaaagcctcaccatctgtcccaggctcctagtgaatattgagttatgggaacatatgatgatat

SEQ ID NO: 140094 - DNA, 473 bp, Glycine max
  Clone ID: PAT_MRT3847_97513C.1
gagtttttcgagaaggtcacgatgcgctcccgggcgatctcggccaggcttgcgtattcgcggttatagatcgagttgctggccaccacccagcccatcgggtggctgatcagcttcaggctgcgaatcgattcctggcgcaacaggtcggtttgcagcaccaggtcgagaaagcctttttgcagctgatcgcagaggttcagcgcggtatcggccaccagctcgatttccaccagcggaaaacgatccgacatctgcgccaccaacgggctgagccaggtatggatgaccgtgtccatcaccccgatgcgcaggcgcccgaccttggtcgaactgatctcgatggcatgcttgagggcctgcatggtgtccatcatctgctcggcatagtcgagcaccttgagcccttcgggagtcaggctgacgccgcgtgaatcgcgcaggaacagcttcaccccgagctcaccttcgag

SEQ ID NO: 140095 - DNA, 553 bp, Glycine max
  Clone ID: PAT_MRT3847_97514C.1
caacactctaatatcatggcttttccttcttcttctccattctctttattcttcttactcctctctttttttgttttcgcttcatcggacgacgctccacaaacctacatcatccacgtggcgcaatcccagaagcccagcctcttcacctcacacacaacctggtactcctccatcctccgctccctccctccctctccccaccccgccaccctcctctacacctactcctccgccgtctctgacggcgtccacgtcatctcactctccgtcggctcttccggctacgcgcctcagtactaccgcgactcgatcgccgtgggagcgttcggcgctgccaaccacaacgttctcgtctcgtgctccgccggaaactcaggacctggtccttccaccgctgttaacatagcaccgtggattttaaccgtcggagcttccaccgtcgacagagagtttccggcagacgtaattctcggagacggaagagtcttcggtggcgtgtctttgtattacggtgaaagcttacctgattttaagctttcattagtttatg

SEQ ID NO: 140096 - DNA, 1518 bp, Glycine max
  Clone ID: PAT_MRT3847_97515C.1
ccacgcgtccgcggacgcgtgggcggacgcgtgggcggacgcgtgggcaacactctaatatcatggcttttccttcttcttctccattctctttattcttcttactcctctccttttttgttttcgcttcatcggacgacgctccacaaacctacatcatccacgtggcgcaatcccagaagcccagcctcttcacctcacacacaacctggtactcctccatcctccgctccctccctccctctccccaccccgccaccctcctctacacctactcctccgccgcctcaggcttctccgtccgcctcaccccatcccaagcctcccacctccgccgccacccctccgtcctcgccctccactccgaccaaatccgccacccccacaccacccacaccccgcgcttcctcggcctcgccgactccttcggcctctggcccaactccgactacgccgacgacgtcatcgtaggggtcctcgacaccggaatctggccggagctcaagagcttctccgaccacaacctctccccaatcccctcctcatggaaaggctcctgccagtcctcacccgacttcccttcctccctctgcaacaacaaaatcatcggcgccaaagccttctacaaaggctacgaatcctacctcgaaagaccaatcgacgaatctcaggaatcgaaatcgccacgcgacaccgaaggccacggcacgcacaccgcctccaccgccgcaggcgccgtcgtctccaacgcaagcctcttccactatgcgcagggcgaagccagaggaatggctacgaaagcaagaatcgcagcctataagatctgctggaagctaggttgcttcgactctgacatcctcgccgccatggacgaggctgtctccgacggcgtccacgtcatctcgctctccgtcggcgcgtccggctacgcgccccagtactaccgtgactcaatcgccgtgggagcgttcggcgctgccagacacaacgttctcgtctcgtgctccgccggaaactcaggacctggtccttccaccgctgttaacatagcaccgtggattttaaccgtcgtagcttccaccgtcgacagagagtttccggcagacgtgatcctcggagacggaagagtcttcggtggggtgtctttgtattacggcgaaaaattacctgattttaagcttccattggtttacgctaaggattgtggaagcaggtactgttacatgggatctctagaatcttccaaagtgcaaggaaaaattgttgtttgtgacagaggagggaatgctagagttgaaaagggaagtgcagtgaaacttgctggtgggttgggaatgattatggccaacactgaagccaacggtgaagagcttcttgcagatgcgcatcttttagcagctactatggtgggtcaagccgctggggataagattaaggagtatataaagctgagtcagtacccaacagcaacgattgagttcagaggaactgtgattggtggttcaaaaccttctgctc

SEQ ID NO: 140097 - DNA, 566 bp, Glycine max
  Clone ID: PAT_MRT3847_97516C.1
gatgtcaagctcgccaaaactgtagagccaaccaaggtttacagcgaagctgttctagcactgcactgctacttctacctgcttgactacaggagacgcgtgtagcggccacgaaggcgacgttcagcccacgaacgagcagccactacgttcaccaccacgatgctcacaccaacaaacgcgtagaaaaggccacgcgagaaagtcgaagtcgaatcattttgctgcacgtccgagagtgacgtggtcattagatccgccacgttgggtggtccagccagcacgaaggcgtaatccggctcgtccgatcgcgctgacttcgctgtctcaacggagtagtaaccgggtgtttggtcgggacaggaaacaactcgtagatcgccaccttgttcaccgctgccgcgtacacgatggcactggcctcgcgccagaaccaccagcccttaatcgtgatatccattggcggtgcgttcacgtagccgactttgccccacactgacgtcgacaccgtaggcttgtctgtcacctgtacaagcagctctcctttaccccaacattgacgctcg

SEQ ID NO: 140098 - DNA, 702 bp, Glycine max
  Clone ID: PAT_MRT3847_97517C.1
agcggccgctttttttttttttttttttttttttttttggaagggaaaaattaattgtgtttcattgaacatgttgcaataccatagttgtcattagcggtcaaaacagccactatcacattgtgctttagaaatgttgcaataccatagtggtcgcgataattgtttccatttcttttgctatcacggcctctattgcgcataccccaaagtgttcatgtatcattattcttctcacaaataataaaacgaaatcctggtatatggtgcttcagcgttggaagatcttgacaacaatatacaaagagacaatcaactcaccagttgcttgctataagaaatatcataaaacctatcttgacttttcttttcttacgtgccagagaaattgtagaccaagatgtcactgttgtttcaaaagggaatccatggcctctgccacttttttcctaagagcgtcaagagactctgtgaaatgaaatacttctgtttgttccatttctagagacattgcagaaatatttcctgcatgatcgcactcaagatgctttacaacggaggattgttcacccaaaacctcagctattgttgaaattgccaaaatagtttgtaatcttttaacacaagattttgattcttgatcttgtaatggtctcagaattttatggatctcaggaccaaggccactaccaagcatgcaat

SEQ ID NO: 140099 - DNA, 455 bp, Glycine max
  Clone ID: PAT_MRT3847_97518C.1
ggctcgaggttaaaacaaatcaaatttaatactttttcaaaataaaaaatgcagacagacagcagttacagcactgtgtgcctgtctttccgctagtttccaacttaatatttgtttagattttagaatgttactttggggtttcaaaactgattccagttctgtaactgttgtggagcaaaatcatggtctctgtcagacatattgaaatggaagattggttgtgattgtattattatgttgctattatggaggattggggggagcaggtttttggtaataatggtgtgggaagatgttgtgctggctggctggctggcaatgcatgtactcccccccacccccaaaaaaatactttttaatgagattgtaactcattctgtttttttatttttccagggaaggggatttttcttcaattgcatatcatgatatgctgggacaacaggctatat

SEQ ID NO: 140100 - DNA, 201 bp, Glycine max
  unsure (1)..(201): unsure at all n locations
  Clone ID: PAT_MRT3847_97519C.1
aaaacacacgactataatagcacttcgcanaaacacacacaaatatatagaaactcctcctaagtcatcctctgagcagcttccttggcaagaagcttctcctttgctctggtttcgttgggatttggatccatgatcccccacccacttttttgtctgtatattgggtgagtagcttgtgctcaaattgtgatcattttt

SEQ ID NO: 140101 - DNA, 343 bp, Glycine max
  Clone ID: PAT_MRT3847_9751C.1
attccctttcgtttacgcgtccgagataatcaacaaaccagcggcgggacaggaccgtgtggggtttaagatggattattcgaatgatgccacaccgccgacgctcaggggggggccaccgacactaggggctacgtcaaacactgagaagggaaaggagatagccacgggcggcggctctggtataaagagacgagaaacaaaggctcattcaggaggttgaagaagaatgcgcaactaagagacataagaaagtagcagcatgtaacgttgcagtgaaatagcgcgacggagagtaagctgttgaaaagacagaactaaagagagctagtgcgatttacag

SEQ ID NO: 140102 - DNA, 900 bp, Glycine max
  Clone ID: PAT_MRT3847_97520C.1
ggagaagcaagtttactttttcctgaatattcatcaatctcagataattggttaaattctgagaatgatgattaggaatccctggaaaactgtgagaacttggataataatattctaattcaagaatctgtttcttcacctaaattaaatttggataacatgggtgatgattcctcatccaaggaacctccagtttgcaagaaaattggtgaacttggatacaatggacatagctcccttgcgctcggtgggaataatgatttatcttctactgggagtttggtttcagattttattggaaggttgcaagttcttgaggcagatttgagtttccttaagcatagtatcaacttatcgagcaatggagaagaaggacttaaattattgcaggagatagctgatcagctacaacaattacgccagattgggataagagaattagatcaacctgttgcttgaggctgtatataagattcatacacttatgattggatccgcaaccaggaggaagttaccttgtgcactagtgaaccaggttaccaaggctggttgcaactgtacagtaacatagcttgctttcatccaggatataagaaaataggattttaaataatttttttttctttttctccccctgcctttttgttcggggtttcattgaacgttttgctgcattgagttgacaaggttttcatctgcccattcaaattttcattttacaataaaattttccctttgccgttttgcattgtaatttgtaaatgagtgagtgcttgttaattggtgtcgtcttgtattggattgagtagtttggaaacagagtaaattaacatctgtgagaattttatatatgggcgctatttgctccagtgtttgtataaatattgctccagtgttaaa

SEQ ID NO: 140103 - DNA, 382 bp, Glycine max
  Clone ID: PAT_MRT3847_97521C.1
aaaaaaaaaatctattctaggttaaaaagggtttaaaaaacttacctgctatattaaattaaagttcaaaaatcatattttttgggcttcaaggaacctacgtttttgatttgaattcaaaaaatctgacccttggtttcaaaaaaattgcatagggcaacttcaacacaactcaaccaaaaccggtttccctcaaaacatttgggaaaaaggaaagccaaaggttaaaacccatcccatattaaaaaaaaagggcacaaaactttgtaagcctttttacacgtaaacagcattccaacagggccttgaacgatttcttatcctgggaaatcgaaaaaaaggacacccaaaacgtgaacggaaacggggccgaaaaggggaa

SEQ ID NO: 140104 - DNA, 423 bp, Glycine max
  Clone ID: PAT_MRT3847_97522C.1
acttagataccgtgatgccgcacacatgatcaagaagggagaagaggtgtgctgactttaacaacgatcactgatgcaaaagctggacatgttgctgaactacacactggactgccaacaaccagatgcagaatgccacctttatgaacattgatggtaaccttacctacgagcggataacggttatgtacaacagggaagagtacccccgtgtgctcatcattttttccggttgcgatttatcaacacggaatgctcctatcacacccgatgggcacatgaagaagtactactgggcacctacaagggacgaaagtgttggtgtttgtagtggaatgtttcgcactgacaatgaccctcaggatgacattgtcgagcttgatgacacctttctcgaccaatctattgatttgttcggggcac

SEQ ID NO: 140105 - DNA, 272 bp, Glycine max
  Clone ID: PAT_MRT3847_97523C.1
ggaacataacgctaacatacataagaacactgacaaatacgaagaatctacaagtcaaaaagtgaaaaaacacaggatatttgaacacaaaaaatagaagaacagatagaagagcacaaaccaaaaagcactagaaggaggaggaaagatgcgtgacacaggagatattacactatcggcggatataaatgctagggaacgccgggggaaggaaaacaacgaatctcacacatgtttggagacaaaacaaagggcatagtgaacccttctac

SEQ ID NO: 140106 - DNA, 393 bp, Glycine max
  Clone ID: PAT_MRT3847_97524C.1
cccactcgtccgcccactcgtccggtcttcacaacagaaccaaccatacaatcacatacgtttaacctaatcttacgctctctctctcttcaatctctctctctctctaacactttccacagcctcggaaactaaattccggtgggctagctagcttctcttctctttaagcttatataagttcaactaactcacgtcgcctccacggttccgtgagggctcaatcattcgtcatcgagtttggacgcacgttccatatttgaacgcaactctcggtagtactacagtagtagagtgcaatatataagaagaaacgaaacgaaaagaaactctatggcggttaatagtattatttgagttttaagtttaagaagaagaaagacacggcaacgc

SEQ ID NO: 140107 - DNA, 492 bp, Glycine max
  Clone ID: PAT_MRT3847_97525C.1
cggaattcggtccgaggctgcgagaagacgacagaagggtagggtgtttctctacctgcaaacagcaaacctgctacgaaataggattatggggggtgttcaataatgactgcttcaagggagacccaattttaattttacaaagattgggcagcatcattgcatttttttttccccttcttttttaggttgtgatttgctttatctgtttggaggatgccttccttgtagatgttctttccccccttcttttctaatgaatttttttttagaaatcaatattaaaaataatgctactatgcctaatcataatcccaaaaacatttcccaatgtagagttcatatggcaccagattataaaaagtagaataaatgcaatgccagtgcaactacctttgcaacttacttcagtcaaaggaatttcatttattggggaatagggatacattaatgtataacccatacagagacttttccacaaggacctcaact

SEQ ID NO: 140108 - DNA, 254 bp, Glycine max
  unsure (1)..(254): unsure at all n locations
  Clone ID: PAT_MRT3847_97526C.1
ttcaactccaaacacaagacatcatcatccatggnctgcntccgtctccactgtcggagctgtcaacagagctcttttgaacctgaatgggtctggacctggggtttcagctnccagttcatcctctttgggagcagttgaaganggttatnngctcaagggnccccaanaacaaggntttnccncggnagctnacgattgttgctgnaagagagaanaacgtattcgngcaccccagcaggtncgannngnac

SEQ ID NO: 140109 - DNA, 520 bp, Glycine max
  unsure (1)..(520): unsure at all n locations
  Clone ID: PAT_MRT3847_97527C.1
ctgcaaaggctaacccttttttcattttttgaaggggaaatttggataataaattcccactgcatcgagcgaaaaattaaagtcaaaaattggaaaactggggattgatgtatcagctgaaaccacccgggcaagttcaaaatcagggcaggggttgttacaaaccccatttaattcattttcgaggaaagtcggaaacccaaaataatttgattcaggggggtttgcaaataaccaggatttttgggaaggggggctaaaaaatggatcattttttaaaaccaaaaaaagaaaaagggcgggggagttattttgcgccctgcctccaaacaaaagggaaggggcccttattttatcccttttgacagaaaaagaacccccttgggtataatctggggactttggggggaaaaccgcatngtttcgcttacctgggggacttccccgggagttttgtcaaaaaaaggggggggtttttttgatctctccacttgctttgggggaaaaaaacccccttttt

SEQ ID NO: 140110 - DNA, 916 bp, Glycine max
  Clone ID: PAT_MRT3847_97528C.1
tactcttctttcttacttctttttttttttattccatcacaacatattttcatcatagaagtcgtcactgttaaacgggaatacatggtaatttttcatgaagaagcctcgctcaccgcctcaggccaggacgtggctctcagaaatcagaaaatacagatatcaattgctctgtgaaattgcacaaaatttcaaaataaacataattgatcgatacctctggtcaacaattgtgctttaaaaggaattgcagttgttgggcattagctcattgctcagtatgaagagatattgtctcctaaggtaattagcactaaccttcacttgataacacactgaacacttcattctttcttcctgattactgaaaccgtaggttaaagacttcattaccatatcaaatgatgcctactccagaaaccatatcctttccatggagaaagcaattctcgagagattagaatggaatttcactgtccccaccccctatgtcttcttagttagattcatcagaacttttggtctcccaccagatcagcaggtaataaaataaacttcaacttgaacattacaacttatcaaatacagctactttatactttaaattgcatttgcattgtgtagaaagaaaaaatgacatttttcttagcagaactttagccttgtgcactatgaaaccgcaaatttgtcccccccttcaatgactgccgcagcagctgtgtatgccgctcgttgcacactcaataggaaacacccatggaatgaaatcctaaaggacatggcaggctacaccacagcacaattaagagaattctgcactctagacaggggaaggaaggcattattatcgccaacgaaggatatataagaattagagaattatctttttttctgacataagttaaaatgttcagat

SEQ ID NO: 140111 - DNA, 325 bp, Glycine max
  unsure (1)..(325): unsure at all n locations
  Clone ID: PAT_MRT3847_97529C.1
ttgttaatcctgcaatttctgctcttaaacgctaaatattgttgcttagctatattgcagtcctagccacaaataaaaccactgattaaggcagtttatggggacaacatacatgcatgatgtcaacccaaggtatagtagaggtttctatttgttatagcatctcttttgtagaagggggagattaattgataaaatcaaatagaagtttactattacttttanannnnnnnnnnnnnnnnnnnnnnnntnnnntnnntnntntnnttntnnnttnttttnttttttttnttttttttaaaaagggaaaaaaaaaaaaaaaaac

SEQ ID NO: 140112 - DNA, 396 bp, Glycine max
  unsure (1)..(396): unsure at all n locations
  Clone ID: PAT_MRT3847_9752C.1
tcgcccacgcgttcggaacgaacacatgcttagtttttgtctgtgactcactcactcaactctgttgttcattagtgctgcaaaaggggaggaaaaaacaaatagagaaaaaccctaatcttctggttcctctcaaattggttgaattggagcacttttatggcctcaacggagtgatgcanagtagagtggtgtgagtctgttgtagaagagcaagacaaccgatggcaatggcgtctaccgatacagagttggaagaacaactcctggaagccggtaacaagctcctcctagatcctctctcctcggtggaggacctcctcccactcctcgaccaagtagagaagtgcctatcaaggggttgacagtcacctaatgactctatgcgaaatgcac

SEQ ID NO: 140113 - DNA, 716 bp, Glycine max
  unsure (1)..(716): unsure at all n locations
  Clone ID: PAT_MRT3847_97530C.1
tttcatttggctttactcgacttgaacaaaaaataaaaaggggtggattcgatccattgctgcgcaaacccaatccccaacccgtaactaaccgcgctagagtcaatagagaaaaaagtcatctttctattgtgggatacaatttgctatctcgctcttcaatttggacaactaaaacaggatcaaaagtctatattaatctcacttatcccttcgagagaagtcactggaagaagtgattccacagcttggatgaataactcagggacacccaagtcttcaagttctgaattggatcttgatcgacccaacattgaggattacctcccttcagggtccaccattcaacaagaacctcatggaaagcttttcctgcatgatttgctcaatatttctcctactttgtctgaggctgcaggtgctattgtagatgactcattcacaagatgcttcaagtcaaatcctccagaaccatggaattggaatgtttatttgtttcctttgtggtgttttggagttgtgattcgatacttgattctgttcccaatcagggttatagggttaacaataggatggataatatttctttcatccttcattccggtgcacttcctattgaaaggacatgacaagttaaggagaagtattgagaggtctttggtagagatgatgtgcagtttctttgttgcatcttgacctgnngtgttaagtatcat

SEQ ID NO: 140114 - DNA, 574 bp, Glycine max
  unsure (1)..(574): unsure at all n locations
  Clone ID: PAT_MRT3847_97531C.1
ccactgctctcaactcgatctgaggctgaaactatcatatatatatatataaccaattaactaatatctctccacaaagaaacattattcgacatggggcactgcttcagcaaacccagcacaaacgaaataccaatcaactatgattattcaccaccccctcatcattatcagccacgcccgcactcacactcagactcaaggagaacacaacaacctcaacttcaacctcaacctggttaccccaatcgtactccaaaatcagacccatctccatcatcatcatcatttggtgatcaagtcgcagcacgaatattagacaaaccatactttgacatcaaatctctttacaacctcgagagggaactcgggaggggtcaattcgggatcactcgtctttgcaccgagaagaccacgggaaggaaatacgctngcaagtccattccaaagcggaagctaagtaaaaaaaagcatactgatgatgtcaagagggaaagtctcatccttcagcacctctcgggacagcccaacatccgtgagttcaagggtgcttatgaggattggcacacgtgca

SEQ ID NO: 140115 - DNA, 497 bp, Glycine max
  Clone ID: PAT_MRT3847_97532C.1
aattcggctcgagaaaacaaacaaaccagagtaataaaaatcttcaacttttagcagtttttttttctatattgcagaagccatggatttcagggtgatgggtttggattctccattgttccacacgctgcaacacatgatggacatgtcagaggacgctgcaggggacaacaagacatacagtgctccgacacggtcatacgttcgagacgccaaagcaatggctgcaacacctgcggatgtgaaggaatatcccaactcctacgtattcgagattgacatgccagggttgaaatctggggacataaaggttcaggttgaagacgacaacgtgcttctgattagtggggagagaaagagggatgaagaaatagagggggtgaagtatctgagaatggagagaaggattgggaagttcatgcgcaagtttgtgttacctgagaatgccaacactgatgcaatctctgctgtgtgccaagatggggtgcttagagtca

SEQ ID NO: 140116 - DNA, 1678 bp, Glycine max
  Clone ID: PAT_MRT3847_97533C.1
ctcgagccgaatcggctcgagcagaagacacataaaggcaaaagcaaataactattaacgtataaaacgcaaataacaaattctacaactttcaacattcttcaattttttctatatttcaaaatcatggatttttatggacactgtttggagactccgttgttccacacgctgcaacacatgatggacatgtcagaggacgctgcaggagaaaacaagacgtacagtgctccgacacggagtcatatgctcgagacgcgaaccagtgctcgtacatttaagttcctgtagcataatcccgaacttctgcgtcataagtagcgccaggcttccaattagcaggggtggggttatttgaaggcagccaatatccatagccaacttgaaacctcaagagaattgcaccactgggtgggttagcatagtcaaacactgccccatacaccctgcgtagtggctcccaacgtttctgccctctctgccacatctcaacagccgtgatgtcgcgtactccatttacgttgagaagcaggacagctaagtagccagggtttttgctgctcttgtggacacggagcttaatgttagaagggtagttacagggaacccttgtgaatgcaatatccaccaccccgcgtttgaacagctccttagaagcagctacgttgcgtgccaatcctgagaatccacgtttgctcattatgaagtctgttccgtctcccgcaccagagtctgtggccaccacctgcactcctttcccgcagtattgtggaattttgcaccttacccaataacatgtgccacagccagcaccattcctccatagcccagatacagcagccacacttccattattaatcgttcttccatattcttcaaagccacaagctccccttggattcccaaggccatcaggggtattataatagcttgctctggagttcgtaaagtattcgttgcagctacatagtgcagggaagagcaatattacacaaacaagcccaagttggtggttaagacttagttccatgcctaaatgacaagacaaattctcaggcacaaaggagaaaaatgcagcaagtaattaagaatgaccaatagtgtgtgacaagctaatgtatatatgaaaatgagagagcaatggctgcaacacctgcggatgtgaaggagtatccgaattcttacgtgttcgagatcgacatgccgggtttgaaatctggggacataaaggttcaagttgaagacgacaacgtgcttctgatatgtggggagagaaagagggatgaagaaaaagaaggggtgaagtatctgagaatggagagaagggttgggaagttcatgcgcaagtttgtgttacctgagaatgccaacactgatgcaatctctgcagtgtgtcaagatggggtgcttagtgtcactgtgcagaaattgcctcctcctgagcccaagaaacccagaaccattgaggttaaggttttctgaggtttcaatcgaatgctcacgaaccaattatctttgttcgaataaatgtaacgggaacaatattagctttagtgaggaccaactattggtgttcctctgtgtttgtattgcagtggttctgtttcttaggttggcttgtcacttgtgtatggaaatatgatactactactataatgagattttattgaatgcttta

SEQ ID NO: 140117 - DNA, 214 bp, Glycine max
  unsure (1)..(214): unsure at all n locations
  Clone ID: PAT_MRT3847_97534C.1
gtngcaggcacgcgtacgtaagctcggaattcggctcgaggacaaacgaaaacnatgtgtgcgcnttttccactgngtntggtannnaanacaaantaanangnnanagtgtctgtgttttcnatnattgtntggnatcgcacactatatagnatnnaaaanangnacnncanatncattcatcngcaacnnatcaatnaaatantcncnatag

SEQ ID NO: 140118 - DNA, 1316 bp, Glycine max
  Clone ID: PAT_MRT3847_97535C.1
attttactaatgtcttattgactggtggtggaaaccaaacacaaaataccaaacaataaaaaaaagactatgctctgagacattgaaggtagagagtaccaaccacttcaccttccacaccacactctcctctaagccatatatctcatgcttaattttttcatagtagactcatgtagctttcaattcctctccacaatccaacaattcccatctctaattcctttccttttcctgaattaagttgaacataatggaggaggatcaatgttggatcaagagtaggagaaagtactcaatgagctctaatcttgactcatctactaattacccctcctcctatgatgaccactcatcatgggaagaacaagccttcgcaaaagatgcagctaggtctggttgcacatggccacctcgatcatattcttgtagcttttgcagaagggaatttaggtcagcacaggctttaggcggccatatgaatgttcatagaagagatagggcaagactcaagcagccatatagccctcagaatgaaatcctaagtgttgatcttgagaaaattaccacgcaacccctgaattcagttcagatttcttttacttctttgggttacttatacccatcttctcttggtgtattgacccataataacactaaccctaattctgatccttattctcatgctcctccttcaccttccaaggttttagtctcatcaatcaataagagaggaagagagaaaccccagattccgctttacaaaggatgtcatgagtcttctcctgatcttccttctaaatccatgtcaaatttaactgaagacttcagattttgttcacgtaggctcgatcctgaagctggtgttgagaaaaaattgaagggattggattctaggtgtgggagtactgagggagatgatgataaaacggacgtggctgtgagcttgaacttgtttatgaatctagctcgcccaactgtgcagtttgagactaaggagaaagatacaagtttcaagaagaggaaagaagatgcttcatccattccattcttccccaaatcatgctctgttgataggcttcatatgcagtcaaagatgtttgaattgagccctagttccatagaagagctagatctggagctaaggcttggttataggtccatggtatagtaagtagtaacagatatgaagcaccaatattgtttataaatgtaattttactcttctggttttcctcttgttccttgtttatttctttgataccatgtaaggaagattttcacgtttaatatattggatttgtgataataacaat

SEQ ID NO: 140119 - DNA, 557 bp, Glycine max
  Clone ID: PAT_MRT3847_97536C.1
actcttgatatgagccacttatgcactaagatgtgcagatggagctgtacaaaaagattaataatgtacagggtcaatattgtgtacttttagataccaaaagagcatctcacaaggctgccgaaaaaacttagttttgagtgctcaaactaaatataaccatgatgaaaacataaaacctgcagcattttccttcttatataacacccattgccaagttgtgattttgatttcctctactagtttgttcttgccaagctgttggcctttgaatatgatattgtttctttgattccaaatttttcatcaccctatgaatcaaattagccacctccaacgcttggccttttttccttttatctgtgaaccgacttgatagagatgagcaacaacatcatttggtaatacagttgacatgcccatccatttgaaaatggcacaccaaatagatgaggtttccacacatttaagaaacaagtgttggggatgtttctaggcaatttctacaaaaacaacatagtgaatggttgatccttgaattttgaatattccttttt

SEQ ID NO: 140120 - DNA, 267 bp, Glycine max
  Clone ID: PAT_MRT3847_97537C.1
ggagtgatcaaccaagggaggaaggaaaatataccggatatgaaggttgtagagttggccatgcagagatggtctgggcagcatagccgtccatttctttttgggattttgagtgatggaactattctttgttaccatgcttacctttatgacagtccagatagtcattctaaagttgaggattcagcatcagccggaggatccattggccttagcagtaccaatgtttccaggcttagaaatttgagatttgttcgtgtgcctttg

SEQ ID NO: 140121 - DNA, 230 bp, Glycine max
  Clone ID: PAT_MRT3847_97538C.1
ttatcaaaatctgctgcaacacacaaatctaacatggttgctttttaaaaagaaactattctaccaactaccaatatatcaacttacaattatagcttccctatttcatcttttaaaataaccaaaaacactttttcctaaacttttcctttctaatatcaaaaaaaacttttttccattctctccttaaatacctcaaaccaaattcaatactctatccacctaatttt

SEQ ID NO: 140122 - DNA, 138 bp, Glycine max
  unsure (1)..(138): unsure at all n locations
  Clone ID: PAT_MRT3847_97539C.1
aaaatccggaaggttttcaacctgtgtaaggaggaggatntgaggggantatctgaacacctataggggaacatttacaactaaaaatggggaaaaggggagcaaagctcccaagatacaacgacgtggcactcccct

SEQ ID NO: 140123 - DNA, 331 bp, Glycine max
  Clone ID: PAT_MRT3847_9753C.1
gtcaactgcctccagtatattcaactctgattcactgggggctgagacatcggttatagcatcatcgtccaaaacaggtgcaggctatttttttttacactcacgcaggagtgctttcaagtattctcttcgatcttcagcacatgtattattgccgaaaaaaccacctgtggtgctctgattagcagctccaaggttgtgctcagccgaagccctgactagatcttcaacggtgtgaaccgttgtaaaccgcttaacaagatcattcctgttttggccaattctatgagcccttgcttgagcttggacatcaacctgtggataccagtca

SEQ ID NO: 140124 - DNA, 442 bp, Glycine max
  Clone ID: PAT_MRT3847_97540C.1
tacaccaggagattactcactaggtactgatgcatatgaagattcagagcatagctttcttgcattccgacctggatggaaagatatattcaggatgaaccagaatgaacttgaatcagaaataagaaaagtttctcaagattcaactcttgatccaagaagaaaagcatatcttattcaaaatctaatgaccagtcgctggatagcttctcagcagaagtcgtctcaatcattgggagttgaatcttcaaaaggagatatattggaaacttcactttcgtttcatgatccagagaaaaaaatatttggatgtgagcattacaaaagaaattgtaaactccgtgctgcttgctgtggaaaactattcacgtgtcagttctgtcacgacaaagttagtgaccatttgatggataggaaagctacaactgagatgatgtgcatg

SEQ ID NO: 140125 - DNA, 1021 bp, Glycine max
  Clone ID: PAT_MRT3847_97541C.1
ggctcgaggtttcaccggaagaacgtttccttatttagcgagtttgccccagaccataccgaatgtataggtgcattgtcagatatggttacaaggacattcaaagggatgatggagattttgagaatcatcttatacagagtatagcagaatttatccaaatggaagcagtgcaacctcagttctcaagttccgaagcttcttcttcacttgatgggaggatggccgttataagttctagaaactatgattatgcttcaagtttaatagtttctgagcaggaggatataggcgttgacatatccatccctagcagcagatctgcaaccctgcaaagtttgcaatcggtttacgatgatgaaactccgcaagttagaagacgacgagtaagatttcagctaccagaaaacactggtatggatcccgatgttagggaagagcttttggatttaattcaagccaaggaagctggggttgcatatataatggggcactcatatgtgaaggcaaggaaatcatcctcattcttgaaaaagctcgtgattgatattggttactcatttctgcgcaagaattgcaggggtccagctgtagctcttaacattcctcacattagtcttattgaagttgggatgatatattatgtgtagttattggtgaaatttacaacttgatcctagttgcataggtaattaattgtagctcacgggaaaatgagtgtcttttggggctacgtgtttatctttgctttcgcatctctctcccaatgtaattacatagttgcaacaataaggttttagaattatatttaggaatcagaatattttccttacttccgcgtccacctgttttatttcgttttcgtctagtgaatgtttaatgtacacgcaaatttaatttgttataagaatatgcttgcacttcaaagttaacaatgtagttacatagttgcaataaggtattagaattatatttaggcatcagaatattttccttaaaaaaaaaaaaaaaaaaaaaaaac

SEQ ID NO: 140126 - DNA, 620 bp, Glycine max
  unsure (1)..(620): unsure at all n locations
  Clone ID: PAT_MRT3847_97542C.1
tttgnnaaggcgtgcgtacggctgcgagaagacgacagaaggggaggatattggcgttgacatgtccgttcctagcagcagatctgcgaccctgcaaagtttgcaatcggtttacaatgatgatactccacaagttagaaggcgacgagtaagatttcagctaccagaaaatcctggtatggatcccgatgttagggaagagcttttggatttaattcaagccaaggaagctggggttgcatatataatggggcactcgtatgtgaaagcaagaaaatcatcctcattcttgaaaaagcttgtgattgatattggctactcatttctgcgcaagaattgcaggggtccagctgtagctcttaacattcctcacattagtcttattgaagttgggatgatatattatgtgtagttcttggtgaaatttacaacttgatcctagttgcataggttctatactccttgtttctttaggtagttaattgtagccccactcatgggaaagtttacaacttgatcctagtgtcttttaggctacgtgtttatctttgctttcgcatctctcccaatgtagttacatagttgcaataaggtattagaattatatttaggcatcaaaa

SEQ ID NO: 140127 - DNA, 378 bp, Glycine max
  Clone ID: PAT_MRT3847_97543C.1
cataaaggagtcctgcttcgtacactctaacaacaacaacgtaggttttgttaggtccgtggataacaacaatggagccagtgttggacaaactcaacgcgtttgcgaaatccggccaggattttttcgacggacttttccgtcgccgcaatccggttgaaatccttaaacggttgcagagagaagcgttctctgatctcatgaaactgagagagcgtcaagataaggttgagcgggtgctttctttctaccagtcctcgaaagtgggtccctttcaagagaccaccactcacgtgagaggacaagtggatttcttaggtgctttgttggtgctgggtaacttagatgctgtagataagttgggaatcagaacagggg

SEQ ID NO: 140128 - DNA, 274 bp, Glycine max
  unsure (1)..(274): unsure at all n locations
  Clone ID: PAT_MRT3847_97544C.1
gttacacaaaagttggccttgatcattgcagtaattttagtaaatagacattgagcatacacaaactaaactggcagcatgggacanacttcntccatacaagangataagatgaaaaagcgcattcgtncaagctatgggcacgttcatggactttggcacacacttgaaaaacgcgaacgagtgggcccaactctgtgcgacaccaaanaactgctacctgtcgttccgcatcgtgattgatccgaaaacgtcggctgagctgctgccatac

SEQ ID NO: 140129 - DNA, 594 bp, Glycine max
  Clone ID: PAT_MRT3847_97545C.1
cccacgcgagtcctctgtctctgtttttgttttcgcatacataaaggagtcctgcttcgtacacacgaacaacaacaacgtaggttttgttagttccgtggataacaacaatggagccagtgttggacaaactcaacgcgtttgcgaaatccggccaggattttttcgacggacttttccgtcgccgcaatccggtatttgctatctctctctttctagcgtcttggggtttatgtgagttcttcagcctttttcttttactcgtaaatttcaggttgaaatccttaaacggttgcagagagaagcgttctctgatctcatgaaactgagagagcgtcaagataaggttgagcgggtgctttctttctaccagtcctcgaaagtgggtccctttcaagagaccaccactcacgtgagaggacaagtggatttcttaggtgctttgttggtgctgggtaacttagatgctgtagataagttgggaatcagaacaggggttgattcgaggttcatttttgaaacaaccatgggggacaaggctaccggtgctgctgagtttgtggccagtcattgaaggagggaggaacattgtga

SEQ ID NO: 140130 - DNA, 265 bp, Glycine max
  Clone ID: PAT_MRT3847_97546C.1
aggccatagcatcggtaatcagtggtaatatgtgatatcatcgattcgggtaacttaagtatatagatctcttagagtagatggaaaagtataagatggagagaagttcaatgcttgtggatggggaccagacaccaagtcaaagcaggataaagagataagggctgcagcagagaaactggcagagtgccaggagaccatattgattcttggccgtcagctgcaagctatgcgtcctccagccgagtcactcggctcttcacct

SEQ ID NO: 140131 - DNA, 412 bp, Glycine max
  Clone ID: PAT_MRT3847_97547C.1
ggctcgagcttggacacggatagacgtcctttgggtcttcactctacaatggcatactcccacccagggatccactgtcaaaagtggacgctgcaaatgcaagccatgaatcccaaactctgtgcaccaaaggtacttcgactgctgaaaacgtaacccaaaaaaccgcgatatgtgaccgaggagggaatgcatagcaggaaaagggtttggtggcgacaagtgccggccgcatcgtgatgattctagcaaacaatgaacactatggggacgagttggtggctgactcctatctcctccctgcacaagctttgggccaaaaaccaagcaatgcgtaaaagaaccttgttatctcacctcccaaacccacaagttagcttggatttggaggcacccaattagggcttcaacc

SEQ ID NO: 140132 - DNA, 216 bp, Glycine max
  Clone ID: PAT_MRT3847_97548C.1
ccaaaaatctcaagtctggctacccgatcgtcatgtatgattctgtattttcataaccatttattccaataacaacacatcgcgatcgtaggatagggaatccaaccctcagaatcaagttaaacaaaataagcaaaaagtccaacttcaaaagatactaataaataatgcagtctgctgattattttagataccattgatccggaagcatacaat

SEQ ID NO: 140133 - DNA, 282 bp, Glycine max
  unsure (1)..(282): unsure at all n locations
  Clone ID: PAT_MRT3847_97549C.1
tatgtgttggttcatcactcactcgtgaacacaacatgtgcatataactagctaccttttatttttggtgttcatggctggcaagctagttatagtctnntgggtgctttcattntctactcacttttttctagtttctttgttttgcctctcacatggggggtaataatatgttggaatattcaaatattgcatcatgggtcatgcatgacatgaatcacggcactaatgcaccattttgagggggttcttttttcttttctttattttttgcagagaaat

SEQ ID NO: 140134 - DNA, 271 bp, Glycine max
  Clone ID: PAT_MRT3847_9754C.1
agccaaaaatttacaagttcaagaaaaaactatttctatatttttattggggatgtgggagtggcggtatatagaaaacaaaagctacaatatatactcagatcttactcttaccccagattgatattctgcgtcacctatttcaaacctatttgactctgtttttactaattaaacaatgctttttttgttgtttatttcaaaaaaaaaaaaaaaaaaaaaaaaaaaaaaaaaaaaaaaaaaaaaaaaaaaggaaaaaaaaaaaaaaaaa

SEQ ID NO: 140135 - DNA, 189 bp, Glycine max
  Clone ID: PAT_MRT3847_97550C.1
ttgtggtcaccttgccctcctacttactgtttttactggctcggctgtttccataaaaaaggacccgttccggcccgcgattgtactacattggcattgggccacgcggcactcctccattgcttttttcacctacaaatcgtgctggcaccttggggtatgggaagagccatttcacaatagagaaaa

SEQ ID NO: 140136 - DNA, 221 bp, Glycine max
  Clone ID: PAT_MRT3847_97551C.1
ctcacacacactttctctctctctctctctcatccagatcgtgtagcaatcgcgagcgctcccactccacgcgccgcgttcgtgtacatggcgaagctagcggagcaggccgcgcgctacgaggagatggtggacttcatggaaaaggtcaccgcctccgccgagcgcgacgagctgaccgtcgaggagcgtaacctcctctccgtcgcctacaagaacgt

SEQ ID NO: 140137 - DNA, 211 bp, Glycine max
  Clone ID: PAT_MRT3847_97552C.1
gtgtatctgagcaatggagcgacgtgccgtttaggatgggggacatgatcatcttcaactccctccgcgacgccgtttcactcggttggtctttgtccgattgcacgacatcgaaacccgaaaacgacgccgcagcagatagaccagcgcacgaaataggttactccgattccaaagatgtcgttttggcgcagattaagagtttgggaac

SEQ ID NO: 140138 - DNA, 572 bp, Glycine max
  Clone ID: PAT_MRT3847_97553C.1
gtcgatctcacccgccgccgcacatggccgaatcccacagaacccgaccctcccaccagcagcccagccgcctgcagagtcgctccccgttgttgtttcagataaaccgtgccgtcgagtgaaacgtcgctatccccctgttgttcttgctggtctggtcaccccctccgccgctgccgaaggacgagccgccgcagccgcagcaacaacgcccgccgaaaaaagttgtcttcaaaaagtggcagcaccccgctgcaccgtttttctacgaacaaccttcgctagttcctcccttcgttaacgtgtaaataatatataaaaaaatgaagaaaaattatgaatatttcttctatcatcttttcattttcattttcacttttatttttacacataatataccctcatagtaagcaataagagtaaaacccaatatttttttaacttttttttttcttttctttatttgtggctttaattagtgaatagaagtgtaagtttgtaacccttattattattattattattcaatttttgtaatcgtttttggagcatatagaatagtttaattcgtg

SEQ ID NO: 140139 - DNA, 230 bp, Glycine max
  Clone ID: PAT_MRT3847_97554C.1
gcctcttttccgatgagagagcgcgagcagcaaaagattggtagtggtggcagagacactcattgcttgagtttaataatgaacaaagatctacacacccttttgtgaactgaatattaaggggaagaaaatgcctctgtgcgattgcacaaacatgaagaagcatcatctgtcccacgtgcagtttattgggaggacactaacccatatgatgtagaggagggggaagg

SEQ ID NO: 140140 - DNA, 328 bp, Glycine max
  Clone ID: PAT_MRT3847_97555C.1
ggggggaaaatcatattttaacacctttgatacaaaatatgcagccttttgtgagggaaatcttgacctccaggaacaatgtggctctccaaagaaactgaacactgtctggggcccattaaatccacttgagacaccggtcaaacacacccataccccacaagcccgcaccatcatatactcccttgccaactgcgtaccccaaaactgttattacttaccgggggccgggcttatctagcccaaaaccgttgatctattttccttaatccaacgcccttttctcgggtactgaccacaccctctggtggggggcaactctcccacg

SEQ ID NO: 140141 - DNA, 104 bp, Glycine max
  Clone ID: PAT_MRT3847_97556C.1
ccatgacaccagtctgactttacatctttcaaactctgactatgaatgggtggcttcacattggtgagtgccgttatctgaccctaggcatatgtactttctcc

SEQ ID NO: 140142 - DNA, 253 bp, Glycine max
  Clone ID: PAT_MRT3847_97557C.1
caccttgccagcactgatcgtccggactgctcactttgaggatgcaaccaatccagcttgcctatcaaaactagatagtgccaaatacattttccctagggtcgctgatgggtaccttaactatattagcatggaacttatataccagcatacactactcgctgatgggtttggtctatatacatggaaatacattacatcggtgatcaaatctaaaaacgatgatgtcctgtttgaggcagcatggtcacta

SEQ ID NO: 140143 - DNA, 464 bp, Glycine max
  unsure (1)..(464): unsure at all n locations
  Clone ID: PAT_MRT3847_97558C.1
aagggtancatgttccncccctcnaggctgaaccccagggtggtaactccctgggttgtgtttgaaagaaatggggaaggtgaaccctnatgggaattgctttgggtgaaaaagaacatgaaatgttgatgtttttatgatgccccccttaaaanggagccagcatttgaacaaaaaaatgttttgtctaataaccaatgtctaaggaaatgccaaagaaaactgttcnagttgagtcctatgccngttagggaaccctatgaatgccnncnaatttacccnaaataccttgttgggttcaaaatcttattaaggtttcangttatttaaaaaaaatgtttttgaaaatttaaaatccattgggtggctcccctgttcttcctgggtttgtttcccaagtttttnccctcccnaaaagaatttccccaagggcccnnaattccttgccctcccccctgggcccc

SEQ ID NO: 140144 - DNA, 394 bp, Glycine max
  Clone ID: PAT_MRT3847_97559C.1
aaaaaaaatttttttttttttttttttttaaaaaaaaattttttattttggaattttaagattgtttctttgggtggaaactgttttttcaaaaagggggggggaggggaacttggctaacttatggggaggggtgttaaaggggggaaaaagaaaggcaaaaaaaaggccccagagaaaaaaggtcagggagtaaaaagggaaaaaaatggggggcccaaaaagtaaactaacaaacactggggggcataaaaaggggggaaactttagagaaggaaaacggggccaaaccccggttttaaggaaggaaaacactcgggggaagaggataaaagaatttggcaccccagggggggaggcgtttttacaaaagagggggaagggggtttttttt

SEQ ID NO: 140145 - DNA, 408 bp, Glycine max
  Clone ID: PAT_MRT3847_9755C.1
acaatggaggtcccacacttgccacacaagttaaaagtgtattgcactccaaacattggaagagcccctattaacttaaacttataaagggattgcaccctcacatttatatgcccataaatcaaataaatttaaaaatttaaattctgtttgcaaaatgggttgaaaggcccctggttactaagttgatgatccaaaggggcccatcttgttttatgccaaaaccaacaaggttaagataaaacatgttatgggaaaccattttgtgaatttactccacatcaccttgcccacaaacaccgtgcccatatagaatgtgtctttgcgggacaaatacggggacccgcctgtacgaagtggcatttttggtggggttccaactaacaaaaaatgcttgttaagaacagg

SEQ ID NO: 140146 - DNA, 243 bp, Glycine max
  Clone ID: PAT_MRT3847_97560C.1
gtgagatttcacagaaaccaaatttccatactttaattgagtaaaatgcggctctttttataagtatgtttctggggtatcatatgggaaattaactttattacatactattgactaaataaagaacatttgggcagtcagagagaaagaaattggtttgctggattcggggaactctgactatgaagggaacaagaaatggagattccaaagcatgagtacttgagcgggactttttttctt

SEQ ID NO: 140147 - DNA, 361 bp, Glycine max
  unsure (1)..(361): unsure at all n locations
  Clone ID: PAT_MRT3847_97561C.1
gggaattattaccattaaacggggcccaacagcattgtatgtatcaacgaagtttgaagggccaatatgtaaaccatacattgactctcttagatctaaaaagcccatattaattgggggaatttacccagaaccatggttttaaaggccaataattttccggaaagggataacttctccttaactttttttgggtggataaaaaaggaccaatttcggctctttttttcttcaaagggggggaaccccncctccctagggtggaaatccaccagggggttcaaaatttgttttgttggttaaaaaaaaaacttttccccccttggttaagggaccataaaaacaaaaattccaaaatttt

SEQ ID NO: 140148 - DNA, 672 bp, Glycine max
  Clone ID: PAT_MRT3847_97562C.1
ccacgcgtccgcattaatggaatatctcagctctcagtggggacttcattcccacacaagaaatgtagccgaagacccctcctttcgagaaaaaagctgttccctccagaacccagaggataatggagagtgtttcagtgagtggagaagttggtggtgctggtggagcatactcttatgaagccttgaaaagattagaccagcaatggtcaagcatatgctcctctcaagaagttgtgcaagagcctcagcaagttgtctctaccatcccaagcttgtttggctcatctgatcttgctgacaaagcagagggatcatacgatgtgttagtgtgtggaggcactctggggatcttcattgccacggccttgtgtgctaggggtcttcgagttgccattgtggaaagaaatgtgctaaaagggagagatcaggaatggaatatatcaactaaggagctcttggaacttgtagaagttggggtcctggaagaagatgacattgaaagagccacagcagtaaaattcaatcctaacagatgtggatttgaaaggaaaagggatatctgggtcaacgacatacttaatctcggagtctcacctgcaaagcttatagagattggaaagacacggtttatctcccttgggagaggattttttgaggggggcggggttt

SEQ ID NO: 140149 - DNA, 451 bp, Glycine max
  Clone ID: PAT_MRT3847_97563C.1
agagatagagaaactgggaaagggaggaatatgcctttttattattgtttaaatttaaattggaaatccttttttttttctgtcctgagagagcaatgacaccgaaattttactctggttagcttgttagaattgtgccatatatactcttaagatccgtccaataatttgagcatgactgttttagcttagtaatcaacatagaggctaagcagatctcttgtgtattaaatgagccatacatcaagcacaattatcaatattgtggactatggagcagtcatgaactgctacaaagtttgaatagctgtgtgttttttaatagcagccatggcagctgcaattgtgaccaaaatggcagctatagtggtagctagagtgacgtttttcaaaaacccattttttccttaaaacattgttttttttcgtggcctttttttggggaagggag

SEQ ID NO: 140150 - DNA, 729 bp, Glycine max
  unsure (1)..(729): unsure at all n locations
  Clone ID: PAT_MRT3847_97564C.1
ccacgcgtccggaaatgtgcgaaacggtgatcgtgtacaccgcgaagcactcgatctgcgggccgtgtcccctctctctgtctctgaactcaacactctcactcacccactgcaccaccgcactttcttctctctacgatttcatttccatggatctttgttgattcttcagatccagcatggccaacttcctcgctcagttccagactattaagaacacctccgatcgccttgtcatttcagtggaggatgtgagtgacttgtggccaactgtcaagcctgcttttgaggcgcgtttgccgttcaaaagggcgactttgaataacaagacgcggaaccctgtctttgttgacacattgccggcagagttcatattaactaccgattcaagactccgtagccggttccctcaggagcaatttttattttggttccgagagccgtatgcgactgttgtacttgtcacctgtgaggatctggatgagtttaaaaccatccttaaaccacgcttgaaattaattgtccaaaatgatgaaaaggagtggtttgttgtatttgtgtctaaagctcatccagctaatgatcaggncagcaaaatggcaaagaaagtatatgctaaacttgaagttgagtttacaccaaaaaaagagaagatgctgncagtatgatatgcatttccctgaagcanaattttgggaggatctagaatcaaagataatggaatgcatc

SEQ ID NO: 140151 - DNA, 204 bp, Glycine max
  Clone ID: PAT_MRT3847_97565C.1
agagaggggtaatattacagcccatatttaatttatggacaaataaaaaggttggcagacagaactcttttaaaggaaaaaaaaagggcgttgcccactggacataaaattgttttgggccaccaaaatctttggccaagctaaaagaatgctgaatagccactttgttatgcggaaccccaattgggggggggggttggcggg

SEQ ID NO: 140152 - DNA, 133 bp, Glycine max
  Clone ID: PAT_MRT3847_97566C.1
ctctgttgcaaccatatttgctacaaccatgaccacataggtgtgatcatttaagtttttaggggaccttcttactaaaaagaacattgactcatgttgtgacaccccaatgcatgtacaatccttcagtggc

SEQ ID NO: 140153 - DNA, 1012 bp, Glycine max
  Clone ID: PAT_MRT3847_97567C.1
aaaaggattgattatgtacactcatcttccatttcctatataataatatacatctcaatttgatacaaaatgtattgagtgcttgtcatctcttcccccatttgggagaaatggaataaatatattctagcacaaaattttcttgctttcagcatttcatcatgtatactatataattactgccctatatatacatagaaataagctaattaagatcaaagttgaaaaaaatggatttgtacccaaagtcacatggacctcaattgtggttccaatagttgaaaaatttcaaggctaccgaggttgagagtagcgagggtatgaatggaatgtaacagccacataattgtgtttggctttcaagagtcttcagaaaatattttaaatatgaagtcacgaaaacgccttgaatattgtctgggatccacggcagatattgacgttgggtcatattgaatggacttataggcatgctcaagcttcttgctgatgtcatagtcttgaagtatgtctatgataccaaaaatcagatccacctcatagaactctccaattggttctcctacaagttgtaattcacatccacttctcctcaccgtcctttcagcccttgctggcatgttcacccccaatttgatactcgcccaactggtaggatctagaagaagttgatccatgtctactctagaaatacagggagttccttcactctctgaatcgccagcaagagtatgagatcttgaagaaataagatcaccattttctgatatatctttgaaatgaataccaactagcaggctatagtccataattccctcttgttccagaagctcacagtccctatcaatttgcctgcaaaatccttgaaaccaagatttttgtagtcgaaatatgaaatttagatccagatctttaaggatagttgtttcactaatctccgactcgggcttaattgttattcgtccaagtgaagaacccttcaaatcaaagcgcctgtggatggtctcgagcc

SEQ ID NO: 140154 - DNA, 373 bp, Glycine max
  Clone ID: PAT_MRT3847_97568C.1
agcatcgtctagctatctcgatcgaactgtccaaggtcctgtcactatgcgccaacaacccgtaagaccaccaggtccagtgtagcggcggtacggtagccatttggcagccattggtggcagcccaaaggaaacgccacccttaaggcggtggttgcaggcggataggcattagccagtattccggcattaaggcacgctactgccgtggatattagtgtatagactaatagtacgtggtacgtgatggccataaataacacaccgtatgacaccagtagcatagaaaataaacgtaaacgccggtaaggaggaagtttgctaagcgataaacagactcgcaggtatttacacgaagataatggtcgctcgg

SEQ ID NO: 140155 - DNA, 431 bp, Glycine max
  Clone ID: PAT_MRT3847_97569C.1
gtgtgcgaaaaacaccacaaaagggggtgagtgagactgcacttttattgccactgaaggaaataggctggtccaaatataggatatgatggcgagacgggcgatctctgcagacctcaccatgatgatggatcagagaggtcacacattcataacgaggccaggctcttacagtacagattaccatggagattgtttgacagcatttagtatagacaaccataaatgctattcttacttttaactggcggcacgtaacaactgatatatggaggtagactatacaggatgatcaattaggacaaatatattctgtataaacatctgcaggatcttattcacattcaacaacacctccatccagaaacgcttgctagcgtttttctcgacaattctccaggaatatccgaggctctctggaaggccatcaa

SEQ ID NO: 140156 - DNA, 281 bp, Glycine max
  unsure (1)..(281): unsure at all n locations
  Clone ID: PAT_MRT3847_9756C.1
tctacangcactcgtacntaacctcagaattcanctcnagctnaantannanncatcctannaaacncanaaagattcaatcgccaaannatttanaagaanaatntttnaanactttaatgttgaaatcccttatnnaantccnctcacantatttaacaatagcatttttaaatganatgcacantagatatagctatnaaanaatangcaccacgctaaagctccaagtnnagntttacnatccntcaaaaattctgtntcttatatatntatagnnc

SEQ ID NO: 140157 - DNA, 469 bp, Glycine max
  Clone ID: PAT_MRT3847_97570C.1
gggggggcttctcttgagtgtaatatacctatgtggagaagacagtattaatgtggaaaaagagtatcagagaagaagaaatacatattttattgaaggcaaaaagaatattacaataatatcttattagatcaattggtatattacaaccatgtatatgcaactgcaagggatacttaaaacagataaaaactgaaaagggatcatttaaatatgatttaaatatatacccatgtttggtatttagtcgttaataaattttttctttaaatctaatctctaatattttaaaagttttatcttactgctattagtctggatttgttatatccttacctggtcattaataggataggtagacatgcaacatgttgtgccacatgcaacatgttttgacacatgtactcattgctggagtgagaatacatgtaagaattttttttaaaataaaaattattaaaaacaatat

SEQ ID NO: 140158 - DNA, 212 bp, Glycine max
  Clone ID: PAT_MRT3847_97571C.1
ctaaacccgggaaagggtcacaaatcttcaacttacggcgcatgctgacttattgttagaccaatgtggcaagaacggctgagactcgggcactattgctatgtccaaaagggctgcggacgaaatggatgatgaccactaactggcacatgctgatctatcgggcagaagcaactctgaatatatttctgcatgatgggagactaaatcag

SEQ ID NO: 140159 - DNA, 414 bp, Glycine max
  unsure (1)..(414): unsure at all n locations
  Clone ID: PAT_MRT3847_97572C.1
tttttatcgcttcctataacaaaacggaagcataccaatctttgttgacgagcctaattgctgataactcactactaaggagtgacacagcgtctacatagtatgatggccggcggagggaatcggatcagggagcttgccctcggcgcaggtgaagctccacggcgaccagcactagctgagactgctactcaaaacactcataatagtagcctcactgcttctgacgagtttacttatctagattgctggtaagcggaatataaaagctctgacacaccagaccggtcacngtacgggcagagataatggagccatcaacattgagacactcacaacctcatgtagtgtacacacgcagccacgaatcccttaatctcatgcatgaagagacacgaggtggctcagaacact

SEQ ID NO: 140160 - DNA, 656 bp, Glycine max
  Clone ID: PAT_MRT3847_97573C.1
ccacgcgtccggtgcattgccaagtacaagaacatgcacaaaattgccctggtgtgccaggtcaagtagccattacccaagatccttcagctactagtgctgtctcttctacagatcagaatcagaatgctgctccagttgcagcaacggcatctcaaactgctgtcacaactactatacccgggcaggtttcaaatcagccacccaacccagcttcccaaacccaagctccagtccaaactgctgggcagccaactgcagagcaatggtatcagcagcaacaatatcaacaatactaccagcaataccctggacaagatccataccaacagcagtatcaacattactacccctatcaacagtctgtggttccacagtaccagcaggcctatggtcagccccaacctcagtctcaatcacagccccagggccagcttcaacctcagtcccagccacagcctcaacttcaaccacaacctcaggcacaaggactgtctcatccacctacacatattcaggctcctgtggtcccaccatctcagaatcagatgcaagttcaacaaccaccacagcaacttcaacctgctgtgcagccacaaggtcagatgagtcatgcaccatgccatggtcaagccatcccccagtctcagactcag

SEQ ID NO: 140161 - DNA, 460 bp, Glycine max
  Clone ID: PAT_MRT3847_97574C.1
aggagagaaggacgtgcaaacggcaagtcccagaggacaaggcaaacgacaaagagatcgctgtgtcacatattcgcaattggacaatctgagctgaatcgaaactccaaaactactactcgatttcagagcccacaccgtggaatcataatcaattcattcatttcggatgctcacactcacggtcaggtcctggggattttgattttaccattctgcccctgccggaccgaaccacctcgttctgtgggggagcgctgttgttgttgtccgcgaaggctatctatctatgcttagcaagattacgacgctgtggatcctgtgttcggggctggtcctgggtgcgggataaggtgagtgagagatatgctggtgccggggattttagggtttcatggtctagtgtatgtggtgttggcgttgggtttcgcggtgattcggcacgtgtggaggaatgtgg

SEQ ID NO: 140162 - DNA, 1756 bp, Glycine max
  unsure (1)..(1756): unsure at all n locations
  Clone ID: PAT_MRT3847_97575C.1
cacgcgtccgctcttgggtttagcggagcaagatgtcagtttaccggctgcttctccggcgcgtggccgtagcccgccccatgttctctctgacccaaacccgttcctacgccttctcatccgccgaagaagccgcggccgagcggcggcgacggaagcggcgtctgcgcatcgagcctcccctgcgcccgattcgacctccgccgcagcagggccctccgcgcgacccgaacgcccctcgactcccggactcgacctcggcgttggtggggcctcggctgagcctccacaaccgcgtgcagtccctgatccgcgccggcgacctggaggcggcgtccgccatcgcccggcactcggtgttctcagtgacacggccgaccgtgttcacctgcaacgccatcatcgccgccatgtaccgttcagggcgctacgaggaggccattgcgctcttccactttttcttcaagcagtcgaacatcgtcccgaacatcgtgtcctacaacaacgtgatcaacacccactgcgaccagggccgagtggacgtggcccttgaggtgtatcggcacgtggtcgccaacgcccccttcagcccctcccccgtcacctatcgccatctcaccaaaggtttgatccattctgagcgcatttcggaagccctggacctcttgcgcgagatgctctctaagggccacggtgctgattccctcgtttacaacaatctcatttctggctttctccatttggacaatttcgacaaggccatcgaactcttcgacgagctcaaggagcgttgcctcgtctatgatggcgttgtcaatgccactnttatggaatggttcttcagcaagggcagggacaaggatgccatggactcctacaggtccttgttggaccgccagtttcggatgacccctgccacctgcaatgtcctgttggaggccttgcttaaccattccaagacctctgaggcttggtctctttttgataacatgttggacaatcacacccctcccaatttccaggctgttaactctgactcctttaatattatggtcaatcactgcttcaagcttggaaactttgagcttgccctttctacttttaagaaggttggatccaagcctaactctaagccctttgccatggatgttgccggctacaacaatatcattgctaggttttgtgagaatgcgatgctttcccaagccgagaccttgttcgaagaactctgctctaaatctttgagccccgatgtgcccactcataggaccttgattgaagtctacttgagaatggacaggatcgatgatgctctcaggattttccacagaatggttgattctggtctcagggtggttgctacctttggtaacaccgtgtttcatgaattgattaagaatggtaaagccattgactgtgctcaaattttgagtaaaatgggagaaaaggatcccaaacctgaccccacttgctatgaggttgtaatcaagggactctgtgctgatggcttgttggacaaaagccgagagctgctggatgaggttatgaggtatggtgttggggtcacttcttccttgcgggaatttgtgactgaggttttcaagaaagccgggaggggtgacgagattgagaggctgctagatatgaacagatttgcatacactcctcgtccatccccaccaagacctgcttactgtccaccgctggtcaggtccccctcgcaaatggcagcaggggcagcacatagcccaccttc

SEQ ID NO: 140163 - DNA, 483 bp, Glycine max
  Clone ID: PAT_MRT3847_97576C.1
acgagtagaatcggcatgtcatcaacaaatactagctggatcaatttgccattgttgataggagatatcaaagtggctctggtaagccttcaaccatgcccgcaaacagaattttgtgtcatagcttctccaaatcaaactctatagaactccatccaactggccatcatagcttaggtttctccccttgtaatccatgtgatctgtgagatatgccttaaatgatcaatagccttttcagggggtactgtgtgtgtgcccaataaactggaccatttccaccaaatggcttgtgaattttgcacgaaaaaaagaaacatgagaagcatcttcttgaacttgattgcacatgacacattttaaatactcatcttgaacttggatgtgcctcttatgaaggttatcttttataggtaacctatcatgatgtaagatcctccaaataaaaaacgagaccttttgtgaaattttgatttgccaaat

SEQ ID NO: 140164 - DNA, 281 bp, Glycine max
  Clone ID: PAT_MRT3847_97577C.1
aaaatgaagagctccgttctcacttggagaaactaagacttgaacaagctagcctgttagaagtaagcaatatcactaccaaatcagatggacaaattgaaaacagtatctcaaacctaccagaaatggtcaccgagaatatttctctgaagggtcagcttataaaagaacagagcagatctgagagtttgttggcagagataatgaaactttcagctgagcttaggaaagcagtccaagcacagaataaccttgtacgcttgtacagcctgtattaagag

SEQ ID NO: 140165 - DNA, 753 bp, Glycine max
  unsure (1)..(753): unsure at all n locations
  Clone ID: PAT_MRT3847_97578C.1
cccacgcgtccgacgtcgcaacgcaaagcaaattgttgtccatttttgaaacagagaaacaaaaaaaaaaaaaaaaactcttccaaagtagaggcagagaatctgaaagctagggtttgggatgccgaagaacaagggaaagggaggaaagaaccggaagcgcggtaagaacgaggcggacgacgagaagcgggagctggtattcaaggaggacggacaggaatacgcgcaggttctccgaatgctcggaaacggtcgctgcgaagcgatgtgcatcgacggcaccaagcgcctctgccacatccgcggcaagatgcacaagaaggtctggatcgccgccggcgacatcatcctcgtcggcctccgcgactaccaggacgacaaggctgacgtcatcctcaagtacatgcccgatgaggcccgcctcctcaaggcctacggcgagcttcccgacaccaccaggctcaacgagggcatcggcgccggccttgatgaggaggaggacggttccgggaatgattatattgagttcgaggatgaggatattgataagatttgaaacaaatacaaataattagggttttggttttggttgctgttgaccttgctctttcctttttttttgcttttttgtttttgcttgagattctataaaaaattgttatcatgtggtgatgaattaactgtatgttcttttttatgctgntgtctcactgtactgtggcacatggatatggtgaatggatttcaatg

SEQ ID NO: 140166 - DNA, 1746 bp, Glycine max
  Clone ID: PAT_MRT3847_97579C.1
ggctatggcttattacagatttcttgatgtgttttcatggattcaaaaccttccaccaatcccaggatggaaaacggcttccatgtccctgagcatatgttccacaaactcatctcagccatctcttaatctcaccatagcaaaaaatcatcaccaatcctcaagaatctccttagccattgtggcagacttcaatattcccatctctctttggacctctaaacctttcaaacctagcaccaaaaccatgaggttaaaagatgatgaaactctttccaatctccttgttaatttcatagaagagatccttcattatggcaccaacaagcacagtattccctatatcaagttccccaaacttgattctgtttccaacttccaagacattttcaaccttgctttcctcaccctcttgttcctagtttgcatatatgaagccccttctgatcttcgttctggttgccttaacactttgaaagaacaattggcagggtgtcaatcaaggcaagcatcaaaatttctgatgaaactcttgggttccaacttggaagagcagtggatgcgttctgtgaaccttgcgatcacaaattggatagtggagatccaagaagcacatcacactgatcacaccaccatcagaacaccatctcctctattttcttatgcgttctcaacgtttgggttgtggaaagttcaattgtactgccctgtcataaacatggatgttgtgaatgcaaacaaccacccagctgatgagaggcttcaattctctctcaagtatcagcagcttgaaggtgttcttcaattcaattacaaagtcacaatcagagagaggtgggttgaaatcgtggtgaacattgacaacataagatgcgatgttttcaaactggtaaatgacattctgatgagagaacgaggagcaggtgcagcagaaaaacatttcccttcaagaatctcattgcaactcactcccacaattcaacaacaagtattaaccgtatccgttggcaaatcctcagagaatcctcgaatagagtttggcgtggagaaaggcatagaagcctcattcgagccaccaaatccttacataggacttagcgtatcagcaggagagtccacaactgtgagcttaaagccctggaaattcgagcaatcagttcatggctacagtgcaaacttgaactggtttcttcacgatagcaccgatggcaaggaagtgttctccacaaagccttcaaaggttgcgttgtttaacccaaaatcatggttcaaagacaggtactcaagtgcttatcgtcctttcacgaggcaaggaggggttatctttgctggtgatgagtatggagaaagtgtgtgttggaaagtggacaaaggtgctgtggggaagacaatggagtgggagataaggggttggatatggataacgtattggcctaacaagcacaagaccttctaccatgaaaccaggaggttcgagttcagggaaacggtctacctcaaaattgcatagcttaggagtcacgcataggaatatatcaatcaactttgatttggaccatagaaaccaatttattatatcacaaatatgtattttttttcttcgttttattgaacatgtggttaattataattttaaaggaaatgataacggagtgaaattattggtctgttttcatttttcacaaacacccgatcatttccatgggaatttaattttaatgactgattgtaaaaagtttgtattaa

SEQ ID NO: 140167 - DNA, 352 bp, Glycine max
  Clone ID: PAT_MRT3847_9757C.1
gctgaacgatttctctatctttttaacaacgtgaacataacttgaggtgccaattctccattgtgttgtcaacaagattctatgggagcgcaaccttgactaccaatttgcatatctgacattaatgggctgtcatctatcctgataagctaaattagaagggttaatgcatgccatgtcgaactacatatcgaatggctcaattaggcacccaggaaacataatgcttgcaatgcctgagagaccggccagggtccctgaggatcccattgtggcttgacctgtacactttcttagtttggctcaatgagatgatatatctcgctaattctttcggcggatacaactttag

SEQ ID NO: 140168 - DNA, 371 bp, Glycine max
  Clone ID: PAT_MRT3847_97580C.1
gaggtctaattatagtggttacccaaaaaaaggaacctctctatgtttattggataactgaacatcaattatttatcagaaaatggctatctttccaatttaacttttgcatttagtactaccagtgttgtttatggcggatggcggaccatggcggcaagccaaaaaatccgccataaatttatggcggatgacgttgcggaaatggtggaagccatggcggaccaaatatatatataattattaatactaacaaaataatatataaaaattaaaaaagtaaaaaaacagtagacataacagtaaatgcaaataataaaactaaaaaacaattggtataagtaattaaaatatatatgtgtgtgtgtgtg

SEQ ID NO: 140169 - DNA, 574 bp, Glycine max
  Clone ID: PAT_MRT3847_97581C.1
gaccataaaacttaatcttttgctaagaaaaaaaagtacattttattgcaatcatgtttctagagtttaccaaatcctagccccaaatgcaacgaaatgagtctaggtagaaacttattctatacaacaaataaagaagtggcaattactaatggatgactaatgcctaactcactgtaacaaagttttctataggagcatgaaataagaacaaaggttatcctaaaatttctattttagaatatagaagaataaggtggagtcttgtcatcttataacttcagagcaaatcttgggtgatcccactctatgacaacatggttatgagttatcaccttgagcgaatgccaaccacttagcaccattgttagttcaaattcatcacgaagcatttgaagtacttttctcacattagcctcaccatgaatacatcggctgcttcaagagctagggcattaaaaacatatgtccctcgacgaattcaccatgcaaaaatctggatttttcttatgcaacttactactatacagtagcacttattcatatgttatatgaagagctatcatagccaaaa

SEQ ID NO: 140170 - DNA, 1839 bp, Glycine max
  Clone ID: PAT_MRT3847_97582C.1
gaaggtcggaattcggccggagctccttcccttttttcatttccttttcgatttcaccatttgtttctgagacaccctttcttgaatcactgcaccctttttccctctctctcagaaaataaagtttttttttccaagtgaggatgttaaaatgaaaggaataatagcattgcacacgcttttgccatttcttctattttctgccattttaccactctctttctcagctcaaccccgcaacgccaagaagcccaaaaccccatattctgataataatcatcatcgcctttcctcctctgctgttttcaaacttcagggaaatgtgtaccctcttgggcattacacagtgtctctcaacattggctatccccccaagctttatgaccttgacattgactcgggtagtgaccttacttgggttcagtgtgatgcaccatgtaaaggttgcaccaagcctcgtgatcaactttataaacccaatcacaaccttgtgcaatgtgtggaccagttgtgttctgaagtgcacttatcaatggcctataattgtccttccccagatgacccatgtgactatgaggttgagtatgcagatcatggatcatctctgggtgtgctagtccgggattacattccttttcaattcaccaatggctctgtggtgcgccctagggtagcctttgggtgcgtccgggctaggtgcggatatgcaaaagtattctggttctaactccccacctgctacgtcaggagtccttggccttgggaatggcagagcaagcattttgtctcagcttcattctttgggtctgatccgcaatgttgttggccactgcctaagtgcacaaggaggagggtttttattcttcggagatgatttcattccctcttcaggaattgtttggacatccatgttgtcgagttcttcggagtaagttttaaaaattgatgccatttgttccttctgagatttttttgtttcacacttgcatcatctgttgccgttcatgaaaagttgccaacaatcattgcttcagaaaacactacagctcaggaccagcagaactggttttcaatggaaaggctactgctgttaagggtcttgaacttatcttcgatagtgggagctcttacacatacttcaactcacaagcctatcaagctgttgttgatttagtaagatagaaactagagagaggctcaattttcatcatcaatctcgttgtcttatatggcctaagatatttagtcagccatcttaagttaataattccttgatccataattcaggtaactaaagatttaaagggaaaacagttgaaaagagcaactgatgacccatcacttccaatttgttggaagggtgcaaagtctttcgaatcgttaagtgatgtcaagaaatatttcaagcccctagcattgagcttcaaaaaaatcatgaatttgcagatgcacctaccaccagaatcttaccttattatcactgtgagcaccttttaagactgaacaactctgcctctagttaaggaaacaaatgaaattgtctaacatgctgtcctttaccagaaacatggcaatgtctgcttggggattctagatggcactgaagtaggactagaaaatctgaacataataggaggtaaggcatgccaatttaaaagagtataaaaaaattcctttctcttatttgattattgttggaaatcaggaataaatgtcatttattaaatgtcatttattataaatgacatttattcctgattctcaacaatttttttgatggtaatatgccttttattgctctcagacatcactttacaagataaaatggtgatttatgac

SEQ ID NO: 140171 - DNA, 944 bp, Glycine max
  unsure (1)..(944): unsure at all n locations
  Clone ID: PAT_MRT3847_97583C.1
tnnnacccnatcatattcattaatttagtaaataaaacaaaataacaaggggccnnnncaaacattttcattataaggcgcagagtgagagagaggcgattattttttctaattgcaaattggttttcagcacttttcttcttatttttatgagtgaagcagtacttcccctgtttggagccaatcttcttctgtatccctttatttggctcggtctaacttgacattattcattttctgccaacaacactaactgtgtgtgtttggaaactatacctgatagctttacatgtatcacaagaaaccatatcaaataatgcgtaactaaacaccataacataacctcacctttcctcttggtttcttttttcttttttcagtgtaatatcagttatgtatcacatttcaatcgactttgaataaatatcaaacttctcagaagaagacagttgtggctcatgagtatactgctggcgagtgttcatggtaaagtcttgatcgttttggccaaaggctttttctttagccccacgaattgtggagcgcatggaattaagcaagtggccataagtcaaattagattcattttgcatggcttggatgaaactgaaagtcaaggcaccagagctttcctcaccgctcaaggccgatgtgtctgctgcatttccatcgtcatcacaagctgaaatgcaaactgctaaccctcctcttgtgcctttgtaaccagctcttgggtttctctgatcttcccatccataataaccttttcggttcatcctgcacataaatggtaaatcaagaattgtcccactaaagcaagtatcaacaagggcatgaagtttggcaccacgagggagaggcctaacaattgtggcgttgatttcatcgtcaagtatcttcccctcatgctcataatcaacgggcatattgcttcatcatatcca

SEQ ID NO: 140172 - DNA, 264 bp, Glycine max
  Clone ID: PAT_MRT3847_97584C.1
ctcacgcgaacgattccaggagagcgtcctggagatcgtgcttgaaaagatgaatatgaaggggaacatcattggtggctgcggttggtgagattgcttttcagattccatagatgatgcaatatatgagggtaggagggatggtaggagtagcactaattggaacattaacagatacttacgcatatactggactgtgtccgctaccgtgaagaaaaccggctagaaaatgagcttgggacagatgtatggacataaatgcgt

SEQ ID NO: 140173 - DNA, 439 bp, Glycine max
  Clone ID: PAT_MRT3847_97585C.1
caacatctttcacgctgatacctatcccttacacaccataacaacctagcatatcatctaggagcgaagaaaacggaggcgatctatctcatccgcaccaccacacctgaaccgccaccgcacttcttcgccaccctccccttacccctcttgccacatcctccctatccgccatgtctcgcacagcaactgccaccccaccgccggcatactttcctcctcgcaatgcgacaccgacgatgcggcactgcgccgccccaaacgtcaacgcagtgcatttaggacctcgccacgcacatgagccgcaccacccgaagaaaaaggcccgaaatgtctccgcggcgtttgtgggcgctttgagccccgaagaagaagccgatggagatgggaacggttacgccggcgggagaggcgctagccatgtcattcgaggagatct

SEQ ID NO: 140174 - DNA, 351 bp, Glycine max
  unsure (1)..(351): unsure at all n locations
  Clone ID: PAT_MRT3847_97586C.1
gggtggagtgaagattcaacacatattaatanncatttcttttgaaggagtacacaaacaacgagagggtcttttctaagtgttgggggccttacacaacataatcaataatccaatcaatcaaatcattcttacattgttgttactatgaaatcacctttcagacctcatattctgaacgtaaaggttgctcttatcaccgttggagcctcctgattcttatttaaaatttccacccaatttcataaacatgtagccttagtttttcttataatcccccttaagctagttctttaatccgctttctttctttcttcaatccctttgtcatatccctccttcttctttttt

SEQ ID NO: 140175 - DNA, 1466 bp, Glycine max
  Clone ID: PAT_MRT3847_97587C.1
cgacaactttcaaaagcaaagtgaaagcactttttcagaaaacttgcacttcaattcaatctagtattctatactgctgctactgtataattagcagctagtatctatatataattaaataagtttatactaattcccttattattataaaatggagggtggtttgtggaagaaagagttggttctaaggtttgttgtgcttgctgtggctgttgtgaacacagtgcaatggaatggagaaggcacgcgtgtagggttctattcgagcacatgtccacgtgccgagtccattgtcaggtccacagtggaatcccaccttaggtcagaccctactttagctggtccaatacttaggatgcacttccatgattgctttgtgcgaggttgtgacgcttctgttctcatagccggtgctggcactgagagaacagcggggccaaaccttagtttgagaggatttgatgtcattgacgatgctaaggctaagatcgaggctctgtgccctggtgttgtctcttgtgctgatatccttagccttgctgctcgtgattctgtagttctgagtggtggactaagttggcaagtgcccacaggacgcaaagatggaagggtttcaattggatcagaagccttaactttgcctggtcctaatgataccgtcgcaacccagaaggataagttttcaaacaagggccttaacaccgaagacctcgtcattcttgctggtgggcatacgataggtacaagtgcttgccgatctttcgcagacagaatatacaaccccaatggcactgatccttccatcgacccttcatttcttccatttctgcgacaaatttgcccacaaacacaaccaacgaagcgagtggcactagacacaggaagccaattcaaattcgacacgtcctacttcgctcacctagttagaggccgtggaattctccgttctgatcaggttctttggactgatgcttccacaagaggctttgttcagaaatacttagccacaggtcccttcaaggtccaattcggaaagtctatgatcaagatgagcaacattggtgtcaagaccggttctcagggtgaaattcgcaagatatgttctgctattaattaattaaggcaaatattaatcagtatccttataatattgattaaggaattaaaaaaatatttaaaattatattaatcatcacttaaggatactggttaataagactaattaattaattgcatacttttctgagaggtgccaagattaaacttctatacacctccttaattaaatctatgccagaaaaactttgctttataagtgaataaagcaataattaaaaatattgtggacaatgatataaaaagaaataaaaatcatttaagatctgttaatcgcagaattcgactatgaccgcagaaaagcttgtgaaataaaattattatatttttgttagctaaaaagcttaccc

SEQ ID NO: 140176 - DNA, 540 bp, Glycine max
  Clone ID: PAT_MRT3847_97588C.1
agctcggaattcgctcgaggcttccacaagaggctttgttcagaaatacttagccacaggtcccttcaaggtccaattcggaaagtctatgatcaagatgagcaacattggtgtcaagaccggttctcagggtgaaattcgcaagatatgttctgctattaattaattaaggcaaatattataaggatactgattaatatttgccttaattaattaatcagtatccttataatattgattaaggaattaaaaaaatatttaaaattatattaatcatcacttaaggatactggttaataagactaattaattaattgcatacttttctgagaggtgccaagattaaacttctatacacctccttaattaaatctatgccagaaaaactttgctttataagtgaataaagcaataattaaaaatattgtggacaatgatataaaaagaaataaaaatcatttaagatctgttaatcgcagaattcgactatgaccgcagaaaagcttgtgaaataaaattattatatttttgttagctaaa

SEQ ID NO: 140177 - DNA, 683 bp, Glycine max
  Clone ID: PAT_MRT3847_97589C.1
aatctctgtatggtgttactttatatatcactattatgcaattattacttcaattgtccacggatggacccatttttttggcaggaagcatacaacctatgtgactcgctatgaaggaaaacacgttaaacttattcaattttttcagaactaaaagtctaaaactatgctccattgcaagctcataacttgcaggttcagagttcagacagaagaaagccacattaacacgagcagcttttaaacacttcatcttctggattgtagaggccatgttttgtcccattagcacataatgactccaccaaagtggtgggaaaagcttaacaacaaacttctccgggccagttacttttctatggcaaccaaacttgcacatggcaagaaagcatggaaagaaactgtttcctatctactgttcaactgctatgccagactcctgattgtgggagggcctccattttcggtcatagatacttctttcaaccactcgtgcacccttcttattctgaacactaagtttcttatctatcaattccagcagctcttgcaacccaactcctgtgacagcagatgtcttcacatgaggaccagattgtcctatcgagccatttttcacgacactggttgccctttttataggactcattttggttggcggcccccgttgaaggtgaacaaaa

SEQ ID NO: 140178 - DNA, 275 bp, Glycine max
  Clone ID: PAT_MRT3847_9758C.1
catgtactactccatgactgcttgttctgtatggactgtctttcgctgtatgctgctctcccggctcgcgcatggtgaactgcatgggtgccctcgagctacgacttgttcggagtggaacattccgtaatattcttggtcattacctaggacttggaaccgctgtttgtcggtacaggacaccaagatgtgttggtcctacatacaccggagtgttcgccatcttgagtgacattgttgtcggcatctatctcagtaccgctttcatttgattt

SEQ ID NO: 140179 - DNA, 1882 bp, Glycine max
  Clone ID: PAT_MRT3847_97590C.1
ccggggatttcgcctgcgttcttggtggtattgtgtttagggccgcgcggaatctgcttcctttccccgccctcgagctgcctgcgaactctgagcccgactttaatgcagaggctgttcctaaaaatgggaaccaaatgagttatcaggatgagttccctgataattatttcatgtcctgcattggcagtgttactggtttcaaagatggtgatgtggaggtgacatgggcaactggtttcacaaccaaggtgtgttgcttgcaccttatgaaattttccggattgagaaacatgaaggttcaactgtaacccccactccttttgagacaaatgttgaagagttcactcatgagataatcgaacacaggagtctaccttctgaccagaagggaaaggacttgttaaatggtgatggtactagagagaattgtgaaaagaatcttggggaatgtagttccttttcccttcctcgagcagcctttgaacttttctccagcattaaagccagcatattccaaacttttagaggaactctaatttcaggagcagtttcctcagtacctacatttgaaaagaagaatggatatgattgtctagataagaaagatttggaaacttctgacctctttactgaacaacatccaatggctgagttgcaatatactgaggacaagacttcatatcctgaaaatattgagattcatgagaagaatgattttccattttctttagacagcaacagttcaaaccagttcaagcagtttgatgtaatagaaaattgccctgaccaccatttttttgttgagggaaaagggttgtcaacatctcaggtaaaaagaagttgggtgaaaaaggttcagcaagaatggagcatcctcgagaaaaatcttccagaaactatttatgttcgtgtgtttgaagaaagaatggatctcatgcgagcagctattgttggtgcatctggaactccttatcatgatgggctgtttttctttgacatatgcttccctccggagtatcccaatgaaccacctatggtgcactacaattctgcagggctccggttaaatcctaatctgtacgagtcaggaaaaatctgtctgagtctcctaaacacttggacaggcacagacactgaagtgtggaaccctggagcctccactattcttcaagtccttctctctctacaggcacttgtccttaatgagaagccttatttcaatgaggctggatatgaccaacaaattggcagagctgagggagagaaaaactcagtcagttacaatgaaaatgctttccttgtcacaaccaaatccatgatgtatctattaagaaagccaccaaagcattttgaagcactggtggaagagcactttagaaaatgctcccaacatatacttcttgcttgcaaggcttatcttgaaggagcttctattggatgtgcttttggtagtggaaaaactggacatgaaaaccagaaggggacttcaacaggatttaaaattatgcttgctaagctcttccccaagcttgtagaggcattttctgataagggaattgattgcagtcagtttgttgatctacaaaaagaacctttacttactaagttgtaagtatctgccaaaaatcccgaccgagatatcccaatcttatgtgtaatatcaatatatttacattctcagtataatatcaattttaatctctgggttttgtacttttgtggtttgttactgtggtgtagttgatagataaatcaacataacatgtgcttgtagtatgtgtatgtatcacagcatggtttgtggatgtaaaatatggaataagaaatgcagccattggagtgattagctttaaaaaaaaaagggcgccgccgactattg

SEQ ID NO: 140180 - DNA, 115 bp, Glycine max
  Clone ID: PAT_MRT3847_97591C.1
cgtgtgcttctgattccaagtatcatatacttagatcatctttcggtatcttcggttgctctcacagaattcgtcaagagaagtccttatcatctaatgaacaagtaagtgaatc

SEQ ID NO: 140181 - DNA, 334 bp, Glycine max
  Clone ID: PAT_MRT3847_97592C.1
cgtcaatctcattgagcgagccaaagagagagagagagaaaccccacaaaacacaaaatcaaagggactcattaatttaagttaagcaacaacaacaaaaaaatggggatagtggaagaagctcacaacgtgaaggttttaggatccggcacgcggcacatagttctggctcacgggttgcggcacggaccaatccgtgtggaaacacctcgtacctcatctcctcgacgagtttcgtgtcgtgctctacgacaacatgggagctggcaccaccaaccccgattacttcgattttgagcgctattcaaccttggaaggctatgcctatgacttg

SEQ ID NO: 140182 - DNA, 474 bp, Glycine max
  Clone ID: PAT_MRT3847_97593C.1
atccgggacaaaagaggagactgagccttttggtgccctgagatatcttcaaaactctacatatcccgaaaaaactggataacattaggtgctagggagaatagacctgaattgcgcgggagggaacaatagggacctctctctaattatggaaacatacacagggatacaaaggctctaagaggtcctgcggtgctttatatcgccatatggccggattggcctgcatgagcacattgaatcagcttgatcctttaaaaccgtaaaatactatagcgcaagagaagagcaacacgcgctgaggcgtccccggtttacccgacaattccgggcaagcgcgtaactgcgccccatattgtgcgatattaaaacttgttacattgtgggggattgtggggcctcgcgggaaattggggaaaacgtgggcccgctcacaaatggccaccccggtccatttagaagcataacgggggg

SEQ ID NO: 140183 - DNA, 270 bp, Glycine max
  unsure (1)..(270): unsure at all n locations
  Clone ID: PAT_MRT3847_97594C.1
gaaagggaaagtttactgttatttttaagttattcgatcaaaacatgaccaccagcaacaaagccagacattagaactctgctgatgtatatccttcaaatttctacaaaatatctaatgctaacactgtcaatccatcttcttctcattgctcttgggagattcctcttttctctttcctctttggtgcaacctttgggaactaccaaacacaagntttctttgaagataaatgggaaaccaccaggaaataaatctttttcttcaacc

SEQ ID NO: 140184 - DNA, 240 bp, Glycine max
  unsure (1)..(240): unsure at all n locations
  Clone ID: PAT_MRT3847_97595C.1
ggattngaatcggttcnanaatgttttctaatttgttgataatcantaattntcattatggggtcnttgnttgttcnaggtgaanntgatcaaacaataaagnttgtntgtgtttgctttgtattacngagtnaactcatttnngtagtagcacatagtanggctctttgccntnatggtgttgatgtcaaatacttaagaacacaggnnntggnggcatttccaagtntatngcttggg

SEQ ID NO: 140185 - DNA, 1233 bp, Glycine max
  Clone ID: PAT_MRT3847_97596C.1
tacggctgcgagaagacgacggagagaggtagttgaaggagcagaagaagaagaagagaaggtggtaccgccttcaattctctttttctctctccatttctcatcctcatcatcttattattcctcttccatctctattctccataacacccaccacaccacttgtgaaaaacctcattaatatcacacactgacatgtatctctgagctccaatccaatacaagaccacaccttgtcgtgtcggacgaaccttggtgtctgtttttttttttttttcattattttctccgaagagatgaggaagggcagaggtggaggcgcctcggcggcggcggtggatgtgaacggatccattttaaaggagcctcggtaccggggcgtgaggaagagaccgtgggggagattcgccgcggagatcagagacccgttgaagaaagccagggtttggttgggaaccttcaattctgccgaggatgctgctcgtgcctacgacgccgccgctcggactctccgaggtcccaaggccaaaacaaatttcccccctctctcacctttttgctatccacaccccaccaccgatcctttcttctacactggtttccacgatcaacaccaccaccacaacaacaacaaccttaacaaccctcaaagacccacttcaagtggcatgagtagcaccgttgagtccttcagtgggccccgccctcccaccaccaccactaccaccacaaccacaactgcgacgccgtttttgactgctacgcggagatacccgcgcactccccctcttgtccctgaagactgccacagtgactgcgactcttcctcctccgtcgttgacgacggcgacgacaacatcgtttcgtcgtcgtttcgacctcccttgccgtttgatctcaacgcgctgccgtttgatgatgctgccgcggatgatgatctacgccgcaccgcgctttgtctctgatgatgattatcgtgcgatgatgatttttaatttctcatttttttacttgatttttttgttattgctatgcagaagaaatatatatttaaaatgatgatcagatgtaagattatggtaatatgatcttaattctgtgagaggaagattccgtgttggttatattttcttctttttattattttttaaaacatttttatttagaaggaaatattgaatgagaagagaaaagagaaagtaattatgatcaaaaaaaaaaaaaaaaaaaaaa

SEQ ID NO: 140186 - DNA, 329 bp, Glycine max
  Clone ID: PAT_MRT3847_97597C.1
cctcgtacggctgcgagaagacaacagaaggggtgcttaacaacacactcagtgtcctaagggaaaattgcctaaaattattacacacaaatggaatgagggtgacctatagacggctgccaactcacttccaatgaaaggcctttttgctacaaaattggaaagcaaaacaaaccgccaattacacaattacacatacaaaaagttctgaattgtggtggccattatctacctattggttgactcaactggtagtgctacttagatcaacagctgtatggtaggttggccccttgcttaatgactcaaattcttcacgatatggcacc

SEQ ID NO: 140187 - DNA, 493 bp, Glycine max
  Clone ID: PAT_MRT3847_97598C.1
gttattttttttttttttttttttttttttttttttttttttttttttaaaaaaaaacttttctatttccccaaagaaaatttccaaaaattggctggggattttttctcattgaccccttaaaaatattttaatctcattccccttggtttgggaagaacgactccaatcactactgggggaacatttaatttgtgaaaaaaacatgaattttttttcaattttgccaactaagggcctttttggtggtgcccttttttccgccataaattacactttttccacttgacacttggcacttttgattcaaaggagactatcaagggctaaaagataatatgccattcataggggcttgaaaattccatttcagctcattttccggtgaaaaagccagtgggggaatgcctcaagggttttaatggcacccctataagggttctgaggaaactcaagcagcttaggcgctggaaaatcagggtttatccttggg

SEQ ID NO: 140188 - DNA, 911 bp, Glycine max
  Clone ID: PAT_MRT3847_97599C.1
ccaacattttaaagcgtttctatattacttgcaatagccactctactatatacattacaaattaattgaagcacacttgtcacatttacatttagtgacagatatatagtaacatcatcatgggtttgaagaacagtggcgttggtcatagagcatggagcctccttcgggcatcattgctgtgggcaagcaaaggtggcgtgttgaggcgcagggtggcgatggagctgcgtcttgtaccaaagtacttgaagcgactcggccacactgctcctccaagccacattcactactttgaacgcgagctctcgttcgacaagacccccatcttccatgtcaagatgtaccgtccaaccaccatgcgcttccacttgcctcacattccttgcataaacccacatgttgattttaatgatgatgatgatggcaatgttgagtatgatactggtggaagaaagagtgccctcatggatgcatcaggagacagcagagaccaggaattttatcttgattatgaaggttgccaagaaatgggttgtggtgaagaagaggaagaacaacaactagatgctcagggaatagataagcaagctgaggagttcattgctaaattctatcagcaaatgaggctgcagcgccagatttctcttctacaatacaatgaaacacccagatcagacacaagttgttgagcatacttcgttcgcttttttcttctttttctattgagttttgatgccattgtcaatgtagaacattttagttcacgaaatgtgagagagagcgagagagatctatatgtacggcgggatgctgtaaataccaggagctacctttgagttctagtatttacattttttcatagttataatttcaataaaaaatactacagtctaccgggctgttattcc

SEQ ID NO: 140189 - DNA, 349 bp, Glycine max
  Clone ID: PAT_MRT3847_9759C.1
gttcataaaacactatacacatcacaatgagatgatctcacatgaaagtaggctcattcaatcgtcatacagaggcgagacgtttaacaatacacagtcgaatacatggagcagagtgcacttatgcatgcgatggatggccctacactcgatcgctgacatcatcctcatagataccatctgcagggtgtcgcccagacgatgctagattcccaccttctgtgtgcactggaagactttccaacgcactagatgcttgaattatgtgctcagagaagctcatcgctgtcatatgcccaagtgatatcatccttcctataagcaaacacggaggatcctcctcttctat

SEQ ID NO: 140190 - DNA, 472 bp, Glycine max
  Clone ID: PAT_MRT3847_975C.1
cgtgggcggacgcgtgggttcatggggttagttttggtaatctgaatttttcttgggtttttagtattaaacaattatattttcctgttgtgtgttgtattttatgaataacgtgtgaattgtaaatgtggtgtggttggtttttctgtgtgcagtggaagagactgagatgggttcaaaaaccaagacttttacctttgaagaggtggctaaacacaatcacaggaaggattgttggattatagtcaaagggaaggtgtatgatgtcaccccatttttggatgatcatccaggaggtgatgaagttttagtgactgcaacagagaaggatgccaccactgatttttgaggatattggccacagggattcagtcaccacagatgatggaaaaatactttgttgggggaggttgacaccaacactttttcagcacatgttaccagcaacaacagtgtacgccaaccaacacaa

SEQ ID NO: 140191 - DNA, 304 bp, Glycine max
  Clone ID: PAT_MRT3847_97600C.1
tttttggtggtttttttttaattttttgtgtggtttttttctttttttttttttttttttaagaggaattcatatcattcatttggggggcctctatcggcttgaaacaaaagggtatccctaagtaaaaaattcaggggggttaaaattggttacatacaacaaccgtgacctgcagggcagtgccatgcaatacagggactaaagataggcgaattcatcttccttggggggggcaaagaacttgacaggaccaccacccgggatgtcggggagaaactgaaccttgtaagggagattgggg

SEQ ID NO: 140192 - DNA, 400 bp, Glycine max
  Clone ID: PAT_MRT3847_97601C.1
actttttacagagagtttcagtggaataagattgttaggttatcaactttaatcaaaatcatttgctttggccccacgcgtccgcccacgcgtccggccagatcccacaggatttagcagtttcgtatattatttacgttttttcttagacatgatgattggttatttggtgatagcattgccctatattttagatagtctgtcactcatcaagttggttattttatgattcaactgaaaattagctgaatataatagatccattcttccaaaagctatctgcaagtttcattggtttggtagaatggtatccaactcctaagtcctaagatgatttgtttgggtttcaaactagggaatttttcatcattatggaatgtataatgaatattgagacata

SEQ ID NO: 140193 - DNA, 313 bp, Glycine max
  unsure (1)..(313): unsure at all n locations
  Clone ID: PAT_MRT3847_97602C.1
ngtntattaatctcaagaantnnattcgnnntgtgnnnaacacaactatgannnaantnnannnacannnnnnnnnnccgtnanaannttnacgnttnatnntgtatcnnatngcanattaccnnttttnncgtanntnnnnnntcncnnatnatcttnctatnagggtcttgagagtggncantttnnngtcancntgantnngttgacttcatcaancanggnnaangacgnncnangnnctgatacatnatannnnnnnggtatgncngtgantatncnnntnggncngttnnnctgnaattggngtgtc

SEQ ID NO: 140194 - DNA, 281 bp, Glycine max
  Clone ID: PAT_MRT3847_97603C.1
ggagggctgtgggaaaaggccttcctggggttttgctcctttgcttgttgttgttccagttcaaaatgggtggtgttgccaccaacgcagggggagattttggggtttggccctggaaaactgttggcggaccaaagggaaaggtctttgaaggtgaaaccacaaccgatttcatttttggccttgggactaacatagtgtgggccgggaccaaggctggatataatggttgtaaaactccaaggggggccaaggtttttaagccagggccggttcaaatc

SEQ ID NO: 140195 - DNA, 503 bp, Glycine max
  Clone ID: PAT_MRT3847_97604C.1
ccacgcgtccgccttgatccatctagtagtgggtgtcgtatactgcctcatcagctggagtgtcggtctccccaagcgagcgcctatcaatggcacgctcctgaagcttctctttccagtcgccctgtgccatggtattggtcacatcactagcaatgtgtccttcgctgctgttgcagtctcatttgcccacactatcaaagctctggagcccttcttcagcgcagctgctactcagtttatccttggacagcaagttcccttctctctgtggctttctcttgcccctgttgtcatcggtgtttcaatggcatcccttactgagctctcattcaactggactggcttcatcaatgccatgatatcaaacatctcattcacctacaggagcatttattccaagaaagccatgactgacatggatagcaccaacgtgtatgcttacatttcaatattgctctcattgtttgcaattcgctgcagtgatcttgaggggccccgct

SEQ ID NO: 140196 - DNA, 286 bp, Glycine max
  Clone ID: PAT_MRT3847_97605C.1
tcctctagagcggccgctttgggtttttttttttttttttttttttgggggggaaccattgaccctataaaagcttaacttcgcccaagccataaaaaaaagaaccaattcccctagcccttattgcaaaaaaagggaaggcctggtgatacattcgaggtagaagaatttggaccggcccggtttaatgtcaaatctcgagccctctgccagagcgaatcttgtatcaaaaatttcccaatatttatatgatcccgcgagcctaataactataagagacatgttt

SEQ ID NO: 140197 - DNA, 828 bp, Glycine max
  Clone ID: PAT_MRT3847_97606C.1
tcttatgttatttattgtatcctttcataactgctactactaaagtagctcttaatctatatattctatacacattgagttaaatatttactaaatatggaacggtggtggtaaatgtcaaattgatgaaaggagaggaagatgtctaagcgaaagaggcggttcattgggctggaattcaagaaccagtgtttttttttgttgaattgaattcaagaaccaggaatgggagtgttttccaataagattgataggaaacaattgaagcccggtgatcacatttattcttggaggcaagcttacatcattgctcatcacggaatatatgttggtaagggaatggtgatccacttcactagaggatcaagccaagaaactgaaacaagaacaatgttgggtggtttttatctaagttcaccccaccatgcttctcgtgacactccatgcccaaaatgtggttaccaaacaaagactgaaggtgtcactcaaacctgcttggattgttttctttatggtggctatctatacttatttgagtgtggtgtgtcacctgcattttttctagccaaagctagaggaggcacttgcaccattgcatcttctgattcaaccgaagccatccttcgccgtgctttctttcttctcaagaaaggatttggtggctaccatttattcaagaacaactgtgaggactttgcaatgtactgcaaaacaggcttgcttctagtcagaacaagcatcatgagtgtagggcaaagtggacaagcaacatctctcttggctgctgctggtgctatagtttcttcatcacttgtggttatgatcact

SEQ ID NO: 140198 - DNA, 272 bp, Glycine max
  Clone ID: PAT_MRT3847_97607C.1
taccggccggaattcggtcaccacgcgtcgcggcgctgggcggacgcccgcggggttgaggagagacgagtcgacgtgtgacgggaggtgccacacgctcgaatccgtgataaggcgggaggcattacgaacctagcgctgaggagcgaaggattatcgaaggttgccgaaaaatcaagaaggattcaaggacaactgaaagcgaaaacactcaaaactgtccaggtacattgttaacactgttagctgcacaaatgtctgctcttcttttg

SEQ ID NO: 140199 - DNA, 616 bp, Glycine max
  Clone ID: PAT_MRT3847_97608C.1
gcaattcacaataatccaatcatgggaatcaatatttgtctctctctttgcttcttctacatcactacccttcaccgcacaatttccacgttggcccagtctgagaattatatcatccacatggacatatcagccatgcccaaagcatactcctcccatcacacttggtatctctccactctctcttcagcattggagaattccaaagccaccaccgacaaccttaattctaagctgatttacatctacaccaatgtcatcaatggtttcagtgcaaacctgtcacctaaagagcttgaagctctcaaaacctcccctggttacgtttcttccatgcgagatttacgcgccaagcgtgacacaacacactcaccacagttccttggcctcaacaagaatgtgggggcgtggccagcgtctcaatttggcaaagatatcattgttggtttggtggacactggaatttctcctgaaagcaaaagctataacgatgagggattgactaaaattccttctcgatggaaaggccaatgtgaaagtagcatcaaatgcaacaacaaactcattggagcgaggttcttcatcaaagggtttctggcaaagcaccccaacacca

SEQ ID NO: 140200 - DNA, 385 bp, Glycine max
  Clone ID: PAT_MRT3847_97609C.1
gaaaaacaaaaatcggccaatccatttattttttaccattcttactttttttgattttttcacaggcaaataaacctaaaaataccggtttccttttacacattaaccataaaataaatcttcccaaaaaatttcatgatatcatacaactggtttggcagccctattattctttgggggaccactgagttccttttatgattcaccggctgaaaaaggggcccaacaatagcactcaccatttttttcctttccacggaatgattgcaagaaattataattatactttaaaatcatgtatcatatgaggggaatttaacctttggtggggggttccagccccaaaggcctcaagttctgtgggctttacttcaactgtggaagc

SEQ ID NO: 140201 - DNA, 785 bp, Glycine max
  unsure (1)..(785): unsure at all n locations
  Clone ID: PAT_MRT3847_9760C.1
tttgtgttaaggtttttttttttttttttgggactaaaatacaagattttataaacggaaggttaagcaacacaggattaactaaaatctgtcataattgataaatatcatcagagaaactgaggtaccccgtgttacaataaactaaacaattcatgtggaggcagcatcaagatataaacatttttttttagtgaatctggagtatttccgacggaaagccggagactaatcattagaggcattgagatccattaaaaggattaacatctcttaatcctggagatcaaatccctaaccacattcttttggcactccacacatgttgcgtcaagatataactagaagaatgctcggctaccgtaaaacacacgtgatccatcctttttcttatcagtttctaacttactgctattaggattttgaatcacaccaagttgaccttcactttcaggtttgtcaaggtccattggaagcttcatttttgccaaagactcagtgaattgttgcatgcttctcatgtacatggtaactatttgctgctgcatagctgattgctcagcctccatgttgatgttccctagtgaagcagaaaaaacttgaccaaatcttgtagcttctgtattcctatcactattgatctccttttccttgcttgacgagaactttgactccttgtcatctctagctccactttctttattggaagttggggtttctggactgccaccagaattctgacaaccttcaactgtgantgaaacattgaaagaatttgatgagtc

SEQ ID NO: 140202 - DNA, 418 bp, Glycine max
  Clone ID: PAT_MRT3847_97610C.1
agccggacagccacctcacaataaaaagataatataaagcaaaatggcctttatttgacaccggaaataaacattatttactggaccatcaacctacataagagctttttaaaaaaaagacaacttcaaggaccatttaaaaaacaaattccatgacggtcatgaaaaaaaaacttttaaaaccccgaatcaatcatttagaaaggggcaaccccaaaaacccgttttaaaaatccccaaaaagaaattaacgggggccctgaaccccctggatggaaaatgccccccaaggaagagggccagggccatactggggaaaattctcccccccaagcgtggcggggtttatgcgctaaaagcccggggaaggatttccaacatattcaccatcagcaggggcctaaattggattaaaccc

SEQ ID NO: 140203 - DNA, 439 bp, Glycine max
  Clone ID: PAT_MRT3847_97611C.1
gctgcgagaagacgacagaaggggggtaccccttgtacccgttatttatatagttatgatcttattggctaataaaaaaaaaattggtaattgatgtgtttggaaaagcttatttataggacttatcttatgacataagtaattatgtaagtgtttggagtaacttatgaaaataatttatgatctggtcatactgttttcaacttattttaataaactctccaaaatagcttataaaaataattgcctacttgtatgaaaataatttaactttattttcttcttttattatagaaacaatttatacattagtaagttccttatagtgcttaattaagcctatttacccaaacattggatttggaccaagcttttcttaatatcaaatcatggggttaatggtttaagcacaaatttaattttgttgccgataataaag

SEQ ID NO: 140204 - DNA, 1377 bp, Glycine max
  Clone ID: PAT_MRT3847_97612C.1
gggccggaattcccggctcgaccacgcgtccgccgaaagcccctggttgtttcggacatgctgtccgctcccagtcccagtcgcaggtcaggtaaggtccaagtcgctcaagtggaaacactaacctgtacagtagtattctatttgtacgcgcaaaaccatagataatagattgaagaaagaacattcaagaatctgttttaggatggaagatgagcaggctttgattgcgtgtgtgtgatcaaggaggaaagtggaatgggttgtttttcgtgcttcgattcgcgggaggacgagatgctgaatcccaatcctcagcaggaaaatcaccaccatgaacatgaacatgatcatgatcttaagccccctgttccttctcgtatttccagattgccgccctctgcctctgggagacaagctacggtcaacaacaagtaatggagagtccaaaagggaattggctgctgctgttcaaattgccgctcaaattttcactttccgtgagcttgcagccgcaacgaaaaacttcatgccccaatcctttttaggggaaggtggttttggaagggtctacaagggcctcctggaaaccaccggtcaggttgtggctgttaaacagttagacagagacggtcttcagggtaatcgggaattcctcgttgaggttctcatgctcagtcttctacaccaccctaatcttgtcaatctcattggatactgtgctgatggtgaccaacgcctcttagtttatgaatttatgccttttggatctttggaggactggcttcatgatcttcccccggacaaggaaccattagattggaacaccaggatgaaaatagctgctggggcagcaaaaggattggaataccttcacgacaaagcaaaccctcctgtcatttatagagacttcaaatcatctaatatattacttgatgaaggttatcatccaaagctttcagactttggtcttgcaaagcttggtccagttggtgacaaatcacacgtttcaacccgtgtcatgggaacttatggttactgtgccccagaatatgctatgactggacagctgactgtgaagtctgatgtatatagttttggggtagtcttcttggagctgattactggccgtaaagccattgacagcactcgaccccatggagaacaaaaccttgtcacatgggtagccctctaatctttgcttgtctttattagtttggcatgcattaacttatgcatacataactatggggggtggtaatggtagttttatttgtttgagcaggcacgtccactgttcagtgaccgcaggaagtttccaaagttagcagatccacagctgcagggacggtatcccatgcggggtctttaccaagc

SEQ ID NO: 140205 - DNA, 777 bp, Glycine max
  Clone ID: PAT_MRT3847_97613C.1
cccgggtcgacccacgcgtccggcgacctctctttataatagattttctgccatcccaccaaaccaagaagaaacggacgcgtgggttttaggattggaagatgaggctttgattgatttcgtagatcaaggaggaaagtggaatgggttgtttttcgtgcttcgattcgcgggaggacgagaagctgaatcccaatcctcagcaggaaaaccaccagcatgaacatgaacatgaacatgatcttaagccccctgttccttctcgtatatccagattgccgccctctgcctctgcctctgcctctgcctctgcagtaggagcagacaagctacgctcaacaacaagtaatggtaatggagagtccactgctgttcaaattgcggctcaaacattcagtttccgtgagcttgcagccgcaacgaaaaacttcaggccccaatcctttttgggtgaaggtggttttggaagggtctacaagggccgcctggaaaccaccggtcaggttgtggctgttaaacagttagacagaaacggtcttcagggtaatcgggaattcctcgtcgaggttctcatgctcagtcttctacaccaccctaatcttgtcaatctcattggatactgtgccgatggggaccaacgcctcttagtttatgaatttatgccttttggatctttggaggaccaccttcatgatcttcccccggacaaggaaccattagattggaacaccaggatgaaaatagctgctggggccagcaaaaggattggaataccct

SEQ ID NO: 140206 - DNA, 319 bp, Glycine max
  Clone ID: PAT_MRT3847_97614C.1
ccacgcggtcatattaattgccactagggactgcaacgagctaaggtattgattaaacattcgagctcgacctacaagaattggctgtaataggagaaaacctgcttcataacagttaaagtcaaggtttaaatttgatacgcttggaacgctcaagctttaaagtggacacattcaagcatgcgcgacccaagcgcacaaaaatcattgacgctcagtccctggacgagatggggatcaatctcaaaatactcgcgcatgaacatgcttaagatcccacctggctccaccttcgaccaacaagtcatccctcccctta

SEQ ID NO: 140207 - DNA, 405 bp, Glycine max
  Clone ID: PAT_MRT3847_97615C.1
gccggggccaagaggggcgatccaaaggacaaaggggcgggggacgaggaaatgccggagcaaaatggggcccctgaagcgaggaggaaggacaccacgaaagagccgggaaggagaaacggaagaacggacttgcccgggagagaaccggagagggaaaaccagggggggaagccagggagaggcaccacagagcagtccggggacccaggcaaaggagacgaaggcgagcaggaaaccgatgagaaaagggacaaggcaaggagggaggaaaggggggaaacacgcagggcgccgagggagcggagcagcagagagtaagcgagaggcaaggaaccaagcgaggaagaagacgacgaggaagatgacaaagaacgaagacaagagagagacgccacgcgagaa

SEQ ID NO: 140208 - DNA, 514 bp, Glycine max
  Clone ID: PAT_MRT3847_97616C.1
gccttgccaataccgtctacatgtgtaggagtaccgcctgcttggggggggggggggggggccaaatctaaaactttagtaggcgacggcaataggactaaacaaagatgcgtttagaatgaaagagtaaaaaaacaaaaatagattacgatacagaaattgctgatccctttaaaccttgtgtaaagcataggagaggcgaatgctgaccaaggcgcgttatagagccattatacattacattacaataaataggaacttatccaacatatgaagagataatccatcactaaagcaacaacgttaggtcaagcaaacccccaaacagaagttagttaatgacccccgccccaagtgacacggggtggtgctatgtcacaaagggggtatggctagtaatttaacagcacgtaccatctactaccttaccatagaccggtaaaaacgcagagtagcaaaggttttaggcgcgcaataatggacggcttaaagtccttgtggtgttagcccactt

SEQ ID NO: 140209 - DNA, 464 bp, Glycine max
  Clone ID: PAT_MRT3847_97617C.1
ggccctaattcaggacattaaaccatagctagcgtctccttgcgaaaaatgaccataagcttacagtttaagggctttgtgaggatatgatctatggcacttgtgtcacagcttccaagtcactgattttcagagcgttagtgttgcagaagccattaaattttcaagtaaaattctcctccaagtgttttcctacgaagataagaatggaaagtaatcttaatcatagcatagagggcaacaataaagcgtctaggggtgccttggttgtcctagaaggcttggatcgttctgggaagtcttctcagtgtagcaggctagtgtccttcttggagggacaagggatctctgctgaattatggagatttcccgacagaactacaaatgttgggcaaatgatatctgcctatctaactaacacatctcagttggatgatcatactattcatctcctcttcagcgct

SEQ ID NO: 140210 - DNA, 285 bp, Glycine max
  Clone ID: PAT_MRT3847_97618C.1
cccacgcgtcccgatcgctctctctctaggatctgctgccttttcttctctttctcaattctcattcatagaggcgaattcatttcttcgatctggaccctctatttcttcctcatcacatcacgcgacaacatgttgctctttgactggttctatggcaatctcgctttcctcgatctcatgtcacatagaagcctaaattcttttcctaggtctcgatcttaacggccaaaccacccctctttacatgctcaatgactagagatttgatcatcaccatccgac

SEQ ID NO: 140211 - DNA, 601 bp, Glycine max
  unsure (1)..(601): unsure at all n locations
  Clone ID: PAT_MRT3847_97619C.1
gttagatgttaatgttcttttgctctacatggcagctttcaacattgaaaagtttcattatataattgtaaacctattctttgtgcaaaccttgttttctgtataggggttctgattcgtggggagaatctgatggcgcctccatacaaatgagattgtcttacagcccagctgctcaatttttcctttttctggaacagtggactgattgacaccttgctggagttttgggattgctgagaatcctcatatataaggtatatgaagatgggaagacaaccatgttcatttatgaaaagaaagccagtttgaaggaatactatggtgtgatctttccctctacactacaactccacagatgaatcagtgatgtataagaaagaaaacagaaagattctatgtgctacaaagtacacgctcagagatataatgagaagaggaaaatcatttgtaattgctctagagagagaagaacaatgacgtactcgcatggagatgaacaacanggttgtgctgctcaattgcaaccactacgtatgtatgaaatgctacagaaactggcatgcacgatcttaatcttgccctttctgacgggacactc

SEQ ID NO: 140212 - DNA, 350 bp, Glycine max
  Clone ID: PAT_MRT3847_9761C.1
tttcggtccaaaaggcgaaaaagaaatacaaattaaaatgtagctacatatatggatgtaagcataatttacgagtgatctctacccactgttacaataataatcaatatttttacttcggccacatatatgtaactttaatacatacgagcgggcttcagctgctgatcttttaattaattaaacagtactttatcttttaggggaaccataatattaatattatacattagttacagggggggttatttcacaatgcgcctacctaatattatttttaaattgaccaattacacacatctaaattaatttgagaggatgcatacacatggagggggggcatacatctt

SEQ ID NO: 140213 - DNA, 450 bp, Glycine max
  Clone ID: PAT_MRT3847_97620C.1
gcgtgcgggaggacgacgacgggagagggcgaaatgactggcacatactccactggggtggggactttagtcacaccaagatcaactttacaggtgagaggattatccttgattactaagagcaccatgccaacctatatgagcaaaaacaccaaggggtggagagactcacactgtgataacaaattcttgctccaagggaaggcatatttattcaggacttatcgcttgcaaagattgcaaaggctcaaacttcacctatggtgaatacaccactcttgttgcactgcaatgcaacctcagttgctattagtttggaaccgtattatcaccaccatttgctcaagtgcttgctgtttagatccaaagcaaacgataagcagcacctggtgggaggtgtacgcgcctctgtagctgcaacaacgccaacaaccaatgatgcagaaagat

SEQ ID NO: 140214 - DNA, 652 bp, Glycine max
  unsure (1)..(652): unsure at all n locations
  Clone ID: PAT_MRT3847_97621C.1
aaattatcaaaacattatgggaactaggcactcaagcttgcacttccatacgatatcagagtatcttatatctttaacataaaaattcaggcttcgataagacacttgcaaaatgtgacagccggaaactaaatgtgtatagaagtacagaacaagaaatccacttttagcatgacaggcacaatagcaacctagtacgaaaattgggattgcatagaaatcatcgatgcatgaagtggcctgtcacattcctggagataatgctttttcccaacaataataagtcactgctcaaccgatcggctttcattatgaattattaatgataattcagtggatttaaagtagctgtccctggtgtggcattccacttctcatcattgcacagaactcctcatagtttattctcccatcattatctgtatccacctcagagattatttcctttattgttgcttcatcacccattccatgttgggtcatagcagtctccaattcatctctagtaatatacccactgttatccttatcaaaatactggaatgctttgtaaagatgttcatcacgttcaagtctgtgcctatgcattgtngcagaaatgatttcaagatagtcaattgacccatttccatcaacatcagcagcatccatg

SEQ ID NO: 140215 - DNA, 564 bp, Glycine max
  Clone ID: PAT_MRT3847_97622C.1
ggaattcggcacgagggtgaacagagtacaagaatttaagcagcaacatcatcatgatgcggagactgaaggaagtaacttcttatctttagagaaagacaaagagaatataaagtcagctgaagctcccagccccatcttaaagatattgaaaagcgaatttgaatgtcttcctgcctacatgaagggactaacatcatgggaggatctagtcgtggctgttgataagattaattcaagcctaagcaagaagaccaatggatgcagctacttccaccaagatgaaattccttcatttgaattaggtcctaaaacaagatcatatttgctgcttctagtgcgcatgaaccgattggttgttgagacgattgatggtttactatcgtacagagtattgtagatacgaggtccaatggagaactatatttttcatctcctagttcaccttttcgttggcattcatattccaagaagcacggacccggaacacgaacacagcacataactaagcataatagtgccattgtttgaaagtgttggacatctggtgtttttaaaattctc

SEQ ID NO: 140216 - DNA, 740 bp, Glycine max
  Clone ID: PAT_MRT3847_97623C.1
cggctcgaggaaatattcagcgtattttacagtgagtgttgttggacttggacagtagctgctgctttttcccttgtctccagctacctccgttcctcgatctcattcaccagacagaacagaatgggttgtcaaggtagcaaggagaaaaaatcaaagacagaatttactacttcctatggatcagcagccactggtagtggtggtggtactagttacaacactgttcagcctccgccgccgccaccaccacctactactactgctactactactaatcaggttcaaacatcagcagcacccaaaccacaatcaaaagcttctcctacagtgcagcagaaagcagacacgaggattctggggaaaccctttgacgacataaaaaaatactacagtttagggaaggaattgggaagggggcaattcgggataacgtatctgtgcacggataatgcgagcggtgggacgtacgcgtgcaagtcgatactgaagaggaagctggtgtcgaaggcggacagggaggacatgaagagggagattcagatcatgcagcatttgtcggggcaacccaacattgtcgagtttaagggcgcctacgaggacaggttttccgtccaccttgtcatggaactctgcgccggcggggagctcttcgatcgtatcatcgcccagggtcattactccgagagagccgcttcctctctctgccgctccattgtcaatgttgtccacatttgcca

SEQ ID NO: 140217 - DNA, 4073 bp, Glycine max
  Clone ID: PAT_MRT3847_97624C.1
ccttattggattctcaaatattcaggcagtgtcataatcggttggacttggacactagctgcttcttcagctagctccgttcctcctccatctcattctcattctcccaaatcttcattcacaagacaaaatgggttgtcatggtagcaaggagaaaaaaatcaaacacttcctatggatcagcagccactggtagtggtagtggtagtggcagtggtggtggttacaacactgttcagccatcaccacctactaccgatcaggttcaagcatcagcacagactccagaaaaccgaaaagcttctcctacagtgcagaagaaagcagacacaagcatcgtggggaaaccctttgacgacataaagaaatactacagtatagggaaggaattgggaaggggccaattcgggataacgtatctgtgcacggagaattcgagcggggggacgtacgcgtgcaagtcgatactgaagaggaagctggtctcgaaggcggacagggaggacatgaagagggagattcagatcatgcagcatttgtcggggcaacccaacattgtcgagttcaagggcgccttcgaggaccgcttctccgttcacctcgtcatggaactctgctccggcggggagctcttcgatcgtatcatcgcccagggtcactactccgagagagccgctgcctctctctgccgctccatcgtcaacgttgtccacatttgccacttcatgggcgtcatgcaccgcgatctcaagcccgagaatttcttgctctctaccaaggacgaccacgccaccctcaaggctactgattttggtctctctgtcttcattgaacaagggaaggtttaccatgatatggttggcagtgcttactatgttgctcctgaggtattgcgtcgtagttatggaaaggaaatagatatttggagtgcaggcatcatattgtatattcttctgagtggtgtaccacctttttgggctgaaactgaaaagggaatatttaatgccatattggaaggtgaaattgattttgtaagtgaaccatggccatccatatcagacagtgctaaagacctagtcaggaagatgctgacacaggatccaaacaagcggattacttcttctcaagtccttgaacacccatggatgagagaaggtggagatgcatctgataaaccaatcgatagtgcagttctatccagaatgaaacaattcagggcaatgaataagctcaagaagctagcattgaaggttatcgctgaaaatctatcagaagaggagattaaaggtctcaaagcaatgtttgccaacatggacactgacaatagtggcactatcacctatgaagaattaaagactggcttggctcgaatcggatcaaaactgtctgaggctgaagtgaagcaactcatggatgcggctgatgttgacggaaatgggtcgattgactatcttgaattcatttctgctacaatgcgtccgcacagacttgaacgtgatgaacatctttacaaagcattccagtattttgataaggataacagtgggtatattacaagagatgaattggagattgctatgactcaaaatggaatgggtgatgaagcaacaataaaggaaataatctctgaggtgagattgtatgactaatggaatgggtgatgaagcaccaataagaataaggtggatgcagataatgatgggagaataaactatgaggaattctgtgcaatgatgagaagtggaatgccacaccagggacagcttctttaagttcactgaattatctttaataattcataatgaaagccgatcggttgagtagtgacttataaaaagcattatctatctccaggaatgggtgacaggccccttcatgcattggtgatttctttgcaatcctcccaattttgcttgagtaaaaatggaaatttctcaaagggtcaggtttttgtatgagcgctttctttttattaaaggcggctattttaatgcatggcttttgttacttcatgccctgtgacaaatggagggtccttagttctgtttctctttcttctctctgttctctcaaccaagttctcaattcactctttcttcacccttcttgatctgctaattctcaaggtattcaaaattgggaggttttcgattgaagtgtgatgtccaagccactgctaggcataggggaggaggaaggtcaaagcaatgtcactttgttggtttcttcctcagtcatcatggaaagtgtgtgcctgaatagctcaaaattgaaagagcgcaactacatggggttatctgattgttcatctgtggacagctccgcgccgtccttctcagatgagactaagaagcaatctgaaccttaaggctactgagctcagactggggcttccgggatcgcagtctcccgaacgagattcagatctttgcttgagaagttcaattcagtttgatgaaaaaccactgtttcctttgcatcctgctactgatgatcaccattcctcatcaaagcctgctgttttgggtaacaaaagagggttctcagatgtcatgagtggattcgccgaggagaaattgcttgttagttctgaggtcaacacaatattgtcaccaaggccttcttctaatgtggggttgaaaccaagctctatgcttgagaatgttggggctcagcaacccaaagccaaagaactcgcaacagcgaaggttggtcttgagaggtctcatgttttcaatgatagcagaacaaatctgaatgattctgctaataacaatagcagtgcaccagctaccaaggcacaggttgttggttggcctcctataagatcatttaggaagaattcattggccactacttcaaagaatgttgaagaagttgatggaaaagtggggtctggtgcactgtttgtaaaggtcagtatggatggtgctccttatttaagaaaagtagacttgaagaattactctgcgtatgccgaactatcttctgcgctggagaagatgttcagctgttttaccataggttcttgtggatctcatggaaatctgggaggggaggtgctgaatgaaaccaagctgaaggatctagcttcatggatcagaatatgttcttacgtacgaggataaagatggcgactggatgctagtgggtgatgttccctgggagatgtttattgagacatgcaagaggctaaggatcatgaagagctccgaagccattggtctagcaccaagagctgttgaaaaaagtaagagaaggaactaggcagtatcaagcatctcatcacactctatccatctaactgcttatggggttaaaaagctttcttggctatgtgagggagcaacacaaggccataatggcttggaaacacaactctaggcatgttggactggatagaatttcgtactaaagctgccttgttgatcatgatattatttactatcagtgtgttctgttgtcatgatgttttatattcagtaagcttttttcatgattgtcacaacttataaaaccccaaaaaacctgtctgtgggaggttcttatattttatgtgctgtcatgttcatgttgtggtgaaggatttgtagtttgtaaattggatcatctcttctatgtttgcaacttggtgtgataaaaaacaacaagttattatatatgtaatgcaccttcaactgtttctcttttgttcaatttagtagtgacttaaaaaatgcattatatatctccaggaatgggtgacagaccacttcatgcattggttgtttccccaattttcttacaaggttgctattgtgcctgtcatgctaaaagtggatttcttgttctgtacttctgtatacatttagtttccggctgtcacattttgcaagtgtcttatcgaagcctgaatttttatgttaaagatataagatactctgatatcgtatggagttgtcatctttattatggctgagttacctgagtaaatgagtaatcagggaagggaactatttcccttaacccgtatatggaaagcctagctcgcgtgccgtgttcacattctgcaagcttgagtgcctagttcccat

SEQ ID NO: 140218 - DNA, 1000 bp, Glycine max
  Clone ID: PAT_MRT3847_97625C.1
ggagatgcatctgataaaccaatcgatagtgcagttctatccagaatgaaacaattcagggcaatgaataagctcaagaagctagcattgaaggttatcgctgaaaatctatcagaagaggagattaaaggtctcaaagcaatgtttgccaacatggacactgacaatagtggcactatcacctatgaagaattaaagactggcttggctcgaatcggatcaaaactgtctgaggctgaagtgaagcaactcatggatgctgctgatgttgacggaaatgggtcgattgactatcttgaattcatttcggctacaatgcataggcacagacttgaacgtgatgaacatctttacaaagcattccagtattttgataaggataacagtgggtatattacaagagatgaattggagattgctatgactcaaaatggaatgggtgatgaagcaacaataaaggaaataatctctgaggtggatgcagataatgatgggagaataaactatgaggaattctgtgcaatgatgagaagtggaatgccacaccagggacagcttctttaagttcactgaattatctttaataattcataatgaaagccgatcggttgagtagtgacttataaaaagcattatctatctccaggaatgggtgacaggccacttcatgcattggtgatttctttgcaatcctcccaattttcgtacaaggtcgctgttgtgcctgttgtgctaaaagtggatttcttgttctgtacttttgtatacttttagttttcggctgtcacattttgctagtgtcttttcgaagcctgaattttatattaaggtactttgatatcgtatagagttgtcatttttattatgcctgagtaatgagtaatcagggaagggaactattttccttaagctgtatatggaaatgcaagcttgagtgcctagttcacataatgttttgataatctaatcttttgtgcaaatgcgatattttcttttttcc

SEQ ID NO: 140219 - DNA, 649 bp, Glycine max
  Clone ID: PAT_MRT3847_97626C.1
ggctcgagttgtgtttcagtattggttgtttttttttcttttatgtcagtttgaactttgaaggttccgtgacagatgttgttacttgttattgtttgataaggtattcaaaattgggtggttttcgattgaactgtgatgtccaagccactgctaggcatagcggaagaggaaggtcaaagcaatgtcactttgttggtttcttcctcagccaccatggaaagtgtgtgcctgaatagctcaaaactgaaagagcgcaactacatggggttatctgattgttcatctgtggacagctccgcgccgtccttctcagatgagactaagagcaatctgaacctcaaggctactgagctcagactggggcttccggggtcgcaatctcccgaacgagattcagatctttgcttgagaagttcgattcagtttgatgaaaagccactgtttcctttgcatcctgcaactgatgaacaccattcctcatcaaagcctgctgttttgggaaacaaaagagggttctcagatgtcatgagtggattcgccgaggagaaattgcttgttagttccgaggtcaacacaatattgccaccaaggccttcttctaatgtggggttgaaaccaagctctatgcttgaaaacgtcggggctc

SEQ ID NO: 140220 - DNA, 274 bp, Glycine max
  Clone ID: PAT_MRT3847_97627C.1
ggaaacaaccattgggtaatcctcacttggtgatactactaatcctgagaatgatacctccaacttcgcaataaccaccaaacttccctataaattaactttctctctttctttctttcttccctccctctcttctattctcttcttggctttacatcacaccctcttttccccttttgccaaagcttgatctttttcctcttccatccccgtttctccacttttcttgatcaaggtgccctcgtttcttcagttctgaatcatttttttgtct

SEQ ID NO: 140221 - DNA, 1539 bp, Glycine max
  Clone ID: PAT_MRT3847_97628C.1
gctagttattgaggatggtgaagtagttcatctcaaggatggtggggtttctattttgaaatatgagaatgacatgggagaacatggcgcttctctttccagagctttctcagtgcgacgtgcattatctgttctagagatggaggttgagcaaataaataaaggtaattatgagcattatatgcaaaaggaacagaaggggcagccagagtctctaacaaccacaatgaggggggggcttatacatcgaggatctaacaaatccaagtctgttctgttgggtgggctgaaggatcacctcaaaacaattaggcgaagtagaaggatacttttcattggttgtggtacaagttataatgctgctttggcagctagacccatcttggaagaactttctggtgttcctgttactatggaaattgctagtgatctattggatcgggagggaccaatataccgggaggatactgccgtttttgttagtcaatctggtgaaactgcagacactttacttgcactgcaatatgctttagacaatggtgcattgtgtgttgggataacaaacactgttggtagtgcaatagcaaggaatacacattgtggtgttcatataaatgctggtgctgagattggtgtggcaagtaccaaggcatatacaagtcaaatagtagtgatggtcatgttagctcttgcaataggaggcgatacaatttcaaatcaagccagaagagaagctatcatagatggtctttttgatctgccaaataaagtcagagaggtgctgaagcttgatctggagatgaaggatctagcaaagcagttgattgctgagcagtctcttcttgtctttgggagaggatacaactatgcaactgctctcgagggagctttgaaagtaaaggaagtggctctaatgcatagtgaagggatacttgctggtgagatgaagcatggtcctttggcattagtggatgaaaatctcccaattgctgttgtagctacccgtgatgcctgcttcagcaaacagcagtctgttattcagcaacttaatgcccgcagaggtcgtctgatagttatgtgttcaaaaggggatgcttcctctgtatgccctaatgaatcttgtagggtaattgaagtcccacaagttgaggactgtcttcaacctgtaattaatgtagttccattacagttattggcatatcatctcactgttctcaggggacataacgtggaccagcctcgtaatcttgccaagagtgtcacaacgcaatagagaagtttttggcatattaacgcattgtaaatgagtagatgcaggctcaatggttgatctaaaagacaccttctcaccaagcagattattgtttaatatgattatacatctttgatgtatttaatttgcttgaaactcaccagggagaatactgtttaatatgattgttacatctttaatgtatttaatttgctgaatctcttatcttggttgcttgagctcagtggcaatttcttaaccacaaaaggaatgggtattgttttcct

SEQ ID NO: 140222 - DNA, 675 bp, Glycine max
  Clone ID: PAT_MRT3847_97629C.1
ggtgacaaatggagggtccttggttctgtttctctttcttctctctgttctctcaaccaagttctcaattcaatcttcttcacccttttgatctgctaattctcaaggcacagaaacgattctatgacagatgttgttacttgttattgtttgataaggtattcaaaattgggaggttttcgtttgaattgtgatgtccaagccactgctaggcataggggaggaggaaggtcaaagcaatgtcactttgttggtttcttcctcagtcatcatggaaagtgtgtgcctgaatagctcaaaattgaaagagcgcaactacatggggttatctgattgttcatctgtggacagctccgcgccgtccttctcagatgagactaaaagcaatctgaaccttaaggctactgagctgagactggggcttccgggattgcagtctcccgaacgagattcagatctttgcttgagaagttcaattcagtttgatgaaaaaccactgtttcctttgcatcctgctactgatgatcaccattcctcatcaaagcctgctgttttgggtaacaaaagagggttctcagatgtcatgagtggattcgccgaggagaaattgcttggtaggtctgaggtcaacacaatattgtcaccaaggcctttcttctaatgtggcattgaaac

SEQ ID NO: 140223 - DNA, 616 bp, Glycine max
  Clone ID: PAT_MRT3847_9762C.1
tggcctcaatttccaccttttctacagtgagtctcaagacaagaaaacaaggagaactcatattctcagctggattcttctcattcaagcctatagaaaagcccaacttttgtaacaaaaaacaagatgaattttttccaaatacatacccatcaaaacctaccccagagaagactaaagtgttcaaaaccaatccaacaaccaaaatttcagacaaatctcaatcagataataaatttttagctgaagatttcttttttcctccaaacccatttttcccaccaccattggtccctaacccatttcagcctcctcccctcattccaaacccttttcagccacctcctcttattcctaacccatttcaaccaccaagcccaccactcattccaaacccattccagccaccaagcccaccaccactcatccctaacccattccagccccctccaagcccaccaactctcttccctaacccattccagccccctccaagcccaccaccctctttgtttcctccttttccaccattagtaataccaggtttgactccatcaccaccaccacctccaccaacaaaaccaattttccctcctttccctccactattcccacc

SEQ ID NO: 140224 - DNA, 723 bp, Glycine max
  Clone ID: PAT_MRT3847_97630C.1
gaaagaaagaaattaatcttaaattatatggagaaaaaaatattgcatacacaaatgtaaaaaggcttcattacatccatctgaaccatgactaatagctcaaaacctataatgaatacaacataaccctcactctagaatgatatacacaaaaaaaataaaatatagcactcaatcagcgcattgatttaggatatacattgtctcatggtacagcaccgaacaatggacggatgatggaccgaacaaagaatcaattgtgaaaaaaattaatatagaaaacaatatgctacaatcccaacatcttcgtcaaccgatctgaaagattagctattacaaagcctgcaaatacctgaactgagccaagaatgtatactgccgaataatgccgaccatgaattaccatgtcagccaccatagcaagaggaatggtgagtgacatgcccaaagtggccacaagaggagtagtccatacaacgcaaagtgcccagaagtagtctgaaagtacgcttccaataaatccatttgcaagaaccacttcgtccactttagcagagtggggaatggtaaatttgggttcaattcctaaggccatcaatggccagatgagccaccacaatgctacaagtgtaaacaatccaatatacccaaacagcttttgcacatcaaccctttctccttcatcaccagaaaacttcttaagaagaactgtaaataaacaga

SEQ ID NO: 140225 - DNA, 2221 bp, Glycine max
  Clone ID: PAT_MRT3847_97631C.1
cttttacgttttcttaacatttttcgggaatgcgagctgaaatgtcaatcatcatgacatgagattggtcctctctatattgatcgcacaatgtatcacaggaaatataggaagagacgtagtggggtccagcacccatgtgccctcctcctgtctccaccagctgctgccgctcaatgattagagccctgttccccttcaagttcaagttcaattcccacaccaaggaaactctctcatctctcaaacccaacaaaaaaaaaccattactttacttcactttacatgtcgaactccgacgccaccactaacggcgtcagtaacggcgccatcattgatgcgcagagacagcaggccttagccgttaagaagccgccgtctaaggaccgtcacagcaaggtggacggccgagggcgccgcataaggatgccaatcatatgcgccgcacgtgtgttccagctcacgcgcgagcttggccacaagtccgacggtcaaaccatcgagtggctcctccgccaggccgagccctccatcatcgccgccaccggctccggaaccacccccgccagcttctcctccgtctccctctccgtccgcgccgccgccaactccctctcctccccttcctccacctccgaccacaagccccagttactctctcccactcccttcatcctcggcaagcgcatacgcaccgacgaagactcttccaaagacgaagctgtctccgtggggccctctcttgtgggcccttctactcctcccggactgtgggccctcccggcccggcccgatttcggacaaatttggagcttcgccgccgccgctgctcccgaaatggtgtcggtgtcgcagcagcagcaggcttcattgttcgctcatcaccaccgtcagcagcagcagcaagccatcggagaagcttcggcggcgagggtgggaaattaccttcctggacatctgaatttgctcgcctcattgtctggtggacctgggaattctggtcggagagacgatgagcctcgttgattgtcacatcttcaacggtggtggtgatggtggtggtcggtggtgttggtgtttttttccgtatatatgcatattctcgtgttgtggttgctgtttttgttgtgtgtggcaagcaggagattcttagggttaggttttttcttagatttgagtggagaagtccatcgattaagaaattattcaattagggtttttgttttacttcctgctggtttggagaacttaactaggtttttagatgttggttaattgctttagattccggggctttgttggaggagaggaggggaaaaaaaaggggagaatgtaatgaactgatgatttaatttgtgaaattgtcatggtgagaaatttgtaccgattgaggctggaattgggtttcagaagcttggtccgtgtgcgagtgcagttgaatttgtaatgtaatgttgttgtactcaaagagagttcttctaagttgaagagcatggattggattgcattgttgcttctgtttcactttcatagtgggttattttgggctttgacttactgggtctacaagtatggtgtggttgaagtggttgcagttgaggtaattagtgcttgcaagcttgtttctgaagccagtgaattgtgtttccaaagttcaattgtcagtcccagaatgttggagtaccctactttccaacatgggttgagaattcatgtctcttggatgttgttggggcatgttttgagggattgaggttcatgtaaggtggttatgttgtgaatttggtgcagctctctgactctctcctccactttcacgctccttgatggtgttttattcgttttcagaggtgactggtgtgtgaaagatgaaaaaaaaaaagaagaaagctctggttgtactctgtatgacttctgctttgagatttttatcttcaattcttagccatttcttagattgatcagcgtgagaataatgttttcttgtatgtaagtggattgtttcgggtgccagaataaaaacccgtctgtttctttctttacctcttttcttcacttgtcactttctttgtttctatgtacacgggaacttgttttgctgcttgatgacgattcaattatttcagtgtgctttctgttcttaaattattgtagccaaattgacccttttcttttctgaatgtgttgtggcctagcaatataatattataggagtaaattc

SEQ ID NO: 140226 - DNA, 149 bp, Glycine max
  Clone ID: PAT_MRT3847_97632C.1
tggggagcatgactgataaagttggcaatccatttgtagatgtggggcaaaataagatatcgagtccagtcgaacatgccaatgatatgcgtcgatcaggtgtgtctatggtccagcaggtgttaacgtcatcaaatcaagcacaaggg

SEQ ID NO: 140227 - DNA, 473 bp, Glycine max
  Clone ID: PAT_MRT3847_97633C.1
acgaacaacagttacctaatgcattgtaataggagaaataacaaagtcatttacaacatgcacaacgctattgaagtatgaaatatatagtgcttatcttgaatttaaattatgtctacttacatcacgtctaaaacactattgaagtaaaaagaaacactttgaaacacaattttttagaagtgtagaagacatctcagtgactttccgacggtaaaatgatcaaaggccttgtttatctcctcgatttgaaactcgatcgtgagtgattaaatcatctaacttcaccacctaagttcaagccaccaaaaataggcattaattaataacactacaataggtacagaaagacccacggtacctaaaccaaagacagctacagttgaaccaaaatgctcatcagcgatattccaagcagccccaacacccgttgatacgccacaactaaggtaagttttttaatgtagggattg

SEQ ID NO: 140228 - DNA, 441 bp, Glycine max
  unsure (1)..(441): unsure at all n locations
  Clone ID: PAT_MRT3847_97634C.1
catggttgtacttaaactagaattaacttgaatattaatgcaagaacagttaaggttttcatcactttttctacctatactaatatcatggagaggaaatttctttttgcaaataaaaaattcattataagacgagttttggatggatttataatctgaaaaggtggtagttatttttgtgagaggnttaaattgctgatggcttgtgagtcatgatatttctcttttttgtagactaagtttttattatagtggggatggtttgacaggaaattctattattgtttgaaaaaggggccaaaggggggccccaaaaactctttttttgaaaaaaggggaaaaggtccccgataaaccacttttccgcccaaaaaaaaccccaacacaaggcggcgggggaggctccnnncccnnnnnnnnnnccncccccccccccccccc

SEQ ID NO: 140229 - DNA, 693 bp, Glycine max
  Clone ID: PAT_MRT3847_97635C.1
ctcgattgttattatctttcattgacgttacaagcctcctgtgtttcattcaccgccgcattttgttcttgttgttgctctttcaacaggaaactcctccttcaacagattatgagtgcggttcattactcttgaagcaaggtttggtgggggtaaaaaaggaatgagttttgttaattcaaatcacacccgtggtttcacattattcttaatcgggaaactgaattaagggtatttttgcataggggaataagatcatgcctggcattctctcaaggctgaatgcaaccatttactgtcgcattcgggaagcaataacaaggcaacaaggagtgccgacatccttgtacagaagttcagctttgcctctttgttcgctcacttcaagtcacacacttcacacaaaatcaatgattactgcctcacattccaatgctatgctgggagatgtttatgcttatggcttaatctcaggtcgtggtagtgtgcgagacttcacaaagcctgctgtaggttgcttgaggggtagtgtgaatctaaggagactacaaccattgtatggtcctttgagttttgggtgttctacttttgatgctaataggaggatccgggattcgagtttgctgcatggatcatggctcaagaatttctcagcctcttcttctgcttgctactcaaccgggggctgcacat

SEQ ID NO: 140230 - DNA, 601 bp, Glycine max
  Clone ID: PAT_MRT3847_97636C.1
caaagatcctacggcataatcaaaaccacgtctacatttacattccaaaagtggttctactttcccatccaaacaaaatcagttctcctaaactaacttttaaaacagcattcccagaatgccaagcatcattcccaaacacaaataacttttttaaccccaattcctccaaaaaccaatcctttaaaaagaaaaaacagtcctcctaagatccaaaatcaaaagaaatctaaaacaccaacaacccttaatatcatcaggggactaaatccacgacaaaaatatttcaaaaaaccaatgacataaaatgctcatttcttcatagcacaaaaatgagcctatgcttttcaaatatctaaggttttaaactctcctgtctttaaagatcaggattgcagccacaatttcttaaattctccggtctttggaggcaacaaattgcagccacaacatcaggatttttgaagtctccacaacatcaaggttttgaagtctatgaaaccacatcgccacggcaattgcggccacaaattttcacaatgtcaagattttcagagactccgcgacagcgactgcaatttaaaaccttcggacgcgtggg

SEQ ID NO: 140231 - DNA, 795 bp, Glycine max
  Clone ID: PAT_MRT3847_97637C.1
aaaaaaattcattctttctccgttcccctcttacccacttcaatttttagcttccaattatcgttttgatccttctgattacttcttactttgataatcgaaagtgggtctcttccttttctccaattttgggtcgattctctgttttttttattgaaattctgttgtttgcacacacacactttgggtgtgatttatgtcttttttatgttctaaaattatgatcacgatttttcatcttatagtaatgatgttcatgttgttggttgagtcatttgcatagcttgatagtaaagaaaataattttttttcttttttggtcctaaatttgaagttgagatggtgcaagggaagttgtcggcgagtggcaaaagactaaaaactgaaaagttttgccatttgaataatcaaattttggcatattcttatttgaattttatattagttattttatgttacactcgtgaactttgtgttgatcttacgttatggttctgattttgctgttctgaaatgtgtacatgttgcattggactttggagcatgagcattagctgcattgaccagatattcatgtgcactaagtcaagacaaatgatcaatcattattttaaaatataaaatatttatgtggctccaaaatttttgttgtcatttaatagttaatactataggataataggaattggtctaaattatacacacacacgccataatttcttggctagctgattaaagcttatttggtttaattgctcaaataatggcatgacctgaatgataacttcagcgaac

SEQ ID NO: 140232 - DNA, 508 bp, Glycine max
  Clone ID: PAT_MRT3847_97638C.1
agaactgatcttgcggcctacgcaggtggtcatttggtttcctaaccgccgggcgctctggttgaccaaccgcatggcacacgactataattccctgctgactaattactatgatctcctggctacctatgacaaccttctcagggataacgatgacctccttgctgaggtggcagagctcactgacactgtgcttgcaagactgactgatgagattctcttggaacaggctgatgccaacggattgcaagagcctctgcccaactgtttggttgattcactttctgagggtgaagggtccacagcgacctttgaggcttgttaccaggaggactttagtgctggcaagagtgacgtctttgattcatccgagagcccactatactctgatggagatcactctgcacttcttgatactggtgattctgcttatgtgttcactcctgatccatctgatgtgtctcaagatgatcaatataacttgtgtcagacccttctgcctcactac

SEQ ID NO: 140233 - DNA, 226 bp, Glycine max
  Clone ID: PAT_MRT3847_97639C.1
gtattttggaaggatgtcttacgttgctcataacgttaacacccccaaaaaaaaaattgtggaaggaaaattttcttgatattaaactcctctaaatggaaaaagttcctttcaaaaccaattgtaggggaaaactcaaatgaatatggctgtccatcttaaaatttctgaaggaacagaaacccaagatgaccgatgaacaaatatctaatacaagagtagctca

SEQ ID NO: 140234 - DNA, 506 bp, Glycine max
  Clone ID: PAT_MRT3847_9763C.1
cgtgaacgacatgaggtacaggtgagactccaagagtgtgaaagtcttgacgagcatgtggttagtaacatgtatcccagaaggaatacgtgaggcctctagaggagctcacgagcatagggaacgtgttagaggtggaatagaaggaagggctactggttccgactattgacttgagagagatagatccggaggacgaggatattcgatgaaaatgacgtcagacactgaagacagcagctgaggactggggtgtgatgctctttgagaaccctgtcatcctctatgagctgatatagcggctgacgaaagatcggcaaacgctctttggtctagcgcatgatgaaaaagacaagtcagtattgatgcgaagtgtcagctacactcaaggctttggaagcaggctggccaacaatgcctgcgcccaactagagaggaaagattacttcatacaccttgccttacctgaggacaagcgtgacctctccatatggccatagaaaccc

SEQ ID NO: 140235 - DNA, 858 bp, Glycine max
  unsure (1)..(858): unsure at all n locations
  Clone ID: PAT_MRT3847_97640C.1
gggcggaggctcttctgggccgggctcgtgtgaatctgggtcgctaaaagagtgaaaaggggttggggggttgccgacagaagggaggattgtcatggaggtgtgtctgacaagtttgatggtactgtgaatcaggccttgaatgttatgggctctgaaaccgtggctagtgctggtgaatctaatgatatggaaattgatggatctcttgagcataaagcaactgtcaatgaaggaagttcaccaagcactagtgttcctgtgttggaggagcccctgaattttgatgcctttaattcagctgccgaacttgaggttcttggcttggaaaggttgaagtctgaactgcagtcacgtgggttaaaatgtggaggtactttgatggagcgtgctgccaggctttttctcttaaaatcaactcccctggatgaacttccaaagaagctgattgcgaagaagtaaggagatttttgagaaggcagttatttctctgtacagtatttcttaactgtttgcaccttgtacttgggtgtcagttgtatcctctgatgacttgtggaactctgactgatgcatgccttttctgttcgttttagtgttcatattgggctgtattttgatgtaataaataccgttaccagccagccaaaggaagctgaacactgtataacccaagaattgtgcattatgaacaattccaaattttctttttggtattgtattatgagataaataaatgtatttacaagccagccaaaggaagctgaacactgtataacccaagaattgtgcattatgaacaattccaaattttctttttggtattatattatgagatgacgagtatcatcnnnnaaa

SEQ ID NO: 140236 - DNA, 278 bp, Glycine max
  unsure (1)..(278): unsure at all n locations
  Clone ID: PAT_MRT3847_97641C.1
acgagcttatctaaacaaaatcagattcctgaacacaccttccaacacaccgaatcgggaatatggataccagcagcctatacctattatggaacatcattctcaaacatcatccatttattcatcatccctgcatatcatctatacaacaactatatataaaccttcactttaagatactgcacttaataatccatcgtataacttatttttatatcnagaatactgattagttacttatactcactgacgttcaatacataatatatatgcattac

SEQ ID NO: 140237 - DNA, 357 bp, Glycine max
  Clone ID: PAT_MRT3847_97642C.1
cggccggcgccccctttttggcttcgaggtttttcttacccttaaccttaggcgttgcggcttcatcaaccatgttgcacaacatagcataaaatgactcaagctttgtgcgcttgacaccgtttgagcttgccagtttcagcatagggttgaggttgccacctgtcacatatgatgtgcggttaatgaggggttcacattggaacttgggttttggatctgacggtcggggagcacgccgctgggggactggcccgtcgtgaaccgaacaatggagggcaggtggatttcgcgggcctgaattgggaccgacccttatagggccggaaagataacctgggcttcgtggactgggct

SEQ ID NO: 140238 - DNA, 429 bp, Glycine max
  Clone ID: PAT_MRT3847_97643C.1
ccaattttcaccccccaactttgaggatgctagtccacaaaatggtcaaacaaatcctagtggcttaaatacttcaaggggtacaaaacggaagagaaatgtggttgagttagttgaagatcaatatgagcgaatgaatgaaagtatcatgacaattgctgaagctttgaaagagggaaattctgtttctaaggagctgcaccaagttgcagagcgtcaagttgaagttgctaaaagacaagttgcagtcattgaaaaacaagttgaaattgctgaaaaacaacttactgtgatacaacaaactcgtcctcgtcattattcagaatctgatgtatgggatcttttagaggaattaagagtcacagatccatttcgcatgaaggtttataaccatttatgtgataatgagcacaaaaaacgtaagctttt

SEQ ID NO: 140239 - DNA, 261 bp, Glycine max
  Clone ID: PAT_MRT3847_97644C.1
gtttttactggattttgttaaataatatgtatggtttttattgacaatcccgtgcagggctctccagtttcaattcagtgtttttgaaattagataaatcctactgattatttattttgtatttatgttgttatttcacatgctgcagtcatggatgaattttgtctcatacataagttgtagctttgaagtggtgtagcttgattgttttgaattaactttgcattttgttactgaattactcagatgctcttttttatc

SEQ ID NO: 140240 - DNA, 232 bp, Glycine max
  Clone ID: PAT_MRT3847_97645C.1
ggctagagtttcccttttctgttgtctctttccatccgtaccctcggagcattttttttcattcggaccggcttgtccccttctggcagccgtacccttcctgacccttctggcagccgtacccttccgtacccttctggcagccgcacccttcctgacccttctggcagccgcacccttcctgacccttctggcagccgcacccttcctgacccttctggcagccggacgc

SEQ ID NO: 140241 - DNA, 308 bp, Glycine max
  Clone ID: PAT_MRT3847_97646C.1
aatcttttttggaaaaaagggggagggggcccccctgggataacccatctgggattcccaccttattccggaataccaaccacttataaccccccaaattatggaaattttcaagaacaacctagggggagaggtaaaacccattttaccccggtgttgttttggcacctcctttgaatatttttacaataaaaaaccccaaaggtgactggcggcctcataatattggttgggggccaaattggcttccatgaaccaaggctggaattcattgtccggtccagcccaaattccagcttaactacccc

SEQ ID NO: 140242 - DNA, 187 bp, Glycine max
  Clone ID: PAT_MRT3847_97647C.1
cgtgtgaatatgaaggcatggaggggggtattataagtctcaccgcggggatgcctttggtggagagtgggctaatggtcagagtcattggtttggaatccacaacttgcatggagggcacccgcatatgatggggagtctaagtggggagttaaacatggacttgcacaggaccaatagagggagt

SEQ ID NO: 140243 - DNA, 405 bp, Glycine max
  Clone ID: PAT_MRT3847_97648C.1
ctcgagccgattcggctcgagtgcctattgttttctgtatttagattttttcgtcaacttttccgattttttcctcacttgttgtgaataatctggcagaggcggcagcaaataagaatggcttcaaatcccaaacctttgacttttgaggaggtggctaatcacaacaacaaaaaggattgctggattattatcaatggaaaggtgtatgatatcacgccatttctggatgagcatcctggaggagatgaagttttggtaacgtcaacagggaaggatgccaccattgattttgaagatgtgggccacagtgattctgccatagaaatgatggaaaaatacttcgtcgggaaggttgacacttccactcttccagcgaaagttaaccataatctgccacaacct

SEQ ID NO: 140244 - DNA, 117 bp, Glycine max
  Clone ID: PAT_MRT3847_97649C.1
gcaggcaatgaaaatctcatcatatcataccagggaaaaccttcccacatttgactcctactttataacaaagccatcggacagccttgaaaaccagaaaaaatgggatttagtttc

SEQ ID NO: 140245 - DNA, 1925 bp, Glycine max
  Clone ID: PAT_MRT3847_9764C.1
tcgacgcgctgctccatccgtagcaaccagcccgactaccccgcccccctccggcgcctcctgccacatccccaagccccctgtgctcatcgtgccaaagatcgtcccccccgctcagcaatggaggcctcccactcaagatgaacaaggtgcagccaaggagcacaagaatagtgagtggaaggaaagagaggagggggtagagggagaagatgatgacgagaatgaagagggagacaaagagaaatgggaggacatcgacaataacgtcaaagaggtagtggcgcaacaagaggcttggagggtccaagatatggcaaggatcaatagaaaacacgaacttcttgtccaagaaagatcaactgccgcagccaaaaatgttgcagttattgcttttttgcaacagttatctggtcagcaccaaaattccacggtaacacaagcccagctcaatttccctcaacaaccacctccacaaaaagttacaatagtacaaccaccaccacaacaagctccacaaccacaagctccattggtgttgtcaaatagtgacaacatggagattcagaaaatgaataatggtcacagtgttgttactgctactgttactgctactgctactcctactcctactactactttcgttgctgctgctactgctattactactactccttcttcattgagttctttatcttcttctaggtggccaaagacagaagttcatgctttgataagactgaggacaagtcttgaaaccaagtaccaagaaaatggaccaaaggctccattgtgggaggatatatcagcaggaatgctgaggctcgggtacaacaggagtgccaagagatgcaaagagaaatgggagaacatcatcaagtacttcaagaaggtcaaggagagcaacaagcaaaggcgcgaggatagtaagacatgtccctattttaatgaacttgaagctttatacaaagaggggagcaagactcagaacccctttggcgcttcgttccacaacatgaagccacatgagatgatggaagatcgttaattaacactaagaaacaacagttcacatgggccagcaaagcagaagcatagctatagtgggtgtacatgtttttgcgctcataaatttatgtgtaaagtgtaaattgaagatgagagagagagagagagaaaaaaagaatacgaggtcccatagcagtttaatgaaatgaaataaaataaaaaagtcacatgcatgatgacacttaaactttcttcagtggacaccgttgaatgagacaagataaggaagtttctgattggatggagagttttaattttaattttaattttaattttaattttaatatatatttttttcttcttctgggggatggatttttaattattatgtaagttgattttaatttttccaaaattggggttaggagatgtcactgaaagggcatgatgatggcacaaacaccggcactataaaattcaattctttaataatgaatgacccatctaaaagcatggtggtgcagaagcagaagcagaagcagaagcacaaggtacctatctgacacactttctgatcatgggccagcttaaaagcagatcattggagctgtgggtcacattccggccgccatgaactgggatcagagatcgttaattaacactaagaaacaacagttcacatgggccagcaaagcagaagcatagctatagtgggtgtacatgtttttgcgctcataaatttatgtgtaaagtgtaaattgaagatgagagagagagagagaaaaaaaaagaatacgaggtcccatagcagtttaatgaaatgaaataaaataaaaaagtcacatgcatgatgcaactcttgtaattttcctttactttcattatatatcacggaaccactgtgtggtactgctttc

SEQ ID NO: 140246 - DNA, 876 bp, Glycine max
  Clone ID: PAT_MRT3847_97650C.1
ggctcgagaaaatgatggagtacgtaaagtatgagcaattaatgttcgagctatctagatcggatccgatgtgaaacaataatttgtgaggtagacagacagaggcggcagcaaataagaatggcttcaaatcccaaacctttgacttttgaggaggtggctaatcacaacaacaaaaaggattgctggattattatcaatggaaaggtgtatgatatcacgccatttctggatgagcatcctggaggagatgaagttttggtaacgtcaacagggaaggatgccaccattgattttgaagatgtgggccacagtgattctgccatagaaatgatggaaaaatacttcgtcgggaaggttgacacttccactcttccagcgaaagttaaccatagtctgccacaacctacacaagcaggtggcgctggcaatcaatcttctggatttgttgtaaagatcttgcaattcctgttgccattcttgatattgggccttgcctttgccctgcagtactatggcaaaaagaagcatgctagcacctcatgaaatatgaagttgagctagagccgaagtttcattaggtttgttaattcattgcctacttcaatgcagtattaaagtggtaatagactttagtcaatgttgtgtgtctgtcatttaaactcgttaccccacccttcaccatgcaggcccttgatgcactgtggtgtctttgctcagtcatgctagctgttcatttagacaaatgaatgattttttttttatttaatctctcatgtttgaatattttgaaatggattttattaaatcaattgattgatccctatgtttttgggtcaatgatcaaaaaaaaaaaaaaaaaaaaaaaaagggcgg

SEQ ID NO: 140247 - DNA, 1539 bp, Glycine max
  Clone ID: PAT_MRT3847_97651C.1
gctcggggtagacagacaggtagtgctttgaacaagaaaaaagttgcgctgtgttgcctattgttttctgtatttagattttttcgtcaacttttccgattttttcctcacttgttgtgaataatctggcacctaaattcggatccgatgtattaataatttgtgaggtagaaagacagaaaggggaacttcaagggcaaaaaaagttgtgctgtgccgcctcttccgtaggcagcagcaatggcctcaaatcccaaaactttgacctttgaggaggtagctaagcacaacaacaaaaaggattgctggattattatcaatggaaaggtgtatgatatcacaccatttttggatgagcatccaggaggtgatgaagttttgctgacgtcaacagggaaggatgccaccattgattttgaagatgtgggccacagtgattctgctatagaaatgatggaaaaatacttcattgggaaggttgacacttccactcttccacccaaagttagccatagtctgccacaacctacacaaacacatggcgctggcaatcaatcttctggatttgttgtaaagatcttgcaattcctgttgccattgttgatactgggcctcgcatttgccctgcagtattatggccaaaagaagcatgctagcacctcatgaaagaggaagttgagctagagccgaagtttcagtaggtttcttaattcattgcctacttcaatgcagtatcaaagtggtaatagactttagtcaatgttgtgtctctgtgtcattaaaattcgttaccccaccccacaccatgcaggcccttgatgctttgtggtgtctttgctcagtcatgctagctgttcatttagacaaatgatttttgatttaatctctcatgtttgaatattttgaaatggattttattaaatcaattgattgatccctatgtattaagcttatcaagtgaattgcttgatttgttgagattagtgatcaaaacaaaatgtagaacccaaaaattcatctctgcaatacaaatacaacgttggaacagaatacaaccagatttgaatttggaaaccggacccaataacctcaacaaaacaattatacctattatgaagaacagcacaattgcaacggaagttgttaggcctgatgttatcccttattaccctccttcaagttggagagtgaagattgagatttaagaactcccaacttcgccagcgggtcgtgaaactgtctagagcccaaagccttagtaaatacatcatctggttgctgcttgctaagaacataattagtagcaatgatgctggatagaagatgctcatggaaaatgggattcattgatatatgaagtgcttattgattataacaaaagagtgttgtagaagtcttacaagggacttgcagagaactcaataaaccatggacgtaaatgtctctctaaaatcttcttcaatctatgtgtatccctttgcaaccaagcatttttatatttatcaatctccccaatttgccttatattttatcttaaaa

SEQ ID NO: 140248 - DNA, 340 bp, Glycine max
  Clone ID: PAT_MRT3847_97652C.1
aacaacacaaaagggtgcaatttcaaaaaatatttcttaccctaaactcactgcggcatttgatatttggggaaatcgtatcttacaccttttggtaaccactttgactgacacaatagatattaacaaaaatactcatattataatcataagagaatgccatcaaccatgaaacttcgactttcatttatctgattctaggacaactgatctactttatatattatacttacttcattaccaactttttaccaaatctacaaaaaaaaatctactgaatggaaacaaatactaccttatattgtttcactacttcatgctaatctcatcatttattaca

SEQ ID NO: 140249 - DNA, 420 bp, Glycine max
  Clone ID: PAT_MRT3847_97653C.1
agtattaaaaatgcaacaacaataatagctttcctatacttcttatgctagacatcacccacaacaaaaactccatcaacactagtctttgtggtctcaatgtacaaggatcaatatgaaagattaatggctcttagatgaagctgaaatacactggcttggtgaaggcatttacattctctgttgcaatctaagcccctcataatgaaaatccatccctcctatgcatatattaaaattagagtaatattttgaaatgagggaaagcaagcatgattaagtatcaataactttctaatagaaaaatacaagaaaaaaaaagagaaagaaacgtaaaacttagtttggttcaattgtgtaaacaaatgttatacctgacgcaacttatcaatgaactttttggcattagcaagtgttatt

SEQ ID NO: 140250 - DNA, 1186 bp, Glycine max
  Clone ID: PAT_MRT3847_97654C.1
tagttgaggtgatgttgaaacagaaccgtgatgccacaattcactgggttcaagtaggagaaaagaagcagccaaaacttctcattgagttattggagcagaaatgttctttcttgcaaggattcaagggagtggaaacatttgacagtgaccaagttctttctttacatcgtctagaagctgcatatagttggtcacttcctttggtgacactagctagcattgtagtggcgctgccaaacatcaatagggattcagtgaaaaaattgataagtactctaaatgaaggactccactttgtgaagttcattgaaaataacctggacaaagaacgagaattgtttagactcaggactgctgcagaaattgtgtggcttggagttgatctatatgataagtggctagatgtggatcttcatgagctatcgcttcaagacaagagccccaaagagacacttgagaaactagctgatgctgcaaaaatcaggtatgagaaatttagagccaaatataaccacatatgcataaaggaaagcccttccttatggcccatcaaagtgtccgcatctcacactatgtacagaatatgtaaaactgctctcttaaatcatgaactcttaagagacaattcaagtgagaggttgtttgaagcgcttacagtgatgatttctgatatattgggtgcatgtctcaccaacttgccccttgttatatccaacaagtgtttgaatagcaccattgaagagagggaggatactgtcagacatgcagtcgacattcttggtaagaccaagaagattatagaaatgctagaaaagagagcgtttccccgcgtgaatttctgccaagggaccttcattgaagattggcgttcaatgcataagcaaaacagttttttgcactttgttccatcttcactggagaatgacactcatacagatcctctcaaatcaaatgatctttacctaaatgttgactaagagctagaggtaatggttatttacaattttgtacattattgctggaaaagctttcagattttgcttgatatataaaattagaaacttaggtgtaacaggaatattagaaaattgcactgtaaatcactagtttttgcttgagtaacgtttataagtgttgagcatatcttccaacaagtaggacaaacttataaatgaatacatat

SEQ ID NO: 140251 - DNA, 318 bp, Glycine max
  Clone ID: PAT_MRT3847_97655C.1
ttgttcgtttacacgttcggttagtcacgagacccatagtgcagacaaattaattgaactcattttctctatcaagaaaaagaagttctgaaaaagaatgtgtggaggaagcataatatatagacttcattggatgagaactgtggtcgaaatctccacgagcaggaactgaggtacgagcttgaccctttatttgacctgcttggctttgattccaccaccaccaccaccaaccaaccacccctttcagacaaaaaagaggtgtcatcctgtgagaagaagaagaagaaaagtgcgagtgcacaaaaaaagagtgga

SEQ ID NO: 140252 - DNA, 130 bp, Glycine max
  Clone ID: PAT_MRT3847_97656C.1
gttctgtttgttgctcacaaacaccactacggatacactcgcatgctgaacaattggaagtagagaatagtaaactattggctacccaaattccaagcaattcaaaggcaaaacatatacactactatta

SEQ ID NO: 140253 - DNA, 558 bp, Glycine max
  Clone ID: PAT_MRT3847_97657C.1
gccggaattcccgggtcgaccacgcgtccgatttctttgtccttcctgaagagcctgttttgccttttgagcggcttctgatgttgtgagcttcatcggaatcgtccatcaacctctgaatgctatctctgctcaccattcaccagcttctccctctccccataactaatgccaagccactctgtggcacccacctccaccccaatcccatgcatctcgcatcggaaccccagcagtaacagcctccaagggctggatttgcgaaggatttgggcgtaggagggagtggtaatcaccgtcacgtgctgcccgcgtgaggcgaagagtgttgctatgttgcagagagggatcaaatgcccctgtgacaggtaaggaataaaagtgaagtttcagtggtcgttgatgaagatccatggctaacacaccaatttgacgcttatatatatacttgtattgattttttggaaatgagggtgaaaacgatgagagaactagatggtattgtcaggagccgatgggaggggacaaggggacgggatgactgaagctagagcttgc

SEQ ID NO: 140254 - DNA, 583 bp, Glycine max
  Clone ID: PAT_MRT3847_97658C.1
ttgatttctatatgcttgtggaagaagtggaagaaaggaagtgtagaggaagttcatgtttttgaagagtatatgggaaaagattttggaagggggggaggacccaggaagtattcatatgctgaattaacacaagcagctaatggtttcaaagatgagcacaagctagggcagggaggatttggtggtgtttataggggttatcttaaagacataaagtctcatgctgccatttaagagggtgtcagaaggctctgatcaagggataaaggagtttgcttcagaagtaagcactattagccggttaaggcatcgaaatctagtgcacttgatcggttggtgtcatgcagggaaaaagctcttacttgtgtatgagtacatgccaaatggaagcttagatattcatcttttcaagaagcaaagtttgttgaaatggacggtgagatataacatatctcgaggattgacctccacattgctatacttacacaacgaatgagaacactgtgttgtgcacacatacatacactcaagcaacattattctagattcacagcttaatgcccaacttgagatttttgct

SEQ ID NO: 140255 - DNA, 324 bp, Glycine max
  Clone ID: PAT_MRT3847_97659C.1
gaccgaatgcttgctgtgatcaacatgtaaatccagacgtttggatgagtgtaacgtcaatctctaccgctatcatttgcagatgcatcactagaacagaacgtatttcactggtatagtagaatatgtcaatttatcagatcaatgaaatgtcacatgagcaggatgatgagagccacgataaaaatcatcagccatctttgaatctggttgtggttgacctgcttacgttgagggttttcaacaggatatcgatcgattacctgacccagataggacgaagactgagaaaacttgtacatcatgtcatgtgcacatgagtca

SEQ ID NO: 140256 - DNA, 357 bp, Glycine max
  Clone ID: PAT_MRT3847_9765C.1
ggaccccaacacaggtgtatttatttagactaatacaaaattttggacccattcaatcacaaaatacgaagaaaaagtttgttttgatttctagtttttacaacaagattgcaacctttaatcggaacccaatttaaatttcgaaaaaaggttaaattattgaaatttatcccaccaatagaaaaaatggggcaaaattatacaccaagaaattgtttttagcttaaataataaaaggggcaatcctttaacttaaaacataaactggctgaagggggttagaaagaagtgataaaaatgtgaagaatatcatttacttttctgccattaatataacaaaggccttttttggtccca

SEQ ID NO: 140257 - DNA, 342 bp, Glycine max
  Clone ID: PAT_MRT3847_97660C.1
tgaacctaaaatgtcagataaataaaaggtcagcctcaaaattggccgaaaatatgacatttttttttgttacataaaaaatatatgacattacaaccacagaaaatagtacaaaataaaagaaacataatttggttatcctcaccactatttggcaagatttagatgagtgattgtccaaaacctagctccactccacctgagaaagtagaccatatataaagagaaccccaaggatttgtgatatgattatagaaacatcctgagagagatggtttatagcagaagaggatttagtggatgaattgtatggaagtgattgatgtggatccttcaaatctt

SEQ ID NO: 140258 - DNA, 373 bp, Glycine max
  Clone ID: PAT_MRT3847_97661C.1
tcccaaatctggaagaatatcttgggaagcaggtcttagaggctgtttcattgattgaagttagaaggcacttcattgaagcattatccagtccgtttggaaggccagttgaagctgatgctgtcttttgcaggaaggcaacttttcttgctgcatctggtgttttcacgttcctgaagcagaagaaataccgtgtgacagaaatgttgggatccaattgcaagatatgggacttgagttccacattggaagtaatgagattctaatgtgggttttataagaccttgggctctctgactacaatgattagcttttgtggtatgattcactcaaagttcttatcaattggtattagagcttttcattatgtctc

SEQ ID NO: 140259 - DNA, 253 bp, Glycine max
  Clone ID: PAT_MRT3847_97662C.1
cacacacctccgtcgacccattcagttaaagcatacattatacatgacttggggttggtaatatccctgtctaataactcacactttaaattactcgttatactacttaaagatcttctcacacacagctcaacagtatcaacaactatcacttgataaggactatattctaacaacattgaggacttcttcaactgcgtacgtactatcacatcaagagtgataaccagtaagtacgagcgactaaacaaga

SEQ ID NO: 140260 - DNA, 481 bp, Glycine max
  Clone ID: PAT_MRT3847_97663C.1
tttctttttttttttttttttttttttttttttttttaaaaaaaatccattatggtggttgtaggggtcctatcacactattttcttgttcaaccaaatttataatcacaatatgccatatacctgatagaatggataacggaacaacgaaaaataaactcataaaacggctaataaattattaacttcctgcctgctgggttaacctaccacttaaaaaaaaaaggttacaggaatcccacctccctagaatcaaaaatcttaatgttcttcgtcctatctggtgataattaaataaaacagtattagggtcccagctaccatgggtcactcgaaaatttggaacctgcggaacaagacaccaaaacttttctcttgcccgactttcaggaaaccaggatctgaacctttcacgtttggccccatgcccttgtccttaaatttgaaaatatattcaatttgcccactttggatttcgaaa

SEQ ID NO: 140261 - DNA, 634 bp, Glycine max
  Clone ID: PAT_MRT3847_97664C.1
ttgtcatctagttacaatgaccaccactaaacagtttgaggttgtcggccgtaagaagcccaccgaaaccgataagaaccccaaggtttaccgcatgaagttgtttgcccccaaccatgtggttgctaagagcagattctggtattacttgtctttcctgaaaaaggttaagcgaaccaccggtgaaattttggaggttcacgaaatctttgaaaagaatcccaaccatgtcaagaattttggtatctggctcagatatgattcccgaagtggtacccacaatatgtacagagaataccgtgatgtaaccctcaacggtgctattgatcagatgtatgctgatatggctggtcgtcaccgagctcgccgacccaacattagtgttttgggtactgcagtgattcccgctaagaagagcaagagacaacaattgtggccattcatcaacagcaagatcaaattcaagcttctgcatcgtgttcctcgccctgctttcaagcgattcaagactccattccgagctgttgctccttctgcattcttctaaactctgctttttggtgaaatttggttggtggcggaaaaacaatccagaaaaagaaaagaccaaaacattttttttaaaaattatttt

SEQ ID NO: 140262 - DNA, 1224 bp, Glycine max
  Clone ID: PAT_MRT3847_97665C.1
ctgttccgtcctaccttctggtttaacctcttcctttatctcattctttctgttacactgcagattccctaaaccactagctcttctcatccatcatcatccgcattcaacaagagatgaaaggcatagacatcttctgtgcatcacaggcctcaacagccatatgtcttggcatggatcaaccctcttcttcatcttccatttccatttccaacactgctcaatttggtggcagagcaattgaccgccacaaccccatcatcacagatcccagaagaaccccctcaagagacctcatttccccttgctcttcttctctgtcccccattgaccccaaacctttgcatgatcatctccaaaaggccaagaaaaactccacttccaagccaagtggccagaagaagaagaatgcttcaaagagtcatgatcagaagaagaaaagtgctgctggaaagttgactgaacacatcactaacaattactcctcaaaaccaattgatagcattctgaggaggagttgggctagaccaccttctgatttgatcactcctcctggctcttcaagatatttgctcggtgatacgccttcgtttgattgtgtgtcgtcggtctatgatcctgttttggctttagctaatgttgagaaggagaaagctcaagttattcatcatgatgaaaccaaccattcatctaaaccctctagctcaactcttccaaagactgattcctcagaccaggttgtagaattgagggtttctctgcactgcaaaggttgtgaaggaaaggttaggaaacatctctcaagaatgcgtggagttaggtccttcaacatagactttgcggcaaagaaggttacagtagttggtgacgtcactcctttgagcgtattggcaagcatatcaaaggtgaagaatgcacaattttggccagaacatgcttcagtaattggatctgctaccccagaaacaaagagaacaaattttatctaactagagaggaagtagcctattggtattgttgtaccattttttcgtgtcaccacttcaaggttcgaactcgtgaattgggtagttatttaattagtgtaaatattagagtgtaggtttggctttgaagaaatattagtttgtttcgaaggaaccttatttttgtacaagggttgggctaatttctctggagaaaatttactatatgtaaaccgacataagacctgatcctttaaaa

SEQ ID NO: 140263 - DNA, 539 bp, Glycine max
  unsure (1)..(539): unsure at all n locations
  Clone ID: PAT_MRT3847_97666C.1
gtgaggcgagaagcttgaaagtccgatccccatgtcgaaattccatgtgatgttattagtgttagtggcgttgttatggaattcaggcgcatcagaagcagaggaatgcgagaagcgatggatccacataagaaagctcccttcaagtttgaacctggatctgctcgctaactgttcggaatacccaatgttggacgacctgtgtcccttcctagcaaaccacggtctgggacaaaaaaacccacaaccactcccacagttggtaccgaaccgacccttccatgctcgaactcatcttccaccgtcggatgttggagtacccatgcctcacgcaagatccgctccaggctaacgccatctacctcccttactacgccgctctcgactccttacgctatctctacggccctgaatacaactccagcgccaaacacggcctcagcctcttccactttctccaatccgacaacccccaaatctggaaccgccacatgggccacgaccacttcctcgncatggctcgtcccgcttgggacttc

SEQ ID NO: 140264 - DNA, 519 bp, Glycine max
  Clone ID: PAT_MRT3847_97667C.1
gatgggtaaacaaaaatacacttaaggaagtgcatctaagtctgatctcattagtttaatttctatatacggttagttgtaaaaaaatttacactattaaccaatcaaaatttatggttgatatgacttttgaggttagggacttggatatggagtgcttaagtctcacatggagtagtttaagatgctcgttgagtatttaagtgcttgaatctctcctaaacagttagtttttaagggtgtgttcccaagtgtttgggctcttattggtatcagaattggttgtgagtgaatatcaattggaattgaaaaacttttttattttagccttttaatttaagcactagtacataggataggatagaaaaaaagaatccttgaatatggatttatgtaataattgaaaaatgaaaaggcaatatttttgtacctaaaaagacatttttattgggtgatttgatcttggtttgtagggatgtagcaatggaatactctaggcaagttaagttgtttggggag

SEQ ID NO: 140265 - DNA, 1466 bp, Glycine max
  Clone ID: PAT_MRT3847_97668C.1
attctgtggttctctagcacgtaagcccctgggtgtgcactcactttcgggtcagtcttctgaagatcttttggggggttgtgaatttgtgtcttcttggctcccaacccacacgcaacgcaaccatagaatggaatgaatgaaggcaaagcttatacttataaaagagagatagaaattggttgtgaaaaacagaagcactttgtttctaagtaaaaggaatcttcagctgccatgtttcatcgctggagcaattctcatcaacaggatcagggaagcagcgagctttatgctgaatccaagattaaagagctgaagggtgttatcggacccttatctggacgcagtttgacgtattgcactgatgcatgttttaagagatatttggaagctcgaaactggaacgtagacaagtccaagaagatgttggaggagacactcaggtggagatcaacctataagccagaggaaattcgctggcatgaggttgcaatggaaggagagactgggaaattgtatagagcaagttttcatgatagacaaggaaggactgttcttattttgagacctggaatgcagaacactacttcaatggagaatcagttgcggcatcttgtgtatcttttggaaaatgccatgcttaatcttccaccgggtcaagaacaaatgtcatggttgatagacttcactgggtggtcaataaccaacaatgtgccccttaaattagccagagagaccatcaacattttgcagaatcactaccctgagaggcttgccatagcatttctttacaacccccctcgagtttttgaagctttttggaagatagtcaagtacttcttggacaacaagacatttcagaaggtgaagtttgtctacccgaataataaagatagtgtgcaggtcatgaagtcctattttgatgaggaaaatctgcccaaagaactaggtggaaaaagcataatgagttataaccatgaggagttctccagattaatggttcaggatgatttgaagtgtgcagcattttggggatctgatgggaagctctcaaaccacattgtcaacgggaattctgcatcagttctaaaatgaagctctcataatgtttggattaccgtttgcaggtggtgaatctatattgaaagtacgtagggagaagcatgcttttgttacttttgagttaataactttggaaggattggaacggtaatccaaacatacacttggttttagtggagatggtatggatactaatcattgtaaagccattagctcctggcaaattagaactaggggtgcatccccagtttaattaattactgcaaagagggatttataatacagttatcatttatatactgcatcactattccatcctgatatggtgcaacttgttcctaagctagcagatatatatatatcaagctgaggaactatgacaacttgcaatgctatgtgctgtt

SEQ ID NO: 140266 - DNA, 1256 bp, Glycine max
  unsure (1)..(1256): unsure at all n locations
  Clone ID: PAT_MRT3847_97669C.1
gtggattttcttttgttgtataatccttgttttttattcttagagtcggagagataggaattggttgtgaaaaaacagaagcactttgtttccaagtaaaaggaatcttcagctgccatgtttcatcgctggagcaattctcatcaacaagatcagggaagcagcgagctttgtactgaatccaagattaaggagctgaagggtgctattggacccttatctggacgcagtttgatgtattgcactgattcatgttttaagagatatttggaagctcgaaactggaacgtagacaagtccaagaagatgttggaggagacactaaggtggagatcaacctataagccagaagaaattcgctggcatgaggttgcaatagaaggagagactgggaaattgtatagagcaaattttcatgatagacaaggaaggaatgttcttattttgaggccaggaatgcagaacactacttcaatggagaatcagctgcggcatcttgtgtatcttttggaaaatgccatgcttaaccttccaccgggtcaagaacaaatgtcatggttgatagacttcactggatggtcaataaccaacaatgtgccccttaaattagccagagagaccatcaacattntgcagaaccattaccctgagaggcttgccattgcatttctttacaaccccccctcgagtttttgaagctttttggaagatagtcaagtacttcttggacaacaagacatttcagaaggtgaagtttgtctacccgaaaaataaagatagtgtggagcttatgaagtcctattttgatgaggaaaatcttcccaaagaactaggtggaaaaagcataatgagttataaccatgacgagttctccagattaatggttcaggatgatttgaaatgtgcagcattttggggatctgatgggaagctctcaaaccacattgctaacgggcaatccccagcagtttgcaatgaaaccccacccgaggcatgttaaggctatgtttggattaccgtttgcaggtggtgaatgtacattgaaagtacgtagggagaagcattctctttgttacttttgagttaaaaataactttcgaagggtaatccaaacatacacttagttttactacagatgatgatatgaacactaatcatgtaaagccattagctctgggcaaattcgaactaggggtgcatccccagtttagttaattattgcaaagagggatttataatacatttatcatttatat

SEQ ID NO: 140267 - DNA, 235 bp, Glycine max
  Clone ID: PAT_MRT3847_9766C.1
taacggttggaaaaaacaacgaaaggaattgattgtttctttaattggcttaaatggattccctaaggtaatgtaaaaaggactggtttcttctaattttacaaaaattttaagtgctaattgacttgtgaaagtttggatgaaaaactatatgctattgggggattaggttcaaatataagttatcattctttggatactttttacaccttttacaaaatggttgacatttcat

SEQ ID NO: 140268 - DNA, 957 bp, Glycine max
  Clone ID: PAT_MRT3847_97670C.1
aagtattaccaaactcttgacggacacttattatttcaattgcaattctgtctttgcttattacattatgttatctagaatctatgatcatactcatagttttattattttggtctatagtatagtataatttggtgtgtccactaatattttttttccacggagatattaatgagaagggcaaaaagtgataacataatcagatccagaacaagtgcaaatgcttgaagggtcatcgtaagcgtaactgtaagccgcggggcacgcattcttaaaaatcttcgaataaagcgtcggcgaacacgtctgcggcgaggagtgatcgccggtgcagcaaaactccgccgtgttgaacgccgcgcatgcgctcttgcacgccaccacttcgccgccgccgtctttcacctgcaactccgctggacacgccgcgttcaagtcctccgagcaccccgcgtacttgcagtcaccggttccgccggtagcccgcacgcccacgcccacgttgtaaccgtccaccaggctcacgtcgtagaagtccttgccgccgcctttgccggcgggatccgacggttgaactccgccaagcgtcgcgggcggaacgccggctcctgtgcacctcattcctccggcgcagtctccggttaagcattttccgttgccggaagcgtcgaagctgcacccggtccgggcccataagcggccggaccagcccgacggggcggtgagctgggccgatgaacccggcgccatgggaaaaccgccgtctccgagggtggcgacgccgttgccggaaagtgtgcccggccaaactgtgtaactgcaatgattctccagggtaaacactgtggcatatgctatattgcctaatataaagaggagcaggtggaagagtgcagaggtttttgagtttgggattagggccatgattttgatagaaaaacaagtagcggacgcgtg

SEQ ID NO: 140269 - DNA, 433 bp, Glycine max
  Clone ID: PAT_MRT3847_97671C.1
ggaattcggcacgaggctcaaattacgaccccaccgtcaatcttcagcaaaagggccagagcccatcacaggcaaactatcaaagcgattctttggtccgtttcaagttgttgagcgcgtaggcaagggtgcttatcggctccaacttcctgtggacgctaaactgcaccctgtttttcactgctctttgctgaaacccttccaaggcaacccaccggatactgctgcacctttacctcctacgctcttcgatcatcagtcagtaatcgcacccttggtaatcttggcaactcgcacagtcaatgatgatgatatcgaggtcctcgttcaatggcagggcttgtctcctgatgatgcaacatgggagaagtggacggaattgtgtaaggaatttcaccttgaggacaaggtgcttccccatgggcccgtggaa

SEQ ID NO: 140270 - DNA, 380 bp, Glycine max
  Clone ID: PAT_MRT3847_97672C.1
tcgacagaaggtgatggaatataagatagagtggctgtgtagaactcgagactattcacggctgatatatatcttctgcatagtctacgtgtctatatcactgattcggtaccgcatgagggtgctctagattgcctattgatccagcttaagcatcttctggctgaaagcatcccaaagctagagatctgtgtgttgacattgggtgatcaagatcagcatatgcattgctatgagctgacccttctcattgcctgctgatccatgagtaaagatggtatgcatgctcatgttcactaggtgatagggagcatttagagcattgtggctaagatacttctatgagtcggcttatgctcccgaatatccttcgatgagca

SEQ ID NO: 140271 - DNA, 387 bp, Glycine max
  Clone ID: PAT_MRT3847_97673C.1
cagcttcctgcagggaagtttgtgacgtttgttatgagcaccgtgccatgcctccgggattggttgaggcagtatgtttcatgctagattgctaatagcagcatctgatggggttgaattggcatcctctaattcctcctctgttggagatatttcatcacctgctgcatatgattatattttgacccaaggaagggcatgggcaatttctatcacacagaaaagtacaagaaatgaagagatttctagagcatttataagcaatggaggtggaatggataataaccttctttatcgttcatccactcatggaagaggccttggcagattttggtctcatgttgaaggttacaaaggtcctttgttaattttgatagctgcaagttc

SEQ ID NO: 140272 - DNA, 229 bp, Glycine max
  Clone ID: PAT_MRT3847_97674C.1
gaagaggtatatagagaatgagactcacaagctagatgcagagaaacaggaggagataaagaagcacatagagggagaaactaaataggtgctcgcaaagagtaaagatttacaattttttgttggagagagtgtgggagagggtgcgtgcgagggcgttggctaatacaaggacggaggtgaagatacaacatgagtgtactttggatatgtcttaaaggagggcaag

SEQ ID NO: 140273 - DNA, 372 bp, Glycine max
  Clone ID: PAT_MRT3847_97675C.1
gtgaatcttaggtgaaagcaaatattaaatagtagtaatcacaagaaatcctagtacagttttccaatcaaaattagagttttatctcgttaatctgcataatataggtttgcattgaaggttaacatatctgattggagaataacaccaaaagcatctaaggaactgtatctaagttttatcctttatagttgtgttgtgtggtacttactgtggggatgatgaactttccagtcaggagacacacagctggaattgtgcagtatgcaagcagagggatggaagtccatggataaacaatggtgttagtgtaagccatcctctgtaggtacttaagttttccttcatagccataccacaaggtgcaatggc

SEQ ID NO: 140274 - DNA, 313 bp, Glycine max
  unsure (1)..(313): unsure at all n locations
  Clone ID: PAT_MRT3847_97676C.1
agcagacancnanncaacaggancnnanaangaancngnggaanagcgngcaaaccgccgaggcaanggagaccccncagaagggaaagnnaccaccannaccncgcaanncagagaacaanggaagngnnganacagcagnnncagagagggaacaacnacngcngggcagaannncagaacnccaancccggangaaaaannngaccgaggaaccgacnaaagagaagnnaagaaacgngcagnngcaacaacagcnngcncncnacagccaggaacaaaanggggaaagagaggaannngcangaaagca

SEQ ID NO: 140275 - DNA, 294 bp, Glycine max
  Clone ID: PAT_MRT3847_97677C.1
cactgagcatcgtctagctatctcgatcgaactgtccaaggtcctgtcactagcaatcgcgcgtgcatgtctggatttagtacctgcttacacaagccaagcttctgcgagctgagtgccacaacaacaacggtgcaccatatagcgcgccaactcgtgagcagtgtatatggcaggccccgcaactcacaactacaattgtcttcacctgctaatgcgccaactcactgccaatttgggcgtgtattgataccgtgctaagattattattattattactaattaattcttttg

SEQ ID NO: 140276 - DNA, 2115 bp, Glycine max
  Clone ID: PAT_MRT3847_97678C.1
tgccccactccagtgcccgtggctccaaagaaaaaatggcgtcgataactggaccacagattctactgcactctggttctccatggttgaaacagacgatgaaaccctcgtcatcaccctttctcctcttcccaaaacacactcctcgtcgcaccttctgctccatcaattccaattccaagggttcgagtgtccatcgttcccgacctcctccattacctgaaccatctcctggacccaattccgccacagccgaagctaaacgacaattacgccggtttccacatgctcgacgagaaccacgactggcacctcccggcggatacttcttcacccgcaatgtcctgtttggttgctttcgcgatcgggataactcggtacaatgtcggcgacggttttcacgtgatagcggcgcacaccgacagcccctgcctcaaactgaagcccaaaacggcagtgatgcaagtggaactactccatggtgaatgtccagacttatggagctggcttgtggtacaaattggtttgatagggatttgagtgttgctggaaatgtcattctcagaactggccataattcttatgtgcataagcttgtcaatagtcgatagacccattttgcgcattcccacactcgccattcatctcgaccgcacagtgaacctggatggttttaaaccaaatctagagactcatcttcttcctttactctcaatgaaacctgaggacacttctttggaatcctactctaaggagaagaatagtgccttggcatccaaagctcttcatcatcggctgattatgcagatactgttagatgagttgaactctgatcttgatgacatagtcaatatagaactgtacctttgtgatactcaactcagctgccttggaggtggaaacaattaatttatttttactgatagattagataatctggcttcaagttattgttcattaagggcacttattgactcgtgtgaatctcctggtgacttagcaagtgaaaatgcaattcgaatggttgctttatttgacaatgaggaggtgggttcaggttctgttcaaggagctggagcacccaccatgtttcaggccatgagacgtatagttggtgacttaacaaataactatgttagtgaaggctctttttgagcgcactattcgccaatcatttcttgtgtctgcagatatggcccatggagttcatccaaattttatggataagcatgaagaactccaccgaccaaagctgcagagagtattggttattaagcacaatgcaaaccagcgctatgctactagtggaatcacaccttttctttttaaagaagctggaaaaatccataaccttccaactcaggaatttgcggttagaaatggcatgggatgtggatcaaccataggcccaatacttgcttctggagttggcatccgaacggttgactgtggaattgctcaactttcaatgcacagtataagggaaatatgtgcgaaggaagatatagacattgcttacaagcatttcaaagctttctaccaaagcttttcaagcgtagacaagatgctgactgtggatacctgagagttgcatttgctgaggaagtgttgatggtaaaatcagcacaatgtttttaagatggctttggattcaatctccgaacaagttgatttccctccttgaactcaagcagatggattatgccagaattttgttttgcaaatataactgcgttccgattctttctatttgcccaaagcgtacttgtaaatacattaaattaagacatgaattttcttgtcagcagttcttagattgttggagtaggtggtaagagtagcacaccatgaaatctgaatgcctattatcatgtttaacgttaattatcgcacgtgccacgatgccaggatggtatagaacttgaaatagataatcaagtattgggtggtgcaaaaattaaaaataattatttcttaaaaaagcttcctttattataccctcctttataaacagcttttatcttaatatttccttttatcatttttctaatgctttctcttaatataatactcattataatcttaatttcttttcttataaaaattctaattttt

SEQ ID NO: 140277 - DNA, 465 bp, Glycine max
  Clone ID: PAT_MRT3847_97679C.1
ttttttttttttttttttttttttttttttttttttttttgtttttttttttttttgtttttttttgttttttttttttttttttttgttttttttttgtgttttttttagttgtgtgtcaaaagaacaaataattgtgaaggaaaacaatcccctatgaaaaagataaattttttgaggaaaagggccaaaatttttccccccgtggaaaaggcggagggaaaaaaggagagaataagccggaaacaccatcactttttgcaaaaagggcgtggcccgaagcatggggatcggcccccccaaaaggagcgggggtttccacttggtgggcccgtttgcccccgggagatcccccggggaagggaccctgttgggcataaacaagagggggccccaaaaagggcttgtctgccaggggaacttggggcacaaacgcggggaaaaggacgagcctgttttcggggg

SEQ ID NO: 140278 - DNA, 356 bp, Glycine max
  Clone ID: PAT_MRT3847_9767C.1
tgtttctcttgttcttcaaacccaccacctctcttctctttctcttcttcttcctcattatttcagttacctcacttactgtgccgccgcgagggggggccccactcgatagtgatgatgatattgattccctcacctacctctggccccttcccgcagagtacactttcggcgtcgacgctctctccgttgaccccgccctcacgctctccgtcgccggcaacggcggcggctccgccattctcagagccgccttcgaccgatacagagggatcgtgttcaagcacaccggtgtcgggtttagtttcttcagaaagctgagggaacgattggtgtcttctgattcggcattcgat

SEQ ID NO: 140279 - DNA, 827 bp, Glycine max
  unsure (1)..(827): unsure at all n locations
  Clone ID: PAT_MRT3847_97680C.1
caatcatttcttgtgtctgctgatatggcccatggagttcatccaaattttatggataagcatgaagaactcccnccgaccagagctgcagaaaggattggttattaagcacaatgcaaaccagcgatatgctactagtggaatcacatcttttcttttaaagaagttggaaaaatccataaccttccaactcaggaatttgcggttagaaatgacatgggatgtggatcaaccataggcccaatacttgcttctggagttggcatccgaacagttgactgtggaattgctcaactttcaatgcacagtataagggaaatatgtgggaaggaagatatagacattgcttacaagcatttcaaagctttctatcaaaacttttcaagcgtagacaagatgctgactgtggatacctgaggaagtgttgatggtaaaatcagcacaatgtttttacgatggctttggattctctgtttcaatctgagaacaaaagttgatttttctccttgaacagtgaacacaagcagatgaactttcttccctagcttttagatggattatgccaggaagttgttttgcaaatatatccgccttccgattctttctatttgcccgaagggtacttgtaaatacattaaattaaaacatggattttcttgtcagaggttcttagattgttggagtacatggtaagagtagcacaccatgaaatctgaatgcctattctcatgtttaacgttaattatcggcacgtgccacgatgccaggatggattagaacttgaaatagataataaagtattgggtggtggaattatggtgtgctca

SEQ ID NO: 140280 - DNA, 196 bp, Glycine max
  Clone ID: PAT_MRT3847_97681C.1
gagaaacttttccatttcatatcagatcctgcttcttgggcccgttcctttttctcactgccactcttcaaacttgccttactttcaccaacacccaacaaacaaagttacttcattgcaaactctatattagtctttactttatttggttatttcacctctgaacaaaaccagtgaatgaatgaaacaacctacc

SEQ ID NO: 140281 - DNA, 279 bp, Glycine max
  Clone ID: PAT_MRT3847_97682C.1
ttcggctcgagaattcatggctttttaggtttttggtgattctcaatccacgcactgtctgaaccatacgtatactctgttagtctttaactgtaactgaagctgctttgtgtgtgtatggttcgttgtgctgttttttttattcgaatttgacaatttgtgttttcccttaaaatccttaatgtagaaacctgatttgggtttttgttgagagacactatttgataatctcaattttttcatattctgataggtcttttgctacttgtttaattatag

SEQ ID NO: 140282 - DNA, 277 bp, Glycine max
  Clone ID: PAT_MRT3847_97683C.1
ggcaaaggaaatggtgaagaataagagactgagatgggcagtgtgatcaaacaagaaagctcgggtgggcgtgctaccacggaatgctaaggatgaaaagcttattagatggattgagtgacccaagtgagacatatgccacaatggcaacgctagggaggaggaagatttttttgttgagagcagatgccgcctacagaaacaaaatttggagtcggccggcgggagagagaaggaaaagactgaaaacagggcaaatgagctgaaagaaatgaga

SEQ ID NO: 140283 - DNA, 273 bp, Glycine max
  unsure (1)..(273): unsure at all n locations
  Clone ID: PAT_MRT3847_97684C.1
gangagtgagcatggacgtgtctaccataaccacgaagaagaggcaaagagacttggagatnttcaagaataacttganctatatgcaggganatgaatgcaaacagaaaatcaccccattctcatcgtttaggattgaacaagtntgctgacatcactcctcaagagtncagcaaaaagtacttggcnagctcncaaggatgtgtcgcagcaaatcaaantggncaacaagnnnatgaggaaggnacnatattcttgtgaccatcnaccngc

SEQ ID NO: 140284 - DNA, 339 bp, Glycine max
  unsure (1)..(339): unsure at all n locations
  Clone ID: PAT_MRT3847_97685C.1
tcgagtctcgatttttttttaatcnacgaaccacattcctgggaagggggggcttcccaatacgaggtattgtggtccataataatcggtttatgaaatgtcggagtctctgagtagggcgaaatcaaacgttcattggcattttgcagtttcccttattcgaccaatcaccaaacacgtctacacgtcttttgatattcatcttgtggaattctctcacagatttatgaacattggctggtatatacctcttactgccagcattttctctgtttccacagggctacttgccagaatctatctggaaatgcgtgaatcactctgcatgtatctggaatt

SEQ ID NO: 140285 - DNA, 1342 bp, Glycine max
  Clone ID: PAT_MRT3847_97686C.1
aaaattataaaaagtgagatagataggttttgtgaaaaattgaataagaccataaaaggtgggacatagggggggggcgactggtttttctcttttttcccgtggatcatctcaaagctctctgcttttttgtgacacagatcccttgctgggttcaagttcctcactttggattctctccctaatgggttcctctgatcgattgtttaaccggcaaagaagtcttcatgagatccttggtggtggtcaagttgcagatttaatactgtggaggcggaagaaccttactgtggggatattgttggtcacactagctgtttgggttgtgtttgaaagatctggttatactcttctgtctcttgtttctaatgttctcctcctcctcattgtcattctttttctctgggccaaatcagctgcaattctcaacagacctgctccacctctaccacagttgcatctctcagaggaaatggcaaacgaagtgaagacttttatccgcacaagagttaatgatctgttatcagtttctcaagatattgcccttggtaaagactcaaggctgttcctgaaagtagctgcatacctctggataatttctatcatcggtggcttaactgatttccttaccctggcatacaccagtctttttattgttcttacagtaccagcaatctatgaaagatatgaagattacatagataagtatatcttgaagggttacagaaaattatgcctattacatttgaaaataaatgagcaatatgtcaacaaagtccataattggatcctggagaagaaaaagctgagctgagtttgtgtttttcacattcattttcacaatttcttttattattcttctaaaatatttcttacaggatcactggtgagattgtaattgagtttgagggacaacaatagtgatcttctccccccaaaatgagtgtcttttgcattttccatcttcaatgatggatcacttttttggtacataatgatgaaactcttacgttgggctggttaatgtagtccactaagcatctaagatttattcttaggttaacaaagaaaaaatataggtgccactacctatacaaaatataaaatgtgtttgcaagtatttttacatgtaaataatataggtacaattattattacatatgtagagctgtgcagattcgcctcagttatgagggacaattcaacaatttagcacaccaactaatgtttctttccacttctctaaaagtggtctttgtaactttttccttggagaagttgttgctgtataatgcaagtcatttcaatgttataagtactatttataaaaaaaagctttccc

SEQ ID NO: 140286 - DNA, 245 bp, Glycine max
  Clone ID: PAT_MRT3847_97687C.1
gggggccggggttttttttttttttttacggggcggaagaaaaaaatcttatgagctctattgatatccaggggccacgggtgaacttcagcgcacgaaggccttgctttccctaaaaatcctgccaggcatcaatcataaaaccggctctggctcagggggggagagagactttttttaaaggaactgtccgggaaacaaatggtcccctctttcactccttatacccagcgggccctggtgcc

SEQ ID NO: 140287 - DNA, 262 bp, Glycine max
  Clone ID: PAT_MRT3847_97688C.1
acatatctcgttttttctttttttgcacgcaccgaaaggggagttgctagcgaagaaactcagcgaaaaaaaaaaaagcgtgaccctggggtcgcacaccctggaaaaactttatggaaaacaaaaagggccccttgtctaaaacctgcccgcgacaaaaatatgctttcaggagggggaaaaaaaaaacgcccttttgtcaaaggcgcgcagggagagaaatttacctggccacaccaaacttgcgaaaaacaatagggtc

SEQ ID NO: 140288 - DNA, 1086 bp, Glycine max
  Clone ID: PAT_MRT3847_97689C.1
ccacgcgtccgctcaattaaaaaatgatattgtcgctttctctaaagacctgatcctaaggtactgtcctagttttctctcaactcccttgtgtcagggggtacgttgggagccaacttggaaagcgagaccttcgtggaggccgtaaaggtgaaaagacgcgtggaggaatattctaccctaccatctgcgtcatgaaatcgtttggtttgtacatcaatagccattgtgactatgatgcagggtttcctcaatggtccccctttatccgatacccttatgaccaaaagaatgaagagagatctccatggtctacagagaccgctgagagtaccatccactctctttcgggtctagacacttcggtgagtctattgactcaggctcccctggtagactatcgcaatctaccgaggctggcgctggtaagagatattcgccataggtaactttgtgaatcaaagggtattgaagcctcttcatgatttcctcatggacacgcttcggtctatcccaatggatggaacttttaatcagctccgaccgttcgttggatagatgaaaaggtttcagtaaggtttattcttttgacttgaagtctgccaccgataggtggcccctcagtctgaagactcaccttattagaactttatttggtaagtctgttggagattgtttagatgcaatcttcagcagatctatgaagtaccctttcttcgctcagttcgaggtgtcgtattctttagagtaggacaacctcttggctttctgtcttcttggcctctcttcactttaacacatcacttagtgatgttttattgtgcagagaaggtgtacccaggacagcgctttactaggtatgccattcttggagacgatgtttgtatcgccgacgagaatgtggcctctctttatcgccagacagtaaatgatctaggtctcgcaataagaaagggggtgagataggcgacaggtagcttgcttccaagccggcccggccgcgaggaagagatctttgccggtgctgacttggatctcgggtgacggaataaggcgcccagaagctacgagcagtcgcggtcgaag

SEQ ID NO: 140289 - DNA, 157 bp, Glycine max
  Clone ID: PAT_MRT3847_9768C.1
gggtcgaggcacgcgtccgcctcaacgtcagggctgcaaaaagacgacagaacgggacggtttggttaataaggtttacgctcaaacgtgtgcagtctcaccccccgacgcaagatcgatcataccgtcgcacaagacactcagtcacatcatgaaa

SEQ ID NO: 140290 - DNA, 186 bp, Glycine max
  Clone ID: PAT_MRT3847_97690C.1
tgactgaaaataaactgtccatttaaaaagaccgcttatacataaaacaaagctatataacccatgtaagacaatattctataccataaaagcacttcatatggctgtcaccagtctacaaacaatctcaatcgaaaagacatttcgaccttccaacttggaccatttcgtgatgaacgctattat

SEQ ID NO: 140291 - DNA, 2099 bp, Glycine max
  unsure (1)..(2099): unsure at all n locations
  Clone ID: PAT_MRT3847_97691C.1
gacgatgatgatgatgatgatgatgatgaggtagaatatgaggtgcacgtggtagataagaaagtggttgatggagataataatgatgggaacaaggccaaggagcacgccgcattccgtacccggagacctggttcccggaatccacttgaggttgctaaagagattcagattctatttcagagggcttccgattctggtgcccaaatcgccaagattcttgaggtcggcaagcttccccacaatcgaaagcacgcagcttatcaagcttcttgcaagatgttacaagttgttgctccctctttgtcccttgtctcctcccaaccttctacttccaaagatgctgaatccgcctccgctgctaacatggattttaatgttgatctaacaaccggggcacgcaatctttcctctacgcttcagaagctccttctttgggagaagaaactctttaatgaagttaaggcggaggaaaagatgcgggtcatgcacgataggaagtgtcacaggttgaagcgtttggatgataggggttctgattttcataaagtcgattcgactcgaactttgattaggaatctgtccacaaaaattagaatggcaattcaggtggttgataagatttctatgactataaataagataagggatgaagaactgtggccacagctgaaggaattaatccaggggttgaccagaatgtggaaatccatgcttgaatgtcatcatgatcagtgtgaagcaattagagaagccagaatactgggttccattggatccaggaagaagagcggtgatagtcatctccaggcaaccaagcagctcgaacaagagcttatcaattggacattccaattctctggctggataagtgctcaaaaaggttatgttagagcattgaataattggctgttgaaatgtctcctgtatgaacctgaagaaacaccagatggcatagtccccttttcccctggtaggattggggccccgcaaatatttgtaatatgtaatcagtggtcccaagctttggatagaatatctgaaaaggaagttgttgattccatgcatgtatttaccatgagtgtgcttcagatatgggaacaagataagctagaaatgcataggcaggtgatgaagaacaaggatctagagagaaaagtgagaaatatggatagagatgaccagaagctgcagaagcaaattcaagcgttagagcgaaaggtggttctggtatctggagaaggcaaaggtctctcagtttctgagaatatcatatatcagagtgacaaaagcagtagtctacaggctagcttgcagcgcatttttgaggccatggagagatttactgatgaatctgtgagagcttatgaggagttgctacaacggagcaaagaagaaagtgctgcccgaaatcatgagagagtttcataggggtggtgtagctgatggaagttggaatgatattatctttgccatttgccgagaatagaaactagctgatctccctctactaactattctttacaacagagtcttgggaggaggggttgggtttgatttctcactacgctaagctaactgcattggagctgaagatactactgagatgggacagtggagtttattgtcaaacgaaaagagaagtgtgaggtattaggcgcacagttgctttttgggtatgcagcgctataaggctacaagtgaagttgtgctgctaaaagacaggggaaggggagcccacaaattgtaacatctaaatggttcttctttctgcatttgaaaatagaaatgaaggagaaggacggactttcgggtatagaacccctgcaactggcaagtcatgtgatagaaggctcaaattgaatcagtaaaattggagtaacgcacgccactgaatgcatgggtgttattggttcctgtataaaaacattcgtttttaagttaaattattgtacagattacctattaacactgagcaggcttgatgaaaaagcatttagaataatttttttttttaaaaccctttgttcctccactgaaataaaatgctgagaactgttccaaggattggnnnnnnnnnnnnnnnnnnnnnnnnnnnn

SEQ ID NO: 140292 - DNA, 590 bp, Glycine max
  Clone ID: PAT_MRT3847_97692C.1
aaaaacaaaaaaggcccccatcagggaaaaggttcccccactggcttgcccaaccattttttactttacccccaaaagggggaacacttatggggtcccttttgagggaaaccaaaaggccataaggaattaaaggggtttaaacccaccccccccccacaagggggggttaaaactctgccaaatttacaaaccctgactaaatgggaggcataaaatatggggccaaaagttcaaaccccaaggcagcacccagggggacccttttaaagttcttcacccccggtatgtcatcactccccccaacagaaaaaattttttggtttatttccaccatccgggccaacttccggttgaactcggggttttcaacaacaaaaacagggggaaaaaccctaacagttgggcggtttgccccgatgaagacatgcatggcaaattctttggggttaagcccaaggccttcaaaaaaagctggccgtgggcaatcattgaaatacattggaacaaaacccgatagacagaaaaatcgaaaccacaactttgccttccaggcattaaaaaatgggggctgggccttcatcagggca

SEQ ID NO: 140293 - DNA, 675 bp, Glycine max
  Clone ID: PAT_MRT3847_97693C.1
ataaaagtaaacattctatttgtaattatgattgaatgcaatttagtcttaaccaaagaacaagtgatactatgaagtaaatataacaagtgtatggatacatcgggctcctacttaactgggagagaagcacaatttgagcgttcccaagctaattcctcaagttagagacaaaattaaacaaattaggagatcaagggttaactatcatattctggttagcccacatggtacaaagagccaaagatatggtgagaaaaatgcctattttcttcaagatcgcactcaggcctttctcatcatggcttttgacaccaacaaaccaaacctcattatttgactcattccaaatttccacttcttccttcaaataaacacaatgcatcaacacaaatgcaaagatgaatacaattgcacttgctattggcttggaaggctttataagcttccccatcacataggccttaaccttattccttaataaagacccttggttctccattatcattagcattgcctctgcattctccacataatgattgtgtgccatcactgaattgatgaggtgaacttgaacaggttgtgaaggaactatttgggtgaaagaatgtctccactacttgacgaggcgaaacaagcattccatgattgacctttatttcctcaacgacctca

SEQ ID NO: 140294 - DNA, 316 bp, Glycine max
  Clone ID: PAT_MRT3847_97694C.1
ggctcgaggatctatccaacctcatactatcttatctcaaatcccaccctgctcgcgattagttgctgctgctgaaaccatatggagcatgcttacatcacaagctcaatatactagaagcaccctgcagggaaagaaggaagactgacgagaggactgccttgattgggtttgactcgctggcaagcatcataggcgaggggtggggctcttgtaagttttaagcaaaatcttgaaagaatgtgatggaaaaagtggtgagaatgcacgacctaagcccctttgtgtcgcccacaggagagatcttcaatttata

SEQ ID NO: 140295 - DNA, 171 bp, Glycine max
  unsure (1)..(171): unsure at all n locations
  Clone ID: PAT_MRT3847_97695C.1
taaatgtaaataggtgttaatataaatgagagactgattantgatgcgttgcgagcatcacatataagcacgtatatatatatatacacgattttnttgcgaaattatgaggagtccacaacacaacaaagctatatctaaaacacattttgaaaagagaatatatttttt

SEQ ID NO: 140296 - DNA, 503 bp, Glycine max
  Clone ID: PAT_MRT3847_97696C.1
ctttgtttttttgggggggttttttttttttttttttttttttttttgttttttttttttttttttttttttttttgttttttcaggaaaaaaaagcaaacagaaatttttttaacccgcgggaaaaggggggttcaattaagaaaaatcccaaaccccaacgaggggggacaaaatttggtttaccaatcacgaacaaagggggctggggaagggaaaatttaaccctttggcgggaaaaggggacaatattaagcttgattcccccacaaccccggtttttttttaagagtccccttttttggggattggaaaaccccgagagttgaggaaaacccttgtggggggaaccttaaccttataaaagggaccatggggaaaaacggtttcgagggcatccaagggtaagggggcacacggccaaatttcagggggcacccccccaaaccccggggaggagggtcttccccccgggagaaaaaccaaccccgggggggggaccc

SEQ ID NO: 140297 - DNA, 430 bp, Glycine max
  Clone ID: PAT_MRT3847_97697C.1
ccgggaaattccggacgggtcccgggaggggacccagttttccctaaagggaggcgaataagagcctgggggaaaaaaggggggggggggccccctgtgttaaatgggaacccgctaaaaattccaaaaaaaaaacaagccggaagaaaaaagggaaaagccgggggggccaaaggagggagcaaaccaaaaaaaatgggggggggccaacggcccggtttcaaagaggaaaaccgggggggccaggggaataaaggaaccggccaacccccggggaaagggggtttgcgtatggggccccaggggggtttttctttccaccagggaaacgggaaacagttgatggcccttaaccggcgggccctgaaagaggggcaaaaagcggcccacgctggttggccccaaaaggagaaaacccgggttgaggggg

SEQ ID NO: 140298 - DNA, 826 bp, Glycine max
  unsure (1)..(826): unsure at all n locations
  Clone ID: PAT_MRT3847_97698C.1
tttactttggaatctgcacaaccactcttcagtacgtaagtgagaggagcaaagtctcacaggacacgttgcattgcgcaggatggggagagacggtgagattgacggcggagtgcggcggagaggatgcacgttcaggcggaacgacttcttcccggaggagtcgttcaagagttggggaaactacgctcgagcggtgctggagacgccgtggaggctgaaggatcgtgtggtgacgcgatcggaggaccagacggagttggtggagatgaaggctcgtagcaaccacgagatgaagaaaacgctgaactggtgggacctcatgtggttcggaatcggtgccgtcattggctccggcatattcgtcctcactggcctcgaggcaaggacggcggtcggacccgccgtcgtgctctcctacgtcgtttccggcgtctccgccttgttctcggtgttctgctacaccgagttcgccgtcgaaattcccgtcgcaggcggatcatttgcgtacttaagagtcgaactgggagactttgtggcctacatagctgccggaaacatcctcctcgagtatgtaataggcggcgctgctgtggctcggtcatggacctcttatttcgccaccctttgtggcaaacaccctgatgactttcgtataatagcccacaacatgaaccccaactatggccatcttgaccctatagccattgnagtcctcatagccataactatccttgcagtgtacagcaccaaaggcttcttcatcttcaacttcatttgccacaatcttcacttaattgncattgncttcatcatcatcgcaggc

SEQ ID NO: 140299 - DNA, 481 bp, Glycine max
  Clone ID: PAT_MRT3847_97699C.1
tgattttggtaacagctagccagattaaagaaccaaagttttcttttataataagtagtaacgtgaaaggatcgaatgactcatggagagaacagagttcacccttttatttcttgttacttgttgctatttgctatccttgtttcctacagctttggaagcagaggatgcaataactccaccacaaaccatcagtggctaccagacactagtctcaccttcccaaaattttgaactgggtttcttcagtcctggcaattccactcacatctatcttggaatatggtacaagcatatcccaaaacagacagttatttgggttgcaaatagagacaaaccattagttaactctggtggctccttaacattcagcaacaatggcaagctcatccttctcagccacacaggaagtgttgtatggtcttcaaactcatctggacctgcaagaaacccagtggcacatcttctagactctggaaac

SEQ ID NO: 140300 - DNA, 763 bp, Glycine max
  Clone ID: PAT_MRT3847_9769C.1
agaataagaggcacacacaagttgaaatgaacaagaaacacattcaagggttttttcaagtgagttggggtgggttttgaatttttgtttttccagaaaatgggctttcctatgcacagtgggatcctccaattcctgagattctacatccaaaatcgtgcaatctcactgatcacaccaaatttcatttttcatgtagattgaattgcagggagcacgaaaaatcataggattgtgtgatactgctgctcccacaatcaaaattgcaattttgaccacaatacccatcagacaaaaacaagaacagccagcttccacccatttcaaaaaacatgtcatcgtggtatgtcaaggttattagaatttacaaatagcagagatagaccattcatgctagcaatagtaaacataattcttgagcaaacatacttcactgattatctatttttctactgcaccaccacacagaaacagcaaacaaaccttacaagtccgatcctttgaagctgacacgataatcgcattgcaccctccattaccaataacaacatcagtcacagtcagggtgtgctctgaaaaactatactcataaagactacttgcttgctgatttcgcaaatcatcaaatatcctgaaccacaaaaagtagagcagcatatgccatcgtaattagcactgcaagcacccaagcagcacgctatcctaaaaggaaaaatcactatgaaaggaagaaaaatagaaaaagggagagactagtacatga

SEQ ID NO: 140301 - DNA, 892 bp, Glycine max
  Clone ID: PAT_MRT3847_976C.1
gttcattttttagccttcgtaatctgaatttttcttgggtttttagtattaaacaattatattttcctgttgtgtatgggattataaggctcgacgggtaaaagtgttgtcccaaagaaagagcatctttctcctttctttcatcaccgttggaagagactgagatgggttcaaaaaccaagacttttacctttgaggaggtggctaagcacaatcacaggaaggattgctggattatagtcaaagggaaggtgtatgatgtcaccccatttttggatgatcatccaggaggtgatgaagttttagtgactgcaacagagaaggatgccaccactgattttgaagatattgggcacagtgattcagcaacagagatgatggaaaaatactttgttggtgaggttgacaccaacactcttccagcacaagttaccagcagcagcagtgtacgcccaccaacacaagcacctgtctataacaatcaatcttctggatttgttgtgaagatcttgcagtacatagtgccattgctgatattggcctttgcatttggcctgcagtactatggcaaaaaaagcaagtcagaaaattgaacttgagttgtgaccattgttttagtacttctattattcataagtctctaacaacagtgtcctagtggcaatagactggtgccattgttgtttcttttctttttggggcatcatttaaaagtacttcactatctcaaatatcatgcggggattaattttgtatttttcatgtgttgtggcctcttgctcaagttatgcttgttgttcatttaaacccaatctagtatctcgtgaataatattttgaaatagattctattaaacctagtaactggagtacattatatgctaaaaacaaaa

SEQ ID NO: 140302 - DNA, 133 bp, Glycine max
  Clone ID: PAT_MRT3847_97700C.1
tacacctcttcgaagactacaaaaggattcccaaatccaccacacatatataggcgccgatctttaaaaagaaactctaaagcttcttctacccatatattctaattaaaaccaatccataatttatcacaat

SEQ ID NO: 140303 - DNA, 343 bp, Glycine max
  Clone ID: PAT_MRT3847_97701C.1
ctcactcactcttcaatgccccgagtccacgttccccagctgttgcagccaccaggtcgccgtcacacatgccgcaccaccttcgcgtaagctgccgcgaagttgctttcgtggctgccgtcacctatatagaaaatacaggcattgttttccagggatacacttcagatcaaaggagggcagcctcccttcccgcgactgatgattaggtggatgactatgaagaacctgatgctagaggacacgggaacacaatgctttgataggatgtgacattagggtataagttctatattaattgtatgaagttttagacgaccttgttttgagccgaagtgaattt

SEQ ID NO: 140304 - DNA, 162 bp, Glycine max
  Clone ID: PAT_MRT3847_97702C.1
acgctcacgattcatcatacgcgtgaatgacctcgtggctcgacgcacccgttatgtacctagtctggggtgaacctcgctgccatgctgcatgtccgaagctcgctatgaggattattgttaaagctatgtgcctatatatggaactcgatacagacgcat

SEQ ID NO: 140305 - DNA, 325 bp, Glycine max
  Clone ID: PAT_MRT3847_97703C.1
ggggcaaacaaaaaaacaggaccttggtaccccgttttgggccctgggaaagaggggcccctaaaccgaggtcaaaaaaacccacatttttggtggtttaaacccaaattggattcaattaaaggggcccccttatgggaaacccggcccccttaaaatttcaaaaaaaactaaacataatttccaagacccaaaacaacaaaaggttcggcacccacaagctaaaaaggggcccccaacccttgggttccttgaaaaaaaaacccgggacaacaaacggggggggggtaaaaaaacaggggggggggacccattgggaacccaa

SEQ ID NO: 140306 - DNA, 503 bp, Glycine max
  Clone ID: PAT_MRT3847_97704C.1
ttcggtccactttatatcccttctttgactttgtcttcttcacttactccagcttctcccaatggagacaagaaaccaagaagagtatctccccatcttcttcctcttttgattcatcaacgctgtgaggaaattaagatgagtaagaacaaagcgagtggtttaggagttgaagaagtacggggttgtgcaataggggaggaactcaagtttttcaagagtagtactagtgagcataacatcaagctggagttgggaatagggttgattaaacaaccagaaaagttagatttggagctacgattggggcactgctagctagcaaagtgtaatttgtcaaacaaatatctgtctgatctgcaagtctgcaacttcaaatttgatttaacttcttgcaccagtaattcgttaacccatttaagctgcttattattctattatgtatttgaagaaccgaccttatattttgtgaactgagctcttctaaatttggttacattttt

SEQ ID NO: 140307 - DNA, 289 bp, Glycine max
  Clone ID: PAT_MRT3847_97705C.1
tacggctgcgagaagacgacagaagggcatatggattatgttctattggaactaacaacaagggacgatgaaggaaaagaggggtgataaacacacgcgactgacgctattgtttctttgaatcataaatttaggggacgaggaaacataaaaatcaggaattacactgttatatataactaataaataaaccagctatacgatgtctagattgagacttattaatgcgtatgatcgatgcatataataaacacttcatttatcttgtatttaaaagtgaagtatattg

SEQ ID NO: 140308 - DNA, 366 bp, Glycine max
  Clone ID: PAT_MRT3847_97706C.1
accagcgtactttaagtttctgatttatttaattgtttgatttctttttagtgatctttgttagtgataattttgctatgctgttttggttcttttgatttctcagtttgattgagtaggctttaatgggtttgtttttcttgtgatggttgtttctttaatcaagaaggtggtgttgttgctatttactaaaccatgagtggatcatgtatttgttagcttaattgaatgcatctcttattctggatgttcactgggttgatttgattctgggatctgtttgttattccatttctcgtacaaattcctagcactaaagatattccctgcagactatcttttttaggaatctaacaaaaggtgaaa

SEQ ID NO: 140309 - DNA, 637 bp, Glycine max
  Clone ID: PAT_MRT3847_97707C.1
gcgcaaaaataccagctagcaggaaaattgggtccatgaggctggatgactgggtcttgtgcaggatctataagaagaagagcatggtaaaagcattggagcacaaagaggcacacccagaagtccaaattgctaatcttgcgcctgcaaatcatgatgttgaacagaaaatgatgaaccttcctaggacttggtcccttacttaccttttggatatgaattacttgggtccaattttatctgatggctcttattgctcaaccttggattttcaaattaacaatggggattagacccttttgtgaaatctcaaccggttgaaatgaacaattatgtagcagattcagggaagtaccaagtgaaacagagtagcaccattgaccagcccatatatgtgaaacaaatgtatgatttgctaggataaaaccaataggaaaaaaaaaaaagagcttggattgttgtctagtcatgacgataggtatcatctataaaatataaaagatcatgaagattctatgtagtattatgtcaaatatatgttatattaaaaattggattttcaatgtctcattgacagtatttgtacataaggacgagtaattaactgcctcttaagatggaaataaaacgaaaagag

SEQ ID NO: 140310 - DNA, 1043 bp, Glycine max
  Clone ID: PAT_MRT3847_97708C.1
atgttgagtctctcagttgcttcaccttcttcttcaaccatttcctttctcccaaagccattcaatggcattcagctccgtcgcactgccacatgctccatcccacccacgaagcgcagctcatttgtgccggtggtggtgatgtctaagaggacggaggaattgaaggaaattagacaaatgactacggaacgaattaacgaagaggttgtcgaccttaagggcgagcttgtcatgcttcgccttcagaaatcggctcgcaacgagttcaagtccagcgatttcggtcgcatgcgcaagaggattaatccaatctatggtcataattttgaatctcctactccatactgtctgaactctttgggtctccgaagtgagagggctcacttagaaacaaattgtcatttgtcgctgacagctgctgaccttatcagagtaagaccagcagttaatttcatggtaatctgggcttggcatacccatcggctactaaatccagaaaggacactactatgttctatgcttggtgattggccaagtatttttcttatatgcatgtttatgagttctgctagatgcacttcagtttctgtgtcaatagatgaacatattgctcgcatgcttactgtgaagcgggaaagagaaattgaggagggtatcaataagaggttgtccagaaagcttgataaaaaatggaagaaaagcattgttgtaagaccacctccgtctttaaagaagcttcgggaggaagaagcagcagcagaagctgcagaaactgaaaaagctgcatgagcttacacataaatatgcaagttacagagttcaatggttaaaattattgttcagtcataattttcttgttcaaatggatgtggttgtcacgtgtataatattatcttaatggtagtaatttatgtttgttcctgcccgaaggttcatgccttttattttgtgacaaaagatacatgattcacatccttcaaattaggtaaaacattttttttatgactatcattttttaaattcaaattttcaattccatt

SEQ ID NO: 140311 - DNA, 578 bp, Glycine max
  Clone ID: PAT_MRT3847_97709C.1
ttcgagcttcttctcctccattggttgtcaacattgaggacttgcaacttcattgtgttgttccaccgtcgaggcagcaggaagctgctcctgttgttgaggatgatcctgtggtgactgaagacttacatgcacatgctgaagaagctgttgatgattttgagggacttccaggtggactgcgtgacccatcagtgctgactgactatggtgaccatgttgcagtcatcctatggaatggagagtccccggagaggaagctagagctgagacaatacaatgtcatggggcatacatacgcctatcatggctacaagatatttatcagagtaaatgacatctacgatgaagtcccattgtcgtcagacaccgaccagagagggtggtgcgacaatttggatatgttcaaaccattcctccacagactacgggttcaatgttatcatttgaagatattgacgacaggcacaaaaatacacgaggtcatggaagactgcttaaggatcgctaggggtgtcacagtagatggcaatgtttatgtcaggtcgcgacgaaggcaacacacggatcagccatag

SEQ ID NO: 140312 - DNA, 276 bp, Glycine max
  Clone ID: PAT_MRT3847_9770C.1
ctcctccttagagctaattttaacaaagcaggagttttttgcagttttgccacttaacgcgtttatgaagacaacttatttttaccttatattgatgagctggatgattggcccttgctcatgtgaacagcttattcttaagcagtgtattaattgcataggccaaatggcggcgattttattttcaccctttccagacaaagcaaagctttcctgaggccaggggggggggcccatcccagcacagggatctgatatgacaaagtcagcaccctt

SEQ ID NO: 140313 - DNA, 1152 bp, Glycine max
  Clone ID: PAT_MRT3847_97710C.1
atggtggcactgttctcatcttcttctttgttggaagttcgagcttcttctcctccattggttgtcaacattgaggacttgcaacttcattgtgttgttccaccgtcgagcagcgcacgtaggcagcaggaagctgctcctgttgttgaggatgatcctgtggtgactgaagacttacatgcacatgctgaagaagctgttgatgattttgagggacttccaggtggactgcgtgacccatcagtgctgactgactatggtgaccatgttgcagtcatcctatggaatggagaggaacgtcctgaattgaagttatcctcccatggaaggaaggttcagaaatttgggaggcatgttcctgaaattgaaggactagtcgctgccacaggattaagtcctttgatcccatgcgcattccacagctttgagactctgcatgtcgatgaagcaatcttgatgttggtggagttacttgaagtccccggagaggaagctagagctgagacaatacaatgtcatggggcatacatacgcctatcatggctacaagatatttatcagagtaaatgtgaggccgaacattggactgttgcagctcgtgcctatctgttgcattttttaggttgcactctttttgctaacaagagttgttggatatatgagcatttttcctctattgctaagtgtttgactgatccagactatgatgagatgtcaccacgtgcctgccggtggattgctacgaaggcttcttcgaagtcattaccagcatcgaggtaccagaaacgtctagatggactgacaattgttgatgtttgctggatgccatacgcacagcctgttgatctggctagacatccacctgtgacgcaggatgacacatatgtggagccacatatccctgaggtcccagtggcaccagcagcagcaccgacacatgccccttctgatgaggagcagcctagacatgcaatggaggcttgccaagaaatcgcagaaaggtttgagcgtttgctcaacctaaggatagtcaatgcaggcacaaaaatacacgaggtcatggaagactgcttaaggatcgctaggggtgtcacagtagatggcaatgtttatgtcaggtcgcgacgaaggcaacacacggatcagccatag

SEQ ID NO: 140314 - DNA, 479 bp, Glycine max
  Clone ID: PAT_MRT3847_97711C.1
ggaagtagtcctaatgcagctgatgttcctactttacttggatatggttcattttcgcttcttaatgttgatagaaaaacagctgacaaactggtgaagccccctccactttacatgcgttggccacatatgaaggctaatcaggttcaggggctaagtttaagggagattggaggtggttttactaagcaccatcgttctccatccattcgcagtgcatgttatgcaatcgccaaaccatctactatggtgcaaaagatgcaaaatattaaaaagctaagggggcaccgtgtggctgtctattgtgccatatttgatggatccgggagatatgttattagtggttcagatgatcgtcttgtcaagatttggtctatggaaactgcattttgcttagctagttgccgtggacatgaaggtgatattactgatttggctgtaagctcaaacaatgctttggtggcatctgcttcaaatga

SEQ ID NO: 140315 - DNA, 258 bp, Glycine max
  Clone ID: PAT_MRT3847_97712C.1
cgggggacgatgaatcgatttgataactaagatattgttactcgtgatattgatccaatttgacatcatcgaaatccactttataccattggtgaagtaattatccatgaccgatttatcatctctatgggattcaatcccgcattttttaatggaaatttaacacaaatagaacataatatagattatggaagtcaatagtcctgcatttactgccactgcactgtttattctacttcccactggcttttttactta

SEQ ID NO: 140316 - DNA, 287 bp, Glycine max
  Clone ID: PAT_MRT3847_97713C.1
gaaaactaaaattttttgctattactttccacttaaaaggaaataaatgaatgataaatacggggaataacagagcttttatcataaaccaatttgtatcggtgaatggataacatcctgagatatgaaccgagaatctgaagtgacgggcaatgatgaacgatgtgtgtattcctgaaaatagtatacagcctgaataaaatgaataaaagtgaaaaaatattctcagtcaaaactattggatctaaatgacccagaatttctcttagaaaagagtctcacaagat

SEQ ID NO: 140317 - DNA, 1051 bp, Glycine max
  Clone ID: PAT_MRT3847_97714C.1
tcggtaatccatttgtcaaaataaaggtagcatttgatagacaggtttgaataggatgggaacataccatatgacttttatttcatgtttggtacaatttggaaattatagaagttggaacaaaccatgaggttggaaaatggtacattctggttctgttgaaaagtatggaaccaaggagaaaggaacagaataggatgttccatttggttttgtttgtgaagcaaatgctacagaattgctctggtattcattattattgtttgaaacaatcaaacatagagtacaaagcctgttgttgattaggggtaaaagataaaatatatgctgtggttgatattctgttaatgggaatgagtgttgccattcccttgtgtccattgtcactccctttgttaatgaaactagtagtttaaagaatttatataaaatttaattaaataagagtggtaatggcaatagacatttactctgttttgcgaggcttatcttttttgatagttacgagggaggagtacaaaacgactgaggtagagaaaattctgcagtgcacttactaactagttgactctaaacgataaaaaaacattcctgggctagggcaaaggccgtcagaatagtgaccagcttgttagccattttgaagttttattattttcataaaaatttgaagtgattaagagctggaagcagtttccatttttacaataaataccatatgcttgtctctttcaggcttaactctgcgtggtttcattgactggccattggaaatattaaacattgaaccattgcagaattctgtattttttttgaaacgatttatccagaatcattggttatgcaaaaaaaaaaaaaaaaaaaaaaaaaaaaaaaaaaaaaaaaaaaaaaaaaaaaaaaaaaaaaaaaaaaaaaaaaaaaaaattaagaacaaaaaaaaaaaaagaaacacagaaaaaaacaatgacaaagggggtccccaccataaatagtgtgtgaaacaagggaaaaatgggtgggggggcgccctttgggtagacctgtccccccg

SEQ ID NO: 140318 - DNA, 302 bp, Glycine max
  Clone ID: PAT_MRT3847_97715C.1
ctaatttactactcttttactttcgggaccaacaaagggtagtacaggaatattcacctgttgtcccgaaagtaaaagagtaggaatctaatttacaattaaaatgaatataatttgatacttgaaatagaaaaaacctgaataaagaaaattcagaaaaaaaaaaaaagataacataagaaaaatctatttgcaaatgtattggataatcccaaaagtattaaattaaattgtagtatagattgactaaaattaaaagaaataagaattagaagaaaaaatggaataaaattaagaaaaaa

SEQ ID NO: 140319 - DNA, 857 bp, Glycine max
  Clone ID: PAT_MRT3847_97716C.1
ccacgcgtccgcccccgcatccgtccgcactgaggtgaggtgaggcagccggcgtatgatgaacctctgacgcacagacatcgatgtgccacgtgtacggaaaagatgtgacttgacgatgcgatcgtgcggagcaccatcgtttaacttttccgacaagcacaaaaatcctcaaaaatcttcctttctaccgatcttaccgtgttcctccgcatgattcacaaaacctgctccatcaaacgtaggttcacggtaacgcattcccacttagttactcactcactaggttacgaatcaaaaccgatgttaatggtgttccttttttccgcttcctcgtttcagtagcatgtaaatttctcgagtgagcactgattatttggaagtttcatcggaaagaccagcattgctttgattgttttagtgacgaggagttttcagtgaatagggaaatgtctttccacaatcgagcattttggatggggaagagtcctgagggtttgaatgatggtgacatgacaaaggattcttctagaattgagtccaagcgtgctcatcagtggttcatggatgaccctgaagtggatatgtttcccaataagaaacaagccgtagaggctccgaacaatttgttatctggaatgctcaactccaatatttctttgtggggaaattcctcaggatttcactctttaaatggtcattttactgaacagttatttgccccagatgcagcaactatgagttttgaagacacaaacaccccctctgttagcatagatgataagttgagtgtggaaagaaaggataacgtggatcgctttgggagtgagtcctcttttggtttatccatctcaact

SEQ ID NO: 140320 - DNA, 145 bp, Glycine max
  Clone ID: PAT_MRT3847_97717C.1
acaaattgactatctacacaatcctactcatctctgttctgttatacatcacccacacttgcaccacctccaaatggcagcaccaccaagataactgccacaagcaactccaacgagtaaacctcactcactgctaaaaacacat

SEQ ID NO: 140321 - DNA, 251 bp, Glycine max
  Clone ID: PAT_MRT3847_97718C.1
tacagtttgtattattgtagcagagagatggagagtgatggcgttgaggatgtgcaggtacgtgatggttgcttcgttgcttttcctattggagttcactgcgacagttatagatgcgcgcttacgagtcaagttcattgatccctcatttacgccccaattctgacgccaccgagtacgatgttaattcgacatcaatagcgtgctgtcatagctgtccttgctcgtgatcaatctcttcagggtggcgt

SEQ ID NO: 140322 - DNA, 798 bp, Glycine max
  Clone ID: PAT_MRT3847_97719C.1
gtttaagactcaatggaaagcaaagacccaccaaacccaccaccccaaaacaaccctttcatattcactcctaattcgatgttgcaaaaccctaattgggaccctcaagagcaatcagggctatgtgacattgattggggtaaccttttctctgcccaaaacggcttattgcttaatggggatgctaaagatgaaattgaatgtgcttcttctttttcttttgtggctcaaaataagggagtttgtgaagaggaaaagggaaacaaggagaaaaggaaaggtgggaggatgaagaaaacaacacgagtgccaaggtttgcgtttcaaacgagaagtgcagatgatattttggatgatggttatcgctggaggaaatatggtcagaaagctgtgaagaataacacatatccaagaagctactaccgctgcacgcatcacacgtgcaatgtgaagaaacaagtgcaaaggctatccaaagacacaagcattgtggtgacgacttacgagggaattcacaaccacccgtgcgagaagttgatggaaactctaacccctctcctcaagcaaatacagtttcttgccagcttgtaacgtggaactggtttctctcctacaactacatgcatatcaagcacatttcgtttatgtttaaatatcattagttaatcacgcacatgtagatcaattgctgtaagattattttaacctaacaataggtgttgagttcgagtactgaatctattaattccttggagagtattgaatctattaaatattaaataaaaaaaaaaaaaaaaa

SEQ ID NO: 140323 - DNA, 105 bp, Glycine max
  Clone ID: PAT_MRT3847_9771C.1
cggctcaagtgcggtttatgatcgagataactgggaacattgtgatgaaaatgagaggtacttgttttcttagaagctccaagtttcttagcataggcatgccgt

SEQ ID NO: 140324 - DNA, 1082 bp, Glycine max
  Clone ID: PAT_MRT3847_97720C.1
gggtataagccgaaaacatagactcagacatacaacagatactgtacgagtacacatgtgacagcaatgacaccagcgccaaatccaccaagctccccccatcatacaaaccaattatgaggggccaaaaattagacgcctttgctgctgctgctctatgcaacatgaacctagaaatcgttagtacatagacatggatggatcttgaattcacattctgcaccatcatcatcatcattacattttaaataccccaattcacactaactttccccccccccccaacccctattttttttttcaactgtgtactgttttccttcacatgatgatgactaacaaactaccagaatgacgtgggagaacagtcataattggattcaagaggcgaacaacaagttgcttcggtgttcctgagtctgttcagtcatttgtagcatcaaagctacccatggcgtttgccttcttcttctctctccagttctcgccccacacttttgcctctgcaaccgcgcgctctctgtccaggtcgcggttccatggagtctctctggttcttgcagtatttacagggctgtctctctgggactcctgcctttcattatcatccaatccccattttctccctgaccccccaccgatgtcaatcctgcctaactcggtcgcggcactcggatccctgctgtctctcttcctgaagtcgggtgagtttctgtgggtggaaggggagccgagccggcggtcagggctgtccacaccgtctgccatgctccttctgtcatccctgatcctaggggttgatgggccaaccctgttggattgattggctgcatttggttcgtatgtctgtgaggccagatatgtgagagcagtcaccacatctccaataagaggccttgtagcagcttgttcctgcagacacattgcagcaactgcaagtgcttggtacagtcctcgcatcgggtaacggccttgaagtagagggtcaagccattttggggaacttcctacggtctttgaatagcggccgtgcccacacagctccattatgcctcgagccgctcgagccgaatcaggctcga

SEQ ID NO: 140325 - DNA, 248 bp, Glycine max
  Clone ID: PAT_MRT3847_97722C.1
atttattttaaatttcagtagattattgttgctggtaatatggaggccattaacatagaattggattttgattgttccccagacctttttcaactataaataactaagtgaaagattttgatcattataaatttaatagcattgcagttagagaggaatttgttcacgtctgtgttctcatgcaacacacactttaatcggtttcaggttgtgacggaatctgaggtcagtgatgagggttctataca

SEQ ID NO: 140326 - DNA, 613 bp, Glycine max
  unsure (1)..(613): unsure at all n locations
  Clone ID: PAT_MRT3847_97723C.1
aacccctctcttcgttttcaccgcctccgtctgctctttattctttctactcctcctctgcctccggaagcgtaaacgaacaactccatcctccaacccccctcacccgttctcctaccccgtcctccgccgcgccacgaactcgttctcgacgcgcctcggccacggcggcttcggccccgtcttctccggcaccctcgccggcgaccccgtcgccgtcaagctcatggactccgcctccctccagggcgagcgcgagttccacaacgagctcttgttcgcgtccagactccgctcccctttagtggtccccgccatcggattctcctccgacccaaaacgacgccgtttcctcctcgtctatcacctcatgcacaacggcaacctccacgacgccctcttgcgccgcaaaaccccccacctcacgctctggaaaaaccgcttctccataatcctcgacgtcgcaaaaggaatccactacctccactccctcgaaccccccataatccacggcgacataaaacctagtaacattcttctcgacaattccttctcagcnaaactagcagactctggcctcgcgcgcttaaaatcggagatagaaagattcaaa

SEQ ID NO: 140327 - DNA, 807 bp, Glycine max
  Clone ID: PAT_MRT3847_97724C.1
aggtttgcctaatggagttgttccagagaatggtctagatcgccgtgcaggaaaaaaacataaacggaaaaattcttccagacaagttgatggaaagtttgaacctgtttcatcaggacaggagaatattgaagatacacatactgattatcacctgagagagcaattcaaacttaatagcaatcaagatgttaataatgtgtggcaaaataatggatcaaaggtgatgggagagttgcaagtagaagatgcagaggaggaaagattccaagctgatcttaaaatggctgtacgccaaagcctggacacatatcaagctcgtggaaattcacattctgtttccagtttaagaatgtcacagagagcttcttcataggaggatagtgtggattgcctgcctgtggaggactcaactgataatgtgaatggggctacattgcttggtactggactgaagaatgaagtgggtgaatataattgttttctcaatgttattatacagtcattgtggcatttaagacgcttccgggaggaatttcttggtagatcaagatcagagcatgatcatgtgggtaatccttgcgttgtctgtgcattgtatgaaatctttactgcattggacactgcatcaaaggattcaaggagagaagcagttgcacctacatccctacggatagctctaagcaacctgtatcctcacagtaatttcttccaggaggctcagatgaatgatgcttctgaggtgctggcagtgatatttgactgccttcatcagtcatttactcgtggttcaagtgtttctgatgc

SEQ ID NO: 140328 - DNA, 348 bp, Glycine max
  unsure (1)..(348): unsure at all n locations
  Clone ID: PAT_MRT3847_97725C.1
ntgccgaattaatgcactcctttctttgtctagcggacaacggtatctttataacnncatcnnaagtacccttgcnntgctgcgttcnctgagcacaaannaatttgctttcaaacgacggtcnctcgagtntctttggtaccactttactcgaagacgagtnnntcccctttggatactttttcaaaattttacccccgcgttttaatcattatgctcgttatacgcccctaacgtatgacgaaatcctgaagttcttttgtactttttccgaagagaaggttccccttgggatacctttcaaaattttacacttattttaatcaattttcctgttattatcgtatg

SEQ ID NO: 140329 - DNA, 882 bp, Glycine max
  Clone ID: PAT_MRT3847_97726C.1
cttaatcactagatttttcttctccctttgaaaccctagcgtagctcttatacctttcacatctttcatccttttcatatctcatcgtgctaaatctcataacatgacttacctttttttggatatgtaaaccaaaatcttcaatcattgagatcaatatgaacatcaacttgcgcttgatcgagagattctaaagatgaagattcaagaaattaaaggtgtggaagcaacaaaggaagatgaaactaactttgctttgtgggaggcaattagagatatggatgcaaacaagcaccagaagcatgatgagggattagattgtctaccagacgaacttcttcaagagattaaattctatatgtatgattaaattctacaaatttaggtttggatgcattaattttgtacattgtggttttcgtggttcataaagattaaaacaagttaggttttgatcatataaacttagagttagttttggacagaagttttaatggtctgcgtcattgaaataaaagtttaaggcctagtgaaattgtattataaatctccgccaccactgccaactttagtgttcattaattcaatatcattggaggaatcgaacgtgcgaacctcgaggcccgacctggtatggcccctagtgggactcgaccatggaaaatctgtgatctctagaaacctcactggagctgacaacaacactaagggtggagggtgaacaaggtgaagcggcatggccaacaaaagggacgagccacacaatgcacatcaaaggcagatttattcgttcaacccaaggtttaactatgaattttttaactgcaacaatttaagtgtatcctattggagttaaaattacccattgttggaattggactt

SEQ ID NO: 140330 - DNA, 871 bp, Glycine max
  unsure (1)..(871): unsure at all n locations
  Clone ID: PAT_MRT3847_97727C.1
ccctcgcgttcgcccacgcgtccgaaaaggccggcgggaaagacctgaaaagcaaaaagatttccccacgttaggccacacaagaaaacgacttcaatttctctttcctaacctgcaaaaaccgtcacgcaagcaattgtgcgtttctgaagcgagaatttgatttgtgagagtggcattcaagaaccacatcgcaatgggaagtgaagagatctcaacctcgctctgcgaagacattcccaatctcctctcatcattcgtcgacaccttcgtcgatttctcagtcagcggcggtctcttcctgccgccgccgccgccacctccgccgctcccaacgcgcctcccctcaccgccgcgcctggtggcaatcggcgacctccatggcgatctcgagaagtcgaaggaggcgctgcgcctcgctggcctcatcgacgtcgcggaccgctacaccggcggctccgccacggtggtccagattggtgatgtgctcgaccgcggcggcgacgagctcaagatcctctacttcctcgagaagctgaagcgcgaggcggcgcggcgcggtggccggatcatcaccatgaacggcaaccacgagatcatgaacgtcgagggcgatttccgcttcgccacactacccggggtggaggaatttagagtttggtgggaatggttcgaaatcgggaacaaaatgaaaaccctctgtcacggtttggaaaaccctaaagacccaatggaaggtattccctcttccttccgcggcgtgagggaagagttccacgacgggtttcgggccccggtcgcggcgctgcggcccaacggcccaattgcgaaaaggttcttgtcgcanagcgtcaccgttttggtcgttggg

SEQ ID NO: 140331 - DNA, 161 bp, Glycine max
  Clone ID: PAT_MRT3847_97728C.1
ggacccgggtaaaatttctttggttctttccattaagagaatattttttatacataatacacaactcagtacactatatgcctatcccccggtatattacattggattggccaaacattccaaggggagggaatcaatataccgcgaaattttcatttttc

SEQ ID NO: 140332 - DNA, 819 bp, Glycine max
  Clone ID: PAT_MRT3847_97729C.1
agcaaaagctctggctcgagggaagactttgttagagaatgatcagttgtgtatagagcagaggcaaggtcgagtctttgaaggatggaatgaagggaaaatatattttcctccgacttataagtattcaaacaattcagacagatatgcaggtgatgacagacgctcaaaacaaaagagaagaactccagcatggtgtgatcgtatcttgtggtatggaaggggccttcaccaattatcatatgttcgtggggagtcaaggttttctgatcatcggccagtgtatagcatgttcttggcagaggttgagtctgttagctgtaaccaaataaagaaaagcgccagttccaggattgaagtagtagagttgtttccacattcacattgttacagctacactgatatgaactacttttgatgaatgccaataattcttattccatgagatcaacttggctattttgagggaactgaaacagctcagtgtacaacacaaggtacgcattacagtgagtcagcaattgccagccacaatgatgatcgagacattctgttatcctcactttcaaacaagctgcagcgattcacctcaacaagaaaactccattaaatatcatctgccttgttcaatcatcctttagaatcttacaacaaaccaaactcggctttgccattaattgtatttcctacaacttcaaaattcaatgaaggccaagatccaatatgcgcaggacttctaactggtcttggtcatcaaaattagttagttaattgctaattgaccaaatagtttaggtctagccgtacctactttcacca

SEQ ID NO: 140333 - DNA, 609 bp, Glycine max
  Clone ID: PAT_MRT3847_9772C.1
ttatagtgataagttaagtttaagtaaataatgtagttataaatttagaatatatttgtattagttgttagttaataagtagtcaatttatcgatgtggttatatgataattttaatatagtcgtgtatgatgcttatgtactattaatatgtttgttatttaaggtgtagtaaatttttggatgtggttatatgataatttgaatgtacttgtgtatgatgcatatgtccttaagatggacgaagatcaatggaggtatgactttgcgatgtcacaagaagttcatatggattatgattatgataatcaagaagaatgtggagtaaatgaaccacatgtcgattgttcaaatgcttttaatacatctcaggtaatcatagataatttgagtcattggttgaattgatggtttgtatgaaaattaatatgttagggttgcgttgtaggtattcgctactcgagatgatgttttgcaatgggctcgaacagttgcccatgaaaatggatttgttgcagtgattatgagatctgacacagagaccggtagcagagaaaaaaagttcatttgtgttaattgggtgtgaaaggagtggtacgtacgagtgtac

SEQ ID NO: 140334 - DNA, 181 bp, Glycine max
  unsure (1)..(181): unsure at all n locations
  Clone ID: PAT_MRT3847_97730C.1
gtacccatccagtnaacaatagaaataacatttacgaaaataagtgaaaaaagaaataatgggtnngctttcactgagaagcaagaaggcttttggtcgcagtagcatcattcnngaagcattcannaggcaaacattttcctcannatacagcnngttcgtgttctanncacttcgatac

SEQ ID NO: 140335 - DNA, 182 bp, Glycine max
  Clone ID: PAT_MRT3847_97731C.1
gttttcaaaccaattatcgaagccccgcacgtgacctgacgtccgactgggtccaccacccttccactcacacctccttccttccccaacttgacacctttctttacccctcatcaactccctcctccctcttgcattcgttcgcgctgttccattcgcactcacatcgaaaaccgagccgc

SEQ ID NO: 140336 - DNA, 205 bp, Glycine max
  Clone ID: PAT_MRT3847_97732C.1
acaacagaaagcgaatgataagccaattaaagagcacaaactcaaccagattttgacaagaaaactctacctcaatctgcgggctctgcgagagacaaacaccccttaactaaacagtgggatttagaggttcatatcaagaacagccttctttaaactattcacgtttcggaaagacaaccactgtacggagggagctgggaaa

SEQ ID NO: 140337 - DNA, 256 bp, Glycine max
  Clone ID: PAT_MRT3847_97733C.1
aacaccacacaatagcttattcattaggccgcatccattaatttgcattgaagcccgaaaacagaagccaaaactacaggatgctgggaccgcataccgcaaagacaaatgggaatgtactttaagtacaacaaacaaagtggggcggctgcatgatgctttgtaaattacatcagcgacttacaagcctgggggctagaaggcaataaagctgatgcacctgaacttagttaactgtgggcacattcaacgatac

SEQ ID NO: 140338 - DNA, 220 bp, Glycine max
  Clone ID: PAT_MRT3847_97734C.1
ggaacctgggcgagctatttaccctgtgccacacttcaccgagattacgcttaaaccggattgctactgtgtaagctaataaatgttgcctaaccggtgcgttgtaaccctcaaaggagttccttacgattgcctaacggtgactttaatggctgaccctgacgttctttagcatgaccaccttagcattactcatgaccctagagatcgagatgctgtt

SEQ ID NO: 140339 - DNA, 491 bp, Glycine max
  Clone ID: PAT_MRT3847_97735C.1
aaacaacccaaccctttttaaggattaggccataggcaaacatcaattacgaaacccacaacacaaacccataaaagggggaagggggggacaactcaaaacacaaaaattgggttcccaaagggggccaaaaataaacggggggaactatcccgggggaaacttgggaacgagggggcccgagccaaccggaccaaggtacctggatctttcacaggcagggaaaaaaatttttttattttttttttaacaggactgggaaacaaaaaggggaagcagggtggggccccaaataaggggggactcgttttggggacccttattgggaaaaaccaaccccacccttttaattcaaaagggggcactaaccaggctggggggggggggcgactttttttttaggcgaagacacgggctaaggaagaaggagggataggggcgtttatggggggggggaacggtgagcactggggggggggtgttgcgggggg

SEQ ID NO: 140340 - DNA, 1705 bp, Glycine max
  Clone ID: PAT_MRT3847_97736C.1
gactggtcggacccactcgtccggctttttgtatgtccaaatgagaaaggatagatttcagaaaccccagaaggttgaatctatagtaaaggaagagggtgaaatgtctgacaatgaggaagtatatgagcagtttaaggaggtaaaatggatggaatggtgtcaagatgtgatggttgaagaaatgaaaactttgaaacgtcttcacaggttgcagcaaactagtgccaatcttccaaaggaaaaggtgctttcgaaaatacgcaactatttacaacttcttgggagaaggatagatcaaattgtgttagaacatgaacaggaaccctataagcaagatagaatgaccgtgcgactgtggaaatatgtctccactttttcccatctttcaggggagaggcttcatcaaatatattccaaacttagacaggagcaagatgaggcagaggttggcccctctcacacaaatggatcggtatctgtttcatttagcagaaatggaaatccattccgtttccatatggagaggcaaagaggattaaaaaatatggctacctatcaaatgccagaaccagttgataatactgggaaatctgaggcatggaaacgaagaagaagaactgaaagtgacaatcatttccagggtcagccaccacctcaaaggaccttaagtaatggaatccggattactgatcctaactcactcgggatcctaggtgctgggccatcggacaaacgctttgctagtgagaaaccttataggacacaacctggtgggtttccttcaagacaaggcttctcttcaggtataaagtaaccagcttggtggggattagagtggctgattacaagagtgttggctgttggctttcactctgcatttatacagcttcagcaattgtacattctgtggaatttttttcttccacccatgcgaataagaccttgcggatccctttttggtgtgttttggcggatatgagaaatatccctacactgggattcacatccttgaagatggctgaagccgaaaagatctaatgcaagatgaaaaactagtcttgccaattgtttctttttcctttttgatttctactccttcgaagatatgaccaagcaaagtgacatggcgaaaatcttgaaaagcgaagagttttacccacttgctatagacatacttaggaaactgtacattgtcaattctgcaattttattcgattttactgctcaccccataaagtattatgttagctgatgtagacaaaaaatgtattggatttttgtggtaattatagctttaattttcgagaaaatgtagctccttcaagtgagtttcattagtgaatagtgaattaaaagtttttttttttttagtcttgccaattgtttctttttcctttttgatttctactccttcgaagatgaccaagcaaagtgacatggcgaacatcttgaaaagtgaagagttttacccaattctatagagacatacttaggaaactgtacattgtcaattctgcaatttattggattttactactcacttcataaagtattatgttagctgatgtagacaaaaatgtatttgatttttgtggtaattatagctttaatttccgagattttgtagctccttcaagtgagtttccttggtgaatagtgaatgaaaagtgatttttcggcttatggcctaaagtttctttcc

SEQ ID NO: 140341 - DNA, 238 bp, Glycine max
  Clone ID: PAT_MRT3847_97737C.1
atgccttcaattttcttctggagatatttataaggatttgattcttctgcctgttttgttgtgttggcttctctagatatatgatttattggcagataagaagcatggaacacatgatcgagcatgaaactttacctctaaataaagaaaagcaattgatacgcgagatcaaacaattgaagcagaatcgtgaggagttgtcttctaatatgaaaaggccagatccatcacaacaatc

SEQ ID NO: 140342 - DNA, 274 bp, Glycine max
  Clone ID: PAT_MRT3847_97738C.1
gcgaagggaaaaagggatacctttaaatgccatggttggggagggaaccccgcctttaaaggtttccaaccttacacaatattgcaacaaccaaaagacttttaaaaaaaaaagcctttcttttttaaatttttttacccacaaccttagccaaatgttaaaacaaaccgccctttttttcacactcttttaatccgaatgctgaacacactcaaaactaatggcgctatttatgaaagctccttaaaacttgaaagaaccaaaagccggttta

SEQ ID NO: 140343 - DNA, 449 bp, Glycine max
  Clone ID: PAT_MRT3847_97739C.1
ccaattaaaggggcccctttacctcaaatttttagaggaagacggcccattttgaaaaatttggtaaattcttttcaacctgggctttttttttttgcccctaaaactttgaaatttctaaaattgttccccgcaagtcccatcacaatttttagcattgggatcagcacacccttaaggaacaaaaatttttactggccaagtttgctttgcctccaattcaaaatgggaaaaaagtccccctgttaataccatcctggttagcattcccaagggcaccctttttaaagtccttgccacccaatgggacttttttgacatttttttgttttgggacaagcttgttcccatacgtaaaaagcttttccaaagtcatttggggctgctaaaaggtgggaggcccttttttggagttaaaaagttttttcccaaggccgtaaacaccaaca

SEQ ID NO: 140344 - DNA, 281 bp, Glycine max
  Clone ID: PAT_MRT3847_9773C.1
atttgtatgaatttaaaacaagaactttacagaagacacttatatatatacttatctgaattcaatttcatttcttaatggtacaacttttatggactggaaagagaacatgcacattgtccttggttgcatggctctatgttggagatggtcaatcaatggaggtggaatctatatggaatcctaaattattattatgtactgattcttacatttggatttaaaagacacttttgttgtaccgacatttaaacagaatttaattgtagtttcttatttgg

SEQ ID NO: 140345 - DNA, 389 bp, Glycine max
  Clone ID: PAT_MRT3847_97740C.1
gtttagtgtgattgagttaaagttgctgaagacaatgagttggacaataatgcaattggaacaatctggaaatccttctatagatattcactgctatgttgatgatgccaataaaattccttaatttacaacaaaaaaaaaaaaaaaaaaaaaaaaaaaaaaaaaaaaaaaaaaaaaaaaaaaaaaaaaaaaaaaaaaaaagggggaacaatttaaaggaagccaaaatttaaaaaacaaagaatacaaaaaaataaaacttaaaataaaagagggcgggccctttttgagggcccccgttttttaaccattcctggcggggaaaaacctttttttacccgccccaaaaacccatttcacggagccgcctttaacaagctggggtttgg

SEQ ID NO: 140346 - DNA, 351 bp, Glycine max
  Clone ID: PAT_MRT3847_97741C.1
ggctcgagtgacgatgaagacgaaaacaacaacgatttcagctttgcgttttacgtgaatcgtgatcaaggagacaagtcgactcgctcctccgaagagctctcccacggtggcaaaataaagccctgggtcgagtcatcacgtgcgactttctgttgctgtacaaaatagtggctgagctcgagagagaagacttgtttaaacaacatcttcaaagcctccgtcctttaactggtgtgtctgaacgtgaggacgcacactttcatctgatagagagcaatgggacgatgaacaacagattgcacaaccatggatcataaatcctgatgactgaaacgctagagacctagc

SEQ ID NO: 140347 - DNA, 453 bp, Glycine max
  Clone ID: PAT_MRT3847_97742C.1
ttacaatcgtgtgataattacgtgcacacgggtactactgatcatgttgattgcagtgggacaatgagaagagacacctgtctacatagaattgagtacaatatgaaagatattgccgatgccaatctgccatgagttattaccctactagcttgtttgttaatgagggtgacctctcttcccagagtgctaacgtggaacttcgagttgtttttctacacccaccaattatatgctggattgattgtcaaatatggccctgcatgttagacgattatgagcacactatggcatgctggcagaatatttctatatgtgctggatcgacaattagagttctgcctatcactaatgacagttaatgtgatctgatatagatgccatacaagtggcactgacgaattggttctggaacatcctagagattgagatacaatgcactaatttccatta

SEQ ID NO: 140348 - DNA, 298 bp, Glycine max
  Clone ID: PAT_MRT3847_97743C.1
cggccgcgcctttttttttttattttttgggcaacgacgaaattttagcctatggactatttgagaacgaaggacatttcgtggtcctactatcagaagatcttatatattaaaggactacacgtcataagttttgactcgaaacgatgcttgcttgaaagcaacacaagggcatatgagagaagacctgtgggttgcctgctttttgttgaggaaataccaggcggatatgggaaagttttaaaatattttataggaaccccaagagcacaaaaatgggttggttgaaacccttctt

SEQ ID NO: 140349 - DNA, 335 bp, Glycine max
  Clone ID: PAT_MRT3847_97744C.1
gttgtggttgttttttttttttttattttgttattggggacaagccccccccaattttttaaagggggacccccgcagaataaacgccgggaaaaaaaaaagttataaacaacagggggtaccaaatccccttcgtcataaaaacctttttatgaacaaatttaaaaacccacgggctttggtttttcccccaaacccacgggtactggcaaaagccaaaagaggggggctctgaaacaagactaggcggaaaacacctttttttattgggggacccaagccccaccacatttggtttaggggggggagaaacttcagcttttttgtttttaaaa

SEQ ID NO: 140350 - DNA, 221 bp, Glycine max
  Clone ID: PAT_MRT3847_97745C.1
tgatatgaaactacgggatagatggaggaagtttgctatcatggctgggttggtgctagaaggatgacaatttgatgctcgtcaatatgatgctaagatgaatgagttacttggaactgatgggcaagatttttttacttcgagtgatgaagtttgtgatagctttgatgctatgggattgcaggagaatcttctgaggggtatttatgcatatggttttg

SEQ ID NO: 140351 - DNA, 201 bp, Glycine max
  Clone ID: PAT_MRT3847_97746C.1
gatatttcccttctgagcattgattagtgtggactagttgttgtatactcgatgagtaaggcttctgccactatgcattgctgaacactgcgactaaggggatccttgatgctgcttgatagctacaggtatgcacctgctgcttcggccacactgacatatcagggattataggaacacagagggaaggagatgatgaag

SEQ ID NO: 140352 - DNA, 223 bp, Glycine max
  Clone ID: PAT_MRT3847_97747C.1
gggttcacgcgatcgagtttgtaaaagagcatacgacatttccgggacatgagtgatgaaaaaggagtgcttctgtggaattgaacagctgatatgcctgatgacacacaccacgaatcaggatggggctgtatggggtggaggggagtcactgatgttgatgtcccaaatccactacattggctaaggactatcaccatttgcacactgcattgaggtaggc

SEQ ID NO: 140353 - DNA, 886 bp, Glycine max
  Clone ID: PAT_MRT3847_97748C.1
atggacctccatcgccggccgccgcccgccgctgacgacggagcaatccaccccaagaagaggagggacacttcctctcccaaggcctccgacgctctccctctccctctctacctcaccaacgcgatcttcttcacgctcttcttctccgttgcttacttcctcctccaccgctgttcctctgtttctcgtttttgtgttcagaccgaaccctagctccgcatcgcaaccatgtcgaccaagcaaggtggaaaagctaagcctttgaagaaacccaagtctgataagaaggattacgacgagattgatgtggctaacattcagaagaaaaaggaagaggagaaggcgctaaaggagttgaaagccaaggcgcaacagaagggaagctttggaggttctgggctcaagaaaagtggaaagaaataagggctctttatcatgattgtatgcattcaatattgagccctgtaattacagttgctaccatgataacttctcttattattgtggcctactttattgctaatgtgtactgaactgaggtatgtcgtgatgtaagctgcaataagttaattgtctgtagctttattgtatccccttcatggggttctgataattacatccttttagtagtgttgtggatttggcatagacttgttcaagtaaataatggcatggcttgcgaaattttatttgtcaattctattactatcatcccttctgttgcgaactgcctaacatttgtcagtgattgatatgaattctcaagtcaatacccaattgtttggatttggtttctagggcaagcccttgcctcagtattttgctacgcagatgtgcccctgaaattcagctgcattgttccttttaaatttgcttaaaatga

SEQ ID NO: 140354 - DNA, 2576 bp, Glycine max
  Clone ID: PAT_MRT3847_97749C.1
acggtgacagtggcgcgagcggttgtggctctcgctgtacacactatccattttaaatcgctcttccacgtccctctctcccacaatggacctccatcgccggccgccccccgccgctgacgacggagcaatccaccccaagaagaggagggacacttcctctcccaaggcctccgacgcgctccctctccctctttacctcaccaacgccatcttcttcacgctcttcttctccgtcgcctacttcctcctccaccgctggcgcgacaagatccgcagccacacccctctccacgttgtcactctgtccgagatcgccgccattttctccctcatcgcctccttcatctacctcctcggcttcttcggcatcgacttcgtccagtccttcatctcacgcgcctcccacgactcctgggacctagacgacgccgtaacagctccctcccccgcaattaccaaattgccctcacgggatacctcaattattttctccgaggacgacgaggagattgtgaactccgtcgtcgagggcgtcacgccctcctacgcgcttgagtcccgcctcggcgactgtggccgtgccgcggcgattcggcgcggggcgctgcagcggctgacggggcggtcgcttgaggggctgccgctggaggggtttgattatgactccattttggggcagtgctgcgaaatgccggtagggtatgtgcagattccggtaggggtggcggggccgttgttgttggatgggtttgaatacactgtgccgatggccacgacggaagggtgccttgtggcgagtaccaatagagggtgcaaggccatctatgcttctggtggggccagcagtgtggttttgcgggattgcatgtcgagggcacctgttgttagattctccactgccaaaagagctgcacagttgaagtttttccttgaggatcctctcaattttgataccttgtcacttgttttcaacaggtcgagtagatttgccaggctccaaggtattcagtgtgctatggctgggaagaatgcttatttgagattcacttgtagcacgggtgatgccatggggatgaacatggtttccaaaggggtgcaaaacgttcttgattttcttctgaatgatttccctgacatggatgttattggcatttctggaaattattgttcggacaagaaacctgctgcagtaaattggatcgagggacgtgggaaatcagttgtttgtgaagcaattatcaaagaagaagtggtgcagaaggtattgaaaaccaacgtgtctgccctggtggagcttaacatgctcaaaaaccttgctggttctgctgtcgccggtgctcttggtggatttaatgcccatgctagtaacattgtttctgccatctttatagccactggccaagatccagctcaaaatgttgagagttcccattgcttaaccatgatggaagccgtcaatgacgggagggaccttcacatctcagtgaccatgccttccattgaggtgggtactgttgggggtgggactcaacttgcatcccaatctgcttgcttgaatttacttggtgtgaagggtgctagcaaggagtcaccaggatcaaactcaagactcttggccaccattgttgctggatctgttttagcaggagagctgtctctgatgtctgccattgcagcagggcagctagtgaacagccacatgaaatacaacagatcaagcaaagatgtaaccaaaatatcatcatcttgaggtcagggacgtggttgcagtcattaattctggactctagaataaaaaaattgagggtaagcggatttagggaaggaaaatggagaaacattagattagattgttggcatccacgtttggctctgcattgctgtctgtttagatcttttattatttggagagaggaaagtagagttatactctagatcttccctgtccccttctggatcatttcttcttttcattgcttcttctgccgagccattcagtgggtgttaacactttttttctcctcaaccaagacatttgacgtgttatattctaattcttttccccctatataatatgcttagcatatctatcattgtagccgaatgggttgatgaatattctcttgtccgctagtgcccgtcaattaagcttgagatcccattgtctcaagtctttatctaattaatgaatgtatttctgtttaagggtaatttttggtcttcctctgtttctcgtttttgtgttcagaccgaaccctagctccgcatcgcaaccatgtcgaccaagcaaggtggaaaagctaagcctttgaagaaacccaagtctgataagaaggattacgacgagattgatgtggctaacattcagaagaaaaaggaagaggagaaggcgctaaaggagttgaaagccaaggcgcaacagaagggaagctttggaggttctgggctcaagaaaagtggaaagaaataaaggctctttatcatgattgtatgcattcaatattgatccctgtaatttcagttgctaccatgattaacttctcttattattataacctactttattgctaata

SEQ ID NO: 140355 - DNA, 129 bp, Glycine max
  Clone ID: PAT_MRT3847_9774C.1
tttttatacactaaaaagactactctttaggcttaaacaatttatatttgcttcgatacaagaaatgaggacgtccaaattaaaaccaaccgtattgatcaagcaccaccaaatcaaaatggcttaaga

SEQ ID NO: 140356 - DNA, 373 bp, Glycine max
  Clone ID: PAT_MRT3847_97750C.1
gagggcactcgttttcgttctcgtccaggtctaaacatctttgcgaacgacgttcacagcgctcacccctacatgcagaacgatgaaggacagatcactgagctttacattcctaggaactgctccgcgcacaacacattgattaccgctaaagatcaagcctcggttcagatcaacattgggcatctcgaagaaaatggagtcgacaatggacaattctcgacatttgccctctgccgattcagccgtgctcaaggtgatactgacagtgctcgacaccgcttgtggcacatcaagacagttgaagttaagcagcagtagacacccacgatagcatgtaacatcgtgaggtatgcatttccactcttgctac

SEQ ID NO: 140357 - DNA, 534 bp, Glycine max
  Clone ID: PAT_MRT3847_97751C.1
gaaggaaaacagcaagatcgtttcattggcaggaccgggcggaccaatgagaggatgagagggagggagagaaacaaatcaagcagaagtagaagcaatatcactaagacagggactatgcacatgcaatactactactggtgtggtttgaaacttgctgggtttcatcatgatacttaaaattgatgtacattcttgagttctggatttgcagctttgagtttttgacgaatacgtgattgacgttgttgtaatgaaatcttttgcttgagtgtatattttttgggtgttgctttgggatctttctttttggtacgtgttccaaagaaacctaattcaagatctccacgtggtttagccggagcagcacgaatagctttatgtgcagctgaatattatttttctaatccatcagctttaatcccagcatcaatattaacgttaaattgacgtccatataacttttcatcattatcttgtaaaatatttatatattcagcaacatgacctgcaaagatatatttacgatgaaca

SEQ ID NO: 140358 - DNA, 757 bp, Glycine max
  Clone ID: PAT_MRT3847_97752C.1
cccaagatgtcttttttctggttctcaaacatggtccgtatgcacctctcatggcctgtactaacctatgccgccacgtggataacgctgctaacgttgatggtggcagcggcgtctatgtcgccgcaggtggcgtttgtctccgccataacgccttcctctaaattctctcagaagtgcagcagtggtgggtccattagaatgcccttggatgttccaggtgacatcctgtgtttccctgctcatatgttcgtgaggtccaaggttgatctaatcgttccacccgtctttgcagcggtgattgtagcggcttctgcttgcgtggttcgtgctgtgggcttgtgggagcatgatcaaactccttcagatgcaaattaactcggtaattggtatttccataccctctagcggcgctgggcccccggcttgtgacatcggtcaatcgctccgggtcacgctcgcgtctattttcttgtgactcaagtttgtcttagtttcggacaaagaatgaataaaacaaaattatgtgtcacgtgttgggtgggcaggagcttcgctgtcccacgttctgtcgtggtcccttgttggggactgcggctgcgagtctcggcctgacgcggtgattcggcttccccgggttcttttctcttggctgagagttcgagctccactcattgattctataaacatgggctcatttgtctttgtaaatcaacacaaagacattgtcagctatgctgtctttgtaatagacttc

SEQ ID NO: 140359 - DNA, 287 bp, Glycine max
  unsure (1)..(287): unsure at all n locations
  Clone ID: PAT_MRT3847_97753C.1
ctcactcacacacntacacactctcnttccatgggtncgtttcggaaaccctnccttgcatntctctgcggttgttctatttctnggtctctatgnggcagcngcagaacagagtnacactcacaagagtncttacattgtanacgtggcganancgnanatgcncgagagcttngagnannacgcatgtggtgagtcgtcantgannagcgtgtctanantcngcgnagatgatttacacctacgacaagncatccacggctacgngacgagattnaacgctgagg

SEQ ID NO: 140360 - DNA, 245 bp, Glycine max
  Clone ID: PAT_MRT3847_97754C.1
ccactcgtccgcccactcgttcggcacatcgttgaaaaaattaaatatcagtctataaatggagaggatgggtcgggtcccaaagctggaggtgacaatgatgcatatgctgatgatgaggacattgaaaatgtttcttaaactagtgaagatgtctcacgcaatgaatatgctagtcataaatgcttactcgaagatcatgattaagatgaaaatatataacatgacaacttttatggtaaagc

SEQ ID NO: 140361 - DNA, 292 bp, Glycine max
  Clone ID: PAT_MRT3847_97755C.1
aacgttgttgttatcaagactatgaacgaacaattgaagatggagctgaagaaggtcaaagccatttggtctaactaccattctagaggattctgagttttcatggataatggaagactcgaatccatggaaaactgatgaaaaaatacagcaagggagcacaacaaatgaacttacaaaatgctacaggaggtactgagaacaaatgcgaaaaagcgttacattgaattaccaaaagattttatttatagagtgttaaacagaaaaaggacccaattcaataattttcaac

SEQ ID NO: 140362 - DNA, 152 bp, Glycine max
  Clone ID: PAT_MRT3847_97756C.1
atcatcctttacacgggtcaagttcatactggataacaaaattaaccattctggctttcctgaacatgcagagcgagaatctaaaaagaatacataccatcatccatggggcacttgaaccttctcattcatctttccactcgaagaaaacc

SEQ ID NO: 140363 - DNA, 337 bp, Glycine max
  Clone ID: PAT_MRT3847_97757C.1
cctgatatggcctaaatttttgtttctaccgcattttcaaaattggaaaaaggcctttttaaaagcactggggggggaaaacccccccaatgagggattttttctaaaattaaccaatgtttcccgagaaaaaaaaaaaaaccaattttttttgccttctttttccccccctttgggggagggtttttcacctatgtaaaacggggcccttttttttttaacctaagtggaacgacccctttggggaaaaaaaaagacccggccctctttttttttttcccaatttttttccttttttttttttagaaatggggggcacccatttgagcacttgggg

SEQ ID NO: 140364 - DNA, 346 bp, Glycine max
  Clone ID: PAT_MRT3847_97758C.1
gaattcggatcgagtctgccttcattctcgaacatctatcataatgctgccttaagttatgctatcttcaagcatggcgctgtctaagggatggcgttctctcacatatgtgtcctggctttacaatttataggtatccatagaaaaaaatgtttcattgtgttatgataatgcacttcacaatgccaaattatatattattgtttgaaaccaactgacattcttacaccagaatgatgaattatttgacaactacgttgataattatgaaactaaagtaactcttttcaacccccaactaaaacttgcatacatcgcacttgatgcattgaaaaaagcactatac

SEQ ID NO: 140365 - DNA, 2367 bp, Glycine max
  Clone ID: PAT_MRT3847_97759C.1
ccacgcgtccgttttttttttcctttcgtcccattctctctcctcttttccttgcactctcatcttttgcttctcgaatctatgacaaatcctccgttcattttggaccaagaaaagaaaagtctcacactccttcttattttttcttcttcataataatattaataataccgttttttgtttttatccacaatttctgtttttatagttttttttcaaaaccctttttcatagtatttcccttccctctgaatctacctttctttctttatacaacccacgcaagcgtccaacctcgcaatttcgattttgtttctgtagcaatagaagaggggaattgattgattgtctctcagttggatcggtcttgcgggttcaatttactttcaaacatagcagatctgggttcttcaaggagtattgttgttctgacacttggtgtccagaagaagggctattttcctttctatccgtgttttgcattgtgtactagagtttgagaactaacttctgatagacagagccatcggattttttttctgctgcatgtggtgtctccttggtggtgccacatcatttcattaatgggggagtggattgttggagctttcatcaacctctttggtagtattgcaataaactttgggaccaatcttctcaaactagggcataatgagagagaaagacatttacttggaagtgatggggtaaatggaaagatgaatctgaagcctattatatatttccagagttggagaattggcattgtatttttctttcttggaaattgccttaatttcattttctttgggtacgctgctcagtctcttcttggagcgctgggatctgttcagtttgtatctaacattgctttcgcttacattgttttgaacaaaagggtgacagagaagtgaaagagcaacaattcaatcatttttccttggttggcatcatgttattgggaaaaaaaggataaaaaaattgttttaaatccaaagtagttgacgtaaatttatacttgtatttttttcattctatacctactagctttgatctcaattgttgccttgcatcactccatctacaagaggggcggtcctctgtttgcagtatcaggacatgacctcagaccctattggagcatgctactgcccttttcatatgctgtagtttcgggggctcgagggttcatgctcagtcttgtttgctaaatcgctttctaacctattacgactggctatgtccaatggttatcagttgcacagctggttcacatattccatgcttcttttatttcttagtactgctggattttggatgaccaggttgaatgaaggactgtcattgtttgatgcaattcttattgttcccatgtttcagataacatggactttcttctcaatatgtacaggatttatctattttcaagaatatcaggtatttgatgcattaaggacaacaatgtttatgcttggaatgatgtgtgtgtttattggcatttctttgctggcacctgatgaatcaaaagtttcaggtcctgagactaaagatagttctttggattccatggtgtcttctgccatatctacagaagctaacaggctggtagtgtctcctgaagaagcacaaaacaaagatacgagatcattagttaaagcaatactaataaagattacagatttgttggtaaaggcaaagactacttgtgcattgtctcttggttttggggaggataccatcaatgcatcatcagttcttgtgatgccaatgatgtcatcgagaatgactggattcagaggtaatgggcttgagagagcaagaattttgtccatgagaaatggttggagaaagatcccaatggatgaagatgctgggaaattgcttgaaactagttcggttgttcctcctagcccttaatagtggttgatagtgtcataggaatgtcccacggtatcattttttaccccttgatttcccatttttttaatgattggagtagctgagatatgaaaccgccacaattcaaatttatttgctttgttagcatcatgttattgggaaaaagaggataaaaaaattgttgtatattgtatatacatattgtaaatttttacttgcacaattgaaatttgaaaggaaaaaaaaatcctatcttgtcttattcgctgatatcccattttttttaatgattgttggagtagcttagatataaaaccgtcataattcgatttatttgcttagcattcatgtaattgggaaaaagaggataaaaaaaattgttgtatattgtatatacatattgtaaatttttgcttgcataattgaaatttaaaaggagaagaaaaaaaaaaaaaaaaaagggcggcc

SEQ ID NO: 140366 - DNA, 181 bp, Glycine max
  Clone ID: PAT_MRT3847_9775C.1
tcgagccgtcttcggctcgagttttagggttcactttgtaattctactaccattacctcactgcgcactgcccggcgacaccggcgccgtcagtgctgaaaccaatggcagacgcatcatctctgccgacgggtcaacttggcgacatcagcctcgacgaggttccgtaagctagtttctc

SEQ ID NO: 140367 - DNA, 184 bp, Glycine max
  Clone ID: PAT_MRT3847_97760C.1
cctaccgttccggaactccattaattacccactcgtccagccacactttcgaccacccgtccaattctttgtatttcaatgttaaaaattcacacatccaatggaggatgttttatatcagacaccaacccttcaccaccaatttcctttctaaacaaattatttgctttttccctcactcttt

SEQ ID NO: 140368 - DNA, 408 bp, Glycine max
  Clone ID: PAT_MRT3847_97761C.1
gggaaagagtctcatattatatacctccatctttatcaactttggagcttgggatccgaaaccgaacgataaatatgtcacacaaataacatattttctcctattttatgggccaactgtaagagaccacattggtagagtctgactgcaaccccacatgtcactcttgcgggaaaatgttgcattcagctcattaataacaactttcttattcctttttaggccagatccaaacgggtacttattttgtttgttgggattgaacaacccacaatgtttctctatctctggactctcgatatactaatcaaacaaggcacatatataagtctttgtgggctataaaggccgccctggtctacctctactagaacgaccaaccaaattttctaaatacacacgtgcgtc

SEQ ID NO: 140369 - DNA, 482 bp, Glycine max
  unsure (1)..(482): unsure at all n locations
  Clone ID: PAT_MRT3847_97762C.1
nattgctagcttgtgctctgctcgtgcctctatggctatcatantgctccatttccatttcctcntctctcagtttccaagaatcttaagctactgggaaagtcttacccaaccgtcgagcgctgattaccagaaggccgttgagaaggcgaagaagaagctcagaggnttcatcgctgagaagagatgcgctcctctaatgccccgtccggcaagacaccaagaaggaannnaccaaannanttctttttttctttctttttttttcttttttttttttttttttttttttcacgaaaagacccaaacacaccaccaaaaaagaagaagagcccagccccacacatacaccacacccctgccccgcaaaccaacccccccccccacccacccacacccccccccccccccccttacccctccgcattccacacccccccctcccccccccccccccccccaccccccctcacccccctccc

SEQ ID NO: 140370 - DNA, 252 bp, Glycine max
  Clone ID: PAT_MRT3847_97763C.1
aattatttacgtcacgcgtgtatgtttgttgatgtatgatcattgatatcaaacaaatgttagcacgtgtttgactaagtgttaattaattgttagtaaaatccattgacttcgaagtgatatgtagatatttttattgtcaaaagttaggaataaattttggtataaaaatattttttttaaatatgccaagaaataccaatcgtcctaaagttactgtgattccaactagattagtacccagtaaaccaa

SEQ ID NO: 140371 - DNA, 3062 bp, Glycine max
  Clone ID: PAT_MRT3847_97764C.1
tttctaattcttctctaccccctcctctaatgagaatactcttatttataatatcctaatccaactaattgataaagatagaataataaagataaagatagaataataaagattagatgatagaataataaagataaagatagaataataaagatagatggccctaaagattaaactaataactaattcgatcctatctcccgtgtaggggctttcttccttctagaatagaccctccagataactggtctatattgagatctgatgaacttaggcgttcaaaacccactccagttgatgaagctagggcagaagtggaagaatcccttggtttatttatttttcaattctcccagtattgaatattgtggaggagtcactctgaaaagctgttcctcattatttacgtcgagttagcagcgctttaaagaagcacacaggaaaaccacttccattgacttgcactccaataaaatttggatcttggatgggaggtgatagagacggaaacccaaatgtgacagcaaaggtgtgggataaagcttgattgtggtcggtgttgatgttactacagttgaaggatgtgctttgctgtttcaattactaaagtcacaaaagatgtttcacttctatcaagatggatggcgattgacctctatattcgggaagtggatagcctcagatttgagctatccatgaaccactgcagtgataggttgtcaagattggcacatgaaattctagaagctaagcatgagaatcgccgtgagaattggaatcagtctgcgaatagaagtctcacacttccaacacaacttccagctagagctcatttaccttctattgctgaaaatggtgaatctcggcatcccagactagacattccagcacctgattacatgcacggacgcgtgggcggacgcgtgggtgcttgatgagttcctacaatttgtgcagcctttgtaaaggttccaaatgattgccagtacactagtttaaaaattaaataacagattacataattttctgattgagctgagcgcgaggacatgttgacaatttctaagtaaattccgttgacaattatttgttgtaattttaaatttggaatctaataaatgcctacatcttctttgaatgttgtggataagcttgagaaaagtcgtagacggttagaaattcttcttgaggatgttgcatgtgactatgatcctttggattactatgaaacatctgatcagcttttggaacctctgctcctctgttatgaatctctgcaatcgtgtggatctggggtgctagctgatggtcgacttgctgatctgattcgtagagttgctacctttggaatggtgttaatgaagcttgacttgcgtcaggaatctgggagacatgcagaagcacttgatgcaataacacagtacttagatatgggtacttacagtgaatgggatgaagaaaagaagttggacttcttaacaagagaacttaaagggaagaggcctcttgttcctgttagtatagaggttcatcctgatgttaaagaagtcttggatacattccgaattgccgctgaactggggagtgattcacttggagcttatgtgatctctatggcctcaaatgcaagtgatgtccttgcagtagagcttttacagaaggatgcacggcttgctgctattggggagttgggaaaagcatgtcctggtggaacgttgcgggttgtccctctgtttgaaactgtgaaagacctgagaggagctggttcagttatccggaaacttttatcaatagactggtaccatgaacacatcattaagaaccataatggacatcaagaggttatggttggatattctgattctggtaaagatgctggtcgctttactgctgcttgggaactttacaaagctcaggaggatgttgtagctgcttgcaatgattatggaataaaggttactctattccatggtcgtggaggcagtattggtcgtggtggtggcccaacatatctggctattcagtcccaaccccctggctctgtgatgggaacgcttcggtctactgagcagggagagatggtagaggctaagtttgggttgccacagatagctgttagacaacttgagatatacacaacagctgtactacttgcaacccttcgtccacctatcccaccccgagaagaaaaatggcgtaatgtcatggaagagatctcaaacatcagttgtcagtgttaccgcaatgtagtgtatgaaaatccagaattcctggcctacttccatgaagccacaccagaggcagaacttggcttccttaacataggtagccgccctacaagaaggaagagctcagtaggaatcggacaccttcgtgcaattccctggttatttgcatggacacaaacaagattcgttcttccagcttggcttggagtcggagcaggtttaaaaggagcttgcgagaaaggttacaccgaagagctaaaagccatgtacaaagaatggcccttctttcaaagtaccatagatcttattgagatggttttggggaaagctgacattcctatagccaagcactatgatgaagtccttgtgtcaaaggagaggcaagagcttggccatgaactaagaagtgagctcatgacagctgaaaagtttgtcatggttattagtgggcacgagaaacttcagcagaataataggagcttgaggaggctaattgagaatagacttcccttccttaatcccttgaacatgttgcaggtggagatactcaagaggttaagacgtgatgatgacaaccgtaagatcagagatgctttgcttatcaccataaatgggattgctgcagggatgaagaatacaggttgaccttgcttctcaaggactatattgtacaagccttccacaattcacatatgttcacccttgttttataataggtttgctaaggaaagattatcatagccataatggtgaatggtttgttctgtactcagatatactgttatataagaatgtgatgcaaaataattaagtttttccagcattttggttcct

SEQ ID NO: 140372 - DNA, 267 bp, Glycine max
  Clone ID: PAT_MRT3847_97765C.1
gttggagcagacgatggtttgttttaaatgagaagactggcaagcttggatacacaaaaaaacaagaagagagacatttccgaggagtgattacattagaggaatgcaatattgacgagattcctgatgatgatgaagcctccacaaagaattccaaggataaaaagtccaacggacctgattctgggaaagcatcaaaccttattttcaagataacaagcaaggtcccatacaagactgttatgaaatctgaaagtgcagttttgt

SEQ ID NO: 140373 - DNA, 236 bp, Glycine max
  Clone ID: PAT_MRT3847_97766C.1
aaacacccctttttgtttgttattatttgcacgccttaaaacgcgcgatgacaaaactaactccgctcccccaacggaaggacgctcatcatcctacaatttgattccccaacggcaggaaagaaccagttttctcagaataggagtggtcaaacgacgccccgcctttatagtaccaccagccactacatccaggagcgcgcccgctgttcgaaaaagcacagcctttaaagcaa

SEQ ID NO: 140374 - DNA, 198 bp, Glycine max
  Clone ID: PAT_MRT3847_97767C.1
gtaaaaagcaagtaacattaaagttggatgggggatacacaagtataattcacattattctgaagtacattgcactaccatatacttaaccaaacacaaatctaaaaactctcaaaagtccacgaagcatccttttctttcatgctcacttgccggggacaaagttgggggctaaggcccaagcattggtgttgactg

SEQ ID NO: 140375 - DNA, 267 bp, Glycine max
  Clone ID: PAT_MRT3847_97768C.1
atggcgccaccgcgggagcacaggcgccgccgcgtccggccaccaggaagggctagtgcgcagtggagggtatcggttgggttggatcagcctgcgccgtttgatcaagatccaacgaacggaggctggtctgggtgttttaaatctggggccttgatcttggatccgacggtggcatgggagaacgagcaggctacacaggattctgaggttcaacaagttgagatagctgagcaggagctcattgaaggcaagttgtgcccttga

SEQ ID NO: 140376 - DNA, 401 bp, Glycine max
  Clone ID: PAT_MRT3847_97769C.1
aaaatacttgggtgaaaaaaaaaattattttttttttccttttttttttatggggtttttttttttaaaaaaaaacacacatttcctgtttttgaatttgtttatgggaaacaaactttttttatttttcccaaaaaaaaatggggggctcgatcgtacctggggtgtttaaccttattaatatgataaaggcttgttttattttttaaaggcggatggcaaaattggtttggaaaaaaggcattttggatttcaattttcaaaagcaaatttggcaaaaatgaaaggaccagctcaagccttaagttttgtaattcaaatttttatttgaaaagctttgtaaaagttcggcccgttttaacgattttgaatattgggtttttggtggaaatttcaaattt

SEQ ID NO: 140377 - DNA, 432 bp, Glycine max
  Clone ID: PAT_MRT3847_9776C.1
cccacgcgtacgcaagttcaagggaggattttgatttcgtggtcgtcaatttctacgagtttggattcatccaagacccacaagctgaagtcgacaaacaccgttctttcttgcaattggagggtcttgacatcaatggaagattatatttgaatgaacaagtatagcgggccatcaaaagatgctatgacgtatgtcaactggttaagaaaggataacaggttttctgacatcttggttcagatatctccatcagaaaagggacatacctttccaacattgaagttgcgttataagccttcattagtacaggcagcacggatttcagaatttgtatactctgaagggaggtgtttctcactatctaaagaatgaaggccctgccgaatgggtaggaaatttatttgtatttgactcccgtctatctctccc

SEQ ID NO: 140378 - DNA, 719 bp, Glycine max
  Clone ID: PAT_MRT3847_97770C.1
gtcttgacttttctatctcttgcactttcttgttttcacattattattattactacttgtttgtgtgtgtctgttctacattgttgcttgctaccggctcgaggatcttggaactgtgacgagatgccacattgattaacaacaacaacaataacaacattagatctcaagttggagtctttgtttggagacacccattatggggggtgtgagtctgagggaatcatggtgtttctgcaaaggggtgagtaagtctgagagaatgaaagctgctatttttacagggaaggctcaggccatggccacaatcgccgccaccgccgcgcctaatggggcttccggcaccgggtttttgatccacaggaaccttctattgaccactcacgccaatcttccgtcggtggtcgccgctgacaccgccgagatccggctgcacaatggggtggctgccactcttgctcctcagaggtttttcattacaagttctgtattagatcttacgattgtgggtttagatgacggggatggagactcgtatgcacagggtcagtaccctcactacttgaagaccagttgttaagctgatctggatctgggaagtgcagtgttttttttaggctacacagagaaacaggagctcactgttggtgaaggaaaggtggtcatagccactgacaatctcataaaactgtcaactgatggaattcaatggagtcctg

SEQ ID NO: 140379 - DNA, 741 bp, Glycine max
  Clone ID: PAT_MRT3847_97771C.1
gatgacatctgggaaacccaaatatggggatgaggtaaaaggagcctttccagatgaccacacaggtagtagaatactcataacaagtcgcatcaaagaggtggcatactatgctggaactgcgcttccctactaccttcccatcctcaatgaagatgaaagctgggaactcttcacaaagaagatttttcgaggtgaagaatgcccgtctgatttagagcctctgggtagatccattgtgaaaaaatgtgggggtttaccacgtgccattgttgctttagcaggacacgttgccaagaaggagaagtcacaaagagagtggtcaagaatcaaggaagtgagttggcatcttacagacgatatggtagagatggatggactggcgtgctatacatccttgcctgaaagattaaagccttgctttctgtattttggaatctatccaaaagacgatgagatcaatgcaaggcaattgatccaatattggatcgctgaaggtttcatacaaccacaaaaaactggaattgcagatacaacagaactggaagatgtagcttacttttacttgattgagctggtgcatcgcggcttggtgcaagtggcaaaaaggaggagtgatgcgggtgtcaagacatgtaggattcatgaacttgtatatgatattctatgtgctctttgccagtggcggagccacacaaattataaagcctgggcaaaaatttaaagatagcaaattcacaa

SEQ ID NO: 140380 - DNA, 606 bp, Glycine max
  Clone ID: PAT_MRT3847_97772C.1
acgcgcgcacgtaccggagctgagttcctggatagagccacgccttcgaccacgctttttatctattatccggcagacccaccagatatacaccgatgttcttgaagattgacaacacattgcttgatcactctatgagagctagggcatatcataagcgaaactgttaatggaaagccatacagccacttcatgctaccaaaatcgtgtctatataaaagaggggggtgggactcattgcatctattcagggtcatgagggcctgaaaaacttgccgacacctagctgaggcagctgattcagtttacattcctaccaagtgtgcccacccaacacaaacacccttgtgcgtccaaccatacaagcgctatgaccccaaacgaactatggcggttgcccactaacattgaggaacctacaccatggtttaccttcaaagggatacaacaaaaggaactgagatggtgagtgaagaccaaaaatgagaaccttcaaatataaagactcctcccacaatgcatagctgacagcaacatgatccaacctaagaggaggaacaacagcattttgacatgctaaccctgtgaatgcgctctcttctaggt

SEQ ID NO: 140381 - DNA, 213 bp, Glycine max
  unsure (1)..(213): unsure at all n locations
  Clone ID: PAT_MRT3847_97773C.1
ctcacagttgaaagtatgattcgtggtgtaacatgggcgcactgtgttgcacgttcgntcacatctggcgcggggagtgtttgacttgggcggggctggtaattgtggttgtggtgtgtgtgcgcgcctggtgggtcttctgtggggtgggtgtaggcttggtgcagtcgcggccgcagacggttgttcttgtgtcgcctgggcctgcccttg

SEQ ID NO: 140382 - DNA, 895 bp, Glycine max
  Clone ID: PAT_MRT3847_97774C.1
ggctcgaggatctatgcagaatcatgttcctatcagcattgtgacataggatcaactttcataccaaagcttcaggggaaatttttggccacggaaaatttcttttacacatcaaagggtcaaggttgctaatcaggtgggaagtattccgcttgattgggctttgggagcttttattctgcaaacagcagctgatgcagatataccgaaccataactggattggcaccattttcagcgatgaatcacataccctcctctcaattattggaatttttataatattgttaacggcatggtctatatctaggtggaggaaacctcagttgaagacaatatacgatctagaaaaaggacgatatattatcacgcgagttggtagataatacttgatggtagaggagatcatggttcttggtttactcatgtggaggcactgctgtgattatgatgaaaatatttatcctttaaaactcgatggccacatcatactattgaaggccacgccatcgggggctcagattgtaaatcattggattttggatgcagtatgtggagttactcttgccgaggaattagtgtagagtagcatgtttttgtgttgtttactggaatccaggaattgagtgttataccaatcgctttactggtttcagataacagtaaggccagaagtggagcaggtcagcctaggaattgttgccagggggaactagtttagatgctgcatccttcaacagaaaacaccttgttatgtggtttttgtaacaaacactgcataagaaattactcaattgatgcttaccaattgctacatacaaaacgaaatcttcattccctgcctgggaagctagttttgcagaagcaaattatatagtacatgatttttttaaaaa

SEQ ID NO: 140383 - DNA, 2541 bp, Glycine max
  Clone ID: PAT_MRT3847_97775C.1
cggtccggattcccgggtcgaccctcgcgtccgccctcctcttcttctacttttcattcttctctctctctaaaccacgcctagagagagaaaactcgccgccggcacccctccggcgatgacatgaccgccgtttccctcactcccttcgtagacctttgatgcgccgatcgaatgcccgcactcgcagcgccgcctccaatctcaacaacaacaacgaattaatggatccgatcaaaaccaaaacccgctccaccaacctcttcgctcgtaaccctaaggcctcgcaatcaaagtccctccgttccataatcctcatctccctctctctctccttcctcttcctcgtttcctactacgctttctcctcgccgatggcgaatttccggtaccggatcatcgtcgacggcgggagcaccggcacgcgcgtgcacgtgtttaaatacaggtcggggagatcgctggagttcgggagggatggtttgaagtcgatgcgcgtgaacccggggctgtcggcgttcgcggaggatccgcagggcgcgggggggtcagtggcggagttggcggaattcgcgaagcggtggatcccgagggagagctggggggagacggagataaggctgatggccacggcggggctgaggatgctggacgcggcggcgcaggagaggattctggcgtcgtgcaggaaggtgctgcgtgactccggattcaagtttagggacgaatgggcttctgttatcacaggttctgatgaaggagtgtatgcttgggttgttgctaattatgcacttggcactcttggaggtgatcctttggaaacaactgggattattgaacttggtggtgcttctgctcaggtgacctttgtatcaagagaagcagtgctgccttcattttcacgaactgttaaatttgggaataccacctacaacctttacagccacagctttcttcattttggcctgaatgctgctcaggactcgttgaaagaagcacttgtattgggagaatttaacttagtgcagcttctcaatctcttcaaaaagggttgcggatagatccttgtactcctacaggatactcttataatgttgaatcatggaagttccctcctagctcagagagtgaaaaaaaccaatatcagtccactgtacaagccaggggaaacttttcagagtgcagatctgtagcactaacactgctacaaaaagggaaagaatcatgttcctatcagcattgtgacataggatcaactttcataccaaagcttcaggggaaatttttggccacggaaaatttcttttacacatcaaagtttttcggattgaggtcaagggcctatctgtccaagttgatgagtgttgggcaagaattctgtggcgaggattggttaaggctgaagaaaaaatatgtctcccatgatgaggaagatttacttcggtattgcttctcttcagcatacattgttgctctgcttcacgacagtcttggaattgctttggatgatgagagggtcaaggttgctaatcaggtgggaagtattccgcttgattgggctttgggagcttttattctgcaaacagcagctgatgcagatataccgaaccataactggattgccaccattttcagcgatgaatcacataccctcctctcaattattggaatttttatagtgttgttaacggcatggtctatatctaggtggaggaaacctcagttgaagacaatatacgatctagaaaagggacgatatattatcacacgagttggtagataatacttgatggtagagcagatcgtggttcttggtttacttgtgtggaggcactgttgtgattatgatgaaaatatttagcctttcgtgatggccacatcatactatcgaaggtcatgccatcggtggggctcagattgtaaatcattggattttggatgcagtatatggagttactcttgctgaggaactagtgtagaatagcaacgtttttgtgtttagtggaaatccagggattgagtgttatgtatgcctctcgctttactggtttcagataacagtaaggcaagaagtggagcaggtcagcctaggaattattgccagggggaactagatgctgcatccttcaacagaaaacactttgttatgtggtttttgtacactgcataagaaattattcaattgatgtttacctattgctacatacaaaacgaaaaatcttcattccctacctgggaagtttaataattaaattatatggtacaggatttttgggaagctagttttgcagaagcaaattatatagtacatgatttttttgaccttgcttcaaagtttaataattagataagatacagtgatccatcatatctcattagtctgtggtgtaagcaactgatataatgcttcgtataacgaaatacacgttatggtatacttcatccgttacatagttgattaaactatgttgactaagaaaatttatttaggtgtttaacattaactttgtttttaaaaaaaaaaaaattttttttcaaccc

SEQ ID NO: 140384 - DNA, 541 bp, Glycine max
  Clone ID: PAT_MRT3847_97776C.1
cacgcgtccgatcaaatctcaccatccacacagaaaaacacactaccaaaccctaatctgaaaccatcgttccctctctttctttctctctctttacattctttctctctctatcaacctccccggaagaagagagcaccgccgataaactccgatcccgtatttctctcctcgctacccgatccagaggcttcaatcctttccccgtcgagatcttgcttcacgcgcctccaacgctggaccacgcgcctgtttccgcctccatcatggtcgtgagcggagggaagggcctcaaacgcgtctacgacttcctcacgttccccacgccgtcgctcgccgaagctgagaacttcgccggtggaccgttccgctccaacgtgcgcgcctttctgacgaagcacgcgcttcttccgccgccgtccgcgctcttcccgcacctgctgacggggcagatcgtcttccggcgcggcgagctcaccgagggccccgacgcgccgggagtgtgcctcgacgtcggcgaggaggacgtcgccagatccag

SEQ ID NO: 140385 - DNA, 1005 bp, Glycine max
  Clone ID: PAT_MRT3847_97777C.1
ggctcgagatttccgatccctgaaattctctctctcttccaattttccaaaacagagtctgttttctcgcgattgcccagaacgaatatttcttttccccccttttcctctttccaaagactgtaagaataatttaatgtgttgtgtgtataaataaatacaaaaaatactgatcccagattaatccaacgacgaccatcaaatctcaccatccaaaccctaatctgaaaccatcgttccctctatttctctctctacaacctccaaattccgatctcatattcctctcctcgctacccgatccagaggcttcagacctttctccttcgagatctcgccccacgcgcctgtttccgcctccatcatggtcgtgagcggagggaagggcctcaaacgcgccgcgaagaagagagtcaccgccgacttctacgacttcctaacgttccccacgccggcgctcgccgagtcggagaacttcgccggcggaccgttccgctccaacgtgcgcgcctttctgacgaagcacgcgcttcttccgccgccgtccgcgctctttccgcacctgctgacgtggcagatcgtcttccgcgtcggcgagctcaccgagggccccgacgcgccggtagtgtgcctcgacgtcgtcgaggaggacgtcgccagatccagatctgtttactgtgatcagtgccgagttttcggttggagcggccatccggtgtgcgggaaacgttaccattttataatcaaagccgatgggagctccattggtgggtaccacaagccgtgtatgtgctgtggagacatcttgcatttgtcagaatccaaatgcaagtcatgcaaccatgtcactaccactgatgatgtctaggattgggtgtaccaccaattaaagaacacgactcatcttttacatggcgtagtacacaccaatggatatgggcacctctttcgggttaatggcagagaagggggctctagatttctttctggtattcatattatgga

SEQ ID NO: 140386 - DNA, 396 bp, Glycine max
  Clone ID: PAT_MRT3847_97778C.1
cggagatattgctcaaaagaatgggcttactttcctcagttattcttataatactctcatgtttgttgtttgttaacttgaattctagatttgtcctactcatttgttgttattgtttatgttccctttatttgataatttagtacgatcaattaagatgtatgtattatttattgtgctgtctttgtattttattcctgtatatttatgcgctttattttattttctattgtactagttaccaatcccctttcaataactaaattgttgtatttctttatttacaggacatgacaacctttgtctgtgtgtgcattcctgaattcctttctctgtatgaaacaaaaagattggttcaggagcttacaaaggttgaaattgacactcacaatatca

SEQ ID NO: 140387 - DNA, 245 bp, Glycine max
  Clone ID: PAT_MRT3847_97779C.1
ctagaaaaattattggaataagaattcgatttccactttcaaaaataacgatttattaactcatatcgtccgggattacagtgcatacaattaaagggggaatataaaaagccgaatggggacaaaaaaacccttttcgctaaagggggttattggtaaaagagaatttacccaaaaaaagcttggtttaaaaaatttgggggttatctaacaataaattacccccaattattttaaagggttta

SEQ ID NO: 140388 - DNA, 370 bp, Glycine max
  Clone ID: PAT_MRT3847_9777C.1
ttttttttttttttttttgggtttttgggttttttatttccgggaaataaaaccaaacaaaaaaaaaacaaaaaacaaaacaaaaccaaggcacaaaagggggcaaaaaaagaccaaagggcccaaaaagacgtaccctatccgcgacagtttaaagagcaggaggcggaataaggacccgggaaaaaaacatccgagccgacccccacaagggcgatgccccagacccagggggtcaaaaaaacaccccgcgccggggatttccccccccgggggggacccccgccgccacaaaggggcccaaggcccccaaatggggcctccaccacctccttgggctagagccaaaaactctcggaaggctgacaac

SEQ ID NO: 140389 - DNA, 617 bp, Glycine max
  Clone ID: PAT_MRT3847_97780C.1
aagttccgaatggaacgtggacttgagaggtggacggtagattgcagctgtggagccaaggatgatgatggagagagaatgttggcgtgtgatatatgtggagtgtggcgacacaccaggtgttctgacatccacgacactgatcctgttccagcacgttttgtttgccagaaatgccaacactctgaatcaaaactcaaatctagtgggcactgcaaagatgagactgtgactaacgttagtggtagtagttgcttcagaaacggcttgccagtgccatctgatgttatttaattagtcagataagatgtgtatgaaaagctcctttttcttctgtttattttgctttggcctgaaagtacctgtacataacacagataggccttagaggtagtaggttcagggacggggcatgtcttgttcatatttcagcaggttctaccttcggttgtttattttgtgtatatagtctaacctgtgaagggtggagaggggaaatgtgagcatattcaactttcttttcttcagttcaaaaggagcttcttggtatatttagagcacattttaatgattatatgggtcttctgacaactcatctatttcaacatttttcttta

SEQ ID NO: 140390 - DNA, 342 bp, Glycine max
  Clone ID: PAT_MRT3847_97781C.1
gaaaaaaaaaaaaaaaaaaaattttaaagggatttcgttataaaaggaaacaaaactaaaatacacggggcttccaatttgtagttctagggtagggccccgctaaaatgcaaacgccttggccctggtataaggacaccataaattgtaaaaactgtgcggttaactaacattatcgggctggaaaaaatccgggtttacccaggtgaatcccttgccaaaacacccccatctagccggctgtccaattaccttaaaggctgaaagggaaatgggaaacaaactgttgcggatccttattcgcaaaaggtacgctccttgaacgcaaacttaaaccccccc

SEQ ID NO: 140391 - DNA, 2780 bp, Glycine max
  Clone ID: PAT_MRT3847_97782C.1
ttaatgtgttgtgcgtataaatacaaaccaaaaaatactgatcccagattaatccaacgacgaccatcaaatctcaccatccacacagaaaaacacactaccaaaccctaatctgaaaccatcgttccctctctttctttctctctcttaacattctttctctctctatcaacctccaaactccgatcccgtatttctctcctcgctacccgatccagaggcttcaatcctttccccgtcgagatcttgcttcacgcgcctccaacgctggaccacgcgcctgtttccgcctccatcatggtcgtgagcggagggaagggcctcaaacgcgccgcgaagaagagagtcaccgccgatttctacgacttcctcacgttccccacgccgtcgctcgccgaagctgagaacttcgccggtggaccgttccgctccaacgtgcgcgcctttctgacgaagcacgcgcttcttccgccgccgtccgcgctcttcccgcacctgctgacgtggcagatcgtcttccgcgtcggcgagctcaccgagggccccgacgcgccggtagtgtgcctcgacgtcgtcgaggaggacgtcgccagatccagatctgtttactgtgatcagtgccgagttttcggtgagttgactcgccccttttttttgaggttcattgcttgttttgatttgccttgttatttctgtgttaataaggtatcaccaaaatggtctgaaacaagacttattttggatcaatgcaatgctatcgatcctgatcttacattttggtctattcgctctttctatcttcagatgtttttcttatttactttaatataccactgacgaacccaatcatcatcataaataacgattagagaacacgactcatcttttacatggcgtagtacacaccaatggatatgggcacctcgagccgaatcggctcgaggaagggggctctagatttctttctggtattcatattatggatttctgggatcgcctatgcaagactcttggagtcagaaaagtcagcgtgatggatgtttcaaagaaatatgggatagagtatcgcttgcttcatgccattatgaagggacatccatggtatggtgactggggttataaatttggctctggcagctactgtcttacacatgaatcatacaagtctgctgttgaaagcctatccaatctacccttgtccaccttttcccagggaaagatgcctgactctcgtgtgcaggatatgatcaaatattaccaatctttgtcagaacacgagcttgtaaatataagggacctcttttgtttcataatgggtttgattggtgatgctcacaagactgcatcaaatgttgatgagacaacctgcaagaagcgttgttttaatgcttctggactgtcaatatcatgggataagagtggcattgaacgtgtggagcaagccatgatcatagtgctgtgtgcagtgtctgagtccaagtgggtgagctggcgtgctcttatgggcgcagcctccaagttgggctcttcagagctgcttgattattgccttggagaactgggagggaaaatggtctatggtggaatggttgttaatagctacggctgcgtgaagacgacagaaggggagttcagacttgaggctgcaactggtgcttgctatggaattttagcaaagaataattctctgggctcgaagtatccatctgaagaaaacctcctacaatgcttgagatatttatacgactctttgcttcatcctcagatgatggtaaactatgaagcagggacaaggactcttgcaatgaactcagctcagaagctttttgactgcaagcagtttgtaaaagattataatcctgagatgtggccattgtcagattcgcagatgtttcgcctctcatgtcatgttgaacttgtagatgaatttgaagattcagaagctataactccaccagaattagttgtgctgcccctgaatgccacggtggctgagcttaagaatcaagcagcaaatgcttttcaagatgtatatctaaggttcagaagacttcaagttgatgggctacatggttatagcggtgtcgacgattccacccaggtcaagctcttgttaggatcgagagatgtagtttgtgtccgaggaagatgcatcgggaagaatgggttgagcaagttccgaatggaaaggggacttgagaggtggactgtagattgcagctgcggggccaaggacgatgatggagagagaatgttggcgtgtgatatatgtggagtgtggcgacacaccaggtgttctgacatccatgatactgatcctgttccagctcgttttgtttgcctgaaatgccaaaactgtgaatcaaaactcaaatgtagtgggcactgcaaagatgagaccgtgactaacgttagtggtagtagttgcttcagaaacggcttgccagtgccatctgatgttatttgattagtcagattagatgtgtatgaaaagctccttttttttttgctttggcctgaaagaacatgtacataacacagataggccttagaggtagtaggttcagggatggggcatgtcttgttcatatttcagcaggttctaccttcggttgtttattgtgtgtatatatagtactaactgaaagatgtggacgggggtagtgagagtattcaactttcttttcttctgttcaaaaggagcttcttggtaaatttagagcgaattctaatgattatgggtcttctttttatgctaaaagtgattatggtcttctgac

SEQ ID NO: 140392 - DNA, 409 bp, Glycine max
  Clone ID: PAT_MRT3847_97783C.1
ccttaattcccgggtcgacccactcgtccgacctcttctaaaagactacataagggcgcttttgttttacgcgacttcaacacccatatccagttgggttatccaacactctacgtcaacacattgacaagccacttccgtcaccatcatatcacaatcatcattactctcactatcctatcacctccattctctctgttcatcatgatcatctctacaactctttcacacaactgttatcaccatagctcatagaaattatccttcatatcatactatatatataacatcgctttcagaagccaataacatgattcatgtcctggactatattcatctttgcacatagtattactacatcaacaatacattgttagaatacactacatgacatcctgcactacatata

SEQ ID NO: 140393 - DNA, 486 bp, Glycine max
  Clone ID: PAT_MRT3847_97784C.1
atatgaaaaaaagtcattgacatataatggattcgtccacgcgctttccacatgtataatagagaaaagacaagtaccaacaccaatcttttgaagatgaaaggctccaaggaggatgtccgcttgctcttaatgcataagatggtgccactcagtgatgaccaatcatcactagggagcaaaaaaagcatcagtggtctatggacacgatagagtgattatcagaaaatcaaagtcacttgatcccaccgtctatagagaatcgataaccatcgggcatcctgcttatgttgatcctgggcgacacaacgagggccttggtgagctacaccacaaagtccctgtatgacataacgctctttctgacagaagaatgtgggagtgccaccacagatccgatccataagaagtatgaatacccgatcactcccccaactatgacaggctctatccacctattggggtacagaaagtggccggccttgc

SEQ ID NO: 140394 - DNA, 264 bp, Glycine max
  Clone ID: PAT_MRT3847_97785C.1
gatctttcatctgtgacatacaacaggtacagagttttctgatgctatgcctctatctctccactactcttacgctaaatagactcaacattacctccattctctcaaaagcaaactcaattctctccagcaacatcagcatactctcagtccatgtgatgaccggactgtaccgatcagtacctaaatctcatagctggagtgagcagggaatcccttatggtgaattggtgtccattagtacttctaaccctgacgtcacac

SEQ ID NO: 140395 - DNA, 303 bp, Glycine max
  Clone ID: PAT_MRT3847_97786C.1
ctggcaagcacaacaagatgtccatcacagatgctgattctggaagaaaagtggtagatccggaattgttagaggcaatccaggtgacaatatcgaataatatgactcagtatcaaccggaatcaagcgctcaagtagctctgggagcagctattggacttgtgcctaccaaagagcatgatgacgtggagatagcacccgagattaccatttatgatgacggacgagatcgaaatttgttgaatgtggatacagatgatcgtgctgcatatactgaggatcatgacgagactattacagaca

SEQ ID NO: 140396 - DNA, 234 bp, Glycine max
  unsure (1)..(234): unsure at all n locations
  Clone ID: PAT_MRT3847_97787C.1
cgtctttttgttcaaattcacgcaacaatcaggctaatcgacttgttaccaaacacgccctagctcctatttncncannctcgaanccaaatatgacccatgcaacgcatgccaanatttagtttccaaacttaataaatacaaacaatatctctataagtgtgtgggtgtttgtgtctacattttctttgccagaacgcaacattaacactttacatttttgcattagaaaat

SEQ ID NO: 140397 - DNA, 435 bp, Glycine max
  Clone ID: PAT_MRT3847_97788C.1
ccaagggaaaaaccctttaccttaacggaacaaaaggccccccaacaaaaataaaacatgatcaaagggatccggccaaaaacagaagaaaaaaacgggacaataaagaccagccaactaggcgttaaacattattaaccccccaaaggttagggaagtaaccctattttggctttcaaaaattaaatcaaaacccaatggaccccctagggaaaaaaccccaaagaaaagcgggtttattcagtcctaaacaaagttaaaaacttgggccacaaagcacaaacccaaaactaaaaaacagcattttccaaaccagtttgaaaggcaacattatatcagtcccaaacaacaaattcaaattcttcttcacaggggcagcatttatgaggcccacaaactccggtttagggaggccccaccaaccaaaaatccatc

SEQ ID NO: 140398 - DNA, 410 bp, Glycine max
  Clone ID: PAT_MRT3847_97789C.1
aactaattaaatatatattcaatattgaggagaaggattaccacaaacgtacgatgaagtgatgtttcatttttaacaccacaaaaggataacctaagggagaaggttattaacaattattctgccttgttgaatagtttggcagaaagacacacttacaacgggactaaataaaaacacatggctaaatgtttaaaaacagttgacaaatccaaccaacgatataccaagcatgattcggtcggaagaaactcaaacggtagagaaagaacactagaattttattcagcagccaaatgaatagcagcaaactaagttgtgaaacccccacagctggaaggcaaagaaaagcaactaatgctgatatctctttagcttctccatgcgaccaacaagtgtttgagacacta

SEQ ID NO: 140399 - DNA, 1252 bp, Glycine max
  unsure (1)..(1252): unsure at all n locations
  Clone ID: PAT_MRT3847_9778C.1
catgagttgggcttgggccttagctgttatccaagattttgttaacaactgattcacagactcggtcacggtggcatcggatagaggggcaagaaaggatgaggtggtgcagccaggtcttctctgtgtctgggtccggtgcacatgcacatgcactcgctctcgctcctatagttactgcttctttttccaacacaagtcttgtgttgcaattccaaaagcctctcttcaaattcagcaactcctcttctctcgctcttacccatcgtaagctgttaccctctgcactgccactaacgcagccctcaagttcaagggaggattttgatttcgtggtcgtcaatttctaccactttgtattcatccaagacccacaagctgaagtcgacaaacaccgttctttcttccaattggagggtcttgacatcaatggaagattatatttgaatgaacaaggtattaatgcgcagtatagcgggccatcaaaagatgctatgacgtatgtcaactggttaagaaaggataacaggttttctgacatcttggttcagatatctccatcagaaaagggacatacctttccaacattgaagttgcgttataagccttcattagtacagtttgaaggtggtatgtcacatctttcattgcttgatccttcaatgcgggcaatacctttatcaccttcagaatggagagatagattggaatcaatcaataaaactgatcttacagcaaaagataactcaaacagaaattacattctattggatgtgagaaatggttatgagtgggatattggacattttcgtggggctcagcgacctagtgtggactgctttaggaacacttcatttggtctgtctcgggaagagatcactgcttcagatcctttatcaaatgtagataaagaaaaagcaaacatattgatgtattgcactggagggattcgctgtgatgtatattcttcaatactaaggcagcagggatttcagaatttgtatactctgaagggaggtgtttctcactatctaaagaatgaaggccctgccgaatgggtaggaaatttatttgtatttgactcccgtctatctctccctccttctatttactataccggggccacaactgaagcagagtcaactccagtttctggagatgataattttgcanaatgctacgtatgtagtttggaagtcagtgaattgagacataagaactgtgcaaatcttgattggaatttgctttttct

SEQ ID NO: 140400 - DNA, 296 bp, Glycine max
  Clone ID: PAT_MRT3847_97790C.1
gcgccagctggggagatgatggctacataccatgtgacctgcaggcatgagttaatctacccttgaccactaagacaggatccagacgatgctgacacaagggtctaggacatgtgaccaaggtggcctatgacgcagattcgcgcactcaagctcttcacctcagtacattccagcgatccggtttagtacgagcgctacatgaccactcattactctatgccttaggcacgattgccatgactgtaatgcgaacagggggtctgctaaaaagttactggtctaagcaacaacga

SEQ ID NO: 140401 - DNA, 416 bp, Glycine max
  Clone ID: PAT_MRT3847_97791C.1
taaacaaccattcttaacacgtgttttttataccatttaaactccacctcacctctattctctttcatattttattatctcataaatctataaattctctatatctaaccatacattctctaaaccaaatccatttacaattttactcatacttcccacctcatcctcactaacatctttatattttttcaaccccttcaacccttattccaacccaatttatttatccatcacttttaatcaatcaaattccatattaatatacaatttcacgaaatttcatattaactccattctacaatttataccaatttattaaaaaacttctataataccttcaccatatttattataattcacaatatactataatctatatatccattttcaaaatatttcctacctttataaaacat

SEQ ID NO: 140402 - DNA, 538 bp, Glycine max
  Clone ID: PAT_MRT3847_97792C.1
gcaaaactgctatttattattaataattggtttaaaaaatacatataagagcctcttaagtaaaatcgaaacgttctacaatatgacaattgtgtggaactctgacctaataaaacctattttgactgtagaatatgtattggagttgaagaaacaaaatgatgcattcactccaccttccatttaaaattttatttattcttcttcatatcttcttatgaagtaggatgaggatgcatgctatgaacctttgcagcccatttctgtaaaccaggaaatctgttcaacagtgagttcactttcttatccccacccccaccatgcagtgtttgatgttcagtctcatggaagactttgtttcagcattaatagtgtaatggcattaaacccaatgaatccaatcctggaatgctaatttgcaaaacattcttcattcatttactttcactgttattctgaaagaccatggtttctttcatattcacaacactagggagatgagctttcctcatctgagcttctatcttgctttcgatga

SEQ ID NO: 140403 - DNA, 322 bp, Glycine max
  unsure (1)..(322): unsure at all n locations
  Clone ID: PAT_MRT3847_97793C.1
agtcgcangcacgcgtacgtaagctcgggaattcggctcgaggnanantnggtctcaagntctnncannngtgngcatanntcacanntggtgagaccngtanantnctnaggctatttgaagaccctgtgtcctcntttcngnatggncagcnttnngnntgcncancgtggtcgaggacgggttcggnatcntgaancaccggatgtttnccgaccccnnatgcgatnaccggtnggantagcnagcngttgcggctcnagaattcggnntnggaanantngngcgncagtntggaaggccntggggaaatgggttttgt

SEQ ID NO: 140404 - DNA, 111 bp, Glycine max
  Clone ID: PAT_MRT3847_97794C.1
gttgatgcgcaaggatatcgtctccacactcaagggtctcgcacaacggcttggaaagcgcgaaatcaccgatgcggatatgatcaagttggccaattacatggcgccgaa

SEQ ID NO: 140405 - DNA, 388 bp, Glycine max
  Clone ID: PAT_MRT3847_97795C.1
catttcactcgacacacatcttcccaattgtgctattaagcttcgtggagtccacgactggttcaggtctcgtcaacgccgcgcgactgaggtcagattgttgatcgcaatcatcccggaggtcgctgggtcccgggctgaatgtcacatcacggtgggcgcgactccatgggacaccagtgacacctctcaagtgcatgcatggattcgttcagcaacatggctcacatgctcaagaatcaggtcagcaaagtcgaagagttgtcatcacgagcgacacttgatgggtcaagggcagtaggtgaccacgttgttgcacagcggtagttgtcgaatttcgataactatatcggattgtgcatctgcgttcagccttttatcgcccccc

SEQ ID NO: 140406 - DNA, 131 bp, Glycine max
  Clone ID: PAT_MRT3847_97796C.1
tgcccgtaacttggtgagaaagcaatttttatcaatttataagattatctttatcatgttgaagagctttattctaaaattaaatttgatggctagacaagtgcgcgatgacaaattatcacctggaatct

SEQ ID NO: 140407 - DNA, 255 bp, Glycine max
  unsure (1)..(255): unsure at all n locations
  Clone ID: PAT_MRT3847_97797C.1
gtcgaagatgcgacggcggcgcaggcggcgcatacttccagaccgacgacggcgncgcatgaggctgtcgttgcgccgccggaagggagangcaggcgcaagggcatgctgcgtcgtcaaattcgcatagtcgatgncgtttccacnacagnnaaanagggaaaaagcctgataaggacngaatattacccaactnctcancancnntcttgcgaccnggcagcaagtccaagggaagaaanaatccgacngnng

SEQ ID NO: 140408 - DNA, 516 bp, Glycine max
  Clone ID: PAT_MRT3847_97798C.1
gtgtttttttttattttttttgtttttcagtacaaaaaaaaaagatagtacggctccgaactccagagtttcattctgcaaaatttgtctaaataaccttgacagacgctacacacaatatacgcgtgctgggggctctcagttaatttacaaatgggggggttcgtagcccctttaagaccctgaagactgaacacattccatccgttgcatggtttacgggatctctggcctcgcttccctttaatcgaaaggaaggaacgggactcccagtaatgtaaacaacgtcctcccttagatccttatgctataaggattccccgtgcacgccaacccttcctaccttttctgatggaaaaaagggatcgggagttgtgccggcccaacccgaccggggagattggaaacattgggctcattggcatgcctttcatgattttctttgagtttgttaccacaattaacaaaggtttgaaaggcttgtgattcttaggacccaggggggcaatgcctttg

SEQ ID NO: 140409 - DNA, 447 bp, Glycine max
  Clone ID: PAT_MRT3847_97799C.1
ggctcgagcattgttgtaggttgttgattactatagcctgtaaaattcgatattctaacctcgtgaggggaatgagatcggccgtgtgtgagcgagcttggctggtaaaggcatgggtcctgtcatcgaatgcaagttgacaactactgcctattgcgttgccgtgcggcatcacgatcgtgtcgagatcatggtcaacgatcagggtaacagatctaccccatcctacgtggctctgaccgtcacactacggatgatccgtgatgcggcgccaaaccaagtcgatatgtaccctgccaacaccgttatgaatgctatgcggttgattggaaggcgtatttccattgcatcagtacactgtgacttgacattgtagacgttcaaggtgattccagcccctgctgcaaaacctaggatcgtggcgaactacaggggggcggagaatca

SEQ ID NO: 140410 - DNA, 423 bp, Glycine max
  unsure (1)..(423): unsure at all n locations
  Clone ID: PAT_MRT3847_9779C.1
cgcattcataatgccctagagtgtggtagtacatatataaaatatcttcnaccacattaaacgtggattcttgttcaagttgactacaactcttgaatcttcatattctatcatgtttcgtccttacaagtatatttccacaaacaaattccactttattctcaatcgtaacaatctcaagagtttcgagtttttttaacaccatctttataatctccctattttaccgttttacaaattattttatttatactccccctttaattatattgacaattatacatccatttcttttttttgatctcatattctttatttaatattttatactttttattttttttttctctattttttttctcttttaattctattcatcaattttctttcttttctaaaaccctatcttttttattttttttt

SEQ ID NO: 140411 - DNA, 350 bp, Glycine max
  unsure (1)..(350): unsure at all n locations
  Clone ID: PAT_MRT3847_977C.1
ntnggggggggnagtgncgcagcntacgtnagctcggaatncgncgcgagngnaanaangngttnantnttngtncnaggtgnntnnnggccncantgancctcnntcgccagctgttgancantngtgcaaacgcgtgcccggttgccnngcntggntnncgccntgtccnccgncntcaaaatgcgcatggctgggcntgccccaccganggangnangancnnaggacnttgaccttcnatngctagcatacngtggnagantacaatncatgtgttgtgnccnncangngggnngtnagaggtgcgtnntgtttcntgtttgngncngnggtgttngnngtngtng

SEQ ID NO: 140412 - DNA, 413 bp, Glycine max
  Clone ID: PAT_MRT3847_97800C.1
ccccggaccggaattccagttccgaccacacccttccgcgaccccttgggatgaaagccatcacctttttattttttgccattggcacatccttgccttttaaccatatataatttccttagcagggcaacatgcattaccttttgcaaaatccgacccaactttaaccatacctgtttggtcgatttcccttacctgaatgaaaaatattcctccaaatattttgcactgtaaatataaaataaccggggttcattttattgggggtggggcaatttgccatggacctgacggagcaaaaggtgccggtgaaaggaattgtggagccagatgaagttttccaggccgtttccaaatttggaaggaagactgcattttgggtggttgaagccccccaatctaaaaccaagcct

SEQ ID NO: 140413 - DNA, 499 bp, Glycine max
  unsure (1)..(499): unsure at all n locations
  Clone ID: PAT_MRT3847_97801C.1
cttanaagaggggaggnngatttngaatgtgaaagcggtgggcccattctttctttcttactaaaacttcaaacccttaataagaccgttgcctcactttctttggggaaaagtagcccaagcttttttttttcagaataaacaggttcccccttgcctaaatagaaataaaatgcccgcctaccacccaaaaaaccatccctgttaaacaagggccacaaagcccaaggggacaagggctttcttaaatcttttcacaactgcctgtaggggtgaaagcgattttggctaaaaaatgcgggggccaggggcatttccaaatgccccccctggcaccaggggtacctggcccccctccagtagattttggcaggggggccccaaatccccctttttcccaaaggctttagctttttttgcctaatagaaggtgagaccaagggataaataaaaagccccctgggggtgaaatatattgatgccctttatttttgttaaa

SEQ ID NO: 140414 - DNA, 285 bp, Glycine max
  Clone ID: PAT_MRT3847_97802C.1
ctaaatcgagagcgggcgctgtcgatgaaccagactcacgctcacgtgcatgcgactgcaacgctatagtattgtgataccgacacctaaatcaatggccgtggccgtacatctacaacactgggactgccatgacgctgccgaacccaaacttattggactagatgcacatttccctttctgcagttgtagcaataaggaccaggccgatagcgattgccattagtagcacatgctgaatgtgaatggggactggcactgtccctgtacattaacatcaaccgc

SEQ ID NO: 140415 - DNA, 1546 bp, Glycine max
  Clone ID: PAT_MRT3847_97803C.1
cggacgcgtgggcggtcgcgtgctgtgattgtccgtaagagagagagagagagagagagatggtgatgcattcacgggtcagaagcgtcgccggaaacatcaaatgcgcagcgagactcttctgttcatcttcgacgaccacgccgccggctgcgccgttgcagttcccgcagactctggcggggctccgggcgcggctggcggaggagtcgccgtcgctgtcggacttcctcgcgttaaaatcggagagcgcgtactcggtggaggtcgggactaagaagaagccgcttccgaagccgaagtggatgaaggaggccgttcccggcggcgagaagtacgtgcagatcaagaagaagctccgtgaattgaagcttcacacggtttgcgaggaggcgcggtgccctaatttgggggagtgctggtccggaggcgagaccggcactgccaccgccactatcatgattctcggcgacacttgtactcgaggttgcagattttgtaatgttaagacgtcaaggactcctccaccacctgaccctgatgagcccaccaatgtggctgaagcaattgcatcttggggtctggattatgtggttataacgagtgttgaccgtgatgatttgcctgatcaagggagtggtcattttaccgaaacagtgcagaagctgaaggcactgaagcctaatatgctgatagaagccttagttccagattttcgaggagatgctgactgtgtagagaaggttgccaaatcaggattagatgtctttgcacacaacattgagacagttgaagagcttcagagtgttgtacgggatcatcgtgctaattttaagcagtcattagatgttctaatgatggccaaggaaaatgctcctgctggaacacttactaagacttcaataatgttaggttgtggggaaacacctgatcaggttgtgaagacaatggagaaggtgagagcagctggtgttgacgtgatgacatttggtcagtatatgagaccttcaaagcgccatatgccggtatctgaatatgttacaccagaggcctttgataagtatcagaaacttggcatggaaatgggctttcgatatgtggcatctgggcccatggtgaggtcatcatacaaggcaggtgaattctatattaaatccatgattgaatcagatcgggctgcttctccctcaaagctgacctcttcttgatccaccatcttttttgttattcacacacttcattgtgcattatatgtaaggagtgcagacttactacattgctgttgatgctcatgccacgtgtaatatcagtaaaaagctataaacgggcatatgctgctgtctgcaatttttttcactgcctcctccccaacctatgagtgaataggttgatttatttagaaaatgcaaatttcaaaggttgattgtatatgttctcatttacatgaactcatttttctctattaaactggtgctaacttactccagttactgtagttattaaaagtaataagtgtttacctcttatttgagaaaaaaaaaaaaaa

SEQ ID NO: 140416 - DNA, 2213 bp, Glycine max
  Clone ID: PAT_MRT3847_97805C.1
cgcgcccactcccccgcaccctcacgctccaattctctctctttccccccgccctcttctcgcacctcccgccccccctcgatccccctccctccctctcactcgatccaactccctcaaaccccaacgccctcagaaaattcaaattccaattctctttctttccctctttcttctctcacccaacctcacgtacgatcctagcccctccagaaaaacgctgatgctccaaaccgaaaaaccctcccctttaaatttcatcttccgacactcaaaacattaacctttgactcaaacgcatgagcgaggattgcaattctggagcagcgtcgctgttgttgtcctccccttcgaattccaagattgttggagataagcgtggaagcactcacaggggtcacagcgctcggaaacgggtcaagatgaaagatcttgacgccgttgttcactccgtggaaacgaatagccgttattcggagtttaaaaacgacaaagaaaacaccgtgcaatggtcgttgggtgctacggatgcttctcaacaagtgacaacgggaaggaatgcgatgccggaagagtttaattttgtggctcggcctctgattctcaacactgaagcgtgcaaaggtggagggtgtgttgtgaatttcgccaaagattcgttgtctgagaagcaagaaaaagggcatggtaatttagtagtctcaaggggaattaatgtggatctgaatgcagaagatgctaccggctctgtgaatctggaacctgcaaattcctccaaagggtgcaatccttttaagtcaaaggatgtgtccgagagtgggagctgtgttggacctttggcacagaaagatccaatgacgaaatggaaacagatgaaagaatatggtttttggtcgccctctcatgctggcattccaaagccgaaacatcatgggaggaaaagtatgaatgaaatgctcaagagaaagatagagcttgcgaagagggaacaggttaaccggtttaccaagattgctgctccaagtggactgttgaatgacttgaaccccggaattataaatcatgtgaggaatagaaaacaagtgctttcaattattgagaatcttgtaaggtctgaaaaacatgaaagcactagtgtggggagtaagcacgcagcacattgtatacaaggaaatgtagaagttagtaagagggatcaagaaaatgtggctgatgtaagtgagcatcagcatgactttgcttgtgaggaaggagcccttcatagcacttcagggagcagacaagctagaaagtttcctgtgacaacaaatgattcttcttccttgattttggagggtagagtttgtgattgtgacataggcagtttagataaaggtagtcttaaaagttgtatgacacagtcaacgaatgttgtggaggatgatgctttagctctgaaattgtcatctgaaatgagggcatcaatgagttccaccggtttgtcaaatgaggaatcctcaaatgtcacaatggtttcatccctttccctaaaagctgctactgttgcttctcaatggttggagcttctgcaacatgacatcaaaggacgcctttcagctttacgtcgtagtagaaggaaagttcaatctgtaatcactactgagttgccatttcttttatcaaaggaatttggaaataaccaagattatgatccttgcactatgaaaatgtctgcgggacttcccactggcaaaatagcagatatgcatcgggcaagatggacttctttgtttgatcatatggatgaagctctttctgaagaggaaaagaaacttgaatgttggttgaatcaagtaaaagaaaagcaactgctatgtgaccagggcatacaacatgtaaactggagctcggtttttggtttacaacagctggggaattcagaaaacaactccagagcaccggcatttgatagctcggagaaagatttagcggtgaatgcagctgctgcttccatatactcaacatgtaattttctattgtcaaagagctaacctgtatttgacgtagagttcatgcattcatgtcagaatcttttatttttttcatcctaaatgaaatgactagtaattgtcatgggcacgtggaacacctaacgtcgtgtatgtgattgttatggttgtaacattagttgtaatataatttattttttactttttttctgcccgtcagtaaaa

SEQ ID NO: 140417 - DNA, 627 bp, Glycine max
  Clone ID: PAT_MRT3847_97806C.1
ggtcaacttaggctggagaaccgatatcaaaatgttacggctgccagaagacgacagaaggagcgtggaacgagacaactaagtacgaaaatcgttatccgccgcaacagccactaagatgttctttgagtcttggcacgccacgtgtcagaactgccaacagatagtcccatctctttctccttctccctaaacctcgaactcagcacccccatccactggtgattgtttgattgagccttgaagaaatggaccacagcgctgatgcacatcgcacggacttgatgaccataacgcggttcgtgctgaacgagcaatccaagcaccccgagtcacgcggcgatttcaccatcttgctcagtcacattgttctcggttgcaagtttgtttgttccgctgtcagcaaggctggtcttgctaaacttattggactcgctggagaaccaatgttcagggtgaagaacagaagaaactggatgttctttccaacgaggttttcatcaaggctctcataagcagtggccgaacatgcatcttggtttctgaagaagatgaggaagcgataattgtggagccttctaagcgcggaaagtactgtgtttgctttgacccattggatggctcgtc

SEQ ID NO: 140418 - DNA, 3030 bp, Glycine max
  Clone ID: PAT_MRT3847_97807C.1
ggcaatccttgaaggcttaaaccttctttttaggctggagaaccgatatcaaaaggtggggcacacacaacacaacacaacagcgtggaacgagacaactaagtacgaaaatcgttatccgccgcaacagccactaagatgttctttgagtcttggcacgccacgtgtcagaactgccaacagatagccccatctctttctccttctccctaaacctcgaactcagcacccccatccactggtccctccccactccatcatttattatactttcttcttcttctttattattgttgattaatataacatacacccacatatttcatatgggtacttgttaatttgggtgtggattgttggtttgttacttgttttgttccgttcaggtgattgtttgattgagccttgaagaaatggaccacagcgctgatgcacatcgcacggacttgatgaccataacgcggttcgtgctgaacgagcaatccaagcaccccgagtcacgcggcgatttcaccatcttgctcagtcacattgttctcggttgcaagttcctctgctctgctgttaacaaggcgggtcttgctaagcttattggacttgcaggagagacaaatgttcaggcaagtggttgataaataaatcttagtaacctgcatcatgcatacaaattccagcatggtaactttctaaataatgtatgatgatttgatcctccttgattagtttttcttatttcggtgttcatttttattcaatttgtttcttaactggaataaagggcgaagagcaaaagaaactggatgtcctttccaatgatgtctttatcaaggctttggtcagcagtggacgaacagtaagtcatcaatatgtgatttggtgtgtcttgaaaactaagggttttttttttttttttgtaagcgtctaattgaaaactaaaggtatataatatataatatatagtatgtgcttttgttgatgatggtgagatatatttttccagtgcatcttggtgtctgaagaagatgaggaagcaacatttgtggaagcttctaagcgtggaaagttgttacctatctatagcttagtagtatttcttccatagggtccgtttgctagagtcgaatggcatagaatgaaagtgaattgagatgaaagttttgaattaaaatagaataaaagaatatgttttacctcattttactgttcattttactcattttctgtcctcttttcctgcaaacgaacatgcccttggtgtttatttaaccttggttttgccaagtctaatcaatttgtacgaaattttctgattgtgcagatactgtgttgtttttgacccgctggatggttcttctaacattgattgtggtgtttcaattggcacagtatggtccctcctcctccatatatccttcttgaaatgcatattccatgtgtttttctctttccattgaattctcccgcaatattagtataccagacacagagaagggattaattgataatattgcagattgaatataatatattgcggttgtcaatttgagtgtgttgtcttccatttagatctttgggatttatttgataaaagaagaccatgaaccaaccattgaagatgttttgcaacccgggaagaacatgttggcagctggttattgtatgtatggaagctcttgcacgcttgtgttaagcactggaagtggtgttaatggtttcacccttgatccatctcttggggaattcattctaactcaccctgacatcaagattccaaagaaaggcaagatctattcagtgaatgaaggaaatgctaaaaactgggatgaccctactaccaagtatgtggagaactgcaagtatccaagagatggttcatcaccaaagtccctaagatatattggaagcatggtagctgatgttcaccgcacattgctttatggaggtatttttctgtatccggctgataaaaagagtccaaatggaaaacttcgtgtactctatgaagtcttcccaatgtcattcttgatggaacaagcaggaggacaggctttcactggcaaccaaagggtaatttaccaaaaacagggcgaaaaacaaaaaattagtttagactaaatttctctcaacccttgtttgagatgaaaaaatgaataggaaattttgaaattcaaattaaagagaaaatagaaagtaagaaagaaaatatttttttaaaaataaatttatttattaatttttaatcaaacaaaaaaatatcacttatcatatttttttcgtcctttttattttattttctttcattcaaacgtagtcaataaatattgattcaattaataaaaatcatatttatctctcataagaacatgtgtttaagttttactcttaaatgtgaggactttattcatacttttattgatatataatataagtatttttatatgttatgagaaaatcttagagacatacattgacactaatgaatccttgagacccaattgaactaaattttttctcaccaaaacacatcacttcctttagacaagcaagagagagacatagacgaccagagtctttcaaagacactacctttaacataattggcaaaccccttcattatcaatgatactttgagcaccagaaaatttgtgtttctttttctcctctattaacattaagaaaaataagagaatccataatgattttaattagaatattataaatgcatcatatgccagtgaaagtgatgaatctagctatgtcaacaggcacttgatttggttccaaagaagttgcacgagcgatctcccatattccttggtagctatgaggatgtcgaggaaatcaaggctctttacgctgctgaggaatgaagctggaagaaagcattctttgtctttcgctacttacaagcaattgttatctaattgttacacacatacatggtcatgtatatgttaagaaaacttgttaatgttttgtgctttagaaaaattatttcattagttatatctaaatattttaaattttaat

SEQ ID NO: 140419 - DNA, 231 bp, Glycine max
  Clone ID: PAT_MRT3847_97808C.1
cctatgaacaacacaaaatataacatagatttaacaaactaattgtccatattgttgaaggtgattctgtgaaacagtaactggggttgcatctaggttgagacttgttatggagggtgatggtagtagatttaggattggaagttaatccatttagaggaacagcgcacgagctgagatcttgtcaaactgtgtacaccgagaccatgatgaacatgatgctatatggga

SEQ ID NO: 140420 - DNA, 174 bp, Glycine max
  Clone ID: PAT_MRT3847_97809C.1
gcgcgaaaatatattctaatgtcaaacgcaactcttctatttctatctgcatgagttttcactgagaatgtgcacactgccaacagtgttatgctatctctaatgtttttatcattattgatcataagctttgatgtttttgatgcagcaattttcctttggagggtacaattt

SEQ ID NO: 140421 - DNA, 440 bp, Glycine max
  Clone ID: PAT_MRT3847_9780C.1
cggacgcttgggcggacgcgtgggctctaaactccttatgatttagaagaagcacctctggtatttgtctcccatcctgaagaaaaacactttttgcaagccttactgcaccatcttgttgccaattattattctatcccctatatttgttgctgtatatgtgtgattctgtcaacttttcttctgtctctagccaattgcatggtttgaatgctgaattggggatgaaaaatatgaatccgacacataatctccgattgaagtccacaaagggaataccctaaatattgttcttctggtaatcattgtacttcagacgcaaccaattcaaaggcctcaatgtattcctccacagaaccattttgtctaagttcaccctctcaaatgggttccctgttcttcttactacaaattttgcaaccaaagacttcttaaattta

SEQ ID NO: 140422 - DNA, 2043 bp, Glycine max
  Clone ID: PAT_MRT3847_97810C.1
aatatatagtatgtgcttttgttgatgatggtgagatatatttttccagtgcatcttggtgtctgaagaagatgaggaagcaacatttgtggaagcttctaagcgtggaaagttgttacctatctatagcttagtagtatttcttccatagggtccgtttgctagagtcgaatggcatagaatgaaagtgaattgagatgaaagttttgaattaaaatagaataaaagaatatgttttacctcattttactgttcattttactcattttctgtcctcttttcctgcaaacgaacatgcccttggtgtttatttaaccttggttttgccaagtctaatcaatttgtacgaaattttctgattgtgcaggatataactgcttactttccctcaaaatgatactttaatctaagtattttatctaaataaattctatagccctgacaggcattgattaatataacatacacccacatatttcatatgggtacttgttaatttgggtgtggattgttggtttgttacttgttttgttccgttcaggtgattgtttgattgagccttgaagaaatggaccacagcgatgctcaacgcacggacttgatgaccatcacccgcttcgtgctgaacgagacaatccaagcacccctgagtcacgcggcgatttctcaatcttgctcagtcacattgttctcggttgcaagttcgtttgttctgctgttagcaaggcgggtcttgctaaacttattggacttgcaggagaaacaaatgttcagggtgaagagcagaagaaactggatgttctttccaatgaggtcttcatcaaggctttgatcagcagtggccgaacatgcatcttggtttctgaagaagatgaagaagcaacatttgtggaaccttctaagcgtggaaaatactgtgttgtttttgacccgctggatggttcgtctaacattgagtgtggattgtggagtttcaaagtaatttggcataatttgataaaagaagaccatgaaccaaccatagaagatgtgcaacctgggaagttgaacatgttggcagctggttattgtatgtatggaagctcttgcacgctttagtggatcatactcttttgtatctgtcccttttatatgtgttaagcactggagcaggtgttaatggtttcacccttgacccatctcttggtgagttcatcctaactcaccctaacattaagatcccaaagaaaggtaaaatttattcagtgaatgaaggaaatgccaaaaactgggatcgtcctactgctacttacgttgaaaaatgcaagtttcctgaagatggttcatcaccaaagtctctaagatatattggaagcatggtagctgatgttcatcgtacgttgctttatggaggcatctttttgtaccctgctgacaaaaaaagtccaaatggaaaacttcgtgtcctgtatgaagtcttcccaatgtcattcttgatggaacaggcaggaggacagtctttcacgggcaaggaacgggcacttgatttagttccaacgaagttgcacgagcgatctcccatattccttggtagctatgatgatgttgaggaaatcaaagctctttatgctgctgctgagggtgaacaagaatgaaattggaaaggtttcttgtatctttcgctacttacaagcgcttgttttctaattgttactagcaggtgcttataagaaaactagttatctggtcatgtatatgttaataaaattggttgatgtgcctgtcagggctatagaatttatttagataaaatacttagattaaagtatcattttgttgctgaagaagtataactgcttactttccctcaagatgcatttcaaagttaaatccgcagacctgttagttactatgtaatgcaaacaactatgtgaaatagtggccagaccattgagttacgtttaaaaacaggagcaaaaagttacatttaaaaacaggtgcaaagagttacatttaaaaaaaaaaatagtaaataaataaaaagaagtcacctgaagactcttc

SEQ ID NO: 140423 - DNA, 448 bp, Glycine max
  Clone ID: PAT_MRT3847_97811C.1
cggctgcggtccggaatacagttccgggtcggggaggacgagcttcctcggccgccctcgcccttttttttttttttttttaaatgaaactccaccactacaaaaccgatcatagtccccacgggggaaaaccattcagtaactgagaaataatacccaaaaccaaccgtttttttgtatgcgatgcgcaaagtcaaataggaagagaactttttttattcataaacaatttttagctatgacttaacactggccgggatagaaacacgtctaaaaacctaaatatcggcacctttccgggaatttccaaaacatttttggggatatacaattaactttttttttaaaagagggcattggctgactttggattcacgggggctcaatatattcatcgggacctctttaaattttgcaggggcctatggcgctgggcctatgtttccct

SEQ ID NO: 140424 - DNA, 433 bp, Glycine max
  Clone ID: PAT_MRT3847_97812C.1
gtccaattagtcttattatacaacaaaattaaagctttatgttccttctctctctctagaagattataatgattagagcttagatatgatagttaacacctgtatgttccaaaggaatataaagaatgttgtaaaattagcatttaatttggatattgataattttttatcattatatccaagttcaagctgtagagtattttgatatttgtttttccttttcatattttacagtgtccacttttgaacataagttactgtcctgcatcagaagttgatctggttcaaggaaagaatttggtaaaaatatttatttcatctcatattttgtccttctttcctcactcctcaggggtattggtttatatttaatttttaaattatatcttcttgcgatctttttctatacttaggttattgtagtttacaactc

SEQ ID NO: 140425 - DNA, 131 bp, Glycine max
  Clone ID: PAT_MRT3847_97813C.1
gaccaacccattcaacaagctcatgctctaatgactcatttatatcgtacacaaacaactcactgtaaaggcaagatattttacacatactgtccatccattaaaacacttacaacaactctcacacatac

SEQ ID NO: 140426 - DNA, 330 bp, Glycine max
  Clone ID: PAT_MRT3847_97814C.1
ggatcctacctttaggaagctttttgtggattacatagcctctgcatatagagatacagacagtctatggggccttggggactacaattgcaccatgatgccgcaggcgacaatcaagactcctagcaaggaagttattactgtcttgaattatttatgcagcgatcctgaaaacatggtgttcattgtgagcggcagggataaggattgcttgagcaagtggttttctccatgtgagaaattgggtctctttggtgagcacgggtacttcactagggggaccaaggatttttcttgggagactttgcgattgaccaccgattttgaatg

SEQ ID NO: 140427 - DNA, 277 bp, Glycine max
  Clone ID: PAT_MRT3847_97815C.1
gctaatgctgatcatataaccttagactatgatattatacatctggcacacggcattaatctatgctcatgatgctgatcagaaatcaaattgcttatcttgagatgctttacagattaccatactatatgttataagctgcatcatataagacatatgaatatgctaataactctgcacataatactaaacataatcctactcagtacaccatggactatctaagtaatgcatctaatgctactaattacactaaactcactgctccttataaaac

SEQ ID NO: 140428 - DNA, 499 bp, Glycine max
  Clone ID: PAT_MRT3847_97816C.1
ttcattgatggagatcttttttctagcctgttttgattttgtcattttcttgagaacagtaagaagggacttgactcgttgtgatgatgttggacaaagaggcacaagctaaaatgaatgaacgagctttactggatgtgaagcattgctgacgggtgatgtgtttatagagcctgatggttcgaagcttctctgtgtgatggtcgctgattgggtacagattcttgtaatggctgtgtgtactattagtttctgcagaacatgaggtttgatgttcaccagcattgcaggggtatgctggttacgttatgataattttatatattttcctgggaattgctgataaatatgatatgtgtagtttatggaggaccattaaggaaaccattgaaggatggagatacatttactgtatatatgcatgctatattcctgtaattgctcttattattctaacatgactgaattatgttatctgagacatattaagtactggtgc

SEQ ID NO: 140429 - DNA, 119 bp, Glycine max
  Clone ID: PAT_MRT3847_97817C.1
gccactcttacacccacgggttcctcctctcctccgatatcaatttaaaacacatccctggtatcatatggaaggacccggagaaagagactctttttgaccatacaaccaccacttct

SEQ ID NO: 140430 - DNA, 1077 bp, Glycine max
  Clone ID: PAT_MRT3847_97818C.1
attcttcgcgcggctgcgagaagacgacagaagggacataggacattattgtaataataatttgaattttctctaattttctctctcaaagaacaactttgaactctgacagctctgaactgtcccatagtgttggcattggcaactctctcacttcacacacacacctttcttcattcctaccaccatacttcaagaagcctttttaagactaaagttagagagaaacattgagatagagagaaaaaaaaaagaagacgcaagtgttagttaaataggtacattattgcattacatagttacattaaatacattgacatcgcattacatacacttctctagtaatatttctctcttcttctcattcagttattcttcatttcccatattgattcattttgtagttgaaacagaaaaagctgaagacatgtctggtcattgggggattcttgtttccgatccatggcttcagaatcagttcacacaagtggagcttcgtagcttaaagtcccatttcatgagcatgaggagggaaagtgggaggcttgtgattgcggatttggcttccaagatgtcaaggttgaaggtggtgggagagaatctgagtgaggaagagagagcttcttgcgtgaaggatgtgtatcagaacactgaagaggaggttgattttgaattgtttctcaaggtctacttgaaactccaaacatttgtgaattctagaaccggaagtagtccaaagaactcgttggcattcctcaaggcagctacaaccacattgcttcacacaataagtgaatctgagaaagcatcatatgtagcacatataaatcactatctagcacaagatgagttcctcaagaaatatcttcctattgacccttcaaccaatgagctctttgaaattgcaaaagatggtgtcttcttttgcaggcttatcaatgtagcagttccagggaccatcgacgaacggcgatcaatacaaaaaaaatactcaatccatgggaaaggaatgaaaatcacacactttgcctcaactctgctaaagcaattggatgtacagtagtcaacattggcacc

SEQ ID NO: 140431 - DNA, 344 bp, Glycine max
  Clone ID: PAT_MRT3847_97819C.1
tgaatggttccccgcaaccacaggttgccggggcctttttaacggcactaccgctttctaccctcgatttcaagaatctctcaattacttcctacttctttgcgtacgacttcttaagggaaagaaaatcactctctgagctggccacagactccgtgaatcattatcttttccactcttggtttatttgctgaacactctcctatttgatataggacttcgtgtcagacttaaactactcctgtctctttctcagtatcttgcttaatctcaagctcaagctggtgaaatcttggattaagtgctcccactcctctatctggcataggaacttcctgggtaga

SEQ ID NO: 140432 - DNA, 291 bp, Glycine max
  Clone ID: PAT_MRT3847_9781C.1
tatcggggttttttatgtatcaacacctcctgactcattgatgcattaacaacaccgctcaaacactattcacaaaaaactctctcccaaagtaccaaactctttcctaacagaaacttaccccaattctatcaagatttagatattcagcacagctcacattttagaaaacatactatacgctcacaaagactcattctacatactcataaaactcccattccagcatagacaagatcatatgttgcacaaggaaaaacaatactggtccaattctatacaaaccttctt

SEQ ID NO: 140433 - DNA, 142 bp, Glycine max
  Clone ID: PAT_MRT3847_97820C.1
gctcagtggtcggccgtcgtcctttttttttatttttttattacaatactaggattgacaaggggagaatgcaactgtgtgtgatacaaattatgttatgggttatagatgctatttatatggaaagggattggctttgcaa

SEQ ID NO: 140434 - DNA, 487 bp, Glycine max
  unsure (1)..(487): unsure at all n locations
  Clone ID: PAT_MRT3847_97821C.1
aacggctgcgagaagacgacagaagggacttttaataaacatcactgttttttcaaaaagatgacgtagaacagaagtaaaacaggtaatttatttaaaatggggaaattcttgatatattatgaatataagtttatttttcattttctttttttactcaattaaatactaaagagaaattttattcatttttcttattagcaaggcctattatattcccatatttatctacaaattggttggtaattaattggcttggttgggttgggttgagttgagttgggaaagatacgatccagattccagtcaccatcatctcatttggcactgagtttctatcaagaacagggtgattatctatcagggtaataaaacacatatcagagtgtgacagtgactggtggaaaacaaagcacaaagctgagcatagggcccggggagaccatttaattgcngctttttaccataagaanaataattggggagc

SEQ ID NO: 140435 - DNA, 524 bp, Glycine max
  Clone ID: PAT_MRT3847_97822C.1
gatttatttctaatctaggaaaaggggttgtgaaaaatgttttaggaataatattagagtttaatgtactgttagtgtaaatattttcatattattaactgattaaaaattattttaacattataatctaatcacaagtcatcttgtataataattatattgatttttacaatattatttaaaagttattataataataatgattttttattggtagataatgtaaaaaaatttatagataaaaaataaactattttcttatacccgtgatcgacatagaaatcaaaaaagttgatatgtggatatgagatttatcaatgatcttaaaacatgagatattcttaaattatatggagtaccgtgaattattccataaataaatataaacttaaagaggtttgtctcactgtcaccaactgaggcccaatccaacgtaattttgacaacattagaaaacttcagaatggatcatatccatacatacagtatgagatactttgttgtttccttttctttaactatcc

SEQ ID NO: 140436 - DNA, 318 bp, Glycine max
  unsure (1)..(318): unsure at all n locations
  Clone ID: PAT_MRT3847_97823C.1
gcacgcncgcgtacgtaagctcgggaattcgggctcgagngcttctcaggtgttgaaggagcttcaagnngctangnctntanntncnaanggnttnancngcatnancagcngcgacnncnttcgncaagtnnnnannacncantatnatcgcntannagnncccaggcttgcgaagtnancatcntgtanaaagcagttgtagccgcnagnccacaatggganattaatagttganctntattnccnaagntattggcttgtggagnttgnatccacnngaatttcnggnntctggtttcgggacttcaatggagg

SEQ ID NO: 140437 - DNA, 1649 bp, Glycine max
  Clone ID: PAT_MRT3847_97824C.1
aattcggctcgagctcagcctcgtcattgccggcactggacctctcgccgtcgagtctgcctccgccgccggcggtttggtgcagccggagctttacaccagcaaggactggatcaacggcgttcggttctactcgtcagcgttccaggacctcatcgccggcggctacctctcgccggagtcgaagactctgtgcgtggagacgccgaccggacgcgacgtattcgcgctgagggagatcggcgtgaaggatgccgtcggaatcgcgagataggcggcgaagcctctcgtgaagttcggccgaggcgagcggattccgttcggcgacggagccttcgacttcgtgttctccggcgaggactcgttcgtgaagtcggcgaagccggcggagttcgcggccgagatcggccggacgctgcggccgggaggtttcgcggtgttccatttcgcaaaccctaaagatacgtatagttttaattcgttccttgatttgttcaattgtttcagagtagtgaagttgcatggcttggaaggattcgattcttcgatgccgtatatacgagaaattgttttgaagaaagagtgtggtgatggtgctggaaaattcgatttcgatgattcaaatggaaagtgttatgttcctggttataagcatgatttggttaagattgctgagcctttgattgaggaagagcctttgaagccttggattacattgaaaaggaatgtgaggagcataaagtaccttccttcaattgctgatataagctttaagaataggtatgtgtatgttgatgttggagctagaagctatggctctagcatagggtcttggtttaggaagcagtaccctaagcagaacaagacctttcatgtgtatgcaattgaagctgataagactttccatcaagagtatgggttgaagaaggggatcactttggttccttatgctgcgtgggttaagaatgaaaccttgatgtttgagattcatcgcgatcctggggagcatgttgaggttaaaggccgggggatgggtaggattcagcctttgcaatcgtcggggaggggggagtttgatggcgaagttgagaagatacagggatttgattttgctaattggttgaagaagacggtttcaaagaacgattttgttgtgatgaagatggatgtggagggtactgagttcgatttgattccaaggttgtttaaaactggggccatctgtttggtggatgagattttccttgagtgccattacaataggtggcagaggtgttgccctgggcagaggagtgcaaagtatgagaaaacttatgatcaatgcttgcagctcttcaaatcccttagacaaagtggagttcttgttcatcagtggttctaattgtgcccagcatgataggtgaaatcctacacttcttctgtaacattattgttttcctattaaccttctgcatgttactttttaccccaaacaatagggaagattactgtgttttaaattccttaccatgtaacaattgcaattgaaaattgaatcatttcttcaaatcgatggtatttgttgcaggattctcttattcttacccctattatagatatggaaatggataattgaattctgaaatctttctctctctctctttttatca

SEQ ID NO: 140438 - DNA, 326 bp, Glycine max
  Clone ID: PAT_MRT3847_97825C.1
acccactcgtccgaccactcattccctccaatcctttgatgctatcttcaactcactacaagacctctttataaagcttatacggtcccttacatcatcctaatccttcacacattaccaaatccttccacacaatagaagagctatactccatgctcaaccccaacctttaacccaatcccattccataattgaaaaaccccacttatcagataatcaacactatcatacttacccatccattccctagcaacaagtcttaataaaacatgttcatagttcacgacaagctctacagacacaaagcagacaacgagctcaccttc

SEQ ID NO: 140439 - DNA, 288 bp, Glycine max
  Clone ID: PAT_MRT3847_97826C.1
ccttacacttgttctttcttttgaaaacgaaccaatgctgttactccttctcaaagacccacaaatgaggttcatatcttctttgtgccgaagtgtcacgctgacaactgactaaaactctttgtgcctttggtaaagccaactgtttatctaaaaaagcgcgaaggaaatgcacacaattacagagggcacgttgtcttctgcagcttgatcaccctggaggagtgctttccgatcacaatacgttcctcagggaaaatactgtggcctaaagaaaccttttgcctt

SEQ ID NO: 140440 - DNA, 304 bp, Glycine max
  Clone ID: PAT_MRT3847_97827C.1
cccttacgtatgaatttggtgtatgattgcgtttgggctcgggcctattcctacaaatgttatcgattgttagcttgcctgtcaatattcctgcatggaagtgcaaagtcatcaccatgcttcaagtcacctacggtcacgtgctcgtcctagactatacgatcgacgacacgtctgctaaaaggggttacgattcatacctccactgcctggacgacatccaggatgagtacctacaagctcccgtcggcaacttggccgtccaactactaatgttcaagcacatcctcaacgcatcttttat

SEQ ID NO: 140441 - DNA, 260 bp, Glycine max
  Clone ID: PAT_MRT3847_97828C.1
ctgcgtcaaggtctacaaggtcaaggagctaggcttgaagttcgaacaccacttggatttcgagatcgttgattttcaagtacttcacaattaggtttataatctccactagtttttgttccttattttattcatgtttatattacttaacaaatgttttctgtgtttgtaaaatgtaaattgtaagtgacctcttcttacagaggaggaactgcatagcttcaattgaaataaaaaagttaggtttatattccaattcc

SEQ ID NO: 140442 - DNA, 177 bp, Glycine max
  Clone ID: PAT_MRT3847_97829C.1
ttctttttgaaaaaaaaattaaatgggtttgcgaaccatacttatcctacacgatcccaactaattcatatatccaccccccaatagtaatactttgatgaaagctttatttataaaggatgccccacgataaacatgtgatgctcttttcattaaaaatacttgttacaccaaggt

SEQ ID NO: 140443 - DNA, 195 bp, Glycine max
  Clone ID: PAT_MRT3847_9782C.1
gagtagtaatttatacctgagcagaagacaaccttgaagacgataacacctatgcagtcgaaaaacatattcatcaatctaatgcacactgctcgagcaagaaacaaatcatctaggatcggggcacagagatcatgcacacaatcgtgcggcccctgcatttgccgaaaacacgactgcattaacaccctccta

SEQ ID NO: 140444 - DNA, 1058 bp, Glycine max
  Clone ID: PAT_MRT3847_97830C.1
ggggctattaatcgtttattttatttagagcaagtaaatgcaatggcagaataacaagatagtaacttcgtaattaatccaatatacaaccatgcctttggcatagaggaattgcctgaagaacttctatcaagaagattttgcgcatagaagaccagtaattaatgagcaagactataactacaagaattaacaatctaagccgaggttacaaaattcagcaaacaaagtttattttttttctctccaaatttatatggtggtacaactttaacgcgtcatcaagggggagggggagacatacagcacatcattgtttcaaaatatgttacaacatatcacaagggaggattggagccctctctaacagatggagacctggaagccaagctcccatcacgaccaaaccttgacacacttctactaacacttctaggagtagccaaagcaggagtagaaccgcggtaacttgctcgaagtgtttcatcaacagaagacgaggacttggcaaacgcattcctcacaaacttctgagctgcaggagacagtgtccgcatgcttggactggcactcccccctctaactggtgatgccaacgggggcttatgaaacatttttgacctctcccttattttgcgtgcagcctcccttgaaagccggtgtgcctttgaatctcttgccggcgctataagaatcttataatgaggtccatcagcactaccaccaatatcacggagtgttcctcaaatcctccaaatcatacttctttaacttatccccttctctaagagacataggcgctggcgtagcaccagcaacaggcgtataaagcacctcaacagttccatcatctttgggcctagaatccatcattttaccatgaaacctagtgttcccgcgattgatctccttcgtggcggctttaattctatgcgctctttcctcctcggtcaaagggacctcaccccgatcagcaggatgatacatcaacaaattcttggcagtgtaattccacccttcaagggtactcggaggctgatatgaggttccataaccat

SEQ ID NO: 140445 - DNA, 194 bp, Glycine max
  Clone ID: PAT_MRT3847_97831C.1
gactactgatgggggaactgttaacctcttagattgcacagattctgctccatggggctgaagcactagttgaagcctctgcacaacatgcgaatatatagaattcattcccaagacaaggatctggatttctcaacatagtcggcatcatagtttgcaaaatatcttagtatgaattacaaactgatgaactt

SEQ ID NO: 140446 - DNA, 540 bp, Glycine max
  Clone ID: PAT_MRT3847_97832C.1
attactatcaacaaagacctttaaaaatacctgcttaagaagtcaggtgaggctgcaagaaggcgaccgaagaaggaacatgttgagtagagcgtgacaagagaactggtctgagaatagtgtcccagtgattgggaaatttgccccaagttgttgctgtaaaccaacccaattgttcctccacagaaatatgctatgtagtacagccagaagtcccatttacgcactagcaacttagctgaatgctcttcccctagcattgaaaattgctctctctccaacacattcataatacaacatttcttctctcttgtgctttgtgcacttctattcctcacgctgtcctcgatactaataaactctttgtagagttcatcgtcattagggtcagcgcgagtgaatcttgagtagtagaaggagaagcttgtggggacagtaaagaaagaccattctctggaatacacaatgccaggcaagaaaaagagcagcacaagcagaagaattgcacctataaggataacgcgagcaatggcctggtgc

SEQ ID NO: 140447 - DNA, 139 bp, Glycine max
  Clone ID: PAT_MRT3847_97833C.1
gtgggtttaccaggaccttcttacaggtgatgagctcctctctgactctttccgatacaaggaaattgagattggtatgctgtggtaagttgaggggaagtgggtggttataggatcagtttcttgtatgaacttgggg

SEQ ID NO: 140448 - DNA, 1930 bp, Glycine max
  Clone ID: PAT_MRT3847_97834C.1
cacggcccccgcgtgctcaatggctatggatctggagtgctaagagacaatggagctgtgcactcgaaccttcacaagtttctttcttttcaacccttcttcctcttcaaaccccctgtttcttcgtgctaatgccaacgctaaaacacccttcaaattcaattcccttaaactctcatctttcccccctcatattcacctcttccaaccctttctctctcctcacacttcttctcccttcacactctcagctgcttctgcttcttcttcttcttcttcttcttcagttgcagttggcacagaacaggaccgtcttccagcagaattgaatgtcactgaaacagcggaacccaattccagagttagattgcatgtggaggtgccatcattggtatgtgaggattgttacaagagggtcatagcagagtttatgaagcaagcaaagatccctggatttcgccctggaaagaaagttccagaaaacattcttattagttatgttgggagtcaaaatgttcagaaggctactattgaatctatattaaggaggacactctcacatgctatgacatcagttactggaagggctttgcaggactcggtacaaatagtgactaagttttctgagatggaggagacatattcttctcttgggtctcttagatatgatgtccttgttgatattgcaccagaaatcaaatggattcccgataataatgcatacaaaaatttaaagattgttgttgagatagatagtgatatagatgctcacacagcatctgaacaagaatttagaaggcgctataaatccattggtgctctgaaagtggttactgacagagggctacaggttggagatgttgttgtccttgacatctcagcaacaaccattgatcaagatgaatcaaatgttaaaagtattccttctgctgaaagtaaaggctttaattttgatacagaatatggtgaaaaagtattaccgggtttccttgattgtataattggaattcaacaaggtgaatcaaagtcttttcctcttgtatttcctgaaacatggaaccaagaaaatcttcgaggtgttcatgctcagtttactgttgaatgcaaagaacttttttacagagatttacctgagctggatgattctattgctgataagcttctccctggatgcaccacagtggagcaggtcaaagacttgttgttacagaaatgccaagaggtggagcaaacagctagagaacaagccactgataatgctatcttagatcaggtttctaagattgtacaagttgatatacctcaatccttgtttgaggaacaaggaaggcagctttatggagccaacctattagaaatacaggcaaaaatgaaactaaatgagcagcagctggcgactctgtcaagttcaaaggctgtgaacgaatttcttgagcatcagaaggaaaatataacaaatttgataaaacagagtctggcagttggtgatatatataggcgtgaaaatctgcagtttgctactgaggaccttgtcaaagaggttgagaattccattgctgaattcaaacgtcaaaaccaagaatatgatgaggaacgggtgaagggacaggttcaagaaatactagaaggagctaaagtgcttgaatggttgagagaacatgcagaggttcagtatataactaaatgagggatgagcactagccaaaacaaatcaggaaaatgaaattgcatgttcatttgaatgtgttttgtttcagcggatgtaagttgtgagaaaatttcttgattgaattttgaagaaagaatattaagaatagaataatgcattacaagtttgtatattgagactttgatgataaattaatagtagatatttaactctaacaaaaaacagtattgaaaaacaccaatatatttatcattacaaaac

SEQ ID NO: 140449 - DNA, 1296 bp, Glycine max
  Clone ID: PAT_MRT3847_97835C.1
aagttttgttggatttccagaaatctttctgcaaacaacttcaaagggagtatacctgttgagttgggccatataataaatcttgacacgctggatctatctagcaataatttttcagggcatgttccagggtcagttggttatcttgagcatcttctgaccttgaacttgagccataatagtcttcagggtcccttgcctgctgaatttggaaatcttagaagcatacagattattgatatgtcattcaactatctgttgggtagcgttcctccggaaattggtcagctgcagaatcttgtgtctctgattttgaacaacaatgatttgcgtgggaagattccagatcagcttaccaattgcttaagtcttaacttcctaaatgtctcatacaataacttatctggggtcattcctctcatgaagaacttctcacggttttctgctgacagcttcatgggaaatccattattatgtggaaattggttgggatccatatgtgatccttacatgccaaaatccaaagtggttttttcaagggctgcaattgtttgtctcattgttggtaccatcacattattggccatggtaattatagcaatctacagatcaagccaatcaatgcaattgattaaaggatctagtggaactgggcaaggcccccccaagcttgtaattcttcacatgggcttggccatccatacctttgatgacattatgagagttactgagaatctcaatgagaagtatattgtagggtatggtgcctctagtactgtgtacaagtgtgttttaaagaattcccggccaattgcaattaaacgactatacaaccagcatccacacagctcaagggagtttgagacagaacttgaaactattggcagtatcagacacaggaatcttgtcactttgcatggttatgctctaactcctaatggaaatcttcttttctatgactatatggagaatggctctctgtgggatcttcttcatggtccctcgaaaaaggtaaaacttgattgggaggcacgcatgaggattgccgtgggaactgctgaaggacttgcttacctccatcatgactgcaatcctagaatcattcacagggatataaagtcctcaaacatcctgctagatgaaaactttgaagctcgtctctctgattttggcattgccaaatgtgtgtcaactgcaagaactcatgcgtcaacgtttgttcttgggacaataggctatattgaccctgagtatgcccggacatctaagctgaatgaaaaatccgatgtgtatagc

SEQ ID NO: 140450 - DNA, 185 bp, Glycine max
  Clone ID: PAT_MRT3847_97836C.1
gccagcctattagaaatacaggcaaaaatgataactaaatgagcagcagctggcgactctgtgaagttcaaaggctgtgaacgaatttcttgagcatcagaaggaaaatataacaaatttgataaaacagagtctggcagattttcacgcctatatatatcaccaactgccgttctagatcgcga

SEQ ID NO: 140451 - DNA, 420 bp, Glycine max
  Clone ID: PAT_MRT3847_97837C.1
cacaggttggagatgttgttgtccttgacatcgcagcaacaaccattgatcaagatgaatcaaatgttaaaagtattccttctgaagaaagtaaaggtcgggtgatgtgcttgaaggatgataataaactgataagtgaacatatttcctctaaacctatattagatatgcaggctttaattttgatacagaatatggtgaaaaagtattaccgggtttccttgattgtataattggaattcaacaaggtgaatcaaagtctttttcatcttgtatttcctgaaacatggaagcaagaaaatcttcgaggtgttcatgctcagtttactgtaagtttctaatgctgaatcaaagaagtttagttgttgtagggacatgaaatgacatgatagtttttttctttgggtcctttggatacca

SEQ ID NO: 140452 - DNA, 616 bp, Glycine max
  unsure (1)..(616): unsure at all n locations
  Clone ID: PAT_MRT3847_97838C.1
aggattttcagtttctaaatttgaaactattaactataactataacctctcaatgaaaatttcgggttactaaacctcacaatcttaagggatgtgctctatcctatcatatatgaatttacttaagattgtcatggatcccaggtttcagcatccaagggctgcatgttatctttatgagctaatttaccgttgttttaagtctaacagatccctggatttcgccctggaaagaaagttccagaaagcattcttattagttatgttgggagtcaaaatgttcagaaggctactattgaatctatattgaggaggacactctcacatgctatgacatcggttactggaagggctttgcaggactcggtacgaatagtgactaagttttctgagatggaggagacatattcttctcttgggtctcttagatatgatgtccttgttgatattgcaccaganatcaaatggattcccgataataatgcatacaaaaatttaaagattggttgttgagatagatagtgatatagatgctcacacagcatctgaacaagaatttagaaggcgctataaatccattggtgctctgaaaagtgggtactgacagagggctaca

SEQ ID NO: 140453 - DNA, 1268 bp, Glycine max
  Clone ID: PAT_MRT3847_97839C.1
cgtcgttttcatcagtcaatctctcttctctgctcaaaagctgcttcttcgttttctgatcagcgatcatgtggtcctttttttttgttgttctgtcccacttttttctcgaaccactccgatgttttgtcgttttagaaaacaaaccacctttttcctttttttcttttccatctgccgacaccgaaaattaataatatagaaactttctattttcatcagttcaacgatttttaattttttttgtgtgtaaatttttatcttctttttagtgaaaaaatgctatgctgatttaagaggaggaaaaacatagatgaataatgtatctttaatttttcctttgggtacaagattaattaatggctgttttgattgttcaggttaatattgattctctttggtagcggaaaaagagttgggaaagcgacaaatgaaggaaggtaacaaacaaaagaaatgagaagaatgaatacaagaatttgaaatactaattacaggaaatatttgcaatcataaaaattgaagccttcaactactactaatatctatcaaagtctagagtagaagttaaaacgacaaagaactacaaaatcaaatatatataaaaaaaaaagaggctaaaactactcaaaactgcaaatgcactcagaattgtgttgattgagcacctaatcctagccatgtcatggattcagccggcttatttgaagcagagttgggattgtttatttgatatggggctttggaagcaattctgcaaacacagcataaaaagataacagaattagtcaattaggccgaaacaacattactcagcggatagttgcaggacaaaaagtggaaaactgatttgcacaatgcactagattaattccttctttaatctttactaagaaaatagcacgatgcatcaattttccatgacacaaaaactagacataatcagaccacgcaaaaaggccagacattcactacacaaactggttgatactgagattgtttcaaatgatcaatctaagagagggataaaagtttatgtttgaaaagggaaaaaaaaatcaaagatgcagcctcataacaaacagaatcaccaagcaatatttccttgtttgagaggcttacctatcttttctcttagaaaggaaccgatgaagtgaaactttcctagcaattggcagttctgtacagaaattaaatttatgatcagaaaaaaaacatcaaacataatacaaaagtattggctttggtttgaccatggttggaacctt

SEQ ID NO: 140454 - DNA, 260 bp, Glycine max
  Clone ID: PAT_MRT3847_9783C.1
cgtagatgtccttgaagaacgggctaccttcgcatgacgacggcactggatctatgcatctgctcgcactctataagcctctagatatgtatacttgggggctgttcagatatatgctacgagtggcgtcctatagagtcagcatgctgcatcaacaagatccgacagatgtgatcgattactagatccaaattctcgagtctcaaatccgcgtaaagttggcagaagtccagaagtaggacgagattatagcagtgaaa

SEQ ID NO: 140455 - DNA, 240 bp, Glycine max
  unsure (1)..(240): unsure at all n locations
  Clone ID: PAT_MRT3847_97840C.1
ggctgatgacaccatcaattatgatgccaaatgctatgaagtgatgcagtgtacatataatgtagggagaattgaattgcactacttnaaagacgagatctttaacgaaatgtctccacatgtgcgtaatagtctcattctgcatagcattgggagttaggctgatgtgaccacgagtatgaggcttcagcgcataagctggtgcgagatggagagattcgagataaggtggtattgata

SEQ ID NO: 140456 - DNA, 338 bp, Glycine max
  Clone ID: PAT_MRT3847_97841C.1
gaagtaacttttaatatttttacgctgggatgaacaccctgggggcgaggcttcaaaatcgcttaaaaagttacaagacattacttgacatcaaaagataaaatacaagacattttagcataaagtaattcaagctaggaatatacaaccgcatttaatgacagttttgtgaacaataatatttatttttacacacttagtaaagccgcactctgctatctatgccttgctatacctacaggttatttgtcagttcgttatcccggcaccatgattgacataaacctttcgcattactgggtcgagtgtctcctcactgaattaataaccactgacct

SEQ ID NO: 140457 - DNA, 412 bp, Glycine max
  Clone ID: PAT_MRT3847_97842C.1
gaaatagcagagggcacatcacctaattgtccaggcttgtccaccttgattttatctcataatttgatcagtcatattcccaagtgttttttcagacacatgaatgctctaacactacttgatttatcatataattatgagttaacatctttgccaaagtctctgtctaagttgaggtctcttacttctttagtgctccgtcaatgttcaaaattgaaagatatacctccactgggagatctacaagcattgtcaagattggacatttcaggttgtgattcgctcctcagggtaccggaaggcttgcaaaatctaaaaaagttgcaatgccttaatctttcccgcgatttgtatttatcattggtacccggatgcgcacttgccggtttgagcaatatgcaatatctggatc

SEQ ID NO: 140458 - DNA, 229 bp, Glycine max
  Clone ID: PAT_MRT3847_97843C.1
ggttaaatactcatgcggggatggagccattcttattaccaccaaaccgcccccttatggctttcaacccatttattaacctcttaactcctaattacggggccaccttgacattaacccccctggttaggcaatttttaattatggcggagggcttataaaaaaaacctttttggcccccaaagatttcggtgagaagtcttcaacgggttataaaaaatggggtttt

SEQ ID NO: 140459 - DNA, 344 bp, Glycine max
  unsure (1)..(344): unsure at all n locations
  Clone ID: PAT_MRT3847_97844C.1
gaganaccgacagnggcagagagagaaagacgaggggagggggagagaagctctcgggncagccctaanggccnacgctggcaaccgcngaaacngnaggcgccagncgcgcaaagaaacagagngngccnaagaaanagcaagagcggagagggaccggaaagaagaacagnangggngaggaagaaccagcgaacgaaggcncgaagagcgacncagangagaagagcnngcaggagaacacccgggaagaaannaccgagaaaaaggacccggaaaccgaaggaggaaaagnccnggagaacaaaggaaacaaagagnngaaagaaaanannggaaaagaa

SEQ ID NO: 140460 - DNA, 641 bp, Glycine max
  Clone ID: PAT_MRT3847_97845C.1
ccagcgtccggggagggagtgtgtgataaatgcaccatcccaatcccatatcatgagactgtgtagttagttagtagtgaaaaaatgaaaatggaacaagaggtttcagtttcacactcaacacaaacccaaagccccaaaacagagtaaaagaaaaaatgacgacggctatcgtacgcgaccagaacctggagaaacacattcacaaacagatggggtgcatggctggtttccttcagatcttcgatcgccaccagatactcaccggaaaacgcatctactcccacaaacgcctccctccggcctcgccggagccggaaaaacccgccgcctcaccgacgcgttcaacgccatcgccgcccagagaggtcgtgagttcagagcccaaggcgagtgtccccactctccccgttctcgaattcaaagaaggcacgcggtcctcgtggaagttcgcgagagaagctccgaggctgtcccttgacagcagagccatcgtggacgcgaaaggaacgctacaccttcacccgcgcggcgagatccctcccgaaaacgacgctgacaagcagcgtcgttccaccagtgtcattgccaagctcatgggccttgagcccttaccagattcggagcccgagcccgggcct

SEQ ID NO: 140461 - DNA, 436 bp, Glycine max
  Clone ID: PAT_MRT3847_97846C.1
cccgggttgacccagcgtttgcccttgcgaccgaggacgcgagggctggagacaattgggattctactaaggctattaagatcgcaaaaaatatgaaccttagacaaagtgttgttggagatcttaaacttcttacggaggggaagatatatgagggtaacgcatattactgtacataatattagcgcatgggagaatcatgtaagtcaaataccccttatgatacaggaggaaattctgacttgtagtgcaagtgatttcagaactgcaatggcgagtaaaaaatagcaatgcataaaacgactgaaatgcatgcgggagctatagaaattattactgatacgttcgcaagaactgacctgtacataattggggcaatgcttttggttgatacctatcattaccaaccctgaaaaatgcagcacgtagcaattct

SEQ ID NO: 140462 - DNA, 652 bp, Glycine max
  unsure (1)..(652): unsure at all n locations
  Clone ID: PAT_MRT3847_97847C.1
ctgtttatggagtcactggcaagcatatgtgaggttgtgttgcctcctttgcctatggatgctcttaagatcagaaaggaagaccaaattgatgattatgattctagcaagagtctcaagtccttctgggacatttctgcttctcgctatccaatccctcatgaggttgctgagatgttaacgaagaggagcttaattgaagcagtaatactgattagagtagttttatggctgctggcaacaaggttgggaaccttgttgctctgtggtttcctctgtcttggtgaaaaatggccctatgtcaacaacttctcaaacatatctttggagaaaagagaaatggttatgcagaagtggctgaaacataggttcctcacacctattagactggcctttgcttacatcaaagtcttgtgtctctttgtttttttctcttgggttgatgaaaatggtgacaacccagcatggaaagccattggatatgaggtaccagctgatgaaaacttgaccaatgcctccaaaactaggccccttgaaaaggggattatagaaaccatgaatgaatctgactccgctcttcaacaatctcttgctaacaaaggcctttatgttacactggactcaaaagcaacatccnaaagtcaaatgtgat

SEQ ID NO: 140463 - DNA, 568 bp, Glycine max
  Clone ID: PAT_MRT3847_97848C.1
atccggttggggtagatatcgaatctctggatcatctttgcttgcagcaatggaccagagttctcaagctccttattcagatgtattatctgctcagtctggggatttgtctgcgatgcataacaaagaagagaatgatggatcacattttagcaatgagacattgacaagagtggatgacagaactggaagagcccaccaaactgttgatgtagcagaggttatacggcgatggacccatgccttgcagcgtatccacaaacaatcacttcatttggcaaaagcgaatgatggagagggtccagatatattacgcagtgcacaggaaggtgattcaagtggccatgctgagtctttagcaacaacccttgcagagcatcagcagcatttggctagcttccaggtgcttattaaccaactcaaggatgttgctccaaccatacagaagtccatatctgagtgtacagaaaaggttaactgtataacctccaatttacctccaacgaacagacctaatggtcggtcaacgtcacctatccagacacagagtagtgggaggatggacaat

SEQ ID NO: 140464 - DNA, 369 bp, Glycine max
  Clone ID: PAT_MRT3847_97849C.1
ccaaacagaaaccaatacaatgtataacctgctcctgaagtaacagtctggattaaccaaaactttgcgaaactttcctaagaaagactggcctcaaaactgggactgtgggctggtggagtttccttaaattaaataccctcatcattatccacaggtgagtatcatttaaatgcacacgcatgggagcaaaagtgcataaaattacaaaggaacccattttatcatatcgggctacactgtagatatagatatcctacacctgatgtggtctacaaccccaacgattaacaccattggctccgagaggaaatttgttctaggacttattgctgttggagacaaggatccatgtgaaagttttcaaaa

SEQ ID NO: 140465 - DNA, 441 bp, Glycine max
  Clone ID: PAT_MRT3847_9784C.1
ttcaagattcaattctgtttatcctttgttttccaaagaaagagtaattaaaaagcattgggttgccttgagggggaaagaacatcagttggattggcagcaagagacccttcagggattctctccccatacacctacaatctaataaacacaggccctgatgatgtttacattaaagttcactactgtggaaattgccattctgatctccaccagataaaaaatgattttggaatgttcaactatttctatggatccaggacatgaagaggttggtgaggtactggaggtggtgtcagacgtttgcatgttcagagtggtagagttggtggtagttggacttatagtaagttgtagcaataactgccatccatgccaactagacatagaaaattactgttgctagaatatcaggttttacaatgacgtttattgtttatt

SEQ ID NO: 140466 - DNA, 499 bp, Glycine max
  Clone ID: PAT_MRT3847_97850C.1
ggctcgagctttagctcgtccgcttttctatgaacatcctccatacaaagcacaaaatccgcatactatcctgtggatctttacaacatgcacccgcgatttctacgatcccttcacatggtccattctgtgcacccttgccttaccgtaaagaaccttagcctgatatctcaacatgcgcttacgatttcgtctacaatggccgtggataccacttgctgcagaaccgactagatattaaaggactacaccgcccactgaaccgacatcggacgagctctctatcaagacgtggatgacttctaccgaccatgcgatccatataaggagaacttgcgcctgtatcgcatgcagagtgcttcatctgacgggacattatcggcataagaagttgctacatagcttccggagcctgcactcggaatcactagagctagggatggcatgaaccgctgggtctggactcctgtggcagctgcgcacagtgattcacggttgc

SEQ ID NO: 140467 - DNA, 183 bp, Glycine max
  unsure (1)..(183): unsure at all n locations
  Clone ID: PAT_MRT3847_97851C.1
aggcgtncgtacacgacaaaacgactcatgttgacaacaaaaacaaatggggagggtgtgtttgaagaacaacatggaggatctaaaggcgggttagaaacttctttatcatgtggtggatacacatcctcgcgtggaacaaagcttgtttaaaagttatttttcttcaggggatgactatta

SEQ ID NO: 140468 - DNA, 741 bp, Glycine max
  Clone ID: PAT_MRT3847_97852C.1
acgaaattggtacaaaacaaaatgctactgtttctccggctgatgatgcagttgttgtgatgcgtcaaagcactgctccaactgctcgataattattctcgctgttaccgccagcaactgcttcttttgttagatctcaaagactgagttagtggttggaaaaggtttaattaacaagatgtgcaaaagaaagtgtccaggtcgagaattgaagctgccaagcaggcccacatcggcggagttatcatcgtcgacatcatcaggtgagtggccggaattatcatcgtcatcgtctgcatcttcggtatcatgtacatcaaagatgccgaaggagtcagaagaagagaacgagcaacgtgaaaattctactccagaaacaaaggccatggatctcgttggttgtcctcgatgcttcatgtacgtcatgttatccgaggtggatccaaagtgccctaagtgcaagaccacagtgtttcttgaacttttcaaagatgaaaacttgaagactaacagttgagttatggggagaattatgggaattaaataaataaaatcctcgtggttttaggacgtttgtttgtttgtgcttattttgtttgtaaaatctgaagcttcatatcttgttgagagtgaagtaaagattatgggagctagtatatggtagtgtaacgcgatgccacactatatgggtacggaacgaggaatcgtggtagtaataagatgcgcctattttttttcttt

SEQ ID NO: 140469 - DNA, 437 bp, Glycine max
  Clone ID: PAT_MRT3847_97853C.1
ctgggacagctggctggtgccatgccgcaagcagtgactgtcacccctgaggagcggcaagcaattgagcgtgtaagtttatcctctcgagtcttgtttatattgaacaatgaattatatatagttttccctgtctgatgcctctagaacattggaaactttattttcatctcaaacttcctggcttctttttcttttttaatcaatttcatctgtaattttgcttatttaaaggtctataattcaataataggatgtgatgaggatatttttgttttggttaaaagtaggttttaatggattgggcttatgcttggaaacatttattttagtgattttgacgcaatgctgtttgaatagtgtaaataagaatcacttttagatatataactattaaatttaaaacaagtacaacttatttaatattattaagttag

SEQ ID NO: 140470 - DNA, 438 bp, Glycine max
  Clone ID: PAT_MRT3847_97854C.1
tgcaaccatagctttattaggattttttcttctttgttttcaattaggttcttttgttggtctccttcaaacgccatcggtccaaatcctctatttgccattgtgtttcgatctgcttcctacttcgattgtttctctactgttacatggccatggcggttttcgcaattgcctttgaacgttccctgacaaggttggaaatatccttcttccagccgggactttatgctgacccttaaagaagcagtctaagggctcttaccaaatcccagctgcgtgagattataacaccagctgcttgcaccatctgttcttcgctcaaaaactataatgtccactcctatgttctatatgagtccacactgtttgcttatgcctacaagatcatcatcataacctgtggtctactaagctatcgcttgctatcccacccatatt

SEQ ID NO: 140471 - DNA, 227 bp, Glycine max
  Clone ID: PAT_MRT3847_97855C.1
gttctttctttctatcgggtttcgaaaaatacgattttgatgccaacccatgtaccctttacagaccccgataagtattcttcattgcccattttgtggctccctaatttgaacattgggtatgctctgccttggttataggggatattgataataataagatagcgagtgagatcaaattcaaaggatctgaaaagttaggatccgaggccatttctttggagggt

SEQ ID NO: 140472 - DNA, 476 bp, Glycine max
  unsure (1)..(476): unsure at all n locations
  Clone ID: PAT_MRT3847_97856C.1
ggggggggggnnntnnnnnanananngancagactcaccgtgtttaaggttgacgcacagacattgagtcagctgcctgaagcttctgtgaaaagcgacgaattttataaaaaaccaaccaaaccttgggttgtnggggttcccattttttttntaatgttctcaaacatctctaatgctcattaattcatccataaaaaactctcttattttacacccaaatttattnaatttatcaaagtaaacattttaacatcacatccacaacaacacacacttcaaaatccttactccctgttcttaaacctcatgcctaacnaatgctaatggcccttgccatgaccatcttggggcccctcccagggaagttttcagcccaggacaacgggaccatgttgctttgccctggggactacccacaaccacaggaccgaacacaaaccctataccgcgagtagtggccagcgctttggctg

SEQ ID NO: 140473 - DNA, 192 bp, Glycine max
  Clone ID: PAT_MRT3847_97857C.1
ccgcggggtatataacaccgaaggggaactataggattgatttcacctcttggtgcacccgcacaaaaaatacaaagctctaacactgatcaatggcaatgcatcaaaccgtaataaatctgcaaaaaagcaggggggcagcctgtcctggtcgctccatgatggcatatggattaaaccaaaggtcataac

SEQ ID NO: 140474 - DNA, 341 bp, Glycine max
  Clone ID: PAT_MRT3847_97858C.1
acgcttttcttttcttcatttaataaatcgcccatgctttgtgtgccaaacaccaaagttcacaccatgactagctccgatcaacatgatggggctcaatacaccataatacctacgctccctattgtggctttgatgctccattttgctgtttttggaataagatgccgtgggtgcggcggaccctcattgactttcagacgggcccattagatatggggacatttataccctagggattaaacaacggggtctttttatcagtggccaattcctaggccctgaaagttattctgaggccagcgacgatttgatggttagcgatgactattacttgtccg

SEQ ID NO: 140475 - DNA, 364 bp, Glycine max
  Clone ID: PAT_MRT3847_97859C.1
tcccacctccctgaacacctccaatacagtctacttcacaccatctgagacacgccggtcttcatctggccagagagcctacgccaatttggctaccacagctcaaaagcctacgcctggtcctggcgcgtcatgactatacaacctcctcgcaggccacctgcaattggacgacttcgacatccccggcatgtgccggggcatgttcctcaacgactaccatgtcgcctggatggatctcagaaatccgtacggagcctaatgtaccaattgctacacccaaaccctataacaccaatttcgttagaaaaagtttgcgatctcaataaatggttcaagaataattcaatgcttgaagtgaaag

SEQ ID NO: 140476 - DNA, 355 bp, Glycine max
  Clone ID: PAT_MRT3847_9785C.1
agaatatcaatatgtacaaacaaatactattggtttgagactcttgtgtgtggatccatgtagtttcaactaatctttatgtgacatataatcgattttttcaattcgactacatgtcatatatagagattggatagaatatcatggacatgttgtagtcttagatcatacaataatttcttgcacaagaagattgaattgatgaatggtttggatggaactcactatagctacagagtcacgagctgcaacagctaagatatctgcacgtgatactacaggacgattgcaagctttgtcaactgctactttgatttcatcaaccacctcaaatcctttaattgaattaaaattt

SEQ ID NO: 140477 - DNA, 676 bp, Glycine max
  Clone ID: PAT_MRT3847_97860C.1
attaaacaagagaaagtagacagatacatgttggtaaatgctaactgtctgtattcacatagagacacagtgtaatctctgagcccaatatacagagaaaagaagaaaagctaaaattctataaactactacacaggggcctagcgccctccagcagagccaagggaactggagggcttttcttttttcccacagagcatggtggtgtggaatccacaaatttagacaagaaaggataaaaaatgaattaagaacagaaacggagattcttttcctgttgtattttgctcaagatacttccccccaaattaattgagaaccatgatgttgagacctcaaaacagggcgactgagcacagagggacagggaggaaaggactgcaacttgctcccagggactggagaaaattaaaaaaaaaaaagaaaataaaaaagaaggttggaatccatcagtcttctgtgctaatcatcctcgccttcgtcctcctctccttcctccccttcatcctcatcgtcatcttcttcaccttcatcctcatctccttcttcatcaatatcttccagcccctcctcctcttcgtcgtcgtcatcatcatcttctgcctctccttcttatcatccatgtcgggaaccaggtagtactgcaggggattttgccagatgtcatctttgatga

SEQ ID NO: 140478 - DNA, 244 bp, Glycine max
  Clone ID: PAT_MRT3847_97861C.1
gaccgggagtaagagagggatcgaatcgaaacggatttgacgggaaagcggaatgagttggacggaccgaagacgatatgagttgtcgcacgcggaatcgctgtcttaaagaaatcttctacatgcacctgcttggctccacaaactcaggcgctttgagtattcggtagatgcttatgagctatgacttcaaggttcgcgtacaagactacgactaacattgctcactttgatcagttaagag

SEQ ID NO: 140479 - DNA, 312 bp, Glycine max
  Clone ID: PAT_MRT3847_97862C.1
tcttactcccactctttctattctctttttctctcccaatacctacatacattctcgtcgcttctctaaaatcgttggactctataccattattctaataatcatacctgatacatacattatttatcatttagtcaatatgctcaccaatttccatacccaaactcatatagacaatgtactaatactccacatcataataccctcaatcctctcaagtcttaacaatcacataatccaactataagattaccaaatagttactctcattaacatatcccattatcatcatactccttccacaagtatcca

SEQ ID NO: 140480 - DNA, 1020 bp, Glycine max
  Clone ID: PAT_MRT3847_97863C.1
acgccgctcgttcccgggcaaagggataaaaaaaaaaaaaagataaaataaaataagcaatacgaaataaatcccaaactcccaacactgtttctttctccgacgacacccccttttccctcgtgatcttcgacatggcgagaggcgcctcccaatctcaatccacagcgtcccatgctcgttctttctgccctacgccaattttgtttttcgccttgtatctctcccaattcctcagtttccttctttcttcatctttgtgtcatggccagaggttcttcccagtctcagtcctccacttcaacagccacgcgaccaggaccagcaggcatggctccccgcggttccgccgccgccaccgccggcatgcgccgccgccgtctcggcggaggaaacagctccgccagcaccggcgtcggaggcggcagcagcaacatgctgaggttctacacggacgacgctccggggctgaagatttcgccgacggtggtgctcgtgatgagcctctgcttcatcggcttcgtcaccgcgctccacgtgttcggcaaactctaccgctccaaatctggcggcgccgtttgatcttttggagatgtagttccgatccgtacccgatcgctttgttttctgtttttaattccgtaatttagttaacacttgctattttgtagttgtgaaatcaaatcgttgactatcttcttatcgttcctccggcgccaccgtttgattcctcttcgcgatcatggatctgatctggatcacgaaatccggtattcgaaacctgcgtttttgtttctaatttacgcttctttatttttttgattttgaaaattttcttagggcttgattaggcttcctgtttctctagctgtgaaatgattggatcttcttcttgctcttgaaggaagtcgcatttggtctttccttgaaaattgatctctcaattcattcattctattattacactttttttttgcttaaatttcctatacaaacaacggctgcatttcagcaatttct

SEQ ID NO: 140481 - DNA, 416 bp, Glycine max
  unsure (1)..(416): unsure at all n locations
  Clone ID: PAT_MRT3847_97864C.1
ggtncttttgataatatatgnaannacaaaagatgttatcataggtccattacatgccctaatatgaaatttatcantgcacatatnctagtctacacatggganctttgcatgtctaatgttggaacataagtttaatttttcagtaagaactccctcatcattgtttgaatgggtaaatgttttacttttttcccagttttgttaattaactgaatgtcttaaaaaaatagttaaaaccaaaattaattaaattctaattgattaaacacctaagccaattaagttttgataaaatgtttaatatacacaatcaaccactgcaaaaatataaaccattttcattgaaccaggaagggaaaaattactttcttgtcatcttgttaaaaaatttcaatggcaatgcaaactttttc

SEQ ID NO: 140482 - DNA, 940 bp, Glycine max
  Clone ID: PAT_MRT3847_97865C.1
ggctcgagggtgatatttgcggaaatgtttgtgatcgtgagcttcctcttcaaaactccggcgaggaagctggtgatcgtcacattggatcggctcaagcgcggtcgcggccccgttgtcgtcaagaccgtcgccgccacgctgctggtggtgctcgcttcctccctctacagcatcgcaaaaatccggcatcggaacctcgatgctcccgtcgctaaccccaccgaccaagtcctcgtgtacaagcacatgctcgaagcttctcttatggatagattgcaccattacataagagagcttcggttactgaggaaggccatggaggctgctaagaaacagagtcgaagttttgagggtggcaaaagtgtcagtgcagcggagcacaaggcattggtggaagaaatcgccatgttgaagcccaaaattgagaaactagaatctgagtgtgagatggaagcaagcaaggctaaggctttggaaactgaggtgaaggctcttagaaagcaatctgaggggtttcttatggaatatgatcgcctcttggcagacaatcagaatcttcggagtcaggtgcaggctattgaccacagctctccccattctgttaacaaaaagagcatgtgaaggttcagatatgcagagcaattttctcctttgattcagatgtttctgcttgggtggtgtgtgtttgaataagttaaccaggtcacaatagaaagaggagagagatgttatgcggattgagtgagttgattattcttaaagccctgatttagacatatatgaatgttattaggccatgtttgcagcatatatgataaggataagataatagaatgggctaatagtgtaaaaattatactatcaaatgtttggtgttattaacgtatagactttttgtgtatacaaatataaattttatgaagttatccctttatgt

SEQ ID NO: 140483 - DNA, 552 bp, Glycine max
  Clone ID: PAT_MRT3847_97866C.1
tcgccctttcgtccgcaaaatgttgcagcttctgtacgcggtgatatttgcggaaatgttcgtgatcgtgagcttcctcttcaaaactccggcgaggaagctggtgatcgtcacattggatcggctcaagcgcggtcgcggccccgttgtcgtcaagaccgtcgccgccacgctgctggtggtgctcgcttcctccctctacagcatcgcaaaaatccggcatcggaacctcgatgctcccgtcgctaaccccaccgaccaagtcctcgtgtacaagcacatgctcgaagcttctcttatgggtaaatctagtttctctctcgtttatctgttacttcgggggatattcgatgctctcaaactatgcactaagcaatgatttcgaattccaagtgtatatctgaagaatgaattgatggtgactgtgataccctagggctagagctttgtgatatcatatttcagatatttattatttacttgtgtattacctacttattaatagtaaaaaaaatctcttaaaaaaattatataataaaaaatcgtctaagc

SEQ ID NO: 140484 - DNA, 237 bp, Glycine max
  unsure (1)..(237): unsure at all n locations
  Clone ID: PAT_MRT3847_97867C.1
cgctaagcttgtaactattatgcccaaagatatccagctggcaagaagaattcgtggtgagcgtgcttgatgtggtggtggtggtggtggttgtgaagatgatgatgggtggctgcggatggtgttttgttattcagatttcttttttattcanagatagggttgttagggagcacgtcttaattgtgatacggacaaattctgttttttgtccatgactggcccttcttgctttcg

SEQ ID NO: 140485 - DNA, 146 bp, Glycine max
  Clone ID: PAT_MRT3847_97868C.1
ggggttaagagcagaagccggaagcttacctcaatgacaagaaatcctatgaacaatacatgacaaaaggacccgggcattcaaaaaagcagcggctaacgataatacacaggataccaaactgaaagccgactgaagtgtgaaat

SEQ ID NO: 140486 - DNA, 917 bp, Glycine max
  unsure (1)..(917): unsure at all n locations
  Clone ID: PAT_MRT3847_97869C.1
tcgtacggctgcgagaagacgacagaaggggcaataacgaagaaatagaaaaaaaaaatgttgcagcttctgtacgcggtgatattcggggaaatgttcgtgatcgcgagcttcctcttcaaaactccggcgaggaagctggtcatcatcacattggatcgggtcaagcgcggtcgcggccccgtcgtcgtcaagaccgtcgccgccacgctgctggtggttctcgcttcctcgctctacagcatcgccaagatccggcgtcggaacctcgacgctcccgtcgttaaccccaccgaccaagtactcgtgtccaagcacatgctcgaggcttctcttatggggtttgtgctgttcctgtctttgatgatagatagattgcaccattacatccgagaacttaggttactaaggaaggccatggaggctgctaagaaacagagtcggagtttcgaggatggtaaaagtgtcagtgcagcagagcacaaggcgttgttggaagaaaacgccatgttgaagcccaaaattgagaaactggaatctgagtgtgaggtggaagcaagcaaggctaaggccttggaaaccgaggtggaagctcttagaaagcaatctgaggggttccttatggaatatgatcgcctcttggcagacaatcagaatcttcggagtcagttgcaggctattgaccacagctctcctcattctgttaacaaaaagagcatgtgaaggttcagatatgcagagcaattttctcctttgattcagctgtttctgcttatacgaatgctattaggccatgtttggagcatgtgatgaggataaaataatagaatgggctaatggtgtaaaaatatgaaatgcttggtgttattaacatatagactttttgtgtatacaaattnnnngttatgaagtttccc

SEQ ID NO: 140487 - DNA, 465 bp, Glycine max
  Clone ID: PAT_MRT3847_9786C.1
aggtgatgctgtcatttatcctcatgctcttatggagctgtgtagaatgcaagaaccatcctcacccacaagaccctctaaccccgtctgagttcaacgatgtacgaaccattgtccaaaacgcatacccaacctcccataatctcaccttccactacgtagccttggacgaacccaacaagtccgaactcctctcatggctatcctcaaaccctaaaaccaaacctacaccatcttctccgacaccacctcgccgggccttcgccatagtccggtcccaaaaacagtcccacgagatcacagtggacctttccactcgttccatcgtatcaaccaaagtctacgaaggaaatggataccctatgctgaccttgggcgaaatagcagtggcgacacggttgccattcagctacgaaccgtttaaggagtccgtgacgaagaggggtctcaatatctctctggtgc

SEQ ID NO: 140488 - DNA, 341 bp, Glycine max
  Clone ID: PAT_MRT3847_97870C.1
gtcaattggaaattggaatgtatccatgcaaaacttcagactagttagaaacacaaggatttgaagagagatcacgtgttctgttcagaatcatgcctcttgagtgtacattgttctctgcttctgcttctccctcacaaatacacttcaaaattctaaatattgttttcttagtttgattagctcattgatgcactatgtgatgtcgacacaaaaaaatagagcagctcatatatattagttcttaacttcgtttcgttacaatttacttagattgctatatatcatggactaaactattaatctattgcaaaatattctctatttatagttttcaaaaa

SEQ ID NO: 140489 - DNA, 137 bp, Glycine max
  unsure (1)..(137): unsure at all n locations
  Clone ID: PAT_MRT3847_97871C.1
gtcgccgggggcccccgtcaacnaggggntngaggtggggctgcacggcttcagcctgggagcgcgccagaatccagggccgagcgtggggacgtgcgattcggctttaagcgacttaccggctggcccaagctcag

SEQ ID NO: 140490 - DNA, 476 bp, Glycine max
  Clone ID: PAT_MRT3847_97872C.1
ctcacacagcacgagggccaatcaatggaaagccgtgtccacctcccttgctctaacgacgtcgtcgtccacgtcaacggcgactctgctcccgacgctcgccggtttcacccaaccaacgatgcatttccccctcaacaacaacaacaacagcatcaggagcatgggaaggaaagaaggggcagtttggttcttgcgtacaagactcttggagtggtgtttggaggacttgtgacatcacccctttacgtgtacccttcaatgccactcaagtctcctactgaagatgactatctgggcatctacagcatcatgttttggactcttactctcattggggttgtcaagtacgccaacgttgccattagagctgatgaccacggtgaaggtgggacttttgcccttggactcattgctttgtaggcatgtcaatattgggatcctgcccttcaagcatgttggtttgaacacaacta

SEQ ID NO: 140491 - DNA, 2057 bp, Glycine max
  unsure (1)..(2057): unsure at all n locations
  Clone ID: PAT_MRT3847_97873C.1
ccggggtcgaccccacgcgtccggttgttgttaagctctcacgatctcaactgcgcggtgagtgagtgagagacggaaagtgcaaagccaccgtcttctcttctcagagcttggcttttgcttcatcgattcacttcgcggtgtgagtgagacggagagtgctaagcaatcgtcttctcttctcggagcttggctttgcttatcgattctctctcctctcgtttctctaattccaaggtttgtaaaagatggcagatgccgaggatattcaaccccttgtttgcgacaatggaactggaatggtcaaggcaggatttgctggtgacgatgctcctagggctgtctttcccagtattgttggccgacctcgacatactggtgttatggttgggatgggtcaaaaggatgcctatgttggtgatgaagcccaatccaaaagaggtattcttactctcaagtatcccattgagcatggtatagtcagcaactgggatgacatggaaaagatctggcatcacacattttataatgaacttctgtgttgctcctgaggagcacccagtgcttctcactgaggctcccctcaacccaaaggccaacagagaaaagatgacccaaatcatgtttgagaccttcaatgtgcctgccatgtatgtggccatccaggctgttctctccttgtatgcaagtggtcgcacaactggtattgtattggactctggtgatggtgttagtcacactgtaccaatctatgagggcgtatgcactcccccatgccatccttcgtttggatctcgctggtcgtgatctaactgatcatttgatgaagatcctcactgagagaggatacatgttcaccacctctgctgagcgggaaattgtccgtgacatgaaggaaaaacttgcgtatgttgccttagattatgagcaagaacttgagactgcaaaaagcagttcatcagttgagaaaagctatgagcttcctgatggacaagttatcacaattggggcagagagatatcaggaaggatctgttcttttccagccttctatgattggaatggaagctgctggaattcatgagaccccgtatgagcaaagaaatcactgcacttgctcctagcagcatgaagattaaggttgtggctccaccaagagagaaagtatagtgtttggattggaggatcaatccttgcatccctcagcacttccagagatgtggatatcgaagggtgaatatgatgagtctggtccaccattgtccacaggaagtgcttctaagtccaccttgcatccctcagcaccttccagcagatgtggatttcgaagggtgaatatgatgagtctggtccatccattgtccacaggaagtgcttctaagtccaaagttggaaaaatgctttaatggtgagttatttttgctatggcttttttgatgggtctgtgtcatgtcgtgcgaacaatgttgtcatggataatgaggtggggaattcatctgataggatgagggtatattctgaagcttgatgtatcatatattgtgtggcatccctctggatgtggcgggcacagaattgttgagaagcatttttcatcttggaattcatctgtcttcgtaagtaggtttgtctgtagcaaaggagtgattgtgatgatctcttttattttctttttgtaccctttttcagagttcacatttttttggcctttggaacattaatgtgaatgtctatagctacatgtatcgagaatttttatataagattgtcagttcgcactcataaattatcaaattatgctttttttatgtatgttgaattgctggcttcggagaaattgagggtgcgcttatgctgggaggcggcattaagtccatttgaagaatgcatagatcactgtacaattattctaaaacatattattgcattggtttgtgttgaaactaaataccaaaatattggttatctcccatgacggtgtattccgattgctcaagttgaagaaaccgtatcttaagttgaattttgttgacaaaattatttttaccgtnccnacaa

SEQ ID NO: 140492 - DNA, 653 bp, Glycine max
  unsure (1)..(653): unsure at all n locations
  Clone ID: PAT_MRT3847_97874C.1
taaataagctcggaaacttagcccttaagtttactttacacactcaaaaacacaaacctttattttttttaatattacttttcagcattacttcccaagcttgtttagtttctctcctagaagagaatggtttggtgattggtttcaagggaaagaagcgagctgaagattaactttgagcttggaaaaatgggcgaggagagatctggtttacagaacaaaagagtgaagattgcgggagaagttcgcgtggggtttataattatgttgatctgcacaatccagttttcagttgcagacactgatcccgtcgatgattgtatactgcattgggcaaccctgttcttcctgggtgggtttctagtgcgggagacccgtgcggacaagggtggcaaggcgttcaatgcaatggctcagtcatacaagaaataattctgaatggtgcaaacttgggaggagaactgggtgatagcttgggaagttntgtttctatcagagcaatagttctaaacaacaatcacattggaggaagtattccatccagtttgccagtcacattacagcacttctttctatcagataaccagttcactggaagtattccagcctctttattcacattgacccgactgactgacatgtcttttaacgac

SEQ ID NO: 140493 - DNA, 758 bp, Glycine max
  unsure (1)..(758): unsure at all n locations
  Clone ID: PAT_MRT3847_97875C.1
gttacagctggagaaaatatggacaaaaagatatccttagtgcaaaatatcccagaagctattataggtgcaccttccgcaaaacaaaggggtgctttgccacaaagcaagtgcagagatcagaagaagaccacactatctttgacataacttaccgaggaagtcacacatgtaagcgaaacgatgccgttctgccgcctaagtcaccagattatacgcatgccgcaccagtgactgtcaaaacggataacataacggcaccttccgcttcgtttggatgcatggcgcaagataactaccacgacttatttccttctctggccgattcggctcgagcattttttagcaccccttcccaaacatcctcgttatctgcaaacacacctgaatcaaattattttgtgtctccgactttcctcgaacatgaattcgatggggtctgtaacaagccctgccctgattctgaacttgcccggctggtttcagctgatacatcaatcaccagttctccaattttcgactttaatttctcgctcgatgcagtgggaattgattatccaaatttccccttcaatatatgaaaatatggttagcatttgcagaaattgcacttgagaatgaatttcatactattttgtagaaagtatggttagcatttgaagatgatgtataacactccagacagcactaataaatgcccctgtagttcattctgaataaccacgttacttaagggnngtttaatcannttaaataac

SEQ ID NO: 140494 - DNA, 2016 bp, Glycine max
  Clone ID: PAT_MRT3847_97876C.1
acggctggagaagacgacagaagggtacggctgcgagaagacgacagaaggcggttctcatttctctttctgtagccctcaatcaccggagagagagtgagtgcaaagccatcgtcttcttctcagacaagtagtttggtaaaagatggctgatgctgaggatattcaaccccttgtctgtgacaatggaactggaatggtgaaggcaggatttgctggtgatgatgctcctagggctgtgtttcccagtattgttggccgacctcgtcatactggtgttatggttgggatgggtcaaaaggatgcctatgtaggtgatgaagcccagtcaaaaagaggtattcttactttgaagtacccaattgagcatggtatagttagtaactgggatgacatggaaaagatctggcatcacacattttacaatgaattgcgtgttgctcctgaggagcacccagtgcttctgactgaggctccactcaacccaaaggccaacagagaaaaaatgacccaaatcatgtttgagaccttcaatgtgcctgccatgtatgtggccatccaagctgtcctctccctatatgcaagtggtcgcacaactggtattgttttggactctggcgatggtgttagtcacactgtgccaatctatgagggctatgcactccctcatgccattcttcgtttggatcttgctggtcgtgatctgactgactctttgatgaagatcctcactgagagaggatacatgttcaccacctctgctgagcgagaaattgtccgtgacatgaaggaaaaacttgcatatgttgccctagattatgagcaagaactcgagactgcaaaaagcagttcatcagttgagaaaagctatgagcttcctgatggacaagttatcacaattggggcagagagattccgttgcccagaagttcttttccagccatctatgattggaatggaagctgctggaattcatgagaccacctacaattctatcatgaagtgtgatgtggatatcagaaaggatctatatggcaacattgttcttagtggtggctcaactatgtttcctggtattgcagaccgtatgagcaaggagatcactgctcttgctcctagcagcatgaagattaaggttgtagctccaccagaaagaaaatatagtgtctggattggaggatcaatccttgcatccctcagcaccttccagcagatgtggatttctaaaggtgaatatgatgagtctggcccatccattgtccacaggaagtgcttttaacttctaagtacaaaatatgcttcaatggtgaaatatttttcgcaccagttgtttttatgggtctgtgtcatgtcatgttaacgatattgccatggataaagaggtgaggaagcatcattaaaggagagggtctattctttagcttgatgcatcatattttgtgtggggggcagacagttagagagaggcatttcttgcgtttggccatccgtggttcatctatatcttcttagtaggttgtgttgtagcaagggagtgattgtgatgatctctttttcccccattttctttttgtatttttaaagtttacatttgaaggattttttccccttggaacattgaatcattgatgttaatagtcatatgtatcgagaaatctctatattattgttattacccgttcttgctcgtaaattcatactgcagtttttatgtatgttgaattgctggcttcggagaaattgagggtgcgcttatgctgggaggcggcattaagtccatttgaagaatgcatagatcactgtacaattattctaaaacatattattggattggtttgtgttgaaactaaataccaaaatattggttatctcccatgatggtgtattcggattgcttaagttgaagaaaccgtatcttaagttgaattttgttgacaaaattattttttaccgtttcctatcaaatgaaaatgttactgtttgaaatctgataaaaatgtacaacttctatctatc

SEQ ID NO: 140495 - DNA, 299 bp, Glycine max
  Clone ID: PAT_MRT3847_97877C.1
accactcttgacagaatcattgatacacttcatgaacaaacaaatgagcattgttaaagctgattcagcgggtactgttctatcatcacataataaccctgaaaatcgctgttttaccattcataatcggaattgataacaccctgttcatatttctgactcccaaactgaagtatacaatgatatatctgatatttcaactattgatctactaactgtttataaactggcactctatcatggtatatcactttataatacgaagcctacgaaatgaaaacactttatgatcaatgcca

SEQ ID NO: 140496 - DNA, 560 bp, Glycine max
  unsure (1)..(560): unsure at all n locations
  Clone ID: PAT_MRT3847_97878C.1
atccagcaaactcatgttgaaacatacaaaacagtggtgaaatttcctaaacttttcgtataattgtatgatttgtatcactatatacgtaaagcatactgatgatttctgtaagggatgtggagtagaggcatcactgctttgctttggataaacaaagggttcatcctccatcaacagcccttgatctttgaagttgaccgttcatcctcccaaattactgctttacaatggaagagttgaactctgactcctacagtgtctggagaacaaaaacttggtgttatgtgaaaaagatcttctcattctcattgagacggagatcggcctcttttgcaacgcacgtccaattgaagccaacttgttattaataatagttgttgaagttgagctcccactaccatgcttctcattaacaacaacactcatatccttattacttgaataattcactttttcaccacaatgatgggtatctaaatccaccaccacatcaccaaataacaccattgaattagnnnnnnnnnaatcnnnngaaaccgnnnttctcannngctgtg

SEQ ID NO: 140497 - DNA, 1200 bp, Glycine max
  Clone ID: PAT_MRT3847_97879C.1
aattcggcaccagccccacccaacgaagatatgtttttctctttggactctaaaaatttccacaaccaacgaagataaacaaccatagtggttttctctttttttttctttttcctacgttgtgaccaggttgttcactttagctgcgaaagtgtttgtttggctcagtttgttgaattcgctggcagctacagctatgatcatcaacagcaccccttttcctctatgatcgattcgattccgtagagtgagaaatcagatcagaataatcatcgatgggtaatttgttcgtgaagaagcccaaggtaacagacgtcgataaagcaattctcgctctcaagacccagagacgcaaactcgcccaatatcaacagaagctagatgctgttattgaagcagaaaagcaagctgcacgagacttgattcgtgaaaagaagaaggacagggccttgttagcactaaagaaaaaaaagacacaagaagaattgttgaagcaagttgatgcttggcttataaatgttgagcaacaattagcagatattgaactggctagcaagcagaaggctgtgtttgaaagtttgaaagctggtaatgatgcaatgaaagccatacaaagtgagataaacattgaagatgttcagaaacttatggatgacactgctgaagctaaagcttatcaagatgaaattaatgaaataatgggggagaagttatcagcagaagacgaggaggagattttagcagaatttgaggacttggaaatccagcttacagtccaagatcttcctgaagttcctccctcagctaatgaagaaattgaagaaaagttggaccttcctgatgtcccaaccaaagcacctgttaccagtgatgctgaagtatctacaaaaagaaaagttatggaggaaccgttggcagcttgaagaacattgcgaccagaaacatgtcaattgctttgcaaaccaaggcataaaatctgactgtttttgcctgtattcttacaaattctgttgcaaaattggtgcagttactggagtttgattggttttactatttgcagagacattgaatttgtacagatttgcatgtataataatacatcagttttaacaagaatttgtactgagaaaatcatattttgcaacccgtcccccgtgctgcttctttcacattacttccgtttgttactcttgttaaaac

SEQ ID NO: 140498 - DNA, 399 bp, Glycine max
  unsure (1)..(399): unsure at all n locations
  Clone ID: PAT_MRT3847_9787C.1
atctnnatcttcaacacttcaatacttttanacgcgcaaaaaaagctccagggccagggggtatattgtatcagaaaacctctcttcctgcgagcagagagacaaactaatccgcccctcttaatgcctctcgaaaccctcatctcaattatcccaaacagtaaactagccttaaacaaaacgttcactagtttgcccagatttatattttataaacacgaaacgaacattcgagagaaggcatacgagagagaaacaaagtcttcttcctccctcgggagggacctccacgtgaccatcggaaatctcctgctgcaggtccctttgatgctttccatcaacggagcgacccaccgaaacgcatgctccgaggatctccctaatggagccggtgcgggc

SEQ ID NO: 140499 - DNA, 772 bp, Glycine max
  Clone ID: PAT_MRT3847_97880C.1
acggctgcgagaagacgacagaaggggagactaaaaatttccacacccaacgaagatatgtttttctctttttttcctacggtgtggccaggctgttcactttagcgaaggatcaaaaaccctgtgaaagtgtgtttgtttggtcgagttgattgaattcgctggcagcttacagctatgatcatcaacaacgccccttttcctctatgattgattcgattcgattgaagtcgattccgtagagagtgagaaatcagatcacagtaatcatcgatgggtaatttgttcgtgaagaagcccaaggtaacagacgttgataaagcaatcctcgcactcaagacccagagacgcaaactcgcccaatatcaacaaaagctagatgctgttattgaagcagaaaagcaagctgcacgagacttgattcgtgaaaagaagaaggacagggccttgttagcactaaagaaaaaaaagacacaagaagaattgttgaagcaagttgatgcttggcttataaatgttgagcagcaattagcagatattgaactggctagcaagcagaaggctgtgtttgaaagtttgaaggctggtaatgatgcaatgaaagccatacaaagtgagataaacattgaagatgttcagaaacttatggatgacactgctgaagctaaagcttatcaagatgaaattaatgaaataatgggggagaagttatcagcagaagacgaagaggagattttagcagaatttgaggactttggaaatcagcttacag

SEQ ID NO: 140500 - DNA, 550 bp, Glycine max
  Clone ID: PAT_MRT3847_97881C.1
ccacgcgtccgatttggtttcacggccaaggcattacgaatctgactcttacgaagaactgagcgactaatttatccctttttatgttacaacaaatccctaattttttttagggtttggtttttgtgatggcaaagcgaaactgcgtcgtcattctgtcatcggaagacgaagaagaagacggtttcatcgttcgttcgttgagttcgagtcacagctataatacgaagacgaagtcgaagtcgaagtccacgtcagcatcctcacgtgggaggaagagggcacgtgcttcggcttctcgctctcacctctccaaactgcacgagatagacttatttggagatgacttcaatgaagtgtttactgggtcaaaggtatccgctggtactcacaggcactatgcagaggatctatggattgataaatacaagccttgttcactggaagagcttgctgttcacaagaaaaaggttgaaagagttaagacatggtttggggagagggttgaaaccttcaaagggtgcctactgtaacaatgttcttgtcatca

SEQ ID NO: 140501 - DNA, 221 bp, Glycine max
  Clone ID: PAT_MRT3847_97882C.1
ctatgcgttcgtttatttttttttttttttttttttttttaaaatgttttttgtaaattttattttttttttttttatagaaaagggggaactgtccgggggcagggaaggtaaggaaccggaggcgccacggtctatactgtttgtggagatcactagagatggcgagagggagtggtttacaaatggccggaagagaaaaaggcttggtattccttaac

SEQ ID NO: 140502 - DNA, 355 bp, Glycine max
  Clone ID: PAT_MRT3847_97883C.1
gtttctcccatacattactccacccagtaccgttactaggttcattcatatggaaaatacaataaactaaatattatctattgtcttactcattgatgaaacatggaagaacaaccccatattgccttctgatccttaccaaagagccttggctcgtttctggtccaaattcattgatgataaggttttcggtgctgcatggaaatactttatcacagctgatgacaaagatcatgacaagaatgttgaggaagccatggaggctctgcatttactcgataatgagatatacgacattaagttctttggatgataggagatagggctgcgcgaatatcctgctgtataaatagca

SEQ ID NO: 140503 - DNA, 388 bp, Glycine max
  Clone ID: PAT_MRT3847_97884C.1
cttaattttcttttttatttttttggctttatgcataaccttacatgacgaatggagtggggcgcgatgttgctcccggtccattgataacggactttgtaatggtcgaaggtccatgcttattacaaggtgaaaaacccactgaacataaagggttcctttgcattgatccattgccgaattctgaataaacaggaccatggggtcttcaaccatagatccatactctactgaaaatcacacctaaaattttgtcacagcactaattttactcgaagttttagccttttcattggggtcctcctgtgcaacttgaaagggccaaatcattactgccgatgaagctagaaaattttgttttcaaatttgttttaactcacctttaact

SEQ ID NO: 140504 - DNA, 251 bp, Glycine max
  Clone ID: PAT_MRT3847_97885C.1
actcgagccgcatcggctcgagtaggctgcgagaagacgacagatttgggaagatactgatgctgcatgtatcgaattatcggttaatcatgagcatctctattgttggcgctccaaatttcccgtgagtgtgtctggagtcaatatattcgctacctatactcacactaagttgcttgttctcttgggataacttagttgagatactgtgaactctgtacatattcttgatatgatataccctggtattg

SEQ ID NO: 140505 - DNA, 259 bp, Glycine max
  unsure (1)..(259): unsure at all n locations
  Clone ID: PAT_MRT3847_97886C.1
ttcccggggtcgacgccacgtcgtctcgtcccacgcccgtctcgtaattttgactggggctatttaatagcatataattgcttagcaaggggcttctannattttaaagggtgttggggttgaaggggtgttggctttaagtgtgcagaatttgcagatagcataggggttttgaaatacatctgcaananngttgtcctagngnnagcatttctttaactttgaatannacataattatgannaatttttttctttca

SEQ ID NO: 140506 - DNA, 504 bp, Glycine max
  Clone ID: PAT_MRT3847_97887C.1
ggccatcatgttcaacatccgcatgacggtcactcagccctccaccgccgccggcgtgtcggaacctgcgaggaaactgccatatcggaacccagcaagtagaggttttgccttctccgtttacaagaccgaggaagggttttgaagttgtagagtcttctgggtttgtccaaaatttgtagctggtttatgtggattttgaaattttgtatgctctctctttggttcaccatgtttcagctgattgccataaacattaagtgtactcatgaagaacatgaggacaattgtgtccaaaaaattcattaaacaaacccatgtacctcacatgtgaccacttgagttggggattcgagtgtaactagattgcaaaacggagaggggttgtctctaggaatcaagaatagaggggatgtgtatgtaataaattcatagttgaggggttacgagtgtaatatgctcaagaaattttcattcaattgaagaagtgactacaaatattca

SEQ ID NO: 140507 - DNA, 124 bp, Glycine max
  Clone ID: PAT_MRT3847_97888C.1
caaaaaaaacagtaaatctagtattttttttcaatgggacatcctcatgatgatagttactggttggtgtggacaaactacagtcatgactgataaataaacattcatatttgatggtcttcct

SEQ ID NO: 140508 - DNA, 549 bp, Glycine max
  Clone ID: PAT_MRT3847_97889C.1
aaaaacaaatgtgaatttttaatttttaatctatacaaataatgcatcagagaagcattgtaaaaaaaatattgcttatctctgacaccagagcaaatttctgtttctgtggactgactaattagggaacaaaatcagccgatatcccatgattccatagcatcaacgaaaaccgtcgactgcaggttgaaaaacatctctgatcactcatcatttgcccccaaggtcgcagagctaagaattcaattcatccatggtgagctaattgcaaccagcttgcatgattgattatattacaaaattacttctccagaggactcaacgccgccaccaagagaactagcaaaatcagcctattaccaatcccggcaattcccacacctccaacttccaagcctagatggtatttcaacccaaggcgaacattggctgtgaatcaaaatcccacaaatctcacaaaagagatcaggggccggttccatttgtgaacatttcatacaactaaagccagtgtcttgcaaggaaaatgtaggttctgtcataacatct

SEQ ID NO: 140509 - DNA, 543 bp, Glycine max
  Clone ID: PAT_MRT3847_9788C.1
aaaaatataaatttctaaaggggggggacaaaacaaaacccaaaaaggacagaacgggggggaaccaaagacaccaaaacaaaaaaagaccaaggcaaagcaaagggcacaaaaaaaaaaaaaaaaaaaacccaacaaaagccccccccccaaaaaaaaaaaggtcaaaaagacccgggaaagaggagcgaaaaagagggcaaaaaaaaaggggcggggcaaaggaaaccaaacggagcccatgggccaaggggacgggaaaaagccccggtaacttctcccctccgcaacgcggaggaaagcccgggcactcgcccgtttcccaggggactggagaggaaaacaaaacggggggcccgggggggacccggggggaggaaaaaacgggggcacggggggggggcggaaccgggggaacccaaacgggggcaaaaaggggcccaaaaaaagccccaagaggggggggggaggaatcaacccaaacccaagggggtgggtgggggggggaacaaacagggaccaaaggggacgcggggggggggg

SEQ ID NO: 140510 - DNA, 428 bp, Glycine max
  Clone ID: PAT_MRT3847_97890C.1
ttgccaaatgaagcaataggggaaacactcctgaggacccagccatcaaccctaatactgcgtaataaaaagacaaggtatctcgggcaccaagaacaggttcagttggtgcactaaaatcatctaacattcaaccttcatctacaacatttccaggttcttctattcatccaatgacccagtgggttggtcagaggccacctaaaaattcacgctcacgaagagtgaaagtagtttctcctgcctcacgcaatcttgaagttcaggtttcattcgaaggctgtctaacttctgagttctgtgtaaaagcttcttctgctggcaacaatggatttcaacttgcaagtagtgcagacaacagtacaccaaaatataaaagaccgcctgatgatacttcatccccctttggattatctgaaagtgaagaa

SEQ ID NO: 140511 - DNA, 215 bp, Glycine max
  Clone ID: PAT_MRT3847_97891C.1
cttcttctcttctctgttacagcaatggattctttcccaacacttctctcattcgccgtcatctccttcaccgtcgccctcttatacctccgccgcgtgttccgaccgccgtcagttccgctcccgccggaagccaggcctaccttgatcgacgaacgtgcagtgatatcggcatacaagagcgaaatccgcgccttcatgacgacgctggacgt

SEQ ID NO: 140512 - DNA, 780 bp, Glycine max
  Clone ID: PAT_MRT3847_97892C.1
agagcgtccgtatttttctccatttcatacacttgcagagactcttccatagatatggtggtggcgaccctcttgcagttcgagctagctgttgcatctttctgatttctacctgccactgctttccccgtctgttgcacttcagagggcttgtgattgttcaactgcctattcaattgcacttaagtaagaagttttgttttgaaaggaccttatcttcgccacagcagcaatgaaaggaaagaacaggagaagtggtggtgttgtccatatggaatacctcattcacattcaggagattaagccttggcccccatcacaatctctcagatcgcttcgttctgtgttgatacaatgggagaatggtgatcgctcttcagggtctactggtgttgtttcaccttcgcttggtcctaattctgctcctggtgaggcaaaactcgagtttaatgagtcatttaggcttcctgtaactctgtcaagggatatgtctattcgaaatagtactgctgctgtgttccagaagaattgtttggagtttcacttgcatgaaactcgaagagataagaccactaaagggcagttgctggggactgccatcatagacttggcagattgtggtgtacttagagagaccttgagcattcgtacgccattgaactgccagaggaactacagaaacacagatcagccactttggttcattcaaattgagcctgttgaaaagagtcgccctaagtcctccttgaaggacagcttgacaaagggaaataatggcag

SEQ ID NO: 140513 - DNA, 356 bp, Glycine max
  Clone ID: PAT_MRT3847_97893C.1
aaaattatattttttttgtttttttttttttttttttaaaaacaaaaacggggggggggttaaatttaaaaagggggggggagggacgaaaaaaaagggataaaaaaagttttactgggaaaacaggggacaaaatttttaaaaaagggccaaacgggggcaaaaaaaaaaaaacggggggaggggggggtaaacctgggggaaactaaaaagctagggggggggcttggtttaacgcaaaaaacaaaaaggggggggagttttctcagaaacacggccccctgggaaaccacaagggatatcctttgttggaatgtgaaaaggaaactcccccggggaaaaccccggctcaaagg

SEQ ID NO: 140514 - DNA, 152 bp, Glycine max
  unsure (1)..(152): unsure at all n locations
  Clone ID: PAT_MRT3847_97894C.1
acactagttcctcaaagaactatgcacattctatttctcagaagtngaatgcaaagaattatctcctttggantcactaggttgaacctattattcgtagtcatcatcttgaaggctatatcattaatccgaagattccacanaacnntnnc

SEQ ID NO: 140515 - DNA, 507 bp, Glycine max
  Clone ID: PAT_MRT3847_97895C.1
atggacgaaaaaataaaccctaacgaagaaagaaacgtgtcaaactattgacaaatgacaaatgaagttcataaaaggaaaaattgggacctttgaacgataaacaatcggtctaactctcggatttgaagggacatgaatgaaaaagattaagacctacacgctctcgagacgcaccgccgaaccgggatgtttacagattatatgactcggctggaattaaatccaagctcatatgcaccaaaggggagctttctatagacaacatatatggttccaaaaacacctgtgcaaggacagaaaccccctgaaaagcatgaagtctgaaacccattataattatccaaacaggcttcatgcttaaaaacagcgctgaaatatcactccttgcaggagacttattggggtacttggaccataaaccactcaaagtggggataagacaatgaagggcctttcgggccgtcttactggtaggcctatggaggaggcccttttgtatgggct

SEQ ID NO: 140516 - DNA, 227 bp, Glycine max
  Clone ID: PAT_MRT3847_97896C.1
caatggaagcaaacgagaaatgtgatgtgtatagttttgggatcttggcactggaaatagtgtttggagagcaccctggtggtgatgttacatcttcttgtgctgcgacctcaacacttgatcatatggcattgatggataggttggaccaacgtcttcctcatccaacaagccctactgttgttgagctgatatcaattgtgaagatagcagtttcctgtttgacc

SEQ ID NO: 140517 - DNA, 1733 bp, Glycine max
  Clone ID: PAT_MRT3847_97897C.1
caatgatcaaattcaaacccacaccaacaacagcaccagcaacatggttcgaaacccgaagaaacggtcaagagcttctaggcgtgcacctaccactgtgctaaccacagacaccaccaatttccgagccatggttcaggaatttactggcatcccagcacaacccttcacatcctcgtctttcccgagtaccagattggatctcttttcttcccctgcaacaccaactttgatcagatccaacgttaacgttaaccctttggaccctccaacacatggattcgggcaacagtgggagtatgcaatcttccagcaccgccggtgatgaagagtacgactcacgcgccgacccatcatcgtcttcatcaatctctgcgttctttattaacagtaacccccaccctccaccacaacaaacaacgttagcaactcacgttgttggtcctcctttctcttctcagcaccacgtgttcgaccctttatccaattacttggatccgacacaaagaccgccgcaatcaaaccaaatcctcaacctggacatggtgtggtccaaggttgccgccagatccgaccccggtcttagttccttcgtaccttcatcttccccacacaacaacaacaacaacaaccaagcttttctgttaactcaattgggaggagcaggaggtcaaagtcaaccacgcggaggaggagttaacaacgttgccgtttttcccagtaccactctccctctagaaagtggaggaggattaccagtgaatgaacaagtaaacagtagcagcaccaacacggtggttcgaaacccgaagaaaaggtcaagagcatctaggcgtgcacccaccactgttctcactacggacaccacaaatttccgagccatggttcaggaattcactggcatcccagcacctcctttcacttcctcctcctcctcctctttccccagaaccaggttagatctctttgcctcttctaattctattgcttcttcttcttcttcttccattattagagagcaaacacaaacacctccttatcttcttcgcccctttgcacacaaagttcaagctcaacttccttcttcaatcccaccaccctcttcctttccacccatgttgaacaactaccagcagcactctctcaacatgcagcaaaacccaattctcagcttccaatccattctccaaccacaaccactcattggttccaaaactcaacaaccctcattggaaataccgcctagtgctgttgattcttcacacctcaagatgggtgggttggaagagttaggattgagcaatgcgcacgatggtggtcatcatcaaaactttaacatggtttcgtcttcatcggatggagcattgtcaagggtaaccaacagcaacatgcgtggtggtccttcttcggcagactgggccctgtcccaggcccaaagaattgacaacaatgatggaggagttttgaggtctctcggtggtgccactgcgacgttaaactacagaagcaatgtttcggatccgcgagtaaaggttactaataataattcggattttcatggagacaaaggaccggaatgtgctgtggccgcacgaagcgaagctatggtcgaatcctgcctggaggggtctcctgtcgacagaatgtacaatgtgcagcatagattgaacaacacagacaaaactattctaggagtaattggtggcaagatttgggggattgactatgactaa

SEQ ID NO: 140518 - DNA, 406 bp, Glycine max
  unsure (1)..(406): unsure at all n locations
  Clone ID: PAT_MRT3847_97898C.1
aagagttactgtaatgtaaggaagggaaattgtgtgcaatctcaagaaactgcaaaggaatgtcaatgcaatttgctctaaaaataaacaaacaaataaacgcttctctaacctctttaataaagcacaaacaagaagtactacaacaagatctcatcagtacacaagtattcgtagcaagggaaaactttatccttcaagcaagttcacacaatataacttggataagttgaagcctaatgtgatttagggataaccaaggtctcccgaagcaccaaataaaaaaggagaaaagaaaaagaaatcatgtatatgaaatatccacaagcatatcaacattgttaacactaataccatggttntaaatngcggtcgcgactgagttgcagtgagctagaaaccttta

SEQ ID NO: 140519 - DNA, 133 bp, Glycine max
  Clone ID: PAT_MRT3847_97899C.1
aaaattggattacgggcctggctttagggataaagaatatggggtaacaaaatcaagctttaagtttaagggtggaaaatcccaaccaaaccggttttaccggaattgggttggaacccaaggccttaggaaa

SEQ ID NO: 140520 - DNA, 441 bp, Glycine max
  Clone ID: PAT_MRT3847_9789C.1
gaagataagttatgagggaattattcggaacacccccacaaaaatttcacaccagcaagctagcattggaaacgggggcagagttattaaaattcaaaatacatgatgggggatatatgaagtttcgtgaactttatgtttttaagccccccaaaatgacaaactaaacacaaggcattacaagcctataaaagcacggataaaattgttggatgatatctgtcactgtcaggtttctttgttgtataagtaagatggctttgtctgttcagcagcaaaggacctcaaccttcagttgcgagtaacatatatacacacaattagtaatccaatgcatgtagtcccatctgttgagtaagatgggcaacatgtagtatcttatcaaaattttcctgcttattttccatttttgaaggcaaaccctgatcattagtcaaacca

SEQ ID NO: 140521 - DNA, 1613 bp, Glycine max
  unsure (1)..(1613): unsure at all n locations
  Clone ID: PAT_MRT3847_978C.1
gtaaaatttgtatttgttaattgaaaaatttatcttgatgtaaatgtataattaagaagttaataaggtcgacttggtatgcagcagaagagaaggaatgagaaatcataagttcgattgttctcattaacaaaacctacaactaacgctgattgataaataaaatataaatataaatcccaattaatttaaacatcttaatcatatttatcaatttaaaattaaactaactagaaaaagttataagggcatgtcaattatatcttcgacatgagaatgcaaatttggaattatcaaagagaggctgtcataattacctcctagtagcattggttccttgttaaggtttcttaatatttcattattactttgagctaataagaagccagcattgtattgagtttgcatcacatcaaactagatntaattgagatgttacagggtgaaacttactctgcctcgtatcagcgtgtgagtttttatcttttctcctcctcattcggctcgcgaatcagtgcaagagaatcgccctccatcttctttcttcttcaattcattccgatggcgattccgttgccctctctcgatctcactcaccactccgatttcgaacccttagtctccccagacggttacatctccatttgcggctacggttccctcctctccgagacaagtgccagaaccactttccccgacctcgtcaacttccgaatcgcccggttaactggtttccgccgtctcttcaactccgtcggacgcatctttttcactcaccgtgttgccaatatcaaaactcaggaaattgctggcctttctgttgaaccatgtgatggtgaattcgttgttgtagctgtttttgagataaagaacacagagattccagcatttattgaaagggagcgcgaatatcgttttttagctgttgtccctgaaacactagatgggaagccctttatcaatccagcagttctctgtgcttcttacactgatgaggaattctttaaatttagatgcagtgagggcagggaaaaatattttgaacaatacggagaatataagatccataagatttggcgggatgatgttttcccatgccgtgtttatcttcgtcactgtgtcctggctgcaaaaagccttggcgatgaagtccacaataactttttggatcatactttccttgctgaccgtaaaacgaccatacgtcagtactttgaaaaagtgggtacaagcatcttggaagaagagccacctgagtctttgaaaacccgttatggtggttgattgatgtcatcagagagtcgatactcgatacagttctcaattcgccatttctgaatttggctgttccaattatttcttattatagcatctgccatctggattgaagattgaagagtcactgtggcgaacgttgaatggcggtgacaagtagtagttgttagaaaaccaacaaagcagatttctattttctaggatgaagatatattaataaattaatagggccagcaaatgtttagaataatatttatatattgtgaataaattgctggtaacagtgcccgttcaacaaatatttatagaaaaatgtttgattgcaatatttttccaaa

SEQ ID NO: 140522 - DNA, 182 bp, Glycine max
  Clone ID: PAT_MRT3847_97900C.1
gggagatggtagaggactctcgacaattttcttatgaacgcgggagccaggactggagagtgtttttcttgaaatggcggccacgtgttgaaagaatatatgagcactctgataggtcaaagattttgagcagcaaataaaaaaatccacgttgaggaggttataggtgggggttcaattga

SEQ ID NO: 140523 - DNA, 232 bp, Glycine max
  Clone ID: PAT_MRT3847_97901C.1
ctcacgcgtccgcccacgcgtccggccacgcgtactcggtcgcgtgggatttgcaggaagctgtggtaagagaacatagagaagggctaggttcttctttctctctcttgactatgtgaggcaatgtctcttgtcggtgcccccttgataagcaagcgagcttttctttggtgggatttgagggtatttagggtgtggattgtgatggattgttgggggctcaggctaaaaa

SEQ ID NO: 140524 - DNA, 443 bp, Glycine max
  Clone ID: PAT_MRT3847_97902C.1
ctcgagcctaattggctcgaggctcctcgtcctgtcttgcattgaggccattgtaacagccacccttgcctcgcctttctctacctctgccaacgcaaatgctagagcgtacggcgggctggaagcggaggactgccagatccgctgccctctgagcacggagccgggccaggtggtcctcccggccctcacgcagtacaagaacgcatccggcgagtgggagaacacgatcgagtgctggcaggtcgacaccgtctcgacggagctgccgggcattgacaacgctttccgcctggactgggagggcggcttcgacgccgcgtaccagtacgtcttctacggccagtccttcatgccagcgcaccccgcgcccgagcccagtctcatcgtcatgagttccggaattggagatttgagggtcccttcccgccgatgcctgcgtg

SEQ ID NO: 140525 - DNA, 393 bp, Glycine max
  Clone ID: PAT_MRT3847_97903C.1
aatatttaccgccccgccggagaataagaagaaggatccgtgtcacagtcactgcgcatggccatgtctcgggtggataacagaaattcctcagccaccaagcgtgctaggactgatggacaacttgtaacatgcgtaattgcactcaaccaaggccggctgatcataattctaaatctgctgccaagcctctacaagctccacagggttattcatcctcagctccttacttaggttctaataccccctcttcaatatatcttggtgtgccaccatatgggtcttctctgttcaatggatcatctgttcctccctatgatgttccattttctggaggatcagcatatcactacaactatggtagtcgcctttctgctgggagtccttatagac

SEQ ID NO: 140526 - DNA, 485 bp, Glycine max
  unsure (1)..(485): unsure at all n locations
  Clone ID: PAT_MRT3847_97904C.1
agtttcacgcagagcaacaagagacattacaagcagcatgcacgatcagggctagtatgtctttgaaaaaaatctaatataaacacacaaacaatttaataaaatatttcacagaaaaaaaaaaaaaacanntcagnncgcgtgataaatgacacccaaannnnnatatgcaaaaccagcatancgttctccaactagctgaagcgcctaaatgggaaaaagagacctatcttaagagggggactacataacaaatcattgcccactgtatatggcacttgtgcaaaaaaaaaaaaaaccaccgccttggaaggccttgaaagctcacaagcaatgaatttggtgaacgagactgcccccgccagaaacaccatacatcttccaactgaagaaattgacattcagtaaaacgagacctactgcnnnntttantggactcgcatactcagttccgttgcncaanncagtcaagatagatgaggcgt

SEQ ID NO: 140527 - DNA, 725 bp, Glycine max
  unsure (1)..(725): unsure at all n locations
  Clone ID: PAT_MRT3847_97905C.1
ccacgcgtccgcaacttacctagaatagtcttgatgtattatgccaactttctgtcttccccggaagggtattttcacacagtcatctgcaatgctgacgagtttcgaaacactaccgttaatcacgacctccacttcatatcatgggacaaccctccaaaacaacacccgcattttcttacagttgatgactaccagaaaatggtggacagcaatgctccttttgctaggaaatttggcaggaacgaaccagtcttggataagattgatactgaactcttgggacaaaatgcagttggttatgttcctggcaggtggttcagtcaagcaaattcaagcatcactaataagtattctggcataagaaatatcactgacctaaggcctggccctggagctgaaaggcttggacgccttatcaatggtttattatcagcagaaaattttcacgcaaatcagtgttcttgacacgagtttggaatgcctattatgctcattgctgctcttccatcatctaacaactgaggtgaaaaattcatttcttcagttgatgcccaaggttgctgttatgagatcaaacatgatatatgagtaaacacaagggaaaacagacctttgacttgatgttctaatgaaattatatcangatcacgagtatcaaaatctatcagctggttcacatgaattattaaactatactggatgacaagtcattgatgcaactg

SEQ ID NO: 140528 - DNA, 1453 bp, Glycine max
  unsure (1)..(1453): unsure at all n locations
  Clone ID: PAT_MRT3847_97906C.1
cccacgcgtccgatcctgtgccatcgaaggctgaataagtgacctgcgtcgcaggcactgttcatcgccatgtctcgggttgataacagaaattcctcagccaccaagcgtgctaggactgatggtagtcgtagggaagatgattggacatgccccagctgtggcaatgtcaatttctctttcaggacaacttgtaacatgcgtaattgcactcaaccaaggccggctgatcataattcggtatgatattatatgtaatgtcattttttttttaaaatgtgattttcatttcgttaatgatttatggttaacatttatttgatgatttctttttatcaatttctctctttttgcttgtgtttcttattgtgctttcttttatattcctattttctgttcactcgtgttccatgagtttttttcccaaataatggggagtatagagggtatggaaatcaaatgttcatacatacataaaggactgaggtgtagttatattatgcttcctttagagctacttttatcatcaaatctctatgtattcatttactactatccagaaatctgctgccaagcctctacaagctccgcagggttattcatcctcagctccttatttaggttctaataccccctcttcaatatatcttggtgttccaccatatggatcttctctgttcaatggatcatctgttcctccctatgatgttccattttctggaggatcagcatatcactacaattatggtagtcgcctttctgctggcagtccttatagaccattgcatttatctggaccaacaccctacacaggtggaccagtgattggaaatggtgggatatatggaatgccccaactgttggatcggtatggcctgngcatccctatcggacctgggacaatgggtgctaggccctggattttttcacgatgaccagtcacagaanaaagaatgcactcgtgacaatgactggacatgtccaaaatgtggcaatgtcaatttttcattcagaactgtctgcacatgagaaagtgcaccacacccaaacctggatcncaggcctcaaagtcggacaaaaattctaagcaaaagatgcctgagggaagctggaagtgcgaaaagtgtaacaacataaactatcctttcagaaccaagtgcaacagacagaattgtggtgctgacaagccagccgagtctgaaaaatctccttcaccagctgcagatcaaaatgatcaggtttgttgtgttaaatattttcatgatgaccttcattccttgttgctacagttggttttccaagagaagaaaagtaacataatgaacattttcatatggcaatctgttgtaaagttgtcttttaagtggattataaggaaaagcttcagttttgcttcctttcatttggaaccttttatcacccccttttaatttcctccggatctatccgttgc

SEQ ID NO: 140529 - DNA, 1433 bp, Glycine max
  Clone ID: PAT_MRT3847_97907C.1
ttccttcaatattcttcatacggctgcgcgaagacagaggatcgttattgtgttgcttattcttttttccacaaccttgaatgtttaccgccccgccggataaggagaaggagaaggaggatctgcgtcgcaggcactgttcatcgccatgtctcgggttgataacagaaattcctcagccaccaagcgtgctaggactgatggtagtcgtagggaagatgattggacatgccccagctgtggcaatgtcaatttctctttcaggacaacttgtaacatgcgtaattgcactcaaccaaggccggctgatcataattcgaaatctgctgccaagcctctacaagctccgcagggttattcatcctcagctccttatttaggttctaataccccctcttcaatatatcttggtgttccaccatatggatcttctctgttcaatggatcatctgttcctccctatgatgttccattttctggaggatcagcatatcactacaattatggtagtcgcctttctgctggcagtccttatagaccattgcatttatctggaccaacaccctacaccaggtggaccagtgattggaaatggtgggatatatggaatgccccaactgttggatcggtatggcctgggcatccctatcggacctgggacaatgggtgctaggcctggattttttcacgatgacaagtcacagaaaaaagatgcaactcgtgacaatgactggacatgtccaaaatgtggcaatgtcaatttttcattcagaactgtctgcaacatgagaaagtgcaacacacccaaacctggatcacaggcctcaaagtcggacaaaaattctaagcaaaagatgcctgagggaagctggaagtgcgaaaagtgtaacaacataaactatcctttcagaaccaagtgcaacagacagaattgtggtgctgacaagccggctgagtctgaagaatctccttcatcagctgcagatcaaaatgatcagtgagtactaggacatgtttgagggttgagaaggtccagagttgtcatcaagcattgctcagtctgggtgtctgacagtcagtcttgtcgtcttctatgttgcagcagttgtcaagtcactcaccttctcaatatgtgtcaagttgttgtattaactgagatggtattttggtctttgtggattgttatgacgcatgtgtcagccaactttcctggtataaaggttattgcatgttccagttttaagttttcttttggttcttgactgtctgtgtttaagtataactctagataaatagatgccttaaaagaatgggtatgatattatatgtaatgtcattttttttttaaaatgtgattttcatttcgttaatgatttatggttaacatttagttgaagaattcttttatcaatttctctctttttgcatgtgtt

SEQ ID NO: 140530 - DNA, 704 bp, Glycine max
  Clone ID: PAT_MRT3847_97908C.1
cggccgctcgagccggctgtctcgactcctctctctgaaattctaatcttcgctatcacaacgactctctctgttactctgaacaactgacttcaatgtactgtaactacctgccaagttgtgatggcgttgttctctgtaagaatttctgctctgaaccccaatgcacctatggtcatacctgctagcacttcgtcacgtggaggatttttctcctcattggtgcgatcttgagaaatcgttctcatgatgtcgagatgatagcatgagccaacataaagaggcataattcgaagaagatgctcaatgactctactactagatgatatggagaatatgctctcctacactgtttgatctaagcatggaataacacttctgtgatctagaaaacgagctagagcaggtggtgatgctctctgaagctctagatcattctgtacgggatgatcctaacactggaatatggtctccttagatgcttaacaatgatgttaaagcttttcttattgacttgacacctacatgcaccgagataaacgggctccacgtgctccatctcgctttgtagagcaccttgatatatcagtacagcacgtgaatgtgcatagatcctctctcctaattctccagcctcgttgaggacaacctttatagctcatatgatatcttgctagagctgcgagttgctgactaaagcttgc

SEQ ID NO: 140531 - DNA, 311 bp, Glycine max
  Clone ID: PAT_MRT3847_97909C.1
gaagaaaacactaatataatttttaccaaaacaaaaaatttttaagacagatcatgagaatgttttcattaacacttaagtgttacccttcggagttaccaaaaatggggggccggtttaaaacatgaaatgaagattttgtgaccattttattgaaaaattatgaaagagtttttacaaaagaaaccattttttgccgttaaatgtttgcacaaagttcgtttgcaaccttgtttcattccaaaaacttgttttgtttttattgatcaatgcctgttttaaaaaaaataacaactttggtgccattttta

SEQ ID NO: 140532 - DNA, 1009 bp, Glycine max
  unsure (1)..(1009): unsure at all n locations
  Clone ID: PAT_MRT3847_9790C.1
ccacgcgtccgcgcgtccgtgggtggtgtttgaaaaatagacgaagcttagctttaaggcaatggggaccctgcaaccaacaacaacacccttatgtggacacattaggtgaggttcaacagctagcaccaatcttccttcataaaacacaaacctttgatcacacaatctcaccttaatttgtgttgttgttgtgccattcccatattgtcccattcactaagacatggaagccagcgctggactggtcgctgggtcacataaccgcaatgagctagttgtcattcatggccatgaagagccgaaggctttgaagaacttggatgggcaagtgtgtgagatttgtggtgatggcgtgggactcacggtggatggagacttgtttgtggcttgcaatgagtgtggttttccagtgtgcaggccttgctatgagtatgaaaggagagaagggaaggccacctttgcccacagtgcaaaaccagatacaagcgtctcaaagggagcccccgagtggagggagatgatgatgaagaggatgtggatgatattgagcatgaattcaatattgatgagcaaaagaacaagcatggccaggttgcagaagccatgcttcatgggaggatgagctatggaagaggtcctgaagatgatgacaattcccagttcccaacacctgtcattgctggtggtcgttctaggcctgtaagtggggagttcccaatatcatctaatgcttatggggatcagatgttatcctcttcactgcataaaagagtgcatccatatccagtgtctgaacctggaagtgcaagatgggacgaaaaaaaagaagatagaatggatgactggaaattgcagcaaggcaatttggggcatgaacctgatgaagatccagatgcagccatgttagatgaagcaaggcaaccgctgtcaaggaaagtgccaatagcatccagcaaaatcaatccatatagaatggtgattgtggcacgacttgntatccttgcat

SEQ ID NO: 140533 - DNA, 594 bp, Glycine max
  Clone ID: PAT_MRT3847_97910C.1
ggctcgagagcaagggcttcaagtgtcactactaatcctctaaatggatcttcttcatatgctaaattgggtagcaagaggttccgaaatagctgatatagagtatcaaattatcatgatgaggctgaacttgctacttcccaggttaatgcaaaagaagaaaaattgggaaaacctgagggtaatgatttgccagataccaaaagtaagaagagaaagaccaatagaatggaaaatgcagttaggcgtaagagaaaatcactctctggcctatcagatgtgaatgtaaacacttctaatggtgactctcaaaggcctgggagaaaactgaaacaaaagaggaaggtggaagaagtaactttagtacatcaactgcaaaatgttgagataaattttattggggtaagcagcaaatacagctcagctcctcaagctgcacaaaatttgtgttgccttgcgtctgaaggaaagtctgagcacaatcagagggaaaagatagaggcacaagaacatcaaactgctcaaattaattcagtgtatacagatgcaaaaaagcttaactgcagttcactggtaatagatttgcagtttaca

SEQ ID NO: 140534 - DNA, 664 bp, Glycine max
  Clone ID: PAT_MRT3847_97911C.1
ggctcgaggttcactctctcactcgcattgtttctccgttactcagatcaggcatgtgtggtttccagaattcattcatagagagaattggtagtttattttattaggaagcagcaatggatgtggttttgaccttaggaagagaagacactaattctgttgatgagacaaaaatgactgaagacaccatcttgactgaagaagccccggagaagcttgaaggctgctttgattctagagatcgaagaaaaagcaagtacctgtcttacccatacattggaccaaaccaaaaggatctgccagctgaaactgaagatttgaagacaccatgtccttctcagaaagcaagggcttcaagtgtcactactaatcctctaaatggatcttcttcatatgctaaattgggtagcaagaggttccgaaatagctggtacaaaaaattcatcagctgtaatactatgcccagccattacaatttcatgaatgcatctgcagaagaattactttcaggactttgttctacagctgttgattgtatgtttccagttgggaataagagctttgatttagttgagtgggtcttttgcagaattagagtatcaaattatcatgatgaggctgaacttgctacttcccaagttaatgcaataagtagaaaaattgg

SEQ ID NO: 140535 - DNA, 2435 bp, Glycine max
  unsure (1)..(2435): unsure at all n locations
  Clone ID: PAT_MRT3847_97912C.1
gtcgacccacgcgtccgcatacattggaccaaaacaaaaggatttgccagctgaaacagatgatttgaagacaccatgtccttctcagaaagcaggggcttcaagtgtcactactaatcctttaaatggatcttcttcgtatgctaaattgggtagcaagaggttccgaaatagctggtacaaaaagttcatcagctgtaatactatgtccagccataacaaattcatgaattcatctgcagaagaactactttcaggactttattctactgccgttgattgtatgtttccagttgggaataagagttttgatttagttgagcggttcttttgcagatacagagtatcaaactaccatgatgaggctgaacttgctacttcccaggttaatgcaaaagaagaaaaactggggaaatctgtgtgtaatgatttactggataccaaaagtaagaagagaaagaacaataaaattgaaaatgcagttaggcgtaagagaaaatcactctctggcctatcagatgtgaatgtaagcacttctaatagtgactctcagaagcctgngagaaaactgaaacaaaagaggaaggtggaagaagtaacttcagtgcatcaaccgcaaaatgttgagataaatttaattgggaacagcagcaaatacagctcaactcctcaagcttcacaaaatttgtgttgccttgcgtctgaaggaaagtctgagcacaatcagagggaaaagatagaggcacaagaacatcaaactgctcaaattaattcagtgtatacagatgcaaaaaagcttaactgcagttcactggtaatagatttgcagtttacacccccagctatacctgttgatattcctgagagaaatagaagtgaaaatacggaagaaatagttttattagcttcaaatccagagtcacgtgtttcccaagaaggacctgttgggagtattactgatcatagcttgttggttagtactaaggctgaggttggtactgtcatggtaaataaaacagggttgatgaatagcatggggaaagcaacaggactgcatctcaatactaaacttgctgttggagtgcctctcaatagcatggggaaagcagcagcagcaggagtgcatcttaatgctacttgaacatggggaaagccagcgagtgcatcttaatactaaacttgctgtagatcaaaaagggttgaataatagcatggagaagccagcagaaaagcctctcaatactaaacttgctatagggaaaacagggctgaagaatagcatagagaaggcagcagaaaagcctctcaatactaaagttgctgtagagatacctgatttgaacggtactggtgctgaatgcaattcaatcagcacagaatttgatactgtacatttcgtttcacctgaattttaattggagcagtcaagaagcgtatctgtatgttcaagatctaccaaaactacttcttgcaatagaccggatagcaatggagaatcacttggaacctgtcttctcctagtatttttccctcatcaacacatcccatctaaagaagatttaatgacaacgttttgccggtttggtcccttgaaggcgtctgaaactcagttgtgaagagacgctggtagtgctcaagctgagtttgtaagaagtgcagatgctgcagctgcatttcatagtatagagcaaaacaacaaatttgcttttggttgtactctcgttgattgcaagctccatcttctttctgcgccctgtccacctgtagagcaacttgtgaccactgctcaaccaactgggtttatggcaatgcctggtgtgatgacctctactcgaccaaccatgtctatggaaatgcccggtgttacccctacccaaccagctgggtctatagcaacgcctggtgtgacaccaacccagcagccaactgggtcgaaggccgtgcccggtgtcactcctatcctaccaactgggtcgatgacaatgcctggtgagacacctccttcccttcatttcattaagcagaacttgcagatgatgacatcaatcctggagaattcagggagcagtctttcccccaagacgagagccaaactggattctgaaattaaaaaccttatgagaaaggtgaattccaggaccaaggtctgaatactgtggtcttggaagcttttctttctgaatttatcatggaagtagttaagtagattatagcagtcagggtttatgttctagtcctcttttcagtgcttgtactggactgctggtggactttcctcccaattctttgacttctgcacaattcatttgaatgactcaaggatattttatgcatgaatgtcatttgattcaatatcattcagtgcttaccaagtctttcatttgaatatcaagctaagttttatccatggaagaggtaagttttaatattatcct

SEQ ID NO: 140536 - DNA, 306 bp, Glycine max
  unsure (1)..(306): unsure at all n locations
  Clone ID: PAT_MRT3847_97913C.1
acccaatctatctgaaaattccaacaaaggatcgatggcaactcctagagccagtaaagctagcaaagtggtgatggnggctgaaaatccgttctggatacaaatgtgacaggtatagggagtagtaaatattgtagacacataacagccagtgattttttttttctttctttttacattttgtgagggtatcactactccttgttaattgggcatcctatgcgactaaatcttaataaataatatacgagtttaataggcatgtactgtgagtttaattttttttatcagtattcagagatcttt

SEQ ID NO: 140537 - DNA, 309 bp, Glycine max
  unsure (1)..(309): unsure at all n locations
  Clone ID: PAT_MRT3847_97914C.1
ctnnnaaaaggggttttttnnnnntnggggaatggggcacacacttatggacttgaaacactgaacttttgggcacaacccctcagggtggggtccgaatttttttttaaacttgaacattaaccgcccaaaattttttggggaaggggtgccttaagcattttttaaaaaaaaatacagggcccaatattctttgtacattggatcccaaagtccctttgatcacattacatttttttttcatttaaacgagccccatttattggtgggagatatttctaaaaatgggggggggtggctcaaactttt

SEQ ID NO: 140538 - DNA, 199 bp, Glycine max
  unsure (1)..(199): unsure at all n locations
  Clone ID: PAT_MRT3847_97915C.1
caaatctttatcagatggcaccttctcggagtgtcgctgattcaacgcctccgtcaacaacatcgaagatcgnanagaacgattttcagccattctttgttcttcataaagcttcatcccggagaaaagatagaaaaccaacagctcagggaagattgtggaagagaaatgagttatcttcatcatttccacacaacat

SEQ ID NO: 140539 - DNA, 279 bp, Glycine max
  Clone ID: PAT_MRT3847_97916C.1
agcgatagcatttggttccctccaacttcacttaagttctccctgtgtttctttgtctgaatacacaccaaagcattcttgattgttattattaatacaccaaaggataaatagttacccagcaaagcttccactattgttgccgacgcggcaggcccaggaccacacccaagtggagtgcccgcagcatagctgctacaccgtggtccaagagatcggcggcccagtctccaccgactggtacgccgagcggggcttccacaaaccagcaggctctac

SEQ ID NO: 140540 - DNA, 379 bp, Glycine max
  Clone ID: PAT_MRT3847_97917C.1
aattcggctcgagcagctatcttgtttgctttcgtcctgcacattggtgggaaggggctttggctggggatcatatgtgctctagttgttcaagtgtcatgtcttctgatcattacaatacgtactgattgggaacaagaggcaaagaaggtgaaagacagagtctacgattctatgagagctgaggtcatagtctcgtgaacattatatattttaactggtggcaccgtgaagtgaacattcctcaactgtgcacatctatatgactatatgtttgtagcttttaaacagcgatatagcattaagtctcttcaatctgtaacatctttaaccacaaaaaaaaaaaaagaaagaaaacctgtaacatctttgtctcatt

SEQ ID NO: 140541 - DNA, 315 bp, Glycine max
  Clone ID: PAT_MRT3847_97918C.1
cacaatttctgggtcacccttaccattccccttctaccactctgcatattgaaatcggctataactataagagcaaatcgtaactttctctgggtcatgcatgctgaagggaacacagacccttatcatcccttgaaacctctcttcaaaaaataggctcttgcccagtgacaggctgatagcagagccaggtgctaaaaaggtcgaagatgtatatgaacccaatccaaatgaaataaacgccacttctgtgttcaggcaattggaatttgtcaccccagttacgcaagttgaattttttccacaagaagtgag

SEQ ID NO: 140542 - DNA, 117 bp, Glycine max
  Clone ID: PAT_MRT3847_97919C.1
ggctcgagctcactaaaaaacagattagcaagttagcgacaacttggtgtccgagaactggctactctcactcgctcgaatgccccaataagatggtagggacatggacaacccctt

SEQ ID NO: 140543 - DNA, 129 bp, Glycine max
  unsure (1)..(129): unsure at all n locations
  Clone ID: PAT_MRT3847_9791C.1
gcatcttattacatataaatactttcaaataggcgcactaacttcactttatntgttttcatttatttctcaacatatcactataaacatttctacattaattcttcccaaccttttcatttatcattc

SEQ ID NO: 140544 - DNA, 287 bp, Glycine max
  Clone ID: PAT_MRT3847_97920C.1
cccccccccccaaaatcttaacaaccgaaaggcccagggggaaaaaattagacgggaaaccaaaataccagcatgatgggaccggtataaaaaatctttctgggcaaaaagggaaagcgggcggggtggggccccattggggaaagagggggaaacgccacaatcccaagggggttggggggaaaaacaaacaaaatggggggaaagtcccaacacgaaatatgggttaaaggaaaattggtgaaccccataaaagggttttggttttttgacgcaataaaccccgg

SEQ ID NO: 140545 - DNA, 972 bp, Glycine max
  Clone ID: PAT_MRT3847_97921C.1
ggctcgagggttcagtccactgaggatccttctgaggttttcaagcgcaacgctattaacaagcttgtggagatggttcatggcgacgttgccgctttgaggaagaccagagaagatgaaatggaggggctgtttagtttgcagggcgtgctgaaacagcgcgaggagagtctcaataggggtgtgaaggagatgcagcaggagatggaggctttggagcagcagttacagatggtgttgataaatactgatgttttggaggggtggttgagggataatcgaggggagtagatggccggtttggagaatcccgaggatgcttttgagtgtgcggatgtgctctccaagcagatgcttgactgtactgctgctgatttggcgattgaggacacgctttacgcgttggataaggcacttcaggttggaggtgtgccatttgatcagtacttgaggagcgtgagggccctgtccagggagcagttctttcaccgcgccactgccgccaaagttagggctgctcagctgcaggctcaggttgccaatatggctgctcggagtcagcattatggttgctgaggctcgcagcagcgccatctggtttggtttgtgggtggttcagatgatgaaatctgccattgtgagtacagaactacggattggtatttttgttgcttcactttgagtctgtgcttctagtcaatagcatgaattggtcacccttataattacagccttcaacagcttttgaaattgttaatcaggggctgtaccattgttcttatacaaacttaataatatcattttcttgaaaattttggtttgagggtttgttagctccagcttcttttttctttttataattttattgtttaggagtatacatgcttatggatcatagattgttccaccctgtattttaaaacaatggatattaccatggatatatatttttctttgtgtttctgattttca

SEQ ID NO: 140546 - DNA, 515 bp, Glycine max
  unsure (1)..(515): unsure at all n locations
  Clone ID: PAT_MRT3847_97922C.1
attgggaaaaccagtcactttgtattaaaagccgatctcaataatataaaatgtgtataaatatattatttcacattacaaaagaaaagagtatgagaatgaacataaaatcaatgattcctccatcaaaatattaacttattaccttatgaaaaaaaatgttcttttatgttgcaatatatggatcgatcacctgcagtcttgcatggtggaatcatcattaatgtgtaacgagttaacaatatatatatatatatatatatatatatatatgtgngtgtgtgtgtgtgaagaatattaatattaatgccatactcaatcacctttctctttgttgttcctcccattttttaatcatctctagaaaaatctcattccaagtgtctataggccctggcaagcaccaatgaacacaatcattctgcacacgttctggaactcccttagcaaatgggaaaggattcatataaggaccaggatgaccatctggtctcagcaatgctaattttgttaca

SEQ ID NO: 140547 - DNA, 468 bp, Glycine max
  Clone ID: PAT_MRT3847_97923C.1
gttgcattttaaatccggaaacagaagcgatcgatacttgattccaagaatctcttattttctacctactgatttgggggcgatttcttaagggagagaaagcactctctgtgctggccacagactccgtgaatcattttcttttccattcttactttatttgctgaacactctcctatttgagatgggacttcgtgtcagacttaaactgcttctgtatatttttcagacctctgtttaattgcaagttcaagctggagaaatcttggattagagctcccactctcctatttgggataggacttcgagggtagacttttctattcttctcctatatttcactctctgcttctcactgatccgcattgccgaacaaagtggtcttatttgaaaaacacttgggcgtctgggcaaatgaccgcttcagtaactttgtctggagaaacaggtttactgtgacaacaattt

SEQ ID NO: 140548 - DNA, 1694 bp, Glycine max
  Clone ID: PAT_MRT3847_97924C.1
tgaaagcaagagaatatcccttgtcggtggaaatcacactgccgccagattttgcactcgctaaaacaatatgcgtaagctcggaattcggccttcgctaatctcttctttttctatacctctctttttcttcttctacacataacaaactctctttaaaattttcaacactgtcgtcgtcgacatcttctttgtgtttctttctctttttgaattccctacacttgcttttgaagccacataccaactatatatctatatcgtgattaggttaattaccctaattcagaaatgaagaacatttctcaccgtgtgttgcttttggcattgtttctagcttcctttacctttatatcttcgacctcaactcaacaacaagaagccaaacatgaccctattgccatcaacatggaaacaaaggttggaacgcaaagaaaactattagggtacgtgccagaggcaaagaaagctgcattgcaaaacctagaagacgtgcttcttgagcccccacgtgcagcttcagggaaatcaagggtgtacttgaagcgtacgaaatacttgcctgatttgatgggtgattctcttgagagttaccctcgtcgcgttttcattgatgtgggcctgccagagaaggatggagggagtgccactgattggtttcgcaagacataccctacgaggaacaaggactttgagatgtataagattgagacagtggcggagggtggtccacaaatagagatgtcggattggttgaggaagaatttgagggaggaagagtaagtggtgatgaaatctgagactgaggtggtggaggagatgatgaggagtaaggccataatgttggtggatgagcttttcttggagtgcaagccacaacaagggaataggaagaggaagaatggaagggcctattgggagtgcttggctttgtatgggaagttgagagacgaaggtgtagctgtgcatcaatggtggggttgattcaaggttttaaattgtggtcgtagttggggtttcattgtgattcttgatgttatgagaaattgcaaacaaatatggttgcgatttcaattgatatgattgtggtgacctaaaaaccttgggtgtggcgatcgaaatcgtggaggtgaaccattttttaaaaccttgcattgattgattgattattttggtagaaacatgtaagagggtgttttaagaatttgtgtttcacagagagagtggtgtagatgaagaagacatggagttgagggtgaagagtgttagagagattcaagagtggaggtggcccctgaggagcaaaaagccaaggagttttaattttctctattgtccctttgatttcttttcttttcttttgtggcgtgttttaaaagtttaatcatatttttcatgtgactgctttgtggatgtttatgaaatttgttgattgtgaaaataatgaccaccatggtgtaacagttgaggaatgtgttcactgttcaatgaggggtgaattatggtcaaagttcagattatggtgtgatcatttatattctatgacacgtagatgttgaagctacgaatattcatctgttgtattttatcccccttattttgttttcattgaactggttgcaagctaggaattaattgtatttgatatatttaagtgcttcatataaagaagttaatttgtgtgtgaaaaaaaa

SEQ ID NO: 140549 - DNA, 665 bp, Glycine max
  Clone ID: PAT_MRT3847_97925C.1
ctcacacacacatgatggaatcccagaaccagaacctactacgccaacccttgataaactcaacgcatcatcatcatcactctgctgattcccgtctcgaagaggtcctctctgaccccaccctaccctggtccaagcgcatcctctccgccacatggatcgaactcaacctcctcttccccctcgccgctcccgccatcctcgtttacgtcttcaacaacctcatgtccaacgttactcgcgccttcgccggccacctcggaaacctcgaactcgccgctgccaacctcggcaacagtggcattcagctcttcgcctatggcctaatgttgggtatgggaagtgcggtggagactttatgtggacaagcgtacggagcgaacaaatatgaaatgctagggatatacatgcagagagcaattatcgtgctaaccataacagggattcccttaacggtggtatacattttctgcaaaccaattcttctcttgctagaggagccaccaggaatagcatcagtgaccgcgatattcatatactgtctgatcccacagatgctcgcttacgcaataaacttccccatacagaagtgtctgcaatctcagaacatagtatcaccaatcacatacatgtgcagtgccactctgagtcttgacgtgacgctt

SEQ ID NO: 140550 - DNA, 388 bp, Glycine max
  Clone ID: PAT_MRT3847_97926C.1
tacacgtctagcactaccaccttcttggggggggggggggggggcgggcgggggggggcgggggggggggccggggggggggccgcggggggccccttttcatttcgggggtttaggggtaaaaaagcctaaatagcagggttaactgcacacatttagggttggggaaagcctgcagctcggcgaacaatgtaaaccccgggcgctaacccagacattgtggtgcccccaaaaatttgcggggtgggatatcaacacggacaacgctcttttaccaaataaccttagcccggacaacaaacccgcccccttttcggggattaaccccaccaatgcgccatggagttttgtggaaaccccggagggaccttataaacccccccacaaa

SEQ ID NO: 140551 - DNA, 1640 bp, Glycine max
  Clone ID: PAT_MRT3847_97927C.1
agcctctgaagatgcggcgtggggggccctgtgctgtagccataaaaattattcgtagtaatgacaccatgtacaaggctggtatggatgaattggtcatattgaagaaattagtaggtgcagatccagatgataagcgtcattgtgttcgtttcctttcaagttttagatacaggaatcatctttgtttagtttttgaatctctaaatatgaatctgcgagaggttttaaagaagtttggtcgcaatattggccttaggctaacagctgtgagagcatacgcaaaacagctttttattgctctgaagcatctccggaactgtggtgttcttcattgtgatataaagccagataatatgttggtaaatgagtctaaaaatgttttgaagctttgtgactttggcaatgccatgtttgctggtaaaaatgaagttacaccatatcttgtgagtcgtttttatcgtgccccggaaataatacttggcttgccatatgatcatccattggatatttggtctgtaggttgttgtttgtatgagttgtatatagggaaggttcttttcccaggtcttacaaacaatgacatgctacggcttcacatggaactgaagggtccttttccaaagaagatgctgcgtaagggagcatttactgaacagcattttgatcaggatctgaattttcttgctactgaggaggatcctgtaacaaaaaagaccataaagcggctgatactcaacattaagccaaaagatattgggacactcattactggctctcctggggaggatccaaaaatgttagccaactttaaggatcttctggaaaaagtttttgtcttggatccagacaagaggctgacagtgtcacaagctctgaaccacccattcatcactggcaagtgaacaatgttgctgaatttgaatcccaaaatgatactgatatttgtacataatgatccaattgatattgaggttctaattatttggtactatttatcttctgtgtatggcccaaggagtgtcatcacagttgttggcatgttgaagtgaaaaagggtgatgtcgctacaggcgtacactttactggcggttctttcagtggaatgtactgtttctattgagacataccactggtttgaggcatcccttccatgcttagatgcttaaaaggaacccaggagaaggtaccttggcttgtttattgggagattaatttcactgtgctggaatgaattatgatccccattaaaattcattgacagtgccaatagaataattgccacatttgagtgggagtttattaagatgagctgaatggtcatttttcagtcatgaggataatcaatggttattggtgatgtacgtttgagtacatgtgagcaaattaattgtttattttattagctaggtagtcagggggaggggaaatggttagtatcaaaccttcttcctcatccagatacagctgccactgggccatatgcctagctgctactgcctttaaatcatttcagtataaatgatggaatcccaagtactactgccttttctgcttcttgcttattattcttttcagttttgtaacttgagttgtgtgtgtagatatcttatttcttgaactgtacttgagttgtattc

SEQ ID NO: 140552 - DNA, 321 bp, Glycine max
  Clone ID: PAT_MRT3847_97928C.1
aaaaaaaaatgggccccttttttttttaaggaaacaaaaattacattgttttttttaaagaaaacctccgccacattttaaaagtccaaaggggtttaattttataacgtgaaagaacgactggttggcaaaaaataaaaattaacctgaagtttttaaggggcatattatttgggggctttgaaagctttgacctttttaaggagctttttagcattggtgtccttcctaaagggttccctaacggggtccagaatttttttaaaggactttgccaatgctggtttaagggcaccaggatggaactttccacttttatag

SEQ ID NO: 140553 - DNA, 557 bp, Glycine max
  Clone ID: PAT_MRT3847_97929C.1
gttttttttttttttttttaattttggatatctaaaatcatgttcaattgaactcttttacccttttcaagaaggcatgaacaacccgcacttaggtgccaccttggctgagtcttccccgcattagcaggcccagtgttaaagcgccataaactaagtaaattatattaaaaaataattcatatcgttatatataatattaaaatttttaatatatatttaatataaatataaatttatctaataaattttataataaataattttgatctaataatgtattttttccaaaattaattgttataaaatttattatgtaaacttatacgtatattaaatatatattaaaaaatttagtattatatattaaaacgttaattatttttttaatataattaatctattaacttagttgattaaagcatcttattaataatgtgaaagacgaaagttcaagacgcatggacaatgttggaattataaaaaaaacatgcaggatgtaaaagaaaaaactggtgcaaaaaacatcccacagatgctacagttctgcacccaca

SEQ ID NO: 140554 - DNA, 1391 bp, Glycine max
  unsure (1)..(1391): unsure at all n locations
  Clone ID: PAT_MRT3847_9792C.1
acggctgcgagagcgtccgaagcttatgatgaatctcaatctacttcatctccccgttccaagtctgccttatctgctgttctagtttattggcattgggatcagtaactgcaattcccaatgcaaattttcatcgggcgccaaggagcactagtgtgcttctggttgttgtctgtgttttttgtggtaacaggattcaacaatgaagagcacaggacagtggaggtagttggcctaggagaatgcgcagactgcaggcagaacaatattaagaataaccacgctttctcagggttacgtgtgacggtagattgcaagtcacgacatggacacttcagaacgagaggggcaggtgcgcttgatgaatatggaaacttcaaagtatcacttccacaggacatggttgaagatggtgagctaaaagaagattgctatgcccagttgcatagtgcatctgctgaaccttgcccttcccacggaaactccaaaattgtgaccaggtcagtctctgaagacacacacacccttgcacctgctgctggaaaactcagattctcatcagcattgtgcacttcagccttcttttggcatttcttcaaacaccacccagaattcccttaccctcctaaagatgactactctctccctccccctgtgccagtctataaggaacctcttcctccagtgccagtgtataagaaacccccagcaccatataagaaacctcctattagtactccatctccagttgtgaataaaccatgccccccaaaggaaaaaacaccttctcccactcccatttacaagccacttccacctcccactcccatttacaagccacttcctcctcctactcccatttatgagcctactcctaccgcgccgtcgccaccatattttaaatactttcctcctttccatttcaagaagccgtgtccacctcttcccaagatggaacctccaaagttcttttaccaacacccatggtttggaaactggcctccctctcattcatagactatcattgttctcggagtaacgttttttatatgtgcgttttctagcgtttttgcttcttatgttagcaataaaatccgaataacatccatgtcagtggatacagaatgtgagcagaagagcatggaaatgagagtaaaagagaaaaacaaatgatggagcaatgttgtttgagaaagtttgaagttaattttggtgaccaagttgaatgtgatgagttaataagtgaaggtttctctgttagttttgtacaagtacgtataacttaaaaatgctttatgatccttatggtgatattgatatctaatttttcagtncaaaaatagccacccatgttttctattatttacaaaaaaaaaaaaaaggggcccccc

SEQ ID NO: 140555 - DNA, 545 bp, Glycine max
  Clone ID: PAT_MRT3847_97930C.1
aatcccaaaccattacaaaaccaaaaaacgttaaaatgcttacaactgaaggctagactaacattcactggagatttatggtttaaggaccttgaaccacaatacttagaacttaatcaagggcaagcccattctctaggaacttgggtcatcaagttaataagcttgtgaattaagggaaaacgaacctggccaatttcagttgtatccctatttgtttggtcctattagtaaaaattacaggggggtctgtatacttgtcaaaccttggttcataacgaatcatagtttaaaccacccgcaagttgacggtatccgtctaacttagttgactggaccattgaatataatgagattggtttcttcttctataaacacgactctgacttggcaacacagcagtactctgccgttcccaagaataacttctattagccccataagcattgacgattacattctgataaccaccatggcttacattaatgtgatcaattgttaaacctctagtcccgacattcccacttgactatgaatgtccacgt

SEQ ID NO: 140556 - DNA, 376 bp, Glycine max
  unsure (1)..(376): unsure at all n locations
  Clone ID: PAT_MRT3847_97931C.1
cnaaaaggagggtgaagaggagactgggggggagggggtggcgagaanaagaagaggaaaaaggggaaggggaaggggaagaaggcggctgcggggggagcagcagcagcagcagcagtagcaggagctgtgccagaaaatgagacagcggaagataaagctgaggggattgagccaaagaagagggaggggggggggaaaaaagcgggtgagaagaaagtgccaaagcatgtganggggaggcgagaggcgctagctcnaagacaagaggcggaggaaaggagnaaaagagaagaggaggagaggggaaggagggaggaggaggagcgacntangcganaggagcttgagagacaagcagaagaggcgagacgtg

SEQ ID NO: 140557 - DNA, 519 bp, Glycine max
  Clone ID: PAT_MRT3847_97932C.1
ccacgcgtccgatcatttaatgttttgttcttagtatctggttcccatcaagactgatttaagtctgactttggaaccagttcactgagatatcatgctttttgtatccttagtacctctggtacttcattattaatatatattatctttgctgataaaaaaaaagcatctgagtgtctcgatttctcctcatgctatattggaactccaacgccagcaagctcgtcgacgtagcctttgattttgtgaaggtactaatctattggtttcccttcgagtgaaacagcatgcattgtggtccgtaattgtcgtgccctagacttggtgtgaaggttgaaatgctcgtgaatcttctcccatacctgataggagtgattcaagccaaacacgcatggaagaacagaatatgaagagcatttgattggaagccacacaagggagtgtgttgattcttgccactttcgcattgcttcattattcagaaatatacatggatccatggaatcaaagattcaatca

SEQ ID NO: 140558 - DNA, 265 bp, Glycine max
  Clone ID: PAT_MRT3847_97933C.1
ccattgccatcaacacctttgctttcatggcttatggcgactgaagcaaatgcataactaccgcctggtccatctcttgaagcatgcctgtcactttggcagcattatcatgctctaactgttccacaacggggtagagattgatacccagcttcatactttgctgctatggataagcgtgaagcatagccgtagcccataccccgacaggtattagctgggagattgatgcatcacgcatcgtgctcgcacacacgtcatatgg

SEQ ID NO: 140559 - DNA, 1745 bp, Glycine max
  Clone ID: PAT_MRT3847_97934C.1
ttttcgtctgccgcccgtttagtttcggttttcttactcactcaccgccgggatgtcgccggtgcccggagcacacgcccctctcctcccgggatccaagtccaaggatgttccgccggccaccgtgtccggcgccgtgttcaatgtcgccaccagcataatcggcgccggaataatgtctcttccggcgactctcaaggtcctcggagtgattccggcgttggttctgattctcgtgattgcttttcttgcagagctatccgtggagttcctcatgaggttcacacgtgccggcgaaacgacgacgtatgccggcgtcatgagagaagcctttggacccttgggagcagtggcagctcaagtcgctgttgtaatcaccaatctcgggtgtttaattatgtacctaattattattgcggatgtgttttctgggaatcaacgtgaaggggaagtacatttgggtattttgcaacagtggtttgggattcactggtggagttctcgggaatttgctctgttggttgtcttgttcttaattttgcttccattggtcttgtaccgtcgcgtagagtcgttgaagttcagttctgcaatatcaactcttcttgctgtggcatttgttacaatatgtaccgtgttagcaatagttgctattgttgaaggaagaacacagtcccctagactgattccttgtttggaccaacatacctctttttttgatctgtttactgcagtgccggtcgtagtcacagcctacacatttcattttaatgtgcatccaattgggtttgagcttgccaagccatcagaaatggcaacagcggttcgaatagcattgctgctttgttgtgtcatttacttttcaataggcctatctgggtacctcttgtttggggattcaacacagtctgatattctcgtcaattttgaccagaatgctggttctgcacttggttcattgctcaatgttttagtccgtttaagctatgcttttcatgttatgttgactttccctctcctcaacttctccttgagaaccaacgtagacgaattcttcttccctaagaagtctcctctagccacagacagcaagagatttgtgagtctcactctagtgctgctagccttaagctacattgctgctattttagtcccagatatttggtacatctttcagttcatgggatcaacatctgcagtgtgccttgcctttgtcttccctggtgctattgttctaagggattcttacggtatatcaacaagaagggacaaaattattgcactggttatggttatactagctgcgataacaagtgtgattgctatctccaccaacatatacaaagccttccagtagcacctcgtaaatttgtattttcttttcccttttcaatttttccctatatttagaattttttattaggggagagggagacgtagagagaaaaagagagaattctagacgcatttgatagttgaggcacttggtgacttgggtttatactttcggatgccattgttgtttgttgtaaaattcgtatatctagaacagaccagctatgtaaaatgtaaccaaggatgtgagatccaaatttggggttgaaagtgcatgcatataatatgagatccaaatttaatgttgaaaggtgacaaaatttggccaccattattatgcaagaaacccaagtgcaaatacaccgtgtgttaacatttgggtagctggtacccattattgagagacaaag

SEQ ID NO: 140560 - DNA, 119 bp, Glycine max
  Clone ID: PAT_MRT3847_97935C.1
tttttacatttagcggccgggccacaagatccaatcatgggaacgcttgccttctgacccaaagcaaggctatagcgggaccgacgttcaattcacaggccagaatacaacacgcgtcc

SEQ ID NO: 140561 - DNA, 381 bp, Glycine max
  Clone ID: PAT_MRT3847_97936C.1
gaaggaggaaaaaatataataccaatcgagaagtctctacagagagtgtagtgatgcaatcagctgacacattgccaagaaatcaaggatatatatactttatacagaacatacggcagaagtagattggccataggatcaagaacttccactgaaaccttgcttgtccctcatctttctcatttccatttgccttgtggtatgacgactctgcgcttcactacttagagcctgatgggtttaaaccatactcacttgtaacggaactgtactcactgattgcaccatactcctgagttaccaatgccattgtcctaaaccttttcatgtcttgcttggactgcgcaaggcccaacctgagctttcatgagaactatacat

SEQ ID NO: 140562 - DNA, 427 bp, Glycine max
  Clone ID: PAT_MRT3847_97937C.1
ggtcaatttcatcctctctctacaccgtgaagagaagcataatccctctctatccctacaccacaaacattaactttcaatgccttttcacttcatcaatctccatctccctcaacaacaaccacaaccacaacatcatgttaacccgtaaccctaatcaaataccagaaataccatccgtgccaaaaaccgaacctcctcctccggttccaaaagagcaacctgtgcttccaaccccggaaatagacccttttatgccacccgaaatagtcacggatcctccttctactccctttgagccggatgctcccaaaccgccgctatcaccgcccgggcctgacatgccgctgcctaagccaccggatacgctgccgccacgcccaccggatacgctgccgccgcatcctccgggaccggatattgtgcc

SEQ ID NO: 140563 - DNA, 459 bp, Glycine max
  Clone ID: PAT_MRT3847_97938C.1
ggctcgaggctttttgtaactggagccttgaagatcaatggggttcctttctgaagggtgagccaataacctgtcattggtacatacacagaggtggacatctttggcgttaatgttgataaattagatgacaagttctctgccatggtagccaagaaaatgaaaacaaagggcgaaggcgaggtcttcaaggtatataaggaggagaaaaatgtgcttccccaagaaaagagagaagaccaaaaaaccgcggtcactactatgttaaaggccattgacaatgttccacacctgaagtgttacttgggagctacgctgtgtttgatggccggaatgaaggccgatgatctagtcttgtagagcgctgaagagattatcttcattctggttcagtcgaagcttggctccaatagtggtactgatttttcatcatgataatgaacattgtttagagagttt

SEQ ID NO: 140564 - DNA, 556 bp, Glycine max
  unsure (1)..(556): unsure at all n locations
  Clone ID: PAT_MRT3847_97939C.1
ggctcgagctgagcccgtctcaccctctcacgcagcatttccctgcttaaaccctccagcagcctgcaaacaaaaaccctaattcactaaccccatttcaaatcccaatcacgtttccgatcaatcatcaccttctccataatctctccgttcgcgtcgcaaatcgagcgagatagtgtcgagtcgaaccaacgatcgagaagatatagaagatggagttttgccccagttgtggtaacatgctacagtatgaattgccttatatgggtcgcccttcaagatttttttgttctgcttgcccatatgtttgccacattgagaatagggttgagatcaaaagaaagcaaaggttggtgagaaaagagatagagcctatattctccgaggatgacatgacaaatgcaccatcaactgaagcgacgtgcccattttgcggtcatggtaaagctgctttcaaagaatttcagactcgatcggctgatgagccagcaactctattntataagtgctggaacaatgactgtaaaaaacaatggcgtgaaggtgacttcaacat

SEQ ID NO: 140565 - DNA, 507 bp, Glycine max
  Clone ID: PAT_MRT3847_9793C.1
ggtgattttgctgacaactcaagcacatgctttccaaaatataatgagattaaaataagaggaaggattaggctttatagattttaattgtctggtgcttggatcaaatagaccatatctccatttctaattacagtttgaaaggaatatcagaaattagaaataagttcaatgaatatactatagatgaaattcagtggaatcatacaagcaacaatttttttttttgaagatatgatgcagcatgcctcgatgccatcttgtaggaaggagatattcaataatgagttcttcctaagttttctgtagaatgaattattcatttgattgataaatgctgttcatctttcagtcaaatgttttaagcttatttattatttttgcctgcatgtttatatttacttatactccctgggtcaacaacaaacaatgtctttgttcttcattttctataaatgatgttgaatccttggtgaagaatacttataaatcttatgcactgtgttg

SEQ ID NO: 140566 - DNA, 850 bp, Glycine max
  Clone ID: PAT_MRT3847_97940C.1
tttatttcacttgctcaaaacgtctgagcccgtctcaccctctcacgcagcatttccctgcttaaaccctccagcagcctccaaacaaaaaccctaattcactaaccccatttcaaatcccaatcacgtttccgatcaatcatcaccttctccataatctctccgttcgcgtcgcaaatcgagcgagatagtgtcgagtcgaaccaacgatcgagaaggtaaaagcgttccaaaaataccatcgaggataacgatatagaagatggagttttgccccagttgtggtaacatgctacagtatgaattgccttatatgggtcgcccttcaagatttttttgttctgcttgcccatatgtttgccacattgagaatagggttgagatcaaaagaaagcaaaggttggtgagaaaagagatagagcctatattctccgaggatgacatgacaaatgcaccatcaactgaagcgacgtgcccattttgcggtcatggtaaagctgctttcaaagaatttcagactcgatcggctgatgagccagcaactctattttataagtgcttgaacaatgactgtaaaaaacaatggcgtgaaggttgacttcaaacatggccttatatttcttcattttgctgaggatagaaaagcttttgttgtaattgggccaatatgacagctaagagtgtttggatagtttttacattttcgctgacaataatctaagtgatacattttttttttctttctttattactatcgaagtttgttttagggattagaaaattgagatggtaagcattcctcgtgtttcatacgaaaaaaaaaaaaaaaaaaaaaaaacaaaagttaata

SEQ ID NO: 140567 - DNA, 821 bp, Glycine max
  unsure (1)..(821): unsure at all n locations
  Clone ID: PAT_MRT3847_97941C.1
ggttcattcctcactgggagcgaatatatccttgaaagcgtgctgggtgtgggaggcacgtgacgtctacacaaacaaaataaaaacccagtttctctccactcactaccactaccgctatcacccaatttccccccttcgttcttcagctcatgacgacgtcgttcggaggaccagccaccacctcagcgccgctcaaggacaccaagcttcagatcccaagcttccattgcttcagctctgcttccgcctctgctctctcgcgcaatgccctctcccttccttcttccacgcgctctttctccctcatacgtgctgtttccacgcctgcgcagtccgaaactgccactgtcaagcgcagcaaagtcgaaatattcaaagaacaaagcaatttcataagatatcctcttaatgaggacatgctgacggatgcccctaatataggtgaagccgccactcagttgatcaagtttcatggtagctatcaacagtacaatagagaggagcgtggttccagaagctactctttcatgattcgcactaagaacccctgcgggaaggtttccaaccaactttacctcaccatggatgatcttgctgatcagtttgggattgggacgcttcgcttgaccaccaggcagacgtttcagctccatggtgttctcaagaaggaccttaaaacggggatggctaccattattagaaacatgggctccactcttggtgcgtgcggcgacctaaacaggaatgtgcttgctcctgctgctccccttgtgagaaaagattacctctntgctcaccaaactgccgagaacattgct

SEQ ID NO: 140568 - DNA, 2694 bp, Glycine max
  Clone ID: PAT_MRT3847_97942C.1
tggacgcctgcggtaccggtccgaattcccggtgaaagcgtcgttcgcccaattgcagtgttcgcttttcactctctttccgcacagcataaataaaaaccccttcttcctcttctccaccatcgttcttcagctgatgacgacgtcttttggaccagccaccacctcagcgccgcttaaggaccacaaagttcagatcccaagcttccatggcttgaggtcttcctccgcctctgctctcccccgcaatgccctctcccttccttcatccactcgctctctctccctcatacgtgctgtttccacgcctgcgcagtctgaaactgccactgtcaagcgcagcaaagtcgaaatattcaaagaacaaagcaatttcataagatatcctcttaacgaggacattttgacggatgctcctaatataagtgaagccgccactcaattgatcaagtttcatggtagctatcaacagtacaatagagaggagcgtggttccagaagctactctttcatgatacgcactaagaatccatgcgggaaggtttccaaccaactttacctcaccatggatgatcttgctgaccagtttgggattgggacgcttcgcttgaccaccaggcagacgtttcagctccatggtgttctcaagaaggaccttaaaacagtcatgggtaccattattaggaacatgggctcgactcttggtgcttgtggcgacctaaacaggaatgtgcttgctcctgcagctccccttgcaagaaaagattacctctttgctcaacaaactgctgagaacattgctgcgctcctcgctcctcagtctggtttctactatgatatttgggtggatggggaaaagattttgacatcagaaccacctgaagtagttcaggcacgaaatgacaattctcatggtacaaacttcccggattcccccgagcccatctatggaactcagttcttgccaaggaaattcaaaattgctgttactgtgccaactgataactccgtggacattctcacaaatgatattggtgttgttgttgttaccgatgacgatggggagcctcaagggttcaacatatatgttggtggtggaatgggaagaactcataggttagaaaccacttttcctcgcttggccgaaccattaggttatgtaccaaaggaggatattttgtatgcagtgaaagccattgttgttacacaacgagaaaatgggagaagagatgaccgcaagtatagtagattgaaatatttgataagctcttggggaattgaaaagtttagaagtgtagttgagcaatattatggcaagaaatttgaacctttccgtgcattgccagaatgggaatttaaaagttatcttgggtggcatgaacagggcgatggcaaacttttttatggtcttcatgttgataatggtcgtattggtggaaacatgaaaaagacattgagggaggttatcgagaagtataatttgaatgtaagaatcactccaaatcagaatatcatcttgactgatgttcgtgctgcatggaagcgtcccattacaaccacgcttgctcaagctggtttgctgcaacctagatttgtagatcccctcaacataacagcaatggcatgccctgctttcccattatgtcctctggcaattactgaagctgaacgtgggatacctaacatacttaagcggattcgtgatgtttttgataaggttggcctgaagtatagtgagtctgtggttgtaaggataactggctgccctaatggttgtgctagaccatacatggctgaacttggactagttggtgatggtccaaatagctatcagatttggcttggaggaaaccataaacaaacatcattagctcgaagtttcatggacagggtgaagattctagaccttgaaaaagttttggagcctttgttttattattggaagcaaaagcgtcaatctaaagaatcatttggtgacttcacaaaccgaatgggatttgagaagcttaaagaatatattgagaaatgggagggtccagtggtagcaccatcacgccacaacctcaagctttttgctgacaaggagacatatgaatcaatggatgcattagcaaagcttcaaaacaagactgctcatcagttggccatggaagttatccgtaattatgttgcttccaaccaaaatggaaaaggcgaatgatttcatttttacttaacgaaggaagatgtatgtgatgttgctttatggttgacaggaatggtggataggcaactgaacacaactctgttgttactgtgtggtaactcgggttcgactaaactaatgtttgggtttttgtttttttatctgaaacggctttccgtagaatcttttggttcatcatttagatcgagtttctgaacataaaataagcctttctgtcatttctgtatccaattttgggtgttcgacagcttggtttttcttcacaataatcttgctagccaagacctttttccgattttgcgcttgctccaataaagttcattaatcaggatttgtaaattgcaatcatgtattagttagtggttaattacagaatatggtgtggagaacacatgtatacgtgttcacttgttcagtttttattactattatggaaaagttattcttgaaagaaaagttttaatactaaaaaaaaaaaaaaaaaaaaa

SEQ ID NO: 140569 - DNA, 500 bp, Glycine max
  Clone ID: PAT_MRT3847_97943C.1
aatgtgagcataaccgatgctgattgctcacacctctatttcttcgcctctggatcagatccccccaatcccattgtcttcatcttcttcttcttcataacatgactagaatactttctctctctctctctccgagcttacaagggtagttagtgaagaagaatggtagtacttcttgttcctctacccttgtaacgccaaaccaaccaaaaacataacataaccaatgttccatttccacatacaacaacattcattgacaatccaataacgccaataacccccccttttggcctttgttttgttcctcgcaatccctccattattttcccttaggattgggattgggtgttgttgagtcaaaatctgttaacctcacccagatgcagactctgggtttgttggttgctcctgttctcggtttctacctgaggttccttcgtttctctcttcgcttccttcttctcatgttcatggatttcccttccaccttcaagttc

SEQ ID NO: 140570 - DNA, 718 bp, Glycine max
  unsure (1)..(718): unsure at all n locations
  Clone ID: PAT_MRT3847_97944C.1
ttacgaattcgagctcggtacccggggatcctctagagtcgacctgcagctatcttttaattttaatgaaaaatagagtttcttctatttttttttttaaagtcggtaatgaggtatgcgtcacaataaccaattgagttttgtttgaaaataaaactacttaaaaaaagcttttaaaaatcaaataaaaataactaatgaaattaattttttgcctcttttgtgtaactacaattaaatattaacgatttctaaaaataaatatttacaatatgatagttcaatgtttgaaattgtctacatgagctaaaattatgattttttaaaaaagttattaaatatctcaattaaaaaataagggattaaaatcttaaattttttaaaagtgacagatgaaatatcttaattaaaaaataagaatactgacagcataaatttttttaaaaaaaataaaaggacaaaaattacattttaaatacgttactttattgaattatgcatctaaaaataatctaactattttaatttaaaatattctttattaccttaattaactcatttaatattttttttcattttgttagccattttaacatcaaacttactatagttttctggtaatgactaaaaaacaactccaatatatttttcttaagatattggttagtgctaagcatttggtcgggtaggtttgattncggatccaaaaagcccaatc

SEQ ID NO: 140571 - DNA, 147 bp, Glycine max
  Clone ID: PAT_MRT3847_97945C.1
gaccgctaaaaccattgataaagatgaagttggagaaccaccttggggggcttaaaggggggttggtggttccttttccttgggggggttccagttgaccccttggacctgacctttttaaaaggggtccagccttaaggtattaat

SEQ ID NO: 140572 - DNA, 276 bp, Glycine max
  Clone ID: PAT_MRT3847_97946C.1
tggtgcgagaagacgacagaaggggatgcttggaaaggtgaagacctttttacttatattatgttttcatgcatgcaaggaaaaaatgacacttcttgaagttgatcttgatgagctatttgcatttgatattgatgaaatgtggaaataatagatttacttgcatagttctcaactgatgtactgcattcaatagcaaattcacatccaatatatttatgcttcaatttgcagagagaatcaggaactgaacaattttgctactagccaaatata

SEQ ID NO: 140573 - DNA, 291 bp, Glycine max
  Clone ID: PAT_MRT3847_97947C.1
cggcccgaattccggtcgaccacgcgtccggaggcgctgcttgaatacatggacgagggattgtgattgttggtggttgtgttgtgggttggggttgccagtagctgatcgcattgaggcgcttgtaaccatgctctacgaatgctgcagtgatatatctgtccacatgatttcggacaccaaattaatcatcaaaacaatctgctgccagaaaggacagtgagatgtgatgactttctaggataaacttgttcaagatctgagaatagaatgcagggaattagagtcttt

SEQ ID NO: 140574 - DNA, 1800 bp, Glycine max
  Clone ID: PAT_MRT3847_97948C.1
ccctcgcgtccgcccacgcgtccgttcaattccaattcaaaggagaacaggtatctgttccttcatcttccccaactctccatcacatacccgatacctgttctccttcttttcccctttatccaccaaagccagggttttctctttcaattttcattttcatgcctctcagattcacgggattatgttttttctgtcgcacaaaccctttttcttcttcggtgtaaactcctattccttgttgcaatcgaaaagggtccctttgtctgttcttgtctactgttgttgatgtctattactgttgctgatgggaattggcttgtgattgtgaacacacccaattcctcgccattgcaacacacccactcgtctttctctaaacgcagatgggataaggagttttctgagctccagagtggatagtatctgaatcagattcataacataacaattcaattgtggttttttgatattttggaatcaatggattcttcacaagggtctaccattgctggtttcgtggacaatgcatccattaagagaaatgagtctagttttgatggcgttcccgtgtatgttaaggaactaattgccggaggctttgctggtgcgctttctaagacctctgttgcacccctcgaacgggttaagatactttggcagacaaggacaccaggatttcattctcttggggtgtatcaatctatgaataagttactaaagcatgaaggttttctaggattatataagggaaatggagctagtgttatccgcattgttccgtatgcagccttgcattttatgacatatgagcgctacaaaagttggatcttgaataattatcctgtgttaggtacaggtccttttattgatcttttagcaggctctgctgcaggaggaacttcagttttatgtacctaccccttggatcttgctcgtaccaaacttgcttaccaggtggctgacacaagaggacttatcaaagatggtatgaaaggagttcaacctgcacataatggcattaaaggcgtgcttacaagtgtctataaggaagggggagttcgtggactttataggggtgcaggaccaacccttactggaattcttccatatgctggtttaaagttctacatgtatgagaaattgaagactcatgttcctgaagaacatcaaaagtccattatgatgcgtctttcttgtggagctctagctggattgtttgggcagactttaacataccctttagatgttgtcaagagacagatgcaggttggcagcctgcaaaatgctgcccatgaggatgtcagatacaaaaatacaattgatggacttaggactattgtttgtaatcaaggatggaagcagctgtttcatggcgtaagcattaactatataaggattgttccttcagctgcaattagtttcaccacatacgacatggtgaagtcttggcttggcataccacctcaacaaaagtctcaatcagtttcggcagcatgattgctcagtgctcacccgtgatggcaataagttacaatgtcaccttctaattggctccaatttttacaggaatgtctcttactgagtattactgcatatgatttccacaggctactattagaggaaaccctttttggttaaattaactaatgctagaagtttgtttgttattatatctggaaagttccttcacagtgcttctttaaacttaaaacgtaacctgtatagatttaacactaaatagtggatgcaatacaaaggtaactttcttactaaaaaaaaaaaaaaaaaccaaccaaa

SEQ ID NO: 140575 - DNA, 318 bp, Glycine max
  Clone ID: PAT_MRT3847_97949C.1
atgtgccattattttctcctatttcttaacccttttggcaccattttaaatactgattcgtcttaattgtcaaatttattaggcagttttataatttgggtccattcagctaccttgatgtttttaatctaatttcaggaattaatgaagcattgggcttcaatctataattgggcttgggcttgaatccagaattgggcttggatttaaaacagatttgtaagctttggggctgaaaaactatataacagcaccaaggttctagtttagctctctctcctctctctcttccccttctgtcgtcttctcgcagccgta

SEQ ID NO: 140576 - DNA, 213 bp, Glycine max
  Clone ID: PAT_MRT3847_9794C.1
cttatctctctctctctctatctctgccgaatcactgttcgctcgacccttccacttcgtattccctgtttccggtattcgcgtcctatctggctgcacagctggcatccacttacgatgctctgtcccgtaccagatctggatcaactgtgacaaggttgggtgcagtaatgttgtatcaatctgccttctgaccggtacgcgtggggatac

SEQ ID NO: 140577 - DNA, 116 bp, Glycine max
  Clone ID: PAT_MRT3847_97950C.1
gcgaacgatcaacttaatgattcctaggaggatattggacatgctggcatgcaagtatgcgtagctggattgataacgtggccattcaatgtgtcgtgctaatcacatgatacgtc

SEQ ID NO: 140578 - DNA, 395 bp, Glycine max
  Clone ID: PAT_MRT3847_97951C.1
ttcatgctctacgatatatttgctaatttaaggacatgtcggtgtcaaaaaaaaaaaaaaaaaaaaaaaaaaaaaaaaaaaaaaaaaaaaaaaaaaaaaaaaaaaaaaaaaaaaaaaaaaaaaaaaaaaataagaacacaaaaagaataatgattcaaaacacgcaaagaaaaagaaaagacatctattgacacttatcgatggaggaaatcttaaatgacaaaaactggggattggatcacactgatacaaaatcctccaactagaaaatccacgagagaagctgctcggaagaaaggctgcttaatggagaaaactgtaatatacgggaatgcagaagccaaaaggtgtgatcgggcaatattggtacctgagaccataacaaacagcaacag

SEQ ID NO: 140579 - DNA, 651 bp, Glycine max
  unsure (1)..(651): unsure at all n locations
  Clone ID: PAT_MRT3847_97952C.1
ctcgtcgatatggtgccgccgcttggtctgccactcaaccgggtggcacctcccccttcccaaactctgtcagagaccatgcttcttatgccttcaataagtattatcagaagaatcccgttcctaatagctgcaattttggtggagctgctgtcatcactagcactaacccaagaaataactctccggtgctgacttcagccccaagccgaccctttgcctgcccctcctttgctcggagacgcttacaaatggcctcgtattatttttcagtatccaagggactggggcattccgctattcatcctgggggaatcgtttaccacactactgcgcaaagagcacaagtgccgtacgtctattcgaaatagtaccagaacaagcgaaatcttttcaaattctagctggaggggccacctcagctagattggtccaatcttgcctcattctctggtcattagcaatcttggcgcatgaattatctattactataatattgagagttagattttgcttggatttggtctttattttatttgggggatggggagaagggttgtgtactagacacgcacataggtacaaaaccatcatcaatatgacatacatgatagaacactttgagaaaagtagnnnnnnnnnnnggnnnnc

SEQ ID NO: 140580 - DNA, 445 bp, Glycine max
  Clone ID: PAT_MRT3847_97953C.1
aatgagcgtcaacctttgaaaacatcccaatcctcatctgttgactttatggacctttctcagcagccatcagctgcaacctcaagtgagaagtcactggagttgtctgtcccagaaaatgaaggatgggcaacatttgatatgcctcagcacacatctactgcacaagtagaaattcaaccagcagtacaggaaaaatttgatccatttttgaacttaaatgcaaatacgctatggccatgttttgaaacttctagtgctagcgctctttcttcagttacatctaatttatggcgtgatgtcacatggaccagagaagaacaagtttctgttacggcatcaaactctcaatcatggagtgcatttaaggatcctgctaactctgttcctgtggatgctcttattactcaaggatcacaaatgcatgatcttccatcaactgatg

SEQ ID NO: 140581 - DNA, 434 bp, Glycine max
  Clone ID: PAT_MRT3847_97954C.1
aattcggctcgagacggctgcgagaagacgacagaagggggaggttgatacctacaatgtctgaaatctgctgagttacttactttcatggagtacaatgtgaaaagccttctctttcctctcgaactcacaccgacccattcgccgcaaccgcaacactattatctctctcacacacacatttcattgaaattgtaaacacgccttgtaacttgtgagtagtatcccacgatttgtttttccctttccttcaatcatcaagttttgtttccttgggaaaatcgacacttgtgcttggaagacactctttgtggtttggtttggcgtgttgtcgtcaaaagatagcaacttttgcggtattggaaggtggatttgctggtagctgttctggggtggtggcgttttgtgatgccttgccaaaaaagttgtgattt

SEQ ID NO: 140582 - DNA, 300 bp, Glycine max
  Clone ID: PAT_MRT3847_97955C.1
aggggagggagacggtagcacatgagcttatacactaaactcgtagacaccttcactactggagtcgatggacaattcattgtgggaatcagctgagctgagtaagcatgattcaaaatggttgcattgtatcacacgggtgtgcccctctgaattctatgtcacacatgcatggcatacgtagtacctctgcttttcgttgcgcttctcgaaggcatctcaatgttgccgtctctgatatctggaactattggggagatactcgggaatgtcaaaacttgttgccatgacgaatgacat

SEQ ID NO: 140583 - DNA, 1001 bp, Glycine max
  Clone ID: PAT_MRT3847_97956C.1
acgcgtcagagacgacagaaggggctcattacagatcttccaaacttcagagcgcaggcaaacaacttcttctctcagacatggcatctcaagatggtgtgagaaaatgaagctgtgttgcacacattctgcttgcatttgctttcatggaggagaagcttctgatatttgtgcaagggaagcgtgtggcagtcaagtattactcagatgactggccaacaaacaatgcaaagttagcttttgagaagtttgtatttaccaagactgttaagacaaatgctcgtacagaagctgaggtaacactacttgagaacaatatcattatttacaaatttgtacaagacctgcatttttttgtcactggtggtgaagatgaaaatgagctcattctagcatcagttcttcaaggtttctttgatgcagtcactcttctgttgaggagcaatgttgacacaagagaggcacttgagaacttagatctcattctcctgtgtcttgacgagattgttgatggagggatgatacttgaaacaaatggacctcttattgccgaaaaggtgacctctcatagcttggatgctgatgcccccttgtcagagcagacactaactcaagcttgggctacagccagagaacatttgacaagaacccttttaaaatgatgcttgcatacattgaaaacgagctacctattgttgaatagttaaatttttgtctgttaatgagagttgtttcatcccctaatttgtgagttattgtaatgagcaccatatcatttttctgggaagtgtgttccccctgcatctagctgttatttgtcaaattcagggaagaagttattaatcgaaatattgtgatattcaatgtacgggtgagatttggttccatagaatttgctgttcaagtatgtaacaatccaatatcgagatattctttcgtcaataagtatttgacttgacataaaaacaaaaaaaaaaaaaaaaaaaaaaaaaaaaaaaaaa

SEQ ID NO: 140584 - DNA, 286 bp, Glycine max
  Clone ID: PAT_MRT3847_97957C.1
agcacaacgaaccaaagttaactactctagagagagagagagagagagagagagagagagagagagatggagagtgaaagaagaagataatgatgagtgagagaaacaacatctatgacgaggaatgtggaggttgctgagataagatacaaaggaataatgttgatgaagtgggacatgtcagtcattaaaaatatagaacccaataagcgttcaaggatgtttgttcgtgttctattctaccgctgtcgattccttaagtgtctactaaactaactttttttat

SEQ ID NO: 140585 - DNA, 225 bp, Glycine max
  Clone ID: PAT_MRT3847_97958C.1
cgcaaatcgacttacacgcgaagtatgtcttttcgttagactcttcattagccactttgtcgactttctcgtggttaagatcctaatctttctgaaggcgatataaactactaacgttacccctaataaattgaatttaacctttatcaggttcattgataagagggtacattgtatgcgggaacacaatcatgggaaccgactacttctgagcaaacatttgcc

SEQ ID NO: 140586 - DNA, 515 bp, Glycine max
  Clone ID: PAT_MRT3847_97959C.1
cgctcagcgattgcaccgacctaacagtccccacttgagcatctaccagccccagctcacatggtacccatcgatcttcaaccgaatcaccggagtgggactctctggtgtgctatacgcggcttcgttggtctacctcttccacccactataccccgctctcgactcggcccaccttatctcgctagtgcacagtctgccgacttgggtcaagggcggtatcaagttcgtcttcgccgtcccattcaccttccacacgttcaacggtatcaggcatttggcttgggacactggatttggcctcaccatcaagggcgtctacaccggagtctacatcgtcatggccgcgaccgccgtcagcagcatctggctcgctttcttcgtgtaagctagtctcgcgccagaatggacgacccaacgaaggtcggtcctggtcggtcgaggcagtacactcgctttgttcatgtactataggtctctcccacccattgtcgtggatgcattgtgtcattatc

SEQ ID NO: 140587 - DNA, 268 bp, Glycine max
  Clone ID: PAT_MRT3847_9795C.1
actagttctagatcgcggcggccgccctttttttttttttttttaggatgaaatctagacaacttttatttcagctgctacaattgtatgattagattgagggaaaaaaaaatattttatatagctaagaaattaaaacgaaaagtatggggcgaaaaaagagaagtgctttctaatataaaaaaattcatccattttaaatatcagcatcctatgacacttgttttggatgattcaatgtaatcaaacttattgcaaagttcccact

SEQ ID NO: 140588 - DNA, 337 bp, Glycine max
  Clone ID: PAT_MRT3847_97960C.1
ttattttctattgaccttctcggtggaggaattttagtggacaaaactggagatagggtcacacttatacaaaaatctgcaattagtgactctcctagaggtgctgctacgaatagaggctctgcaagatgtacccatgctatggctgcactgggtcaaccaccaccgagaccttggtcatgggaggggcacctgttaaggatcaacatggagcgtgcagaaacgggttgagccctgtgagaacgacaagatgcagacgcgcaccaaagctgattgtgctaccccagcacttgcaagtgaggccgatgatagagcaagcttgaagcagagatagccc

SEQ ID NO: 140589 - DNA, 402 bp, Glycine max
  Clone ID: PAT_MRT3847_97961C.1
ggctcgagcttcactctttctctctcccatccctttctctatgctcaaatatatatataataaaactctacaactggccaaaaaaatcagcttttgctccctgacatattagtatataatatatagtttttatgtgttgtgtagcactttagattactacttactagagtgaaaagcgagaggcagaagagaggaagggagagatatggaggaggtgtttgtagcaatgaaactggttttttcagttgctgtagtggggattctaagctggattttttatgtgtatggtaatttgtggcatgagtctcaaagggtgagaaagagactacaaatgcaaggtataaaagggcctccaccttcttttctacatgggaatctgcctgatatgcagagaattcaatc

SEQ ID NO: 140590 - DNA, 476 bp, Glycine max
  unsure (1)..(476): unsure at all n locations
  Clone ID: PAT_MRT3847_97962C.1
agggggcaccaaancaccaaatctacctcgtacaaataacttatgagctttctgagggggtaaagtttgaccttgctagagtagaagccccaaaggaagctacccttgtttaatataaccagtgcttagagacaatatctaaactggaggagagaataaaagaagttgaggataatgcattaaggattcatgagcatgctgatatagcagaaaaagaaatgaaggctttgaaattacaagtcactaaacttaatgaagaaaaggaagatgccactctccgttattagcaatgcttggagataatttccagtttggagtataagctctcttgtgctgaaaaggaggcgcgtattcttaatttcaaaatagttgatggggatgaataattacagagttctgagcaatagtgttttttttggagacataaatcacacgctgaagtcggaatacaatttttggacaataatggggtctta

SEQ ID NO: 140591 - DNA, 235 bp, Glycine max
  Clone ID: PAT_MRT3847_97963C.1
gaccagctttaaggttgcatgtgtggttgccatgatgtgcctggatgtggtcatgattgttacacccatggcacagggccaactctcgtgcggacatgtcgctggcgacttgttctcctgcatcaggttactttcctgcggaggtgaaacgtctgacgcctgctgcagctgagtgatgtacctcagctgcacgtggaagaccaccggggacctccaagcatcttgcaattgcctg

SEQ ID NO: 140592 - DNA, 226 bp, Glycine max
  unsure (1)..(226): unsure at all n locations
  Clone ID: PAT_MRT3847_97964C.1
gctcaagaccatattctcactactttaatcatctgtctaaaaccnaaacaatagcctcggccgctttttacaaactagagcgaccttaacaacctatctaccatcccaatccccaaaagcatacaatttttcaacccatcatgattttttcattttttcccacaccatttaatactactcttctttactctcaacacacatacctaatccatttttttttctacca

SEQ ID NO: 140593 - DNA, 325 bp, Glycine max
  Clone ID: PAT_MRT3847_97965C.1
tttcgtgttctttttacagcaggggtttcttactgttgggtaaacctaagtgcatcctacaacaaactatgctgtatgatgggagaccatataagcatgctagtggtgcatcatagagcaatgcctacaataccagagagagtatgtaattggaggatgttgacaccataacaaatgcgcgctatgggctcaacactgttattctaagaactcgtcaatagggcacgatagctaaggccatagcgcaacaaactagattggaataaaaggcaccacggaagacaccattgcatattgcatatagcgagctgaacctaagacaaac

SEQ ID NO: 140594 - DNA, 889 bp, Glycine max
  Clone ID: PAT_MRT3847_97966C.1
ctcgagccgctactgctgaggtatacatcataacagttttgaaaggtctcaagtatcgactagcagcaggtgcaagattacccaatataatcattttattgcctgtagaggaaacagaagttgtgtctcccaaggggaagaagattattaaccttggaggaagagctggccaagcagttggagcgttattgaggaggcttcagattcctcaccaaggtagtgaatcgaatggaaagcttagaattggtggtttggctctgaaaaaatggtttcagccgaaacttgcatctccgttcagtgttaatatgggatctccaacattcagtggaaaaccaggtgattggaactcgtccctatcacgactgggcaaaaatattagtaatcagcaacgaaacatccgaattggcaatctgtctttggattaagtgtacatgtattgatttttgcctaatactatctttcctgccccctcttcactaatgttttttcaatatataagttgaaagctccttcatcataatggtataaatagaagagtgatttagacccaagaaagcagataatgccttcttgagtgctgaggccattgaatgctaggagctgggaaagtgtaggacttctcatcaagttctttttggtgaacaaggtcatccccgcgatagaatacatatggcacagaactcgtttttttgtgattacctgcagttatgtcatggcctttgcaacgcggattatatatatgcataataatagagatgcagatatttcaggtatgggctattgtggtaggtattttttgtctagacctctccatatgtaaactaaaaaataggcaaatggaaaaaaattcagccgattttgatatttataagttctttcattatgttct

SEQ ID NO: 140595 - DNA, 308 bp, Glycine max
  Clone ID: PAT_MRT3847_97967C.1
actgtggcttgttagactgccggagcatgcatcatggtggctgacaacaacttgaaatataacttcaatgtaaaaggaactaaaccggacactgaactaagcgtaatggacactgaacgtgctgcatacattatttctatgtacgataacaacggacctgaatcacctactgtggaatttgcagctggcaatgcagatagggatgctcaggtgactattgttgaacatgagcctaagttcaaccgattttaagcaactgacagaatctaggatggaatacctacgaatcatcatgatattccagtatc

SEQ ID NO: 140596 - DNA, 1507 bp, Glycine max
  Clone ID: PAT_MRT3847_97968C.1
tcttgtacggctgcgagaagacgaccgaaggggggggtttggccgtgtaagataagagggcagccaacaagaagcaaaacactgaaacaaaagcaaaaaagagctgtgagacagtgatggctcacggtgcttacagcaagcggcgcgtgagcgcaacgcgtcgatccaactccaagcctctgggcatcgccaagaagcccaagcccaagcccaagccctccgtttccctcaaaaaccagattcgatcccttgagcgcatgctccgcaagaatctgcctcccgaggtgcgagacgcgcaggaacagaagttggaggcgctgaagaagcagcaggagattcacactcgcctcgccgccgaacgcaagatattcttacgcgaccgaaagatcaagttcttcgagaggaggaaaatcgaaagacgaatcagacgcctcgagaaactgcaccgtgcttcttcttcctcttcttccgctgcccagccttaccctgaccagctttccgctctcaaaaaggatcttcaatatgtcatgcacgttccgaagaatgagaaatatgtgcctttgtttaccggcggtgatgattcggagatagttgaccggagaaacgggctgcgcaaacagattgaagataggttggttgcagctgctgcaagtggcaaggatttagaagagactggcagtgaggatgatggtcttttggatctgagtgatgatgatttttttcttgccgggagttctagtgacgaagcagatgcggatgatgaatggacagacaaaagtgcaagagagcaggcttctagtgcttctgggaaaggtgtgtctggcatgtccagtgacgaaaaaaatcagaggcagatttctgctagagctttgatgcctcctcctcgtccttcaaacatgaagttgtcaagatttgggtcttcttctggccataattcatctgcgcagagatctgagatttccacatcgagcaacacatcaaatagcaaaagcagctcagacttcaaagtaagaccctcaagatcagggactggtcatggtagtagtctaagctccaactctgatgctcacaagcctcggaggaagagaagacctaagaagaaaaagaagcaggtgtaggcatgatggctaaactgagcagtagaatgagcaattggatttgtcgtattcattcgagattcttacggttgtcttacctgctgggagtcagtttcactggttgatatgatgatatatatgtattgacttgttaggttagatcaagaattcgttactgtagatcttttctgcgggctcatcatattcaaccatggcttactgtaaaattattttgaattctgatttattttgtgggataatattcaaccttttgggagtactgtcgcatctgcattcggcaagtacgatgtttggagcaattgatgcgtgaagaacgatactaaggcttaaaatacgctttttgtcatgaatttttttttccctgaattttaattcatataatttgtttc

SEQ ID NO: 140597 - DNA, 224 bp, Glycine max
  Clone ID: PAT_MRT3847_97969C.1
caaggtccatattttcgcgatgagcctggcacatgttcaatgtacaacaagaaggtcaatttcatccatttacttgcaaataaaatacctcactcgttttataagggaaaggttgtacccaggagaccccattctcacttggtccactctttatctatcaaaaggtcaaactaaatcacggagatgaccttggcgattgaagatgttattacaatctttcaact

SEQ ID NO: 140598 - DNA, 787 bp, Glycine max
  Clone ID: PAT_MRT3847_9796C.1
gtgaccctagagaagaaatctaatttgaaacaaaatgaaggctagtgcagttgagtctagtgaaatttcaaaaggagcaccacccagaaaggggttgattagagggctctcgataatggactttattttgagaattgttgcagccattgccacactcggaagtgcattgggtatgggaacaactaggcaaacacttccattttccacccagtttgtaaaattcagagctgtatttagtgatcttcccacatttgtgttttttgtgacctccaattctattgtatgtggctacctagttctttcacttgttctgtcattcttccacatagtaaggagtgctgcagtgaaaagcaaggttctccaggtctttcttgacacggttatgtatggtcttctcacaactggagcctcagcagcaacagcaatagtctatgaagcacactatggcaactcaaataccaattggtttccattctgcagacaatacaaccgcttctgtaaacaaatttctggttcactcattggctcttttattgcagtagttctcttcatcatacttattctcatgtcagcaatatcaataagcaagcattaataattgtggtttcgactcgtcgcagccttatgcagacacactgtgatatcacaatatttctgaatttgtttagtacagtttggttttggtaactaaaataaaaaaagatgattccatggaaaagttgtggtgtaaatagctctgaatctgaatgtgtttgtctagcctttcctgcaatctagtagcttcacc

SEQ ID NO: 140599 - DNA, 619 bp, Glycine max
  Clone ID: PAT_MRT3847_97970C.1
actatagacgtggatatgacatgtgactatcatgaaattttatgagcagatagcaaagatttaacaaacaaatttttttttgacttggcaaaacatctcctaattacattgcaaccagtgattagaacaacatagcattcataacacatttaaacatttaaaagtgcagttagtggattcaacaacaacctcatgcaccagtgacatagtatagcatctacatcctaatactaaacacaaggtgatatcaaactctcaatatagacctctggggtcatatacatgtagatgtcttgaatatcggggattttagaagtgccatttcttgaattataaacagctaactctgagttgaattccatcaacacttggtcatcctcagaaatacaaagtgccttggtatacagataagagtcagcctcgtgcatgtttccaactctaaacaatttggtccaagactctttatttccataatccttcatgagccaaacatccaaaaacgtgtcggcgtgagaaagaacacacaagcaatccctcaacacacccaaagtcaagttaaccactgccactccataataaggctgcaaaacctcttcataagactccttatgcaaaatcg

SEQ ID NO: 140600 - DNA, 351 bp, Glycine max
  Clone ID: PAT_MRT3847_97971C.1
gtggggggggagacaaaaacagcctccttttaagttttttgaaaattcaatgaagcttatttttgtttggttaaattataaagccctcaaaagggtttcattttctttaactttaactttaacaagaatttccattgaaaggtttttgtttaaattaaaggctgggccttttaacaaccaaaaacccgaggggttttagccagatgatgatgtttgccagttttttggggaaaagcataaagctgggccctttcattttttgaataaaaatgtggtttgcggaaaaatttacttgttgaatgaaactgtgatccgctgaggggtttttttgctgaaagaaactgggatttg

SEQ ID NO: 140601 - DNA, 133 bp, Glycine max
  unsure (1)..(133): unsure at all n locations
  Clone ID: PAT_MRT3847_97972C.1
agtgcaacccgagttcgtcgccttaagcttttgggtgttngggtcacggtggagctttgatggtgcagtaggaggctctctactcttgttactagtagcagtgtgtagtggatgcggggtacccggcttgtcg

SEQ ID NO: 140602 - DNA, 472 bp, Glycine max
  Clone ID: PAT_MRT3847_97973C.1
gcttaattaaacttgaacaaacagatctatctaagagcctgtacctgtgaacaggtcacttctccactatctctctctctcactcactcactttttccactttgatgtttttgttaggttgttccatgattctctcaccccaccattttttagcttgccacaaatctctcggcttcaaatttaaatgccaagtaagaaaagtgtttagggtaaatattaaaggcctgattttgcatttttatccactgatgcaggcaagtcagagcacatatcaactcactttatctgaattctgtttgagacagggttggtatctatatatctagatgcatgtttggatgggcaaaaattatttcgtatggtgctaaagccttcaaaagttatatgtgcattcatttaaatgtgatttattctaaaaggatcattaatagttcccttccttttcaaagttattctttctatacatgttttg

SEQ ID NO: 140603 - DNA, 180 bp, Glycine max
  Clone ID: PAT_MRT3847_97974C.1
acgactccgcaaaaaggggcgaaagggtctcacagctgttccatcctgcatcaaccatgggaagtagagccacgccggcttcggctatcacaaacaccatcgtattgggcgcaaggaagttccaatccacccaccgattcgcgttgctgacctcttcggcaacatgcaccgccagggccc

SEQ ID NO: 140604 - DNA, 253 bp, Glycine max
  Clone ID: PAT_MRT3847_97975C.1
ggcaaaggatggggtgtatctacagtcaatggagaaataatttatgctctgtgctggtttaaaaggctttaatatgcttgtacatacaaaatgctctatagttgcatgcataacttacataaagctgagtaaggacagttgtctactgctctgttactgattatgactgtatgatatgtatccgaattctaagggatatgtaccatgaacatccttgtttcctgagctcacttaaaagcctcacagaacatga

SEQ ID NO: 140605 - DNA, 590 bp, Glycine max
  Clone ID: PAT_MRT3847_97976C.1
gaagcggggggggggctcgagcggctcgagtgttttattagaagccggtttgtgatgttgcacttcactttttgcaggctggattccgattccaccatgctgaaccagattacttgatgctcgtgaattggattcccaatactcccgatacacttcctgcaaatgcttcgcaccgcgttgctgttggtgcttttgtcatgaatgccaatagggaggtgcttgtggttcaggagagcaatggcaggtttagtggccaaggaatctggaagttgcctaccggaggcgttgatgaaggtgaagatatttgtactgctgcagttagagaagtcaaagaagagacagggatagatacaaagtttgtggaggtcatagcattcaaggaaaggcataaatctttcttccgaaaatcagagttgttcttcatttgcatgttgcaacctcattcctttaaaattcagagacaagtttcagaaattgaggcagctcagtggatggcaattgaggattacatggcccagccttttgtccgagaaatgagctatttgactttcttaccaaaataggggtatcaaaatttaatggcaaataca

SEQ ID NO: 140606 - DNA, 163 bp, Glycine max
  Clone ID: PAT_MRT3847_97977C.1
tcccactcgtccgtccacgcgtccgtactgttgttagatgactacagaaggggccactaggaagactagatggcctgagcttcatcacattcatgaacaagttgatcttcccaatccttttaataccaccgagcgtgacccttgacgctatctgcctacaaaa

SEQ ID NO: 140607 - DNA, 445 bp, Glycine max
  Clone ID: PAT_MRT3847_97978C.1
accaaaaaaaatccccctttttgaaattcccaaaggggagggcccccaatttttttacccctttaacaggttgaaagtggccctgtcccaggggcctttccccaaaaagggggtcccccaccttttcggacccagaccgaccaaaagcaaaaacccgggggttcccccctggggcgggaataggcaaatttgggagacttggacaaactttgggaacctggaacccccgccgccgaaaaaggggaacgcttttaaaactttacaaaccccccccctctagggggccctttaaaacaccccccataaggccccgggttttgccaaaaccaaaattggccgggaacccaaaccacaaggttttccgggggaaaaaaaaaaacacaaatttggttgcgagggtttgaagggcccccccctccttttttttatggaggggggggggggg

SEQ ID NO: 140608 - DNA, 254 bp, Glycine max
  Clone ID: PAT_MRT3847_97979C.1
gaacaattaaaagattttgtaatgtttgttgatacatcttcaatagtattgtaacagagaatgtcatgctaaacatgttgatgcacaattggataaagtatgagtttaattttcatgtttaaagatatttactatctaaaaaaaaaacaaaaaagaggggccctgcgattagtgaccccgccacccggggatttaatccgggccgggaccctgcgggggtacaagtttccccaaaagggggccgtttaaagcct

SEQ ID NO: 140609 - DNA, 888 bp, Glycine max
  unsure (1)..(888): unsure at all n locations
  Clone ID: PAT_MRT3847_9797C.1
ctttttggcaacattcctaccgaaataggtgctttgtcccgccttgaaaatttggagcttgcagcaaataatttaggtggcccaattccaaaacaggtgggatctttacacaaattacttcacttgaacttgagcaacaacaaattcacagaaagcattccttcgtttaaccaattgcaatctcttcaagatcttgaccttggtaggaatttgttaaatggaaaaataccagcagaacttgcaactttgcaaagattggaaacactaaacctctcacacaacaatctctctggaaccattcctgattttaagaatagcttggcaaatgttgacatatctaacaaccaattggagggttcaattcctagcattccagcctttcttaatgcttcatttgatgcattgaaaaataataaaggcttgtgtggaaatgcctccggtttggtgccttgccacaccctacctcatggtaaaatgaaaagaaatgtcatcatccaggcattactccctgctttgggggctctatttctattattattgatgattggaatttcgttgtgtatttattatcgaagagcaacaaaggccaaaaaggaggaggctaaagaagaacaaaccaaggattatttttccatttggagttatgatggaaaattagtgtatgaaagtatcattgaagccacagaggggtttgatgacaaatatctcattggagaaggtgggtctgcatctgtttataaggcaagtttatccactgngcaaattgttgctgtgaaaaaaactacatgctgtacccgacgaggaaacactcaacataagagcttttacaagtgaggttcaagccttggcagaaatcaagcatcgtaacattgngaagttaattggata

SEQ ID NO: 140610 - DNA, 123 bp, Glycine max
  Clone ID: PAT_MRT3847_97980C.1
tgggggtttgggaaaggcacggaaggcttcggtttcagggggctcatcaggaggtttatcaacctttaaccatattgtactccttcaccaagtatttgccaactaatgctagtgttaaatgct

SEQ ID NO: 140611 - DNA, 190 bp, Glycine max
  Clone ID: PAT_MRT3847_97981C.1
gtgctgctgtcggccaccatcgagcgcgatgcgcagggacgcttcctgcggtcgctggcggtgctggaggatgtcacccgcaagcgcctggccgagcagctcgccgccgagcaccagcgcaccgcggcgatgctggaatgcatcggcgatgcggtgatcggcatcgatgcgcgggggcggctgcgcagcc

SEQ ID NO: 140612 - DNA, 159 bp, Glycine max
  unsure (1)..(159): unsure at all n locations
  Clone ID: PAT_MRT3847_97982C.1
caggtactgcgtttccggaagcngagcgagatggctcgtncgaagcnnaanngctcgtangtccaacnggaggcnaggctcctaggnagcagttggnaccaagggtggncgtnagtctgcaacaactnctggtggtgtgnagangccccaccgttatcg

SEQ ID NO: 140613 - DNA, 706 bp, Glycine max
  unsure (1)..(706): unsure at all n locations
  Clone ID: PAT_MRT3847_97983C.1
acccacacgtaccaggtccggattaaatccccgggtgacgggcaccataaacggcgggccccccccttttctttattttgacggtaatacatactttttattcaaagacaaaagcatttgtatacaaagccatatacatgatagtatatatatatacattttgaaaaaataataactaattgacaacatgaaattttgtacagtttataatattacacacatggaggacgagccctggtgcagcggtaaagttgtgccttggtgacttgttggtcatgggttcgaatccggaaacagcctctttgcatatgcaagggtaaggctgcgtacaatatccctcccccataccttcgcatagcgaagagcctctgggcgtacgaagttttttttttataatattacacacatgctaatacaagtattatagcagttgatttcactgaggtttgcaaacccatcattctccttcggcctccttaaccttccaattaattcttcaactttgtttgctttggtttgatctagcaccacgcttactaagtttgtttatgatgtatgccatggcaactttagcacctaggctagnntgaccannagacnnncannttcagtagcaccccctagaagcaacaaaccattggcnntcaacttttnngatggcctnntttggatcatccnnatttgagannnntcagtaacttgatca

SEQ ID NO: 140614 - DNA, 292 bp, Glycine max
  Clone ID: PAT_MRT3847_97984C.1
gtcttattatgatgcatcgaaatgcactctgctctaagtaattaagggtgctaacataggatttctaataatggtctttgaatccactaacgatgattttaagacactaggctaacatgatgcttttgagtctatactctatagccgtactctatgtgctaatttagatgatacgaatggaatgtcatctaggtcaacttgttccaactacaacattactaatttacatatcgatgagagaaaatgagaataaaaactaggagtttgatacactcattagcctagctgcaat

SEQ ID NO: 140615 - DNA, 227 bp, Glycine max
  Clone ID: PAT_MRT3847_97985C.1
gttctggcgtgtggctacaaaatctttgtacaaatttctggtaatgcattcatttgctttggttgctagaaggaaaaaaaaaatcaattttgtactttcagaactacgaattttttatttgttaaatttgactcttcttgtccttcacaagagaaaattcgaattggatttttcactgaattcattggttttttttgggttagggcaaaccagtttctaggattgga

SEQ ID NO: 140616 - DNA, 293 bp, Glycine max
  Clone ID: PAT_MRT3847_97986C.1
acgcgtacgtaagctcggaattcggctcgagcagacaagtgaggggtccaaaaccgacgcttactgactctgtggcttactactattgtgccactgaattctaactgtgcggtttatcataactctaccatgcatgggttccaaagctaaactctaataaggatccactaagatgcactgctctattaacattacacccaacttgatgtgcttgcctagaaagcgctgccttcacagaatctacaacgaagactgccaaacctcaacatcaacatcttcgtgctcgaaaccaa

SEQ ID NO: 140617 - DNA, 132 bp, Glycine max
  unsure (1)..(132): unsure at all n locations
  Clone ID: PAT_MRT3847_97987C.1
gaggcagcgtagnaagngcggaagncggcgcgangnaagannagggngnnnnagacanagagcgnaaganaggcggacagggnaagaanggaaggnaacnaanagaggcnaganggngagnnaaaggnncag

SEQ ID NO: 140618 - DNA, 512 bp, Glycine max
  Clone ID: PAT_MRT3847_97988C.1
ggacaaatcagaaacattaatccctccgaagttttccgacttaagctgattttgttgggttcatattctttgacttcaattccctcatctcctatatctctccgcccccactcctctgttgcccatggaagaatggtgcagtgttcgcgcagatgcgagcttttcgatctgcatcaggaactgatcccttatgacgtggcatggtcttggcaaaaagacatcgtcagggaaaagaaatcacagattgagaacgaaggagattgcagcgacacacttattattctgcaacacccttctgtttacacattgggtaccgctagtacacaccacaacctcaactttgacatcgaaaatccaccctttcctatttatcgcactgaacgcggcggagaagttacgttccacggccctggccagctaattatgtaccctattatcaacctccgaagacacaagatggatcttcattggtacctccggacccttgaggaggtcgttattcgtgctctttc

SEQ ID NO: 140619 - DNA, 116 bp, Glycine max
  Clone ID: PAT_MRT3847_97989C.1
gttatgacatccgccatttgccgcaacaccatccgccatattgttatggcgggattgttactgtccgccatgaaccatcattcagcattaacaacattgatttcaacccaagatgg

SEQ ID NO: 140620 - DNA, 303 bp, Glycine max
  Clone ID: PAT_MRT3847_9798C.1
ggttttacactaaagatggatctcattcagagggggaaggttagaaccgctgtggtgtccgctctacaacatgcttgcaccgatgatatctcaacaaacgtcgccaccggctataggctagcttgagctgcacatacacaagcagctaacatcactctcaatcacgaactctttgaatgacattacttctatccctctcgaagatatgatgtttattcaatatcatccaccaagtatgtactatgcacattgcctaagatgcaaaaactttcaaaagaagtacgtgtagccattccaaatagc

SEQ ID NO: 140621 - DNA, 141 bp, Glycine max
  Clone ID: PAT_MRT3847_97990C.1
ggagcaatatcgtcaggtcaaaccatgtaccacaatcaaatcaacaccccaaatggcttcagcttcggtacctcatacgttagtcacatagctctgttaccaagatctgtacgccttcatcccaggccttcttgacgccac

SEQ ID NO: 140622 - DNA, 264 bp, Glycine max
  unsure (1)..(264): unsure at all n locations
  Clone ID: PAT_MRT3847_97991C.1
ctaacctcacacattcttccactccncttcgttctattatcgacaccaccactcttncaccccgctcgttttttataaacttactcgccaccacaatttcctaccattcntacantctcatactttatgtaacaactccaatcaccaaccactttttacccaccatttcttataccacccatttttaaatctaattcacctccatcatcacctcttccacttttttccccttttatccacaaacatatcttcacttcatcacca

SEQ ID NO: 140623 - DNA, 445 bp, Glycine max
  Clone ID: PAT_MRT3847_97992C.1
gatgttttgggatgaaagtttttgccatgctatctataagaaaacctatcatttgtatttgcatggattgacatagcattgcttaggctcaaacatagttcgaaaagtttcattggccttttgatagtatatctgctcatggctgtgcattattattcattgcatactgtgctgcaggatattgttatatgcgtaaaacctaggattgttttagctgtaaatcacacatacactgtgcttttatatctctgtcaaatgtaattatcagctgcagcaacctggaaatggaggtattgattccacggcaacttgtcacaaactaatgggagatcttcaagcagttttcaacgcacttacaaaagatatgcaacagctcatgatttcaaatccacaaaaggcatccctcctgcaaggtagcccagaattgacaaaacttttaacacac

SEQ ID NO: 140624 - DNA, 169 bp, Glycine max
  Clone ID: PAT_MRT3847_97993C.1
tgtatgtatgaaatcgggacctgttctttctcgaatggatggtaaatgtcatgaacctgtgttttggaagttcggagaagaggggaacatatatttccgtcatgcaactgggcagatatatgctatctctaatgatctagcgcactctacatgtagcattaactcaccc

SEQ ID NO: 140625 - DNA, 142 bp, Glycine max
  Clone ID: PAT_MRT3847_97994C.1
ctaagtacaaaacgattttaattgctcagagcaaaccctggaaatgaacttcatcccgacactgccaaagactcaattttatgttaaagattgcggtgcagtttctcactagtacgctcactccaacaagtttgttatatta

SEQ ID NO: 140626 - DNA, 1682 bp, Glycine max
  Clone ID: PAT_MRT3847_97995C.1
agccactattccttgtgacctttccctatactactagttcaagcaagtttgacggcaacacagccttctacgatggcagatccgtgccttctcctcagccttctcacggccccatgccttccttctattcctccaagaatcgtgatgctcaaaccttgcttcctctgatagtcaagcagatatacgtcttgtaggaagggtgtgcatcaaagttggaggaattactgacatcacttttgtgcctaatgatgatactgggaagattgagtgcttcacggagatgttgaaacagatgaagctgagggggcatcgtagaagaatggtctgaaatcgactatggccagtgttcagaagcggggtctggaagacgagagagaaagaatgggcaaagtttcaattccagtcccgcaaaacggtttctccatacgcaatttctcaacgtccaaacgctcatgtttcaccccttcaccttcaacgctcagaatttcttgctctggagtagctgagttagatggatctcatgagaataagggaggtttgtttaatttcaatggaatcaagggcgtggcttgtggtattcttgcagcttgtacggttacttctgctgcatttcccgttactgctgctacccagagacttcccccattgtcaactgagccccatcgctgtgagcgtgcatttattggcaacacagttggtccagcgaagtgaagagagaaacaatggccaatgtttcaattccactcccacgaaacggtttctccaaacccaattactcgacaaaacgcccatgtttcaccccttcagcttcaacactcagaatttcttgctctggagtggctgagtttgatggatctcatcagaaaaaaggaggtttgtttaatttcaatggaatcaagggcgtggcttgtggtattcttgcagcttgtgctgttacttctgctgcatttcctgttactgctgctactcagaggcttcccccattgtcaactgagcccaatcgctgtgagcgtgcatttgttggcaacacaattggtcaggcaaatggtgtatatgataaaccattagatctccggcaatgtgatttcacaaatgagaaaaccaaccttaaggggaagtccctgtctgctgcactcatgtcagatgctaagtttgatggagctgatatgacagaagttgtaatgtcaaaggcttatgctgctggtgccagctttaaaggggtggacttctcaaatgcagtcttggaccgtgtgaactttgagaaagctgatcttgaaggagctatatttaagaacacggtattgtcaggatccacctttgatgatgctaagctggacaatgcagttttcgaggacactatcattggttacattgatctccagaaactatgcacaaataagaccattggtgatgaatggagagttgaactaggatgtcgatgaaaagcaaagtcttcactgtcttctatttctagtatgctgctatgctatgacatgacacaaatattttgatgagggtaactagtggatgaatgctacgtccagaagtaaattcaattccttgcttttcctgtatgatattgtataacttatattattccctgtgattttaacatacaaattgaagacgctggtataattaataattctacttgtattttttttactataaagatctagaac

SEQ ID NO: 140627 - DNA, 435 bp, Glycine max
  Clone ID: PAT_MRT3847_97996C.1
cgggtttctgtgtctacaaaggtgacacctatcttgtgtacgagttcgcggagaatgattctcttgaggattggcttcacagtggtagcaagaagtacgagaattctacatctctgagttgggtgcagagggttcatattgctcatgatgttgctgacgcacttaactaccttcataactatactagtcctcctcacgtacacaagaatttgaagagtgggaacgtgcttttggatggcaattttagggctaaagtttcgaatttgggattggcaagagctgtggaggatcacggggatgatggggggtttcaattgacaaggcatgtggtggggactcatgggtacatggcacctgagtacattgagaatggtttgattactccaaagatggatgtttttgcgtttggggttgtgcttttggagcttcttttcg

SEQ ID NO: 140628 - DNA, 357 bp, Glycine max
  Clone ID: PAT_MRT3847_97997C.1
ttggtgtcataaaaattttaaaaaaaaaaaaaaaaaaaaaaaaaaaaaaaaaagcgggggggcgcccgccataggatgaaccaggctcccccccgcgggcaaccgacatctaaacttattagatggagtaaaaaaagagaaacacgggggcccgtgttaaacatcggaaaaaaggggacagccccggccacccccaactttatcatgtggcagcaaatccttttttccccggggggcgtaataaagaaggggcccgcgcaaatccctgttgccaccagctgagcccgctgaagggaaaaccccccccccccccgagcggcaaaaaaaaaacggcccccggggggaaaccccccccaa

SEQ ID NO: 140629 - DNA, 232 bp, Glycine max
  Clone ID: PAT_MRT3847_97998C.1
ctcgttgatagacgagatgctggttattacaaatgtgctccctcactacatgtaaaagttggggtctgagtgcatgttagctattgcaacattgcaggttcaacgtcacaaaacccactaatgctaaattgtcgcgattcttgtgaatacattatcatgaatgcttctgggtcacctatccaccattatgcatctttttttccactcacgtctctccagtctccactatgag

SEQ ID NO: 140630 - DNA, 364 bp, Glycine max
  unsure (1)..(364): unsure at all n locations
  Clone ID: PAT_MRT3847_97999C.1
ggggggggctctctcttttttaaaggagggnggaaggggggggaacttggctttatactttgccaacttatgcacaaaccgattggtaaacacaaaactgggtttttcaacagaaaaaaaaaaaaaataaagaccaacgggtgtgcttttcatggagggcacaattgcttcggattataaaaggcccttttcaaaaaggaaatggattccgcttccggactaatttagaacactggggcttttagtcttctggccaacgccttgctcattgggggcctatcaaaacccgaggggggcaagaggcccttattctttttagcccttgttagggggtgagggttaaccatttggtcggggccaaagg

SEQ ID NO: 140631 - DNA, 483 bp, Glycine max
  Clone ID: PAT_MRT3847_9799C.1
ctcgagccgctcgagccgggctttccaacaagaatgtttcaccaaaagtttgctagaagatatggttttctcctccttgatcatgttgcttctcaggatccgcttagtgtttcagttgcaattcttcatcagtttaatattttgcctgagatgtatcaagttggctacacaaaattatttttccgaacagggcagattggtgtgcttgaagatactagaaatcgtaccctccatggcattttacgtgtccaaagttgtttcaggggttaccaagcacgtcattctctcaaggatcttcggggaggaatcactactttgcagtcatttattaggggagacaaaaccagaaaggcatattcagcattacttaagaggcataagagctgctgttattatacagaaagcgcatcaaagcagtatttgcaagaaacagaatgaggactattagtgatgctgcaatagtcatacaagcagttattcatg

SEQ ID NO: 140632 - DNA, 242 bp, Glycine max
  Clone ID: PAT_MRT3847_979C.1
aaaatgctgacttgaaatttccctgaatctctccaaactgcaccagctggcccgatcccgcgtctacacccatggacacctaggccgaggcggacgacgcttcgacggaggggacagcacactgagtgctggccgcagacgtccaggaacatacagtgacggaatctgaaacaaaatgctgaacactcggctgtacgagacaggaccccgtggcggacaaaaactactctggcaaggttacc

SEQ ID NO: 140633 - DNA, 156 bp, Glycine max
  Clone ID: PAT_MRT3847_97C.1
cggacgcgtgtgctagggaataaaccaagagatcatatacgtatacgcatgaattcatgagggaatcttcgtcacatctgtctgcaatatcacctattgctctttctccttactgccctatccactctcgacggagtttcattctctacattccta

SEQ ID NO: 140634 - DNA, 342 bp, Glycine max
  unsure (1)..(342): unsure at all n locations
  Clone ID: PAT_MRT3847_98000C.1
aacgaccctttatagggattggggccaaaccggcccgaaatgcccgggacgaccgggccgaccgacgcgaacgnccatttttccttattttgatgccatttgtcccaaaagggccaaagacccagtacgcgttctcgtcactggagccgcagggcaaattggatatgctcttgtccctatggtacnggaggaatacaagcaaggacctgaccaacccgtgagcctacacatgcttgacattcctccagcagcagagtcgttgaatgacgcaaagatggaattggaggatgctgcattccctctccttaaaggtgttggggctacaaccgatgcggttgaggc

SEQ ID NO: 140635 - DNA, 229 bp, Glycine max
  Clone ID: PAT_MRT3847_98001C.1
tgatagacagctacctaacagccataaaataacagtagctgacgaaaattaactaactgacatccttttctttttatatttacatatcagtataccttccagactaaaaggtagggattggtacttggaaatatgtaaagaaaacttggaattatgtaaacaactgaatattatttcatgataatgagtaaaagcatatatataggaagactaattctaatatttacta

SEQ ID NO: 140636 - DNA, 268 bp, Glycine max
  unsure (1)..(268): unsure at all n locations
  Clone ID: PAT_MRT3847_98002C.1
actgatccacttggaaccgaactattttactttctattaaaaattcacaccacccagggttggggcactcacatggggggtacgggaaaataattcttcatcccaacaattttctatttatgcttaaacaggaagtctccactgagaaaaagtacactgcnntatgttgtttgcagtgccttacatatccaatttctagtccaaaaaatactatctttccgaattctttcaaactttgagaacagcttgctcaatttaccaatctcaa

SEQ ID NO: 140637 - DNA, 297 bp, Glycine max
  Clone ID: PAT_MRT3847_98003C.1
cggacgcgtgggatacgacagatgggtcacctgtaaagaaagaggaggaagtgattgcagaggctgaagctgagaagaaggaggagggcacagacacagacacagaggctccaacagagtaaaagaatgtgaagaggggaaatgtgcatcttaagtagagtgtatgagagggtatttttttcttagttgcatcgtgtcttgatactccatgcacgtcttttctttgtgtagagcactaacaaaatgtctattctatggaagggacgactgttacgaatgccaaccacttagtacaaa

SEQ ID NO: 140638 - DNA, 350 bp, Glycine max
  Clone ID: PAT_MRT3847_98004C.1
aaaacaaaaaaaacaatacttatttcatcccaaggggccaaaagaagaacataacatacaatttaaggtttcgaaaaaaaaggttgaatgattatccaaatttttttagttacagcttaatggggcttttttttaaaaaaaatttggtttccttaaggccccaagcatttagttaaaaaatcaccacactttggtttccattgggaaaaaaaaaaaaatgggcatttttgaaaatacccaacgggggaaaaacttttctggtaaaacaaattttccttttttccccaaaactttaaataagggggggggaaatcaaacttttaagggaaatcgttttgacattagggctt

SEQ ID NO: 140639 - DNA, 1136 bp, Glycine max
  Clone ID: PAT_MRT3847_98005C.1
gcgcccacgcgtccgctgcgagagacgacagaaggggactgcatttcccacctcaatattaatatatttctttccccacaagagagatcatggaaaaggatatcattcatctttctccaacatgggatggtgacaatggcaattccactgagaaaaggctcaggctatttggttttgagctaaacccttctaaagatggttatgccaaagaatctggtgaaggagatgaaagtgtgaactcctctaactcagtttcttctggaggagacaaaactgtgcaagagaaaccctctgccaaagactctgatgagagaaagtttgagtgccaatattgttacaaggaatttgcaaactcacaagccctaggaggccaccaaaatgctcacaagaaagagagaatgaagaagaagaggttgcagcttcaatccataaaccgctacctacaacaccctttccaatccaagcatggctttgctcacccttctgatactccttggttctatgacccctctacctataataactctgagttcacccttagtgaagaacctcagattagcttcaattcaaatgttttagatgccaacttttcttgtgaccagaaatctagttggtattctcttgcatctcacccttctaattcccaacaagatacttgcatgtttactttctccaatgcaagtaataatagtcctttcatcttcaagccttgccacttccctgcttcaaatcagagccataaaagtaaagccctagatcttcaactaggcctcaacttgcagtcaaatacaagaagttccttaagaaggatgtaatttaagtatatataggacacataagttaaattaacagtttccttgaattattttaatgcatcaattctcaaacatctggaaaaaggaaatgagaaaaggtaaaaaaaaaataattacaattcattagagttagttggccttggccactgcagagccaagaagagtctgacaatgaccacctttcagaattcagacagcatatagaattcatacgatgtatttattatagcatgttgtagccctttgatatatattacatacacttctttacattctcagtacatacatgcttagagaacaacgttctctttcatttcagtt

SEQ ID NO: 140640 - DNA, 108 bp, Glycine max
  Clone ID: PAT_MRT3847_98006C.1
ggcctccaaaattttatggtagtcaatgaatttctgtgacctatgctccacaaacgacggcaatgtgcttccgatcaggactagggaaaatcctgaaaacccttctat

SEQ ID NO: 140641 - DNA, 732 bp, Glycine max
  Clone ID: PAT_MRT3847_98007C.1
cagcaagagaaaaaaatattgcaaggatgggggaggaaaggaaaagtgaattaggagagggtggaaaatggtggagaggacaattgaatttggagaggatttgggggcttaggtcagggagggcatagtctgtgttcgagctctggttgtattctctttactgcattttcttcatttcttctattccagcatctctgtttttgtttgttgagaactaatttttccttgtagaggagatttcctccttcagttccatcttattttcagtatttatgtcattcttatcaaaatctatcatgaattaaaaaaaatattgataatgattttagaactatcaggtagtgaactgtggtaacagaatatttcagaaccaatgaatgaacaagtcaaacaaacgaaagaaaataacacaatactgcaaagaagggactaaccattaaactgttggtccctgaagctacacctctgtttcaccctcaatgactttaattcctttaatgtgaaatcaactgcaaatatacaaacaagtaaacttattttggcatattagattattcgaacaagaagcaaacttgtttagatggaaaataagactttaaacaaaattatagaatttgaaacataagcagacctgaaatacttgtccctaaaaacaatgaaaattgagatgaatttcaagcttatgcatttatgtcacagacagaagcaatcagatcaacaccctaatatttc

SEQ ID NO: 140642 - DNA, 560 bp, Glycine max
  unsure (1)..(560): unsure at all n locations
  Clone ID: PAT_MRT3847_98008C.1
ttgggtgtttttggtacagcttatagacacaacacagaagataaggcatttaacaccgtgaaacagatggctgagcctatgttagaaacagaaagctccctactctatgacctgttcacccctatacaagatatgctatgttccagaatgcgccttaaataaatactcttcaaatgaataaaactatggctaaaaaataaaactcaaagaaggccacctctttgccctcttgtttttcgtccgatttgagccatgagcaataaggtttttcagagagtccgcttaactgttccgtgggttgactggttctttcaaaagccttgacttacgaatcctgtcctcttaaaaattaggacgctgtatcccaaagggcgactccctcctcttgcgaacattgataagaatgaatngatgtcatcttctgtacataggtcgtttggagcagccggttgcgtgccacaccacgcagttcctgatgacaagggccacactggtgttgaagaatccctctaggttttttaaacatataagcagcttgatgactcttgatcagtggaacg

SEQ ID NO: 140643 - DNA, 358 bp, Glycine max
  Clone ID: PAT_MRT3847_98009C.1
cccacagcacatgtttattgaagggatacatacagatgctgatgtaaagctttttcagcagtcacacaatatcctgggtctccaccttcctggtttggggaattaagttaacaagctgctctactcacgtttgtacttgtcaaggagtgaaattaatcatgtacacaggtcactctgtagggaagcttctggtcagcaatttttatattcctaaagaattatctaacaaccagttgtagcccatgtctgtaattccagaacctgggaggctgaaacaggaggatagttttgaagaccaatgtgcccacagaaaaaccaccttttttcctgcggtcagggacagctagctagctgcctg

SEQ ID NO: 140644 - DNA, 190 bp, Glycine max
  unsure (1)..(190): unsure at all n locations
  Clone ID: PAT_MRT3847_9800C.1
gctgagacaaagaagtgagaataanagcaanaantnggagcntcagcatctcccccnaagcttgtctcagcggcagacnctganagctatttgagtagcctcnacccggagaatagcaccaattgtaggaggaggannacaanccataggancccntgtgcnnanggaganaaacccntangnagtagca

SEQ ID NO: 140645 - DNA, 820 bp, Glycine max
  Clone ID: PAT_MRT3847_98010C.1
cggacgcgtgggcgaccctaatgcatgatacttctaaagatgttttccagaaccttgttcttggatcatatttttatcttttgaactccgccctatcaacattttttcattgtaaagcaggtggtgagtgaactttgaatgcatagaagcctgctcaaattttctggcagtgcttttcatatgcttgtaaattgaatcatatttttatacaataggctttgtcaaaacttgagggcgagccctggtgcagcggtaaagttgtgccttggtgacttgttggtcatgggttcgaatccggaaacagcctctttgcatatgcaagggtaaggctgcgtacaacatccctcccccatatcttcgcataacgaagagcctctgggcaatggggtacgaagttttttttttgtcaacttaatattataattacaagccacgttagtacatacataaccaatgtcattcatgcggatgcaatgttcacatcaagtctcaatataaaggtaaacttggctccaacaacataatatgtaatttacttagaccaagtcaggtttaaggaggaagataattcacgtgagccacatgctacaaatcaatcatggataataaccgaactatttgcacatttgatgtcccaatgcaattttactacaatatcatcgtatagtctcttcaacattatgcacatgaaagtttaaatagaaagctggaaattaggaaggccaataaggattcaaagctcaccacctccctgcataaaagaatctgcagctcagtttcgggaaggaagaaaattcccttgcatattaatttcttacaa

SEQ ID NO: 140646 - DNA, 420 bp, Glycine max
  unsure (1)..(420): unsure at all n locations
  Clone ID: PAT_MRT3847_98011C.1
cccacgcgttcgcaagtagaaaaattgtgtgaatggattgatgtattantctaaaacttggttcactcttaaaggaaacatcttaattttatcttctcacgagtgaattgaatgttactaatatttactctatcaggatatatgaatttgactgatttttggctttgctgttctgatttgagttgtgttggggactgaaaactagacaacatttggatggttgtctttatatatgcagctcttagatcttcatatgcaattaccgttatgcacttgataatatcaatttcttgtgtcaagtggttgagtatgtgaatgtgcacaggtgtggcagatgagaactggaccacgtctcttatctatccagtgtgctaaaggctgcagattgtacagcccacatacagggttggatcattatca

SEQ ID NO: 140647 - DNA, 370 bp, Glycine max
  Clone ID: PAT_MRT3847_98012C.1
ctcgagccgaatcggctcgaggtagatttccatgacatgggactcataatgtcttaatatgaatggcaaatagatactattgcgaagggatgaaataacaaagaacaaaaaaaaatctaccaaaaaaataaaacaatgatacaaaaaataaaacgaaaaagaataaaaaaaagattacaaaaataattaatgaaccactaaaaaaaaaataaataggggggaaacagattgtaatcaactctgaaacacgagaaatatttcacataactgaggctgggaacaccataccgtgtcctacacatagacctatcccacttcgtagggtatatgcctcaagcaaataaacctggagatgtttgttaacgccatg

SEQ ID NO: 140648 - DNA, 385 bp, Glycine max
  Clone ID: PAT_MRT3847_98013C.1
ggctcgaggccgtatctatgtctctctcacattggaaactcataccggcggccatcggactataggggttgtggccctactctgattactgtacgcgtgatccaccgttggatcatcatcatcggccatacgtttcacattgacacctgtggcactatgtgccgcgacgagggaggggaccatgcttgcgggtgcaccctgcaagattgcgctgtttaccgtcctgcactctggggaggacgcgtggacagaccgtggcccacgaccagactttatctccatccgggtcatcagtacggagctccacaatgtaaatccagacagtgtgaaagatcttgaggatgggatctcggctatctctatcatgattgcaaatgcgagcttg

SEQ ID NO: 140649 - DNA, 426 bp, Glycine max
  Clone ID: PAT_MRT3847_98014C.1
acggaaatcatggtatggtaagccaaacacttcataaatgtccggtgagatatgtggccttataactgtgagagaacgattgtccttaatttcctgattttgcatgattctgagattgtttaagtacatacataaggtgaaaatgatcaaggccttgtttgattttcttagccactgagccaaatagccaacctgttactaaaatgaataccttgcaccctgttgagcttaatgcaataaattgtttttgaaacctgagccgaatgaaattaatgaccactttgtcttaggttgtaggagagcatgggtcaacacaaatttatccctaatttgggggaggaggattttttggtttcgggaacatcaataatagcacacacttaaatgtaaataagttgctacagtaccagtttaagccagttataa

SEQ ID NO: 140650 - DNA, 290 bp, Glycine max
  Clone ID: PAT_MRT3847_98015C.1
aggcatccaagtttttatataaccaacagaaactatgttggctgggggccccccatgttttccatgcccacgaatgtgaatccgatcccatacccccatggtctccctctctctgtatgggaaacaacgccatggctgaaccttgaagatgcaaaaatgaaatttttaatacggcaacgcaccccctcctacatgatccacgtaaatgggggcctttaaaagtaaaggcaaattgacttacatcccaaaaaggggggcccaccatgccttgggtatgtgggcatcaaata

SEQ ID NO: 140651 - DNA, 340 bp, Glycine max
  Clone ID: PAT_MRT3847_98016C.1
gaagaaaaagatctgttatatcaagcaagcacaaaggagatagaaccttactttaacaataacggtaccgtctatcacgtgaccataaatgtagaacttgcactgaggccactaggaaaaaaatatgcagcacaccacttggttatgtatgcgcatgggtatcaacacaatgactaaaaaatacactctctaaaatcttaaatacccctactacatcgatgtattcatacaagagaatccactcacagatccaggatagggatgtaagatttggcctgagaatgaaatctttttgcaatactagctgcaagaaccgaaatacctttggggggaaccatag

SEQ ID NO: 140652 - DNA, 260 bp, Glycine max
  Clone ID: PAT_MRT3847_98017C.1
ctttgggatttcactttcacggcaagaatgtcgagctcactggcggagaagtccaccttctctcggacttgtactcttctgaggcaatacctcaaggagaagggcagctttggagaccttaccctcgggattgcattgccatgcaccaacggttcccctgacacatcatgtcactctgcaacaaccatgcagtctgtttattctcgccacttggagattccaacttttattaacccaaggtctacggagaaggaggctaa

SEQ ID NO: 140653 - DNA, 508 bp, Glycine max
  Clone ID: PAT_MRT3847_98018C.1
gttgagcgcttctactgttatctacaatctatgtaggcgacgtcgttgccgtcgaacttgcctagcactgcgcagggagctatatgtagtctatggaagcaattaactcatggatgcaatgaccacaaatcccaggattacatagtgcacgatagctgcgtgttgtacctttcacagaatgcatagaagacgacactcttgattcctgtcttgggctcagctggcgcagctgcaactttgtcttcttatggctagactgacagtacgaatacgtatgacgaatatcagtagcttcagcagaatcagcggattcagaaagaacacaatgcccccgatgactttccagattttgctagagaaggttgacaaggtaaagaagtatcatcagataactatgttaagagtgattcaagtctcatatacctaaattacgtagatggtcaaggtgatcatccaaatgatggccaggatgttacgtttcactatattgactataatgaatctggac

SEQ ID NO: 140654 - DNA, 205 bp, Glycine max
  Clone ID: PAT_MRT3847_98019C.1
ggtgcaccgtctcaccttccgcaagcgccacagttttgccaccaaattcaacccgcccagagttgtcaagactcccggtggcaagcttgtttattaaaccacgaagaaaagggccagcggacccatttgccttgtttctggaaagaggattcatgggattccacctttaaggccaaccttatttttaaaaatcaaggttccccat

SEQ ID NO: 140655 - DNA, 422 bp, Glycine max
  Clone ID: PAT_MRT3847_9801C.1
attggcaaaaaatatatgtattataaatataggaaagtaccaggggtactaagggtacaaagataaatgtaaacaggctgctagatccagatggtgctgggatccaactgcagaccttaatattagtacaataaaaacccttcactgctagcctagacagaaaaagctactgatagattactagaccagtagttaaaaggctcaacaaaatctttatccaactctctaaaccatgaccatacttggaatatagcatcatccatcagcttggttccgttgaatgactcatttaggaaaacaatccggtttcagtgctgccaaatcaaacaggtaagggccacccaccaacacttccatctagattgcagcttccctccatttaagctaaaagattgttgcatgtagtgttgccttggaacggg

SEQ ID NO: 140656 - DNA, 188 bp, Glycine max
  Clone ID: PAT_MRT3847_98020C.1
attaggcctgcatacttgtaaagagactatagtagcatatgaaattgaataccgatgtgctcttgaggaaggagcatggcctgtagtcagtgccatataagccatatcttcattgcccaaatttaataaatggatgtattttatatgacacttaaagagaagtacgcttcctttaattactaaataaa

SEQ ID NO: 140657 - DNA, 227 bp, Glycine max
  Clone ID: PAT_MRT3847_98021C.1
cggagaaggaaaatgaagatgtttggaatgtgtggtggtagcgacgatgataatcacagagatgatgaagacaaaagcccgattggggcaagagaagatggcagccaatacagcctcacaggagttcttcttccgtctctcggggccacagctattcgcaatggcagcggtagaccaaagtttcgccaatacattgtctcaccatataatcgtcattacaaactatg

SEQ ID NO: 140658 - DNA, 240 bp, Glycine max
  Clone ID: PAT_MRT3847_98022C.1
cctcctcctcctctatctttcctctaggtctaaaaccatgaccaacccaaaactaggttatgcactaatctacgatatcggcaaccacattctctactccaagtagaaccacaagatgctcctactctctctattggccacccacctcgaggaggcctccgtggtggacaatgatgccgtagtaaaaaactaaaccaaaaactccgacaactccgacaccaccagaacattccactccct

SEQ ID NO: 140659 - DNA, 1058 bp, Glycine max
  Clone ID: PAT_MRT3847_98023C.1
ttgcctgctacaatcttccgtttcataccatataatggagattggacatctaatcgttttagctttattatgtgtaactctcaagggagctgatgcgtcgcaatccgcgaaagattattggcactccgtttttccaaacactcgtctgcccaagcctctctgggatctagtgttgccttcccctaaaacaaatatgcctattaaagtcgaagaagagaagcagtattggactctcttttttgagcatgaccttcatcctcgcaagataatgcacttgggcctccacaagcacaatgatacaaaaaattccacaataagctcatgggctagaacaacaagtcaaccttttggagcatggttacacgcaaaagtagaagagagatataatcttgacgaggtttgtgggaaagcagctgctaaaggagaagaaaagttttgtgcaacatccttgcaatcaatgatgggtttcgccatttcgaaacttgggaagaatattaaggcgatttcaagttcctttgcccaagatcacgatcaatatgttgttgaggaagtgaacaaaattggagaaaaagctgttatgtgtcatagactcaactttgaaaatgttgtgttttattgccaccaaatcaatgcaacaacaacttatatggttcctttggtagcatctgatggaactaaagctaaggcactaactatttgccaccatgatacaagaggcatggatcctattgtggtttatgaagttctcaaagttaagactggaaccgtgcctgtttgtcattttgttggcaacaaggctattgcttgggtacccaatctagtcactagtgaatcttgtgtggtctagttgctatatattttgttgtacactagttttcattatgtttaggtttttttttttttttttttttttttaaattgtacacactggttgaggacttacatgttggaacttgacttatgttaaagtgatgtctatgtatggagtatcttccatgtatttcaaataaatggttcttttttaccattctaaaaaaaaagctaaaaaaaaaaataat

SEQ ID NO: 140660 - DNA, 241 bp, Glycine max
  Clone ID: PAT_MRT3847_98024C.1
aaacccagggaccaatttcacattttggggtatatatattgaaacagcagattaaaagaaagctttaaatccgagaaaacaaacaaaaaatttttttctttctgcaaatcccaaaacaaaatttttatggaaaacactggattcttccattaaataaaaatttgatgcaaacttacaaggggttataggggaatatagccatctctgtgaggcctgggggagcctctttttggggcaatac

SEQ ID NO: 140661 - DNA, 1872 bp, Glycine max
  Clone ID: PAT_MRT3847_98025C.1
cactcacatatacacatatctgagtgtgaggctgaggtggttggattggaggattaggaatgagggatggatcgaaagagaagaggaagagacgcagcgtcaatccctccaatccaaccacctcagcctcacactcacatatacacatatctgaacgcgtatcgtccctcctatggcttcaaagcgcatcctcaaggagctcaaggacttgcagaaagacccaccaacttcttgcagcgctggtccagtagctgaggacatgttccattggcaagcaacaataatgggtcctgctgatagtccttatgctggaggtgtattcctagtcactattcacttccctccggattatcctttcaagcctcctaaggttgcctttaggactaaggtgtttcacccgaacatcaatagcaatggtagcatttgtcttgatatcctgaaggagcagtggagccctgcactcaccatctctaaggtactgctttctatctgctcattgctgactgatccaaatcctgatgatccacttgttccggaaatcgctcacatgtacaaaactgaccgggccaagtatgaggccactgcacgcagctggacccagaagtatgccatgggctgatttgtgtttggataatgtatattgaaatggattgcatctatgaaaacttttgtgggtttgcttttcacttcctgttttctgggtaagattatgtttctgttatgaggggctagggaagggaggtgtcttaatttgataaaaaaaataactgtgttcaacaaccactgtgatgtttttatcatgatgcaaacgcatgaacaggatgttatttgtgtcattgctgtgttgtaacttcctctatgaagtaatgtagaaatagtcatatgaagcacaaaaaaaaaaaaaaaaaaaaaaaaaaaaaagaggggaaaaaaaaaaaaaaaaaaataaaaaaaaaaaaaaaaaaaataaaataaaaaaaaaaaaaaaaaaactttttataaaaaaagtagaataatagaaaaaaattaatataaacaaactaaaaacaacaatagcatcaaaaacgaagaatacagaaaaagaataaagttaacattcgggcaggaacaaacataaattactaccattaagataatattatacacgtgacaaccacatccatttgaacaagaaaattatgactgaacaataattttaaccattgaactctgtaacttgcatatttatgtgtaagctcatgcagctttttcagcttctgcagcttctgctgctgcttcttcctcccgaagcttctttaaagacggaggtggtcttacaacaatgcttttcttccattttttatcaagctttctggacaacctcttattgataccctcctcaatttctctttcccgcttcacagtaagcatgcgagcaatcctcttgcgcatgcgaccgaaatcgctggacttgaactcgttgcgagccgatttctgaaggcgaagcatgacaagctcgcccttaaggtcgacaacctcttcgttaatttgttcggtggtcatttgtctaatttccttcaattcctccgtccttttagacatcatcaccactggcaccgaagcgctgcatttcgtgggtggaatggagcatgtggcagagcgacggagctgaatgccattgaatggctttgggagaaaggaaatggttgaagaagaaggagaagcaactgagagacttaacattctccacgccctctctctctctctctctctcttctcttctcttattaccagcgaagtggatacggagtgttgcagataagatgcaacttcgtcttcttttatctcccctcccgtcgtcttctcgcagccgtacggacgcgtgggcagcca

SEQ ID NO: 140662 - DNA, 457 bp, Glycine max
  Clone ID: PAT_MRT3847_98026C.1
ggacagagagagaggggtttgggattggagggattgacgctgcgtctcttcctcttctctttcgatccatccctcattcctcatcctccaatccaaccacctcagcctcacactcacatatacacatatctgaacgcgtatcgtccctcctatggcttcaaagcgcatcctcaaggagctcaaggacttgcagaaagacccaccaacttcttgcagcgctggtccagtagctgacgacatgttccattggcaagccacaattatgggtcctgctgatagtccttatgctggacgtgtcttcctagtcactattcactttcctccggattattcttaccagcctcctaaggctgcctttaagactaacgtgttgcaccctggcatcactagcactggtagcattcgtctcgatatcctgaatgagctcagcagcactgctctctccttctctaaggta

SEQ ID NO: 140663 - DNA, 271 bp, Glycine max
  Clone ID: PAT_MRT3847_98027C.1
ctaatccttgaacacatctctccttggaacacggacacttgctaggtggctgattaagaagacccctgtaatgtaaacgcatttagcctttggattagtagagatgtgggagttttggaaggtcatttcacagtcaatatccatatgattatgtgtgacgcatactgtcagtactttattgtagggcaatccttttcggatctgtactaaattggatgctttaagctagtgactgatgtgtgattcatctgaggcacattgtgtatctgtt

SEQ ID NO: 140664 - DNA, 1098 bp, Glycine max
  Clone ID: PAT_MRT3847_98028C.1
ctgatgcgttcgtacggggagcgagcgagcgagcagtttcaaagagaggatttgggattgggaaggcgagggattgcgctgctgtctcttcctctgagagagagagcgagcagtttcagacacagagagaggggtttgggattggagggattgacgctgcgtctcttcctcttctctttcgatccatccctcattcctaatcctccaatccaaccacctcagcctcacactcacatatacacatatctgaacgcgtatcgtccctcctatggcttcaaagcgcatcctcaaggagctcaaggacttgcagaaagacccaccaacttcttgcagcgctgtatgtgcaaatacaaatgtttattttgtaggtccagtagctgaggacatgttccattggcaagcaacaataatgggtcctgctgatagtccttatgctggaggtgtattcctagtcactattcacttccctccggattatcctttcaagcctcctaaggttgcctttaggactaaggtgtttcacccgaacatcaatagcaatggtagcatttgtcttgatatcctgaaggagcagtggagccctgcactcaccatctctaaggtactgctttctatctgctcattgctgactgatccaaatcctgatgatccacttgttccggaaatcgctcacatgtacaaaactgaccgggccaagtatgaggccactgcacgcagctggacccagaagtatgccatgggctgatttgtgtttggataatgtatattgaaatggattgcatctatgaaaacttttgtgggtttgcttttcacttcctgttttctgggtaagattatgtttctgttatgaggggctagggaagggaggtgtcttaatttgataaaaaaaataactgtgttcaacaaccactgtgatgtttttatcatgatgcaaacgcatgaacaggatgttatttgtgtcattgctgtgttgtaacttcctctatgaagtaatgtagaaatagtcatatgaagcacaaacctttcccaatatgttttaaacagctttttccaagaaaaataatcacgttttacgaaagcatttttttgaatgccagt

SEQ ID NO: 140665 - DNA, 932 bp, Glycine max
  Clone ID: PAT_MRT3847_98029C.1
atttttcccacgcgtccagagcgagcgagcgagcagtttcaaagagaggatttgggattgggaaggcgagggattgcgctgcgtctcttcctcttctctttcgattcatccctcattcataatcttccaatccaacaacctcagcctcacactcacacatacacacatctgaacgcgtatcgtccctcccatggcttcaaagcgcatcctcaaggagctcaaggacttgcagaaagacccaccaacttcttgcagcgctggtccagtagctgaggacatgttccattggcaagcaacgattatgggtcctgctgatagtccttatgctggaggtgtattcctagtcactattcactttcctccggattatcctttcaaacctcccaaggttgcctttaggactaaggtgtttcatccgaacatcaacagcaatggtagcatttgtcttgatatccttaaggagcagtggagccctgcactcaccatctctaaggtactgctttctatctgctcattgctgactgatccaaatcctgatgatccacttgttccggaaatcgctcacatgtacaaaactgaccgggccaagtatgaggccactgcacgcagctggacccagaagtatgccatgggctgatttgtgtttagataatgtatattgaaatggatggcatctatgaaaacttttgtgggtttgcttttctcttcctgtttttctggggtaagattatgtttgttatgaggggatagggaagggcggtgtcttaatttgataaaaataactatgttcaacaaccactgtgatgtttttatcatgatgcgaacgcatgaacaagatgttatttgtgtcatggctgtggtgttactctatgaagtaatgtagaaatagtcatatgttttaaaaaaaacaaaaatagtgaagggttattaac

SEQ ID NO: 140666 - DNA, 259 bp, Glycine max
  Clone ID: PAT_MRT3847_9802C.1
gttggccatctagtatgagttttaagttgtaaatcgcatgaaacaatatcaaatttataaaacctttcaggaaatgtaaacacaggttaaaccaggttgagtattttagttggtccaaaggtgtttgaccctcaattatgttttgagactgaattataattggacaagtgtccaattaatggttaagctggttggactgcctagtcagcaattactctatcacttgaacatggaatattaagttgttatacatgccatc

SEQ ID NO: 140667 - DNA, 349 bp, Glycine max
  Clone ID: PAT_MRT3847_98030C.1
gccataattaattattaattggagaacaatgtccgtttccgtcactcaaacgatcactcgaaatcggaaaagtgcggaaaagatttccgagggccaattcctttcaatggaagtggacgaattgcaagagttggaagaaaaggcgaaaaagacgcagttcaaaacccaaattgtgtggcgcaacgtgatcctgtacctcattttgcagaccggggcactgatcggagtttaccaattgttcacaagttcaaaatggcttaccgttttttggtgccttttcctttggatggtcagcggagttggcattacagctgggccccaccggctgtggtcccacataagttacaag

SEQ ID NO: 140668 - DNA, 382 bp, Glycine max
  unsure (1)..(382): unsure at all n locations
  Clone ID: PAT_MRT3847_98031C.1
cgaagcncgcaggcggctcgagctcaaacctttaaactgttgatactattttttatcacaaattcatggaagttccaaggaagtattctgcaaaacgcgcccttacggtggttcttacttgcatcatggctgccactgtaggctaactttttaactattaccatggagaatcaagtacagtcacctgcatcaataacttccaaaacaagaatatgatatccgtatatgaaaactagactaccctgaagatccttataaaaccaggactgcaaattcaacaatcaaatactgacactgagtacatcattcctaaacttaaggtctctgcttgcaaagctgctggcatccaccatgactatattgcactcatgactcaatatta

SEQ ID NO: 140669 - DNA, 467 bp, Glycine max
  Clone ID: PAT_MRT3847_98032C.1
tctcgagccgattcggctcgagacggctgcgagaagacgacagaagggctctctctcctttaatgtaaaatgaaagtaaggatgtttaaatctagaatctaatgcaacctaaccaaatctttaacaactagactctctctttctttttggccttcagtaattggaaaattatttgagaagatacaccataatcctttcaatgtataaaatttgttattaagatggatagaggtttggacaaaattcaatttgcattgatttccattatataatgaaagaaatcatgtggacatcaatatttaacaaaaacatgatgcctacaagaaggctgagtgatagtgcatatccccctttcattatccaggagttggcttgagtgtaattgtcaatatatgggtcataagttctggcagatcaatgagtgagattttggctgtctgattaattatgaaattcttaaattaagt

SEQ ID NO: 140670 - DNA, 513 bp, Glycine max
  unsure (1)..(513): unsure at all n locations
  Clone ID: PAT_MRT3847_98033C.1
ccacgnncgtccgaaaaaaaaaaaaaaaaacaaaaaaaaaaaaaaaaaaaaaaaaaaaaaaaaaaaaaaaaaaaaaaaaaaaaaaaaaaaaaaaaaaaaaaataacaaaaaaaaagaaaaaaaactaaaaaaaaaaaaaaatataaaaaaaaaggaaaaaaaacggggggggggcctttttaagggtccaatttttcctctgggggcttggaggtttctgcttttttttttggggcccctaaatgtgaatcctgggccgcggttttaaaccctggggcgggggaaaacccggggcttcccctattttagtcgtttgagagaacttcccttttgagcatgtggggtactatgaaaatggcccggccttttggcctttccctagagttgctcttcctggatgggtatgggagacccccttttatagggggttttactggggggggtgggggggtttcctcttggggtgacttctgcttttgcaatgcccttcagccgggatttttgggttttttg

SEQ ID NO: 140671 - DNA, 548 bp, Glycine max
  Clone ID: PAT_MRT3847_98034C.1
cgaagtaaaaagggaagaagatgcttatagagaggtaaatatatgcagcttactcaaaagactgcacactcatcaataatactgcttgaaagaaaccataaactaggtaccaaatagaagcaagactatatcatgtcaaataataaagtttaaggaaagcagagcaaattccgaaacagtatctttgcttcttcctcatcgcctcgacagcggtgatgatctctccctgctggccatcaagcttgaccatcatgtgctggtttccatctctttgcctataacccaagagttacgcatgacaaatgaagccaccaccgcggtttcatatctggtgcctgtcaacagcgaggactgcgccttcctccatgggttttttcatccccggcaaaacctcatatctgaaagtcgttacaccattgtccttgttggcgtcatcttcttcgctggagccacagcatgccatgattccgaacacaacgtggtggatctccttctgctgttgggttaaaacttcatgtgtatattagaagccttctcaaaatctagta

SEQ ID NO: 140672 - DNA, 244 bp, Glycine max
  unsure (1)..(244): unsure at all n locations
  Clone ID: PAT_MRT3847_98035C.1
gttnattaaatacntnnatannattnccacttacgctacnntcctttcnctactctttctngtnctctttcganggtttgggcttctcttcctcccntggaagaaaaagaangnntccacagctacgacgccgttccgtgcttnctttgaggtgaccacantncatgtntnggcgtggtggactaaggaggngngancactccaaatctnatgntattctcggggtttccaaaaatgccantgc

SEQ ID NO: 140673 - DNA, 683 bp, Glycine max
  Clone ID: PAT_MRT3847_98036C.1
agctcacggctgcgagaagacgacagaaggggaccaaaacaccaactgaagatatattatggcattctctatcttcaaacatgttctgtcgttattccttctttgcattttcttgcaggaacctaccaatgcccttagaaagacctacattgtgtacatgggaggacattctcatggtccagaccctttgcctagtgatcttgaaacagccacaaattcccatcatgatttactcgcttcttacttaggaagtcacgagaaggccaaggaagcaattatatactcgtacaataagtacatcaatggctttgctgccctacttgaagaggaagaagcatcacagattgcaaaaaatccaaatgtagtttctattttcttgagcaaagagcgcaaattgttcactaccaggtcatgggattttcttggactggaaaaaaatggaaaagtcactgcaaactccgcttggaggaaagcaagatatggagaaaatataatcattgctaatattgatacaggggtttggcccgaacaccccagtttcagcgacaaaggatacgggcctatcccttcaagtggcgtggaaaaaggtgtctgtcagattgacagttttaatggtacaaagaaatattctgtgtaacagaaagttgatcggagcaagaatttttctcaaaggtcggggcggg

SEQ ID NO: 140674 - DNA, 1159 bp, Glycine max
  Clone ID: PAT_MRT3847_98037C.1
gatatttagagataatgcagagggaaaaagcaaaagccgtcctctcccgccactatggccagcaacactgaactcctcctccaacgttaccctttttcttcttcttttagatttcttcccttaacaacaaccaccactctctcattctctctccttcgccctcgatcccttccttttcccctcaaattccatgcctccttctccttcaagtccccgacctcaaccctccgcgccttctccgacgccgaggaggacgaagaagacgatgaagaagatgatgaagaagaagaccaagaccatgaccaagacaacgtttctgccgacgaatacgacgacgttttgggtgaggcttccgacgacgaggccgacgtgttctctccgcacgatggattcaagtggcagagagtcgacaagctatgcaacgaagtcagggagttcggcgccgatctcatcgacgtcgacgagctcgcctccgtctacgacttccgcatcgacaagtttcagcggcaggcgatactggcttttctgagaggcttctcggtggtggtttccgctccgacgagcagcgggaagacgctgattgcggaggccgcggcggtggccacggtggctaggggacggagaatattctacacgacgccgctcaaggcgctgtccaatcagaagtttcgcgagttccgcgagacttttggcggcagtaatgttggccttctcacgggtgattctgcagtgaacaaggatgctcaggttttgattatgaccacggagatattgcgcaacatgttgtatcagagtgttggtaatgtttcttctggaagtggacttgtaaatgttgatgtgattgttttggatgaagttcattaccttagtgacatatctcatggtacagtctgggaggagattgttatttattgccctaaagaagttaaacttatttgcctgtcagcaactgttgcaaatccagatgagttggctgggtggattggtcatatactcatattgtgctggtgatgtctattaaagttgtagaatgcactgtgctggctttctgctcttgtaaaatgaaccaacattaaacttcattggttaatttattccccctgtcccttcctcatggaatttatattatttcttgtgaacaagaaaaacatatataaca

SEQ ID NO: 140675 - DNA, 462 bp, Glycine max
  Clone ID: PAT_MRT3847_98038C.1
gattccacgtataggatgctaaaaattgcctgcaattttgggtcctctcagcatccatcagtgcaatgcatgcaggctctcagagttgcaactgtggagcagggaaacatcgatccatatagcgtttatacacagccttgtaacaatacagcatcactcagacgtggtttgaaggggcgctatccatggatgtctcgagcatatgatccatgcactgaaaggtattctgatttgtatttcaaccgtccagaagttcagaaggcacttcatgccaatgttactgggattccttatgcatggaaagcatgcagtgatattgttgggaactattggactgattctccattgtctatgcttcctatatatcaagaacttattagtgctggtctccgaatatgggtctacagtggagacactgatgcagtggttccagtgactgctactcgatattcaattgatgcc

SEQ ID NO: 140676 - DNA, 289 bp, Glycine max
  Clone ID: PAT_MRT3847_98039C.1
tttttctaaagcatcgcgtcgagccccgttactctgcagacactcctcactttccctgcgggagggacacgtgcttcttttcgaaacattacaactttctcttccgtatcataaacctgatagccctgagttatactattcggggtctggagtctgggcgcgacctcaggagagggttctaccgagcggacccttactccctggaccctgaatgataaaataggaggcactccggtatgcatattccatcctgcggaaacaaagttctgaccgcagctgtgggacccct

SEQ ID NO: 140677 - DNA, 1719 bp, Glycine max
  Clone ID: PAT_MRT3847_9803C.1
aaagcagcaattatacattttggtaaaaagtggtataggcgcatctcattcatttggaggcacaccatgcagatcatcggaagttttcagaagctatggaatattgctggtgtacacttaaatcttgatattcccaaatggatgcatatccttcgtttggacaggcttaacaccaatgcagtgcaatggcttaacaagaaaggaaagttatttgaacccacatatctttatactatggaaaaggggtatttcttgttacctgaaagtgctaaatctcatcataatatacgtactgtgaatgttagcatatcagcttggcactcctgctttggaaacaggtggcagcaactactcataaacagatttgtcggatatgatacgattttaatcaatagtttattgagttctcctggtcaaggttatctttataactatcaaacaaaggaattctataaccttagttatgcacaagaagttccggaaggcccagctaggtttggagactatcttgtaacaaagtgtggcgtgcttatgatgtccttgtttgtattttttactaccacaatgtcagtatcatttacattaagagaaacacagactcgcatgctgaagttcacggtgcagcttcaacaccatgcacggcatcgccttccaacatttcagctgatctttgtacatgtgattgaatcactagtttttgttcctattatgattggcattctgttttttctctttgagttttatgatgatcagctacttgctttcatggtcttgattcttgtctggttgtgtgaactttttactctcattagtgtccgaacaccaatatcaatgaagttctttcctcgcttctttttgctgtatttcctggtcttccacatatatttcttctcttatgcttatggtttttcatatttggccctttctacaactgcagcttttatgcaacaccttatcctgtacttttggaatcggtttgaggtaccggcactgcaaaggtacatgcaaaatcgacggtcacaacttcagcaacacccagacttccacattacctcttccaccattcttgcatcaacgttacacatcacaagattgaacacaagaaaccagggattaaataacgttgacttggctactggagcagggttgagacctggttttgatcaatcaatgccccaaaatggaccaggagttgccgatcctcaagatcggtcagaaaataatcgagacagggttgcgaaccctgcccagattcctgggcaagctgacattcaacaagcagaaaggggtccgaaccctggatccatgaattcattcagttctttgttattatggatcttaggaggtgcttcgtctgagggcctaaactcgtttttttcaatgttcagagacgtgagagagcaaggacaagtttttaatgaaacacctggggctggggctggggctggtgatgaaagccgtgagaatcaggataatattgacagatagcggtgaagaggtggagagcttgttaatataggaaggaacaacgtacgtatgtcatataggggactgctttctgctcggtccaaattaaaaaagctcaacaaaatgtttgtacaataatattctttatagcttttgctttataaatgctgaaaatttatgctagttctgtcctgaaagaaagttttaccgaatttattttatcttacaaaataaaattatattttttttaac

SEQ ID NO: 140678 - DNA, 247 bp, Glycine max
  Clone ID: PAT_MRT3847_98040C.1
cgttatattaagtaaaagaataaaaaaccggcgagtcttgttggcgcatgctccactcggcataggagggatataactcgacgggttgaggtacgctctcttaattgcggcggcctggcgttcggattggctgtgtttgtgtccacgcagttaagttagtttcccgtgcttgtaccaggggctgactggtaatacgcgctgggattgacgaccgaatcatgcgaatgaacgactgttctgagacaaa

SEQ ID NO: 140679 - DNA, 298 bp, Glycine max
  Clone ID: PAT_MRT3847_98041C.1
ggcggtgctaaaggtgggttacaggcttacttaccttgcggaggttacagatgcacgcatggaactgagcttattaaaaagagaacagtcatcaagcaatcatgaagatgagtatgcacaaacatgctgtgatctctgcatgcgcacacgctcaatgcctgctgaatgcatgtgagaaaatatgaggcagaattcatgccactcacatagagagagcagagtgtgcacacgctcacagccaggacagtggctacgaatcgacaccaaccacatatgatacaaacctcgcatgtccaga

SEQ ID NO: 140680 - DNA, 112 bp, Glycine max
  Clone ID: PAT_MRT3847_98042C.1
gattggaaatttctcctttagtgacccgcaaaattttggtcgatggttgatagaaagtacttaacttattatttaacagtggaacaaaagagaagctaaagcctttgttttg

SEQ ID NO: 140681 - DNA, 497 bp, Glycine max
  Clone ID: PAT_MRT3847_98043C.1
aattcggctcgagaaaaaatctaaaatcgaaacgagactctctccctaagctccatctctaaactcgacgactcacacgcacggcacaacccaagcgcaaacccactcaggtccaccgtcgccgtcccaagcctgttccaccaccgtcgtcgcgccactgtcatcgcgagttcgcgcacactaggttctgatttcctttcaagcacgatttgctttatacgcatcaggatttaaagcaaaaatgcttcctcagcgcatgaagaaggccatcactgataaccctaagaagcttgccaacttgattgacctcgtcaaccttccatccacgctcagagaattcgtgggtcagtctcagatttcccgcttgggctgtttcaagtgcatttggtcctacatcaaaacaaataatcttcaggatcagaataacaagaatgtggtaaactgtgatgaaaagttaaaaagtattttgttggggaaacctcaggttgagttagcag

SEQ ID NO: 140682 - DNA, 402 bp, Glycine max
  Clone ID: PAT_MRT3847_98044C.1
tcgacttcgcgtgcgggcaaggcagaacatgctgtaacgtgcagacactactgtgcagggctactttgtcagactgggactcagtaaactgatgccagattctttgagccagatcagataactgctgaccttagcggacatacaaaaacgagggccagcatacaatgtacctagcatgtccgttctctcttgcactagactatgccggggcccaacttatccgagatattatgtagctgctataggaatggcggacagacacttgttatgaccgagacacaagaatgaggctctcagattgcacggatcttgactggaggaatagcttctgatggtgacatacatgaatcaacacgtgaggcctcactggttggatataggtctgggaaagtcatgacatta

SEQ ID NO: 140683 - DNA, 576 bp, Glycine max
  Clone ID: PAT_MRT3847_98045C.1
cccacgcgtccgatgaaaataaaaaaaaaaaaattgtgtattattgaatttctctggaatcttcttctgtgtatggttttccttccttgtgttttcttcctaattcactttcgagggttgtacttgttcctttcgtcttaaatcgttggatggttgatgatcaaaaaaaaaaaaaaaaaaaaaaaaaaaaaaaaaaaaaaaaaaaaaaaaaaaaaaaaaaaaaaaaaaaaaaaaaaaaaaaaaaaaaaaaaaaaaaaaaaaaaaaaaaaaaaaaaaaaaaaaaagggggggccccttttaaagaaccaaagtttactcccccggccttccaacgaaaaattttttttatagggcccccaaaatcaaatccctggcccggcttttaacaccggggggatgggaaaacccctgggttacccaaattaaacccctttgaaaaaaatccccttttccccattgggcataaaaccaaaaagcccccccccaaccccctttccaaaaattgccccaccctaaagggaaaagggaaccccccttgtaccggcccttaaaccccgggggtgggggggttacccc

SEQ ID NO: 140684 - DNA, 126 bp, Glycine max
  Clone ID: PAT_MRT3847_98046C.1
ggttactaagggcgttacaatacacagccacataagacacttcaaacggccgttcgacacgatgcatccttacttacgcgtgcaagcgacgtctcagcacttctatattgtcacctaggttccatt

SEQ ID NO: 140685 - DNA, 801 bp, Glycine max
  unsure (1)..(801): unsure at all n locations
  Clone ID: PAT_MRT3847_98047C.1
cgaattcgagctcggtacccggggatcctctagagtcgacctgcagtagaggtcgtatttacagcgaacttatgagttttttgtgttgttcattaaatgtgaatgtactgtattattgagtgttttcggttttcgaatatatgttattgtcttttgtcatgttaatagccgtgattatgtttgatatttcagatcattgaaacatttcctgttatcgtcttactttgctttacgtagaaggaaatttaatagctgctatttggacttgataatgtttatctctgtggccaagatttcttctgttaaatccatgaaattgttataatttgacagaggtaccaatatttttaccatctgtatattttctctcttcctcttggtgacccggtggggcataggttctagctgcaaagctgcctcttcttttgtggcagtagtgctgcgtacaatacgtctaaccctctgcggaccttatgcttaatcttattaaaataagctgtgccttactcaaaaagtttatgagcctaactgattttgtcaagtaggttgttaaaagagtggcaagcagggaattggattctgctgttgccattgttaggcctccgggtcatcatgcagaacaacaagagctatgggattttgtctgttcaacaatgtggcagttgctgcaagatatctcttagacaaaaagtgagtaacgtaactcctnctaccaattcccatatttgaaaaacttttagcctttaattaacagtttggttactgtattgacacctttgcttttctggtttttgccgtctg

SEQ ID NO: 140686 - DNA, 272 bp, Glycine max
  Clone ID: PAT_MRT3847_98048C.1
atcttcttcgtttacgagtatccacatcaccgcgttagacgcgatagtgaacgtgaattccctttttcaccctcgccgtcttcatcggactaacctggaaccctaacgacccttccaacaggctcaacaccgatccggcgtcgtcaaccgcaccgccctccgcgccggcatgctcgtatccgtcgccggttgtggcttcctcatgctcgccctcgtcaacgtcgcgcagatcaagctcgaaaccctcgtctgcggaagctcacacacttacg

SEQ ID NO: 140687 - DNA, 382 bp, Glycine max
  Clone ID: PAT_MRT3847_98049C.1
tagcttttaccagggacactatcttaatatcactcgaggcacttttacaccgaggcagagaggacatactccgcgttaggcatccagtgcatctgagtaaatcatactacggactagagactgacagcttacgtagcgcccacatacaaaagcttgcgatgagctacctatgaatcagctacgatgtgcgctaccaccgtagtgacaagagagtgttcatttgatcgtcatttcaccaaccccccaagccatatcagacagagcacacaaaggtagctccaccggacgtatagaaaacaagctaaccaacatgcttagtcatgatgaagaggtggccatcaaatcaagagtgtatgaacacaaaaccgtttggctcaatcat

SEQ ID NO: 140688 - DNA, 699 bp, Glycine max
  Clone ID: PAT_MRT3847_9804C.1
cacccagacttccacattacctcttcgaccattcttgcatcaacgttacacatcacaagattgaacacaagaaaccagggattaaataacaccgacttgccaactggagcagggttgagacctggttttgatcaatcaatgccccaaaatggaccaggagttgccgaccctcaaggtcggtcagaaaacaaccgagacagggttgcgaaccctgcccagattcctgggcaagctgacattcgacaagcagaaaggggtctgaaccctggatccatgaattcattcagttctttattattatggatcttaggaggtgcttcgtctgagggcctaaactcgtttttttccatgttcagagacgtgagagagcaaggacaagtttttaatgaaacacctggggctgcgaatgaaaaccctgagaatcaggataatatcgacaacagatagcggcggtgaacaagtggagagcttgttaatataggaaggaacaaaacaatgtacgtgatgtcatataggtcaacgacggtccaaatgaaaaagctcaacaaaatgtttgtataatatatattctttatagcctttgctttataaatgctaaaaatttatgcgagttttgttctgtactgaaacacagttttaccgaatgggagcatttggaagagtttatttgatcttataaaagaaaattatattttttta

SEQ ID NO: 140689 - DNA, 388 bp, Glycine max
  unsure (1)..(388): unsure at all n locations
  Clone ID: PAT_MRT3847_98050C.1
aaaataaaaaattaaccccccaattttataaaaaaaatactttaatacccccttttctaagtaacccaaaatatcctctatttaattaaaatttatctaattcacctatataaacacccctttcctttttttctctagcacacactttttaatccaatttaactcaattctccttttctaacacaaatattaattcacttttcaatacttatattaaacaaacaatgttacaacaacaacacatnttttcatttaatgttttcttcttttttaaaagtccctccccccattttccctcccctttcaaaaaaccaataattattttttttttaaacaaaataatcaccctaaccttttattaaaacactaaattccaattcccattccc

SEQ ID NO: 140690 - DNA, 218 bp, Glycine max
  Clone ID: PAT_MRT3847_98051C.1
gagaagctcaatgcctctcgttatgtggttttattcttggagggacagaaccttgaacaagagagtcttcaagtaatgagacggttaataaacctgtgcaccactaacaatacgtgaaaccatctgaagacgctgagcttatgctgcacacagacacatcattctgcaccaactggatgatcagaattgccttctaaatggattcataaatgaagagt

SEQ ID NO: 140691 - DNA, 450 bp, Glycine max
  Clone ID: PAT_MRT3847_98052C.1
tccacgcgttcgctctctctctcatcccctggtattcttgttcatcactcttctgttctcttttctcccctataataatatttccaacacaacaacactcagcagacaagtagccagaacaagaaaatcctttgacacattgatcacttcctttaaggaaacaaacatggaagggggtcacatggggtggctcctcttctgttgttgtttttctctacttttttttcattcttctgggtcacccagaagaaacttgcccatcatagcctttgaggatggctacacccccttgtttggggaccataatttggccatccatagagatggcaaatcagttcacctttcacttgatgaaagatcaggttctggatttgcgcctcatgacctttaccttcacgggtatttcagtgccctgaccaagctggctgctgattaccctgctggagttgt

SEQ ID NO: 140692 - DNA, 232 bp, Glycine max
  Clone ID: PAT_MRT3847_98053C.1
taatgttactacagttccagtcttcatgttaagactcactatacaggtgactatcttttcagagtggacagaagacgatgctgacagactggtatatatacaggcccttaccagcgatactgtattagctgtcccgatggcggagacatacaggctccttggggttgatgacaaagacgtagtgccacctcacacttatcttgtggagttgtggtctcacatagtgcagaag

SEQ ID NO: 140693 - DNA, 402 bp, Glycine max
  Clone ID: PAT_MRT3847_98054C.1
atttcccgtggtccccaccatctctccgcagtcatttaaatcatgctattttattgtatcggtttactctcacaaagagtctgtttgtttcctcgattcaattttccttgatatggttgtccaaatccaaccagatagattatcaaactcattctcactcattcccttcgtttgtgacggaaattggtctcctgcttagtcatatctgcatctgattttgcacgtggcgtacacccagacattctgcctgatctagttgggataaagtgtttccttatattgccaagacgagtttactgtgtggcgggagtgtttttagtttggaggcctaatatacttgtgagacagacagcttttcgactttgagtagttgggtgatagaagaaggctaaggttctttgg

SEQ ID NO: 140694 - DNA, 248 bp, Glycine max
  Clone ID: PAT_MRT3847_98055C.1
gtgacatgtgggtgatatctacagtagttgaattttctaactgaaatactgtatgacattctgaatgatctcaagctctctagtattatattcaggtagcatttacattcttccatgcgtgggggtgaaagaagtggttcgaatggtcgtctcaagaggatgaaaacttacgtgggcgtgcatgcgatctcatatctcgtcgctagtgtcgagtaaatgcagttcacagggcgtcttatatcaagttc

SEQ ID NO: 140695 - DNA, 178 bp, Glycine max
  unsure (1)..(178): unsure at all n locations
  Clone ID: PAT_MRT3847_98056C.1
attctttttttttggactncaatttttttcttggttcaacagattcatgttttatcagtacaaacagcagcccctttgattgcataccaagtctgtacttttacttaatcatacaaaggtattaaatgttcatgcaaatgctacaatgcaccttgggggggatagataccacaaccat

SEQ ID NO: 140696 - DNA, 284 bp, Glycine max
  Clone ID: PAT_MRT3847_98057C.1
tttttagtgcataacactggttattgtggcaacagagtgtttcgaaaagaaacattttcaaaagaaagagtgactgcaagctcttgctttgcgtgaaaaacccaatcagtggtgtccacttgtccaaaacaacatggtgaacacttcaaaattcgacccggttagagactaagaatctttgtatttcatccatacgagaaatttatggaaagctgggctgaaactctgagatgattgcccttgtgtttttggttcaaactttaaggtcttgcctctttcaaaac

SEQ ID NO: 140697 - DNA, 307 bp, Glycine max
  Clone ID: PAT_MRT3847_98058C.1
actcagtcggctgtgtcggtctatatgcactgagctcactggcaccttcatgattcaagatatatgggatgcaacgggctctcaagaccatgaagtgcccgatgaattaccacaataacccatttaacactgctgcctttcctacctgaactgcttttcactttacaatgcctacagcagcatggcccactgcacctactacctctgcagactactcaatctaaaacaccttcagcatgtattgcatatgaatccactatcacaagcgatatacctagcacacaagtataagttgctcccactacta

SEQ ID NO: 140698 - DNA, 102 bp, Glycine max
  Clone ID: PAT_MRT3847_98059C.1
cccgaaggttgcatgccaatctccgaaggcgcttcagccggattgcaaccatgtacgaggaacaaaggttgagagagccagaaggatggaaagagcgtgact

SEQ ID NO: 140699 - DNA, 283 bp, Glycine max
  Clone ID: PAT_MRT3847_9805C.1
aggggctcggaaattttatgattcattaccttaggattattaagtttaaaaaggcctgagggccttaggttttatcatcacatcatattttatacaaataaattttttttaaactcagttttctttttattctctccctttattatctaaaaccccataattgcaacaggtggcttaaatcatcactttggaggagctccaatttcaggattttttaattggattcattaaaattggatcagggtaaggaatccaaaaatgctttaaacaagggctagggctt

SEQ ID NO: 140700 - DNA, 602 bp, Glycine max
  unsure (1)..(602): unsure at all n locations
  Clone ID: PAT_MRT3847_98060C.1
gcctagtcaagcacagctgatagttcagatgaggcctttgatgttattcccaagtcttatgctgatccttcaaaattattgatatctgacaaccctgatttggtccatttagcttttgagaacaatggtggagattatgtaaatctcacttcaagaacacctgatcagtcattgactgataatggggcattaccttactctttcccagaaaggaatattctccttgttcctctccaccatcaccttcaccaccccccgctactcaaccttttccaacaccggcaccaccacttcccacatcaatgcctatacagccagatttagctcctcccttgcctccgcatcagatagatcagaatgtgaatagtgcttctacattgccttcacctcctcctcctatagtttccaatgctcctagtcaacctccaccgcctcctcctcctcctccacttcctccacgatctgtacaaactggttcagctccacctcctccaggacctgtacggacaggctcggtaccaccgcctccacctcctccaggatctgtacaaactggttcagctccaccacctccacctnctccaggtccagtacgaacaggc

SEQ ID NO: 140701 - DNA, 281 bp, Glycine max
  Clone ID: PAT_MRT3847_98061C.1
agaaataaattttacgacaattgtatgtagaatattggttagacatactatgcaatattggagtgaagagttattattaatggtatattatttacagttggtagtattttggttagaaaggttaagtttggacaatgtgtaaagtatgaagtaagtgaataagtagttttgggtggttgtatgaacatgggtatgatggtgggttagaactgttaatattggaattgaatggggaggtaaattgtattaaggttttgatgttgtgatgagttgttaaaatt

SEQ ID NO: 140702 - DNA, 710 bp, Glycine max
  Clone ID: PAT_MRT3847_98062C.1
acatagcgctaattgtgtcgcgaaccatttttcaaagcgacatgaggcagattctgagccttgtttctgtcccctgccacatcatacaagctgagaaagacatggctgttccgatgatgatctcggagtacctccaccaacacattggtgccgagtccatcgtggaggtcatggcaactgatggtcatttgccgcagttaagctcgccggataccgttattccggtgctgctcaaacacattcaacttgatattgaggcaagaaggtagtagatatagacgtgacgtgactccgttagaaaaagagaatctatccctgtgtgtgtttgtggggtgttttttttttttttttttgtattcgtagtgtgaaataacaactgaaatggggggaataagttcccttcaactgtttctctatctgtgtttgttgtattcgaacttgtggtaaaaccgtagaggtaccaagactcttgtagtgagaatcaaatgtcaatgtccctcattgtgttgcgaacatttctcactggaaaattggggagtggtccaacaactagaaaaaacacaacttgtgtaggactagtattatcaattattaatgacgtttaaatttatgtagctgtgataatcaagctaaggaagctttgagaattgatcttggactttgtcacttgagttttcttatggactttgataatagatagttattgagct

SEQ ID NO: 140703 - DNA, 476 bp, Glycine max
  Clone ID: PAT_MRT3847_98063C.1
gttagtgcacccatttgactttgtcaatagatcacagtctgctcatgatacatacccagctgttatgcacattgcttccgatgcggcatatacactcagtactgatccttggccttaaaacgttacacgattctctactgttccagtgacttgaatctaaagacaatgctatgatcggacacactcatactcaagatgctacagctttgactgtaggacatgagactagtgaatatactacacagactattgaccgtattgatagagtaattgacactctgccacgcatgtatcatgttagaccaagtgacactgctgcacgcactgtattgaatacccagagagggtctgatgccaagacagcatcgactaccactaaggaaacagatctgccttttgccacagcagaaaataaggatgaagccttggctgcccatgatgcttatgatgaaactagtggatcccttaacactgat

SEQ ID NO: 140704 - DNA, 437 bp, Glycine max
  Clone ID: PAT_MRT3847_98064C.1
ggctcgagaaaaaactgaatcagtcttgcagtgaccctgaaccagagctggtttggagttttcaaacagatcatttgatagataataataacatagcatgccaccaagtggaatgtattataacagtgaaagtacagctttcctgaatagatcacatgccagttgcgaccaatggaattcatttcactactgttcagccatcatgccaccagcagcgtgaccttatatgtgtacctgactgtttggagagatagaaggagctacttaaaaccctaaaattggtcattggtggaaaatgagttttaagtgaggtaccgtagtacttagtagagacttccttagcttatgcaagggcaaagtagtattcttgttagcttcagcaaggataaaaaagagattttgtatgcaaaaaacaaatcagattttaattcaacaaa

SEQ ID NO: 140705 - DNA, 263 bp, Glycine max
  Clone ID: PAT_MRT3847_98065C.1
gctttctgtgacaaatttaggacccatagaatagaaggtaccgacggagagcctcacatccacgcaccagagtttccaaagccatcaaatacccccccaaaccaggcactaccacctcccatcccttcccaaaccccaaaccccatgatccacaccagacacacttcaaaacaacaagctcgacgacgaagtggcaatacgaaagtcataaagacccgagatggacgggtgaaaagcccccccactctcgctggtgctttgga

SEQ ID NO: 140706 - DNA, 768 bp, Glycine max
  Clone ID: PAT_MRT3847_98066C.1
gatgtcatttgatcatctaaatgaactgcccattaatacctcaccagatgctaaaaatgaagtcgaggaacatcaagatatagatattcatgacctttttggcagcgaaacacctgaggatgaccataatgttgaagaaaaagataatgttggatttgacatgaatgttccacacactgatgatgagattgctgatgtggatgatagtggtgatgaggtggacaaaggacccaatgctgcagaagctctcggagaccaggtgaatgcagaggggagggatgagcagacatctacatctagcagtagtagtggtagtagcagtagtgaaagtggaagtggaagtggtagtgggagtagcagcaacagtgatagtgaaggcagtgatgaagactcggttcactcaatctgaagttatacaactgtggtttctttcttttccttttctcattggtcaagcctggcttagaagaaatttataagccatcctcagtgtgctgagggttataaataatgtgctatattttatgtgtatattaatcggctttaaatagttttgcgttttcattaaagcatgtgaagcaatttttaactagcctaacttggcaactttccatgggtgaaaaacttgctagctggaggttcatctttaggagacgaaatggatttgaattctttaatattgttattgttaagtggacaaaatttagatgtcctacaaaattaaaattgtcttaataatttatccaaaaaagttttgcattagaggtt

SEQ ID NO: 140707 - DNA, 1318 bp, Glycine max
  unsure (1)..(1318): unsure at all n locations
  Clone ID: PAT_MRT3847_98067C.1
ggctcgagctcaacttaatggagctgtctcacgcaatgtttaacccattgattgaatccaaattgctgttatttgggactggtgtctcttcttccctatcttctttttcccttagatgtgggtgtgacagatgaaagcagcagtagcaacagtaatggcaagaagcaagattgcgatcttgaagtggttgtcaaatgtgcagagaaataaaggttcttcatagtcatgggaaatggtgtgggtttcaaatagggtttggacttgaaacactcttggaccatcaattgagtgaaccaaaatttagttaactcacttggtgtctcttattctcctgcgtgaaccgaagcagaaaccagagtgtcattttatttttttgtcttttttgttgtggttgcaaaagggtattagatctgttatgttaactggtataaaacatgagtggttcaattccataggctcgaaggaaattatgctaatttggtgtggtggaatgttcgtcttggtttagtaaaagaaagaatgctgagagctcataaacgtcatgcctgccatgaataagtgcaaagcttgtagaaaaagttaaagagagaaaacagatatggaagggaatgaatagcatgaatgaattagctcacaaagttggttattacagctgattatatagttagttgtaagagtaactaactcacaactaactataactaactaagctaactctagttacatagagactaaccaactaatctaactctagttacataatgatccatgctaagagccctcctcaagcgcattgttaccactgtcaccatcgcactgccaccaccaccattgtcattaccgacatcaccactaacactactactannntaatcaccatcaccacttacaccaacatcactaactaccactcccaacaccaccatcaacattggcattgtcaccattggctcagatgttgttgttgttgttgttatcatcaacattaccacaaaatactcttatattaatgttaataggattgaaaacttttatatcttgaaactaaagattaaagaaaaactaaacctaaattttaaaaatggtattacatttttttaaaactaaaactaaaaattgattgcttataaatttttgaaacttacaactannncctacccccaaaaggacttcatgagcaccatggcaactcctgtcatctctctcatgaacacttctcatctaaagattgctctctttgatatcacaactggtcctcctcnnncttactttatcgtaaggtcccttttgtgcattgtagtcatatttgatctcactt

SEQ ID NO: 140708 - DNA, 502 bp, Glycine max
  Clone ID: PAT_MRT3847_98068C.1
cttatttccagagacgaggaaaacaaaaaccgatgactgaaccctaaggggaaaattgccgatgcggcaccgtaataccatttcccaattctagcactggtttctgaacttttcttccaccatggctaacaaatctcaagaagagcccaagactgctcctgagcctgatcggtggtacaatctcacccttggaccttccttcaaagatgattcctctaataaatactgcaccctacgatatgaatttaagccagcttcagttgataagactaagccaggattgctacgcaagaccaaagagaacagggtttctgtggaatttcagaacaaccaaataggaaagcccaaggtgacatttgaggggaatagtgaggaatacaaggaaaatgatgctgtattgttctttgatggtgagacacttcgattggagcggcttcatagggctgttaagcaactgcggcatctacgaatgcctggtgaatctgcaggtgctgcatctaca

SEQ ID NO: 140709 - DNA, 1737 bp, Glycine max
  Clone ID: PAT_MRT3847_98069C.1
cggctcttgatttgaggtgcgtttagacagaaaactctctcggtcttatttccagagacgaggaaaacaaaaaccgatgactgaaccctaaggggaaaattgccgatgcggcaccgtaataccatttcccaattctagcactgttggctggggcaaattcctcacccaaaacgacacatgtttggggggccattttgatttgaggtgcgttgagacagaaaacattaggccaccatagttctcttctctctcgcaatttccatctggtctcaatttttctcgtgattccatctccattccggtgtaggctcctttgatttgaccatcttctcttccgccatcatccattgaagagcagcaactaggagctgcaaaccacatacaagcctgattttcgcccctctctactataaggtttctgaacttttcttccaccatggctaacaaatctcaagaagagcccaagactgctcctgagcctgatcggtggtacaatctcacccttggaccttccttcaaagatgattcctctaataaatactgcaccctacgatatgaatttaagccagcttcagttgataagactaagccaggattgctacgcaagaccaaagagaacagggtttctgtggaatttcagaacaaccaaataggaaagcccaaggtgacatttgaggggaatagtgaggaatacaaggaaaatgatgctgtattgttctttgatggtgagacacttcgattggagcggcttcatagggctgttaagcaactgcggcatctacgaatgcctggtgaatctgcaggtgctgcatctacagttgtggctgctccatctggaccagctttagatcctcgatcatcccctgttgggaagtctgtaaaaccagcacctcttggcaggagctcatttccggctgtgccagttgaagtggaacgcattgatattggtgaacccgagaatactggaatcaaatctggttctaagaggtcatttgatcatctaaatgaactgcccattaatacctcaccagatgctaaaaatgaagtcgaggaacatcaagatatagatattcatgacctttttggcagcgaaacacctgaggatgaccataatgttgaagaaaaagataatgttggatttgacatgaatgttccacacactgatgatgagatcgccgacgtggatgatagtggtgatgaggtggacaaaggacccaatgctgcagaagctctcgaagaccaggtgaatgcactggggagggatgagcagacatctacttctagcagcagtagtggtagtagcagtagtgaaagcggaagtgaaagtggtagtgggagtagcagcaatagtgatagtgaaggcagtgatgaggactcggttcactcaatctgaagttatacaaccgtgatttctttcttttccttttctcattggtcgttactttttgcaaaacaatccaacacatgatgaattgaatgtgtttgtccgtcctggcttagaagaattttataagccatcctcagtgtgctgagggttataaataatgtgctatattttgtatgtatattaatcggatttaaatagttttgctttttcattaaagcatgtgaagcaatttttaactagcccaacttttcatgggtgaaaaacttgctagctggaggttcatctttaggagacaaaatggatttgaattctttaatgttattgttaagtggacaaaatttagatgtcct

SEQ ID NO: 140710 - DNA, 375 bp, Glycine max
  Clone ID: PAT_MRT3847_9806C.1
accacacgtccgaacggcattgaaaacacaatagatgtggcgactaatcaaggggagatacgagcatacggggtaactacattaaaagattaatgaaaagcctaaaactctacataatgataccgtcgagactgcaccaaacaaacaccaatgatactgagaaacaacggcattgtggatgatacaaaaaatcgatcaagaaaaattgaatcggatggaagaaacttcatcttaacttgtaccatgatgaagaattcaagactagattgtccactgcttcctttgatcaaggcgacactcttcaaataccacaccattcaaacactgccctatgatgatttctaaatgattgatattgcgaataacatgcacact

SEQ ID NO: 140711 - DNA, 872 bp, Glycine max
  Clone ID: PAT_MRT3847_98070C.1
ccacgcgtcggctcgaggcgaagaaagagtgagttgcagtaagagtctccaatccaatccatgtcgttgctgctactccctcaacctccgacacccctctcaacggtcaccttctccgccgccgcacgcgcacccttcgccgccgtcacgcctccgcgcccgagaacgctaactccgaaacccgcactctccctctctgccccaataacaacaacagcacccaataatgcaatccctccgaagaaggtcctggttcccatcggattgggcaccgaagaaatggaagccgttatcatgattcacgtcctgcgccgcgccggcgccgacgtcaccgttgcctccgtggagccgcagctccaagtagaagccgccggaggcaccaaactggtcgccgataccgacatttccgcgtgttccgatcaagttttcgatctcgttgctttgccctggcagggagggatgcctggctctgcaagactacgggattgcgatgtgctgcggaaaatcacgtgcagacaagctgaggaaaacaggctctatggtgctatttgtgctgctccggctgtcacccttttgccatgggggcttttgaaaaaaaagaagataacttgccaccccgcattctacgacaggcttccaagattttgggccgttaaatcaaatcttcaggtttccagaggactcacaaccagccgggggcctggaactacttaccagttgctttgtccttggcggagcagctatttggggactctgttgccaatgaggttgcagaatcgatgtttatgagaacagatgatgatcatgcagctaaggagttcaataaagttgaatggtctgttggccaccacacccctagtgtcctcgtaccg

SEQ ID NO: 140712 - DNA, 2197 bp, Glycine max
  Clone ID: PAT_MRT3847_98071C.1
ggaaccctgaaccgcccaagggtcttcatgaggtgacttcatgaattgtggttatcattggtgcagtgacggctcacttgttattccccggcgtttttgcggcagaggagctatcattggaagaaaagcttgctgagatgcatgaaacaaggcatgcatttgggaggacagctttgctgttaagcgggggtgcctctcttggagcttctcatgtgggtgtagttaaaacaatggtagaacataaactcatgcctaggataattgctggttcaagtgtgggatccattatgtgtgctgttgttgccactaggacttggcctgagctccagagcttttttgaggattcatggcactcgttgcatttttttgatcaaatgggtgggatttttgcaaggggtaagagagtcacaacattgggtgctgttcatgagatcagacagttgcaaatgatgttgaggcatctaacaagcaatcttacatttcaagaagcttatgacatgacaggtagaattcttgggattacagtttgttccccaaggaagcacgaaccacctagatgtcttaactacttgacttcaccccatgtggttatatggagtgcagtcaccgcttcttgtgccttccctggcctttttgaggctcaagaattgatggcaaaggatagaaatggagagattattccttaccaccctccttttaacttaggtcctgaagagggctccacaccagcacgccgttaaagggatggtcgcttgatgattgatttacctatgatgcaaccggcagaactattcactttacttcattttatacctaattgcatcaaccctcatattgcaccattattgcgattggcaaaacttggaagacccaccgtggcatacatgatggaagtgacagtgcatcttaaggagttgatttgcattcttggacaagaactaatactgctttgatgagttctacttcagcaaatatgttcgttgattttctacaaaacggaaggtgatgtgactgttgttattcccgcaactcttgctcagtacaccaaaattatacagaacccttcttatggagagcttcaaaaggcaaccaaccaagggagaagatgtacctgggagaaactttcagccataaaagcaaattgtggcattgagcttgctcttgatgagtgtgtggtgattctcaatcatatgagaagactaaagaggattgctgagagagctgcttctgcttctcaaggtttgtccagcactgtaaggttcagtgcttcaaaaagaattccttcatggaattgcattgcacgagagaattcaactggttcccttgaggaccttactgatgttgctgcctcaaagcatcaaggcattagcagttcctgtggaaccaatggcaaaacttggaagacctaccgtggcatacttgatggaagtgacagtgactctgaaagtgttgatttgctattcttggacaagatctggtgggcctttgatgagaactacttcagcaaatatgtttgtcgattttcttcaaaacttagacgttgataccgatcaaaacaataaaggcttagtgagtcgtgctaaccctaatgattttcagtatcgtagccccaggctcgcaacactggataggaactctgatagcacagaatctgagccaagggaaattggcaacagggttttcaatgtgtccagcatacttgtgaccgaaggtgatcttttgcagcctgaaaggatccataatgggattgtgtttaatgttgtcaagaaagaagacttgtcacccttaagtggtagcagtcatgattttgaaaattacaacattgaagttgctgaatgtgtccaagatgagtgtccagggaaggagatagatgctgctagctcagcttctgaacatggagatgatgaagaatccacagtagctaggtccttaactgaaactcaagactacaattccatggatcatcattcgggtatggatcagagcattgttgacagttagtttcaagtatcagttcttttccagtgacattttaatattttgttcctattgccctccatattgtaaatagtactcattctaggcttggaggagaatctctattcatgattttgatgggaataactcaccatttggtttactcttgtaactaagataaagtgattgtatacaaattccacgaccacacaaaaaacca

SEQ ID NO: 140713 - DNA, 148 bp, Glycine max
  Clone ID: PAT_MRT3847_98072C.1
ggctgcagcttatcatcagcatctcgcccaagagagagagagagagatgcgcgaaaatgaccgtagcgactgcgatgatgcagggatcgagctttgtgatcgattgcgctaagccggtggacgacaccgttatggacattgcttctct

SEQ ID NO: 140714 - DNA, 346 bp, Glycine max
  unsure (1)..(346): unsure at all n locations
  Clone ID: PAT_MRT3847_98073C.1
aatactggatgccacatctnangnatnnacaccccgcccttcttaaaaaacacggcgcccccaacaaaaaaaaantnnattttttcaacactagaatttgaacgctcttctcagggataatatgctctcagacaaagtacatcaaacattaaaatttccagcaaaaatttccagtaaaagaagagtgtcccaccaacattttcagctaaaagaatatttataaacactctactgacaaaatgctccaactatataatctgcgggcgagggccgggcttaatccatattcaactatctaattccatctcaatcacaaaaacctttactccactgacagtcaataact

SEQ ID NO: 140715 - DNA, 136 bp, Glycine max
  Clone ID: PAT_MRT3847_98074C.1
gggaccaaacggccaaaaatggctggggaaacaccctttcgggtagggggaaacaataacctttgtatgttggagggggtgacttactttggaagcttgaacaaggggaacataattttgtaataggaaaatgttg

SEQ ID NO: 140716 - DNA, 109 bp, Glycine max
  Clone ID: PAT_MRT3847_98075C.1
cgcgtacgcgtcacgcaattacacaagtcgcttccactgcactacatgtacctacttcgccgtctgtaacacacgttggactgctctttgggccccgtgccatcttccc

SEQ ID NO: 140717 - DNA, 320 bp, Glycine max
  Clone ID: PAT_MRT3847_98076C.1
gttttagttgttaattaaatatatagatagaaatccaaggaagaagatgaagcagtttgccgtccaaaacgtcgtcgctccatcccacgatgagattagcgtggtttgccccaagccccgccgcctcggcctcttcaacttccccgtgaacgatccccctgttagacccttctactggcatctcaggtataattaatttgttcttcttggtctaattctaatattgttcttgttattattattattattattcagctttgcgtactcttttttctttgcagttgccaggctgagccatgtgattcaaactcgtctggttc

SEQ ID NO: 140718 - DNA, 405 bp, Glycine max
  unsure (1)..(405): unsure at all n locations
  Clone ID: PAT_MRT3847_98077C.1
cgcgtcgtcacacaagtagaaacacaaactaaatcatggcgcccacgacgacaacgaaaaccgggtcgtgaaggtggatcagttaacctgcccacggcacacactgacgggaagtggtcagttcaagccgggaagacggacccccggggcgaccgacgggctagccggcgcccgtcggcattgcggtgcctgtcgcacaaccgaccatattaccgtcgacgaacaggtggaccatatgaatgctggcgcactgtatttggtaatgaagattgacatgcagggatctataactgcaggataatgggggtttgaccacgaccgaatttgacgtaagagaacaccttcgtgtgattgatatgagtgtgagaggtntgctttgaaggatttgggttcggaggttattta

SEQ ID NO: 140719 - DNA, 333 bp, Glycine max
  Clone ID: PAT_MRT3847_98078C.1
ggcttggaacctttgggctgatttatgtgcttgattgtcgtgagcaagcttatcgaccggcattacccggagctctagtcaaaagcccgtgcgacggcggcacagactcggcaggaaacacccatagtacgtggcgataccccgtaaccctggaagcctagccccaagtcaatctacccccctcatcatttcccctacccacgacattagtgaacacaacaaaaacaacacaaaaaaccacgtattggcgaacccataacccggacccgtaagaaaacgcaccgcaaacaacacacggaataagcacattagccccccccttctaaagtccga

SEQ ID NO: 140720 - DNA, 143 bp, Glycine max
  unsure (1)..(143): unsure at all n locations
  Clone ID: PAT_MRT3847_98079C.1
gcgaaaatgcgtntgatactgtagatttactgaaactatgacaaccatgtggacctcatgctgttcccaaaagctcaaaattggcattggttggattgcggaaacctttggccagtttcctggcccagacaattgattaaaca

SEQ ID NO: 140721 - DNA, 265 bp, Glycine max
  unsure (1)..(265): unsure at all n locations
  Clone ID: PAT_MRT3847_9807C.1
cctgggcacttcgcaaaaccagagtttcctcttacagcaactcactctcacattcccattgcgctatcttctctgctccaaagactcatactttcaaattagtctgcctccttagtcctgcccccaaacctttgccgttgtttttgactcacatcatatggttatgaaggatggtgctgaaaggcggtgaagtaagcatgtctgagaagaaaagggaagtgatggtggcgattccacatganggtggtgncgaatcttgatgcca

SEQ ID NO: 140722 - DNA, 267 bp, Glycine max
  unsure (1)..(267): unsure at all n locations
  Clone ID: PAT_MRT3847_98080C.1
cactcctgcacctacactgaccatgtggactatgtcggaccttgcgaagttgatcacgacgctgagcatggcaaagccgagctgcatcgagaagatcagagacgtatttgtcagtcgagtgggangacgaaaagtcaaaaaaatattatgataaaaattccttatggtgacaatccacgttgacaatcatttcagtaacaaatttgtccctccgtgccacgtaggctattttattattggtaacgcacgaaagttaacggcagaaca

SEQ ID NO: 140723 - DNA, 477 bp, Glycine max
  Clone ID: PAT_MRT3847_98081C.1
tcgtctacttaaacttgctagaggtactgacacagaaggcactatcaacgatacaccgctctgaaacatagcaagacttgattcgagggaagacattttgatgcgatgtcacggacctactaacatatggaggtggatcatgaagtgagacctgtaagagaattgtcgtctgtctggtcggtatattactgatgaggagcatcttactattgtagcgaaaaaaaacaatgacagtccgaaaagcattacggtacgattattctctacgttaaaaggatttcacctgcatttaagcttgcttgactatacagacggatccctttatatattgacacgtgccgagacaatacacacatctgttattgtgcgagcgtttaattatagaaatttttcgccttgacaggctacaggcccttattggattgcttacaacattcatgctctcttcaattcgagagggatacttgcacagtttca

SEQ ID NO: 140724 - DNA, 190 bp, Glycine max
  Clone ID: PAT_MRT3847_98082C.1
attatattgtttcatttttatttccattattgtaggggcttgttaatatttaaaggcaaggaaaattccgaaaagggcaccaacaggtgaacactaacacatccaaaggaaaaaccgttgaccaaacccggaggtacaccaggttcccaacaaggtttcacgcgatgcagaggaatcagggaccccggaa

SEQ ID NO: 140725 - DNA, 199 bp, Glycine max
  Clone ID: PAT_MRT3847_98083C.1
aaattaatcctattcattttttggttggttttcccattttacaaccgggggggggaaaatgaattttcattttaggcgggttataagcgggacaccaccaacaaaaggggttaaaactggcggttttccccagatatgcctgttccgtgcactataagactgacggaactaatgagggcgccaaaaactgtgggcattc

SEQ ID NO: 140726 - DNA, 514 bp, Glycine max
  Clone ID: PAT_MRT3847_98084C.1
tgcaatatgacgactcttgatggagttatattagcgttttgtaaagaaatgactaagaatgaaaggttatttcattacatatatcataaacggaaaactaattacataagtaattatataaattaaaagcaaaaatcaagatatttactatataggatgaaaaatatatttaaattgagataaactataacaccttataatatttataataacaattttttatttttaaaacatcattttttcccttttaattttttatatcaatatcatatgctatattagtggccatataattttaaaaatttattctgtccttaaaattgtccatgttgcattaaattcgtgtttgtgtgttacaaactagggttggcctgatggtagaagttagaatagatgcatgaaatttaagtttgactttcattatcatcattctaaaaaaaaaactcatgtttgggctatgttttctctaatgctttcttatatagaatagaaaatgagtcaggttctttgtttt

SEQ ID NO: 140727 - DNA, 455 bp, Glycine max
  Clone ID: PAT_MRT3847_98085C.1
attattttttttttttttgggttttttttttgttttttttttttttttttttcgaagggggaaaaagtatcccggtccctatttttcaagattccattcaaaaactaaatccttatccccatcaatttggattttaatctaaaaggaaaagacccgcccccgaataggtttggttttttaaaaagaggggatctcagcgaccaaaaggggttaagaaaaaataattataaatcccgttaagggcatttttattaaaataaaattaaaatttatttcattctaaaacattaaattttaaaaaatttattctaatttttaaggttttaaaaggggtaattttaaaattttattttaaatttggggcataagccttactattttgttaaatttaaaatttttaaaaaaagtaatttgattttataaacctaaaaatcctgtttttcttttttctattt

SEQ ID NO: 140728 - DNA, 294 bp, Glycine max
  Clone ID: PAT_MRT3847_98086C.1
aaaacatttttgtggggtgggacctcaatgtaaatgtccgttgccattaacaaggcctgggttttaactgatcaagcataacctaaggatcttgtaagggggggggttgctgttaaggacccatctgttcccaatggagtccgtttttggattgaggcctatcctaatgcttttgttgggctagagtaatgggttgccatcaagctctggtggcaggaatatttttaattttcctccaagtaagattgggacctccaaaaggcccctgaactccaagctttggtggaaggacct

SEQ ID NO: 140729 - DNA, 139 bp, Glycine max
  Clone ID: PAT_MRT3847_98087C.1
acgggagcgggtggtcgcacaggactcttagactccgccatggccacaacgacgactcacctacttaggattacctgtcagtgtctcacatagcgaactatgccccccttatgcccatgtgaaagacgatattgatgcg

SEQ ID NO: 140730 - DNA, 502 bp, Glycine max
  unsure (1)..(502): unsure at all n locations
  Clone ID: PAT_MRT3847_98088C.1
caaaggaatgatcacttttgtgacataaagaatcaacaatgggagggtggggaaaattaactattggctgctgaaattcaactatgcattgaagcatgcatgatacactattaatatgaaggacaacacaaaagcagatttgtacaatctgagactaagcaaatattcttcagccatgagaaattgagaaatatgtaatgttaaatactagataggtaaatggtgggacataggatcatgcacactactgaaagctcaaaggggggatcagcaaaacctgaatgcggctagaggctgctttagatggggacaggggtatggcagtgattgaggtggggcaaaacgggcacgggccatgagtggggcgggactnatgaagggcaccaccttgagtagtagagggaggggaggaggatagagagagggagcaatgatgagtgggaacacgagcccgagtgttgaggcaaggccaaaagctcgagttgtgaggtccataactact

SEQ ID NO: 140731 - DNA, 125 bp, Glycine max
  Clone ID: PAT_MRT3847_98089C.1
ctctagcctatctcttggaggatatgcttgatatctatgcggccatgaataatgggtgtcgcgtgacttggttacctgttctggactatttctgataactcggactgcgctgatggatatcgtcg

SEQ ID NO: 140732 - DNA, 404 bp, Glycine max
  Clone ID: PAT_MRT3847_9808C.1
attgtttaacaagatgataacagatttataagttttctgttcgataaagtgctgcaaaagtactacatacttgaactatacttggattgaaacaggatggttacggcatggattgctttacgattgaataaaccctggaattacccacgaacgaaagctataatgaacctcaatagttatgcctcaactccaagcccacaccgagcagccattgatctttggtcactctatcgtaaccacatcgtttgaacagggacccattagctacctttgagcagcctttgtaggctagtgtgaacccttttatacaactgatacctgaatgagccaagcttaccacatccttgccaaaaatttaacaaaaattgtttgcaagcgggccacaatttttccatgttacctcc

SEQ ID NO: 140733 - DNA, 577 bp, Glycine max
  unsure (1)..(577): unsure at all n locations
  Clone ID: PAT_MRT3847_98090C.1
ggctcgagctcgagccgctcgagccgaatcggctcgagtgtgatttggcctcggctttgcatgccatgggctaggacgagagggctattgaggtgtttcagaaggctattgatttgaagcctggtcatgtggatgcactttataatttaggtgggttgtatatggatctgggtaggtttcagagggcttctgagatgtatactagggttttggctgtgtggccaaaccattggcgagcattgctgaacaaggcagtgtcactgctgggagctggggagactgaagaagccaaaagagctttaaaggaagcattgaaaatgacaaatagggttgagctgcacgatgcaatatctcatttgaagcagctgcagaaaaagaagaccaaacctagtaatggaggtgcttctggggaggcatcgtttgttatagttgaaccatctaangttaaggtagttggagaaaagactactgcaagacaggagctagccactgccctgcanatcagagcacttcagagggttactagattgagtcgttgcagcgtggagcttttgagaaggagatgagcgaacgtgat

SEQ ID NO: 140734 - DNA, 1617 bp, Glycine max
  Clone ID: PAT_MRT3847_98091C.1
tatcaagctggacccttcttatgtcagagcctacaatcgtttggccacaatatatgtcaggttgggagaagcagaaaaagcactagattgcaatcagtcaatcccatatgttgattcaatacttgctttccaagctcaggctcttcaaaatcaccttaacaaatgcatagaagcacggaaagtcaatgcgtggagtgatatactaaaggaaacacagtttgcaatatccttaggtgctgattcagctccacaggtctatgctttacaaactgaagccttgctgaagctcttaagatatcaagaggcctatgtcatctacgataaaatgccaaaattttcaatttgcttggtgtggagcagatgtttggcccagctcgcagcgcttacctgttggtgataggctcaatggtttacttggcatctggcaggtttgaggaagctgtggcatcaactcagcaagcagcttaagttgatccaggcaatatggaggtgaatgcaatcagaaggaaggccagagctgcaacatcagctagaatgagcggaaacttgctcttcaaggcttcgaaattcatcgaagcatgtgccgcgtacaacgaaggactagagcatgatccacacaactcagttctactatgcaacagagctgcaatgtcgttccaaacttggtcaaaatgagcaaagcaactgaagatttgtgacgcggcactgcgggttcggccttgctggagccaaccacgggttgggagggcgatctgctatgccgtgttgcagcggtgggcagcgcccttgcaagactatgaaatgctattaagagaaaggccaggggatgaggaagtggcaagggctttgtttgaagctcagctccaactcaagatgctgcgtggtgaagatattaaggacttgaaatttggttcaaacttggtttccatctcaagtaatgatcggttcagacattatgtaacctcacctggtatggctgtggcgctttttaccaacaaggcaacccacaagaaagtgttgcttgtgttggagcaaatcagcaagagattcccatcagttaatttcctcaaggtggaaatcgaagaccacccctacttagcaaagtcagaaagtgtgagctctatcccagccttcaagatatacaagaacggatcaagcgttaaagaaatttcaggaaacaaccacgagttgttagaaagatcagttaaattgtatagcagctgagatcattgcacttgaataacctcctcaaattgtttctccttcataaattagttgatcttgcttacagggcaagaggatgagcattgtaccactgtagcatgtaaaaaatgttcatagaaaaatattctgtgttagtaatagattcttttaatctattgaatgttccttcaattattcctatgccataacctaaacaattgcattgtatttttctttttttaaatattacatgttcataacaagaatgttttctcagagtttgtccttgtgaattactggttgtaaaatgatagaagtaacataactgcgtgcgttggagaaactttgtggaatatcagtggacttatgttctacgcttgttgttggggtggatctaagagtttctatcctttc

SEQ ID NO: 140735 - DNA, 1154 bp, Glycine max
  Clone ID: PAT_MRT3847_98092C.1
ggttttccccccgagggaagacgcgagagaaggagaaggacgaggaggttgaggatttgagtttcgatggctccgggttgaactatgattctgatgacttgactgagagcaattataataatgtttctgagggtaatactgggaagaatggtggggttagttccaacgcgaacagcaccgtcatcaccggtttggatcaaaaagggaagaagaagggaatgcctgctaagaatttgatggccgaacgacgccgtaggaagaagctcaatgatagactctacatgttgaggtccgttgttcccaagattagcaaaatggacagggcttcaattcttggggatgcaattgagtatctgaaggagcttctgcaaaggatcaatgatctgcataacgagttggaatcgacaccagtgggttcttcactcactcctgtctcaagtttccatcctttgacgcctactcctcctacgctgccaagccgaatcaaggaagaactgtgccccagctcattgcccagccccaatggccaacctgctagggttgaggttcggctgcgcgaaggaagggctgttaacatccacatgttttgtgcccgcaagcctagtctgttgctctcaaccatgagggctttggataaccttggattagacattcagcaggctgttatcagctgcttcaatggatttgctatggatatttttcgagccgagcaatgcaaagaaggtcaggatgtccatccggagcaaatcaaagcagtactcttggattcagctggctacaatggcatgatgtaactagttttgacaagaaacaaactggtagctgctatttcacagtcaatttggcaagttaaatcagaatcagtttttactttgttatgttcacaattcaagtgtacgatactagctctggtaacttgagttaaagttgaggtagaagaaattttcacatgaattttaccccctgcagcggcagttactatttggtacctttcacttgctcatgtcgaaccgaatcttgatgctactacttcgagttcaattagttcagggacatttctgaaggcgcgttttgacgtgaagtttgtatttatgtttgtcgaacctattgtcctctttatacagttttcgccaaggacaaaactttaaagcaaa

SEQ ID NO: 140736 - DNA, 425 bp, Glycine max
  Clone ID: PAT_MRT3847_98093C.1
agttggaacggtgggaagctgctattcaagactatgaaatgctattaagagaaaggccaggggatgaggaagtggcaagggctttgtttgaagctcagctccaactcaagatgctgcgtggtgaagatattaaggacttgaaatttggttcaaacttggtttccatctcaagtaatgatcggttcagacattatgtaacctcacctggtaagacacatttggctgcttctgttgtataattgcattaatatgagtaccacaaatacactaacacttgtgagtgttaattcaataggtatggctgtggcgctttttaccaacaaggcaacccacaagaaagtgttgcttgtgttggagcaaatcagcaagagattcccatcagttaatttccttaagggtggtttattttaatgttgttagaattc

SEQ ID NO: 140737 - DNA, 232 bp, Glycine max
  Clone ID: PAT_MRT3847_98094C.1
atctgagaatgccatgcctgttgctacaaataatccctatgaaagaggtgttagtgacagtgtctcaaatccttgtctatacaaggaggatgataattccatatcaacaagtctcgcctacaatgaagaggttgcgaatataataacaatggatggcacatatgacaggacagataacaagtttacatcaagtattcaatcctataacaagggaaatgacagcttatctata

SEQ ID NO: 140738 - DNA, 473 bp, Glycine max
  Clone ID: PAT_MRT3847_98095C.1
cccgcgtccgccctacacttagaagtgcataatatacatgagttttctcgctttcataaccataatccgctgcaaagccatactcccattccactggaggatctccgagggagtcctaaccttccatttcgagggcgggctagacgccgccccctcctccgccgccgccgacccttccggacccctcatcccgcacgagtgctccgtggcctcctccgcggtgtctaacggaggccctgccgatcccaccccctccgcggaggaccctgagtgccgctgcagctacctcggacggagagacttccgtgcgacgatgagccggaactgactgcgcaaacaccgccagaatggtgacacgcgcgggatcctgggacaatccatagttacagtgcgccggagtgctcggtggatcagatctacggaggatggcagccacaagagagtgtggacttacacaccaatgataacggaaa

SEQ ID NO: 140739 - DNA, 349 bp, Glycine max
  Clone ID: PAT_MRT3847_98096C.1
atcagaggtaccaactttatgtttgtcaatttccttcttgcttcattgtttgcagtggggagcgaacaattggttagtgtgtactagttttcaatcacagatgtcatactatgatgcttacacgacatatagtacaatctattactgtggatatgcatctaatataaaggatactggaacctggagagcttgcccctatatgttatgaaacgtatgatatgagagattgacttattatgggatgagcacatacttggtgctgtatttgatgaaccagattaatgactataccgctactgcttgcaacaatgtatgtaattgcaatgaaacttgctatatcacaccattg

SEQ ID NO: 140740 - DNA, 458 bp, Glycine max
  Clone ID: PAT_MRT3847_98097C.1
ctagaagcagctcacgagagggaaaaggagttacttcatgagataacagagttgcagtggaggcttatctgtacccaggaggagcttcaaaaattgaaaacagaaaacgcccaggtgtgattgccttgtggaatggatgctttcaagtggatggcttggatactcaattttaagttcttcacggacacttgaaaaattgaagtgcagaaagaaactagaataacgaccatacaaaatatctagactagatatgaagcggtatgctacttgtagttttttttttttaataatctagatgatataaactttactcatagttttctcgttatagcagattcattgttgataattttgtttttgtaaattatttttagcattatttcttggttgtaaattataatgcacatggtactttctggtgcaatattcttttgagattaaaatgctgagatttcgat

SEQ ID NO: 140741 - DNA, 426 bp, Glycine max
  Clone ID: PAT_MRT3847_98098C.1
gtggagtacggctgcgagaagacgacagaagggaatcatagtaatgatcatcaacaaaaactaatagtaatgatcatcaagatggacataatatgtcaaaatgctttttgaacaaaagtatactccattattgccttaattctaagctaaggcaactccttaactacacagggcatgcaacaagacttaacagtagcaaaatctaagctaagctaagctaaagtggtaaatcgcgtcaaatagttatgatcacataaaaaatcgcacgcctggttcttttaaggtttcttcaacctagagaaacagaatctggcgctttaggctataaactttcaacactattttaaaggtcctatagagaggctggtagaacactttccaattttcaaggttcaacttatctataataccattaaaactcaagca

SEQ ID NO: 140742 - DNA, 406 bp, Glycine max
  Clone ID: PAT_MRT3847_98099C.1
tcacacattcaaaatttttatatataattttaaaaaaagcaggggaatggaagggccccccctcattccttgataaaatatgtatatattcactcatacctgttatatagcgactttaccataaaacatacatgcttagttactataaaaatataaacaagctgcctggttcaaaaatccaactggaaaatagggagggcaaagtccaaagttgtcaactcaaacccaacccattgaaactgttttccaaaaaggaccttttaaggctgagttttttttttttgatttggacaaaaagagggtaaaccccccctgaaaaacttaaataagggccccttttcatgcctttattttaacaaccccaataacttggatgaaaaagaacctgggccccaaccaaaatttt

SEQ ID NO: 140743 - DNA, 406 bp, Glycine max
  Clone ID: PAT_MRT3847_9809C.1
cgcgcgccacgactgatcaagaccggtaccacggtccgagacttaactgtcccagagtccgaccgaagcctcaccctagtccgagcggcccgccccctttttttatttattttcttgtttacttttattcttttgtattttgtaattttatttatgtatttactcacgctatttgtttaattctagatatgctttgatctcaacaatgaagaaagaacaaacaataaacatcaagaaaaaggccccaaacaaaaaataacagcaacccacaacaagagacaacaaaaaacaaaaaaaaaaaacaaaaaaaaagaaaacaaaaaacaaaaaacacaaaaaacaaaaaaaaaaaaaacacaaacaaaaaaaaaaaaaaaaaaaaaaacaggacacccaaaagaagatg

SEQ ID NO: 140744 - DNA, 319 bp, Glycine max
  unsure (1)..(319): unsure at all n locations
  Clone ID: PAT_MRT3847_980C.1
cntangncgggnttcgnanctgcgaaattcggnnngntgagcantttgtntgnnnncntgtgatgccngagttgnntgtggaatcccntctngatttccgctcacaattatgtgcantagcntttntaatgagatgctcattngatatagctatgtaanattactgcgccaggctaaagctccaagtatgtnttnacaatccttcaaaaattttgtntctntgngtgtgtatggtgatgntaacttaattagtgttcatgaatatgncaagccttactttagnggntctaaantgaaaagctttctagctggtcataac

SEQ ID NO: 140745 - DNA, 296 bp, Glycine max
  unsure (1)..(296): unsure at all n locations
  Clone ID: PAT_MRT3847_98100C.1
ttcccgctctccctcgcgctccagatcctcctctccctcctcctcgtctccctcccgaagttctcgcagccgcagccntnccccacagcgccgccgaagtcccgntgatgcagctaggcgaggtcngtctcctccacatcaatctaagnangctnnacttcccccaaggnaaacttctcctgtaagtgaatncactngntnttcatgtangaaaagntcaagcangaatgtccaatgaagggnatttnaaaggaaatttncagtnattttggagcanttnanancgtaganatngc

SEQ ID NO: 140746 - DNA, 152 bp, Glycine max
  Clone ID: PAT_MRT3847_98101C.1
ataagaagtaacagggcggtttttattggtttctagttgatgggtacaactgcaaagttttttaaaacattcctagcggttggttggttggttttggatcaaaagggccagaaaccgaaggttttgttccttcaccccgggatgcccaaatt

SEQ ID NO: 140747 - DNA, 464 bp, Glycine max
  Clone ID: PAT_MRT3847_98102C.1
tttttttttttttttttttgaattatcatatacgcatctaattgaagcactaatgtcattggctagttcaaggactcaatcagatcaatcatatatgtgcacaatattgtcaagctctacagttattgcaaagagcatcaacaacactattcaagatagttaattaggactgcatacatataataactagtggaaggaactcttcaataatgcatcgtagtggccataaccatgatagatcactcgaatagggttatccttcccatactcctgaccgtattctgcaataactttaaggttactcgaactcttatcctgcatgagcaccgttataggcatctgtaagacatgtgaggacatgagaagttcaggttctcctccccatatgtgaggctttcgcatctgtactgtataggtatcaaagtcaccttaaagaaaccactcagtgtctaccctcctcttga

SEQ ID NO: 140748 - DNA, 284 bp, Glycine max
  Clone ID: PAT_MRT3847_98103C.1
tttttctaatcaatcattcatttgggtctagaatgtggaccaaaaaaaaaatttatctagaatgcatcaattattatgcatttaggatatagattaacctcagacaaaaaatcaggataattttttgaacaagcttgactaaagattataatgttctattgataagaaattgaatcaagagaaacaaaatattttaattccgagttcaatattctaaacatcacccttgactttgtgaaccattttgtacaaagaaactgatggctttaagcctgaatttatca

SEQ ID NO: 140749 - DNA, 564 bp, Glycine max
  Clone ID: PAT_MRT3847_98104C.1
caggataaatgaaaagctgcttctaacataatgttcctccagtcaatggcataaattaatagtgttaatctttgtcgtgaattaatttgttctacatatgctgatgaaacattttttgtgaaatgaatattgcatgcgttgtctcaatttcacaacattcgaatggaaagtaacttatcagagtgttatttaatttattagagagaatcaccctattctgggaggtgatgaatttattggagtggaaaaaatgagagataaaaagaaaagagaaaaagaccgatagagaaaatatatttttctatttaattattatgtgaatagagttagaggatggccgtctttatcacgtatatatatggtaaaaattagaagttaaattatataactatttagaaaaagaattcaatgtttatacttgaaacacattatagtaatgattttaaaatttatatttataatgaactttaacggtgttaaaatataattttttaatactgacaatatataaaaataaactcttaaaataattacgtaattttatgtttttaccttcgttataca

SEQ ID NO: 140750 - DNA, 164 bp, Glycine max
  Clone ID: PAT_MRT3847_98105C.1
gttatgtccacgcgtcacggactgccaacccaatatagacattggatcctaagcagcgtgaactatggccaatggggagcgaggtctgataccacacacgaattctgctgatctatggtatatagaagatcacagggtgcttgatcagtgttctcctacgacgg

SEQ ID NO: 140751 - DNA, 599 bp, Glycine max
  unsure (1)..(599): unsure at all n locations
  Clone ID: PAT_MRT3847_98106C.1
gtattgtattgtatcataatatgaagattctgtatgtaatgtgttgatatcttcatattagagtcaacaccttttagttcattgtcttgtaaattgtaattttgtgtattctaaggtaataccgtaatatatatgtccaattgacctataatttgatgagtaatgaagttataattttcataactatttgaaaggtagtcaaaaggtcattatgtgattagaaaacattaatgtgattttgtaaaatcaattatggctataagagagagttcaaagcaatgtgatttttgtttaaataatagatataaaaaatgattttgcatataatgttgattgaatatttttaatcaattttgaatttgaaggtgtgattctaaaattggttttaacgtctatgtatacattttttctattataattttattttgatgtatacattattatgtactatgtacaattaagagttactcttaagtaatttgttacaggtggtgccctctcacaaaattaggttcttatcctcaagcacaaaccatgatacttattatgttgcatgtacctcataagttaatatttagccgactctatttgntctaatt

SEQ ID NO: 140752 - DNA, 477 bp, Glycine max
  unsure (1)..(477): unsure at all n locations
  Clone ID: PAT_MRT3847_98107C.1
gaattcccgggntcggacccacgcccgtccgtaccggcnttgcgagaagaacgatcagaagggggagagtannnagttggtgnnnaagttggattatttgtggtgagtattgagagannngtttcgtnnttaataccatnnngcattcnnaattatnnntaaacccttatanntgttttgggttnnntttttctttcnnttctggannaataagaaatgttttcattttcgtcgannaaattaatangcnttttannatttnntttagagnnngagagaaattatangnnaaataannnattttatttatttctttcnnaataannatatgtntnntggttttgggttttnntttttttaannaaaaaatattattattnnttattccggtggcttattaagttaccaagtaatttaatttgaaggttnnaccatttaccaaccgtgttgtaagtcgtaaaagcatgattaaagcga

SEQ ID NO: 140753 - DNA, 427 bp, Glycine max
  Clone ID: PAT_MRT3847_98108C.1
ctcgagccgaatcggctcgagtacgacagaaggggtttccagctctgattacgggcctctgtcaggtctacagagtgcctgtcacccccaacagggtcattaggcccccattaaccaggctttcatcaagaagtattgcacccccaggcaggcatagggcgagacaccacagcagcctgaggatggccggcagtgggcaacagacgcactgccgccacctcaagagcacctcagctcattcacaaaaaggttagagcgttgcctatgacacatgaccgaccaataggcgaccaagtccaaagccaaaggtaagcaaagtactaggtccatgaccgacaagtcatcaggtgtccagctcaagacgttaaagaagcgctactaggaggcaacctagtaacttttaaatttctgctttttatttgatcac

SEQ ID NO: 140754 - DNA, 252 bp, Glycine max
  Clone ID: PAT_MRT3847_98109C.1
ttaaaaagttgaaacctgcctgattgcattgattagaccggttttcattgcacaaacatggtttattaatgacaactacaaccccatcacggactctccaaatacataactgaaacatactccactcggtgaaggaatcagattccttctattgcacatttataaaaagccagggacagttcttcaggaaccacagagcccttagatagagatactcggtgggaatgcccctgaaaagcaaacccatccccc

SEQ ID NO: 140755 - DNA, 1153 bp, Glycine max
  Clone ID: PAT_MRT3847_9810C.1
aaacatgaagaatggaagattcccccaactttgaagaaaatagaagttcacaattcaagggctagggaggcaaataaaagatgtatagtgtatttgattccacatggcaaatataatttttcacatttagggagaacttaatagttatagcatccacatcctagacgcaatttcttatttctcaactgttttttcaaacacgtataatggtgatcaaaatagaggtttccttccatttagcatccccaacaattgatcaataactttgctcccatcatcacgcaagccagaatgcatgaactcattagttatccatggcctaatccctgctatttgagaagctgtttccatggccagcttaaaattcacgtacaagtcttcatagtacacagctgccgcaacaggtaccttgttgttattcagaacctgaacatcatataatgggggccaatccttcttctctgccaatatatgagctgcctctttgaatggtttcaatgcatgaatctcatcaaacatccatgggaaaatcatctctcctgtaaaaagtacaggtagtctttctctggcagctctaattgcatcaaacttgtctccaactgcagtccttacactattagcagaccatttattagcagaaccctgacaatagatggattcatgtagaagagcatagagtggattggtatcaaaatttaaccacttctcaaaagaacttaggaagttgtaacttattctctttggtgctcccggaacaaaagtaggatcccacacgctctcaaacaaatagtgcatgctttcgaaaccagctctggatcctaagccagatagaccaagagtctgcagccctcttggggttaggaagccaccagatggaagagccacccctcctccttcttgttcagccaaataattaacaagcccacgcgtccggttaggatcccgccggatgctcgtgccgccctccccatcttgatgtatagcttgctcaaagcctgctttgtacactgaatctgcaggacatccactgccaatcggaggaattcctccagttataaggacttgcttcagtccttgtggtgcaaaactcaaatatgtgactgcacaaaatccaccatagctctgtcccaatattgtccaaggaccagcatcc

SEQ ID NO: 140756 - DNA, 665 bp, Glycine max
  Clone ID: PAT_MRT3847_98110C.1
actttcatcagctcccggtctaaagatcagttttgagttattcttcactttcttgaaaccaacaggaagtgggtatagtatttccttctatatcattttcaaagtgtgttccacatgcactttttgtaggattataatttgtggttaatattaagtccgcacaactagttgtcacaatttttatgggtttaaccatgatttagcagttctaatcaggttttgaaatgcaacccaaactctcaaattttttaacatagacgaacaatttttagaagtgtcgtgtttctttagcattttaaaaaagcaatgacaattgtatcaataatgcttttgttctgaactggtatattgggtatctgccaatgaccaattcctctggtctaactgcaactcttcttctgctggttacacttgtcaagttgtctcttctcctactggttacactttttttagatgtttatttgctctctctgtccctctatgctgagcttacatggatacagtgttcacaaatgttctaaattaatttgactgcattgtctctccactcttccagaagttattatcgatgctcgaatcctggatgccctgtcaaaaagcatgtggaaagggcctcttatgattcagaaactgtaataactacctatgagggacagcatgatcat

SEQ ID NO: 140757 - DNA, 257 bp, Glycine max
  Clone ID: PAT_MRT3847_98111C.1
tattgaagctcccttatatggaagccaaggaaacaaaagaagaataaggaggtggagcttgttttggaaaccatggataggaaacgtcctagaaagttaaacttgaatgcaccccttttgtccacacggcgtctcggtagtccaaatgttgcagatacttcatgttcatcatattcagttggagcagtccaaaatacaagtgaaagggttccattttcttgggagaaagcaccaggcaagccaaaagaaactgagag

SEQ ID NO: 140758 - DNA, 406 bp, Glycine max
  Clone ID: PAT_MRT3847_98112C.1
gattgagtagttgagttgtttttttatttttattttgacattagaatcttatagtagcacaccgattgaaatgtaaattacacgccataactctctgcgtatgttttggtttagaataaatagcctttgtaatcacgtttccgtgtaagtattaaacttgcccctttctctaactttatatagctgtagcagcatagagctcgttctgaactctttgtttaagctttctattcatttttatttctagcacaagtgtccttcacccctttcttttcatctgccataccttttttatatctgagaaatctactactctgcatagagcactaaaggatcacttttttttttccctttatcactatgtggagcagggaaaatttaaatgatagacgttattctttctcat

SEQ ID NO: 140759 - DNA, 934 bp, Glycine max
  Clone ID: PAT_MRT3847_98113C.1
ctcaagtgtggtggtttcatccaggccctccgcttgaaccacaccatgagcgatgcagctggtcttgtacaattcttgaacgcatgggctgaaatggctggaggtgcaaagagtccttccattgcacccgtgtggcgtagggagcttctaatggcaagagatcctcctcgcatcacatgcaagcatcacgaatacatggaattcgtagacaccgagatcgaggaaggaagccttactttgcatgatgacgacatggttcttcgatcattcttctttggaccttcccaaatagcttcccttcgtcgcttggttccccattactgtgccacgtttgatctcatcacagcatgcttatggcgttgtcacacaaaagcattgaagatagatgcagataaggatgttcgaatgatggtcgccgtcaacgcacgtgctaagttcaatcctcctttacctgttggttattacggtaatgccattgcatacccagcagcagtcaccacagcagggaagctttgtggaaatccatttgggtatgctgtggaattaataaataaagtgaaaggtaaggccacacaagagtatatgcattctgtggcagatctattggctattaagggacgatacataccaagaatggtgaggtctcttactgtgtcagatttgagaggttttgatcccagacaaattgattttgggtggggccatgctctctatgctggaccagctcaaggaggccttggaccctttccaggagtaacgtttatcactccttttaagaatgcaaaaggagaagatggtttagtattgccgatttggttgcccacagaggctatgaataggttttccaaagagttggatggcatgtttggtttcatttgtagctcattatgaaaatattcctttttcttttttggaatggaaacaaattagaaaa

SEQ ID NO: 140760 - DNA, 1703 bp, Glycine max
  Clone ID: PAT_MRT3847_98114C.1
ctaattgcatccccccatcaacttaactctgacccattctctctctctctctctctctctctctctctacacagacaccaacaacaaatggcacacacaatgaaagaagaaacatggaaactccacgcatccatcatgccatcaaaaccaaagagtccacaccacccaacccaaccctctttctctctcatcaatggcccagctggaccaaaatttatgtagaagaacgaaaaacagaactgaaacaaagaaggaaagaaagaatgggaaaacaaaagaaagagaagttagatgtgttcaaatgtcctccaaccaaacccaccttacatctctctttctctctctctctctctcatcaaaaccatgttccccgaattgcccttctgcaagcccccaaaaaatcccatcttcatcactggtctttcaaaagaacaatatttttcaccgagttatgtgggctttttggatttctttgtctcggtcagagtcttctcacagagaaaacaggaaagcgagaaccttcttaccccttcacctcttctctctttcttgggcctctcttttcctatttctttctttctctcacgtttcgctccatcttccctcacccctcaccccaccccacccaccttcttctttctctctttctccccttttccctttagtcttcgtttgttcttcccttttgggttctcttgtttctctttgatctcatgaagaagatgaaaggggttgtctccttggaccctccttatgaggtatatcaggatcagagggccaggctgaggcaccagagtctcttgcaggactatgaagacctgcacaaggaaacagaagccatgagaaggaaattgcaggctacgaggcagaaaaagttgatgctggaagatgaagttagatttttgaggcaacgttacaattacttgctaaaacaccctattctaaagcctcatccaaagcaagttgtaaagccacaaaagctcaaattgcaagcacccatcatctcgaagggaaagaattacagcaggaaggagcctactctgcgaccccaccccacatctcatttgaactcaaatggaaggatttccaatgtggctgaagccccattgaaaaaaactggccacttgtttgatctaaaccttaatgctaggagttctagtaaaaaagatgcttcctttaacggttctggtccaccagtgcttgagttgaatcacaaagaaaggattcacagcagcaaggaagccacaaagaagagtgtaactccatttttcgacttgaaccagatttcgagagaagaggaggaattgcaggggaacagtgaggccatgaggattgaagaaccaaagagaagtacacaaagagttgcgactgacgagcagcacagcgacatcaagctctcggctgcctgtagaagtgttggggatggatcaaatagggcagggaagaggaagatttcatggcaagaccaggtggctttgagggtttgatctatatataaagtacagtagactgaatctataccctttcagaacgtgtattctgccttgatagtatgcaacagatttttaaccatttctagttttatgttttactttgtaaagataaaatataccttatagaatcatatgttcaatatatatattatatgaagtggagaattctattcccctaaatcatcatatctttctcgcaaaaaaaaagaa

SEQ ID NO: 140761 - DNA, 752 bp, Glycine max
  Clone ID: PAT_MRT3847_98115C.1
cagtcttcaaatatcttttattggaaggccatgcattgccttcatttattgtatttgaaatcactgtacagttacttttgtgaaaacactgcctgcattttctagtacaaaaaaaacctaaaaattgtttcaggaatgtagagaaatatccaacttaaatagcgaaaaaagtgcaccataattactgctgcactgcagtcatttctgcatttcccatgtttcttaaataactatcttgtctgataacacacaatataaagagcaattatgaaaaacagacatttacatatacttctaaagtcttattgagaataccctgttggcatgggatagccaatcataggcgcagcagctgcggtagcaggatatgcatatgcctgttggttcataccattgtgcatatttgcaacattacttccatattgctgagtgctatcataaccgttctggtaagtccctgttggattaccagtcctaaaactggtctgtatgccagcagatacaaaattacttccaaagctcccattggtgtaatttgcagcactgtaaacaccattctgagttttagccccaaaatctctcttaagcagattagagtagcctctgtcatagttttccctgtctctaaaggtattaaatccaccccttttgcctgcagagtatctgtcacgacgatcgtccttcatgcctcctctacccctggaacgacctgaacctctgtcttcgaccaactgaagcaacttgggattaat

SEQ ID NO: 140762 - DNA, 561 bp, Glycine max
  Clone ID: PAT_MRT3847_98116C.1
ggctcgagcctgcatatccctcacactttcttcccttttccccctctcttcatcttttgcttccttcgtatagggataagagagcagcaagtaatgatggatgcgctgataaaggtgcagttcaacgcaccaaaaccataaaaagcgcttctttcgtcttatggcatgtctgaggaggaagaagcactgcgtcaaaggccaacatcgttgatttctttcccaccccatgacaattcttcgcttcttctgccccttctttatactcttcttcactccaatagcttctgtgcaagcgttcaccggaacctatggtataaattatggtaggattgcaaataatattccttcacccgatgaagttgttactcttctcagagcagcaaaaataaggaatgttagaatctacgatgctgatcacagtgttctcaaggcatttagtggaactgggcttgaaattgtagtggggcttcccaatggccagctgcaagacatgagttcgaatccagaccatgctttgaactgggtaaaagaaaatgtacagtcatttcttcctgacacacg

SEQ ID NO: 140763 - DNA, 555 bp, Glycine max
  Clone ID: PAT_MRT3847_98117C.1
gttctgctttgccttttacttactcaacaacaactcaattataaaagccctgcatatccctcacactttcttccctttccccctctctcttcaacccccaaaaccaaccctcatcttctgcttccttcttatcggagattagatagcaagtaatgatggatgcgctgataaaggtgttgtagttcaacgccgcaaaaccataaaaatcgtttcttttcgtcttatggcatgtctgaggaggaagaagcactgcgtccaaggccaacaacgcgtttcattttcaaattttgatcatcctcgccagtcaaatatgtacttgattcttcgcttcttctgccccttctctatactcttcttcactccaatagcttctgtgcaagcgttcaccggaacatatggtataaattatggtaggattgcaaataatattccttcacccgatgaagttgttactcttctcagagcagaaaaaataaggaacgttagaatctacgatgctgatcacagtgttctcaaggcatttaatggaactgggcttgaaattgtagtggggct

SEQ ID NO: 140764 - DNA, 722 bp, Glycine max
  Clone ID: PAT_MRT3847_98118C.1
aagaaatctcgtggggaagaagtacataatttaaaatttggtggtgaagtggaggacatatcaggtcttgagcagtttagagctgcaatatctttaccaggtgtttctgttgtcctttttgaaactgcatcaaacatgcaatgtaagcagatatcgccattcatgaatacactatgtagtcgtcatccatctattaacttccttaaggtggatattcaaacaagccccgcagtcgccgctgctgagaatgttagggttgtaccaaccttcaagatctacaaaaatggcagtcaagtgaaggaaattatatgtcctagtcatgatatgttggaacactccattaggcattacagcttgtagaactcttgaccttgtactgcttctgatgtatactccatttctaccccgccgcttgaacatgctgcacaactctccacagttcatccagtcttatgatcccctcacaaaatggtcttttgatacttgtgacattcagaaaccacataataatcttgttagcagccagtgcccgtggaaccaggacataatctagttccttttgcagttgttatttattcattcattcctaattactttctggttccatgttcctccaactttccctctgtcaattttctttagtcttctccttttcagttcatgtagaccagcttttcttgtatccccagtttccttatgggtgaaaaaaaagggagattttt

SEQ ID NO: 140765 - DNA, 455 bp, Glycine max
  Clone ID: PAT_MRT3847_98119C.1
gccagagtgctgtacacgggcacccaagggcgtgaaaaaacgacttatgcttttaatcagtttagggtttggcatggtgtgatcgcaactgttggcggggctagaccactgacggcaaagccgttcacccaaagctacccaaaccaaacaaaagtcttagtaggccgcgtgtaattggaggcggccgcctgagccggcgcctccgtataaggccccgtaagtgtaagcacaagccggttaataagcagagacaccataataacaaacagtagcggctggtggttagaaaacttcgttaaatttgggcgtagtttatacaggagcacaaacaagctcaccaaacttggagactgcccctgccaaagattatacagttaaaacaatggagtaaaaggggtggtaatagtattaggataaaaaggccgcagaaatgtaaacaaatgaagaggggctag

SEQ ID NO: 140766 - DNA, 840 bp, Glycine max
  Clone ID: PAT_MRT3847_9811C.1
cctcaattcagcgtaactttcccaaacccaaataagaatcttccagaaacttcttttctttcaggagccaccatggccgagactcggagatccacgggcaccgttaagtggttcaacgcgcacaaaggtttcggattcataactccccaagatggaaccgatgatctcttcgtgcacttcacttccatccgatccgacggctaccgttctttgtccgacggtcagtccgttgagtttctcctcgattacggcgacgacggccgcaccatggccgtcgacgtcacctcagccgttagatctcgtcttcccggaggatttcgcggcggcggcggtgggaggggcagaggaggaggacgctacgggggcggggaaggccgtggcagagggttcggtcggagaggaggaggccctgagtgttataactgtggaagaataggtcacttggcaagggattgttaccatggacagggtggtggtggtggtgatgatggtaggaatcggagacgcggcggtggtggtggaggaggaggagggtgttttaactgtggggaggaagggcattttgcgagggaatgtccgaatgttggaaaaggaaatgagtgagaatgtgttatggtttcttctattgaattgagtctgttactgttagttggggttggttaaatggattctgttatttttgtttctagccattggcatttccttccttccttccaaatatgtttttccagggctttgctaattgttttatctaatgcgcttcttttcaacaaagtgtgattcattatgcttgttcctcctcttgaatatgaagattgaagcgcaacggacggcttaatt

SEQ ID NO: 140767 - DNA, 680 bp, Glycine max
  Clone ID: PAT_MRT3847_98120C.1
acaagttacatgcattattattatatatccaaaacaacagcatgagttcgtgactatacgaatctaaaaggatccaatccaacactactccatattactaaacaagagaacttcactcgcatgaaaaattactacatgatctaagactactacgtacataagttcttgaccaacttctatgtgatacataattaagtcttataattatctttgtaaactgaaagttccaattatataccacatgaagattgatcaaaactatagaagcacgatggtcttagattatgtgagaatttctacaactcataccgaagcatagagctttggaacaaaagaaaaccacttgaaaccacagctaaatttcagaggcaaataggggcaccttggaagccaatcccaagtcctcctcagaacactgtaatacaatatctccggccacatatagcagcaaacgcagatcattccctcgtgccagaagcaataaacatgctcatagttatggtaacaaaccgacacaaattttctacacataatctcaggcaaccccaccacttccacccaaaccctttcaccctttatcaattcccacaacttgatgctcctcgagaaaccatcggttccaaccccaccaagcagatacaactttcccttcttcatcactcaccagcctcacgaaagtg

SEQ ID NO: 140768 - DNA, 289 bp, Glycine max
  unsure (1)..(289): unsure at all n locations
  Clone ID: PAT_MRT3847_98121C.1
gtcgcangcncgcgtacgtnagctcggaattcggctcgagctgaacataggaaggaagaggagaagagaaantgcctttcgtattctatcaggaaagtaaaaatccccccaaaaaccaaaaggattttgcattaagacagcagtattgcagacatgtaatgagtggatgaggggaatgagcagttcgttcactctaatcatctgtgtataaggcagttatttcagtgggctggacccgttcaccctgactggtaaatgcactcccaaggtgggaagtgtcctttgagct

SEQ ID NO: 140769 - DNA, 329 bp, Glycine max
  Clone ID: PAT_MRT3847_98122C.1
ctgcagagacacagaagggactttttcaatttctgtcatgcgatcatccttgcctccttgcaactgtatttcgggcgaaatgattcaatcatatttcctaatcttcatccacccataataaaaagaaagatagatcaaagaaacaagataatctacagaaaaaagccattcacaaaaagttgtacataatattgtatgcatgataattgaatgaaggtgttgaagactctttatcatcatccatcgtgtacagcatggattcatcatcttcaggatctcaattattttaacacccacaactcccaccttgttttctatttctaccccac

SEQ ID NO: 140770 - DNA, 706 bp, Glycine max
  Clone ID: PAT_MRT3847_98123C.1
cggctcgagtcgcaaaggacccaaagaacgtcatctacgtcatcagtggacgcgacagaaccgcactgaatgagtggttcaagggagtgccagtggggttcagctgtgagcatggctgcttcttcaagatgtacccaggagcggaggggaaggatcactgggaagacgtcggcagcgaattggatctctcctggaaggccactgtcggcagcatattcgacgattacaccgatcgagtcccagggtctcatgttgaggccaaagagatttgtctgacgtggcactaccgcaacgctgaccccgagtttggagagaatcagaaaaatgaattggtgctgcacttgcagtcactggcaggactgcccattgatattctgttggggaagaaggcagtggaggctcgtcctcagggaattcacaagggcagtgtggtgaagagagtcatgtccatgctcagtgatgctgattttgtattgtgcattggtgatgatgtcaccgatgaagacatgttcgaagaaactgttggaacacgagaagccagattctgaaggaaagtttacgataactgttggcaaaaagcccacatttgctggctattatttcgatgagcaggaatcagtgttggatctgttgggagatttagcgaaagcatctcagtgacacttgttaggtttttcttgtttgtgaaaataaacaattcttcatt

SEQ ID NO: 140771 - DNA, 604 bp, Glycine max
  Clone ID: PAT_MRT3847_98124C.1
ggctcgagcagaaatcatggtttgcattggactactcctaagcttccatataatgattccttactcagtgactcaatatgttggatcagcccttatcacatttgtgtctgctgaagttcttgaaggtattttttctcattaagtaatgctcgaaatttatttagtaataaacagaactggcatgaatagaaaggtttgctgacaactttgcattatcagatgaaaatggcaatacttcaactattctgatgactatgaataggtacatagttagtttgtacccatcatgtaataaggtctgattatgatatcatgtaacccatcaattgttaaacaggttgattatttctgttattggcattaacctggtaatttactttatgtgacaatcttaaatttcataatggtgctttttcttctcatctgaaaatattttagatagatttgtttgcctcattcatttctatataatgacttggtcaaagatttaagtaggttcacatcttatgctaaactctgaagcttgaacttgctccttgaatgtgccacgtttttttgtttgctcaataatccaggagtgaactttcacttctataaaaatgat

SEQ ID NO: 140772 - DNA, 636 bp, Glycine max
  Clone ID: PAT_MRT3847_98125C.1
ggaaaaactaacaaactctcaataatttggattctcctgttataaacaaccgtaaaggttcgttctattacagggatcaatagacagtttttaattcatgtaaacccataaaccatcatgctgccccgcacaagaaaacttgtttctctttctccaactagatggtactatgacaggcaagattccaaatccatagtcaatctacttgcaaaagtgagttgaagactctactctagttcttcaaaaagtcaaatggtccctccacaatttgttctctctacataccgtagaatgaagagagaagtccttttctacttccactcccgtgtgcaaccctgctgagcaaatttccttacaatgattaccatataatcacatctgaattccactgagagccatgcagaaaagacagcgtagaacatagatacatagctcctatgagaataaatctaccactgaggcatcgcctgtggcactatgaacaattaagcattctcaagactgaactctccccatccactactgcttcttacatacttatcaacaatgccaaattcctgattctgagcaacccgcctggcatagttctcagttgaaattgggcctttcttcaacctacgggtataaacaacatgc

SEQ ID NO: 140773 - DNA, 426 bp, Glycine max
  Clone ID: PAT_MRT3847_98126C.1
agtcctgaaacatcatatctgagcaactgaggttctgcatacacggaccttctgagaaactcatcatgaaaacgacgaatcttggcagaacgcaacttcacaaaccgaacaacctggcaaaggtgataccgacttccctgtgccaccttaaactaagggtctaccagtgccattgttagcctactagctaagcacggctcacctacacacgtagaaccttgtactctcaattacgctacctatatattccatccatcacacagtggtttgaccctcatgccatgcaactaacagcctaacaggtcggatgcccactatgaggagcgacaagttcacaggcttaaaaaacaactgcccgagcagcacccctgccttgggacagacaaacctgcagcggcggatctatgactactgatgacctgggct

SEQ ID NO: 140774 - DNA, 321 bp, Glycine max
  Clone ID: PAT_MRT3847_98127C.1
gggggaataggttctggcgccacatccataaaaaccattgttaaaactagtctgactagaatctataccccagggcttgaacaaaccaatataaaagggttacaaaaatatttttgctttaatagaaaatagaaataacaagcaccaagccccaaaagcttgttttttggcccaatatccttgggggcacaaatttgttcctcacccattggagacatgacagacacaacaagatccttgccctcagaaaatccatcctttatttgagtgagcagactctcatcagggggaagcttgagggcatccttagggttaccattt

SEQ ID NO: 140775 - DNA, 457 bp, Glycine max
  Clone ID: PAT_MRT3847_9812C.1
cgttgcaaaaaagacgatctggatttcctgtttacgactctcgaggatggatccgtgtctcaaaaacgcacgcttagtggcgaactgaacaaacaaacccttgatccgtcattgtatttgtaacctcgaatcgaaggagaagacgtcccttttgattctgcgactactctccaagtccgggtttggccttctctcctctcctatctcactcgcgaatgcagcttattcttgattgatggaggattgtcgaccactgtgtctggagaaggagaagaactcggtcacttggacttaagcggtgcctggatcctcagagatcacaatacgttttcaagctattgataaatgaagcatattgtgaagattttgacattggtaatggccattactgcattatgggttggccttctacaaacttctatgattccacgcagtatacttgttactcatattattt

SEQ ID NO: 140776 - DNA, 573 bp, Glycine max
  unsure (1)..(573): unsure at all n locations
  Clone ID: PAT_MRT3847_98130C.1
ggctcgagctcgagccgaatcggctcgagaaacatgaaagcccggttccactccaaaataacatcacttccatgatcaaatgacggctaagtcatcgtgtatggctactgattcgaatttagaaattgtttgtgacatgtatccgaacgtctgctgatgttgtctatctgcgtcaacatggccatcaagttcaggacggcctatgtgtcaccgaattcaagggtttttgctatgggcgagctcgctatggatcctaagctgattgcaaggcggtatttgagatcagagttcttcctagatcttgtcgctacactgcctcttccccagactgtgattcggtttattatgccagcacttagaagctcccatgctgatcataccaacaatgcactatgtgctcagattatacatgatcctcccattgagctctcagattattaacgccactggtgtggttacacagacagattgggctggagctgcttacaatcttctactatacatgttagctagtcatgtgttgtgtgcatccggatactagctatcactngaaaggcatgctacttgccggaa

SEQ ID NO: 140777 - DNA, 306 bp, Glycine max
  Clone ID: PAT_MRT3847_98131C.1
tttttaatggcaagacaaatgcagggatatataaatctcattcaagatcgtaactgggttgtatctatattagataattgctaattatgactgacatacttggcattgaacatgcatttgttgcaaatgaagtctacagtcttttccttccatgccgacaattacacagataattgacaaaccagtatttcaaattcaaggagaacaaaaattaagatcaaagaaaaatggctacacattctaaaattcaaccaaaccggaccattaattagttagctccataatggccgcaacaatgtcaccacc

SEQ ID NO: 140778 - DNA, 1029 bp, Glycine max
  Clone ID: PAT_MRT3847_98132C.1
cgagtatataatatcccagtgatgtcatccaaactacagacataagaaccaaagttacaattattaaattggaagtatttaatatcttggaaatcctaaagcattcactacttcattctttgagggattaggattagtaatgaatatatttttcatttattaacatttgttcttaggccaagtaaactaaattctattttatttgaatgattttgcttactattgccctaaggacaatgcttttgttagatgtcacgttgacgatgaattggtaacatcgattgttagtgtcacttaaaaaactattcattttgatcccttaaccattgcctttaggaaactgtatttcattttccattccgtgacatgctttgagaatttaggataaactcaaaagccggaaagaaatttttcagctttctaccgggggaagttctgcttgcatcgttggatggattcagtaaagtgtgtgatgctgttgaagtagctggaaaaaatgtcatgtcaacatcatcaactgtgacaactgagcttgtcgatcacagatatggagaacaagcagctgaagcaacaagtgaagggtttagtgctgctggtcatgctttgggtactgcatgggctgcttttaagattaggaaggctctcaaccctaagagtgttcttaaacctacctccctggccaaagctggtgctaaagctgcagcttctgaatttaaggctaaaagttccaagtaatttatgtcagcagttcttaaatataggttttgtccttcctacaatcagaaactgctgcttatggcttttcattacccattttttctccaagaaaaggcaggggaacatcaacgcatgatttgttgttgttcttaccatgtgagaacccaccatgattggtcatgacacccacaagctatattatatatatatatatatatgtgtatatatatgtctatatatatatatatatatatatgcatatatcctcctttgacgagaccctttctaaaatttggaaaacatgataggggc

SEQ ID NO: 140779 - DNA, 169 bp, Glycine max
  Clone ID: PAT_MRT3847_98133C.1
tggagcttcaataggctaagcctgcatgccccaacggcttgaaccgtatcatcggattcgacaacgatcgccatgtgaagtgcatcagcttcatcgtctgcatgctcccaggcttctaagtgtgactgatttgcaatcaattgtagacggaccccacttcgtgtgtttg

SEQ ID NO: 140780 - DNA, 351 bp, Glycine max
  Clone ID: PAT_MRT3847_98134C.1
aaaattctctgacaacatatacagtttataaaattgataacattatgcagacttgggcgattgatatggacaaaaaactggggaccgttaatacaacgagcagccctatgatgatgacaaaagtcactggctgatcaacatgtcaatatttacaccggctctccatggaacaaactgtccctatgatgcatgcgtccccccaagcacatagaggttctatcaaaggtggcagcacattgttcaccgcaaaacgaacaagggccttgaccttgacggttatgactgtgcaattgtacctaatctgccacttgtgaccggtgaacacattgatgtgacccgtgttgggcatat

SEQ ID NO: 140781 - DNA, 355 bp, Glycine max
  Clone ID: PAT_MRT3847_98135C.1
ttaatttttattttaatcttttttatgctttatttttatttttttagagtttggggttttttcccccaaaaaaattatactaattcccccgaaatcaaaaagtgttttcaaaacattattataaaacaaccaattaccaaattatcaaaaaaattctaataaaacccgaaaattatttttattcaccccaaataaggtagaaaccatttagcttattttgaggtgcatctgttctctttataaacccaagatttacactattttgggggttttttgttatattcatgagagcgataaccctgacttgacctcttttattaaggtaactaactacaatttcctttcaaaaggaccc

SEQ ID NO: 140782 - DNA, 184 bp, Glycine max
  Clone ID: PAT_MRT3847_98136C.1
acggctgcgagaagacgacagaagggctcttctcatttccttgatgtctattagtgattttgtgggttccagtagtggtttatgccattattgtaaaccatggttacaatgctaataaaattgataaatttggcatccttgtctcttatcctctcacaattacatcttttcttatttaactccc

SEQ ID NO: 140783 - DNA, 188 bp, Glycine max
  Clone ID: PAT_MRT3847_98137C.1
tcgcccacgcgtccggaagctatgaggtattcattccttgccaaaggtgccaagcgagccccacctgttggggtattgtatgcagttgtggatgatattatagaagagagattgaaagttgagggagatggtgacaggaaaaacaagggtaagagttatgctgaattctatttttcatgaattgccct

SEQ ID NO: 140784 - DNA, 411 bp, Glycine max
  Clone ID: PAT_MRT3847_98138C.1
aactccaccatctaattctttctttttttacacacactctctttatttatttctgcttgcaaaaacaaataattttattattggttttatttaactgttgttggaggttgatcctagcttatgagtgagtgaggctaatgcaatgagaggagggaggattgactagcatgtggctcatggaggttcacagccttgagttccgagtgcttggtgcacctccctccagatgcaatgtgtcaagatgcctcgaggtcaaggggaccactggtgtcagggccttagcctgagcatacaggagaaccggagtgactgtacttcataccaactgggatgctgagatatggtgcaacatgtctgtttaagcatcctcctaacaggaagctggctattgccgctgcacggatgaaaggt

SEQ ID NO: 140785 - DNA, 1035 bp, Glycine max
  Clone ID: PAT_MRT3847_98139C.1
caagcgtccgccggtatacgcaaccggtaacactgctcacgccaccgccggaaaattcgcaaccaccgtttgccaccatcagttgattaaatttgatggataacaataattggagacctaatcaaggcactgaagccaatatggatactagtgattggagaggtggactgcatcatgagtcacgccaaagaattgttaacaaaataatggacacattaaaaagacatcttcctgtttctgttcaagagggattgcatgaacttcagaagattgctcaaaggtttgaagagaagatttttactgctgcaacaagccagtctgattatctacggaaaatatctttgaagatgcttacgatggagactaaatcccagggctccatggcccccaacttacctacaaatcaaggtggccctagtaataaacctcctgatccaggacttggtattccacctcaagttcataatccagggcagcaacatcctattcctatgcccaatcaacctccgaaccgtcaacagcttctacctcagaacattcaaaatagtattgcgtctcaaccttcgaatatagcccaggctcccatccaaaatgttgggcagaataatcccaacatgcagaatattcctggtcagaattcggtggggagcaccattagccaaaattccaacatgcaaaatatgtttcctggttcccagagacaaattcaaggaaggcaacaggttgttcccccaacaacaacagcagcaatcacaaaattcgcagcagtatatctaccagcaacaaatgcaacatcaacttttgaggcagaagctccaacaacaacaacagcagcagcagcagcagcaacagcagcagcagcaacaacaacaacaacagcagcagaatcttctacaatcaaatcagttgcaatcttctcagcaacctgccatccaaacatcaactgttatgcagcaaccttccatgatgcaagcatctctacctagcattcagcacaatcaacagtctaataatcaacaatcaacacagtctgtg

SEQ ID NO: 140786 - DNA, 713 bp, Glycine max
  unsure (1)..(713): unsure at all n locations
  Clone ID: PAT_MRT3847_9813C.1
ctcgagccgatcttgcacacacgggtacttcctccaaaccaacattatgaaccctactcttttcactaaaccctcttcttcacttctccctctttcaattcccagttagttccaaccgcttccttcgcaaaggttttcgaataatggttagtggagctctcaaaacgactgagaacagtcttcacaagcaagcttctcaggtttccgatgccaatgatgcagttgctgaccctgatattcctgcaaagagagccaggctgcagaaggaacagaaggatttgacctttcaggacatatatcaaaatgatggcgtgtttgacgacgaagacagtgattgggagccgtttcagttacacaagtgtatggattttgaaatcaaaaagtggttctgcagaaagtgtaccatggttaacctcgatcacgatgactgttgctacatatgtggggagcatacggattctaaaatccttagccttgggttttttgcatctcctttagcccaagatgaggatctgactgaagtccaggggatcgttaaaggactgaaagatgttggttcacaggaatcagtggcaaatagttctactgctatcggctntgacgagagaatgttgttacatgcagaaaataggttgaaaagaaatcaactctgcatcctgagaggccagatcgtcttcaagccattgccgctagtcttgctagagctggcatat

SEQ ID NO: 140787 - DNA, 193 bp, Glycine max
  Clone ID: PAT_MRT3847_98140C.1
tgtaatgaggattggcccaaaggtaggcctcaaccggctttgaaagagcaatagactcgactttgccaattttgaggtcctctgggttggggtgaacattttctttggtttggtatttgacagttagctttccagcagaccctccggtggcgccagcagccaatatgcattcgaatgtgatcctcttcactgt

SEQ ID NO: 140788 - DNA, 227 bp, Glycine max
  Clone ID: PAT_MRT3847_98141C.1
gccacacaaataaaaatcagcaaccatttacagagggggcccttgactcatctctcaccgaaattgacccatattgtttagggaaattctccatatcacaaaaattgaaaactatttttggcgacaaactaacattttcattgcatatcaacaaaatgttgttatccacttttccaaaaatatctctcagcccatctgacactttagacgcccctgtatttcttaac

SEQ ID NO: 140789 - DNA, 418 bp, Glycine max
  Clone ID: PAT_MRT3847_98142C.1
acgtacgtgaatgattatgacaccatccctgatgggatggatcatcgtggtctcaagcgtttatagtgtgtgtgggtggtggtttaagtcaagcttccccgttttttgatttcataattatggcttaaattatcatcctgaaggatcatactgtcaattgagcttattgatcatgcatgcagaagagataccggccgaaccagataacttgaaggagcagggtacaacaactataggtcattcaagggagaccacaagtcaatcaggatctttaggttcagttggagattgtcctctgtatcctcctaatgtgtatgctccccaagcccaggctttctactatagaggttttgacaatggcaatggtgaatgggatgaatattcttcatatgtcaattccgaaggtttagacattgga

SEQ ID NO: 140790 - DNA, 306 bp, Glycine max
  Clone ID: PAT_MRT3847_98143C.1
cgtaagcaagcaaggcggcgcgagcaaacactatctcgaggaagaacaaggaaatttttttttatgaccaacaactatatatgggggtgaaaataaaaccagggggggggaatcaataccatgccttgatatatattgaacctgactcaacaaggtatgatccttacatagtgaaaaatgtaccttactataaggctaataatgctctgaagacaaaggctattaagatcgattctccactaaaaccgatataaatcgactgagcatgaccttccatcgaatgcatcatcttgatgtaaggattat

SEQ ID NO: 140791 - DNA, 1762 bp, Glycine max
  Clone ID: PAT_MRT3847_98144C.1
cgttagtctggtatttcggctggaggggtggtaagtgtaagctgccagatggtaagtgtaagctgccggatggtatttgtacatttgagcattggaagtgaggcagtgcctgaaggaattagtgctagaatatctaacttggaaatgcagcccttatgggactctggtaaagataatagtattttaaagcgcccattgaacttgttggctatgacagtaggacttaagcagaaagaaattgtcgacaaaattgttgaaaatcattatgatggttttgttgatggaagagtttagcctggagcagttgtgccatacatgtatctgctatcaatcaaacaaaatggtggtttgcaaagcggtttttgcatccagacatagttgctgaatacaattatatatttctttgggatgaggatcttcttgttgataatattgacaccaaaaaggtatttatctattgttaaagaagaaggacttgagatatcacagccagctctggatcctaccaaatctgaagtacatcatccactgacagtccataaagcagtatcaaaagtgcacaggttgaaaaggtagtggaaggtgtgatgacaaaagcactgctcctccttgcattggttgggtggaaatgatggcaccagtgttttctaaaaagtcttggcagtgtgtatggcatttgatccagaatgacttaatccatgcctggggcctggataggcagcttggctattgtgcacagggagatcgaatgcaaaatgttggtgtggttgattctgagtacatagttcatctgggtctgcctactcttgggggctcaaatggcaatgaggcaccatcaggctcctcaggagataatagagctaaagtaagcaacataggaattaggataatgtagatttatgcacctttagctccggcgccatcagactccccaggagataattacacgcaagttaggatgcagtcatacattgaaatgcaggtttttggtaaaaggtggaaagatgcagcagagaaagacaaatgttggattgatccgtatgaacaggcaaacaagacaagccattagtgtattttgtgaggctttaagtgatcaaaatccaagtacagtgtccatgttcataatcagcttttgttttctagtcttcgttagagcttttgatttgatatctcaggtgtgggatctcgtaagagtttgcaggaacattgcttcctttaccattattttactttcgttttgtcatcaagccattcatttccttaaatattggtgtacatagggtggtatagagttgtttatatggcagcagaaaaatgtgtggcatagattttttttttcatccgtgaagtcaatgtaaaacggttgcttgtatgaaataatcatattttctcggatccaattagctttacaccttattcttggggtccccaacctttttcaataaacagtgttccagtggtaaatttatacctttattaaaatacagccaacatggtactctattaatgaactagaatattgcatagtttcttgtcattttgtggcttatatttcagatgtatgggctttacttggaaacacaatatttcttgtaagtgtacctttgtggaaaaaatttacctaacatatacttacccttgttattaatgtcgccgatatttgaggacaaatttgtacttatataggggaccattggaagaacttattttcttattgacccttcctttatacccttcaagcttttttcacttaatttataaa

SEQ ID NO: 140792 - DNA, 382 bp, Glycine max
  Clone ID: PAT_MRT3847_98145C.1
aaaaaatgaccttgtacatgaataattttggaaagatgaaaagaagtgaagaaaaagcgaaaagcccttacgtatgaagtgtatggtaaaaaccttctggaaggaaaggtaaagtgaatgaagctgtgaaagctgtcagggacatggaaagaagaggagttattggaacagccagtgtatattatgaactagcttgttgcctttgcaacaatgggaggtggcaagatgctattctggaggttgacaatattagaagtcttcctcatgccaagcctttggaggttactttcactggcatgattaagtcttccatggatggtggacatattaatgattgtatatgtatatttgaatacatgaaagagcactgtgttcctaatat

SEQ ID NO: 140793 - DNA, 807 bp, Glycine max
  unsure (1)..(807): unsure at all n locations
  Clone ID: PAT_MRT3847_98146C.1
ggctggagatttgtgcgttaagaaagaaagaaaaaaaaaaaaaaagtcatggcagcgagtgacggttgcagcagcttcttaacattgtcgtgtgcaggtgcagtgcaaaatcaacatgtatcacaccctacaacgtttttgggagttcctaaaaacaatcagagaaaaaggaaaacaccgcacaggttagttgtggttgcggtgactcaaggctctgctgaatcaagcaagtccgatgaaaaaatcccttcgtgggccaaaccggactccgatgaacctccgccgtgggcccgggatgagcccaacaacaacagttcgcaacaagaaggatttgagatcccgttctatgcttatttgcttgcctctgctatcactgctattgccgctataggctccattttcgaatatgtgaatcaaaagcctgttttcggagtattaagctctgacagcgtgttttatgctcccttgcttggtttttttgtcttcaccggcattccctcatcggcttttctgtggttcaagtccgttcaagctgctaacaaggaagcggaggaacaagataagagggatggctatttgtagggtgtgagtggttctgagttgaacacgcttcctttgttttattgatgtaagttatatgagtaaattgcacataatgcctattgtatgtcacactttaaatttaatgtgaatattcatgctttgtatgaaatcagagattagtatgataaaaaaaaaaaaaaaaaaaaaaaaaaaaggcggccgcctntattctgctcgtcgccccaagaattnnttccggnccgg

SEQ ID NO: 140794 - DNA, 1664 bp, Glycine max
  Clone ID: PAT_MRT3847_98147C.1
tttgactcatcgacgcattactattactctctctgagacaacactcactcggctcgagctctcttctctgtttcatgtatgcttcttgacactctcacattatttctaggatccctttttttcatttcacttcacttcatccatctttcagctatgaacgctctagcagccaccaaccgtaacttccgacgtgcagctcacattctcggtttggacactaagcttgagaatagccttctcattcccttcagggaaatcaaagttgaatgcacgatcccaaaagatgacggaacactagtatcatatgtaggattcagaattcaacatgacaatgctcgtggaccgatgaaaggagggattcgttatcacccggaggttgaccctgatgaagtgaatgctctagctcagctaatgacatggaagacagccgtagcagacattccttatggaggagcaaagggtggaattggctgcaacccgagggacctcagcgtcagcgagttagaacgtctaactcgcgttttcacccaaaagattcatgatctcattggtattcagagagatgttcctgcccctgacatgggaactaattcacagacaatggcttggattcttgatgagtattctaagtttcatggacattcaccagcagttgtgactgggaaacctatagatcttggaggttcattgggaagagaggctgccacaggattgggagtgatttttgcaacagaggctttatttgctgaatacgggaaatcaatttctgatatgacatttgtaatccagggatttggaaacgtgggcacttgggctgctaagtcaatttatgagagagggggtaaggtgatagctgtgagtgacatcagtggtgctattagaaacccaaatggaatcgatatacctgctctgctgaaacacaaggaaggcaatggaaatttgaaggaattctcaggagcagatatcatggatcctgatgaattgcttgttcatgaatgtgatgttctcatcccttgtgccttgggaggagttctcaacaaggaaaatgctgctgatgtgaaagcgaaatttataatagaagctgcaaatcatccaactgaccctgatgctgatgagatattgtctaagaaaggagtcatcatattacccgacatatatgctaatgccggtggagtgactgtgagctactttgagtgggttcagaatattcagggatttatgtgggatgaagagaaagtgaaccgtgagctgaaaaagtatatgactaaagccttccgcaacataaaggcaatgtgtcaaattcataactgtgacttgcgaatgggagccttcagtctcggagtgaaccgtgttgctcgagctacacttctcaggggttgggaagcttaatagaacacatgcatcaccgcttgctaaacaagttttctagcttagtattatgttgttgccctttctccagtatgctcctttttttccgtttgttatttgatcggtttagtttaatttagtttagtaattgagtatcattgttgcctaagaaccacatgtgaagttacaggtggatgtgtttctttatccaagaacccaaattttctgcaaaaaaaaaaaaaaaacaagggcggccgagtagcagtgaccaccgcgggaattattctggaccggta

SEQ ID NO: 140795 - DNA, 225 bp, Glycine max
  Clone ID: PAT_MRT3847_98148C.1
cacaagggtgaagaaacttggaagaaacccaatcatgacgcacgctgatttttcctcagtgcgctgaaggtagcacatgtaaaaacatccacgctgctttgaaacctgtacacaactgtttggaacgtcgcaagattgacttcataaaacttcttccaggggggcaacctacgaataatattactaacttggaccacgatatcggtgagtccaataataaaactg

SEQ ID NO: 140796 - DNA, 535 bp, Glycine max
  Clone ID: PAT_MRT3847_98149C.1
ataaaatctgaaaccccaatcaaacgaaaacggctctgttctacctttgaacgcttttccttttcgtgtcttcaaaaaccagccacgcgccactgatgctagattcacaccacgccgttattttttttggtttgttttgtttctccgttgccccggattgtaaattccgggtcgggttgtgaccgttttttacgacagcgatgggcgatcttcttgtgaacggcgtcgttttcggggaggatcgccccttgcgcgtcctcgccttcgtcaccgccacttccgcctttgaatcccgaaccgtcctacgtcgcggctgacgcctgggcggaggccgagaaaaccaccgccgagattcttagccgcatacggcccacgcttgtcgacgaccgcaggcgcagggaggtcgtcgattacgttcaaagactcaatttggtacggcgcgcgctgcgaggtttttacatatgggtaagttccgctaaaacataatttccaaaaggagatattgatttgactgcactcaactgtcaaaacattg

SEQ ID NO: 140797 - DNA, 190 bp, Glycine max
  Clone ID: PAT_MRT3847_9814C.1
tttcccgtcgccaccgccgacggtggagatacacagaggggacccattcaaccgatcaattactactaaaaggcgtttctcgcttcataacctcgtcgcacggggttttacaaaacacatgctgatcaagacccaaacggaacatacgacagaccccggtttccggagaccaactctccgggcattctcc

SEQ ID NO: 140798 - DNA, 192 bp, Glycine max
  unsure (1)..(192): unsure at all n locations
  Clone ID: PAT_MRT3847_98150C.1
tattttttttanaagaaggttggtgaaaaatagatctgcttccattaggggagagggataaatgggtgacaaccaaaaacttaacataaaatcatcacaacaactaatcatatgtacaaaattccaatgtcaaaagttaaggtggcactgaaccatggacttccaatgacagacatggtttatatttttaac

SEQ ID NO: 140799 - DNA, 1261 bp, Glycine max
  Clone ID: PAT_MRT3847_98151C.1
ataactcgtagtcacaatggcaaacgacgctctccaggtcaacttggacaacaactcccagttgggtatcacccaacatggctctgactggctctgggcagtcttcgccgtcatgctcttcaccgacttgattgtcattggatggcacttcaccgtccctcgaggacaacgattgttccaccagctcggtgcgattatcttgaccactgccgctatcgcctacttctcgatggcctccggtctcggttacactcccattgccactgagttcgcttacttgggctaccccgttggcactctccgacagatctgggtgagtgcgcttgaaatcgacagtgaacatctttgctgatggcggtagtacgtccgatacatcgactgggtgatcactacccctgctcttttgctagagttgtgccttgcctccggtcttcctttgtccgacattgtcactctgatcttcttcgacttggtcatgattatcactggtctcgttggcggtctggtcaagtcatcttacaagtggggatactacactttcggttgtgtcgccctgttctacatttggtgggtccttgccggccctgcccgggtctctgctggtgctctcggcaaggacttccaaaagtccttcaccatgtcggccctcatcctctcgttcctctggctcttgtaccccatcgcttggggtctcgccgacgatggatcggtcatctaccccgattctgaaatgatcttctacggtgtattggatatcctcgccaagcccgtcttcctcatcatccacctcatctcccttaggaactgtgaccttaccagattgcaactccagtccggcaagtacaccacttcggccgccgctatcaccacccacgacatggagaagaaccctcgtactacccaaaacaccggaatgatcgccaacgaccccgtcgcccctgccggccacgacaacatggctgctcacggaaagaagggcttcttccagaggaaaggcaagtacgacgctcaacccgttaatgccgaccatcccgccgatgccaacaccaccatgcccaggacttcagaggcgaccatggcttcgcgataagccctgccggagttcaatctgatcgttgcgtaacatcatccaacgatcatcctatcacacgcgatactttttcacaccaagacaacaacggatgatattcctcttctataattgatctacctccagcgtagtatgtagccatattacatagttcatgcaaatcattataat

SEQ ID NO: 140800 - DNA, 397 bp, Glycine max
  Clone ID: PAT_MRT3847_98152C.1
tgcctttcaaacccaattatcctcacttgtgtctcaatccgaaagcgataggccacaaaagagggcctttacttccttacacactttcacttgtttgtggctccttcgttcatattttttgatatttcttcttcttcgttttgttcagtttccttcatggcgatctcggagaacgtgctacccttgaagctgcggctacgtcacaacccttggtgacgtcggtcgcctccgctgaaccgcgcaagggctcggacatccttgtggaggcccttgagccgctgggcgtgactaatgttttctcctaccccggcggcgcgccgatggagacccaccagtctctcacgccctccttccccatccctaactccctccctcgccacaagcagggcggcttctt

SEQ ID NO: 140801 - DNA, 296 bp, Glycine max
  Clone ID: PAT_MRT3847_98153C.1
ccttacaaagtgtataaaacctcacttggatcaccactacacccacaattcattctaatttttcctcattgaaatacccctgaaacctataatcccccttaaactaataactagctaattcccttacaactgccacaaaaatattcattctcccatacaaatggctcgtaatgctttccccaaacccccacagtctatttcacactaaagagctttgcctcaaacgtcagaatccccttggggcacgaaatacaaatacaaccttttgaccagttcaatttttgtgtacaccctgc

SEQ ID NO: 140802 - DNA, 322 bp, Glycine max
  Clone ID: PAT_MRT3847_98154C.1
atccatgtagaccagcgtcagcagcagctcgtctttctttccgagctttaaaagagtgtgcacgaaaagcagcttgtatgcgtgcagctgcctgagctgtatttgtaacagcttcgaagaaagttggttgcgaaacctgatcctgactggacacaagattttctttagagacactactgacagatgactaggcttcaagctcagaacatgctttataaagctcactctcttacaatgtgagggatgacagatagctgtgtaagccgtcctatggaggataacctgctaaatcgttatagccgtggctagcggcgatagaggc

SEQ ID NO: 140803 - DNA, 467 bp, Glycine max
  Clone ID: PAT_MRT3847_98155C.1
ggccacgtcatcactttctggcaacttcagccttctccgccacagcgagactcaatcccgctcgctgctgttgctcggtggcagctctgtcaagctcttcaggtcgaagcacgaggccagcacgtgccatggcgcacgcgtcgctgccgccgtgccacgtgcttcggcgcctgaggtggcggtggttgagaaggggagggagaaagtgagggtgctgaagctgggcctcatatgtggcggtccttctgctgagcgtgggatttccctcaattctgctagatcagttcttgatcacttgcagggggatgatttacacgtgagttgctattatattgattgcaatctcaatgcatttgcaatttcttcagctcaggtatattccaacacccctgctgattttgattttaaacttgaaagccttgcccaaagtttccagactttgtctgatttagcaaagcatctagcaa

SEQ ID NO: 140804 - DNA, 393 bp, Glycine max
  unsure (1)..(393): unsure at all n locations
  Clone ID: PAT_MRT3847_98156C.1
cgccctttnttttttttttttttttttttttttttttttttttttttttttttttttttttttttttttttgggggggaaagggtttccaacttgaacaaacaaaaaccttgcccattttttgtttttttcccaatctttacccaattgaattgggggaggcttttttaattttttcccctatgaaataaaacctacaaaacttcctttgagttttttggcttggctggaatgttttggaccttctggccgcccaaaagcccaccaatcaaccaattttttgttcctttttttgggggaaacaaaacattccccatgccgatgccgcccaaaggggggctcgcttgtttttttcaagtccaaaaatttaacccttcggacccctgggttgacc

SEQ ID NO: 140805 - DNA, 636 bp, Glycine max
  Clone ID: PAT_MRT3847_98157C.1
atgagtaagcttcagagtgatgctttgcgtgaagccatttcaggaatcatggccgattccaaggagaagaatcgcaaatttgtggagaccatcgaactccaaatcgggttgaaaaactacgatccacagaaggacaagcgtttcagtggctctgtcaagctgccccacatccctcgccccaagatgaaaatttgcatgcttggtgatgctcagcatgttgaagaggcggagaagataggactggactggatggatgtggaagccctgaagaagctaaacaaaaataagaagttggtgaagaaactagctaaaaagtaccatgcctttttagcttctgaagcagtcattaagcagattcctcgtcttttgggtcctggaaagttccctacacttgttactcaccaggaaactcttgagtcaaaggttaacgagtccaaggccatggttaaatttcaacttaagaaggtgctctgcatgggagtagctgtggggaatgttagtatggaggaaaagcaaatcttccaaaatgttcaactgagtgttaatttccttgtctctttgttgaaaaagaactggcaaaatgtcaggtgcttgtatctgaagagtacaatggggaaatcttaccgtgtcttttga

SEQ ID NO: 140806 - DNA, 768 bp, Glycine max
  Clone ID: PAT_MRT3847_98158C.1
atggccgattccaaggagaagaatcgcaaatttgtggagaccatcgaactccaaatcgggttgaaaaactacgatccacagaaggacaagcgtttcagtggctctgtcaagctgccccacatccctcgccccaagatgaaaatttgcatgcttggtgatgctcagcatgttgaagaggcggagaagataggactggactggatggatgtggaagccctgaagaagctaaacaaaaataagaagttggtgaagaaactagctaaaaagtaccatgcctttttagcttctgaagcagtcattaagcagattcctcgtcttttgggtcctggtctcaacaaggcaggcatgtattgcctttttttcggaaagttccctacacttgttactcaccaggaaactcttgagtcaaaggttaacgagtccaaggccatggttaaatttcaacttaagaaggtgctctgcatgggagtagctgtggggaatgttagtatggaggaaaagcaaatcttccaaaatgttcaactgagtgttaatttccttgtctctttgttgaaaaagaactggcaaaatgtgcttgtatctgaagagtacaatggggaaatcttaccgtgtcttttgaggaattttttttttaatccgctagatacaaactatcatcttgttacagttttgttggctggatttttattgtttcgtgttcgtgttcatgttcaaacatttgataatgatatgcgctgtttttggtgctgcttttgtttttactcatga

SEQ ID NO: 140807 - DNA, 1355 bp, Glycine max
  Clone ID: PAT_MRT3847_98159C.1
tgccatttgggttttatccctcccttgttctgcactgcggccgataacaattttctgttttgtgtgatttttttgttctttgtttacagctctgcgagatcttgagtcgccgatttgaaaagatgagtaagcttcagagtgatgctttgcgtgaagccatctcaggaatcatggccgattccaaggagaagaatcgcaaatttgtggagaccatcgaactccaaatcggtttgaagaactacgatccacagaaggacaagcgtttcagtggctccgtcaagttgccccacatccctcgccccaagatgaaaatttgcatgcttggtgatgctcagcatgttgaagaggcagagaagataggactggactggatggatgtagaagccttgaaaaagctaaacaaaaataagaagttggtgaagaagctagctaaaaaataccatgcttttttagcatctgaagcagtcattaagcagattcctcgtcttttgggtcctggtctcaacaaagcaggaaagttccctacacttgttactcaccaggaaactcttgagtcaaaggttaatgagtctaaggccatggttaaatttcaacttaagaaagtgccctacacttgttactcaccaggaaactcttgagtcaaaggttaatgagtctaaggccatggttaaatttcaacttaagaaagtgctctgcatgggagtagctgtgggaaatgttagtatggaggaaaagcaaatcttccaaaatgttcaactgagtgttaacttccttgtctctttgttgaaaaagaactggcaaaatatgatgaaaagattctttattgtctcttctttctacaatatgcctgtccaatatgctcttaatgtgatttcacatcagtgaatgtgaagtttggccaatgctgttttagtttgcatctttgttgaatttgttgcctattgactctggctggcagtgtttgctttgcaattttttcattctatttttatagtctcaatccattaataccaatttttcttctttttttttgtttctttcctatccatgcaatatttcaatctggataagccagaaagccatctaatataattttttgttgatttcaggttaggtgcttgtatctgaagagtacaatggggaaatgttaccgtgtcttttgaggaatttctttttttatttcggtgaaattgtgatcgcgcatgatatgttgattaatcttaatagctagatacaaattatcatcttgttacagttttgtgggatggatttttatgttaaagtgtttcgttttcatgttcaaaaacatttgataatgatatgcgctgtttttggtgctgcttttgtttttactc

SEQ ID NO: 140808 - DNA, 485 bp, Glycine max
  Clone ID: PAT_MRT3847_9815C.1
aattcactacatacatttgcatatttattctctgatacgaacataaatgggggggtatatatatatatatatatatatatacacccagaaatcagtaaactgcagaagatatatgaagattcgtatagatatatgcgtgatgctttatatctagctattagattagacatggtaatccagttgaacatctttagccttcaaaggctcatagcactcatacacttccaagtgatatgacaaagcagacttgtcaacaatctcgcgggggtaggacttgcaaacaaaatacatcacagtttggataacaagcatcagcaggaacaaatgagacagcagcaagaaacacacaatcccaaacactgttctgtgcaccgaccccaaaccgaacaccttgcatccgttcaccaccaccatcggagaacaaaaactgtgttagaaagaacaagaagttgagctttaaaacaattatgagggacggacccatg

SEQ ID NO: 140809 - DNA, 283 bp, Glycine max
  Clone ID: PAT_MRT3847_98160C.1
ttttgtccctcttactttaactttttatcccaaaacactaaccggatgtcatcacattcttagcagtggtggaactgactctccaattacaacattgaataagagaggggatgaattcttccacaaatactttccaatagtggaactataaacatctaacaattcaccatatttgcttttaaaaaaaaaacagtcattcaggatacttgcttaaggggccgcagtttaatgcttcgtaacgctgaaactttgaaacttctcataaatcaaaaatatctattct

SEQ ID NO: 140810 - DNA, 1043 bp, Glycine max
  Clone ID: PAT_MRT3847_98161C.1
ctcgaggtattttttctaccccgaacatctgctgttgggttttatccctccattgctttgccctgccgccgataacaattttctgtatcgtgtattttttttttccttgttcacagctctgcgagatcttcattcgccgattttaaaagatgagtaagcttcagagtgatgctttgcgtgaagccatttcaggaatcatggccgattccaaggagaagaatcgcaaatttgtggagaccatcgaactccaaatcgggttgaaaaactacgatccacagaaggacaagcgtttcagtggctctgtcaagctgccccacatccctcgccccaagatgaaaatttgcatgcttggtgatgctcagcatgttgaagaggcggagaagataggactggactggatggatgtggaagccctgaagaagctaaacaaaaataagaagttggtgaagaaactagctaaaaaataccatgcctttttagcttctgaagcagtcattaagcagattcctcgtcttttgggtcctggtctcaacaaggcaggaaagttccctacacttgttactcaccaggaaactcttgagtcaaaggttaacgagtccaaggccatggttaaatttcaacttaagaaggtgctctgcatgggagtagctgtggggaatgttagtatggaggaaaagcaaatcttccaaaatgttcaactgagtgttaatttccttgtctctttgttgaaaaagaactggcaaaatgtcaggtgcttgtatctgaagagtacaatggggaaatcttaccgtgtcttttgaggaattttttttttaatccggtgaatttgtgatcgcgcttgatacattgattatcttaatagctagatacaaactatcatcttgttacagttttgttggctggatttttatgttagtgtttcgtgttcgtgttcatgttcaaacatttgataatgatatgcgctgtttttggtgctgcttttgtttttactcatgaatgcgtgttctattttggcctcaatttaaagatcctgtacgtagcgt

SEQ ID NO: 140811 - DNA, 571 bp, Glycine max
  Clone ID: PAT_MRT3847_98162C.1
ggagttttaagggaattttaaagccactttttgtttgatttaaacattgattaggggcaaatataatctacccgtttccaaattaagtcaatttttgtttttttaatctttttcagtatgttgagtcttcttttctttcagcagcaattaggctagtaagtagtaacacatcgagcttgaatttgatacttacactgttcgatttggatgacacaccattagaaaattaaacttggtagcaagtgattctaatactgaaaatctgtaatagttaaacatagtaaacaaaagtgcatataacttaaacataaatgtagttttttggtatactttttatgttctttaattacaattataatattttcttgataatttgaatagtaattttttatgttctttaattacaattataacccactagaattaatcgagtaatatagaatttaagtaggttgcacaaagttttagattcaaaattaaatttcggtattgttattgtagggaaaaaaacatttaaggtataaatataggctatcaagataaaaaatttcaacaacaattaaggaactat

SEQ ID NO: 140812 - DNA, 422 bp, Glycine max
  Clone ID: PAT_MRT3847_98163C.1
agacataccatgaagagaaattcatctgaacctaaagctcacgccacgttaagtttcatcatgacacagacccggctgttagttggccctgagagggataagattcctttatctgttttgtggcaccaagagtttcttgactcttgaggtggagttgaacatgaacggggtttattttttctttctattttagtagctaggttatcagatcagagatgagtgctcattaattagtctaaatttgtatgtggatcttttggttttccactcaatctgttgttggcgcatgttcatttttttttatttttaaaacaaggacatacttgttcttttctcttgcatgcatggctgtattttggtgattttctctgttggctgatggaagtgataaactgattatatattgtttgtttggggtattg

SEQ ID NO: 140813 - DNA, 395 bp, Glycine max
  Clone ID: PAT_MRT3847_98164C.1
gggccagccacaaaatggcgggggggctttgttttaaaatggaaatggccaaaagcataacccattaaggcattttataaaacttaattgaaaccctaagcaactggggccaaataaaaaggcaaggcccctaagaggggaaggttctcccgaccaatttttttaacccaacaaggggtttacttcacccgaacaaagtttttgggcatttgaaaaataaggggggggcaaaaaaaggggccccatttttagcaaccccggggcaaaaaaaacccattttcagggggggaaacaaaaaaaacccagttttccgggggtctcccggcaatattggggcaaacgaaggggggataatttcagccaaaccgtggggggaagggggccgaaacccaaaa

SEQ ID NO: 140814 - DNA, 274 bp, Glycine max
  unsure (1)..(274): unsure at all n locations
  Clone ID: PAT_MRT3847_98165C.1
cccaattcagatccccgcaggttccccttctcctccctcacctcttccaccaacactccccaaccaatccctttctctctccantccccaaggtgctggtgctggtgctggcacgttcctttggaaccccgcttccgacaccccttacgccgcgctccacggaggcaaagaccgcgtcgccacggtggtgctgttggggtggcttggancgaggaccaagcacctcaagaggtacgtccgagtggtacaattcgcgcggcattaacgcactcac

SEQ ID NO: 140815 - DNA, 591 bp, Glycine max
  Clone ID: PAT_MRT3847_98166C.1
attaatcagtgattttcaatttaatcatcactaatctattaacaatataagagatggcagggtaaggcttcacctaaagaactcaccacagagacaccccaaaaattctgaaacaaacagtagctagcctaacacaacatgaaggaatccacaaatgtgaatttaaaattgtggtgaaaccaaactttcatgataaacatgaatatcaaacccaagttcatccacaatcctaagatagtccatcctaccatcattcaaattgtaaataactaatttggaagatgtagtcttgaggagaagaacaccattttctgaaatgcacaatggcacaaacaagtgagaccatctacaaatcccaagcttaatgtaagggatggtcaccaatttagtccaagaatttggaaccccatactccttcatgagccacacaatccaatgaccttttctacagtcagagaaacaaacacaaagacagtcacgcaagacatccaatgtaggactacaaatcttgtcatggtccccatcaggcagcaacacttcgccataggtctccgtcgccaaatcgaaggaaagaatcatcctttgttgatc

SEQ ID NO: 140816 - DNA, 1564 bp, Glycine max
  unsure (1)..(1564): unsure at all n locations
  Clone ID: PAT_MRT3847_98167C.1
caatttccaatcttaaaaaacaaaaagaagagctttgaggaggtgtaacataattcctcatgtggtgttgagttcacgttcacgcccatcccagtaaaggtggaacccccatggctgctacagcctctagctttggaactacatggtgtcttagaagagcagctcaggcttttgctatctctcattctcatattctccgcaacaatgttaaactctctttgcagaggaacttttgctctcatcttctctccgtttctacttctttagcttcaggtgtaagccagacagtacaagctctaaagggagaagttgacttgttactcaaaggagtaggagaaagaagtgtaacgaaagaagtaaaacatattcttgagatggctagacgagcatcattaaagcgagagattctccatacagattttctaacccctccagtgttaaaggaatctatgcaagttttggaaaaactagcagacgtgaaagcaattgctcaaggaggttaccctcaggctgaacgttgtaggatttctgttgggcagacagaacagctgtccagtgatccagatattatttcagcattaagcattacaggaaacttccagtttgaaccttgctcgcatggtgacttccttagctcaattcttggtataggtattgtcacggagaaacttggagacattatattgcagggggaacagggtgctcagataattgttgtacctgaactcgttgaatttctcatgtcctttttatttaaagttcgtaatggaaaggtatcttgcaataagattccattaatttctcttgattatgaaccaccaagaacaaaatcattcaaaactatagaagcatcactaagagttgatgcactagctagtgctggatttaaagtttcacgttcaaagctagttgacatgatcagcaatggtgatgtgcgtatcaactggatccctgttactaccaaaggaaccacactcaagagtggagatattgtatcaattagtggcaagggaagattaaagataggagaaataaactccacaaagaaaggaaagtttgcagtggagctcattcggtatttgtagaagtttagagagttcagaagtactttcactctcaaagtaacaactttttctttcttcatttgtgtattggatttcacaaacatacttttcaaactttaaaccaacacagccgtagcctgtctaaaacgacatgcttttattttttgtggaaagatttgcttagcctcgcataacagttatgaagatagaaaaaaattgtacagacagaaccttgatgatgaaaccttaatatgaatcaaatttcagcatccaaaaaaaaaaaaaaaaaaaaaaaaaaaaaaactgtntttcccaaactaacaataaaccttgttgcaaacaaaaaaaaaaaaacataaaaagaaaaaaaaaaaaaaaaaaaaaggggggcccccccacaaggggccccccccccccggaaaaaaattccggccggggcccggggggggacccatttttccttaaggggagggaattaaaacctgggggctcactgggaa

SEQ ID NO: 140817 - DNA, 497 bp, Glycine max
  Clone ID: PAT_MRT3847_98168C.1
ggctcgagcaatcttctgagagtgtttggttgtatgtttcaaacatgtgtcctttctggcagagggggctaaagatcaaggggactatgggggctcagcacaatactgtggcggatatcaacggcattatcactgatgtagggatccttgcccaatgctaaggctcaataggttgtgcacacgatgcacttgcttttgcaaccgccgccatctccatacagctgattagagctcccaaggctgactgggttacctgatgaactggaaagagcactacttgaagatgaaagagaccattacgggccattgcatgctggcgctcaagcttacgaggttcattcagaatgcaaccgagacttcggaattcccgctgcatgttctatctagaacttcatgccaagtgatttcttcctcgagtatctaagtctcgattacattcctaaccatggaaccatttccttcgtattcaactgctgggtttacaattccatttacta

SEQ ID NO: 140818 - DNA, 1038 bp, Glycine max
  Clone ID: PAT_MRT3847_98169C.1
gcagatacagggacagccctactaggaacatagacatgaatgatataaccggaggaagtagatcgtttctggatttgcatccagagatccacgcgtccgctttttcacaagatgttatttcatcccgtcagagaacagatgattatgtaaacatgggaaacaaagttgaacacaccagtgctgaatctgttgttcagcaatttactaaggatgatgttaccaacccacaaatcaccacctttcaacaagatgagtcaccgatacaagtaatgcaagacaaatttgaagagagccattttgaagaccttataagactctctttggatccaatgaacaatttaaccttctccaaggacatcttacacaatgtaagagaaattctgcatgctctcagcttaaaatgggatgaacttactctgaagagatcatgtgaccaattgttagatccatccacctttgttgaactgaaggaactaactagccaactttctggtggtagaaatcttgcatgactgtgtcatcgaaattttcatgcaggtatatcagaactgtggattcccacctcatgtttcaacaaaaaatccaaatgtccaagcatatgttgtgaagaaacttctggttaaagagattacagaactagttaagttgcactttcaccctcgtccatcacctttaacgttagaacaacttgctgaaaaggacttggcaagacgtggttcgtggctaaatatccaagttgttgcagaagatattgcaatagaggtggagaaagatgttcttgaaaaaatggtattggaaattgcatctgagatggatgtcagaagtattgtctacttattactcgtgggatgataaagcactatggaaagattatcaagctaccattttctgaataaatcataaatttggtccaggcattacgcttcctaaattacacttgtatcagtacaacatgattttttatacacaacaatatgaaattttcattttctcattattttttgttcgtgtacaatgacaataataaagtttgaattt

SEQ ID NO: 140819 - DNA, 445 bp, Glycine max
  Clone ID: PAT_MRT3847_9816C.1
ccctctcgtgcggcaaaatattgctatagagcctgggccctccctacctatggaatgggctttcactctctctgtctctctctctgtctctctctatatatatatatatatagtgacatatagatagatgtatatcaaatgctctgctctgaactgtctcacttcccgggttcaaaccttttctcaagcacgccatttatcacggggctaaaaaaagacccaaggaaaggggagcatctccatatcctatcagactacttctcagcatccaccccaaaaaagaaacgcataccaatgcagacagctaaaatcagggtgaaaatggactgtgatggctgagaaagaagacttcggaacactgtttccaacatgtcacgtgtgaaacaaggagaggtgaatagaaagcaaagcacggtaacattgacaggtcacgtggatagaaaca

SEQ ID NO: 140820 - DNA, 379 bp, Glycine max
  Clone ID: PAT_MRT3847_98170C.1
aaaagtataaaaagataggaaaatagcagataaatgataaacgtataagttgaacataattcgtaagaacaaaactgaatcactatatcatgcaactttaactgaaaaatgatagaacacgacaaaaacatccacgaccaacaaaatccagtcatatagcttgtaaagccataaaagggagttactgaacataagatacaaaaaataaacacgaaaaaacaaacaaaaaatatccacattttgctggaacaatacgtattatgacatcatcttggcgacttctccagacaaggtgtccagcaattcctcgagtgtaatcaggggaatgttacctgcctattatacatcaaagcagtctttggacaacccccaaaagcac

SEQ ID NO: 140821 - DNA, 2561 bp, Glycine max
  Clone ID: PAT_MRT3847_98171C.1
atccaggtggagtattagtacaacaagtattgcagacggaaggtggcatattgtaacaatgtcaattgatgctgatttaggtgaagcaacatgttatttggatggtggatatgatggctaccagagtggattaccattgtgtgtgggtagcagcatttgggagcaggggacagaagtgtgggttggtgttagaccaccaacagatattgatgcatttggtaggtcagatagtgaaggggttgaatctaagatgcatattatggatgcttttctttggggaaggtgcttaactgatgatgaggtttcttctctctatacctcaatggcttcggcagacttcagtgcacttgatttccctgaagataattggcagtgggctgattcaccttcgagggttgatggttgggacagtgatcctgctgatgtagatttatatgacagagatgacgtagattgggatggacagtattctagtgggaggaaaagaaggtcagagcgtgatggcatgatggtggatattgattccttttcgaggaagtatagaaaacctagaatagaaacacaagaagagattaatcaacggatgttatctgtagaattagccatcaaagaagctctctatgctagaggagagagacgttttactgatcaggaatttcctcccaatgatcactcattgtttgtggaccctgcaaacccccctgcaaagttacaggttgtttctgagtggttgaggccaggtgagattggcaggcaaaaccatcttgactgtcgtccgtgcttattttcaggagctccaaacccttcagatgtttgtcagggccgtttaggtgattgttggttcttgagtgctgttgctgttctagcagaggtttcacgtatatcagaggtaatcatcactccagattacaacgaggagggaatttatacagttcgcttttgtgttcagggcgagtggatccctgttgttgttgatgattggattccttgtgaattaccgggtaaacctgcatttgctactagtaagaagggctatgaactttgggtctccatattggagaaggcatatgccaagttgcatggctcttatgaagcactagaaggtgggcttgttcaagatgctctggtggatcttacagggggtgctggggaggaaattgacatgaggagtggtgaagcccagattgaccttgcaagtggtagattgtggtctcaactgttgcgcttcaagcaagaaggttttctcctaggtgcaggaagtccatcaggttcagatgtgcacatctcttctagtggcattgtgcaaggacatgcatactcaatactgcaggtaagagacgtggatggtcataaacttgttcagatccgaaatccatgggccaatgaagtggagtggaatggtccctggtctgactcgtcgcctgagtggacagataggataaagcacaagctgaagcatgttccacagtcaaaagatggcatattctggatgtcctggcaagattttcagattcattttcgatcaatatatatttgccgtatctacccatcagagatgcgtcattctgttcatggtcaatggcgtggttacagtgccggggggtgtcaggattatgatacatggaatcaaaatccacagttcagactgactgcaactgggcaagatgcatcatttcctattcatgtattcattaccttgactcagggtgtgggattttcaagaacaacagctggttttagaaattatcaatccagccatgattcacagatgttctacattggaatgaggatactcaaaactcgtggcagacgtgctgctttcaatatctacctacatgaatcagttggtgggacagactatgttaattcacgagaaatatcctgtgaaatggttttggaacctgagccaaagggatatactatagttcctactactatacaccccggtgaagaagcaccgtttgtactttctgttttcaccaaggcgtcgataactctggaagctttgtagtgcctagggatagtttttacatgtatcttgtcctcttgataagtttctctgcctgggttctcggtggatcatttacttgtactgccggagcccgtctttagaacaatcggcattgagatactattcctggcggaaacgacatggcatctgtttgagagatgaatgaggtatagctgcgcataaactcttggtctttgaatctgacgatttgtcatcttgaacaatgcttctgccagcattgaagagggctctcggggtgtttattgtgtacataaaaaagtggtactataggggtatacttgtaaccatttaagcaaagttgaaaaagaaatagctgaaaataagtaggaaatttactaacacctggttcaatggaggtaaggacggtgtggggaggtatagtaacaagcattgagtgactgattgtaaattcagttgccgttttgacaattgcaaaaaattgtacaaacattaacaattatcagttcctatcatttattggcatttgggaaaattttgtacaaatgtctttctaatctaatttgatttc

SEQ ID NO: 140822 - DNA, 273 bp, Glycine max
  Clone ID: PAT_MRT3847_98172C.1
cagtactccgctcgaggtttcctaaagcatgtagggaatttagacgctgcaggatcatcacgagattgagtaatgaagtacaacattgcaaatcacagcaatgggtgccagaatcacctggaaatcgatgatgaactgaagcttcgggcattttggagacaaaggattccccatgatgacctatgcgacgtcctaggtgaggagtttaaagggtatgttttcaaaatcactggcgggtataacacgcaaagattcccaatgaagccgggagtg

SEQ ID NO: 140823 - DNA, 529 bp, Glycine max
  Clone ID: PAT_MRT3847_98173C.1
aagaagaaagccagtttctcagggaatggagcagtggaaaatgcactagattttcccccatgtttctcgggaacaaaaataaagaaaaagtctaaattccagaagcacttcagtttctttgagcgttctcttggtggaaaacaagcttcagaggaaccaggtggtttcgatgaaggatggaaatgaaaattttatctgtagcttttgcttctgctgtggaaagaaagactaggtctaggggatgtcagagtagatgctgttcaatgacaaagagaactcctttgattcttttctagaaagaaagaaaaaggaaaatcccttttattgtaattttactgtttttttttttcaatatttgctactgtgccactgccaatgcagtttggaacaacataagagaatataagaaactgaagagggtttctgattccattttcttggatgccatcagtgacaggcatgtctgaatatggtcacaaattgtttttttttttccctggtatcgagaacacaagcattaagttgctaa

SEQ ID NO: 140824 - DNA, 477 bp, Glycine max
  unsure (1)..(477): unsure at all n locations
  Clone ID: PAT_MRT3847_98174C.1
ggctcgaggattagttaacaagttcccattttagggtttttctctctctgnctctctgactcttgtcttctgcacacaaccacatgccctggggggaaatccccaataatggacgaaggtgagggaggcgatcccatggatcagttccaccgtaacgaggctatatccgctgtagctgacgacggtttcttgggcgaggaggacgacgattacgaggatctttacaacgatgttaatgtcggcgaagggtttcttcaatcgttgcggaagaacgaggattcnggggtttcggaacgacgtcgtcgaggacaaaaagcccgtgcagcagcctgatcaagatcccgttgtcggggtttcgatacccggtgtcagtggtggccgtggaagtggaattgtggaaagcaaggtttctgggaatgttgatgggttacagaatcaagggtttagaaggggttattctggtggaggaggtggatc

SEQ ID NO: 140825 - DNA, 834 bp, Glycine max
  Clone ID: PAT_MRT3847_98175C.1
cccatattctctctcttacccggtcattcagtgacctttctccccaatatatattcctcttcccctccatctgcccaagtcttttttccttcgtaacatcttttttctctttttcttcccatagcattctgactcatacccaaattatttattgtttgtctacgaaagcagtgaaaaaaaatgacagtggagcttatggggttccccaaaatggaggaacagaaggcaattcaagaagctgcctccgaaggcctcaaggccatggaacacctcctccgtctcctatcctatcaaccctctcacctccacgctcaccacaccgacgccaccgtttccaacttcaaaaaactcatctccttactcagccgccgcaccggccacgcccgtttccgtcgcgcacctctcccttccccgccaccggctaacccggtcaccctccaccaacctccctccaccttcgtcccttcgcactcccagtctctaaccctcgatttcacaaaacctagcattttcgcctccaacgccaaatccatggacctccaattctctaaagaaaccttcagcgtctcctccaactcctccttcatgtcctccgccatcaccggcgacgccagtgtctcttacggcaaactaggatcctccctcttcctcactcctccgccagtctcagccggaaaacctcctctctcctccgctccgatcaagaagaggtgtcacgaccaccgcgaacactccgacgagatctccgggaaactctccggctccagcaagtgccactgcactaagagaaggaagaatcgagtgaagaaaacggtaagagttccggtgatcagc

SEQ ID NO: 140826 - DNA, 253 bp, Glycine max
  unsure (1)..(253): unsure at all n locations
  Clone ID: PAT_MRT3847_98176C.1
ggcaacaccctttttcctgtctcctcctcaccgctcctcatactctcatggaggagcgggtgtcttcgtcatcgctaccgtcgccatcacccccacctcttgaaaagaaccataataccgacaaactcaagttaccagacttagaccctggcacctnncgttgtccaggtccccaaggaccaagtctaccgtgttccgccgccggaaaacgcccaaatcgccgagagccataagaaatctcctcccaacaagg

SEQ ID NO: 140827 - DNA, 155 bp, Glycine max
  Clone ID: PAT_MRT3847_98177C.1
ggctcgagctcaaatgctacccaaaacgaaattttcaatacccaacaaagaccaccacaaaagacaggacagcgcataatccagacccaccgcccagcagacacagccacgacccgaccaacacaggtcaccaacaactaggaacgcacagcata

SEQ ID NO: 140828 - DNA, 363 bp, Glycine max
  Clone ID: PAT_MRT3847_98178C.1
ggctcgagctgcaaagtagtgatttgagagtcttagattgaggatggcgtggacccagggcagattcgtgtctatcacaaagctgtcgcgcaggttgctaattctcatcctcctgaggctcagattctgtttagaagttggcgaccaaccatcggaattgagggaatcccatttctggttgccgaatagatgccatctttgagagcccttatcttgcgggaatgctgactgaatgtgccatacctcataatggttaaggtcctgtgcttatctctacactccctagctgctcggtaaaagatccaaccctaatcatcatctactgtatctcgctgtactagttggacactgtcgctgacaagc

SEQ ID NO: 140829 - DNA, 359 bp, Glycine max
  Clone ID: PAT_MRT3847_98179C.1
cttcttttcttttttttttttttttttttttggggggtttttttaaatttttttgtttttaaccccgccaacagggaaattggaaaaccataaaataatacccctaagcccaaatccaattttaaaagatgttgcttgggggctcccattaaaatatgctaagggctgaaaataaaaaacaggtgtcgcataaaaagaaaaaaaaaaactcaggtttggcttaaaactttgggcccaaaggaacaccacattgcaaaatttgggccaccaaaccagggttaaaaaaaattattctgagggcgacctgttcacaaatgaacggccacatttcctcaaaaaaacatctgccctttaaagct

SEQ ID NO: 140830 - DNA, 180 bp, Glycine max
  Clone ID: PAT_MRT3847_9817C.1
cagaggcaaaactaaagtatgctgttgttactggagccaacaaagggattggatttgggacttgtaaaaaacttgccttaaatggggtcaagggggggctcaccgcaagggatgagaaaaaagggcctggaaccttttagaggatggaagagggggggttcttttatttgggtatttttc

SEQ ID NO: 140831 - DNA, 496 bp, Glycine max
  Clone ID: PAT_MRT3847_98180C.1
cgagaagaccacaggggggcttactcagtcgtaatgtgtactatctcgctaaacagagcgtgcactgggcaaacaccactggcatgactctagcttaagcgagagagaaaatagcggctgggatctctagcagaggcttgatgtcatcttcacatgaactaggagctggctgaagaataacgccttcctctaaaccatctgatggtaagatgctgaaccagatggctaataccagacatacattggggaggattgagcaagacaagcaccagcacccatttaacgcccaccagatccagcaagccttgcatcacatgttgttgaacgcatcatgtgtgttccacctggcactttgcgcgaacacgagctctgctggacctgctatgctgcgatgaccacgcatcgtaactagaccaagtgacccgtaagcccatagtaggtgaggcctatgaaatgctcccttctcacaccatgcaaagctcgcatctaataaaaa

SEQ ID NO: 140832 - DNA, 351 bp, Glycine max
  Clone ID: PAT_MRT3847_98181C.1
acgagctttcactctctcgcttctctatcttcctgcggttttttgagtctcccaaattctcccccatcaggttcccttcttctcaatccatgacccctttgtgtttgtaataatgtctaacacacgcttctcaattattattttttcccatttgtgcccctgccggattcaaattcacttgaatatgtagttttcagaaagcgaggatgagaggacagttagagaatttccagtttcataacaaaaaaaaaaaaaaaaaaaaaaaaaaaaaaaaaaaaaaaaaaaaaaaaaaaaaaaaaaaaaaaaaaaaaaaaaaaaaaaaaaaaaaaaaaaaaaaaaaaaaaaaaaaaa

SEQ ID NO: 140833 - DNA, 882 bp, Glycine max
  Clone ID: PAT_MRT3847_98182C.1
gagcagtggcactagcaacggcatccgaaacagtgattgtgctaaaagcaatagcaatgtcaatggccataacaacagcagctgcaagagtgatggtgctaaaagcaataacaattacactcgcaacagttagggtgccagtagcaattacagccaaaccagtgaggacgctaggggcaacattaatagtgctaaaagcattggtggcaataaccgcaacagtgatagcactaaaagcggcgacaatagcagcaacaaccgcaacagtgataacactaaaagcggtgacaatggaaacaaccaccacaacattgatgttgcttatggcaatggcagcaccaaccgcaacaatgatagttctaaaatcggtgacaatggagacaacaaccgcatcaatgatagttttaaaagcaatagcaatgccaatggccataacaacagcagcgacaagagtggtggtgctaaaagtaatggcaatagcaataacaacagcaacggtggtggtgctaaaagcaatgacattggcaatggaaatagcaattataaccgcaacagtgatggtcctaaaagcaatgtcattggaaattacaaccaaaatagtggtggtaaaagcagtggaaatggcaatgaaaagagcaatagcaaccgtagcagtggtggtgctaaaagcaatggcaatagcatccaaaacagcaacagtaatcgtaccagaagcaatgccaatgccaacaataattacacaaacaaccccttccaaaacaatagcaccggtgccggtgacactcgaaacaggaacgagaggcaggtgcaaagtagaatcaatattgaaataataatgaaattattagcttggtgcaaaggaaattaataaatgttaggaag

SEQ ID NO: 140834 - DNA, 559 bp, Glycine max
  unsure (1)..(559): unsure at all n locations
  Clone ID: PAT_MRT3847_98183C.1
ggctcgagctcagagctgaagaagtgtttcgcttggggcttgaagtctctgcaccaagcgaagcaatgccactgccttctcctccgtctcggtctccaccaagacacctacctcatcaacctcctcctacgctcttccctccacttcgccgccacgcaatacgctaccgtcgttttcgcccaaaccccgcaccccaacatcttcctctacaacaccctcattcgcggcatggtctacaacgacgccttccgcgatgccgtttcggtctatgcctccatgcgccagcacggctttgccccggacaacttcaccttccctttcgtcctcaaagcctgcaccagactcccacattacttccacgtgggtctcagccttcattcccttgtaatcaaaactgggtgtgactgggacgtgttcgttaagaccggccttgtttggttgtactccaaaaacgggtttttaaccgatgcgcggcaggtggttgatgaaattcctgagaaaaatgttgtgtcttggactgctantatttgtgggtacattgagtcccggtgctttggag

SEQ ID NO: 140835 - DNA, 337 bp, Glycine max
  Clone ID: PAT_MRT3847_98184C.1
aagggatctcagggccttggagctgtaccccctaactctgtgctggcctcgtcctgatggtcacgacgtgtaacgttgtcacccaactgtagtggatcgtgctgatagttcttatgctggaggtgtatatctagtcactattcacttacctccggattatcctctcaagcctcctaacggtgcctttaggactaacgagtgtcgccctaacttgtatagcaatgagtgcatctgtctagatatcctgacggagctggggagctgtggactcacgatatctagagtactgcgtgatatatgcgttttggttggtgatgaggattctggtgaaggcctg

SEQ ID NO: 140836 - DNA, 468 bp, Glycine max
  Clone ID: PAT_MRT3847_98185C.1
caaagcccgctacttacccaccaacggaaaccccgtcgtcaaaatcgccgtttcggggcagcaccacgtcacgtccatgcccgcgcgcaagtccaccgtgttattcgaatggaatcagaccttcgcattcgcacgcgacgcacctgattcctcctccgtgctggaggtctctgcgtgggacccccaagcttccgaggctctgctcggtggtgtgtgctttgacgtcaacgagattcccgtgcgggacccaccggacagccctctggccccacagtggtacagattggaaggcggaggggccctccacggcgacctcatgatcgccacgttgatgggaaccgcaagccgacgaatcatttcccgacgcgtggaagagtgacacgtttgctcatgtgaactccagagccaaagtttaccagtcaccgaaactgtggtacctgagagccactcttctcgaagctcaagacg

SEQ ID NO: 140837 - DNA, 367 bp, Glycine max
  Clone ID: PAT_MRT3847_98186C.1
cccaaccctagatattaattcttcaacagcaccaaccttcttccttctcttgggctcaacattatgtcacacttcattctcagatctccccaaattccgtcacacgctccctccatcaaaaacaccccacaattcttcccggacaagtctctttccctaacaattttccacctttgagcctcaaagcctctcaattttgcattccatcttgtgggatccacttgaattgcactggatttgaaaccccactgaaaaactcacattttttcaactgggtatgctttgtatgcggccttagtgtgtagtgtattggaagtagtgagttctcatggcaatgccatcgggaaatgcagtaatgccggaaaaa

SEQ ID NO: 140838 - DNA, 376 bp, Glycine max
  unsure (1)..(376): unsure at all n locations
  Clone ID: PAT_MRT3847_98187C.1
ttgctgtnngatgagagtttcccttctctagttcatacaagatgnnctctattaagttgctccttgatacctcaacaaccttactactggaatgaattaactccttctgtttgaagggaatcaaaatctcagacttatcattgtgtttatagactagaagacatgtgtctgtttcactcatgcagattgaaccnttnncagtatgtataggctttatgatnnagaattttgcgccccacgaacattggtatagctcccactacacnngatgctcctaccgtgaggaccagcttcagnntnaaccaccataagcacgttaactgcctattccgtggtaactccaacatgtatatggatcccatacgtggccagtact

SEQ ID NO: 140839 - DNA, 743 bp, Glycine max
  Clone ID: PAT_MRT3847_98188C.1
acaattaagaacaagatatctcttgctgagttgtttgatagtaatcgtgggcagctcaatgagaagagaattctgaatttaatgaacattgttattcaactaaggaaggtttgcaaccatccagagttgttcgaaaggagtgagggaagcacatacctttactttggagagattccaaattcccttccacctcctccatttggggagatggaggatgtatattattctggtggtcacaaccccatatcatatgagataccaaaacttgtctatcaagaaattatacaaagttctgaaactctcagctcagctgttggtcctgttgtctccagagaatcttttcataaacattttaatatttttagacccgaaaatgtttatcggtctgtcttctcagaagatatgtacagtaaaagtggaaattttggttttacccatatgatggatttgtctccacaagaggtgacatttctggctactggttcttttatggagcgactactattttctatgatgagatgggaacaaaaattcattgatgaagctgtagactttctaacggagaccatagatgatgatccggaatgtagttaccttgagaaagaaaaagtgagagcagttacacgaatgttattggtgccatcgagatctgagaccctggttcttcaaaaaaaattccaaactggacccagccatgccccttttgaggccttggttgtcccccatcaagatagggtgttatc

SEQ ID NO: 140840 - DNA, 486 bp, Glycine max
  unsure (1)..(486): unsure at all n locations
  Clone ID: PAT_MRT3847_98189C.1
ggctcgagctccctccgtcacgcatcttgtctcttccgtcagcccattgtaaagctgccaacacacctgcacactcaacgagcccacttctcccgcaccatccgcaagatggccaccgaatacaagctcaagggcttgaccagcgtcgacctcaagaacggccagaaggctgagtacgaggtcgaaggcatcgagggcggcaaggtcctgctcgtcaaggcccaggatggcctgcacgcaatgtcgcccaactgcacacactacggagctcctatggtcaaaggtgtcgacaccggcgacggacgtatcacttgcccatggcacggcgcctgcttcaagatctncactggtgatgtcgaggacgccccggctctcgaccctctcgccaaagtcaaggtggtgcacaaggatggcaggtgtatacatcgagggcgacgaatccacaatcaaagcctgcaggaggaagttgaacatcaagtgctctgc

SEQ ID NO: 140841 - DNA, 503 bp, Glycine max
  Clone ID: PAT_MRT3847_9818C.1
tgcacgcttacggccgctgggaattcggatcgagatcctagctagggtgaaaaagcagcttgctctccgtagacagcgaatcactgacggattgtgcttctttctatgactaactcaagggtcatggatacacatgaacagccgtgcttactacaggcctgccacctactgatacttcgggtgtggccattgatcatgaggccgtgtgactggcagactgacacaatatgaaggaggttcttctatgccgtgcatggacagcaatgagatgcctcttgagtcgtaacatatgcctagattgcagacccgaggagctacacttccctatggatcgacttgcacctgctggtgacgttcacatacccctggcttatgactgtggagaacctcaacgctttgactacgagcagactgctgatccttatgatgcctcagaggctcatgtaccatatgaacagacagattttagctggaagggaaatatacgtgatagaagctgaata

SEQ ID NO: 140842 - DNA, 250 bp, Glycine max
  Clone ID: PAT_MRT3847_98190C.1
gctggtcaacgcggtgtcgcgcgtgctcatggccttctcgcccaactacatgtccatgctgctcttccgcctgctgcagggcctggtcagcaagggcaactggatggctggctacaccctaatcacagaatttgttggctcgggctccagaagaacggtggcgatcatgtaccagatggccttcacggtggggctggtggcgattaccgggctggcctacgccctgcctcactggcgctggctgcagctg

SEQ ID NO: 140843 - DNA, 436 bp, Glycine max
  Clone ID: PAT_MRT3847_98191C.1
ctcttcgatattcgacaaagctgaattggataacatttttttatttttctgccaacctactaatccacaaatgcattcaaatgccacccaaacttttgaaggggaatagaacaacatatatgcctttcatgctgctcaaataactccccctagaaatgttgaaaatatgaaatgcggccggtgcaacggaaccgcaataagcataaattgagttggactatatgctccaaggggaactgctgtattaccctcaagagcgctaaagctttgaggtcccgcacagaaagctggatgtaaaactattgtccttgcaactctgccggatcaggaaggagcgatatgccaggaggcactgcattgagcaaagaagggtgagatgactatgatacgtacacctggaagagctcattgactatctggcatggggtggggaaca

SEQ ID NO: 140844 - DNA, 408 bp, Glycine max
  Clone ID: PAT_MRT3847_98192C.1
gggggaaaaacactgaaatttaaatgctaaaggggagttttcgttaggaaggaatttgggcccctttcttttaaattccctaacccctggcctggaaaaacttttgctgcggcttgaaaatttctcgattttaaaactgggccttcatctatattttggtatcatcttcttctagaggagacctttgaatggcatatcccttttttgggggtggggacatttaccggataacaacggattcatcaccttttttaaaaatctggggggggggatccatttttattgggggaaacctggcaatttttttttttaccaaagctggcaggtctgacctttaaccccccttttttagggggtaactcatctaatttttccgcattgcctatttcctttgaacccacagggggg

SEQ ID NO: 140845 - DNA, 247 bp, Glycine max
  Clone ID: PAT_MRT3847_98193C.1
ctacaagatagagcttgtctgagaatgcaatagatagatagctttggctgggcaatttcatgtacattgagaccatcaaagaagctttggaaagagaatgccctggaggtttttcatgtgctggtatccacgttctctctgtcagatatggcattgtatcgctaggaggtacccatatcactcgtaagactggaagcagggattgtacaatgctcagagctgatgtggttgcaccagttcctcccag

SEQ ID NO: 140846 - DNA, 586 bp, Glycine max
  Clone ID: PAT_MRT3847_98194C.1
gggaagatcgttagagggaaattatccctttgagaggaaatcacgctctagatggcaaaaagtatcctctacaaaagcacaattagttagtggaaaaaccttcaaatatgacataatcggtgctggctcacattcttcaggagattttccatgaaacggaagatcaggaaaaacctgagccgatcgatactcagagggagacaaagaatagatcctcaatacaatgaggatcaggctcagatggaaacaaattcgcttaaattgtctcttgatgatgttgaaactcctaaaggctctatgttggatcttaaaatttctcaatctaaaattgcacttcccaagaacacagagggaggaaccattttccgtagcgatctattggcaaatgctttgacagatggtaatcttagagcaagtgttgatacgcagcgcactcatgatatcaaaggaaagatgaaaatggcggccacagccggtatccctgagaatacaggtatagcatcggcctgcgctagcaatagttattttaggcggcgccccagctctggtttttacactaactgatgtcaacactgggaatcatgga

SEQ ID NO: 140847 - DNA, 915 bp, Glycine max
  Clone ID: PAT_MRT3847_98195C.1
catcttgactctctgatgttagtgtatcaatttagatttgttgaatgttttggtgccttaccatgtagttacgaagttttgtcaattactattactgttcactataggtctatggtctactgatggtcagatcaactatgaggagtttgtcaaagtcatgatggccaagtgagggccaatcacccataacaaaaaaaaattgaaaaacccctgaacagaaaaaagacagggcagataagttttgatgagaattatattttcattaggacaatcttcatttggggtcattagtttttgttggtcggctttgtttgcttttatttaacgcgtccgctcattagtattttctacttgtttgctctgtccttgttttagtagcttggattagatgtgtctcaccatgcatttgtacttcacttttcatcttttttgggttactactatgaacctggaacaattggttgcaatttgtgcttttacatgtgagtgatttatactgttgataccaaaaaaaaaaaaaaaaaaaaaaaaaaaaaaaaaaaaaaaaaaaaaaaaaaaaaaaaaaaaaaaaaaaagaaaaaaaaataaaaaaaaaaaaaaataaaaaaaaaaaaaataaaaaaggggggggcctttttaagggtcccaatttttcttccccggggtggcaagttataaatttttttaaggggcacccaaattacatttcccgggccgtggttttaaacccccggaccgggaaaacccggggggtccccaaattaaaaggcttggaacaaaatccctttttaccaagtgggaaaaataaaaaaaaggcccgacccgttcgcctttccaacaatttcccccccctgaatggaaaagggcacccccctttaaccggccatttaaccgcggggggggggggggttcccc

SEQ ID NO: 140848 - DNA, 149 bp, Glycine max
  Clone ID: PAT_MRT3847_98196C.1
ggagctgaatctggggcaatttgcgttatcatccgctggaactctcacacataatgcatgagtacgtaaatcggataaggctgttacaatcagaacgcgcaagatcatgatcaacaggcatcattataagcagcaataagacgtggatg

SEQ ID NO: 140849 - DNA, 494 bp, Glycine max
  Clone ID: PAT_MRT3847_98197C.1
aagccaggcgatggtatatttttcttgatagtgtatgactatcgaaatgcaacggtgccgattgcctgaaagtcggcattacggatgaaagtctggctacaaacgaagcttgaaaccaatctctcgtttggccttgccagagagcacgttcggtcggttgattagacaagaagagcaaaagaagagacttttgaggatgttcgtgataaatgagcagctacttttttttgggtgctatagtacgtcgggcctgattcatgagactgtcggctggctcaaagcatatatcggaacccaggtcggacatccaaagaagttgggatctttccgtctctgacaccgccaagagttgcactgtcgtctccgtgggcagctctctcctgttcgagcacctcgattttcttgttcatccgattgagatcccatcgatggaacgtcagacccatcaggcagactccaaacatggcaatgctgatgccaaaactatagcgata

SEQ ID NO: 140850 - DNA, 917 bp, Glycine max
  Clone ID: PAT_MRT3847_98198C.1
ggaataccaaggtagttcgttggtcactacctgctcatagcgacacacacagctgctggctacggatacataaaatcgttcccagattcaaaacctgagatgcttttcttgagctggggtcgcccctctccccaagaccaaaagacttgcatcaacaagtcaggtactttcaactatgatgacaaatataaaggagctactgctaaatcagtggcttcccttaaagcagacgagggactctccaaagatggatttttactaaacgaggcgcgagttctggttggttctggtattgagacctttgaaaagggcaagagtgctcttagaagttggaggcattttggattgaattgggcatttgttgatccgaagacaccagtccaacaaggagtgaagttctgtgtttgtgtcaaggagttcttcccgtggctcatgatgcctcttcaggttgtgtatgtaaatgaaactggcactgccaaataccgtactgcctcctttggttttggaagtggaactcttcatggtcacttgctggcaggggaagagcgcttttcaattgagattgatgagaacaatcaagtttggtatgaagttctttctttctcaaagcctgctagcattttatcattagttgggtatccatatgtgatgcttaggcagaaatactttgctaatgaatctgccaaggctatgctgaaacatatcaattcttcaaaatcctaatgcaaatgtatatgttatttgtaattgaagaagatttgaatctttattttccttttgatcccctttttaattaaatattctgcctctttttcccttttgcaaaacacaccccgaacctccccccctttcccccctgtccgccggctgcttcgtttgcctttggtggtgggctggatgctgtcttcccactacct

SEQ ID NO: 140851 - DNA, 413 bp, Glycine max
  Clone ID: PAT_MRT3847_98199C.1
aatcccttcgttgacattaagacattcattaagatggtccccaggggtaaaacttcagtaatccaaatttccagcatggttaactgggatggaggagcgctacctgtctacaggagcgtgatggctaagcccccctgagggctataaacagaaggtcgggaaagtacattagactaagacttagagagctaggatgtacgatataccccgcctacgaccgtgcagaggataaggacgctactaggctacgaatgggggtatgggagagttctaaacagatcctttccgtggaagctggtgaaacaagagcctcaggcaatctaaggtggctgaggcaaagctcctgctaggtgttgagattaaaatacaggcctaaggggttcttgaaaggccatatgatcaccatatgacac

SEQ ID NO: 140852 - DNA, 358 bp, Glycine max
  Clone ID: PAT_MRT3847_9819C.1
gatagcagtatctttgctcatctatattcaccaatgtacactgcatttcacttcggcgtttgcgatcatcagagcaatggcacgtgtcaccatgacgctcacacgtctaacagatgaaatgctccgaagaagcaattggcatccaaagcctctcccaaatgagccccggcgaccttcggagtgtacaatcgacacagcttcaggccattaacggtggcactaacggagattctacagtagcagcatagcacgaatcctctgatgacgaaactcccatatcagacgctcgtcaaataaatcgctcaggatatcaaaacgcatcacagctttcagtccaacgccatgtcggatcttcatg

SEQ ID NO: 140853 - DNA, 398 bp, Glycine max
  Clone ID: PAT_MRT3847_981C.1
gggaaggcaagaaccgaaaagggttatacacattttttaggggaaccccacttggactttacattttacaggacagtccgaacgttctagtttttcccccggaaggaaagatgaaatgaattacaaatggggggcttaatatgaaaaataatttttttacggggggggcgtatgacccaataaattaaggggggtttaaacttcaatctttaaaaaaatctcacaggcaaaactcccacagcagtgggaacaacgtggcacaggtaaacaaaaaaaggggattccatgacaagagattcacagggctggctggggaaaattgatccccgaatttttttttcaaggattaaagtcttttttttatgacagcagcatttttattgccacagaatttttgt

SEQ ID NO: 140854 - DNA, 490 bp, Glycine max
  Clone ID: PAT_MRT3847_98200C.1
atttcatagttttttatataggattattttagctttgtgttatagatactttaacattggttgtagaagattcccttaagacaggccccacttttgaccaatattttattaggggcgacaaccccctcaacaacgaaaacaatttttattataaaaaaaaggtttgagattctctttgccttaaaacaaaaaaacttgggaaacaaggtttttttttttttccccatcgcccgaaactcccccctctcccaaaaaatctggaccttctacaaagagggggccaaagggggtccaaacaagcctaatgtcccagtataaaaaggaaaaacctacacttaaaacgccgttttagagagggggagcactgcctttctcattttccaccccagtaaaaaacggtttgccctcaaacaaacactgttttttttacacccttgggccaagtttttaggaccctataaaaaaaaaaagccgaatgtggactatgacc

SEQ ID NO: 140855 - DNA, 202 bp, Glycine max
  Clone ID: PAT_MRT3847_98201C.1
cggggagaacaagaacaagaaactaggtgaggttgcgctccatatgatcggaacatacgtccacttgcatgcggcatcacatctcatcaatagagtcacctagattcaactcagcgtccgtcgtttgacaccttctctgcaggtaacattccagagttccacaacattcaccacttgcaacaaatccacatttcgccaactg

SEQ ID NO: 140856 - DNA, 257 bp, Glycine max
  Clone ID: PAT_MRT3847_98202C.1
atacaattttatttattggagtttagcaaaacagaaccggagacaacacaaagataaggaaagttatggacggtattattcctttacaaagattacacttttattacaactaaccttattatgaaggtgtatttattgcgagtccttaaacccatatataagccttagaaagttccttcttaggggtgagggggagcaaaaacccgagactcgttttgatcattaggaccattgggaccataaccgggagcaggttc

SEQ ID NO: 140857 - DNA, 297 bp, Glycine max
  Clone ID: PAT_MRT3847_98203C.1
ttaattcctccacttcactccatgcatgcaccatattcttgaacctcacacacatgtacagtagcatggctgcaaccaacgaagcagaagaagcagcaggaggcaaaagggtccaatacccactggactcttcctcctacaagctcctgaacgagatcggcgaaggcgtgagcgccgtcgtctacaaagccctctgcatccccatgaactccgccgccgtcgcaatcaaatccatcgacctcgaccgctcccggcccgacttagacgacgtccgtcgcgaggccaaaccctatccct

SEQ ID NO: 140858 - DNA, 2760 bp, Glycine max
  unsure (1)..(2760): unsure at all n locations
  Clone ID: PAT_MRT3847_98204C.1
gtgtgtcataacaaaagaggaagaacataggagagaaatctattcatatcatcatatcataggaaaaaagcgagcaaattcagaggatgaatggggtcacacaccttgaaccagatgagtctgagtttgttgaagttgatccaactggaagatatggcagatacaatgaaatccttggcaaaggagcttcaaagacagtatatagagcattcgatgagtatcaagggattgaagttgcttggaaccaggtcaagttgtttgatttcctgcaaagccctgaagatcttgaaaggctttactgtgaaattcatctcctgaaaacattgaagcacagaaactttacgaatttccacgcgtccccgcacgtccgagcaaatagaaatatcaactttgtgactgaaatgttcacttctggcacccttagacagtataggcaaaagcacaagagagttaacattagggcagtgaagcattggtgtagacagatcctgagtgggcttctctatcttcatagccaggacccacctgtgatccatagagatcttaaatgtgataatattgttatcaatggaaaccaaggggaagtgaagattggggatcttggattggcagcaattctccgcaaatctcatgctgctcattgtgtagggacgccggagttcatggcaccagaagtatatgaagaggcatataatgaattagttgacatatattcctttgggatgtgcatattagagatggtcacgtttgaatatccttatagtgaatgtactcatccggctcaaatctacaagaaagttatttctgggaagaaaccagatgctttgtatagagtgaatgatccacaggtggcaaccattagtacaaagatgctttgtcactccgtctctcagcctttcggccatagaaagcagcaacgatccattacttcaaattgatgattatgggtctaatttgaaaactgtagaaaatggggaattggatgaatttggtcctctcatgagacagccattctttgatcttcatcgaagctatagtaacttcagtaatgaatacacgaatggctttgggtatgaaggagactggggtcctcatccggctgagatcgaacctagtggaattgaactttttgagtaccatgatgatgatgaaccctctgaagatgttgacataagcatcaagggcaagaggaaagatgatggtggtatctttttgagactaagaattgctgataaagaaggtcgcatccgaaatatttatttcccatttgacatagagatggacacagcaataagtgtggcaactgaaatggttgcagagctggacatgactgatcaggatgttaccagaatagcagatatgatagatggggaaattgcgtccttggtacctgaatggagaccaggaccaggaattgatgagactccccgttttgctaatgaaggtttctgtcacaattgtgtgtctaatcatacttctagcggttcttttctggattttctttcaaacaatccaggtaacaagaacttgcaacttctcgagtgttgtaggcatggatgtgcttcaatgcatgggcggtttggggagattaccttccaatctgaagagtatgacaatcatgctagaggggatctgaacgtatcaagccaattagacagcttgcagtatcaagagttatggaatcagcatgaaagtcgtgaactgagtccggtagagtctgatcaaagccattctgacgaacaatgtgagcaattagataaaccgattccggctaaagacaaagcacaggatgtttgggaaaaaaagttttcccccaatgcagcaaattctctaagaaatttatcaggaagtcatgatttctctactatccgatcgacctattgcgaccttgaggatgactatgagaaagagatccaaaaggaactcagatggctcagagccaagtaccaaatggagttaagggatcataaggatggacagtttgggcaatgctcacatagtagtaacagtgagcacagaacagaaaatggctttttgtcaccttcactgacagaaacattaaaaggaggcaacaatgggactcggttgaaacccattactactaagtggaattgtgattccagtagccaccctcatgtccatgaaagcagccccaattcggacacccaaagggcccaaaattgtgaggcgattgaatcccctggagaaggtatggttactgcaaagagtttttatacaggctcattgctgccgcactctttgcacaggacagtttctctcccagttgatgctgttgatatataattttgtgagacactcattggattcttttgtagattatatatactccccatagaggctatctgatttctaaatccctccttatttttcataggattttcaatttacccacatggaaatcggtagccactagctataatccccccaccaccaccaccacaaaggcatcaacatacacttgagtgtttatttatctaggaaaaagaaaatcagattttggttacggatgttagtgatcgtgaatttgataattgaggcatgtaaaatatgaaagtagtagagtctatgtaaatctgtccaagtttattgtatgatgcaatttgtatctcccacgttatgaaaacaagtattgatagaccttagcgtgttaaaaaacctaaaaaattaaattttttcagggcggnnccgtctnctagnaggnatnccaaggncttacgtagcgcggtgcatgcgacgtca

SEQ ID NO: 140859 - DNA, 768 bp, Glycine max
  unsure (1)..(768): unsure at all n locations
  Clone ID: PAT_MRT3847_98205C.1
ccccggngtcgacccacgccgtccgaaccgattcttgctaaagacaaagcacaggatgtttgnggaagacaagttttcccccaatgcagcaaattctctaagaaatttatcaggaagtcatgatttctctactatccgatcgacctattgtgaccttgaggatgactatgagaaagagatccaaaaggaactcagatggctcagagccaagtaccaaatggagttaagggatcacaaggatcgacagtttgggcaatgttcgcatagttgtaacagtgagcacagaacagaaaatggctttttgtcaccttcactgacagaaacattaaaaggaggcaacaatgggactcagttgaaacccattactaccaagtggaattgtgattccagtagtcaccctcatgtccatgaaagcagccccaattcggacacccaaagggcccaaaattgtgtggcgattaaatcccctggagaaggattttcaatttacccacatggaaatcggtagctactggctataatcctttcccccccacaaaggcatcaacatacacttgagtgtttatttatctaggaaaaagaaaatcagattttggttacggatgctagtgatcgtgaatttcataattgaggcatgtaaaatatgaaagtagtagagtctatgtaaatctgtccaagtatattattgtatctcccacgttatgaaacaactattgatagacctcagcgtgttaagttgcttgctttataatctaataaaaaaattag

SEQ ID NO: 140860 - DNA, 250 bp, Glycine max
  Clone ID: PAT_MRT3847_98206C.1
attggggaggggtttttcattaagtgataattgtttatatatttgcttattttaaacctttgttggctaaaaaggggaaaaaataaatttaaagccccacccacggggggtgaacttgcaccaaagagggggccaaaaaattttcaaagtttcaaaaaagattcagcttttggggtttcacaagaaccatggggggcatggcaatgaacccccacaacagaataaaagtggggtgcagaaacaaagaagc

SEQ ID NO: 140861 - DNA, 107 bp, Glycine max
  Clone ID: PAT_MRT3847_98207C.1
ggcgcatacacagatacgactggtatatctgtgtgtgtggcaaccgaaatcatcttgcactaaaggcgcatttgtgcatgcggcctatttgctaaaaaaccagcgcg

SEQ ID NO: 140862 - DNA, 1110 bp, Glycine max
  unsure (1)..(1110): unsure at all n locations
  Clone ID: PAT_MRT3847_98208C.1
tgtatttgtatgaggaagaacgggacaagaggagaaatctaatcataagagagaaaaagagaaaggaaaaagaggatgaatgagcttgaaacaacagattcctctgcatctgagtttgttgaagttgatccaactggcagatacggcaggtacaatgaaatcctcggcaaaggagcttccaagacagtatatagagcatttgatgagttccatgggatntgaagttgcttggaatcaggttaaattgtatgattttctgcagagccctgaagatctcgagaggctttactgtgaaattcacctcctcaagacgttgaagcacagaaacataatgaaattttacacatcttgggttgatacagcaaatagaaatatcaactttgtgactgaaatgttcacttctggcacccttagacagtataggcaaaagcacaagagagttaacattagggcagtgaagcattggtgtagacaaatcctgagagggcttctctatcttcatagccgtgacccacctgtgatccatagagatcttaaatgtgataatatttttgtcaacggaaaccaaggggaagttaagattggggatcttgggttggcagcaattgtccgcaagtcccatgctgctcattgtgtaggtatgtctttttcatatcgtataagaaggtatcaagaaaaaacctagccaattctaacaccatttctaattatttcagtttgttgatgctaccttttgaaaatgatttggcaataacgtatgaaactgtgtgatatgtactgcagcgatggcgctgttaacataattagaggattgatttgaacaaggatcggtaattctgattagagttttatttacatttgtatttctacaggaacgcccgagttcatggcaccagaagtttatgaagagtcgtataatgaactagttgacatatattcctttgggatgtgtgtattagaaatggtcacatttgaatatccttatagcgaatgtagccatccagcacaaatctacaagaaagttatttctgggaagaaaccggatgccttgtataaagtgaaggatccagaagtgcgaaaattttgtgagaaatgcctggcaacagtgtc

SEQ ID NO: 140863 - DNA, 670 bp, Glycine max
  Clone ID: PAT_MRT3847_98209C.1
gaaaagttgctctcctgtctctctctttctcctgttctccctctcgtcaattattattaaatctctgttaaaggaataaatatattattatatggagagaaagagagagataaatttgtgaaaaatttattttgggtgtttgatgtgtatttgtatgaaaggaggagaagtctaatcataagaggatgaatcagcttcaagcatctgagtttgttgaacttgatccaactgccagatacggcagatacaatgaaatccgcggcaaaggagcttccaagacagtatatagagcatttgatgagtaccaagggattgaagttgcttggaatcaggttaaattgtatgattttctgcagagccctgaagatctcgagaggctttactgtgaagttcatctcctcaagacgttgaagcacagaagcataatgaaattttacacttcttgggttgatacagcgaacagaaatatcaactttgtgactgaaatgttcacttctggtacccttagacagtgagttccctccattttcaaccttttgccactcctctatattatatttgtatgatcattatcctttttgtgcttttgagaagatttgttattttttcttcttttatttattttaattatcacaatagatataggcaaaagcacaagagagttaacatt

SEQ ID NO: 140864 - DNA, 353 bp, Glycine max
  Clone ID: PAT_MRT3847_9820C.1
cccacgcgtccgcataattgaagtttttcttttgtgtgtgtggatttgtttggcaaatggtacaaaagttgaatgtttcagctcatgaggtgcgagttttttgttgggttttggcaagattttaaattgcattcgccgctgcgacagcatcaccatccttgctgttgtggaaaattgtggagaaatatgattgatgcagtcgcaagtgatgcagttgcagtgacatcaaaaactttgtcgctgtggtaacggccacaattgcagttacaaagcagttgtgctggcatcatcaattgcagtgactacaaaacattgatgctggttatcggccacaatttcagtttggggttggg

SEQ ID NO: 140865 - DNA, 280 bp, Glycine max
  unsure (1)..(280): unsure at all n locations
  Clone ID: PAT_MRT3847_98210C.1
taacggtatgnagagaagnnctccggtcacgaagacacacacntnaactggagatttgcttacgtngcnngaaanaccaatttctcantcnncaagtgnntccttcgcccgcngttcnntctcagcagccgtcggatnggatcatgnntgtngnattnnggggcatgtcaccgatgaannggtcgagagcttaaatanacgatagccttgttcggnttatnagatnaaggagatagntcgtagtngccatatttgtagccaatggagaagatgatgccta

SEQ ID NO: 140866 - DNA, 393 bp, Glycine max
  unsure (1)..(393): unsure at all n locations
  Clone ID: PAT_MRT3847_98211C.1
cccagtttacaagtacaagtctccaccaccaccatacaagtacccttcccctccaccaccacctaagaaaccatacaagtattcatctccacctcccccttaccactactaagtatagtgatttactatatatatatatcatcccatggatctgaagaatgtgtgcaaataaagaagattgatatggaaggaacaagcagtgaagcaccatacatatatatcagttaatttggcttgactttttttttctttttgtattttataaagttttaaggcactgttcagatctgatccatatgtactcgttgtcctgcatgtgttgtggtattgtaactgctgggcatgcatgcaggggtttgttatgccangttatattatatnataaataataaa

SEQ ID NO: 140867 - DNA, 760 bp, Glycine max
  Clone ID: PAT_MRT3847_98212C.1
gttgtcaacattcacaatactacttgtttggttttcccccttctcttaaatacataatctaaacatctaaaatcaatgcttaacaccaaatattcccctacattaaataaatttttgcaatcaccaccatacataatcagcaaatgtaagctcaatggttccctctactgattgcaatcacagttcaaaattttttccatttccagaagatcagtttctcagagtccttattctctcatgcattgctgcttaaggagagaagtatagaacccaaacttgaattccaaaggtggggagtgattgaaaagaacagtctccatattctgtggaattctaagcaaagaaagaatcagaggtatcaagttggtgtgctcggtgcaggaagccttttctcttactcacaacaaggcttccagtaagtgaaaaggcttcctgcaccgagcacaccaacttgatacctctgattctttctttgcttagaattccacagaatatggagactgttcttttcaatcactccccacctttggaattcaaggtgcgtagaaatagtgccaagtatatggttaaatcatcactaaaataatcttaataatgggacttgaaatttaattactgtatccctctctacctgtttatgtaattttgtggagtatgtaccctttattttatttttatttatttgatatcatgttcgacccccactttgatggtttgagaagatatctacaaaccacaatgtcatgagaggaattgacat

SEQ ID NO: 140868 - DNA, 771 bp, Glycine max
  unsure (1)..(771): unsure at all n locations
  Clone ID: PAT_MRT3847_98213C.1
ccacgcgtccggttgcacgatcttctcaacccttagtaggtcttatgatgaacatgaggagcaacatggatgaaaaacttgtggctgcactttgcagcaaactagataatggttctaggagaaagctgtatattgttgatgcacggcctaggaaaaatgcattggctaatggtgccatgggaggtggttcagaatcatcatcaaactattttcaatctgagatagtctttttggggatagacaacatccatgcgatgagagagagctttgttcggctccgagaatacatggacactcatggcagaacgtcatcagatggaatgtcctcttttttggttagtctagacaaggtgggtcaacgtggggtggtggcaatctaagtagtatgtctgcttcggtatcaacccttggggacagtggatggttactacatgttcagaatgtgttggctggtgcagcttggattgctgctcgtgttgcaatggaaaatgcttctgttcttgtgcattgcagtgatggatgggataggacaagccagttggtttcacttgctaatttgttgcttgatccatattatcggacattcacagggtttcaggcactcattgataaagactggcttgcttttggtcatccattttctgatcgggtgggaatgccatctgtctctggaactggcaatgtgcctttcgagttatctaggcagtcttcaactagcaatttcccaccatcacccatgcgccagtcatcangaacctttgcnngtgcacc

SEQ ID NO: 140869 - DNA, 479 bp, Glycine max
  Clone ID: PAT_MRT3847_98214C.1
acggctgcgagaagacgacagaagggtccaccccctaacatggacccaaatctattgtccaggcccagttgtttggtatttccctttcatcacctttacattgttttttgccactcagtcttcctcgagccttgtgttcacctgcttcttggcacctaaattccccaactcgcatattgtcatatagattttcacctcaaacttctcccctttactattttcatgaaagatcaccacgtcctcatggcaccctttgttgtctaaaaaactatgatctgtcaagctcaatgtttttccggacattagttgaccctctaagcaacataggtgtactaccctcacgcccctggctaaactcctttcctttttccattgtcatttcctctgacgaagtttttcgaccatggtatcggcccatggtatcctgttcatcctcttttcttccttttatcacctcttctaagtcttctacagagcac

SEQ ID NO: 140870 - DNA, 608 bp, Glycine max
  Clone ID: PAT_MRT3847_98215C.1
atagaattgacaatgaggcctgctcttgctttgcttcctcttatattagctttcttgttagctgccactacacaattaagaaatgatacatgtgaatattgaaaaatgatcatgaaagatcctgtaatgccataaggacttcaacgacgtgtttcatttcaagctgaacataaccctaatactcaacagcacttggtgcaaggctccaacaaccactcgtgaagagtggctacctgcaaatacacacgccaataccgactgggaacccataccaagtgttaccacaatatgatgattacggaattcatgtcaagcattgtccagaaccatgattttgaatcgagaccaagtgttaccaatcatgatgattatgaactcaagtcaagcgttaccaagaacaatgatcttgaaccgcgacctattgttacaaaggatgataactcctaacccagaccaactgttaccgaatatgatgattaccaactcaagtcaagcgttactgacactgatgatactgaaccgacaccaaatattaatcatgtatgatgactttgaactgagggcaagcgttaccgagaatgatgattttggatcaagaccaagtgtta

SEQ ID NO: 140871 - DNA, 428 bp, Glycine max
  Clone ID: PAT_MRT3847_98216C.1
ggccggcctttatgtttttttctctgaagtagggaacttattcattcctcatacttgaccttacgaagataccattctgggctactcatttttcttgacatgggaacataacttgaatgagcactgtacaattaccttgggactgtgcttaactcactcttgctaccaacaagactccctacctatattaactgtactctaaaggttcaacgcgtgacaatggaacttactcggagacactatatgctatgtacgaaccacacatcgttggaaccccttgccttgtgcaacacatatggataatcacagagctataagcaaattgctcttagtggatctgcatagcacaacgcatattggattgctggatgctttgcttgataactgaggtgtgtgccaatgttacaaaagaatgttgcatgagaaga

SEQ ID NO: 140872 - DNA, 125 bp, Glycine max
  Clone ID: PAT_MRT3847_98217C.1
ccaccgaactaccgggcacccagagatagcaacaaaacagcctgataggactctctgctagatgcaacagatcgtgtcatcgaacactgttacacctagacctaaccaagtttaccacacagaaa

SEQ ID NO: 140873 - DNA, 134 bp, Glycine max
  unsure (1)..(134): unsure at all n locations
  Clone ID: PAT_MRT3847_98218C.1
gtgnaaacaactaaacggggggntaagacgacttgtcgncgagtgagtngggtgtngncggcgnngcacaaccaccaccancnagcanatggctgcttacccatggcgttancgcngcaanangcnatattcct

SEQ ID NO: 140874 - DNA, 182 bp, Glycine max
  Clone ID: PAT_MRT3847_98219C.1
tttttgcccaagaagaagaagtcatcttatccataaattggtgtacgcagcaacatgacctcaccctctttgaccatccatagaacgacaccctcagccatctgcatggccgagcgtagacagacgcttgatacgaagaagctcagacccatcctcgaactggcccataatctacaacaaca

SEQ ID NO: 140875 - DNA, 136 bp, Glycine max
  Clone ID: PAT_MRT3847_9821C.1
ctctatttcttctgggggagggttaactttgaatcccgtgggtcacacacgccaagccaggtgctgcagaataacgacccgctcaaaaggccggcacgccaataacgaacaccatgtgatactacacaagaccaaa

SEQ ID NO: 140876 - DNA, 266 bp, Glycine max
  Clone ID: PAT_MRT3847_98220C.1
ggtatgggggctttgtttggaacaagaaccacaattcggaccgcgcaggggcacaggcaaaaaaggcccggaggccgcccaaggggaaacaaaggtgacccggaacgaaaaacggccaaaccaaaccacggggggggaaccccacccccccgaaaagtgctcccgaaacgcgaacccggggcggaaggggcaacgggggggcgccaagccaagcgacagagccggggaacccaccacaccgccaaggggacagggggcctccccag

SEQ ID NO: 140877 - DNA, 395 bp, Glycine max
  Clone ID: PAT_MRT3847_98221C.1
ccccaaaaaaggaaaaaagtacaataaagcaaaagcaaatgacaccccacccgggggggggggggcgagcaaacacaagaaaacttgggggggggggccgggggggccaacacaaactacaccccaaaggaaaagaacgggggcggagttttcttaagatggggggggacccccacaaaacggccctaaaaccggggcactgaaaggggggggggggctgctgaagacccttgcggaaggaacccccccaagcacccttttctgcgctttgaacaccagaggggaaggggggggccttttgtcgcgcggggggaccccggaaaaaaggaccggggcccccatgcggaccagggggccctagggagaggcccaccccagcgagacgccttcttgga

SEQ ID NO: 140878 - DNA, 457 bp, Glycine max
  Clone ID: PAT_MRT3847_98222C.1
gggtgggtttaatggattaggctccacgtaaaccttgactttagaaaagaaagcaaaaagactcgaaaagcccatcgcggagacacaagacacaggggagatcaggaaaaagaaaagagaagggttacaacacaaagcatatcccgtgaccctggacatgaaatgggagagaacaaagacttcagaggcagacataccacacgctctggctatcaacaatatcactgagaggccggcatcgccaagataaacttgctaccaccagccgaatccgtgcataggcgggtcaaggtcttagccagagcttggaaggcaacccaagggttgccataaaagatgggaaccccggctaaccaagccttgccgacgggaaaagagaataaaggcaactgcactggaacggggacatagaggccaacctgaccagcctgtaggtcaggcggaaattaccttgcgg

SEQ ID NO: 140879 - DNA, 248 bp, Glycine max
  Clone ID: PAT_MRT3847_98223C.1
ggcagttcggaccacagaactttctcagattttaagaatcaacaaaacatccttaatgaatgtcttacacgcaaatccaggagacgcacaaattacaatggataaccttttaatgagattaaaggggcttgaaggttttggctttgaatatccatgcacagattctggacggcttacacatgaagtgcttcaaggaggtaacacgagaggaaacttttctcacgagtgtactaataattcacctgagc

SEQ ID NO: 140880 - DNA, 1678 bp, Glycine max
  Clone ID: PAT_MRT3847_98224C.1
ggctcgagttttcacaaccatcttcagagaaaagtaagggaattccattggcgacgcttttactcattctgttcctttctgccattttcccaacatctctctcgaatcaggttctcaactccaagaaaccaataccttcaagctctgcttcttcccttggttcctctgttgcttttcagattaaaggaaatgtatatccacttgggtattacacggtgagccttgccattggcaatccccccaaggtttatgatcttgacattgacacaggtagtgatctcacttgggttcagtgtgatgcaccatgccaaggttgcaccatacctcgaaatcgactttataaacccaatggcaaccttgtgaaatgtggggatcccttgtgtaaagcaatccagtcagcaccaaaccatcactgtgctggaccaaatgagcaatgcgactatgaggttgagtatgcagaccaaggatcatctctcggtgtgctactcagagataatattccccttaaattcactaacgggtctttagcacgtcctatcctggctttcgggtgtggatatgatcaaaaacatgttggtcataatccctcagcttccacagcaggggttcttggccttggaaatggcaagacaagcattctgtctcagcttcactctcttggcctaattcgcaatgtggtaggccactgcttaagtgaaagaggaggaggctttttattctttggagatcagcttgttccccaatctggagttgtttggacacccttattgcagagttcctccacgtaagtgttaaaaattaaaatagatattatttgtttcctttatgagatattgctactcatgagaacttacacacagtctttgtttcagacaacactataaaacaggaccagcagacctgtttttcgatagaaagcctacttctgtgaagggccttcaacttatctttgatagtgggagctcctacacatacttcaattccaaagctcataaagctcttgttaatctggtaactaatgatttaaggggaaagccattgagtagagcaactgaggattcatcactaccaatttgttggaggggtccaaagcctttcaaatctctgcatgatgtcactagcaattttaagccactattactgagcttcacaaaatcaaagaactcgctgctgcagctaccaccagaagcttatctaattgtcactaaacatggcaatgtctgcttgggaattctagatggcactgaaataggactaggaaatactaacataattggagatatctctttacaagataagttagtgatttatgacaacgagaaacagcagattggatgggcctctgccaattgtgatagatcttccaattcataaataaatcaatgtaatttttttctttagctgagactgtagatagggatttctctcaaggaaatcttagcaaaccggtgccctgcaacttatgatgttatagattatcaatgagttgttaggcaaggagggttaggacttaggatgtaaaatggctggaatagtatatatgatttactatacatatttcatttactataactttgtttcttcttttttgttgcccaaactataattttgttttccacaggctacaatatacgcatttacaaatgaaacatcggctgaaaaggttgatgtttctgta

SEQ ID NO: 140881 - DNA, 157 bp, Glycine max
  Clone ID: PAT_MRT3847_98225C.1
acgcaacttaatagttggattttgcggttaccaatatttttaaggacgtttgattccgttgaggtccatttaacgtcaatgttgtgcgagtgggttgatttacattgaatgttcgtttgagacttgggaatggaaaaaggaacacagattaagtcta

SEQ ID NO: 140882 - DNA, 384 bp, Glycine max
  Clone ID: PAT_MRT3847_98226C.1
atcggggtgaactttttttttttttttggtgggccaaaggagaggtccatatttttataattaaaagtagcataatacgggcctgcacctgaaaaacattttttggggcctaaatctccctgggcgagcgaaaaaaaaacccgctgggtcccccgggcgagagggattttccccagaaggcctgaaattaaccaagaatggctgggacattgccaaaaactgcatggcagccccagccacctgaaaagaccctaggacctgccctagaccctgccttaggaagattaatccccttggataacaacatggggagctcaaaaaacacgggtttccagaaaatccctggcggtctgataaaaggggaactttgggagaggaaaatta

SEQ ID NO: 140883 - DNA, 386 bp, Glycine max
  Clone ID: PAT_MRT3847_98227C.1
gggcaaaccccagggggttggattataatttgggcccaaaaaccaaaatctttattttaaaatatttccccaacctaaaaattaactaattaaatcgttcttttaaaacccttccccaacctaaattaactaaataaaccgttactttaaaatcctcccccaacctaatttaactaaataaatcctccatttaaaatccttccccgacctaaaaattacctaatttcataaaaggtattccccatttttcaaaatttaattaaatgaattccaagggtctaaatttttttgcccccaatcctgtttgttgggttggcttaacatttacccttgcaacctctttaaattaaatcctttttctggatagcttaacttttggatgaacc

SEQ ID NO: 140884 - DNA, 869 bp, Glycine max
  Clone ID: PAT_MRT3847_98228C.1
tcggaaattcgcactcgataagtctccgcattattatagagccacatcaggataacagcttaaggggttcggcttaaggtgttgtttggcttgcgttcttccgtgtggagccctagacttgatccgcatagtgcacttgaacgggtacgtggaagaaatcacgcgtccaatcacggcgggggaagttcttaaagcgaatgccaaaccatgtcttgagcaaaccgacctcccaaggcgtggttcgccggattctgatcctctcaccagataccgaactcaagagagggagcatatacttcttgatcccgacagcatcgctgccggaaaaaaagaaaagacgttgcagtgacgatggtggtaatgataatgatcatcgtaataagaatgaccttgtcaaagtgtcttccaagaagagcatgaagagcaaccatgatttgccatcatcacaacaatgtgataatgagggctttgtactttctaaggagaagaaatgctcacggcgggatcaccggagccgtcgcggcggattgtggcagcctcggttggagagcatctcagaagactagtttctttttattccggcagccggcgccggaatctggcttgccggtggggactgggaaccgaagatggttcaacaacacttgaaattgttagaatataacatgacttttttctcctttttttaaatgtatgtgagtatctaaatttgtggacatagatgagttactctgccttcttgtatgattttgcgtttttgatttcggggttgaattaatcaatttaattaagcatgcttgcttaatacagagaaaaaaaataaaggaaaggaaaataatcaatttaaacatactctgccttctctttct

SEQ ID NO: 140885 - DNA, 207 bp, Glycine max
  Clone ID: PAT_MRT3847_98229C.1
ggaaagtttcttggatgctaaaaaaaaaaaaaaaaaaaaaaaaaaaaaaaaaaaaaggggccccccccgaaaaggttcccctaccacccacaatttaattccacaacgtcccccttggggccaacaatttcccctaaaccgacacggttggaactcttggatagtacttgccaatactgaccactgggaaaatttttatccccccat

SEQ ID NO: 140886 - DNA, 290 bp, Glycine max
  Clone ID: PAT_MRT3847_9822C.1
ggatgcacgcgctcactagctgggggtcgcccttttgctttatttgtggcgataaaaacatatgctgttgaaagtttgcatggtcgactatttgatcgcggaacttttgagcatggagctgtgtgaatgttcctcccttgactcactggattatgaaatctcctccgtcatatcattagttcaaactaccagcagtttgaacattttgttaggtaaaaactcatagtttcactaacattatatgcttgactcttgacctgcttaattactttaccagggggcgagacccc

SEQ ID NO: 140887 - DNA, 990 bp, Glycine max
  Clone ID: PAT_MRT3847_98230C.1
atagcatggtatacccttgctagcttcacagagatgtaattcttggacttcacttgagtgctgacaacaccttgagaccttttgaaaaaaccactatcttgaaggccctctctatctctgatgctactaaaccatgttacatttctcacaaaacaaggatggaaatcaaggagaggctgataccattccaactccggtagttattattgatcaagactctgatccagatgcaactgtggtcgagataacctttggtgatcgccttggggctcttcttgacactatgaatgcgttaaaaaacttggggctgaatgttgttaaggcaaatgtctttctagattcttctggcaagcacaacaagttttccatcacaaaagctgattctggaagaaaagtggaagatccggagttgttagaggcaatccgtttgacaatattgaataatatgattcagtatcacccggaatccttttggtgatcggcttggggcacttcttgacacaatgaatgcattaaaaaacttaggtctcaatgttgttaagccaaatgtctttctggattcatctggcaagcacaacaagttctccatcacaaaagctgataccggcagaaaagtggaagagccagagttgttagaggcaattcgtttgacaattataaataatcttattcagtaccacccggaatcaagttcccggttagcattgggagcagcttttgggcttctgcctccaaaagagcaggtgatgaatgtctatacttttcagtttcaatttcaaaatatgaatttttcactccttctggtgacttgcagacaagtgttgtcaagttaaaagatatcctctgaatggtacctggaaaaatcttctttataaatgagtgcctataaaaccctagaacggtggggatcttctgctttgtggtggttgacatgccataataagcatacctagttcctcctttagcattttaatggatatattggtcatc

SEQ ID NO: 140888 - DNA, 849 bp, Glycine max
  Clone ID: PAT_MRT3847_98231C.1
ctcttgcctttccccattattccaagtccgctctttctcaaattaattaattccctttattatcaaaatggccctggctatggctgcttgcagtcttggacttcacttgagtgctgataacaccttgagaccttttgaaaaaaccaccgtcttgaaggccctctctatctcttatgttactaaaccatgttacatttctcacaaaacaagattatcatcaccttcatcttcaggaataacaatgatcgcacgagcaacagcagttactggtactgtggaggatggaaatcaaggagaggctgataccattccaactccggtagttaaaagtaaccaaggcattcttctatcttcattccttccctattactctttctctgctaaattatttaaattttctctctttctctaattaattccctttgttatcaaaatggctgtggctatggctgcttgcagtcttggacttcacttgagtgctgacaacaccttgagaccttttgaaaaaaccactatcttgaaggccctctctatctctgatgctactaaaccatgttacatttctcacaaaacaagattatcatcttcatcttcaggaataacaatgatcccacgagcaacaacagttattggtactgtggaggatggaaatcaaggagaggctgataccattccaactccggtagttattattgatcaagactctgatccagatgcaactgtggtcgagataacctttggtgatcgccttggggctcttcttgacactatgaatgcgttaaaaaacttggggctgaatgttgttaaggcaaatgtctttctggattcttctggcaaacacaacaagtt

SEQ ID NO: 140889 - DNA, 354 bp, Glycine max
  Clone ID: PAT_MRT3847_98232C.1
tttccttccatgcccctcctccttccgcttaaacacttttttctttctcacctcaaactcaaccggcaaagttattccccttaatcttccctcccagcattatcttctccacctccccttgcaacaggggtcgctgagccccattcttcctatcccactggcctactcatgaccttttattccgcctcttaacatcttctaccacacccccgccgccggtgctctctctccctgcacctatccccttctcacacagggtttttcttttcgcttccagtacctaaggccctaccatcctcaaatcgttggccgctttctgcatccctgatttttgacatggctttacttaaccct

SEQ ID NO: 140890 - DNA, 789 bp, Glycine max
  Clone ID: PAT_MRT3847_98233C.1
cccacgcgtccgctggtgggtctggcagaaatgttattgacaatggtaagaatgacagtgatggaaattgcaaggattttggtgtgtgcctagagaaagtaatttccagcaattcagataatgttggcatgatcaagtgttcaccagtgcatgttgatggagactttgatgatgttgttgttgatgatgaagaagaagatgaggagattgatgttgagatggagaaggggagctttgatgttaaggaaatcagtgtgccagaatccaaggttgtgaatgaaccagaaaggaaggaggttgtgaatgtaccagcaaaacagaagattgtgaatgaaccggaacctaaaaaggttgtgactaccaacagacaatttcatcaaaaaaatgaaaggccagtgtcaatccctatagctgtgaagccatctcctccaattagaaagctttccacaattcaccaaaatttctccaaggctgattcaattccaaaggcagaagagtactattgctttccacaaagccagaacaaactgcagagtttagttgatttaatcatgtggagagaggtctctagatcagcatttatcttcgggattggaacattcgccatagttttatcttcttatgcaaaagatatcaatctgagtcttatttctgtaatgtcctatattggccttgtctatctagctgttatcttcctctatagatcactaatatgcaggggggtcatagatgtagaggacacaaactatgtactacgagaagaagaagcaatttgggtgctaaaattga

SEQ ID NO: 140891 - DNA, 1103 bp, Glycine max
  Clone ID: PAT_MRT3847_98234C.1
cagcaatgcaaggatctcaacatatcttctgattcaatcaagaagagcccaattcaggccaggaagaaaaggtctggggtgggtgaatcttttgaaaagaatgctgggaagctcagaaagaacaaatcagatttaattaagaatgtcggtgatggagatgcgggaaatgcaattcagcctaggaagggcaaatcagagttggatcatgttttggatgaatcaaggaatgatggattggctggtgggtctgcaagagttgtaattctcaatgggaagaatgattgtgatgaaaattgcaaggattttggtgtgtgcctagagaaggtcatttctagcaattcaggtaatgttggcatgatcaagtgttcaccagtgcatgttgatgatgatgatgaagatgatgtggtagaggaagaggtggatgatgaggagattgatattgagatggagaaggggagctttgatgttaaggaaatcagtgtaccagaatccaaggttgtgaatgagacagaaaggaaggaggttgtgaatgtagcagcaaaacagaagattgtgaatgaaccagaacctaaaaaggttgtgagtaccaacagacaatttcatcaaaaaaatgaaaggccagtgtctgttcctatatctgtgaagccatctcttccaattagaaagctttcgcttttacaccggctatctggtctttacgattcaattccaaaggcagaagagtactgtagttttccacagagccagaacaaactgcagagtttagttgatttaatcatgtggagagatatctctagatcagcatttatcttcgggattggaacattcgccatagttttatcttcttatgcaaaagatatcaatctgaggttagaaatctccacactacagagagttcaattcattttgtacatacactttgccacttaaaagagaacccagaattgacacacttctttatcctttgtttgtgcagtcttatttctgtaatgtcctatattggccttgtctatctagctgttatcttcctctatagatcactaatatgcaggggggtcatagatgtagaggacacaaactatgtactacgagaagaagaagca

SEQ ID NO: 140892 - DNA, 244 bp, Glycine max
  Clone ID: PAT_MRT3847_98235C.1
gtttatttgctgagtactctcctattttatatatgatttcgggtcagatttaaacttattctggttctttgctcatttctctgtcatatagtgctgttcaagctggtgatattttggattagtgcgcccattctcctatctgtgtataggacttcgtgggtagacttgtcgacttcactccgtgctttgactctcgtcgtctcactgatccggattgccgggcaaagtggtcttatgtgagaaa

SEQ ID NO: 140893 - DNA, 226 bp, Glycine max
  unsure (1)..(226): unsure at all n locations
  Clone ID: PAT_MRT3847_98236C.1
cccacccgtccggcttccatgactcgatatttggaatcaagaaagtttgagttctttacctccaaaaaaaaaaaaaacagaaagtttgagttcatttttaataaactttcattctttcagtagcttgatatgagaattaggattgtaataattgagaggtgacaagtcatcgatntactaaaaggcagacagattacatgactgattcagatcacctaggaaaacg

SEQ ID NO: 140894 - DNA, 343 bp, Glycine max
  Clone ID: PAT_MRT3847_98237C.1
gttagagaaacaaagagatgacggtgttgctgggcggcaacctgagagagtgagtgggaagctcagaaaactcaccaccctcccaactattgatgaatgagagagaaagaagctgcagaagacgttgtcaatgtgggcaagacagacaaaccggatgactcacacaattccaacaatacagggatacgtgcgtaaagatgacaacgtgtggaggagcgtgtgacatcctgggagcaagtgagccacacagacaaacagagctcagatgtttgaatgaccaattaccaacactcccactgtctaccagtgtatgaatggaggggagaccagaagaacgcaccga

SEQ ID NO: 140895 - DNA, 773 bp, Glycine max
  Clone ID: PAT_MRT3847_98238C.1
gtacagggtggcaagactacgttggaaatttattacagaacaccgaaacagattagaacatgcaacttattagctaagggtattaaaagaaacatgcaccttcacgtggaaacaccaataacaagatgaagcctatcattttccggttaggttaggtggcatacaaacagattaagaaagaataaaattatagcataacaatacaataataagaaaaagatgacaatcgaccctgcgtcgtggaacatcttcaattaaacgaccttcggtcattgtttattgtcatctccgaagtgtcattgttctccttaacctcagttttaaattcggttttggttgtcactttgcattcgtggtacctgaagcatgttaataggtggtcattaacgagccctgctacttgcatgaacgaataaactactgttggtcccacacattggaaacctctacgcatcatgtccttgctaatcacttctgcttttggagtcttcacgggtacttgacgtccatatctgaattcatttcttattggtttgtggttaacaaatctccagcagtaattgctgaatgaaccaaactcctgctgaaccttaggtaattgtttagcattttccacaatggcacggatctttggttctgataacaatgagttgccgtttatcttcagtgtcagcaatttcttatcagtaaactgagcaactgatgacggttcaaaattttcaaaaagcttcctgaatatgtcccgctgccgaagtattgctggccaacggtgt

SEQ ID NO: 140896 - DNA, 404 bp, Glycine max
  Clone ID: PAT_MRT3847_98239C.1
tgcactgagggcattaacggacagcgtcctactgagctaaacactctggaggctgcgcaaccctggcactggcttgaaaaccgaccagttctgttgtactgccggtgggtgtgggcccactgattattccagattctttaagccaagagagcccagatgctcatcgctacccgaaggatgatccaactcgcaccttcacttgtaatggtgggactgactatagggatgagttttgtccttgaacccaatcaccttacataatatataatatatgcactaaaataaagagcaatacaattacatgcggcgtgtgcactttgcgtgcccctgctaagatatgatgtgggtacttttattctgaatgaaatggggtacttatgaagaatatagttaactctatggcc

SEQ ID NO: 140897 - DNA, 357 bp, Glycine max
  Clone ID: PAT_MRT3847_9823C.1
cgctcgcttgagcgaggactagttgagttgctgcgctacagcacaacacagcacaacggtcttttctgtagtcttgcggccaaattacaactaagaccactgtgtactactctataaggatttgggatgggacatgtgctgtgatttaaagagtaaagagctctcttccacaacccgaggcaaggaggatggtctctacaccaactctggtgatgcttgaatcgactgcagctgatgattctgaagcttgtaaaagagaggtggaggaaaagggctgagatgggaacgaggcacgcttatgtgcatggtagaagaatagtgtcaacaaagatgggatctgtgaccaggaccccactg

SEQ ID NO: 140898 - DNA, 346 bp, Glycine max
  unsure (1)..(346): unsure at all n locations
  Clone ID: PAT_MRT3847_98240C.1
cgacccacccgtactttaaaatccatactctcccacatttctttcttaccattatcaggtccctancttctacatagttttcatcttaactctgcactccccctcacatattattccatacatatcccacaactttattcttatctacttatcatctcatcacaatttacaaccaacattaatatatatttcacctactcatttatactcaacaactcattttacaactataatctttattattaaaacctacttatgtatcttacaaaccactttcatacacacatatttcttattctaataattcaacaaaaccctcccttttacattatcaacatctttaaac

SEQ ID NO: 140899 - DNA, 1629 bp, Glycine max
  unsure (1)..(1629): unsure at all n locations
  Clone ID: PAT_MRT3847_98241C.1
ctgccattgcagacattataaagtcccgaactgaggcacttttgaagaaaaccaagacagcagtttctcctaagccaattgtaatgagagctgagtatgcacattgtcctaaccttactattattgacacacctgggtttgttcttaaggcaaagaagggtgaaccagaaaacacgccggatgaaatcctttctatggtgaagtccttggctagtcctcctcaccgcatacttttgttccttcagcaaagtagtgttgagtggtgttcctcattgtggttggattccattcgcgaaattgacccagcatttagacggacagtgattgttgtctccaaatttgataaccgtctcaaggaatttagtgaccggtgggaagtggatcgctatttgagtgcaagtggttaccttggagataacacacaccccttttttgtggccctgccaaaggacaaggggaatgtttcaaatgatgagttccgcaggcagatttctcaggtggactcagaggttcttcatcatctccgtgagggtgtcaagggaggtttcaatgaagaaaagttcaagtcctctattggctttggccgtttgagagattatttggagtctgagcttcagaagaaatacaaagaagccaccccagcaacccttgctttactcgagcaacgatgcaatgaattgacttctgaacttgctagaatggattcaaaaatacaggccaattcagatgtttcccatctcaggaagtttgcaatgctgcaagcagcttctatcagcaatcacgtgggtgcattgattgatggtgcagcggatccttcccctgagctgtgggggaaaacaactgtagaagagaggtcacgaagtggtattggggtttggcctggtattactgctgatgtaaatccccccaatgctactcttcgtctttatggaggtgctgcatttgagagggtgttgcatgagtttcgctgtgctgcatattccatagaatgcccctcagtgtcaagggagaaggttgcaaatatattacttgctcacactggccgaggtgggggaagaggaataacagaggctgctgcagagattgcacgagctgctgctaaatcatggcttgctcctcttcttgacactgcttgtgaccggctttcttttgtcttgggaagtttatttgatttggctctagaaagaaactgcagtcatgattcagaatgtggtattaaaggagatgacatggatggctatgtaggtttccatgctgctttaaggtgtgcttataatcgcttcataggggatcttgctaagaagtgcaagcaacttgttaggcaccaccttgattcagttgctagtccatactcacaggtttgctattttaatgactttcaaccatgttctggcccaaatgcactctcttatagcaaagtccttgagttgagtgatactagttcagcttcccgtgatgtaaggagggatcaggaaaatataccctcccgaaaaaaatgctcaagaaaccacaccaggtaaaacaggagaaaccagagatgttttgagaggaaagtcacataactatcccctgagaccccatctcccagaatagnccaggtaatgcagcatttggggggtggggttaaaa

SEQ ID NO: 140900 - DNA, 392 bp, Glycine max
  unsure (1)..(392): unsure at all n locations
  Clone ID: PAT_MRT3847_98242C.1
taaagagtttccatattacttgcaatagctactctaccatacacatacactcctcctcacgtttgagtttcagctacattatctaaagcacacttggcatttacatttagcgacagccacaaatatatagtaacatcatgggtttgaagaaccgtggcgttggtcatagagcatggagcctcctgcgggcgtcattgttgtgggcacgtaaaggtggcttgttaaggcgcagggttgccatggagctgcgtctggtaccaaagtacttgaagcgactcggccacactgcgccgccgccaagccacattcactactttgagcgcgagctctcgttcgacaagacccccatattccatgtcaagatgtaccgtcaaacctncatgcgcttccac

SEQ ID NO: 140901 - DNA, 300 bp, Glycine max
  Clone ID: PAT_MRT3847_98243C.1
cggggtgaggcgagggtaaggccgcgttgtgttgcgtcgtgtcgtacgctgttcccctgtttctcgtttttgtgttcagaccggagcctagctcggcatggcgggcatgtcgacgaggcaaggtgggaaagctgagcctttgaagaaacgcaggtctgataagaaggagtacgacgagattgatgtggcggacattcagaagaaaaaggaagatgagaacgcgctaaacgagttgaaagccatggggcaacagaagggaagcgttggaggttctgggctcaagaaaagtggagagaaata

SEQ ID NO: 140902 - DNA, 279 bp, Glycine max
  Clone ID: PAT_MRT3847_98244C.1
gacttgttggtcatgagttcgaatccgaaaacagcctctttgcatatgcaagggtaagactgcgtacaacatccctccccaataccttcgcatagcgaagagcctctggacaatgggctgagcttttggggttggccggtttcatacgtccctatgcaagtgctggagcccgagacatattttacggagtcaattatgcttcagcagcttccggaattagagacgaaactggacaacaattgggaagccgtatcagtcttagagggcaggtgcaaaacc

SEQ ID NO: 140903 - DNA, 318 bp, Glycine max
  Clone ID: PAT_MRT3847_98245C.1
ggagcagggcttgtttatttattgaaaccattggaggttcccttagggtacctggtcaaaaacaaattgggcattacagccataaaccattactaatgttaggggaccgtgaatgatatgaaaagtatcttgtgatggaactttgcctacttaaacgttgacagatcgttactgattatactgccagatgatatgacacaatcccgcttgatgttgccaatatcggttctcaacagctacctttcgttgacaggattctttggaaacatttacggccttctacaccgatggcggattaagaagatgcatttataatca

SEQ ID NO: 140904 - DNA, 107 bp, Glycine max
  Clone ID: PAT_MRT3847_98246C.1
ctcacccccagcggaagcaggaaccaacacgtgaggatgtcacagatgagaggaaatcagaatcgacttctgctataattaatgcatcagaacttccacatcacgtg

SEQ ID NO: 140905 - DNA, 228 bp, Glycine max
  Clone ID: PAT_MRT3847_98247C.1
tgtgtggaaatagcacacacttcacacatgattacgacaattaagagaggtgtggaaattttcaggataggcaaagcatactcaagagggaggggggtgcctaatttcctttatgggattgaacaagcgaagcagggagagaaaacacgaatggcacatcatgcagaggattccggattttcagaagatctggcagtagcctgaggaacagaaaaagctggcataaga

SEQ ID NO: 140906 - DNA, 581 bp, Glycine max
  unsure (1)..(581): unsure at all n locations
  Clone ID: PAT_MRT3847_98248C.1
aatnnggcacgagcggcaccagcagacctgcatctggcaatcccggcaacagtgtaacgcctttccccaccacattaccgatgccaatctccaccgcaagccaaatataatttccactcggtttgcggacgataatggctaatggtttcacagagggcacggaggtgttgacgatggtgatgcacggtggttcctcggttgcgactggggttgatttcagtcaacaatgggttcctccacgcggccctctcctctgtctcgctcacgctgagatcgctgccatttgtgtcgtctccgtgggtttcacagccgctacacggtttgcgtcgtcgacggacaaggctcaaagatgccagatacgagagaagagagagaaatgagttgcagagggcaacagagagagaaatgagcgtttaattttatttttttaatggtgcatcaaaacaacgtccaataaaataactaggttgaaaaaatgaaagactcatttagtaaattaaaatataagaagatcaggattcgtaaactgagataaatataaagaataaatttgtaattatnnnntatatttatccatattc

SEQ ID NO: 140907 - DNA, 186 bp, Glycine max
  Clone ID: PAT_MRT3847_98249C.1
tggcagaaatgataaacagtctttgtggtgtgatgaaaattgatgcgtgaaaggcacactgctgtggctgttgtcaagatgcattgtagaagtgttgagatgatgtgatcctcgattcgcaagtatcaagcttaaggtgctgatagagaatatggcacaagtcaagttcactaatgtctggggagg

SEQ ID NO: 140908 - DNA, 434 bp, Glycine max
  Clone ID: PAT_MRT3847_9824C.1
tttttttttttttttttttttttttttttttttttttttttttttttttgtttttttttttttttttttttaggtattcccaaattcgggccccaaaactgggtatgaaaacccattggaagcccctaatcggggcccaagtcggataaaaactaaatttgccccaaagggtggggcttgggcctccggcttaatcaaaaaaacttctggtttttaaaaagattggtgggctttttggggaacaaaggcactacccttttccgcatgatttactaaaacagggggcccaatatggggtattttagcaaaaccgcccaaaaaagcccttgggaaccaatgggctttaaaaaaaccttttttcaaaatacccttattcacgggtggggcaaaaggcccctgatttgggaaaaccccaaattggccccttttaggag

SEQ ID NO: 140909 - DNA, 456 bp, Glycine max
  Clone ID: PAT_MRT3847_98250C.1
cgcggcttagcgcagcgccgccccaacaggtaaactatgccctcgatcgcattctcagggggggaagaacctgccggtgtgggcttggaatccctgcaaggtctggtgtatcagactccaaggagaaggagtgacgcccaagttagtcggatgtttgcacaggctcccatcaataagagagcaactgagctgctaggagagcatatatgttgccccagcaaaaagtacagaccctaaccacaacaacttagtaatgtgaacggtagcccacctgccagtatcctcgaaggagagcgtgcagagagacaaactacctttgaagctgaaaatgcggatgcatactactagactggcagcattgactgcctcggaatatctctggaactttgaaagttaacaaacacaggttcacagaacattggtgctgcacacagtgaagatgccttctacaggtat

SEQ ID NO: 140910 - DNA, 599 bp, Glycine max
  unsure (1)..(599): unsure at all n locations
  Clone ID: PAT_MRT3847_98251C.1
aaatnctacngtgccatcaaatacactaccaaagtctgtctcgctcatgacaacagagacttcacggaatctcaattctcaatcttatacatattttacgattcgatttcattttttttccgaaatatttctcgtgcgagtgatcggttctacgcctttattataatatgatgaggagacggacgcagctgttagtcaaagccaccaaccacgtcgagcgaactcccaaagacagacacctgcgaaaaatcttgtacggaactactgttggacggactacagctgatgtagcggacagcatgcatgcaatcgcgcgtcgattggccaagacgcggaactggacggcggcattgaaaacattgatagtcattcatacgatgtcgagggagggtgaacctactctcacagaagaattacttaatttctcacaaagggggcgcatacgccaaccttctaatttcaaagatgaatctagcccaattgcttgggatagatctgactgggtacgtactgatgcattatatttggaagatagactccaaagtttccaggttctgaactatgatattgaaactgaccgactagctaaacctgttgct

SEQ ID NO: 140911 - DNA, 337 bp, Glycine max
  unsure (1)..(337): unsure at all n locations
  Clone ID: PAT_MRT3847_98252C.1
tacgnaagctcaaaaaacggctcgagaggaactaaagccatggcatgaatgatgatgatgatcaatagcacattatttttacatggtgcctccgagcttgtcagcatatacagtccgcgcacgcgcgtcttaaaagcaaaatgatctttcactactggcatttctttcaaaagccaaacccaatgaatgccctcatcaccttcacattgctcccttttgttttcctcctcttcatcataaaggtctacttcaaccttcctcttccaatacgccttacaccctccacctatgagattctttctatcaaaactccaatacaaaaacaccatccttcttc

SEQ ID NO: 140912 - DNA, 1977 bp, Glycine max
  Clone ID: PAT_MRT3847_98253C.1
ccgggtcgctcacgcgtccgcccacgcgtccgcggagggtatgactttgttgagcgcaccatcaaactttgtaacttcaaaacatactcctctgttctctctgtttctcttcaatcagcaaacaccctctacagcctctaagtcctacaagaacccatcccctccccagccgctcccaaaatctcactcttcttactcttcttcctccaagagaagtaaacaaccctcacattcaccacagcagcacacacagacaaagacaaccttgtttgtctccaatcaaaacctttcaagctggcgttcgaaaaccaagacaaccctgtccgagaaatcaagcccaagaataggagaatcatgggtgctggaggccctgatgatgaggacaacaacaggtggccaccgtggctgaagcctctgctaaaagaaagtttctttgttcaatgcaagcttcacgctgattcgcacaagagcgagtgcaacatgtactgcttggattgtatgaacggtgctctctgctctctctgcctcgcttaccataaagatcatcgtgctattcagataaggaggtcctcataccatgatgtgattagggtgaatgagattcagaaggtgttggacatcacaggggttccaaacctacattatcaacagcgcgagggttgttttcttgaatgagaggccgcaggccaaggcctggtaaaggtgtcaccaacacttgtgaagtctgcgagcgcagccttcctttgattccttaccgattctgttctcttggttgcaagattgttgggacttcaaggaacttccagaagaaaaagtcagcggcaatggtatcagacacagaggattcttggagcagcaacagcagccatgggaaaaaagaacagcttcaacaccttccacaccgtcctccaacttctgttaattacagaacggccaagagaagaaagggaattccacaccgtgccccaatgggtgggctagtcatagaatactagaaactaagttagctttaggttatttgctataatgcccctgataaattttacctcaaaacgcaactttctccgtgcagtttcacccgtcacaacatacttgagctttttgctgtaaaaggccggtgctggaattgtgttcccttctctgttccttacttgttaatagcgtttgtctatataggaaaaatccaatagaagtggaaaaaaaggttgagaaagtagaaaaaaaataagacatctgtgaaatagtttgagaaaaagaatggtgcagcaaaataagcaaagttcctttcaaccaaagtacaggaagatgaggaacattataggtttggtttctagagcaattatacgtaagttttggggtgggtgtaaatagtggcttggggaagaagacagtgacaatgtactctttccaaatagatggattgtttatataggaatggtgaaaaataataatagtactaatagattttcttaaatcttgtgtctacattcattcagtgcaattacaattttaatacgttaaattaatgagttatagttcattgaattgttgaaattataggaaaggtattattttaatctttgaattgttcaatgatgattatttttagattttggtatcattagatgacgataaattaaacttcaaaattataaaactaaagattgaaataaaaaatactccggattttcttaattttaagaattaatctagtgtattgttccaggtttggtatgcaattatttcctctcctttttctttatattatttttcttagaagtgaattttcttattttagcttgtgattttggtattggtgatggctaaaagcttccggggcccacttgagccggtttatgagggagctggtcaaagttttggtcgtagtcgggtccacgtgtcgaatcctggttggactgaaggaaagcggaacgtattggttgtcgaaacaaacattaggtcagccgcccttgttag

SEQ ID NO: 140913 - DNA, 625 bp, Glycine max
  Clone ID: PAT_MRT3847_98254C.1
agcccggaattcggctcgagacaatttctctctctagaataaaacagcttctaccgcctccaagtcctacaagaacccattccctctcacaccgcccccaaaatctcactcttctgccttctcttttctcttctcttcttcctccaaaacaagtaaacaaacaacactctcacattcaccacaacacaaacacaaacacaaacaaagacaacaaccttgtttgtctgcaatcaaaacctttcaagctggcgttcgagaaccaagacacccctgtccgagaaatcaagcccaagaaccggagaatcatgggtgctggaggccctgatgacgaggacaataggtggccaccatggctgaaacctcttctcaaagagagcttctttgttcaatgcaagcttcacgctgattcgcacaagagcgagtgcaacatgtattgcttagattgtatgaacggtgctctctgctctctctgcctcgcttaccacaaagatcaccgtgctattcagataagaaggtcttcataccatgatgtgattagggttaatgagattcagaatgtgttggacatcacaggggttcaaacctacattatcaacagcgcaagggttgttttcttgaatgagag

SEQ ID NO: 140914 - DNA, 421 bp, Glycine max
  Clone ID: PAT_MRT3847_98255C.1
gtgcagaaggatttgtccgtctaaatggaatcttattcactcgtacaagccttgagatcctcaccgaagttctctctcttgttagcgctggcctgcgtgagcttttatcatcagggcaagacgaagagctgaattttggcacagatactcttgagaacaaacttgccattgtcagaattgtttccattatcatatttacagttcataatgtgaataaggaatctgaaggtcaaacatatgcagaaattgtacagcgtgctgttctacttcagaatgcattcactgcagcttttgaattgatgagtttagtagtagagagatgtatgcagctgtgggatccttcttgtagttatctcttaccaggcattttggtttttgttgagtggttggcatgttattcatatcttgctgcaggcaatga

SEQ ID NO: 140915 - DNA, 231 bp, Glycine max
  Clone ID: PAT_MRT3847_98256C.1
taattgagtttaattattcagatgagtcaatttctcgtcttacaaatttatttattttcgtaagtcaaacctaaatttttagtattggactccccttgtccatatgcgtaaacacatacagcctggtaagagagaaattagaggggggaaagtaaaattaagtttggttgtttaataaataaaagagttaaaataatttttaaaataataaaatcaaaaaaaaaaaaataa

SEQ ID NO: 140916 - DNA, 399 bp, Glycine max
  Clone ID: PAT_MRT3847_98257C.1
aaatcttttttttttttttttttttttttttttttttttttattaaaaacaagggggcccgtcttggggacaaatacatcttggggttccgagaagcaaaaacacaaggcaacgatgctttgcaaaaaaattaaaaggatcccctccttaaaggggtgtttaaaagggaaaaaggaacgaagccaagcatcccaccttttttggggagggggaaagcccccttaccttgtttactcaggggcttcatcccgttttcttgatcactgaaaccctagcctctggcacctcttccgaaataggggaggggcacgggacctttctttattttgtggaggggtcccacaacctccccataatgccttaaaactcccaacaccgttttaactccgacggccctgg

SEQ ID NO: 140917 - DNA, 276 bp, Glycine max
  Clone ID: PAT_MRT3847_98258C.1
tccaaattccggataacatgagactgaaagttgttcctagatcgcgtactaacttagatctacatgttcatctccaaccatagatgaacaacttacatgtgatgaccacagtttgatccgcggttaatcccactaataacctgaaattcaaaaccacgtcatcatccataaatcttcattcctttctcacgagaacaatcaatcacccgcataatttccagtggcacgaaataaacactaaccagcataggcttagaccacgaaaacaacgctcca

SEQ ID NO: 140918 - DNA, 752 bp, Glycine max
  Clone ID: PAT_MRT3847_98259C.1
tcgttctgctgcgagaagacgacagaagggtacggctgcgagaagacgacagaagggtacggctgcgagaagacgacagaagggtacggctgcgagaagacgacagaagggagaacaagaggaacagagaatgtaaagaaggaggagggaaggagaaaatatagaggggtgaggcagaggccgtggggaaaatgggcagcggagataagagacccattcaaagcagcaagagtatggttaggaacatttgagacggtagaggcagcagctagagcctacgatgaagctgcccttcgttttaggggcagcaaggccaaactcaacttccccgagaatgtcactctccgacaacctcaattcactgtttccacatcaacagacccatttcaactctcgggtaccaacctttatgatcataggatgtttctgacttctaataccatggcttctcatcatcttcaatcttctttgccgctgccaccagcaacctcctcttctctaacttctcctcctcagaacatcacttcactttcttccttgtattctgcccagttgcccccatggtcggcctctggtcatagctcttcttcctccccatgatccttttttgtttctttgtttttattgagtctatattttcccgtcttttatcgtatctctccatttttttcaaacactaattaataataataataataattattcctctacaaaaaaaaaaaaaaaaaaaaaaaaaaaaaaacgccgttaga

SEQ ID NO: 140919 - DNA, 1529 bp, Glycine max
  Clone ID: PAT_MRT3847_9825C.1
aggatgttacaagttaataagcctacagccagttgacatgttcccacacacacctcatattgagtgcgtttgccttctggagcttcagtaatctgtgataaattaaaactttccatttcaaggggattacaagcttaatacaagatgcaagtcaagattgggtcttcaaggtgatagataggaaaactcatacttttatgctgcaaagtgtgcctgatgctttgcctacccaaaactactgcatcagtgtacaaattacaaaatcattatgaatggtggtagcattggcaagcatgcagggatcacattgttgcaaccttgcaaaagtttctcatacatttccattcatgcggagcccccaaaaggttttggattcatgcttagcaacctccaaatgtggattattgttgagtgttgatcccacttcatatgatatgacaagttcatcatgaaatagatcatatgctacacatgtcagatccttgttgatagggaagttactgtcagctggcttcgagggccagtacctgtaagaagaagaaggaaaagaaggcaagtattttttcacagatctgcagcttattacatcggtatatttatactgtgattctctaacagaattgtgattatgtgctagggaacattacaataacagaattggttatcatgatctcctagaggtagacaacaatattctgcagatcccttgctgccagctctgccataacaagcaacattcacacataatccctcaggtacgcaggctttgtgattgttctcatggttctctcttctagttgcacccttgtgttcctttcttcactagacccactgactgatgcttcctgcacccctgtttcgctatcacttgtgtacttgaggtggaaatgcaagtacatcttgaaacattagatgtttaactgtttgagtaaacagtattcagcgtgcatataaatggatcatattcttctcttcatttctttatctttagaaagaagactaagtgctatttttgtggctgtattgactggggtacgctttcgagtaattttgcatgctgtatttgtaccgttattagtcctgtgaaaagggggaaagtgaccaagaatgccattggaagaagttatcaagagggatctcatggtgaataatatattttgggattttttttttttgtgatcaattaaaacgttccatttcaaggggattacaagcttaatacaagatgcaactcaaggttgggtcttcaaggtgattgataggaaaactcatacttttatgctgcaaagtgtgcctaatgctttgcctacccaaaactactgcatcagtgtacaaatacaaaatcattatgaatggtggtaacattggcaagcatgcagggatcacatcgttgcaaccttgtaaaagtttctcatacatttccatttatgcagagcccaaaaggttttggatttatgcagagcccaaaagtattcagcgtgcatataaatagatcctcgagccgattcggctcgagatcgagccgaatt

SEQ ID NO: 140920 - DNA, 218 bp, Glycine max
  Clone ID: PAT_MRT3847_98260C.1
acgaccaagaccgtcacattgcattagagtcatgatttgctgctacatatgcctatctacatcaatcattcaatgatccaaggggaaaaatccctcacacgcaaccttttccaatacaaacagatgatgcgggaaactgttatgtgacgagcactcccttgctgcgccaccacctactacaaaaatctagatgaaccacctactgtcaatctcaataa

SEQ ID NO: 140921 - DNA, 457 bp, Glycine max
  Clone ID: PAT_MRT3847_98261C.1
gattctcgcaccactgctaagaccgcgatcacaggttgacgaaccttaaaaccggatccacaagcggacgctcccagcactcgagaatggtccaaaaactgcctacttcacgggggacgatcccttaagggaaagaaaactactcgctgtgctggccacagacaatgagaatcagagtcttaaccactctaaccctatgcgctcaacactcttctagaacatataggacttcaagtcacatgtaaactagtgctctttctcactcaggaccctgcttaatgatcaagtacaaactggagaaaagttgaatactagctgccactctcgtatctggtattggacttcgtgggtagactgggctatcgctgtacatgatcccactctatgctcgtcactgagccacattgccgctcaaagagggcgtaaccgaaaaacacttgagcggcggtgcaaatgc

SEQ ID NO: 140922 - DNA, 424 bp, Glycine max
  Clone ID: PAT_MRT3847_98262C.1
cctaaactaaacatgccattaaagaaaatgactgcttattttcttccttgaaagtaaactatatatcattccattgttcgtcactcttgagtatgctgaggtcttgtgccttatagagtatccatcagtccactcaaagttgtcaagcaaggaccacacaaagtaccctctcacgtctgctcctttccttattgctgttgccaaggaatccaagtaaccacgcaagtattccactctttcgacatcattgatgatttctttagtggcatggttggaattctccctcatcccaattccattttcggtaatgaacattggtatgttgttgtacctgtgctttaagtaagtcagtatcttctccatgccttgtgggtggacatacaaccagtcaagtgcagtcggttctccaatgctgataccattc

SEQ ID NO: 140923 - DNA, 220 bp, Glycine max
  Clone ID: PAT_MRT3847_98263C.1
gcatgtaaccgggtgtgtgttttttatctaactttattctttcaagtcaaaaggggattcgaaacctgtgattgaaacaatgtggcaaaaaatttgaacaaacattaaaacagggggggtgcaccctaaacccttgaaccgcaaataggtgttaacatccccatttgtgaaacttttatcattttatatactgtcaccttaaaaaaatatgcctttcccc

SEQ ID NO: 140924 - DNA, 1880 bp, Glycine max
  Clone ID: PAT_MRT3847_98264C.1
ggcgggagggagcttccactcctagcacatcatgcactctttgcactaagcttttgcatctcaattttcttggcatcgtgtgatgatgattttctatccgtgaaaaagaattcaagttcatctccatttcctagcaactttctttttggaactgcatcttcttcatatcagtttgaaggagcttacttgactgatggtaagggactaaataactgggatgttttcactcataagccaggcactataatggatggaactaacggtgatgtagctgttgatcattaccatcgttatcaggaggacgtggatcttatggattacattggagtcaacagttatcgcttttctttatcatgggccagaattttgcccaagggtagattcggcaaggtgaactgggctggcattgattattataaccagctagttgacacaattgtctctaaagaaatagaaccttttgtcacaatgtcacattatgacattcctctggaacttgaggaaagatatggaggttggctaagtcctgaaatccaggaggatttcaagtattatgcaaacatatgcttcaagaattttggagacagagtcaaatactgggtcacctttaggctcgagaacgttgcaactattcgtggttatagaacagggatgtggccaccttctcgttgctctggttcatttggtaattgcagctatggtggggactcagagagggaacctttcattgcagcttctaaccttctcttatcccatgcggttgccgttgacctatatcgaaccaaatatcagaaaaaacagggagggaaaattggagttgtgatgaatgcttatggtttgaacctgtcagcaactcctggaaagacaagttagctgctgagcgagctcaatcattttatatgaattggtttttggacccaattatcataggggagtatccagcagaaatgcatgaaatattaggacaagacctcccaacatttggctcgagcgacgtggaaaaactcaagtccgggttagatttcattggagtaaaccactacaccagtgcctttgccaaagactgcatcttctctgcgtgtgaacaaggacgagggtcttcaaggactgaaggttttactctaagatcgccacaaatgaatggtatcagcattggagaaccgactgcacttgactggttgtatgtccacccacaaggcatggagaagatactgacttacttaaagcacaggtacaacaacataccaatgttcattaccgaaaatggaattgggatgagggagaattccaaccatgccactaaagaaatcatcaatgatgtcgaaagagtggaatacttgcgtggttacttggattccttggcaacagcaataaggaaaggagcagacgtgagagggtactttgtgtggtccttgcttgacaactttgagtggactgatggatactctataaggtttggacttcatcatgtggactatgcaactctcaacagaaccccaagaatgtctgcattttggtacaaaaacttcattgctcttcatgcccctcgtgcaggcacaagacctcagcatactcaagagtgacgaacaatggaatgatatatagtttactttcaaggaagaaaataagcagtcattttctttaatggcatgtttagtttaggaaagaaagtgaaagggaaaaaatagaaagaaaaaaaaaagaatagaaagtgagttgattatataagttattaccgtatttctttttcctagtttggttgtgaaaaaaatgaaagagaagagaaaaaatatatgtataatgatataaatatctttaataaaaaaaataaagtatgttaaaatgtgttattttatatatagcaactttcatctcttttg

SEQ ID NO: 140925 - DNA, 547 bp, Glycine max
  Clone ID: PAT_MRT3847_98265C.1
aaaaaaaaaacccccttttaaaaacccctcaataaaaaaaagggggggaaagggtaaacccaacctcattaaccaaaaaacttggccaaaaaaaaaaaaaaaaaggccaattttgacggggggtactttaaagaggaaccaaaaaggtttcaccaaacaaacccagggtttttttttttttttccaccaaacaaccccacagaaaaatattttttttttttgtccgaggaaggaaaaaaaaaaggaccttcaaagtttttcactaaaaaggcttttgcacccgagaagggcatttaaaaaagggattttttaaggaacctaaacccaaaaaacaaagccggggttaaaaaaaaaaaagcatttaattggggagcacctccaatccctttaaaaaaaaaaaccatttggctttgtccacaaaccaaaagtcccacgtaggtgggaaaactggttatttttgttgctgcccccacaaaagaaattcctttttggacccttatttccattttttttttaaggcttttttttcctggattggggggggttt

SEQ ID NO: 140926 - DNA, 279 bp, Glycine max
  Clone ID: PAT_MRT3847_98266C.1
gagcgttcccaagatctctagtgaccttattgcagaaagaattttagtggacaaaacgggggaggggatcacacttatacaccatggcacaattagtagcttgaagagagtggctgcttgtatgaaaggctgagctatggctaagattgcgatgatcatgaatacagcacatgcaatgagttactgtgcctcatatgtacaagtagatttaacaactggaaactgtacagagacttctgatgcatgtaagtggccaaaatctgcaccacatgactggga

SEQ ID NO: 140927 - DNA, 266 bp, Glycine max
  Clone ID: PAT_MRT3847_98267C.1
acaaactgaactttgaacttgtgaagaccctaactggtccgaaccgttggagccaccgggcaatagatggttctcttactctctgcctcaacacaccattgtttgcggtttcagctttattgggaagagggttggaacagctgacgtgaaatcgttctgaatacaaagatgcaagcttgtacaacgatgacttcttagccccaaccacctatgtcgaccaaaggcgttaacgtccctgcccaagggtatggcagcgataacgggtt

SEQ ID NO: 140928 - DNA, 234 bp, Glycine max
  Clone ID: PAT_MRT3847_98268C.1
ctcgagccgcttggctgctggagagggggtcaacaatgttggggcacttctggtaacatgcaggagagcaaagcttgccggtgaattgaggctcaaagaagttggaagtgatcacatggattgttgtgtggaagagaaagtcttacaagtcgagcaaaacctatgatggatacaacaatgggcaatctagggaagaggcccgtagcatataaaaatggagtgaacaaatttggc

SEQ ID NO: 140929 - DNA, 390 bp, Glycine max
  Clone ID: PAT_MRT3847_98269C.1
gatcatccgctgctaactcactgctgactgggcacagagctcgtatatagagatagaacaaacaaggcgcgaggtgattcttatctgacagatgaagaggaacaccctcaattgaagcaaagccatgctcattatagatctagggatcctacatcgacaggtcatatgtgccatatgccaatccatattatataattttgagaggatggtgcatatatacaatctcgtgggtgcagatgggaagtcacgagctgagtgtcactacaagaaggaaatagaatgtgacgggaaaagtgattaggctgctgggctatctgctgctagaaacatactgctagaagatattcaaaacttgagagaaaatgattgacacttgcactggataatgga

SEQ ID NO: 140930 - DNA, 362 bp, Glycine max
  Clone ID: PAT_MRT3847_9826C.1
cccacgcgtccgaagctaataagcttacagccagttgacatgttcccacacacccctcatattgagtgtgtttgccttctggagcttcagtaatctgtgatcaattaaaacgttccatttcaaggggattacaagcttaatacaagatgcaactcaaggttgggtcttcaaggtgattgataggaaaactcatacttttatgctgcaaagtgtgcctaatgctttgcctacccaaaactactgcatcagtgtacaaatacaaaatcattattaatggtggtaacattggcaagcatgcatggatcacattgttgcaaccttgtaaaaagtttctcatacatttccatttatgcagagcccaa

SEQ ID NO: 140931 - DNA, 143 bp, Glycine max
  Clone ID: PAT_MRT3847_98270C.1
ccgggccgactcaaacgtccatccaggcgtcagacagcggcaaaaagacaatagaatgggaaatttcaacgtttacttattttggtggaaagtatagctgtagcagcggacgctcaccctcactgttgttaagagtggatcac

SEQ ID NO: 140932 - DNA, 1147 bp, Glycine max
  Clone ID: PAT_MRT3847_98271C.1
aaccaacatacctcccagtcctttcatttcctcaaaccctagagtcatcactctcctcgacgacatctcctttcccatcctcttcgacaattcctttcatgccttccacctccttcactggcggctatcgtgcgttcgtatggagcggtgaaggcgctggtggcagcactagagaaacagacaatgatggcaaaggagaacacggtgtgcgcattggttcggttatcgaaaaacaaggaggaagataaggtgatgatagggagggtgggagcgattctgcatctactgaagcttctagaaggagggggattgcacgggaagaagaactcggtgactgtgcggtacgcgctatgttcgacgacgaaggagaataaggtgaaggcggtgagcacgggggttatgagggcactggtggagctgatggtggacttggggttgagtatggaggacctggggttgagtatggtgtacttggtgagcgtggtggtggcggtggcggaggcgaaagggatttatgatttccaactacaagcccttgttgccgaagttcgtgatcttagggacagagagcactctgccaccgagcaacaccaccttctagtccaggttttcgactcccttcaattaggtcaagtttcttcgtcgcgtagcgtagtgctttttgtattttcttgttggtttagtttgccacgtttgagagtagaagctgaagcggaacgatgaagagtgcggcaaaaggatacaagaattgcaggacgagttggcttctgcaaaagaggacaccagaaactggagagaaaggttgtgctggacttagatgaaacactggtatgtgcatttgagacatcaagtttgccagctgctctatggactcaagcaatcgaaggtggtttgaattgtttacagctggtcttaaaggctatgctagatcccttgctaacagaatagatgtggaaaatcgaatcattctacgactttatcgaccctcaacaattagcacctaagtgaatctaccttgtttcaaatccagtattctattttatgtaattaatcttttttgtttacatcatggctagtagccagccaactatatgtgaattaatattatagttcattttattttaattatggttctttattccttgtt

SEQ ID NO: 140933 - DNA, 1411 bp, Glycine max
  Clone ID: PAT_MRT3847_98272C.1
ggctcgagaaagaaacatatatcaagtagattacacaccttcacgttaatggattcccaaatgacgaagcttggaacctctctattggttccttctgttcacgagctagctaagcaacccatgaccaaagttccagaacgatatgttcgtctaaaccaagatcctgttgtatctgacacaatctctctaccacaagtcccagtcattgatctgaacaaattgttttctgaagatggaactgaggtagagaagctaaaccaagcatgcaaagaatggggtttcttccagcttataaatcatggggtcaaccctttattggtgcaaaatgtgaagataggtgttcaagagttcttcggtcttcaaatggaagagaagaggaaactttggcaaaaacaaggagagttggaggggtatggtcaaatgtttgttgtatctgaggaacaaaagttagaatgggcagatatattctacattaatacgctaccatcatgcgcaaggaatccccacatatttgctagtaatccccaaccattcagaaatgatctagagagctattctttagaattgggaaaacttagcatcgcaatcattaaacttatttcaaaagctcttgagatcaacactaatgaattgctagagttatttgaagatttaagtcagtcaatgaggatgaattgctaccctccatgtccccaaccagaacatgtcattggccttaatcctcattctgatgctggtgctctcaccatcctcctccaagtcaacgaaatggaaggcctgcaaataaggaaagatggaatgtggattcctattaaacctctctctaatgcttttgtcatcaatgttggagatattctggagatattgactaatggaatttatagaagcgttgaacaccgagcaacaatcaacgcagagaaggagagaatttctattgctacatttcacaggcctcaaatgaacagaattgtaggtccaacgccaagccttgttactcctgaaaggcctgcactgtttaaaagaattggtgtagcagattactatagaggctatttttcacgcgagttacgaggaaaatcatacattgatgttattaaaataaaaaatacataggacataaattaggacttttcctgagtttttgataaaataaaacaaactcagcaaaatattagtatatcgttacagactagcttattgaacaataacatcaatattgttactatgtattaattgcctcgttcaatgcttcaagtttgaaaatgctagcttccatgctcatgtataatagcaagtttacatgatgggacttatgtgtgcatttgttagttaatattgcttagtatgtaacacagacacccactttttattttatttcttataatcaaaagatagtattgaataaaaaccc

SEQ ID NO: 140934 - DNA, 465 bp, Glycine max
  unsure (1)..(465): unsure at all n locations
  Clone ID: PAT_MRT3847_98273C.1
acggaagacgacagaagggcatatgtctatgataatcacaagaaaataattttgtgagtgtcatatatagaaaaaaggcatcagatttcttcattgaactccatctaccaaacattagccgttaaaacaacatgcatgatgccttttcaactaagtgcttgtttggttaattttattttgaagtaatatatcttcaaacattagtgttcttaagtttgggtttagcctaactcagtcgagaaagttggcttgtgaggtgaggaatgttcgagctttaagtagctctactagcaatatatataatgatatgccataagatattgnttgatgcctgtcaacaagagtgttaacattatttaacacacactctttgtaactaattctcttctattaactaaaatttattgaaaattataaaataaattaagaacgagacttataaaataagaggtgagacaaacaatt

SEQ ID NO: 140935 - DNA, 442 bp, Glycine max
  Clone ID: PAT_MRT3847_98274C.1
attccattgaataatatctagttaatatgttgcacacaatatacaaaagttaaccgttagtaaaattataataaaatgacaacagaactaggtttaaaacaaaaaaaaaatagaaaaggacctcactggaaaaagcaaagtaatttgggaaagggagacaacaataaaaggaagcatgcaacgaaaggggaaatgatttgggccaaactgtttgaaaaattcacacacaattaaattcagccgtttccctgggaagaaacaaggtcaaggggggacacagatcctggattccagccatttacacatgaaccagatcatgacttgagtgtcccattggagggctcctcacctgcaaaaggggagggtccatatgccaaccgatccatgctatgggtagaggaatttgaataaggagaatggggagaaccaggactgggaccgc

SEQ ID NO: 140936 - DNA, 299 bp, Glycine max
  unsure (1)..(299): unsure at all n locations
  Clone ID: PAT_MRT3847_98275C.1
ggacacatccatccatggcttccctatnatcatcncgantcanaggacngttnaacttagccaaactccagattgtgttcctacncttccatncncattactcaacaagaccctnatttcttttctcnncnctcaacaaattctatnnctactccaattctctgcgctgctctgcctccgtggaagacaccgaatgggattgggaagatggcaaaaccatttccacgtggtcgatgaancagagcttctcctcganattctcaagtctcgcttaggtgatgctctgcgtttggaggatt

SEQ ID NO: 140937 - DNA, 199 bp, Glycine max
  Clone ID: PAT_MRT3847_98276C.1
cgttgatttaattgatatcacccgcaatgcttggcacggatatggatgctcgttcgactgctactttcattacgattgtgagtacatagatttctatcaaccataaccggctcccaggaaggcctaatccctcgctttcattatcaaatgtattacgtagactaggacatgccgtgccaagattccatagcaagattac

SEQ ID NO: 140938 - DNA, 1441 bp, Glycine max
  Clone ID: PAT_MRT3847_98277C.1
tcgatttaaaaaaaaaattgtgattataattttgatttgtgtgtattttggtgggccatctcccagccccaaggtgtgtttgtcttgcagatccaacacgcctcaaccacactctctctatttatatccaactgtcccatcctcactcgcaacccttttccccttttatcaattcaaaccacgccttcccctgttcacaacctagcttgcccacaccaccatcacaacacaaaccattcctctcttgcatttaaacaaaaataaatatagattctgggggcatttcttggattctggttctcgttggtcacatccatcaaacacccctttgattctttcttggcgtgcgtcaggttcaattcatttttatggcaaccctgtcagagtaataagacagttaccgtgttgtacgtgtccttcaaacgtcacccacttcaacacataaaccaacgtttctctcttcccagtctcgagccgaatcggctcgaggtgattcagcatcacccaccccagatcgagaacgtttattgctcgcttagcgcacacgaggttatgaactcgaatcctgggcactatgttgcgcttgtcgtgtcctcgcccacgctcaaggccgagaatggcgctccgatgaagcagcttaagcttctccgacccgacgatactttgcatattggccaggtttatcggttgatcagcttcgaagatgtgttgaaggagtttgcttccaagaaatgtggtaaacttgggaaattgctcaaggagacgggtagtcatgggattcagatgaagcacaaggactctagagctacaaatcctagcccaaattccaaaaccgaattcggttccattaaggtcgaacaggagattcaacgaatggggaaccatggcagcagcagcagcaacaacaacaataacaaaggtgttggaaggcatttcgttggtagtggtgggcaatggaggccagccttacagagcattgcagaaattggaacttgaacacactattattatagcccccactcccatgaataaaccatgcagagcaacaaccgaccctagcttcctttcatttcacactttccaatgcattcacattgcccttctccttaatttagtagtagtttactatacgtagggtttgtgtttgttaaacgtatctctctccatcgaaggacatgtatacttcttgatcatcatgaccgtacaattagacatattagccaacttgttgttgaatagtatcatggtggtttgcttaatttgttaaaacaattaaactgttttctaagttgcctagattcatatatggtacagtagaattttatcattatttcattaaggacggatctcaagggtgtttcttctttttttagaagagtttggttataaattttcctcacttttagttgggacagagccactggtgagtgcatgtaacaac

SEQ ID NO: 140939 - DNA, 363 bp, Glycine max
  Clone ID: PAT_MRT3847_98278C.1
atagggggaaaaccaccaatggggggaaaacacccacaaaaggggaagacccccaaaaaacagggcccgccccgaaaaaaaaaagagcgttaaaaaaacaaggggggggggcacaagatccttttcattgaaatttcattgccgaataaccttccaacgccgtggggcaacataccaacgccgggggccatggcaccagggccttacagagggccaaaaaaaccctattaagcccccaaacccgggaaaggaccccaaaaggcccccaaaatctaattaatggccgccatgtataaaggttcggccgccatcgaaaaaggggcgcccaccccacaaagggtggctaccagaccccttatcctt

SEQ ID NO: 140940 - DNA, 301 bp, Glycine max
  unsure (1)..(301): unsure at all n locations
  Clone ID: PAT_MRT3847_98279C.1
ccggggcgacgccacgcgcgcgctgaggaggnnccgcgccccagagggtgtggggggcccttgctatgttagatggggtccttgggcctctgacagataccatctggagaatgccttttcatggtcttgctaccggggtgtgctccgaagggggtaacgagcgttaatgtggatgatgcaagggattgggatttgtggccttggcgctcggggattcgaatatgggtgcggtcggaggggtgatacaggcggaaccttgtggggcgctacattactgggaaggaaagttagtgccgcggaa

SEQ ID NO: 140941 - DNA, 493 bp, Glycine max
  Clone ID: PAT_MRT3847_9827C.1
gtaaattaaagaagctgcatagagatttactagaagaaatcaggatacaaacaagcacatttgtgttcatctccggcatgtgctgtataagatattcggttacagaagcctgttgcagaaaccccatacgaaaattttaatgataaaacattatatacattaaattgggatgtattcaataggagtgcaagcaggataacccttcttaagcgacttaagcccctttcacagtaaatagcattacaaaaaggagccagcatatgatataaccaaagtaaggactccatttcagcttttggtgcattggccttaggcagaatgactgatgataatcattggtcttgtgagcactgtacctatgccaatgttaagtctgccaccacatgtcaaatgtgcaatcaacagcgtcgatgaaacttggatccttcattagaaatacatgtcttctgcctaaggccaatgcaccaaagtaaggactccatttcagcttttg

SEQ ID NO: 140942 - DNA, 298 bp, Glycine max
  Clone ID: PAT_MRT3847_98280C.1
ggctcgaggggaattgttgacaccaaaatttttactgttagttgaggcgcaggcgcgccctcagggaagagggagcagggtaagcaccggaccaccacaggtgaaaacgagggagatccttgacgtctcgggagggctaaggggcaaccagaaacgatcaacagcctggtgagtggactacgcccagcacggaatatagccgactgagcagcacggaggaaaccggcatccacagctggtgcgcgtgaatcgtgtgtacaacgagtgttagcagcagactgtaagggcaacgcccgca

SEQ ID NO: 140943 - DNA, 786 bp, Glycine max
  Clone ID: PAT_MRT3847_98281C.1
gtttatagacctgccttatactggataagggatggatgtatcttttagtggaatattgagctatattgaagcaaccgctgctgaaaagctccggaataatgagtgcactcctgcggacttgtgctactctctgcaggagacactgtttgccatgcttgtggagataacggagcgggctatggctcattgtgacacgaaagatgtgcttatagttggtggtgtaggttgcaatgagcggttgcaagagatgatgagaatcatgtgctctgaacgtggcggaagattgtttgccaccgatgatagatattgcattgataatggagcaatgatagcttatactggcctccttgaatttgctcatggtgcatcaactccactagaggattctacgttcacccagcggttccggacagatgaagtgaaagcaatatggagagaagcaaatttggaaaatttgaatgggcttgcagagaagagtatttgatttgtcaatcttgaggtttgagtgctcatcagtttgtctaaaccaatgtctatggaaagcctttgcagtttgtcctggtattggtgactttgcagtaactctttatctctcttaggacatatactggtctaaaacttatccatgtaatatctatgtgttcactaaggcagtcaatctttaggctttgtttatgtattggcctgcagatcaagtttgcctctgcatttcactattggtgacaagcactgaaaaattatgaaacataacattttcagcatatcaagtaattaggttggtctttg

SEQ ID NO: 140944 - DNA, 298 bp, Glycine max
  unsure (1)..(298): unsure at all n locations
  Clone ID: PAT_MRT3847_98282C.1
aananngnngggagngttcnggagaggnngacgntaganacnacngtgggcncnagaaatcaccgaattngngnttanncgaanagtgntcgccantnntccngatacacatcnggnttgnnagttcntnncatgnnaccatagnntnattaggatgtgttcnncnaccgcnttgaatnaggtttnnntgtngctcnccttcaaacnccagcnntccaaatccgctctttgcgattgtgntgtgancngcttncnactgcgatagnttntcnantgntacatcgccatggcggnntcc

SEQ ID NO: 140945 - DNA, 412 bp, Glycine max
  Clone ID: PAT_MRT3847_98283C.1
gggaaaaccaagggaaaattttcccctgccactcaaaaaaaaaatattttcaaaaggaaaatttccatcttggagaaaattaaaaacgggttttgggacaaattccccttttggaaatttattaaacaaaatttgggggggcaattaggctaaaaatcttggaactcaaggggtttttttatcgccctttaaaaacaaaaaataatactggctcagcattaaaacttaagcccccccagagccgttctttttggcgaacacaaaaacctggaaattggtataacccggaaggacacccgccccgggaactgcacggaggatgttggcacccggcccctttaacaagggcttgggacccctatttttgaggatctgggggaaagcaaccaaggggcttttggtcttggcaggt

SEQ ID NO: 140946 - DNA, 316 bp, Glycine max
  Clone ID: PAT_MRT3847_98284C.1
cgcccccttggttttttttatcccatcttgtgtccatatgacaaaagataaaggcgttggcctccaccttattgctcgctcttattggcatcaacaacccttcctcatatgtagctaaggaaagcctcggctcctacgtacccgaatcttatgtcattagcatagatttgtatgacactgaattccttgacaaagataacactgaactcatagccgacgacttgtacaagtacgactcctttacttgtgcatgcaaatgctcccctgccttcggcacaactgcatgttgagcggcatgcactcgtgatactgctgc

SEQ ID NO: 140947 - DNA, 281 bp, Glycine max
  unsure (1)..(281): unsure at all n locations
  Clone ID: PAT_MRT3847_98285C.1
ttccattcaccacccaaatncctcttcanagattccctanttctctcttcttcaactntctcagaacaggtattcgnagaaagaattctgggtgtattgaaagtttnnancttttaancctcnaaatntccnccatacatgtacctgcatttccaanttttgaagtttggatgcggnaataatcaanatggcctctngcgtgtcaacaatttttgcaccttctancactanaaatncnccanngggggttactgttggaggaagnaanctgacntgtaatt

SEQ ID NO: 140948 - DNA, 419 bp, Glycine max
  unsure (1)..(419): unsure at all n locations
  Clone ID: PAT_MRT3847_98286C.1
gaaaagaaagaaaaattgccctttagatgaagaaaaattcgaaattttctttctttctattttctcttctattcaatttttaagtttttgtctgttgactcattttctttcctctgttaccgagggtaatgctgtaacttgcaactggggaagggaagggcttccaaggaacttgggcctcagtttcatttgcccctccccttttgggcggactgggggtttaacccgccagatgggagggtgggtttttcatgatttgctaaaccgagatttcggcttttgttgtttgctgttgtctcttgcccattgccgtttagacaccggccttgctgagaagctcttcgtgggtgcctctctcaacttcttggccctcngtttttgctgcgcccgtttcggccgtttgtcctgggggtaacccg

SEQ ID NO: 140949 - DNA, 1087 bp, Glycine max
  Clone ID: PAT_MRT3847_98287C.1
atccaaaaccaattctgcaacataaaaaacatttaaattaagtttacaaccattcatctaaacgctattgattacttccccaacccagggcataattagctcgtatcgtacctatttaaccaaccattacaagaacattcaagtcaacgagctaataacttccaaggtatcaatgcttttatatatacatcatctatcatttcttctctttcaatttcttttcaataaaagaaaaggaaagaaagaaaaagatgtacttagatgggactaaaactaactaatacttgccgataaaaacaaaaaaaacaaaaacaaaaacaaaacaaaaagatgggactattttcatgcgcaggatagcaagttccagtgtccatcaagccgggggcttaggttattagtttttatggatggagacattggctatgtatgtacatatggatcaataagatgaggtgaggagcatctgtatctgtattttgtacaaaatgaaaagtaaaagaaaaggaacaatgcaatcaatgaggtaaaaatgaattggacagtgctgcagatactttacaaacagggcaccagttcttatgccgcaaccactcctgtatgcaaaccacatgaaatctatgttcacattgcagatccccaacttcatctccaacaacatattcctcctggcaaatgcagcatttgatatcatccttatcctcattacaacactcatgtgtatatgcagactgatatatacttcttttaagacattcagcaaatgcttcctccggcaaagcggtgctcacagttcccatcctctcttctagagctaaaagttcctcataggacatgttatcaatatccaaccgcatgcctctgtggtgatcataaaagtttaatccattgaggaataagttggtctccaacaaaagaatttgctcatgggttagttctgcatcttgttcaatcctctcaagtgccaataatacctctgcaataccacccatattgtaatgtccaaagctatctctatttattagagaatgagtgatgtcatcttcagcaggagacacaggcataacaccacttaactgctcactgccga

SEQ ID NO: 140950 - DNA, 387 bp, Glycine max
  Clone ID: PAT_MRT3847_98288C.1
aggactcgtgtgatgaacaccctatctagaatcagatcaatgggtatacatggctacatcgtgttaattaccactctgtgagctaaaacagacacttgctatctcatatcatcactatgaccaccacctaaacttcagaaccgtgctgtggatcttaccaacctgcctcatttgccccaaaggctgaaactttccttcgccggaggagacaccagcaatggggtggcacaacctgtcggtggaagctgcggtagcaaacgatcaagagaagaaccaacgcccacagatgcatcttttgtgataagaggactctggctgaaccgctctagatgactgcatagcactaaacaacaatgccactcaaaggccgtgatacagtgaaccgtg

SEQ ID NO: 140951 - DNA, 1449 bp, Glycine max
  Clone ID: PAT_MRT3847_98289C.1
ccacgcgtccgtgatgaaaagatgtccaattcaaatagaaggaaggaattttctttgatgcttgctggtcctagagataaggcaatcccatgtaatgatatagaaaacacaaagttgaccatttctgtgtcagattctgctgtgatgggtgaaaaggatgctattacattgccacgtgaaaatatgagttctgattcaacttggcttttgcatgtgaaagaagaatgtcatgaacagacaggaacagttctaacctctaccctagtagatctttcttgtcatatgggtcttacaagtacagaatctactagaaatattccagctccttcaaaagtagaggccagtgatcattgtttggagagtttggaggtttgtcctccaaacccacaactttctggcattaaggttaagactgaagataatcatgaaaaccttggaggatgtgccacttctaatgtagcagacaatgcaagagctgttaatgggaacatttcttgtgctccaaacaattaccgtcagaaaggtcctcggattgcaaaggttgtccggcgcatcaactgcaatgttgaaccattagaatttggagtagtgctttctggaaagtcttggtgcagtagtcaggctatatttccaaagggatttagaagccgtgttagatacataaatgtcttagatccatccagtatgtgttactatatttcagaaatagttgatgctggacgtggttggcctctatttatggtttccttggaaaattgtgcaagtgaggtcttcattcatatgtcagctgcaagatgctgggaactgatcagagagaaagggaatcaagaaattgcaaagcaacataagctgggaagaaagggtcgctcctcctttacaacctgttaatgggaacttttcttgtggaataaacaattaccgtcagaaagctccagtgcatgcaaaggatgtccggcgcatcaactgcaattgtaatgaattagaattctcagttgtgctctctggaaagtcttggtgcgatattcaggctatctttccaaagggtcttagaagccgtgttctcaaggtaaatgtcttagttcccacatgcctgtttaagttgtagcagggctaacgagcctatttaaaaagtctaatgcagaagagttgaacttattgtacagcattcttagtgacaataggccagaggctgacaggaacctagttgcacaacttctcaatgaagaggttcacaaatcacaaccgccctaggtaattgattatttggacggaattgttcatatgcctaaccttttcttgacgtgtaaatggtagttcctccgaggttgcacaatgcaaccttaatctttgatttgtttccttcctgaatggaggttatagagaaagaaaagaaaggaaataaaattgggaaaagtggggatgggggtggggggaggcctattttccttc

SEQ ID NO: 140952 - DNA, 3111 bp, Glycine max
  Clone ID: PAT_MRT3847_9828C.1
aaattaaagaagctgcatagagatttactagaagaaatcaggatacaaacaagcacatttgtgttcatctccggcatgtgctgtataagatattcggttacagaagcctgttgcagaaaccccatacgaaaattttaatgataaaacattatatacattaaattgggatgtattcaataggagtgcaagcaggataacccttcttaagcgacttaagcccctttcacagtaaatagcattacaaaaaggagccagcatatgatataaccaaagtaaggactccatttcagcttttgggtgcattggccttaggcagccacggttcccaggcgggaccgaagaaagaagcatcataaagcaatacacttttttcccctcattctaccttccttcaccttcttcttcgttgcggtggtgccctagattttctctatccctttgttcgttcctgaattaccagcccccggccctcgctctagggttacccatggattcctaggaccatatgcaccacgccaacgatgtggaatcactcgactacaatttctacagtggcgagaccgagcacacgcattagtattactactatgactacgacgactacgcctactattactttgtcgacgccgctgatcctgaccggattgagtctcgccgccccgagcaaaactttaccatattgaaggaactggatatccagcaaaggtaggaagacgacatagctagagtagcggcatttctttccatcaccttcgggattctgcgagcatcctacttcgtcactacaactgaagtgttagataaggtgcatgatgcttggtatgttgatgaatataaggtgtgaataacagttggtttgtttgagaacccagtttgccagaattctaatactagagagcttacttgtggcatctgttttaaatatgtatcctcctgcacgggttgaatctactgcttgtggccacacttactgctattcatgctgggcaggatattttagcacatcaattaatgatggtccgggatgtttggtgctgagatatcctgatccctcgtgtagtgctgctgttggtcaagatatgatcaaccttttagcttctgatgaagataaacagaagatcaacgagcttctgatatcttataatcatgacaacaacaagaccacgtggtgtcctgctccaggttgtggatatcatgcaattatttttgatggtagtgggggaaattatgatgcatctttcctctgatcatatagcttttggaagaactgcacagaggacgctcatcgtccagactatggcactgtttcaatccaggttttgtaaaaaagatagggatgaatctgaaaacaataactgaatacttgccaactcaaagtgttgtccctacaagtggccacttgataaaaaccaagggtgcaggcagatgatatttactcctcctcctaaatagaagtagttttgctggctactgggtgcatcgttggcgaatgatgaaaagagtggtggaggatataattgtaaacatcctcaagaagctaaaaaaggagaagtacaatatgaacccagagaaacaagaataatatcaagaaatacattagcaaaataaaggtagaagcttgataagacgaatagcacccaaccctctgagccaaagttaactattgcagtgctcaaagcaacacaatctgttaatgtataggaggtttataagagacacaagcagttataacagctaattgacatcacagaggtggtcagattggaaaatgattgaagaaagatgatgattcgaagaaaaaatactcacaaaaatttaatggaggagccagaaaatgctaaaaaaggcttatataactaattatactgtgggagagtatctgttatagagttattaaatttatgtactgaaaaggaaatactggttcctaagtgcggtgatgatccatctagagaattcaatgactttcgtacaaaactagctggattgactagtgtgactagaaactactttgagaatttagtgagggcattagagaatggtttatctgatgtggatagtaatggagctgccttcagcaaagcaacgagctcaaaaaatgctgctgggagcagcaaggggagaggaggaagaggaaaagcgactattcgaactatatccagcagaatgactgatgataatcattggtcttgtgagcactgtacctatgccaatgttaatgtctgccaccacatgtcaaatgtgcaatcaacagcgtcgatgaaacttggatccttaattagaaatacatgtcttctgcctaaggccaatgcaccaaaagctgaaatggagtccttactcatagttatatcatatgctggctcctttttgtaatgctatttactgtgaaaggggcttaagtcgcttaagaagggttatcctgcttgcactcctattgaatacatcccaatttaatgtatataatgttttatcattaaaattttcgtatggggtttctgcaacaggcttctgtaaccgaatatcttatacagcacatgccggagatgaacacaaatgtgcttgtttgtatcctgatttcttctagtaaatctctatgcagcttctttgaaaggttgctcttcatgcgctcctattcaatacacaacccaatttgatgtatatagtgttttatctttttacgtatgaggttttctactacaggcatttgtaactcaataccataacacaacagatgctggataatggagatgaacacaaatgttcttgtttatgaccactctttcagttggtctcttggcagcttcccccagttctccaccttcaccagttggaaggggttattgcaggattccgacttgggagccctgtcgtcgtcgcgtttggcatcgtcggcgcccgcgccaatcacaaacaacaacaccaacaacacaccgagaccacgaaacgccatcgtttgccaccagatcaagatcaagactctttgctgctgcttttataatttattcttttcttctgtctctgtctcgcatggaatcgaatagaacagaggaattcaattcaataacgcaaattaaattactaacaccgcctcttcgctgcctccctcgagcc

SEQ ID NO: 140953 - DNA, 423 bp, Glycine max
  Clone ID: PAT_MRT3847_98290C.1
gaaagcctcactccctcaccggcgtctggaactggaagcaccgtcgcagtgattgagaacggtaatagtatttttgctttagccggataaagactttgaatttttcgataatgtgaaaggagaataatacataatgtttgtttgttggttggctggaatattagtgccttacattcctattctgtattggaaaagcaaaccctaatatctcttcttccccttcagctcagctcttgcttcttccaaagtttttgttaattctgaggtttagagtatcggcattatgggaagcgaagatgcgaaagatccattcaaaggggtggattggaaagccgttggtggcgagatgcagcaaaatccgagtgctaaacctgcattgaagaaacgattaccgaagaaagttagggaaattcctgaattcta

SEQ ID NO: 140954 - DNA, 471 bp, Glycine max
  Clone ID: PAT_MRT3847_98291C.1
cgcagttatcaactcgacaacgtcctgatccctcagttcaattctccatatccacgatgttgtctcgagctctccgtctccccagggctgtgcctatgcgcaccaagctcgccgctcccacttacactgccattcgctctgtcaccaccgatgctgcttcggcgtccctgagccactcagtccccaagtccgatgacgagcctttctctgttaacctcagcgatgagagcttcgagacctacgagctggacccccctccttacaccctggaggtgaccaagaaggagctgaaggatatgtaccgcgagatggtcatcacccgacagatggagatggcggccgatcgtctgtacaaggagaaaaagattcgtggtttctgccacttgtctaccggacaggaggctgttgccgttggcattgagcatgccatcaccaaggaggacgatattatcaccgcttaccgatgccacg

SEQ ID NO: 140955 - DNA, 300 bp, Glycine max
  unsure (1)..(300): unsure at all n locations
  Clone ID: PAT_MRT3847_98292C.1
atgactgnngccgtgatnnaaaaaatttcaacgggttaaatgcattatttggggtattgtcagtccaacatcgntgaagtcatgaatgggttcctttttttntgtacttgtattttctcaaatcgaaacccgcaaatccgcttctcgcttcgtcgcataccttaacggggtctgggttgggatttcccttccttttagcttactaagatgtttgcaactcgcttaagttttaaanagtccaaaagaagtgcagactttagtcgcgaagctttggatacccggtttcctaaattggaagat

SEQ ID NO: 140956 - DNA, 253 bp, Glycine max
  unsure (1)..(253): unsure at all n locations
  Clone ID: PAT_MRT3847_98293C.1
ctaatataaaggaatngctacgagcaaaatggggatgtcggggggtgcggtttttaaaaggacctcttgctcctaatacgaacagactgatataacatgcagcatactatcacagcatctgaactcatgtatgcatacaaagtcgggatcacacgcctgggaatcaatcttcatcataaacgcatgcaatgctaatcatggttcctgaacgtgaagatctgcgtcagcaaaaaaaactttaacgcatttgaaa

SEQ ID NO: 140957 - DNA, 932 bp, Glycine max
  Clone ID: PAT_MRT3847_98294C.1
gcttgagaatggcagacacaaattcagttgaagtgattttggattttctgaagaggaatcggttcacacgagctgaggcggctttgcgtagtgagctcagtaactgttctgatttgaatggtttcttgcagaagcttacattggatgaaaagaacttgcatgatgggttgcagaatgataaggggaagcctgtggtagaaaatcaagggttggattctcgtgacagtgttgaagtttctaaagaactgattgtgaaggaaatagagtgtgggactggtactagtaatgctgctgaaagcaaatggaaaattgttgctcctactggcgaaaggaataagtctaatgaagtggttgagacgagtgacaaaaacttcactttctccaagagttcggaggacagtgttcttgatatgtactcatggaagtttaatgccagcaatggtcctgtggagctttaccaaaatgatggtggaagtaggcctaataatgctttaaaggccccggtatctcagcaatcaaagtatcaaactagtgaagctcttgatgcaaccaacagtaatgtgaaatctaaggaggaaaataatgtgcctgcggaaaaaacttccttgtggattggaagtagtggtaaagcctctacggaaccaaagtatgaccttatgcagagcaaagaacctagggaacttgatcggcagtttaaatttaatgcttcatctcttaaagagaacttgacagataatgtcttgtcaagaactgatgagaatgtgaattcatctacagacccatggaaagattgttctgtcaagactgttttccctttctcaaagggggatatgtctacaagctacaacggttcaacttattctgacagaaaagaggaaaagagaagggcagaaaacagtgatgttagggcatcaataaaagagcaagtggac

SEQ ID NO: 140958 - DNA, 259 bp, Glycine max
  Clone ID: PAT_MRT3847_98295C.1
cacaagcctggaaaccgcccacaaactcgccaatatgggtgttggacgtcgcatgaagaaacaggggccccctgagccgctttcagaagagcactttgccaatctcaagcggaaaaagggcctgcccgtcgacgatactccgaccgaggtgcgctctagcaagaagcgtcgcacgtctgcgaagccgagaagcccgccaaaaagctccgtgaggactcgggcaagactgctgtcgcatcgaagtcagcggggaaacaag

SEQ ID NO: 140959 - DNA, 313 bp, Glycine max
  Clone ID: PAT_MRT3847_98296C.1
aaagaagcaggacatgtataattaaaaaattaactaatccgttgcaaaccagtccacacatatttccaaagccagtcggccacggactatcaggatatttggaactattcgaagaacaggggttcaaagagggtgtttaaccggtcccaggaccaaataaaagcaactaacgccatgtaaaaattgggccacccctttactagggcgggaggcctttccctggttcttctgggggttttgtatgaaaaactccaagtccttaaattccagaaagtacccttcagctctgccactttggccaaggcccatggaa

SEQ ID NO: 140960 - DNA, 189 bp, Glycine max
  Clone ID: PAT_MRT3847_98297C.1
cccactcgtccgaaaaaagattaatgccattgctttattagacttctaaacagactaaggtgctgccgttttcccaaatctccatgacaattaccattcacattgagaaattacatccatgactagccgacggacgttgtttccccaacataaactcttcccccgtaggtggaccgtcagaagggctat

SEQ ID NO: 140961 - DNA, 489 bp, Glycine max
  Clone ID: PAT_MRT3847_98298C.1
gtcttaatggatgtgtactgcaaatatggtttgttatttacttgtttcctttagcttttgtttatttttctgtttaattacttaaaacaacttttaaaattcatttgtatttgtgtgtttcgtttccttaatcttaaataagattttgagtttggatgtataaatgaaaaaaataattaaaaaaagaaatattacatattaactaagtttttcgatatgatagagattagttattttagtagaattgaaaggagaaatcttaccggccaaccaggcttggtgaagtgggtgataaagaagcactcatggatgaaaaaaaaaaagaaaaaaaaaaattaagaggaaaaccgaagaacaggacaagagactataaggcttcataagtgatacgctccgatatggacctggcgttttgtgatgcaagtgtcaacggttccttgtggcaagacgtattcataaaaatggcagagctggggtatctctgaagct

SEQ ID NO: 140962 - DNA, 907 bp, Glycine max
  Clone ID: PAT_MRT3847_98299C.1
acctccttctctctacaatcaagtcccctagctattacgattcacaacttattctcttcatctttaatttcccttgataatttcttagtcacatcaaagtaatatctcttgttcatcactcatctgcgactataagaatggcagattataagcaacaccacggaagaagctgcggctgctgctgcctctttggaatcttgtggaagattgtggttgcactcattgtcctcgttggtcttgtattcctcatattttggctggttgttcaaccccgctacttcaagttccacgtcacggaagcggacctaactcaatttgagtactatccaaacaacaacacccttcactacaacatggtcctcaatttcactgcacgcaaccccaacaagaagctcagcatatactacgacaaagttgaggcattagcattctacgaggatgccaggttcgccaattacgatgtcataactcacatgaactccttccgccagtacaagaagagcaccagtcccatgagcgccgttttctcggggcagaaggtgttgatgctcaacaacgaacaagtctctcagttcaaccaagacaagagtgttggaacttatgatatctatgtgaagctcaacttcaggattcggttcaggctcggggactcgatttcccgtcacttgaagcccaaggtcaaatgtgatctcaaggttcccttgaacaaaagtggcacctttactctgtttcagaccaccaagtgccatgtcaatgtctagggactaaggatgcatttgatttctttgattgatttttgaactttctctctttacccattatttgaaattctaataattatgttacttttgtctttagttaattcattctttgactatatatgccgcaatatttttctgaaaacccc

SEQ ID NO: 140963 - DNA, 619 bp, Glycine max
  Clone ID: PAT_MRT3847_9829C.1
ggtttccacacattgttgacaccattatactcctgaacactaatttgatgttccaagaaaagatgaaaaggtccagaaaatcactggcctctgcattcactttattttgtccacaaattgcagctggctccagaagcactgatctaggttcactgtcacatgtgaaagtggatgttgaggttgatggttccagatcatgcagctggaaccctggaggcaagcatgaggcaggatatgatgccttcatgactggatgcatctttgcccagttatgcagtgatttaggtattgattttaaactccgtgattcttcaaaccaattagccctcaatgagaaactgcagaagtacgttaatcgtctatatcttagttggatacacggggacatcattgatctaaatactggtaataaggttgcagattcttcacccaggagcctgacgaagcggtacccaaaaattatgtttgagaacattgttattatttggggattttcttctaagctgaaggcaaacgaaataagagagtgcatatctaaagtatttggaccaacttctgtagtttctgtcttccacttggatgcaactgcagcattcgtccagtttagcaaaactgagtt

SEQ ID NO: 140964 - DNA, 475 bp, Glycine max
  Clone ID: PAT_MRT3847_982C.1
ggcatctcgattcgagctggatccgaaaactatctcgctcgatttcgagactcgctgcatcaccgtggtatccctattgtcacgtcaccatcttgtactactgctactgctatcttgtactgcacagattgacgcttagactacagagctacgccagcccattgcgctgcgctcaggctacgctacagactctcgtcgacccgtgctcatgctcctctcttcattctcactatgcttgctgcactatcctgaagcatcagctagcccttgtgtaccttacttaccgctcaggcacaggcatggtccctgcatacactccccagggaacctgccctaccattaatattctcactgactcttgcccatgggaaagagcgcatgctcagaagactttaccgctatgctgttgcctactgttcatccaacttgagcccttgaaagtatggtgtcgaggtctagcctattgatgctcgtc

SEQ ID NO: 140965 - DNA, 234 bp, Glycine max
  unsure (1)..(234): unsure at all n locations
  Clone ID: PAT_MRT3847_98300C.1
gcttngcanctctngtganccggctntctgagctcnttggtatccaggtgcgttcaaggctgaagacantattggtccanaagtagannagttggtggctctctccagatgcagnngttcttcttctagaaaatgtgaggttctacaacngcggangaaaagnnnngaatcccgagnnatgcnganaancttgcnctctggcagttntngtgngtganggctgcctttgggaac

SEQ ID NO: 140966 - DNA, 185 bp, Glycine max
  unsure (1)..(185): unsure at all n locations
  Clone ID: PAT_MRT3847_98301C.1
gataaatgagtactttcatacttggtgcaagtatgtaacactaaaaggggaaaaaatgagaacaaaaacttaagtatttgtatacttgaacttagattagttgatactanttagtgagangaatgatgtaccaggggaattacgaagtggtgggtttgggttttgtttggtgtgaatattagggg

SEQ ID NO: 140967 - DNA, 1337 bp, Glycine max
  Clone ID: PAT_MRT3847_98302C.1
gttccttgaagttagtttgctttcaattttatatgaataatgtcttgggtgtgaaaatgtcgcacagcgataccataccccgtcacccagaccaaaggaagaagaagaagtagtggagtgatcctggttgggtgtgaaaaatgtcgcacagcgataccataccccttcacccatcttcccaatccgacattgacgagatcgagaacctcatcaatgccagcgttcaccaatcagtcccttcggcgagacctcccagtcccccacgcgcctccatccccgtctccgtctccgccgccccttcccccttcatctcctccaacctccctccaccgccacccctccctaaatcctccgtctccgccgtccctccgccccctcccccgccgcgcgccgacatctcctcctccgggttcggctccgcccccaacacgctcactgagcccgtctgggacaccgtgaagcgcgatctctcgagaatcgtgagcaatctgaagctcgttgtgttccccaaccctttccgcgaggaccccggtaaggccctcagggattgggatctgtggggccctttcttcttcattgtcttcctcggcctcaccctctcttggtctgcctctgtcaaaaagtctgaggtttttgctgttgcatttgctttacttgctgctggcgctgtaattttgacattgaacgtacttcttctgggtggacacattattttctttcagagtctgagtctgttgggttattgcttgttccctctggacgtcggtgcattaatttgtatgttgaaggacaatgtcatagtgaaagtggttgttgtgtgtgtgacattggcttggagctcttgggctgcatatcctttcatgagttctgcagtcaaccccaggagaaaagctcttgcactctacccagtttttctcatgtatgtatctgttggttttctcatcattgccattgactaaatgcatcaatgcttctgatttctttattacgataaccacctggaatctgcttctaaataggaatttttgtttgatgatcaaccatttttttttaattcttttctgcccctccttttttctgtttaaaatttggttagatatatttgaagacaaacagttgtataatattacgtggaaagtatatggtgggatcaaacttgctacataagtattgtttctctttctattatgtattatttaatgtgtaaatgggaatactgataggattgaaggccccctgattaactttttaatatattagaattttgtgtattattttttttatgattgaatttataaatttatgaaattttttgttgatgaattatttatgaaaaa

SEQ ID NO: 140968 - DNA, 673 bp, Glycine max
  unsure (1)..(673): unsure at all n locations
  Clone ID: PAT_MRT3847_98303C.1
accagcccccccctatcctctctccaccaccaccaactaactcatcatcaccgccaccaccaccaccccctgtcctctctccaccaccacccccccctgtcctctctccaccaccaccaactaactcatcatcaccgccaccaccaccaccccctgtcctctctccaccaccacctccgcgttcgccccgtcgaagtgtttgcatcaatatttttccaaggccaccaacaaattcttgctgcaccctcctcgctgatctaattgaccttgaggctgctgtgtgtctctgcgctcaaatcaggacccagctccttgaaatccccattaacatagacattttcttgaacctagtgttaaacagttgcagtaaacgcctcccacccaactaccgtggcaattaagaaaaaagaatatgcttgacatccatcatcgtattctctcgtgttactttgttttttgcgtgtttcaagctaaggacgttacccttcgtgcctgctacatatatatgccagtggacactataatattaccaataaattaacgtccttgcataatactaataaattatgaataatactgtattgtgatgttgttcttcctccatgctacattngtttatcatgtngcagtaaaagttgttcaataaaattaaagtcctttgttcaagaaaaaa

SEQ ID NO: 140969 - DNA, 228 bp, Glycine max
  Clone ID: PAT_MRT3847_98304C.1
tatatatccctatatgtataggactgcctctttaatgaagacagggaatgttcaaggtgcactggctgaaatcaaccggattcttggctttaaactttcgttagagtgcttggaattacggttttttatctatctggcccttgaggactacaaagcagcagtccgagatgttcaagcaattcttaccctgtgtccatcttataaaaaaaaaaaaaaagggcggccgcc

SEQ ID NO: 140970 - DNA, 531 bp, Glycine max
  Clone ID: PAT_MRT3847_98305C.1
ctttacttgtaaaaaagagggacttattagggggttaaaacctttatgttcttcttaaaaagtggggtattaaagtgggaaaaagacacattattaggagcagttttgtaaaacccttacaaatagaaaatttaaccgacatcaattaatagggggcttaattgaaatgtaaaagataacacagaataaaaaaagataaaaaaaaaactaattcaataggaaaacataacaacaattaatagggggtttatttgaacaggtttaaaagattacaaaagttaaaaacaattcaaaaaatgaaatctgacacggtttttttatcccatgttgaaatcaagtaagattcagggacaaacatgatttttctgattataattcagagtttattcaaatctgattctgaactgatttattaccaaatcaaatcaaggcataaattaggaaataattgatacaaaaattaaggacaaacttgcaacacactcctatgttctctctcacattacctatcttgctattattgatctataa

SEQ ID NO: 140971 - DNA, 467 bp, Glycine max
  Clone ID: PAT_MRT3847_98306C.1
ggcggccgcccttcctttttttttttgactattataacttttcattattattatgcaaacgaaagataaaagaagagtaggcccaagtaaacagagaatcatggaactgtccagatcctcatgcttatcacactgtgcctatagtgatttaagcggacaagtcaccaagtggaggtcatccaagcaacaatataccccatagcaatactgaaataaaaggaccaagcctttcaaatgaatcctgcggcaccaacttcttacttggacccacatctgcatctcttaaaagctaggggtgccaccaccaagcaaatatacttgggcccaacacccgcgggagatgcgcacatggtgatgcaaacaacatcttcgatcatatcaggtggggattccctcaccagagagggcacccaagagagatcaggctcttccccgctgttctcgagctcaaacaaggattatctttg

SEQ ID NO: 140972 - DNA, 375 bp, Glycine max
  unsure (1)..(375): unsure at all n locations
  Clone ID: PAT_MRT3847_98307C.1
gggctcgangggccaaatcggctctagcttgcttttttttctatccacctaccacgtagtgctgacatcgaaataatgaggggaagcattcaccaaaacaaacactcgattatgataccttaggactcgattttcgtacaacataacttgagcttgttaacttttacctcaaacacaagttcctcggcgatgatcctattgaccacgacatccctgacattgatcttttacatgattaaccttggaatgtaccagattggtttaatttcttccatggcgattccaagaacttgacaagcaaatggttaatcaggacaaccaattgtaaatactggaacgtcactgcgaaagaccgtgacattattacagttgaca

SEQ ID NO: 140973 - DNA, 520 bp, Glycine max
  unsure (1)..(520): unsure at all n locations
  Clone ID: PAT_MRT3847_98308C.1
atactctcaacttcaaaaggtggaagctaatgtgcacatcaaggcttctgctgatcagttccataatgttttatgcaacaggacacaccatattgccaacattttccctggaaaagtacagtctgttgaaattcataaaggtgaatggggcactgagggatccgtcatctcctggaattatttacatggtatgtgaatttcgacatcaaaattttaacaacaaatagcaatattcctttctcgtttgcatttatacaaaatatgtttctcaacttctaaaagaactatagcagccatgatatatatacttcatcttagcctagtcttcccctcccaaagtatattgaaataattgttatacanagtacatattttagtatcataatttatggctttctgcgttagataattaggaattttgggaagcctcggtacatgtttgagtacatcttttgagaacaataattgttttttaagaattctaaaaaaaatagaatttgattaaaacatagtaaaataa

SEQ ID NO: 140974 - DNA, 1138 bp, Glycine max
  Clone ID: PAT_MRT3847_98309C.1
tcggaattggaatttgctgcgagaagacagaagggggatttgaaaggcgaggttgtcgcaaacccagacccaatctctcttgcgaaggaagacgatgggtccgatgctacaaaccattctcactgtgcttcttctccttatgcttcttctcatcgtcatcttcctcttctttctcttcaaaccatggcgcttctttttctcttcgcgtttcctctcctccatcaagggcgagctagagcggcccctttttgtgggggacgaaggtgatgcgtcgtcgtttaatcagtgcaatgaattgcctcgagattatgatctcgagggtgcgtgttatcccagtgaagttcattttcgctctcctcgaacccatggccaaggccttgttcataagcaaaggcttcaaacccttaacatgccacagccacatgctggtgatactttggttgtcgatgtcatctctgatcattcctctgaggatcttgatgttggtcaaacgcttaagcttccttcatctcatttagctcaaattcaaaagcatgccccgcccaattttcaaaatgatagacttgaggactttgtgcaaagggatatctctgatcaaaaagtgaaggaagttgcctcactctggaggttatcagtggcccttctcggggacttcgttattctgttgagtcaaccaacccctctcgtcttccgctgaccttgggaagggtttctccgagtgatttgttgatgaaggattcagaagtgtcaggaaagcatgccatgattaactggaatttggataaatggaaatgggagttggtggatatgggtagcctcaacggaacactgttgaattctacgccgatcaaccatccagacactggaagtcaggaatcggggggatccaatgaatcttactaatggagataccataacacttggatcaacatcagaagtaatggttcatattacatcacagactcagcatcacattccctttggacttggtatggcatcagatccgttggctctgcatcgaagaggcaaaaggtttcctatggaaaaaggttactattatcaatggccttctacctgagctggatcacttcgaaactctgagccctatggcttatccgtcgccgacagtcggcctggc

SEQ ID NO: 140975 - DNA, 204 bp, Glycine max
  unsure (1)..(204): unsure at all n locations
  Clone ID: PAT_MRT3847_9830C.1
acacgcccatgcgttcgtgactagaangattggattacaggggcattttcctttataaccgacttctatttccacgaccgcgcgcaacagtttgcagactcacaatggccgcaatttgcaactccttattactgaagcacaggttctctctgagtcgagcccctcctctctcctctttccattaaatccatactcagaagatgt

SEQ ID NO: 140976 - DNA, 223 bp, Glycine max
  Clone ID: PAT_MRT3847_98310C.1
cgctcgagccatttgatgtgggagatagatgagaattcgatggggtttagatggagtaagaagaatgaacatatgaacgaccatatttctgagatatgataatcaaaagggcatcatccctaacaatgtaccagttgccaaggccatatatatctattacctttttgctgagatggcagatgctatagaatcctgaacggatataattaccccatgatccatg

SEQ ID NO: 140977 - DNA, 2063 bp, Glycine max
  Clone ID: PAT_MRT3847_98311C.1
gaatagcttgtataaaacttgactattccaaatttcattaatgaaggtgtgatacaaaatgtcaaaagaatagaaacaagagatattcttacaagttacaaacctccggcattgatacaaacttacatctgccttgaatacaaaagcaaaaaactggcaaaaaaacattatcaaggtttaggagagtttactttcaagggaaaatcactttcaatcctccaataaagagggaaatgtatgcaggctggagtcatagacaatgctgataatcgtcaccagtcaatatcccaggacaggtcacttttatttgttcaatcattgccactgtccacaggctcttacagtggaagacaaattcatttggtcttatacttcaaaattcaaactatattgaaattgggtatgcaaactttttcaacttttcctagtgtgtcttgatcatccaccaaaacttgttgagagcatcataactgtcctttcctcaactgttacatctactccataccaggtaccagctgctaagtctcatcataactcgatgttcttacagccacataaattgttgcctaaaattcagaagtggtatatttgagcatgaacagctaagcttatacctgagcttacagaagtcaaggcaatcaacataaccctgaaagcctaagagataagatcgataatcatgagctgttctcgtggaattgagggaaataaaggagtaaaataatacaacttaacagcactagtcttagtaatgagtacactaatactcgaatagcgccgtacaaaaacactagaaacctgacaggttggctagaaaatgttaacagttaagtacatcattgattcatagtgcagcattcaaaatccagctacaacagtctgcttctcaccaaggttagcaataaactgaagtcaattttgatttcataactatctgaatactaaataaagcctgctcaaatccccattcaacagtcaagctacattaagcactacattacattcatactagaaatataaggagttcctacaatagatgaacatacatgtccatcaatacgaaaccataattgttcaggttctgttattcatactcatctgatagaaaaagggagaaaaaaagcacaagtgaaatgatagagtttttccagttaaataatatatatctagctcatatccatgccatctccaacttggctgcagatagggctgacagcagagaaagatctctcaaaaggagaaggatggatttgggcatccccccgtctacgcttaaaaccacagctttcggaaggcgaattctctgcatcaagcttccttcgtacgcctctcactgcctgttcctctgcaggtgaaagggggaaaatttgaccactagctcgacaaagggagctatggttgtcatacagaattctctggttacagtttttatcacagatgtgagtcagcccagttagcttgcagcgatacatgtttccacaaacatgttcattttgacatttccagtcgcatttgtgaccgggaactggaccttcttggcccaaaatacttgacagaaaaataacatttgcaggacctgcaaccatagatttgccatatacctccatttcttcagtcaagacagaagcaactcctaagaaatccttaacacacactccgacttcaaggcctttgcctgaattgtacgctcttgagctaagtgaagcaagcggataaagttttggtctttcttcctcagtacctacaaaaaaaaaaacaagagaaaccaacaaaaaagaaaaaaagagccttctctctctctctctctctctctaactctcaccgaagaagaagaagctgaacaaaaaaataaagtgtcccgtcatgtctgtcgggattcatcatcaatgtaaatttctgaatcccacgcaattgaaactgcagatatacaatattcactgttgaagactatataatatagtagcttttgtgtttcttgcaagttttaattgaaagatggttactatctaactttattaacagaatcctcggacatgttaaacaaagacagagaaagagatgcg

SEQ ID NO: 140978 - DNA, 542 bp, Glycine max
  Clone ID: PAT_MRT3847_98312C.1
aaaaaaaaaagtgggttttttgggaacaggttttataaaaaattttggttttttcacctttgggggggttggggacaaaatgttaacatcaaatcccttgggttggtaatcgggaataaactcagcttccaacctaaggcctggtttggctttttctttaaacaatttttaaaagggctgcctcgtcccacttaaactccattcgtttttacctcaaaggcttaaagccttttttatgcatcctccaacctcccattccctactccctacttttaaaatagttttttttcaaataaccgcggcaaattgtaaccgtttaacccaaaaccccataaaaattcagggaactgggctccaaatattttaaaaaagccaaaaccgtttatttaaaattaataaaccgaagaaagccttgtttttttttttccccaggaaggggaaaaatttgatttaagaaaaaattgtgttttccatgtcaaccaggggggggagggggatagccactggtttttgaccacctcgaagggggaagctccgaaaac

SEQ ID NO: 140979 - DNA, 225 bp, Glycine max
  unsure (1)..(225): unsure at all n locations
  Clone ID: PAT_MRT3847_98313C.1
ctgcctttctcngtncantnctcgggnttcggctggggnctctacnntgtctnngntgnangncttgtatgngnccngccacgcaggntntncanctnnctgnctcaccnggtngnnntcgnccnanannngtgcnanatcagctactganngacnnacacagttggagnngngttanccntnggntnctctatctncaatttgcagngnacagtganaaccgtc

SEQ ID NO: 140980 - DNA, 362 bp, Glycine max
  Clone ID: PAT_MRT3847_98314C.1
gcttacatttattcaacatctgttcagttatttgaatgttttcaccgaaaacccattgcgaacactggcgtacatattagaacactgatctgaattaataatacatagccacacatacttacaaaccttaactggtgccactaatcggcttacgctatacttgactcacaatcaaatgcatcaattcagtacatacaacaccaccactcactctcatatcttctacaacagctcaaataacaagatatccccatttttggaacacccataaaaaaattgggaccatttccaaagctgccaaacttgttaactctattaaggagctgtcaaatcaccaacaaaaactttatgcaactattgat

SEQ ID NO: 140981 - DNA, 473 bp, Glycine max
  Clone ID: PAT_MRT3847_98315C.1
ggggagatggaggagtgaatggagtacttacataatagggttggcatataaacattggaattatacatgagaggcgaaatctaaaatgtgctagccagaaaactttatactattttcaagacaagtgccaaaaaaaaaaatgagaaaaacttacgtactattatgtttctccaccctccgtgcattaactcataccaggattatacattataggataaattagttcctctctctcaaaaaaggttaaattaatttattttcctttaatttattttttaagtcgatttgatcctttattttttttataatttaatttgattttctaatttttaatatcgatttaatttagttctatactctaaattagatcatcgagttaaaaaattatactttataataatttaaaattattattaagtaattttaaactatcataaaacatatatttcttaacaccatcagtttaatttgaa

SEQ ID NO: 140982 - DNA, 405 bp, Glycine max
  Clone ID: PAT_MRT3847_98316C.1
ggctcgagcaaggatgcacttgatgctgagtatttctggacggatccattacgatgtgatcctgagagtgtacccaaatacgagtcatcgcatgagtttcaaaccaagaaaaaacgtgtgcagctacgaccaaacgaataaaacgccaagcgactgaaaatgcaacatcctctgcagcatacacgtttgccccccattcagcaggctgggcaacaacaccctcagatgacggcgaggctatccaccctattgctgtgtcaggtgacagcggttgctgtaagacgtagacatgtttatggaaagcctctaggcccttttgttgggcctggaacatctcctttgggcgtgaactcgtggcgggaatccaatcactcaaatcttgctcgttaacgacgctgacctgat

SEQ ID NO: 140983 - DNA, 413 bp, Glycine max
  unsure (1)..(413): unsure at all n locations
  Clone ID: PAT_MRT3847_98317C.1
aggtctttctccgaattgcatcacaattctgtaatatagggccaaatcaaactgttaattttaaatntnnaaaaaaaaaaaaaaaaaaaaaaaaaaaaaaaaaaaaaaaaaaaaaaaaaaaaaaaaaaaaaaaccctggggtgtaaaaaaaaaaaaggtgcaacattatccccccaacacggaaaaaaggctaaactaattaaaaaaatgttaatccaccaactaaaaaaatcattatgaataagttttggctaaataatccttaaggaatcgggcccaaggcaaaggcttgacctggggctggagctgggccatgcgaaggagagaacccctttgactcttttttatataaacaatgtctcctgtctctcccatacacgatccaaaaaatcaatgaaaacatgacggcaaag

SEQ ID NO: 140984 - DNA, 273 bp, Glycine max
  unsure (1)..(273): unsure at all n locations
  Clone ID: PAT_MRT3847_98318C.1
ccataatagcattgggttcttctctagtctctgtcctaccanaaaaatggtcccancgaccaatcttagtcagaanacnancgtcggcaacttcngcagcctctcnactgcncaacgcagtttcacccctcaaaanagnagannaacccnananataaaccctanaaanccccatgangantanncnaaaagctataancanaccanggccatcatcatccannaggcaaaacgacgccgcagcagcgcgtggagntanagagatnaacaanc

SEQ ID NO: 140985 - DNA, 293 bp, Glycine max
  Clone ID: PAT_MRT3847_98319C.1
atggctataattcggggatcgggctttattatattaacagagacaaacatgcaagctaaacaatccttattggagcaccaaatcacacattagcatgccctcatgttccaacccaaaaaatcaatggtttaaatctccaaaaaatcatctcccctcccttccatcctaattcagaagctgaaatcatcacgcgtgctccgcaactaacccacatttgataaaaatcatagtgtggcacataaaacattaagcttttttgagcataagtgggcacaaaaaaaattatgcttttt

SEQ ID NO: 140986 - DNA, 193 bp, Glycine max
  Clone ID: PAT_MRT3847_9831C.1
aggtgctccgcctgggggcgccgcgccggaatccccgggtcgccccccgcctgcttgtactcttgcggggctcataacgttaattaggggcaatggtaaaatccgttggcgggcaatattggctttggccaaaaatccggctccagatcgtaaaacgatggctctccaaaacctcatttggtaggtgcataaa

SEQ ID NO: 140987 - DNA, 319 bp, Glycine max
  Clone ID: PAT_MRT3847_98320C.1
gggcgctaattattgccttattggaaggggggacattatactttttcaaacccgggataaagttaaaggaaaacaaaaaagggcccaagaaaaagaaccctggggggggaaaaaaaattttcaaattggaaaaaatcttttttggccccaatttaacgtaagctaataggaaaacttatagggccagccccaaaaaaggacccccaaaaagtctcaagtcgttgttggcgcgggggggacatttttccccccttcttttttaaaccccccaaaaagaacattgttttcaatgcccaaaaaaaacgggacaaaatttggg

SEQ ID NO: 140988 - DNA, 566 bp, Glycine max
  Clone ID: PAT_MRT3847_98321C.1
gaactcgagccgaatctactcgaggaataagatgctctgaagatcaacgtgggggctcttaaggccagcttgaggctgcttaagcttggcctgctcactactagtgaccatctatgaggctctcataagcatggatgactgcttctgaaaccgatgctgatgatcaatcgctcatgcgcataatgcaaacccctactccatgcctgctgatcaatatctcatgccaaattcaagcccttctcattgccaatgttgaaatatcacgttaacttctcccgctcaaggttgcagatctgacataaccgctttatgctatcaacctcactgacccagtgaggacgacaccgaaaactactattgaccatgcgtatgcatgaagactacctctacaactaacaaagaccacttgatgcgcttgtagtttctctctgcaacactacaaaaacttgttatgaaactttctctcttttcggagtcactaattaaacttctgataaaacgggccctctttattccacccttaatttgctttctgcaaacccccgtcttgttcattccactgttaa

SEQ ID NO: 140989 - DNA, 441 bp, Glycine max
  Clone ID: PAT_MRT3847_98322C.1
tggatcctctagagcggccgcttttttttttttttttttttttatttttttttgttaaataaaaatctaaatacatgggggcgaatttttggatgcggggaggctacaactaaataattcattacaattaacattaaatgaaaaaaaaataatttaaaaaatgtattcaaataccttaaaaattagttacttgatcaaaaaactttcattctccctaacttttactctgatttatggcaaacatttaaccacctattttactaattgtcccctacatataaagaatttttatgaatttaataattcaccttattttaaattattaacttgcctagagtctcctaatgttttaaattccatttttaacatattatttatccaacatttacaattgctataacattctttctactttttaacactttttaatacattgtctat

SEQ ID NO: 140990 - DNA, 715 bp, Glycine max
  Clone ID: PAT_MRT3847_98323C.1
ggctcgagcccggaatcacgagagagtctcatagggtggtgtgtagctgatggaagttggaatcatattatccttgccatttgccgagaagagaaactagctgatctccctctactaactctattctttacaatagagtcttgggaggaggggctgggtttgacttcttactaggctaagctaagctaagctaagctgcattggagccgaagatgctgctgggatgggacagtggaaattgttgtcaaacggaaggagaagtgaggtgtgaggcgcacagtggctttttgggtactcagtgctataaggctacaagtgaagttgtgctggctaaaagacagtggagcccacaaattataacatctaaatggtctttctttctgcattagaaaatagaaatgaaggagaaggacggactttcaggtatataacccctgtaactgcaactgcaagtcatgatagaaaggcgctcaaattgaagcagtgaaattggaacaagtttctctccttcgctgatgaacgtagctagctagctgtctgtcggaataacgcacgtcactgaatgcatgggtgtttattggttcctgtattaaaattatgttcatttcgtaaaaatattcgttttcaagttaaattattgtacagattacctattagtaacactgagcaggcttaatggaaaagcatttagaataaaatattttttttatagccg

SEQ ID NO: 140991 - DNA, 750 bp, Glycine max
  Clone ID: PAT_MRT3847_98324C.1
aagaaacataaagatcattgttgaatgatatgtatgtctttatcagccaatgttgctacctgaaagatctatgaaaatatttctgtcaacccgctagaactaatgtttacagttgtcagatttcaaaaactaacaaaaaggttttgccgttaaaaaaaataaaaactaacaaaatgattttggcactggcaatgataaattgtgaccaagaggaatgactgaaaggttctcaagtctggtcaatgaagaatcaaggggtccagagagattgcagtttgaaatgctcaattcaagactaaacagtggaagcaaactgtaccattcctgtcccggtgttgagatgtttacaccatcctatacagttgcctaatcctgctgtagttttggacaaacttttgtaggtctacactctcgagtttcagcagtgtcctcagaattgaagttattattaaccacattcaaaacctgcagattattttgcagactactcgaattgtatagtccagcatagattgattctccattcaggtcaagaccaacatgtccctacttgtcataagttacaccaccccactcacagcaagcaatgctttgataccaggagtgatgtctcctgcagtagaaggaaatccatattcatcatatagccgcatcaaatcaccaaactgaccatgaagatcaccaaatactttgacaggagctttaagctgaagaacgattggttcatgcataaatatttgctcggcagca

SEQ ID NO: 140992 - DNA, 392 bp, Glycine max
  Clone ID: PAT_MRT3847_98325C.1
ctctgtccttaattcccgggtcgagccactcttccatacttctgataaaacaccacagaagggttacaataccaatacaaaataccacataactgggcaagcgaaccttgcacatgctggaggatgattctaaacatggcaacacattcatcctctactaacatatataactcttcccttagtctcatatcaatgcacttaacatactaacattcaaaatacatcaacttaccttatttcgtactataacaaaaattctacttaaatacacttctacataccttcaatccattcaaactacatactattcaacatatatattacataaatcaaatcttactaactaatagcaataatgacttcatataatatatcacattaatgaattttta

SEQ ID NO: 140993 - DNA, 360 bp, Glycine max
  Clone ID: PAT_MRT3847_98326C.1
ggttaactgaagggtctattataagtttataacactagtaagagtttaaagattaaccggtacaaggtgaaagtttgaggtgtctatttgtaaaagacaaagtttagaatatttgtatgctattttccctaatttaaataacaaaagcctgtttaatattgtttttttttaataacgaatgatgaatacattaagaatagaccattatattttacacaattacagaatctagttatatatgattgagttatatttagctgtagagcaaccgttcaagatgtcaatggctcctggctgttatgtgggatctcagcctctgccgagggcaaccaattttacaattgctatgtagtacaagaa

SEQ ID NO: 140994 - DNA, 526 bp, Glycine max
  Clone ID: PAT_MRT3847_98327C.1
atcgcttccagcatatccgcacgaatttgatgacgttatgaataactctcacacaaccctgggaacatcttgctgtatcagaacctccaaagaggtgatgatcgtctctaatgctgcattcctgctaagaaaccagataatgcaaagccttaagaagcacttggggagagagccgtataacgagcatcttatggatatgttgaaacaggcccaattgctgacggcggaagaacagatgatagatctgatgacctcactgtaaggatagatagacttgtctacatacacattaacactgtgtcaacatattgtccaaaacaaaactgcgtattcttccttccaccgttcggtagcatgtgcattgcacatggcgggtgacgataatgacaaccatgtgactgtcactaacattcgggctgagatcggaacatacttacgagtacaggatgattatatggatacgggaggagatcctcaacaattgaagagatgtgcacatatattgaacatgtcatgtgctcttgtt

SEQ ID NO: 140995 - DNA, 483 bp, Glycine max
  Clone ID: PAT_MRT3847_98328C.1
ggctcgaggttagccacatggggatggtagatcggcaagagcaacatattcagttcctccttaacattcttcatcccacccaaatccctaaaaattgtcacatccttccccttaacctcaacaccaccacagactgaacccttccgaagctgaaccagaagggcctcctccactcgacgccgccggagcactggccttctcccgttcctactgaacccagcaatgagacccagctgtgcctgagcctgtcccacaaaaacaattaccaaaaaactaggctagagaaaaaaaaaaagataacttctcaatctgtttttctaaactgtttttattttaaaaaatatattttctcttgagaaacaaatcttattgaatacacttatcttaaaattgatttttccctctttgttctcaagatgtcctcacccgaaacccttacattcatggagctcgccatacaacaggcaaaagtagctttggatg

SEQ ID NO: 140996 - DNA, 261 bp, Glycine max
  unsure (1)..(261): unsure at all n locations
  Clone ID: PAT_MRT3847_98329C.1
aaaataatattgaaacgcaaggttagaaggatcagagagagaaaaatgtctaagagaggnatccggaggaccccttttgngcatcggagatctcctgaacgacgtcggagaagaagaacaacaacacggacaaggacactctactccttgcgcgaaacctttccttcttcttccaatttcaactacaacgatccaccccctgacctncaccaaactacttccaggaacactnacgaccattgaattccgcactctctggca

SEQ ID NO: 140997 - DNA, 564 bp, Glycine max
  Clone ID: PAT_MRT3847_9832C.1
tacggctgcgagaagacgacagaagggccttatctgaagcccttctacttcactagctgcatctgaatgggaagtgaggccaaaaaccttctctggttgaggacatggtgggtaatagttcatcctcatagtctgcatacgatctttaaaaactctatcatttctgtttcttccatctttagagcttttcccattttttcaacaacaaccatggctagatttttaagttcctgtgtgtagagttctaaggtgttcctgagttacaaagagaagtgactctagcatggcatgcaagctctttgaaatgcaggaattcaatccaattgtcttttcataagttgaaattagttttagattttggcttagtcaatataagagagtttctagcaattagttatgcttatattaattttaactaatgccaaaaaacttgtttttaggagttcagtttataatattttataataaaaatgcttccttagcagtttattcaaaaagtatctacatatgaggtctgatcagtgattaccctttcttcacaaagagagagagacagaagagtac

SEQ ID NO: 140998 - DNA, 389 bp, Glycine max
  unsure (1)..(389): unsure at all n locations
  Clone ID: PAT_MRT3847_98330C.1
tttnnnnnnnntnttttttttttttttttttttcttatattccaggagtaatttaaatttcaaaactttctctcatcaattattttcattccaacctattaaacagatggcacggacaaggggaaaatctcataaggactactgggagaagccacctgggaaatattacatttatacgaggtacgtacgtaaaagaacagaaatgggggtctttatacggaaggctaccacctccaactacctntgcaacaatccatttactagctagctggatgattataagatcaaacctacttctctacaacatgtggaatatgctcaacgcctcaagtaaaaagcttcaaaagctaacataactaaagtttggaaattatgttttacatataact

SEQ ID NO: 140999 - DNA, 470 bp, Glycine max
  Clone ID: PAT_MRT3847_98331C.1
acgaggaaaggcagggccaaggtcaggttgtaacttgctctggagcttacaaggatggttctcttcgtgtcgttcgtaatggaatagggattaatgaacaggcatcggtagaacttcaaggtatcaaaggaatgtggtcactgagatcctcaacagatgatccttttgatacttttctggttgtgagttttataagtgaaacaagaatcttagcaatgaatcttgaggatgagctggaagaaactgagattgagggattctgttctcaagtgcagactttattttgccatgatgcagttcataatcaacttgttcaagttacttcaagctctgtcagactggtcagctccacaactagagatcttctgaatgaatggcatgcaccatcaggctattcagtaaatgtatctacggcaaatgctacccaggttttgttgggcacaagtagagtgcatttggtttaccttgaa

SEQ ID NO: 141000 - DNA, 349 bp, Glycine max
  Clone ID: PAT_MRT3847_98332C.1
tctgcttctccttctctcatactccctgtacggtgccattgctctttgcttatgctcgccatcgccattcaccaaacaacaatgccatcccaggtgtgggcataatgtgagtgttgaaaatggcttagagtaatgttttgtgatattgctggtgaaagagtcaagtaaagagttattgaagccgcaatgagtcagtgcctttgtcctcaatcaaacactgatacacaggagtagtaaagaggcaagaaattgaaggggatgttgatgattagaaaaagactagcatgctgcacaagggaaaagaaatttatcatcgatcatatgagcaagaaaggattattacatataa

SEQ ID NO: 141001 - DNA, 195 bp, Glycine max
  unsure (1)..(195): unsure at all n locations
  Clone ID: PAT_MRT3847_98333C.1
gaacttgtagcnaggctgngnngatttcanccantntnantaggtaaccgatctaggaggagnangatgngcattgacgattgatgncntcaaacttcnaatgnancatcaagttacagattaatccgtaattnganacaacntggttgcantatccaacgcaggatatgcncagtggtggggngagtatgcagc

SEQ ID NO: 141002 - DNA, 246 bp, Glycine max
  unsure (1)..(246): unsure at all n locations
  Clone ID: PAT_MRT3847_98334C.1
gttcttgatctagattgattctaatttgttgattttcctggaggtgagtggtgcggtgctgttagagaaagggccaaaggggtttcttgcacttttttataatttgtttcctgcaatttgtggcggtttttaaccccaacaaattgtgttttgattttttctaatgtaatttgtgatggttttaaaccacctnaaaaaaaaatatttaatttatttttttaataaaaatttcaataaattagaaaa

SEQ ID NO: 141003 - DNA, 372 bp, Glycine max
  unsure (1)..(372): unsure at all n locations
  Clone ID: PAT_MRT3847_98335C.1
ggggggggggggggnaanannaaacaanaacnnggacagggaaanncnnccaaaanaannanacaaaagggacaagggaaaacccgancggccagnngccnacggaanaaaaacacacancannacnangngnnggcanacacgcangaccnngngccggggggggggggaanannccaaagcaangggnccnnnangccnccnaaanccnaaagccacaaaaggcnancancccnggaaaggggnaanggccncnncagaaanagannaacacaaaggnagnngcaanancaaaangccaaacnaaaaagggaaagacccnncnncccaanccaaggaggggcccaangggannnacaaaggcgggacaaa

SEQ ID NO: 141004 - DNA, 995 bp, Glycine max
  unsure (1)..(995): unsure at all n locations
  Clone ID: PAT_MRT3847_98336C.1
gacgaagaacctgatgatggagctgcgcctttacaccatgaagactgtgttaaacacagatatgttccatctggtgctgctctatcaataatccgtgcctcaataggagggcagcagacaattgcagatagagccaaagtcgcaatgcacggttatttgaatcgattcttgggaaacctggatattgtgaattctcaagaggtctgcaggtttttggaagtctgcacgctatcctttttacaggagtatggtcccaaactgaaagagggatatgtaatggtgaagcatttgtcaaatatttcacaggattcagatttatcatgcttctcttggacttgattacatggaatgcttcaagtttcaagtaatcaagtcataattctgtatggagctctgtaaaggtattgacaaatgtatgaattactctgttagtatgtatagagtattagctataacctatctgccttccaaaaaaaaaaattagctataacctatcaagttttttttgggtacattcagggttatttaatttattaacattaatggaaagtaatttaacatgttttaataaaatgttaaattagggaacaaatttaaaatgtatacctctgatgtagcaatccctctttatagtattatgtggtctcctactgtcctacaactgtttctttttccttttttttttctttttttcagttcatttaatctagaaactgttgtctgcacacaggtatggtctgttttgaaacctgnngtttttggccttcctggatgatccctttaacaacaaaccactggatataatgatttttgatatcctcccttactcaaatggagatggagggaccaaaatatttttagctgatcctgtaaaagaacgcaaccctttgcgttacacattcaaggttactagtgggaataggagcatatttgtgagaactaccagcagtgctaaagtaaaagcttgggttactgccatcaatgaagctagtcta

SEQ ID NO: 141005 - DNA, 434 bp, Glycine max
  Clone ID: PAT_MRT3847_98337C.1
agaagctctaccgtaaaggaaccgtccacccctctccctcgccgtcgccgccaaccatctccgaccacgtatgggtcctccccgccggcaggctgggcctcactctttccctctccccgaaggaccaagaagtcctcgcatacctcatctcatgctcctcttcctcatcctccaccaccaacttttccggcaaccatcgccggaaccctaaggttgtcgtggacggcgatcaccctcctgtcttcaactgcagctgcttccgctgctacatgagctactgggtccgctggaactcctctcccaaccaccaactcatacacgaaatcatcgacaccttcgaagactctctggctcacaccacaaaaccttctagaaaggataagagaaacaagaggggctccaaaaccaagcctttcgagttgactcgctccgag

SEQ ID NO: 141006 - DNA, 427 bp, Glycine max
  Clone ID: PAT_MRT3847_98338C.1
ctaaaacctgaccctgaactagccaatttgatccacagcatgggcatggtgcttaacaactggtatggcctaatgcgagatctactctgcgttgttgagtatgtgccatggctataatgacatgggtgaactggaaccttatattgacaaaattgaggcattatgggggacgatgtacctttgatgactttggactatggatcttctgaagggtggataggaacaaatgtgaaaccaacagtgacacatgaattcggcacatacactgtgctgtcttgaactggcgtcatctgaatacatccctctaagagagctagaatgagcttacggagattctagatgacttggtatggaagctaatcctgtggagctcactgaggtgaaaattggggatgaatatgtgattgtcgatacctattcagcaggc

SEQ ID NO: 141007 - DNA, 1838 bp, Glycine max
  Clone ID: PAT_MRT3847_98339C.1
gtgatgttcaagctttcagaaagatcagtctattcacgatagttaacccttcaatttgggggaaatttccatgtaaaatcaatgccagattttgaagtggtttttattttgcatgaatcttcaattgaattttatattaaaaaaaaaaaaaaaaaaaaaaaaaaaaaaaaaaaaaaaaaaaaaaaaaaaaaaaaaaaaaaaaaaaaaaaaaaaaaaaaaaaaaaaaaacataaaaaaaaaaaaaataaatgggtgtggactgtggagtaggatgtttctcaattatgtttttttgggcttgtttgacaggttgggcttggagatacttctggtggtgacagtccgaatgatcactattgctggatgcgtccggaggacatggactatgaccgccctgtgactgaatgccacagttgttccgatctcgcggctgagatggctgctgccttggcttctgcttccattgttttcaaggacaacaaggcctattccaagaaactggtgcatggtgcgaccacgctgttcaagttttccagggatcagagaggcaggtacagtgctgggagttcagaggcttcaatattttacaattctaccagttactgggatgagtacgtttggggaggtgcttggatgtactttgctactggaaattcgtcgtaccttaagcttgctacggctcctggcctggccaagcatgctggtgccttctggggaggccctgattatggagtactcagctgggataacaagcttgctggtgctcaggttcttctgagtcgtttgaggttattcttgagtcccgggtatccatatgaagaaattttaaagacctttcacaaccagacaagcataatcatgtgctcctatctaccagttttcacaagctttaatagaaccaaaggtggcttgattcaattaaaccacggtaggcctcagcctctccaatatgtggtcaatgctgcctttttggctgccctttatagtgattatcttgatgctgctgatacacctggatggtattgtggacctaatttcttttcaactgatgtgctccgtaattttgccaagacccagattgattacatccttggaaataacccaaggaaaatgagctatgttgtaggttttggtaatcattacccaaaacatgttcaccatagaggagcatctataccgaagaacaagatcaagtatagctgtaagggtggatggaaatggagggacacttctaagccaaacccaaatacaattgttggtgccatggttgctggtcctgacaagcatgatggcttccatgatgttcgtacaaactacaattacacagagccaactcttgctggaaatgctggtttagttgcagcactagtggcattgtcaggcgacaaaagcacatcgattgacaaaaataccattttctctgctgttcccccaatgtttcctacaccgccaccaccaccagcaccatggaaaccataagcgcatcatgccattggttatttctttctagcaagtatcccagatgatttgagtgcaccggtaaccttcgttgttttgtatcaactgaaagatcaaggtaattttgcagaaaaaaagctttgagaaatagaagaaatggagcttggcctactgaatatagctgcctggggccaatgatcgactcaagatttagcattaagaattgataaagtggtacttgagagtgtgtctctttaaatttttgtgatacacatatagtatatatgtatctaaatcaaatcttgtattctttaaacatgaaaaactgaacagcttgtaattgtttgacagtttcatctaatgccttcacagttttactc

SEQ ID NO: 141008 - DNA, 146 bp, Glycine max
  Clone ID: PAT_MRT3847_9833C.1
cttcgaacccattctcgctgaataatggcctggggtccttaagccttgccaggattcaatggttggtggaagaaaaatgggtccttccaccttgaattgtaggcggttggctgcctttcctggtaaccccaaaggattggttacca

SEQ ID NO: 141009 - DNA, 3141 bp, Glycine max
  Clone ID: PAT_MRT3847_98340C.1
gtgatgttcaagctttcagaaagatcagtctattcacgatagttaacccttcaatttgggggaaatttccatgtaaaatcaatgccagattttgaagtggtttttattttgcatgaatcttcaattgaattttatattacaaaaaactacgggtccttttggtccggcacgaaccacgacagcccaaacaactactcgttgattgaaggaatacagtgtgtgttggtgtcggtggcattgttggttcgagtgagcgagggaagatgtactctagagattcatggggtggtccgttggagataaacgcgacggactcggcaacggaggacgagcggagccggaacctgcaggacgtggacagggcggcgctgtcgcgtcccttggacgagacgcagcagagctggctcctaggccccggcgagcagaagaagaagaagtacgtcgatctcggctgcatcatcgtcagccgcaagatcttcaagtggaccctcggcaccctcctcttcgccgccttcctcgccggcctcattgccctcatcgtcaacaccgtcccccgccaccgccacaaacacccccctcccgacaactacaccctcgccctccacaaggccctcatgttcttcaatgcccaacgatcggggaagttgcccaagcataacaatgtttcgtggaggggaaactcgggaatgcaagatgggaagtcttcagatcattctgctgcgattaaggatctggtgggtgggtactatgatgccggggatgctatcaagtttaactttcctgcttcgttttccattactatgttgagttggagtgtgattgagtatagtgcaaaatatgaggctgctggggagcttgaacatgttaaggagatcattaagtggggtactgattattttctcaagagtttcaatagtactgctgacaccatcaccacccttgctgctcaggttgggcttggagatacttccggtggtgacagtccgaatgaccactattgctggatgcgcccagaggacatggactatgaccgccctgtgactgaatgccatagttgttctgatcttgcagctgagatggctgctgccttggcatctgcttccattgttttcaaggacaacaaggcctattcgaagaaactagttcatggtgctaccacgctgttcaagttttctagggagcagagaggcaggtacagtgcagggagttcggaagcttctatattttacaattctaccagttactgggatgagtatgtttggggaggcgcatggatgtactttgcaactggaaattcatcgtaccttaagcttgctactgctcctggcctggccaagcatgctggtgccttctggggaggccctgattatggggtactcagctgggataacaagcttgctggtgctcaggttcttctgagtcgtttgaggttgttcttgagtcctgggtatccatatgaagaaattttgaggacctttcacaatcagacaagcataatcatgtgctcctatctaccagttttcacaagctttaacagaaccaaaggtggcttgattcaattaaaccatggtaggcctcagcctctccaatatgtggtcaatgcggcctttttggctgccctatatagtgattatcttgatgctgctgatacacctggatggtattgtggacctaatttcttttcaaccgacgtgctccgtagctttgccaagtcccagattgattacatccttggaaataacccaaggaaaatgagttatgtcgtaggttttggtaatcattacccaaaacacgtccaccatagaggagcatctgtaccgaagaacaagatcaagtatagctgtaaaggtggatggaaatggagggacacttctaagccaaacccaaatacaattgttggtgccatggttgccggtcctgacaagcatgatggcttccatgatgttcgtacaaactacaattacacagagccaacacttgctggaaatgccggtttagttgctgcactagtggcattgtcaggcgacaaaggcacatctattgacaaaaataccattttctctgctgttcccccaatgtttcctacaccgccaccacctccagcgccatggaaaccataagctcatcgtgccattggttatttctttctagcaagtaccccagatgatatgagtgcaccgttaaccttcgttgttttgtatcaacttgaagatcagggtaattttgaagaaaaaaaagcttggagaagtggagcttggccactgaatatagctgcctggggccaatgatcgactcaagattagcattaagaattgataaagtggtacttgagagtgtgtctctttaaatttttgtgatactcatatagtatatatgtatctaaatcaaatcttgtattctttaaacatgaaaaactgaacagcttgtaattgtttgacagtttcatctaatgccttcacagttttacccaaaaaaaaaaaaaaaaaaaaaaaaaaaaaaaaaaaaaaaaaaaaaaaaaaaaaaaaaaaaaaaaaaaaaaaaaaaaaaaaaaaaaaaaacaataaataaaaaaaaataaataaaaaaaaaggggggggccgttttaaaggaccaaattttatttcccgggccatggaaaccataagcattgtttttttttaggtaccccaaatttaaatcccggccgcggttttaaaacgtcggaaggggaaaacgggggttcaaattaaatctttggaacaaatcccctttttccggggtagaaaaggccccccccatttgccctttccgatatgagtgcaccgttaaccttcgttgttttgtatcaacttgaagatcagggtaattttgaaaaaaaaaaagcttggaaaagtggagcttggccactgaatataactgcctggggccaatgatcgactcaagattagcattaaaaattgataaagtggtacttgaaagtgtgtctctttaaatttttgtgatactcaaaaagtaaaaaggtttttaaatcaaagttttgtttttttaaacatgaaaaactaacagcttgtaattgttttacagtttcatttaatgccttcccagttttttggggggggggggggggggggggggggggggggggggggggggggggtggtt

SEQ ID NO: 141010 - DNA, 3185 bp, Glycine max
  Clone ID: PAT_MRT3847_98341C.1
atcgatgcttctgaggtactgtcagtgatatttgactgcctccatcggtcatttatatgtggttcaagtgtttctgatgcagaatcagctgaaagcaactgcatgggatcttgggattgagcaaatggtagttgtatagcacattcactttttggattgaacattttcgaacaaatgaactgctatcactgtggtcctgaatccagacatatgaaatatactcacttttttcacaatataaatgccagtgcccttcggacaatgaaggatacgtttgctgaaagttccttcgataagcttttgaatcttgtggagatgaaccatcagttggcttgtgatctagaagctggtggctgtggcaagctcaaccacatgcatcactttttttcaactccaccccatgtttttatgacagtcctaggttggcaaaatacatgtgagagtgccaatgatataacagagactctggcagccctgagcaccaatatagatatcagtgtcctttatcctggtttagatcctaaatgcatccataacttggtgtcagtggaacttagtgatgaatttggctttattacagaaggtttgctactacggccagcattatcattgctttgcttatagccatgaccatgaacagtggattatgtatgatgacaagactgtcaaggtaattggtggatgggcggatgttcttacaatgtgtgaaagagggcatctacaacctcaggttcttttctttgaagctgtaaactagatttttggtggaactgataacatcatttgctggactgaagaatgttgacttttgggtttcaattggtttctggagtggccttgtttatgcagatgcattgcataacacaaaagtggttcgggcaaataaaattgcaagttgcattgcataacacaaaactagttttggcttacatacctctgtgttgggatgtatagcattttaaaatttacgatacaattcaggattttaataggagcaggttctggcgagggataatgatgacaaatgcatttagtgtaacaggatgacttagaagagccgagagtgtttggtaccgagcatcactgaacacaattggttcgttttgagaatatcggattcattccttgtatcctaccaataagcaggttttggtattttgctagatgaaccacaatttgtggaggttgaccagcaatgtacgagaagatcttgggctgttttatgatggaaataattgcccattattgtcgggaatatatatatagcatttgtacgaggggagtttattcaccagttgtcgaagaaatttccttcccacccccttcccccaaaacaaaaaagggatctgtatagttcttatacaattagatttgtcaaaatgtcagcttcttgtcacttcggctgtaaaaggagggtcgtttactgatctactggactactattctcccttccaagaaacctgtgttggaacgtgcttcatgacagattttgtgcaactgtaaattgagggcttccatcctttggatccacaacactactctattcttgttttcttccatttgggtgtgtggtgttggatggggatccgtaagttgagtatgattgaaggtaatgaactaatgatatcaattgttatagttggagaggttaactgtagctttgagtgtggaaaaagctgaaaggttttggcacaattttgccatattctagcgtcaagtgagatggattattatacttcattattctatatacattagtgcaaaatattgtgcaatttaacatctaaatttgcactcgggttcccctaattgtgttaatgttaatattttttaggttaaatacatttttatccatgcgctctctgaccttctgatctgccgcactgccagcctcccgtccctgaggccggtgttggagcgtcctgctgggctgctgttctgctgcactactttgcgcccctcccagcctccggtgccccaacgcgccccttggctggttttctgccactggggtgggtggtgcggcctgccgttccgtcccctgcgcttccttgttcgtgttgtcctccttttggctgggtggggtgggagggggttccgctagctgtgtgtgagggaagggcttgaacgggttcgcgcaatttcgggctacacttgttaccactagctttaagtgagcagcatgattaaacgtagtcccgcgagtttgataccgaccttctcttaccacacctgcctcggttggggtgtatcgcattctttccttgttgctgcactgcaggctgttgatagtagcatgctatggggaccgcgagtggtgccgagtgtgcccagccatgcaggatcagctcgacgcccccgtggtgttggcaaccaagcctcactgttcccgggaggttcgctatggcagtcgcacatgcctcccttgtgccctaccgctcggcaaaatttaccatcctgctaaatgttccaataggagtagggtcggtggctggttatgcatgacttatgcatttgctgttctaggctgcatatcactaaccccgattatccggaacagatcgccagtggccgtaatgggggcgttttttggcgagcatacccatgatatgaaacataccattacgcaccttataatacagctcgagatcagcctccgttcgtgtggtggcgagccagaatgctgccagaagctcttggcctggcttggcgactaagtagagcccaacgattgccgtgcctatgccctgctccttgccctgtccatgatctgtggtgtctggacggtcacgggactggctgggtgggcggtggttcggccgatgtgcgtacgagggctgctacagcccctcgtcctcctctgggtcgctgctttctagctgtttgctggatctgtggtcgtcctgtgctcgtctgttgcttggcgagggaccgttgcctttcgtgtctgctggggcccggtggctgcggctgcctcgcccgcctccatcactcacttgcggctccgccccatgtttttgcgactggccgtgccggccactagtcttggcacactgcccatgatataacagagactctggcagccctgagcaccaatatagatatcagtgtcctttatcctggtttagatcctaaatgcatccataacttggtgtcagtggtttgctactacgggcagcattatc

SEQ ID NO: 141011 - DNA, 303 bp, Glycine max
  Clone ID: PAT_MRT3847_98342C.1
gtatgttctgtcgaaatacacaaacgatggataatgacatcacatcgcattttagaaaacatggaattatctcctatctattacggatctatacaagggatttctcatggtaagacatcatcacttcagtgttgctctctttcagtcgtaaagcatattcgatatcatcatgcacaggcttcattttctgcgatcgcatcaagattcgattaccgctttaatggaacaacattatgaatttctcagttgaatgcggtctcgttcacctaacttacagatggtcttcagatgttggtaaagaaa

SEQ ID NO: 141012 - DNA, 302 bp, Glycine max
  Clone ID: PAT_MRT3847_98343C.1
ccacgcgtccggcgatacataaagatcttaaaagggtatacgaagaatctacatcatccagaagcatctattgttgaaaggtacattgcagaagaagccattgaattttgttcagagtatattgaaaaggctaaacctattgggcttcctaagtttcagcatgacgacagagtggacagtaagggttcaagaggactgcatgttatcactccaagtgtagaagatttgttacatgctcacttgtatgtgttgactacagtaatgaagttttgccatacatactttagcatgaacgtttagtc

SEQ ID NO: 141013 - DNA, 355 bp, Glycine max
  Clone ID: PAT_MRT3847_98344C.1
aaacagtaaaacctggatactatagaattaagtcatgataaatcatgtcaaaacagagatagacaactcgttagaatgcgcaacaacaaacaaaatttctgataggagtcagaaggttttcactcagaaccactacaaactaagaagaagcttaccgaataacagttttaacttacaaggaagaaacccggttgagggcaggaacaccaataccaggtcgtccagtgctgaacgaggcctgatgaaatactaaaactaagcaagataacgcccaatcatcccaagttggactccaacctgcataagggtttcgccattcgacactccaataaagctaccaatcatctcaagcaca

SEQ ID NO: 141014 - DNA, 395 bp, Glycine max
  Clone ID: PAT_MRT3847_98345C.1
aaacagagacccacgcgtccgctggaaactgagcgagatttggcggctaagagttctcaggagtcgcgtactgcgattggaacgttgaaggaggcgtttgaagcggtgactagggagaagagtgagattcaaagccgaaacagtgctctagagacgaaaatcggttatctggaaactgagttgaagcaactcaacgattatacgcggaaggaagaggagattacgcgtgcgaagattctcgaactggaagggaaccttggcattgccatgcagaaggaagaggagatgaaaatggagataagtgctcttctgaaggagaagaaggaggtggaaatgaatgttgaaatgttaacagaggaaaaagatggtgttcgtgaggctctgagtgtggttca

SEQ ID NO: 141015 - DNA, 443 bp, Glycine max
  Clone ID: PAT_MRT3847_98346C.1
aacctttgggctgatttatgtgcgtgcatggtcgtgagaagatcatagaagggcatcgtcgtgagaagatgatagaagggcatggtggtgaggggatgatagaaggggggaccggaggaaaaaaggcgctactatttaagcaaagcattaagggggtcgcggaagtggccgggtgcccctcgttatgggagttacagaagtagtatacgtaacagtaataggagattccgccagttccctcgaataagaatctgcagatcgcgcggaagaaagtgaaggccgccataacggacggtatcactaactgcctgaacgggccccagaatacggcgggaccgttatcgacgacgaccacttccatagagtcaaagaaggcagacgtaaagttaacaagacataagataaggccataaccgatggacacgaaatctcaacaacgctag

SEQ ID NO: 141016 - DNA, 398 bp, Glycine max
  Clone ID: PAT_MRT3847_98347C.1
gggttttaactattatcttgttctcctgtttaattacaggcaagactaaaagtatatcggttagcccggaacttcgttctacttatgaaaagcacctcctacattgacttcagccataacacaatatggcaacttaggtttaccttatgggtcagaaaaacggcgagcagctcatccttcactgtaccaaagtaattctctgggaccatgacttgcttagggagaaggactcacaagtgccatgctcaatgtagcaaggggcaaaactctgtaatgatgtactaaggctttatcttagaacctaggaggcgcgtgacataggctgaatggcccacatacacccacaagtgacataccaggactcgtaatggtgaacttaacccagaggaatggtagaa

SEQ ID NO: 141017 - DNA, 332 bp, Glycine max
  Clone ID: PAT_MRT3847_98348C.1
ttacgcgatcagggaggggggtacaacaacaacaatggaaacctcacgtgcagggtgctgtagcccttttgtttgtttgaataatcgtgttgaaaggtagcaagctttcttcgaaagcgttgataaaagggcgagtttgtttggtcctttgggaatgtagggcggggtctcctttttttttttgtttcttctctctctctctatctctctttttccacaagctagcttctaataattaaccttcatcatatcatatgccctctctccactttgcctacaagccttttttactctctattgatctgccacaaaagtagtggttcgtggacttt

SEQ ID NO: 141018 - DNA, 667 bp, Glycine max
  Clone ID: PAT_MRT3847_98349C.1
cccacgcgtccgaaatttttggttcagttctccactttgagtggcattatatttttccttttacagaaagtatcagaagttgtgacttcaatgtgcttgtgcattgattttaaattaatttcttcaccactttttccccccctttttaaattaagacttcaaaaccagttaaagggaaggaagcttttagtttggggcttgtagatggtttgatgtcaccagatgatttggtaaacactgcatgccagtgggccctggatatcatgggtcgccggcgaccatggattgctagtctttataagactgacaaactagaaccccttggggaagcaagagagattttgaaatttgcacgagctcaggttcaaaaacgggctcctaatctccaacatcctttggtttgcattgatgttattgaagcaggagtagttgctggtccccgtgcaggactctggaaggaagttgaagcatctgaaggacttataaagtcagatactagcaaaagcttaattcacgtatttttttctcagagaggaacatccaaggtaccctgggttacagattgtgggttggttccaagacacgtcaagaaagttgccatcattggcggaagactaatgggctctggatagcaacagcttttattcttaacagctatcctatcata

SEQ ID NO: 141019 - DNA, 343 bp, Glycine max
  Clone ID: PAT_MRT3847_9834C.1
gaggcaaaaaacccacttttgattcttggttctcttttctggcgggggtgaaaaactggggttaacccctaagtagaactcccaacattacctcccagctaaaaattttcactttgaactttaatcccgctaaaattaacaatttttccctcccctcctcacttttggcctttaaacccaagttttccctcccgggggaatttgaaacaaccttgtagttatacaactttggaattaccattatacccctttatttgggcctgctttttttggggaatgccccacctggacaaagacttcaaattatttttggaacaataaagggctaaaaatctccccgccc

SEQ ID NO: 141020 - DNA, 314 bp, Glycine max
  Clone ID: PAT_MRT3847_98350C.1
agggcttgtgaaacatatctatcacgaggtggaggtgctcgctggcgcgaaagacttggatcatgccttataccattgattgaatgtgtggtcaaggtgtggtggtgtatatcgacgagtactagtttccctgcgactttacaatgcacattagtattatttttcttggaagcacacaaatatatcttctattttctttgaattcatttactttcaccctcacaagtgtttgtatcccaacacaaaactttaaaaatgaaatgatttcaatatgagtatttaaaaatcttaaaatttaaaatttcttaaaattt

SEQ ID NO: 141021 - DNA, 699 bp, Glycine max
  Clone ID: PAT_MRT3847_98351C.1
cccacgcgtccgtacggctgcgagaagacgacagaagggggcagttcaaagcgaagaaagattcgaaacgaagaaagaaagcgttgtgaagaatggcggaagagggacaagtgatcggtgtccacagcgtagaggagtggaaggaacatctcaagaagggagaagagtccaagaaattgattgtggtggattttactgcttcttggtgcggtccatgccgtttcattgccccaattcttgcagagtttgctaaaaagttgccgaatgtcaccttcctcaaggtggatgtggatgaattggagactgtttccaaggagtggggaattgaggctatgccaaccttcctgttcttgaaagaaggcaagctggtggacaaggttgtgggtgccaagaaagaggagctgcgattgacaatagccaaacatgccgcaattgctgctgcttgaagtgccatatgaatatgttaagaataatagactattgtcttcgagtcagtttgcttttattactattaatctgttattgggtctgtttgcatgatttcagaacggatttagagttagtaaaacatggatgggttatgtgtaaatgaaattgttgcactatcgtgattgaaacatttctgctgatgaaactagccaaaagattagccggtacgttatgtttatcattgctgtgacaatggatgtgtttcatcat

SEQ ID NO: 141022 - DNA, 202 bp, Glycine max
  Clone ID: PAT_MRT3847_98352C.1
ccaggaaaaaattatcggaggaatatctataaaaaagttaacaggggaaatatccaaccatatttgggtcccaaagttaaaaacaaaaaaaccctcctttgcctttttaaagtttttttattcccaataccacaatggggggccttcttcggcgggccaaggaataaccactggccgggccggccccacccaataggcaagg

SEQ ID NO: 141023 - DNA, 824 bp, Glycine max
  Clone ID: PAT_MRT3847_98353C.1
aaaaaataattaacataacaatattttattgatatttaattatatggataaaaagtttcaaaaaatgaaaaaaatcatactaattacaaatatccaacagtatatcacaagtaccaaatttatttgatatatgatcgcatatcggttccgcaactatgttgaagtatctgtacattctaacccagaccgcgtttgaaaaaagaatgcttacattccatttccatccattgagaatgcgaacgttcactagaacaaactggaaatgcgcaaatggggatcccagatcatgccactgttaaaaggcgaaaccaaaactgtgtgtactctcgagtcttcctaatgaaaaacagatcacaattcacatcctataccgtattttctccatccataattcttcatttcaaagtcgtacaggtttgtacaagcatgacgaatatcattggataccggatgttgcgacagagatgtgaattcaccaacacgaagcctggaaggtgggtatcctgtcatatttggaattaggcctctgttgtgataaaagaattcacttggcacattcctgctttgagaatttacttgatattggtatgtactttgtggataactatgtaatggataaactggaacttggtaacggtcaaattgagcccaattgtgacttccccttgtagttgcttgaagatgctttctccttctgcgttgctcgagttgacgaagtgacctctcgaagttgaaagtgcctgatgccatcttggtgcctaaccttatctactacatttgatcttcctattttttatcgttttttattatggcggacgcgtggg

SEQ ID NO: 141024 - DNA, 463 bp, Glycine max
  Clone ID: PAT_MRT3847_98354C.1
ctctcaatacatttctcaagcagctctctgttactaaccctcctctcactcgtgcctaagcttcttctctcctttcgttcaacgttgtggcgtcgctgtgaaaaccctcaaagaagtgtcgtgaattttagagcaatgtgattgcctctggtggccttggcggggaggtttttatatgggatatcgaagctgcactagcttcagctacaaaatgcaatgatccaatggatgatgatgataattcaaatgatatcaatgtttctggaaactcattaccaatgacaagcttacgtaacatcagctcaagtagcagtatatctatgcacactactcaatctaaaggatacaatccaattgttgccaaaggccataaggaatccgtttatgcattggcaatgaatgaaggtggaacacttcttgtctccggtggtacagaaaaggttgtgcgtatttgggatccgag

SEQ ID NO: 141025 - DNA, 395 bp, Glycine max
  Clone ID: PAT_MRT3847_98355C.1
ggtcctaactattaattcgttaccctaatttggaaaagcacgcaaccacgcactaaatttgggacattttgcaacatattttttcctgcccgatgttttgcaaaggaatattccccagtgatcattaattcccttaccgtggttgatttccactggccaaaagaaggcctatcactcattaaagggatatccaggtttttaataaattatgattgggccttttccgtgcgcctcttaagggggcccttgacaatcccaggggatactttggggtccaggtacaaacagtgggttcatactgagccttgttagccttgcacatgggggcaatatttggcacaagcggggaattagggtttgggacgcccaacaaggagccaaaggcccaaaggccc

SEQ ID NO: 141026 - DNA, 1114 bp, Glycine max
  Clone ID: PAT_MRT3847_98356C.1
gagataacttggatgtggtgtcatgttctgtatgtcagatgggtgttttaattcggcatcctcacaagtgcaatgcatgccaaggttattgtcacgagggctgttcaacaagatcaacagtctcggcaaatgaagttgagtacttgactacatgcaagcaatgctaccatgccagattacttgctcagaaagagaatactaatgaatctccaaccagtccattactcctacaaggacgagagaataactctgggacatttttgaatggatcaaggcctaaatctcatgatcaagtactgaaatcttccaggacaaaggctaataatcccaacgtgaaacaagttactcctgtgacggctttgaaatgaacaaaggctaaatattatgaacaagaaccgacttctaccaggacaaaggataataatcattttggcacgcctcaagttgcttctgaggccactttgacaggaaaaaaacctcgcaaaaattgttcttggggtattatatggcaaaagaaaaataatgaagatacagacaatgatttctggctcagaaacatacttttgaaagggggttcaaacatgccacagttaaaacctgtttgtcacttgtgtcggaagccatatatgtctgatctgacgtatatttgctgtgagacatgccgaaattggtatcacgctgaagctgttgaacttgaagaatccaaaatttctagtgtgttgggcttcaaatgttgcaagtgtcgaaggataaaatcacctgtttgtccatactctgatttgaagcctaagagacaagagggcaagaagtcacgcacaaggactaaaaagaaagagcattctggagcagactccgattctggagcaatctattatgatatgagagattgtgaagttgctactcctgtctttcatgtagaggatgatcccagtcatgtctttcctgtagagggtgatcctactcacgtctttcctgtagagatgatcctcttcttttctctctttcgagtgttgagctgctaacagaacctaagatggaaggggatgttgagtggaacagtgtccctgggccagggcttcggaaattgccagtgagaaggaatgttagcattgag

SEQ ID NO: 141027 - DNA, 467 bp, Glycine max
  Clone ID: PAT_MRT3847_98357C.1
ctcgtctcactcccaaatcccaattctaaaccccacgcctcattcaaagctcaaaacccagagaattaattcaaccaatagttacaacttacaattacttctttatttattttttaattttctttcttcttcttctctttcttttgttattttttttacatgcttgcttctttcttcttgtttttcttcttctcaatatcctacaacacacagcgatcgagttttctgatatggattttgggctacaattgaaacccgggtcaggtccacaacaatggcggggttattctcattaggtggaggagggcgaggaggcgataaccaagaagaaaacaacaaccaaagcagcgagattccaccagcggagaccctattctggtacagcaaaaacgacgacgtttcatcctatcaccgagggtttgagctatggaaccagcatcaggagcaccagcaccatcaccacgcga

SEQ ID NO: 141028 - DNA, 1050 bp, Glycine max
  Clone ID: PAT_MRT3847_98358C.1
ggggcgagatttattttagtgccgcgacagagacaacaaagagagtgagaaactaaaaagagaagaggaaaaaaaaatggaggaatcatcaacaacatgcgtgttgtgcgagaagagggcaatgatgctctgcgactcggaccaggctaagctatgctgggaatgcgacgagaaagtccacagcgccaatttcttggtcgcgaaacattctagggttcttttatgtcgtttgtgtcactccccgactccgtggaaggcttcggggatgaaactcacgcccactgtgtcgttttgtaaccgctgcgttgcggaacggaacgcgaggtggaaccgattggtgaataatgaaaatgaacatcaacaacagcaacaacaacaacaacagagtgattttgtggtggatgatggtagggaatatggttctgatcatgtttttgatgatgacgatggtgattatagtgatgatagtggtgaagaagaagaagaggacgaggatgatgaagaggagaatgagaatcaagtggttccaatgtcttctggttctgccacgtcaccacctaaggttgcctgtttagcgttgaagcgattgagaaacaactcttttctgtcgattcttcacatgatgagacagcgtgctcttcatctgagatgcttagttctacattgcctagtggtgatgaatcaccctctttgagtagtgtattaaagaggcatcgggttgattagtgaaaattgaagaggttagaggtggtgacggtttgtgttgatgaacccaatttgatcgaaaattaatctggaccgttgaattgataggacaacttctgtttatagggcaacttcagattatgtttagtgttaacttccatctttctcttgaaactacttagtttatagaacaacttagattcagaaaaaaaattgttttctttttgcattcaatttttgtagccaaccccattgataataactctgtagttcacatttcatgatatatatgtatgtggagaatgtatatacttcaaatcctactttcattaattttcgccacct

SEQ ID NO: 141029 - DNA, 462 bp, Glycine max
  Clone ID: PAT_MRT3847_98359C.1
cggacgcgtgggttctcctctcatacttaatttgtttccctccattgtaacgtttgttttatgcaacactaagtgcggtttgtgtgtaacaacactaatctccctctcaaaagagacttatcaaatgagagtactgtcacagaataagagttaatcttggttatatggtaacacatgattattcttaactccgtccgtacccatgaatcttacctaatgaataatcagatattaattgcccatatatttattttatggagacaacttctataaatcatcttgtttgtataagagctactaccagtacaaacccggggctacccgctgagtttaagcatatgaataagcggggagaaggaccatacggtcggtgactttgtactctagtgaagtgagacccataagccccagttggcaatttatgttgtaattactatttagttgcaattagctgtaatcacc

SEQ ID NO: 141030 - DNA, 466 bp, Glycine max
  Clone ID: PAT_MRT3847_9835C.1
gaaagaaatattcactgcaaatgctgatagaaacttggatttctattttaaaatatgaagagtaactccctgcagcagagctagacatctgtaatctctcaaaaacagaaatgaatatggttacagacactttgaggggtctgcttcctccctgcccatgggcccaaaatgctccaggatccgttcctcccttttatccttgctcctactgtcccatacccgtttccacgtaggcaaacgatagacgggaaagtagatggggaaaggtgtatgttagaaaatacccttggaagagttagggagcttccagttgtaggacagctaagatagctgttagttagatagagagctgtcagttgtaggacagctaagataactgttagtttgttataactaactgttagttagttagttataaccaattgtggttagataagaggctataaatagcttgggcaggggttag

SEQ ID NO: 141031 - DNA, 461 bp, Glycine max
  Clone ID: PAT_MRT3847_98360C.1
tcgttccggtggggcagaaagaaaacaaacttccagcgctccttcctcagtcctctgtcttgctagaatctcacaatgacaacctcatggtacatgcaatctcaccagtaactcactgagcagggagaacaagccacgtgaatcaaacccgggcaaactaacacacggcaatgcagcatacgggggaccgatgctgcctggcgccaccagctgacaactccgtatcgcgggcaggcacacgagagtcctgactgtcacccgatccatgcccttgacagaatggatggtgacgctaagcgagtgccgcggaaccagagcgatcttgctgacacaatcgctcctgcaagactaggagaccacagacccccatcaccaacagctaagatctcggtagcacaaccagagaataccaccgagcctgagagcaatcgaggcattcgctgaacatgaaagccattcta

SEQ ID NO: 141032 - DNA, 615 bp, Glycine max
  Clone ID: PAT_MRT3847_98361C.1
cgggttacgtgttgcgaaagacatagctgagaacaaccctggaagccgagtgctgattgctacctcagaaactacaattattgggttcaagccaccaagtgcagatagaccttatgatctagttggggtggcactctttggggatggtgctggtgcaatgataattggctcagacccaatattggagtctgagaagcctctctttgagcttcacactgcagttcaggagtttttgccacacactgagaagaaaatagatgggaggctgacagaagaaggaataagcttcaagttagcaagggaacttcctcaaataattgaagacaatgttgaaggattctgtgacaagttaataagtgttgttgggtttgagaacaaggagtacaacaagatgttttgggctgttcatccggggggtcctgccatcttgaaccgcgttgaaaagaggcttgatttgttgccagagaagctgagtgcaagtagaagggctctcatggattatggcaatgctagcagtaacaccattgtgtatgtgcttgagtatatgatagagggaaggtctcccgattagaaaggttgcctgaggagatcttgaatggggctttattcttgctt

SEQ ID NO: 141033 - DNA, 431 bp, Glycine max
  Clone ID: PAT_MRT3847_98362C.1
agggtcatacaagtatgcctgcgtggctttataagcttatatgtcttaacgcgaaagaacaatcacaatccgagattgccttgtaacattttgaaaccaccaactactattgcacactcattgatgcccctggacacactgatttcatcaacaacattatcacctgaacacttccaacataactgtgctgctcttatcattaattccactactggtggcttacaatctggaatttcaaagaaaggacagactcgctaacatactcttctttaaatcaccctttgtgtgaaacatataattctttgctaaaacacaaactattcttcttcaccaaattacttcaaagtcaattatgatgaaatcataaataaagtttatttctcttttaataaagacatatcaaccctgacaagataacttttgttcctata

SEQ ID NO: 141034 - DNA, 205 bp, Glycine max
  Clone ID: PAT_MRT3847_98363C.1
atatatcatttctactatcgttttactttgtgacaaacaccaacacccaatcttgaatgaaattgtaagaacaatctcaataatgttttaaatctgaatctagtggttataaccacttaactgagtgttatgtctcacacccttacaactttcaatgctggtatggagtaatctatttaatttgtaaatacataatcattttaaa

SEQ ID NO: 141035 - DNA, 236 bp, Glycine max
  unsure (1)..(236): unsure at all n locations
  Clone ID: PAT_MRT3847_98364C.1
gtgtggcacctggncnngcgcacaagctttgtagtngttgccgacaagcacggtgttnctctnngnnaccncagnctctnngttggcgcacaggncctaaaacctgcttgccaaccgntnnnagtttcttcacctgtttttggncccnacacaagtggncccncacctccttggcgtctcatancgttgnagctcgagtctgtngcctgantttgcgatcngcnttgcagctgaaa

SEQ ID NO: 141036 - DNA, 164 bp, Glycine max
  unsure (1)..(164): unsure at all n locations
  Clone ID: PAT_MRT3847_98365C.1
tttttagtctacttttgactattatatatcaggtggtttagtgtttacttgcgactttgctaagactcattgtttatgattgttcagcctttagagatgtttaatctttctntattagctcnctagattcttcaacatacacnaataacaactttatcncttnt

SEQ ID NO: 141037 - DNA, 506 bp, Glycine max
  Clone ID: PAT_MRT3847_98367C.1
aattcggcaccagggcatgtttgacaaaaatctttttttgaagatttcaatcggggcatgtttgaatttagcttcacctagattagccttgaactcctttttcatctttcccctcttttaatttatgttttttctttattaatagttggattttgcagtgtcttagtatgctaatcttgttttctttatattgtctgcctatttaatgatctttgagggccatagctgtaagtggaatgttttatatggttgtgacagcataatctgagtattctcccttgtttgggtgggggaaaatttatacatgctcatcgggaaaatttggtcattatcactaaatggaattttgttaatttgtttccactaaatggaaaattcatgcgtgcatgtttaaatttaatcttttacttggtcatttgaattttttatgagtgatatacgattacatttatgctcagtactacgcttgactagccttttaaaattcaaaacactttgtattttgg

SEQ ID NO: 141038 - DNA, 352 bp, Glycine max
  Clone ID: PAT_MRT3847_98368C.1
tctcccactcgtcctatccaaaaacaaggggattaattatccatccaatatgactcattctgggtatgtgatcttctaaattgttaacctattatcttgatatgtatcattcatacccatgattattcataattcactaactctattcataaaatagcacctaatacactatactaatcaactgactcataatctagaatagttaactcataaattgaatttcctatatccaacacaatctacttctatattcatttatgatcctctttaatgaccactctaaacattactctatctaatggaccattatgcagaacttactaataccgtaaatgaattacctactgattct

SEQ ID NO: 141039 - DNA, 253 bp, Glycine max
  Clone ID: PAT_MRT3847_98369C.1
atcacacgctcctatacattttatctatacattattatacttgccaaccaccttcttatgagcgatcaaaccattgatcgatcgcatacctctttcatatcacgtctcttcttaacaatatctggacctattctaaatgaacacaatgttgaaactgtaacccctttcactattctaagtctaaccctattaacattttgtgcttcgattacctcgcatcaacttcatacactcttctataacaccttattat

SEQ ID NO: 141040 - DNA, 121 bp, Glycine max
  Clone ID: PAT_MRT3847_9836C.1
tactcgcttcaaggctgagtttcccgtttatgacaaagttgatgctaatagtaacaaaagtactccactgtacaagtgtctaaaatcaaacaaaggtagactctttggggatggtaacaaa

SEQ ID NO: 141041 - DNA, 175 bp, Glycine max
  Clone ID: PAT_MRT3847_98370C.1
tgaagttggaacaagaaacaggttggttttgcgctgcctttgttttgtcccttggtcttggagcactaggcacaaggtggacatcaagtatccacttattgcaaagttcagcaaatagtgatccaaagatatggaggctttttttttttcttcttaaaaccccttagctcatata

SEQ ID NO: 141042 - DNA, 492 bp, Glycine max
  Clone ID: PAT_MRT3847_98371C.1
ggctcgagcaccatcttgaggctgaccataagaccactatcctttgcaggctcaagctcggagagagcgttactacaatttctaccattgggggcagttacaagacgacccttagcactggggcttatgctcactgattgggatgttggcggacaggacaagatgcgaccattgtggcggcactacttacagaacacttatggtcttatttttgttggggacagcatggatagggacagagttgatctacaactatggaaaagccgtggaagccttgaaaggtggataactggaacacgccataatgcatgtgacagcatgcaaaccttagccttccaggctgcactatggctgtggatgaacccaccagagaagtacctaccattatgccacagatgtctctggtgcattctgagaaccctgagcaacatgtgcggtgggcctttacgaaggcctggactggctttccaacaacattgctctatggggacc

SEQ ID NO: 141043 - DNA, 287 bp, Glycine max
  Clone ID: PAT_MRT3847_98372C.1
atcatcatactataaaaatcaccatacttttttgcgggggcacagaaataagtgggggggcggccaattaataatcaaaacaaaacaatttttcttatttaaatgtgcagggacagaacaaatataatttgttacattaagggaccatggtgtcaaacacaatagccactcctaattttttctaaaactttttatcaaatggaaattaaaaaatgcgaatttaataacataaattttttgctaaaaatttgaacccagaataaagtggcacaaacttacctaaccat

SEQ ID NO: 141044 - DNA, 270 bp, Glycine max
  Clone ID: PAT_MRT3847_98373C.1
gctcgagtacatatagtccttcctacatatagtggttttaaatatgtcacataatgatttctcctagaaagttacaattatcaaagagttttaaaactgaattgttagtttctagtgacttatccaattttcagtgggataaatgtcatcgagaaagttttgggtacttatagtttatagtttagtgtcttgatcacagattccaaaacaatacatttcttttattcatggtaattaattggtagaagtgaagttctatttccaaaatga

SEQ ID NO: 141045 - DNA, 417 bp, Glycine max
  Clone ID: PAT_MRT3847_98374C.1
ggctcgaggtgagaggcttgctgctctgatcaagagacctgcaactgtccgttatttgcttactgttacaggcccatgtctcaacacagtggaaatctcttctgggtagtacgaatccgagatccgtgaacaatctaggtactgggtccattgtatggcggaacatgatactgggatctttcacgtgggacacagtgcaatccttaaatgggtgatgtttgagatcctaggttgatctacattagttgacagaccgagcaatttattaaccaccatagcgatatagtctacgaaaaaagttggactctattgactttaatgcgggatctgaggtgggcatgaatggggaccaaatgcaccaatgctttgttgtccggggggcagggataagacatgcctacagcttgcacgtggtgg

SEQ ID NO: 141046 - DNA, 223 bp, Glycine max
  Clone ID: PAT_MRT3847_98375C.1
ttggggactttatatgagacggatcaactatgtgtcttaggggatatatttgatctccgattcattataatatctgataggtttccatcctctccgactgtatatgaattaaaggattcatattatagtgcttcccgatctatatttattgctatgcctccatcttctggtgatgtctcaccacatcctattgaaaaggaaacatataattttgcacaagaca

SEQ ID NO: 141047 - DNA, 536 bp, Glycine max
  Clone ID: PAT_MRT3847_98376C.1
cttctccaaatgttcccaaacatgttttcagtcttcaaagtttacagtcaccactggctcacagcaccatataggttgagttgaggggtaaaaaatgttgcgcatggctaattttagtcctattctactatacaagttgaacacgaaggtgactgaaaaagtgaaacaaatgaaaacaagtccctaaaaattgagcaggcataaacactactaaaatcacttattctggaccattttcttgtgaatcgtcttcgtgtaacggcctgtgcaagacatggttgcggtggtggatcaacattcaatgtaccatctagtactctcactacctcctccatagaaggtcttctacgttcatccatttgaaggcaccaccagaatgagattcttaacgctcgttcaagttcctctgcattgacaacaccatcaattcttttatcaaccacattaactgccctcccttccatccattcagtataagcccactcacaaagttgttcatgatcttgacaccctgttagcaaggttaataccaactt

SEQ ID NO: 141048 - DNA, 326 bp, Glycine max
  Clone ID: PAT_MRT3847_98377C.1
cagcaactgtgagccagcttcaagccggttcactgaggttcgcgcctgctaggtaggtagagtcttcctccagttttccaaagctgcatcaagagtgtatctctagataggcaggcaatcatccaaaaaggatttgtagaagcctgtgttcatttcatggccagagggcagtgctatgggaagaaagttgtgtgcatagccagaggggttgtttagttttcattagagtgtagagctgtgaacgcgtcgaatatccttgttttttcttgagagcatgtgatttattgcaatttgcatcattgtttacgtgaaataaaataagtttc

SEQ ID NO: 141049 - DNA, 240 bp, Glycine max
  Clone ID: PAT_MRT3847_98378C.1
ttttctgaaaaatccgacatggaaacgtatattccctttatttgaaacaagggggattcgaaaacattttcctgaacatagccaacagccaggcttaatcttgtaacgcggtgagtccattcaagggagggggggcttttaaaagaggcctttcctaaaagactccaccttccgcggtgggggggaaaattgccgggttggttcgtacttgtttggaaaacctaataaaaaagcattttt

SEQ ID NO: 141050 - DNA, 463 bp, Glycine max
  Clone ID: PAT_MRT3847_9837C.1
cccacgcgtccggaaaagaggaagaaataacagttgcggcacaacatgcttgtggcatctctctagaagaatgaggatgttatgataatgctagggatgatgacatggccctgcaacctgttcatgatactaaggtgaatcttaacagcacttccagtgtgtgccactaattcgagaagccagctcaagatctggtgcttcagcctattcattgtctttaccctgtggtgtctgagagcctagggcatgtgggagcttataatggcctgttgacccaccataggccgctgagttcactcactggtgcccatcactactcatcttctgagcaagctgtttaccataatgtaccgaatgctccaaggcaagctgtgggacccattaagctgtaattgagtctgatctgtgttgcatccttgataccatgacctgtacctgccatacagattggttctatacagat

SEQ ID NO: 141051 - DNA, 286 bp, Glycine max
  unsure (1)..(286): unsure at all n locations
  Clone ID: PAT_MRT3847_98381C.1
aacaggaggcnccaacaacaacggaaggggcagctgcgccaccgccgaccgcgccaccggacaagncgcaggcaacggagccggagcaaacccgccagcgacggggggagaaatcacaggggcagcaaacggagggcaagacacccacgacgggagcaacgaggaaggcaacaacttttttttgtgcgaaaccccacaaggggggagcggcgattgtttatcccccccccgccccaagaacaggaagcctgaggggccaggggagctccgagccaaagggaaagag

SEQ ID NO: 141052 - DNA, 251 bp, Glycine max
  unsure (1)..(251): unsure at all n locations
  Clone ID: PAT_MRT3847_98382C.1
aatcttttttctcaatctaaaaaagttatatttcccaactctcccaccagaatattttagtgagaattacataggtaaaanaacattcccaaaaaataatatttcttaggaatgttattgttttagataataaagcaaacataatatttacaacctcaaagtccttttatatgtggaaaatgagggttattattttttacataattganaaataaggctcgttaggttgccttgtcttgcctcgttcaaaa

SEQ ID NO: 141053 - DNA, 468 bp, Glycine max
  Clone ID: PAT_MRT3847_98383C.1
ggctcgagggaattctttatatctggaggtgacggcctccctcggggtgtagtcgaaaatcaggttgcacgtgttcggcatgtgatcaagttgcacggctatgaggttggttcacctatatcccatgtttggtattggattagctaggtatcaaatagccttagccatatcttaagaccatgtttggtgttaatgattgtgttggtattgctatgttgtcaaattcatcattatatttaaattctcttatatactagttttcactgtttgatgtaccctataatttaatacaacaacaaaagccttatcccactaggtgagtgttgtatctacaaattttatgttgactgctgacaaacttaatacaatcttcttcctttatctgagcttggtgggaccagctataatttattaatgatctaaaatattttcttgcaacaatcatgtctcaaaagcatgaaaatgatc

SEQ ID NO: 141054 - DNA, 334 bp, Glycine max
  Clone ID: PAT_MRT3847_98384C.1
acttgtaaaaacacaccaaatttcgactccaaaaaaacaacaaaacgtggctatctttaatcaccatggttatttcataaaacaacctacttttcttttacacactacacatataccactgcgtaatttataatttccatgacctacctaatcctagcatcttctacttaattataaaccacgcaacaaccaatatcaaacacgattgcataactagacctatcatcttgttacttcaatctctaattgccctcattcttgacagcctacttccaatcatcacgcacatctcgtaaccagctcttacaactcttatttccattatcattatccc

SEQ ID NO: 141055 - DNA, 400 bp, Glycine max
  Clone ID: PAT_MRT3847_98385C.1
ccgctgttgcgcaagagagcgactgcgccagccagagaaagctgtcggagttgggaggcatccaataggatgctgtcaataatagtccctgcaggtataggggtaggcgagctgctacaggtagcagtggagctgcaaatgggatggatggtatagaactggaggtacatcccacgtagtttaagttgatgtgtggatgtggcctagtacctaactagcaagtaggcaatatcgcatatgtatgtgtcagatgaatgatggatgacaattagggatgcaagagtctcgttgcaagcgtgtggaggttagatttgcaacatatgcaggtgtcccatatgcgagtcagacttgcagcaagagacacaatagcacacagacgcgtcaaatgtacccagacaga

SEQ ID NO: 141056 - DNA, 317 bp, Glycine max
  Clone ID: PAT_MRT3847_98386C.1
tttaaattataaaaatgcgaatcagaatcggcaaaaatttaattatgctaacagaatacatactcatacaatacatagctatcttgtataaagcaccacccaaaaaaatccataccccaactatgctacaagattttcaatagataaggcacaaaaaccatttctatagttgttgccgatccttctgagattctttcaagatggatttctattctgttacattgtgagatgttaggctagagtcagttcattcatatatgcactggcgcgatcggaaagtgccattagccagcaattcaacaatggccttctcaagc

SEQ ID NO: 141057 - DNA, 341 bp, Glycine max
  Clone ID: PAT_MRT3847_98387C.1
gggtcacaaagagatgtattgtagaactgagcaatggtttctctttctcattcgcagtctgcttcttcaatttcacgcgtttcagtcaagcatgatcatgggcagaaaattcttcgtcggtggcaattggaattgcaatgggaccactgatgaggtgaagaagattgttaatactttagatgaagctaaagtcgctgaagaagatgttgtacatgttgttgtgagccctccttttgtgtaccttccttttgtaaatagtttgctgcatcctgatttccatgtcacggcccaaaattgttgggttcgcaaatgtggcacttacactggagacgttattgctg

SEQ ID NO: 141058 - DNA, 473 bp, Glycine max
  Clone ID: PAT_MRT3847_98388C.1
cagaaaccgaacacccaaccctaacgcccgctcacctactcctattcttaccatcatacacctatacctagccttgggcgctattttactcgaccacgtgatatccccatccgacgcacacgcgctgtgatataataaatgcatggggtggcgcaactaaattctcaggcctaaagcccgtgcttggatcaactggacctcctctctcgacggcttacccgactagccagagccctacaacgagatgcatcggacctcgccgtactaatgaaacagtaggacaactaacagaacaacactcatctcattaaatcatcgcggcgtcaagaccactgaaaacacgcacttcaatgtaaggaagaatttcgcaaaatattgatgttgctgtttaagcagggcacaccatcaaccgagtgtatgtactatgcagccacacatgaatgaaaacacttacggtggtaggtatgagctta

SEQ ID NO: 141059 - DNA, 407 bp, Glycine max
  unsure (1)..(407): unsure at all n locations
  Clone ID: PAT_MRT3847_98389C.1
atttaagattggatcctctagagacggccgctnnnnnnntttttatttttttatttttttttggaaaagaaccnccaaacacacccgggccgctttataaaaaaaaaagacccacttctttatacacccatttttttatacacacacaaaatatctacaaaaaacacccccccccaacatattcctttaataaaataatttttttttttccaaccactatttttaaacaaaaaccaaaacaaaacttttattcttttaaacaaaaaaaaaacattcattcttttaacaaaaaaaaaacaatttccaatccaaaagataactttaattttacaacccacatcctatacattacccaaagacagaatctcctttaaataaaacctatccatacaaaataccataaccat

SEQ ID NO: 141060 - DNA, 251 bp, Glycine max
  Clone ID: PAT_MRT3847_9838C.1
cacagggaaaaacccggggccttaaccgtttttttaattcattccccccccaataaagggaaacaaaaaaaaaaatttttttaacaaacaatttttaaaaacttagaaatttgggggtcacaagggacttttgttgcataggggggaacccaaaattagtgggcctttttcaaaggcccccaaagggggggaggcccttcccataaaaacaggggccctttttgggaaactatttttccccccattttatt

SEQ ID NO: 141061 - DNA, 228 bp, Glycine max
  Clone ID: PAT_MRT3847_98390C.1
tcccacgcgtccggcgtgaaatcgattaaattcgacgaaaaggcagtgcgcgttaaacacgggttgtttgtccataaacaggaaaggcttttgtggaaccaaaattagttccgttaacccttacactgttttggagggttctatcttcaaaggggtgacgggggctttcttgaaagcttcttctgctaggaacataacgaggggggcttctgtggcgccttttgaggg

SEQ ID NO: 141062 - DNA, 393 bp, Glycine max
  Clone ID: PAT_MRT3847_98391C.1
tttttttttttttttttttttttttttttttttttttttttttttttttttttttttttttttttttttttttttcaagtatccattttattgtagttttataaaataaccatgggtacaatattaatcaattacttacaacaacaaagattaatattaaaaaaatttaaacatttactgtcaatcttaaaatcatgactaatacaagattgcttgcagtctggcgaatttatgcattttgccacacaagtatagcctggaataaattgtccagtcgttagtccgcctgaagttagaatcaaagcaacaaataaaattcccaagaggatatgttgatggaagcgaaaacccatttgatgaggatttagtttttaattttggtccttctttctt

SEQ ID NO: 141063 - DNA, 165 bp, Glycine max
  Clone ID: PAT_MRT3847_98392C.1
atttggtcttgctttatttattattactattaccatatgcctaataggttgttttggggttggggtgtaggtaaagtcacattctgcatgtggacaacgttgtatgtgaactggccttaagtttataggttatgccatgagaaatgaaattgtcttatctgtctc

SEQ ID NO: 141064 - DNA, 274 bp, Glycine max
  Clone ID: PAT_MRT3847_98393C.1
gtgggggggaaccagttttggttaataaaaataaataagggatgaacaaaattcaatttcctttttaaaaacctgacttttcccacccccatttggggatcccggttaaattttattggcataccgctgcaccttttagggaaaaaaaatctgaaattttgttggtttaaaaaccccgctttttggaattgttagggcttttaaacatggcccgtggggtgaccccttaaaacacaaaaaaagtttttcaacccccttttttttcaaacaaaaa

SEQ ID NO: 141065 - DNA, 1093 bp, Glycine max
  unsure (1)..(1093): unsure at all n locations
  Clone ID: PAT_MRT3847_98394C.1
ccacgcgtccgcctctgcatgttgctttggtccacgcagtctcgcctcgcgcagtctcttctccgttttcaaacttcattagcacacagacacagcttccgccaccactcggacatggcgagcgagggcggcaacaagagcttcgcgcggcgtgatcgtctccgcgagatcgaatcgaaggtccagaaatggtgggaagagaaagatgtcttcagagccgaaccgggcgagaagcccccttcttcgcctggcgagaaattcttcggtaacttccctttcccttacatgaacggctacctccacctcggccacgccttctccctctccaaactcgagttcgccgccgcctaccaccgcctctgcggcgccaacgtcctcctccccttcgccttccactgcaccggcatgcccatcaaggcctccgccgacaaactcacccgcgagatccagcgattcggcgacccgcccgtcttcccctccgaagtcgaagaacaacaacaacaacaacagcagcagcagcaagaacaagaagaaccaccttctggcgacggtgctcctcctgataaattcaaaggtaaaaagtcaaaggctgcttccaagtcaacggggcaggtttaccagtgggagattatgcgtagtgtagggatttccgatgctgagatatccaaatttcaggatccttataagtggctttcgtattttccacctctggctgttgaggaccttaaggcttttggattaggttgtgattggagaaggtctttcgttacaaccgatatgaacccttattttgattcgtttgtgaggtggcagatgaggaagttgaagtccatggggaaggttgtgaaggatgtgaggtatactgttttttctccattggatggtcaaccttgtgctgatcatgatagagctagtggtgagggagttcagcctcaagaatacactatcatcaagatggagttggttgctccttttcccgaaaatttaaggcatgggagggaaagaaggtgtttcttgctgctgcaactntgagacctgagacaatgtatggtcaaaccaatgcttgggtgttgccggatggggagtatggggc

SEQ ID NO: 141066 - DNA, 711 bp, Glycine max
  Clone ID: PAT_MRT3847_98395C.1
ggccggaaaacccggcccgacccccgctttgtcgcacgcagtctcgcctccgttttcaaacttcagcaccagacagcttccgccacctctcagacatggcgagcgagggtggcaacaagagcttcgcgcgtcgtgaccggctgcgcgagatcgaatcgaatgtacagaaatggtgggaagagaaagatgtcttcagagccgaaccgggcgagaagcccccttcgcccggcgagaaattcttcggcaacttccccttcccttacatgaacggctacctccacctcggccacgccttctccctctccaaactcgagttctccgccgcctttcaccgcctccgcggcgccaacgtcctcctcccctttgccttccactgcaccggcatgcccatcaaggcctccgccgacaaactcacccgcgagatccagcgattcggcgacccgcccgtcttcccatcctccgaaatcgaagaagagccacaacaacaacagcaagaacaagatgaaccttcttctggcgatggtgctcctcctgataaattcaaaagtaaaaagtcaaaggctgcttcgaagtcaacggggcaggcttaccagtgggagattatgcgtagtgtagggatttccgatgctgagatttcgaaatttcaggatccttataagtggctttcgtattttccacctctggctgttgaggaccttaaggcttttggat

SEQ ID NO: 141067 - DNA, 733 bp, Glycine max
  Clone ID: PAT_MRT3847_98396C.1
atggggtcattttcagacatgggggtacacttatattatacagaggcagaaattataatccgaaaaagaggcctgtaattcctgtcatgttgtggaagccccatgaacctgtatatcccagactgattaagacaacaattgatggcttaagtattaaggaaacaaaagaaatgcggaagagaggactatctgttcctgctttaacaaaacttgccaaaaatggttattatgcttttttggtacccatggtcagagatgctttcctctcctgcgaattggttcggatagactgcgagggacttgagaggaaagattacaagaaaataggctgcaaactcagggacatggtcccctgtattctggtgacttttgagaatgaacaaattgtggtttggagggggaaggattataagcacccgaaggatggatactttctcaaagatcgagaatcgtttgacgacgatgatgacttttgtgtgggaaaagagcaacaggctatgtaacacaccacaatcagatgtgataattaagtggaatctttgtgcaaattgctgccatgaatcagaagttcccttgagattggattgttgtgttctgtgtaaatgcagtcaatgatgaaatttgagatatttggatataacaagatatatctacactgttctttttccatgactcattgtaggcctttaaagttgtaaggaaaaatctgaagatataggatgagtttctaacc

SEQ ID NO: 141068 - DNA, 471 bp, Glycine max
  Clone ID: PAT_MRT3847_98397C.1
tttgaagaaaaacattcaatattccattgtatcataaaatcgtagcataacagcaggggtctcagttcagaaaaaaatattaactgcagcatacaagtaatatgcctcaattttcagtattgattgtactatacagaaactataaggtcaaacttctaaaagacctaacaaaagcatacacaaacttttcttgaaacttctggttaatagtcttttaacagattatctcttgcacaaatccacaattgctaagtgctatgtaatagtttcacatcaactaaggttagaatgctgaggtagcttggatccaatactgaaatgttcccatcatcaaaagggaaaaaccaaacacggataggttccaacttttgtcattagtttgaccatacatgaacaagaccatgcctgttcccagtatagatctcatttctgtcttcgtcataaaagagggcagggatgtcctccaaagcc

SEQ ID NO: 141069 - DNA, 384 bp, Glycine max
  Clone ID: PAT_MRT3847_98398C.1
tgggaaccaaaccggaattgtttttttttaaaaaaaggggacctcaccaccttttttgttttaccccgacctttttccccaaaattttaaaccgcgttaaaaataaagcccaggggggaccaggtttaaggggatccttgcccgtttgaaaaacaccctaattttacctttttagggcttaaaattaaatgacccttttaatccaggaaatccaattcccatagttcctttcctgcttaagtccaaataagaaaccccaaatttgaaattgggacagggttttgtcaaaggggttctgggagggcctcacttggcactaagggttgggaaatgcccgggttcttaaatggatggaccaggtcctttgttgggggcacttccatg

SEQ ID NO: 141070 - DNA, 631 bp, Glycine max
  Clone ID: PAT_MRT3847_98399C.1
aaggactctaagcaatctgagattggttccaatctagttctgcttggttgttgcagaagagaagaaagcaagtgcacgagtcccatagctatactccagctacctaagggtcaagtgccttttacttgccttccttctggtctgcggctctgttggcggctctcgttctgcccttctaggacccctggtccacgccttcccggcagttttcgaggttgtcgcccacgtgggtttggtaaagaagtactaatgtagacgaagggatgctagaaacaattcttttgtcattctatgtatgttgtgtatgatatcattcttatttcttatcatagacattggcaaatggcaattttagtttgttggacaattttgtaattattattattatttttctaatttttggtttctcggatattattggctggaacaacctttgtggaactagtaggtccaatccaagataaatatctatttatctccttctttttttaatttgaagaagcatattagtgtctgtgtgtgtttcagttagggtatttttttttttgtcatataaaatagtactaacgtgtatgttgaagaataacatatagtgtcttaagattgaatcaagaaatagcctagtaataat

SEQ ID NO: 141071 - DNA, 2151 bp, Glycine max
  unsure (1)..(2151): unsure at all n locations
  Clone ID: PAT_MRT3847_9839C.1
gaaaagatgaataagatttttgcaatgtctgaagaagaaattatgtcagaccaagcaaaggtcattatgaagaaatctactaacttttgttggccaagtattcaggacctgaatgcagctgcccacaaagaaaaatgtgggtggtgctttacttgcaaaggtgaaaatgaagacagggattgcttgtttaattctgtggtgaagcctatttgggaagtgcctaataatactttagttgggcttcaacccaggaagatccagaatggacgtcttagagatatcatatgtcttatcttctctcttgaggttcgattacgtgggcttttgttgggtccatggttgaatctgcatcaaactgatctttggcataaggatcttttgaaggcatctgattttcttcctgttaaacgattattgcttcttttagaatccaatttgcggcttcttgcactttcagcagattggttaaagcatgtggattctgttgctacaatgggatctgctacacatattgtggtcagttcatcacgcacatcttcaaggcatggtattggaaggaaaagggccaggaactcagatattgaaaccagttcatcttcaaacactgctagtggtttgggaatgtactggtggagaggtggcaggctttcccgcaaaattgtttaattgtaaggctttgcctcattccctggttaccaaggctgctagacaaggtgggtgtaggaagataccaggcattttatatcctgagaattcagattttgcacggagaagcagatttgttgcctggcgagctgctgttgagatgtcaacaagtgctgagcagcttgctttacaggttagagagctttattcaaacataaggtggcatgatattgagaacaactattccccatatgtgttggacaaggaatctagaaaatcagtcaggctgttcaaaaaatcaatcgtacgcaggaagtgcactgaagggggatctgtgaaattccctattgattttgggaaaagaagggctattccagatgttgttattaaacatggttctttgttagaacaatctgctagtgagagaaaaaaatattggctggaggagtcttatgttccattgcatcttctaaagaattttgaagaaaaaagaattgtccgcaagtccactgataagaaacttggaaaaattcttgagattggtagagtaacaagaaattcctcaacaaagggattttcatatttgtttacagattggaaagatctgattgccatcaatgtgggcactgcaacaaagatgttgcaatgagggatgctgtgaggtgccttcattgcaaaggatatttccacaagaggcatgtcaggaaatcaagtggcacaagaaccactggaagctcttattcatgtcacagatgtcaagatgggttgcaagcaaagactaatactaataaaaggaaagttgactcaaaactgcagaagattcaagcaaagaaacgtaaaattgtgccttcagtttgtaaatcattgaatctcaagggcaataaaaaggcatcgagtaataataagattcgacaggtgagatctcgaaacagtaagaatatcccatcaagtatacctcttcgccgttctactaggaaggccaaatcgttgtatatgcatagtcaattgaatggaggacataaaaaaggaaaaaagaatgtgggacgtaaaaagggaaagcaaggtaaaaccaagaaggtgattcctcaaaagtccaaagaaactactggtcaatataagaagtcggaagttactactgcacgtaagaagagaacaaaaatctgtaacagttattggcttaatggtcttcagttgtctagaaagccaaatgatgaacgagtaatgctgtttaaagagaaaaagcgtgttgcctcctctaaagatttctctggctctcttgatcatcctaaatgctgcctttgttgtggaaatgaatgcaccttgaattatattgcgtgtgaaatctgtggagattggtttcatggtgatgcttttggcctcaatgtggagaatgccagacaacttattggatttaagtgccatgttttgtcttgatagaactgctccaantctgtcccatttgaaggttaatgcattgtcttgcactgaaagcatgctgcaattgag

SEQ ID NO: 141072 - DNA, 336 bp, Glycine max
  unsure (1)..(336): unsure at all n locations
  Clone ID: PAT_MRT3847_983C.1
ncgnccttttttttttttttttttttttttttttaaactgcgatgggcacataaataaattgataacgggttttttcaatagcatacctgaaaacaaaccgaattagattcttgagatcaaccctgcttccctagaccacaaccttaaatccaaacaaacagcttattctcttcacaacgtcataagcaaaacaccgatcttaattgcaggcaaattctccctatagaaactggtagtacacctggtccatgtccaggtgccacaaagtcacctgcgagaaactgaggtcacttcacattctccacggaccatacgaacctaaaacaaacagtcat

SEQ ID NO: 141073 - DNA, 1123 bp, Glycine max
  Clone ID: PAT_MRT3847_98400C.1
tgagggtttagagagtgtgcgcgttaccggttctcaacttaaactcaactcaactcacatccgaggctttctcattcattctctgtcgtagttctgcgattcaccactcagttatttttatcgtgtgctcgaagtgaagtctctgaaatttgtgctttctctgtgttcttcgattttggatttggcttctgtcgaattgaattagggtttgtatggcgagaagaagcagcagcgagtctgaggatgacgcgaggaagcgcagtggcagcgaatctgaggatgaggagaggtataggtatcggcggcgcggtgctgagaatggtaagaagagttccggtcaccgtgatgacggtcattcgggggaagaacgaagcggagccaagaggaatggtggaatccgaggtgataggaaaagtacgagtagggacagaaaggaggagtctgagagctctgaggaggagggtcagattgtgaacaaagaaggggttagggaagagaagggagaggatgagagattgcggcgtggagggagagaagatgaaggagatggctggggtggtaggggattctcttccagggaatgaccagggtgaaaggcgggggaagaaggagagtcacagattgcatcatggcgatagatggcgtggaggtgaggaggacagatggagatttaaggattgccacccgcatagtgattcgaaggaggaggatcacagggagctggccaggaaatcagaaagggatagagatagggataggaagcggaaagttgaaaggggtggagacaatgagagggatcgccatgcatgtcatgattcggatgaagaagatgatagggagtttgctaggaaatcagagaggggtagggatagggataggaggcgtagagttgaaaaggatggtgacaatgagaggaaccacagggagaaggatgtgagcaggcggcaaaaagaaaatgggaagaaaaatgacagaaatggaagaatggttgaagatgcaaatcctcgacggggaacaataccaggaggtaacttgaatggtgatgtatctaatttgggcaagagtggaggtgtttacattcccccctttaagatgccaatgatgatgaaagaagttcaggata

SEQ ID NO: 141074 - DNA, 224 bp, Glycine max
  Clone ID: PAT_MRT3847_98401C.1
ggcccactaccaaattttggattattagcggggtgcaacgcacgtaccatttcttgtacaagccattcgattacttattattaacgaaaaaagaagaacttgcaaacatgcttcgcaaacttattgaactaaatataatcgttgctcgtagagactctctacggcacactgacacaaccggagaaagcgctcatgtgtaaaaccctactcgacctaacacgtta

SEQ ID NO: 141075 - DNA, 690 bp, Glycine max
  Clone ID: PAT_MRT3847_98402C.1
ttgcattgagagtggtcaagaatcaaggatgtgagttggaatcttacagaggataagactggagtgatggatatactgaagcttagctacaacttcttgcctggaagattaaagccttgctttctgtattttggaatctatccagaagactatgagatcagtgcaaggcaattgatccaatattggatcgcagaagggttcatacaaccacaaaaaactggaattgcagatacaacagaaccggaagatgtagctgacttttacttggatgagctggtggatcgcagcttggtgcaagtggcaaaaaggaggagtgatgggggtgtcaagacatgtcggattcatgatcttctacgtgatctttgcttatcagaaagcaagtatgataagtttctggaggtttgcacaaactccaacatttttaccgtcagtaataccaatccccgtagaatgtccttccactggaaaccagactcggatgtctctgaaaccacatttaacaaatcatgcactcgttctatgttcatctttggtagggatgctaaaacgtatttagttcctattttgaaaaacttcaagttggctcgtgtgcttggttgtgatatgattcaacaggtttggtcttattcagcctcaagagatttgaagaggatgatccatctaagatacttgagaatagaagtggagcac

SEQ ID NO: 141076 - DNA, 290 bp, Glycine max
  Clone ID: PAT_MRT3847_98403C.1
gggccaaatagggcattggaaacaagtattggttttgggaaaaaaattaatggtaaaaaggaaattttgggaattcaggttttaaaaaaaataaaagggccaaaatccccctttcaaaataaattatttttagcaactaccttaagggactggtattgaaaagcttttgaaaggggggccaaaatggtcaaaattaggggcacagggttaactaaaaacattttggataaaaaacgcgaacaagtttgtttcggaaaaattttaaatcaaccattatctgggacttagga

SEQ ID NO: 141077 - DNA, 283 bp, Glycine max
  Clone ID: PAT_MRT3847_98404C.1
acccttgggcacaacataactcaaccttcccatggccaatggcctcattttgttccacacataatatcccaatcctttgtccaagcaccctcttttctacacctctatccttccattcattccttattttccggctttcatatttgaactgcaccctctcagacactctatttaccctcagtcatctacggacaatcttctcaacctcctcagaccatatttcctctttccccttactataatgataacttagagctcctttttgaaatatgtcatttctgat

SEQ ID NO: 141078 - DNA, 797 bp, Glycine max
  Clone ID: PAT_MRT3847_98405C.1
aaaaaagtcgtttttttattttttttattttcaaccatggctggtgtgaaccccgaggcaggagggtggaaggcttatccttctgttatggagactgctcttgatagtggtgatggaaggagtcatcataacatgagtgatgatgggtcagtggcagtgccatcatctggacagaataaagtgattcctagtccaactcagtttagcatcctctataaggggaaaatgtgtatctatgaaggaattcctgcagaaaaggtgcgtgaaataatgttgattgcttctgtctctgctaagtctgctgaaatgaagagtgggatccgattgacttcattcattcccaaaagcccttcttcttcacagggaaactctactaatttgccttcaccccaatcagtcaagagttccattcgcaggctgcaagatgaatttccactggctcgaaggcaatcacttcaaagatttcttgagaagagaagaaacaggttggctaacaaatccccccatgccttaacaaaaaatgtggttcacaacccagacaagggcttttctcctgacgacacgccagattttggtttgttgaacttgaactttcagaggagggatttcagccccgtggtgctgcctctttaaggcaactggtgttggttctgctctatatgttctggaattgcatgtgcatgcatgtagacccaaagaaactaatataactgtgttatgttctcgagaccatattttatgcctaattagtgaacttgaatgtgtcaactatgacatgaaagttgggttagtttggg

SEQ ID NO: 141079 - DNA, 1067 bp, Glycine max
  Clone ID: PAT_MRT3847_98406C.1
acgaacggagcagtgtgggaccagcacagcctatctcctaagccatacaatacaaaaaagtcgtttttttattttttattaattttcaaccatggctggtgtgaaccccgaggacgcccgccacttgctcctgagccatacaatacaaaaaaaaaaagtcgcttttttttattttttctttccaatcatggctggtgtgaaccccgaggcaggagggtggaaggcttatccttctgttatggagactgctcttggtaatagtggtgatggaaggcgtcatcataacatgagtgatgatgggtcggtgatgcatttctctgctacaaggtcagtggcagtgccatcatctggacagaataaagtggttcctagtccaactcagtttagcatcctctataaggggaaaatgtgtatctatgaaggaattcctgcagaaaaggtgcgtgaaataatgttgattgcttctgtctctgctaagtctgctgaaatgaagagtgggatacccttgacttcattcattcccaaaagcccttcttcttcacagggaaactctactaatttgccttcaccacaatcagtcaagagttccattcgcaggctgcaagatgaatttccactagcccgaaggcaatcacttcaaagatttcttgagaagcgaataaacaggttggctaacagatccccttatgccttaacaaaaaaagtgattcacaacatagacaacaacttttctcctgacgacacgccagattttggttccttgaacttgaactttctttaaggcaactagtgttggttctgctctatgtgaagtggtactttctggaatagcatttgcatgcatgtagaaccaaagaaactaatataactatgttattgctctcgagaccatattttatgcctaattagtgaacttgaatgtgtcaactatgacatgaaagttgggttattttggattataatgcgtagaaaatattcattatgctcagaaaacctgccccttttaaatgttattcgtagaccttaatgtatttggacaaattgattatcgattgtgttgtaacatc

SEQ ID NO: 141080 - DNA, 1700 bp, Glycine max
  Clone ID: PAT_MRT3847_98407C.1
aggtcattttgcgctttatttggccacgcgtccgcaaagaacaccaccactaagttgttatcttgtcctcaaatgtgccatgaaacaaggacaaataaaaaatcccatgtttctgaagttaccaaagtagaaatgggaaaaagacaatctttgcgcaacaaagccacccatctcgtatctgtccttctcaaccccatctccgattccgacactttcaatcccaaaacctccaaacacccacccaccaacaccaacacctacacctccttccggagaagtaggtgtgatcagagacaaatgatgaagagggtaaccgtggtttagttgatgggcctgatacgtaatccttcactgcgttcctctattccttattgtcttcctctgacactggagataatgcaaactcacgcgtgcagagtgatgataataaatctgctgcacctgatcacaaccctttaccagactcatcaacgctgaaggaaaatggtgggaggaagagtttgatttctagaagcaagcaatcgcttggtaaggctattcgcagaatcggtggatttcgccatcaggatcgctgggataatcttgaaatgaaattggatgatgggaatggttctaaggtttctggtgctgttgagatgaggagaattgagcctgtgactgtgcctttggttgatcttccagaaatttctgaaccttcagttctcctttcagatagtataaggaatgttgtctatgtttctctcccgccacttattcatggaaggaaatggctgttgttatacagcacttggaggcatggtatatcactttctactctttaccggagaagcatgctttggcctggattgagtttgctggttgtcggagataaaaaaggagcagtatttggctgtttagttgaagcacctctcagatcatccagcaagaaaaaataccagggaacaaacaatacgtttgttttcacaaatatctctggtcatcctgttatatatcgtccaacaggagtaaaccgctttttcacactttgcaacactgactacatagcaattggtggaggaggtcattttgcgctttatttggatggtgatctattgaatggttcaagttcagtctcggaaacgtatgggaatccatgccttgcaaattctcaagactttgaagtgaaggaagtagagttatggggctttgtatatgcttcaaaaaatgaggaagtacttgcaatgagcaaaacagaagcacctgggatctgccgattctgaatatttacctgatgtgtgaatcaaatggcttgcagttggcatttcattgaatggtcacttttcctctggcctctagtgaagttcatatgacaacaatataatggagagagattttatgtatccaattatgttctgactaagcaactaacatatatgtaaatatttaccaagcctgtatatattggagtacctacacatatataaatagtttttttttttttgccaattttgttcagaataaaaggtggagcaagtttgtattcttaaagcagatgatgaaagaacgtgaaataaccctatgaccttacgtcccgacactgtagttttactatgctgtggagtcctttaatcttaattcgtatacgtagtttgaaaaataaaggctaaatgaatttgtaagttcctgtattatttaacaattttaaacatgtcaatactttt

SEQ ID NO: 141081 - DNA, 693 bp, Glycine max
  unsure (1)..(693): unsure at all n locations
  Clone ID: PAT_MRT3847_98408C.1
ggcaaaaaaaaagaaactatttatatatgtgtaggtactccaatatatacaggcttggtaaatatttacatatatgttagttgcttagtcagaacataattggatacataaaatctctccattatattgttgtcatatgaacttcactagaggccagaggaaaagtgaccattcaatgaaatgccaactgcaagccatttgattcacacatcaggtaaatattcagaatcggcagatcccaggtgcttctgttttgctcattgcaagtacttcctcatattttgaagcatatacaaagccccataactctacttccttcacttcaaagtcttgagaatttgcaaggcatggattcccatacgtttccgagactgaacttgaaccattcaatcttccagtagatgtcacaaatgcagaaggggttaaaaaccaaaaccataatcaaaactcaagctgatgatattattgatggaagcaagactataaatataaacagtgtaccatataagaactcttaattattatgagaactaagaatgataaatatagatcattagatcaataatcaagaataaattntttttttttaagagttcatagatgactactaacttttaatcttgaccatctatatatagtcgtaaggtatagattcataattctaacattctttaaaataaaaaaaaaatagca

SEQ ID NO: 141082 - DNA, 326 bp, Glycine max
  Clone ID: PAT_MRT3847_98409C.1
tttttcttcaaatctttatatctcatctaacggtgcttgctctttgagcatcctgatttcttctttgcgatgcctgcttgctctgtctacttctcgaagccttgcatcatttctccatttctcttgctcttcctgccatcttctgtcctctttactgtcccattttttaaaaccttcagttccatacacggtctcctgtttcttttgcttctcgaaattccacaatccaacaattcttttaaattgtggtgagttgaagtccaagtgttatcaccaggactgtccagatccaaatcaataacttccttcgtacgttttaaaacaaa

SEQ ID NO: 141083 - DNA, 269 bp, Glycine max
  Clone ID: PAT_MRT3847_9840C.1
tacggctgcgagaagacgacagaaggggaccctaacaggagagataacatagatagttgactactggtataatgctattatttcttgggtggcattgctactaagacctagcagttcattattgtcagcaatcatcattattcattacagattaaatcaagtttcccctcagtcatcgaaaattgattatccaaagcaatcttctagttcaaaatccaaaaatagataacacaggaaatcttaagtataagatccaaaaaatgaaaaga

SEQ ID NO: 141084 - DNA, 503 bp, Glycine max
  unsure (1)..(503): unsure at all n locations
  Clone ID: PAT_MRT3847_98410C.1
ggcatcaattagattaagttttattatttcaaatgggttacttaggacatttttttaataattaaatgggttggtttgcaaacttgtcgaccaaacccatttaattcgcaggcaaaacgagctaggaaattgttttgtgcagctaccgtttattcttgtacatccaacatttttcgttatttccaatattattcatggcaaatctaaatgggtgcgcaaagcaattcccaacgagctatcgtctataagcctgtatttaaatgggccgacatcaactggctcaggcctgtacgagcagcaagttaagagcactgctaggtgcacccagtagttttgctggtgcacccagcaattattgggaaaagtcctttaagcccctgagtattttttttttaaaaaacaactctctcgcctttctctcccatgccgcgaattagcttcttctttctcggagntctgcttcttcttcctcggattctgctgcttcttcattcgtctgcttc

SEQ ID NO: 141085 - DNA, 1506 bp, Glycine max
  Clone ID: PAT_MRT3847_98411C.1
atgggaaaaagacaatctttgcgcaacaaagccacccaccttgtttctgtccttctcaaccccatctccgattccgacacttccaatcccaaaacctccaaacaacacccaccagcaccaacacctacacctccttccggacaagtaggtggatcagagacaaatgatgaagagggtaaccgtggtttagttgatgggcctgatacttcatccttcactgcgttcctctattccttattgtcttcctctgacactggagataatgcaaactcacgcgtgcagagtgatgataataaatctgctgcacctgatcacaaccctttaccagactcatcatcgctgaaggaaaatggtgggaggaagagtttgatttctagaagcaagcaatcaattggtaaggctattcgcagaattggtggatttcgccatcaggatcgcagggataatgttgaaatgaaattggatgatgggcatggttctaaggtttctggtggtgttgagatgaggagaattgaacctgtgactgtgcctttggttgatcttccagaaatttctgaaccttcagttctcctttcagatagtatacggaacgttctctatgtttctcttccgcctcttattcacggaaggaaatggctgttgttgtacagcacttggaggcatggtatatcactttccactctttaccggagaagcatgctttggcctggattgagtttgctggttgttggagataaaaaaggagcagtatttggcagcttagttgaagcacctctcagatcatccagcaagaaaaaataccagattttgtacagggaacaaacaagacatttgttttcacaaatatctctggtcagcctgttatatatcgtccaacaggttaataacataagatttcccttcggttcggtgcacattttgaaaaacatgctgaaactagcttataaaatgctgctttccttgacttgcttaaccacaatatttgcaggagtaaaccgctttttcacactgtgcaacactgactacatagcaattggtggaggaggtcattttgcgctttatttggatggtgatctattgaatggttcaagttcagtctcggaaacgtatgggaatccttgccttgcaaattctcaagactttgaagtgaaggaagtagagttatggggctttgtacatgcttcaaaatatgaagaagtacttgcaatgagcaaaacagaagcacccggggtctgccgattctgaatattcaaatggcttgcagttggtatttcattgaatggtcactttccctctggcctctagtgaagtgagcaatgcgaagttcatatgacaatataatggagacatattttatgtatccaattatgttctgactaagcaactaacatatatgtaaatatttaccaagcatgtatatatggagtccctacacatatactgtatatagttttttttttttgccaattttgttcagaataaaaggtggagcaagtttgtattctt

SEQ ID NO: 141086 - DNA, 391 bp, Glycine max
  Clone ID: PAT_MRT3847_98412C.1
ccagtcgtacgtacagatccaagaggcctccttaagggggagcaggattgaacagcgatgagactggctcccaacgctgcaatcttttagactgagctatgctaatcaccactgcaactgattctgtgtattgctgatgataatgtacttggtatgaactcttacgtggactcatgctctcatgctgaacacatcatcgaagaacatgtcaatcttgtgtacaaacgctacaagaacactgctctctcccggatcaaactcatcatgcatgactgggctaatcagagttgtgatgctgcactgtggctggactccacacgaaggagctcttatgagaatgatacacatagactctttgatatgagagattctatgtacattgagaccatca

SEQ ID NO: 141087 - DNA, 787 bp, Glycine max
  Clone ID: PAT_MRT3847_98413C.1
cggtccggcggctcgggtcgacgggtcagtccaaacagagcgcagaaaaataaaaaggtgaaacgaatatcgatttcaattccgccactcaactccgacaccaaaaaaccattccaacgaagaagagagttagttagttctgagtgagtggttcctctcaagaagcgtccagcgtagtaacgctgaggaccttcactctcaagttttcaaccgtttgttttctatataatatccctaaccgccgtggatgggacaatctgtttcctccgccgccgtcgcaagccgtcgtgagagggatccaggccacctctccgtcaacacctccaagaccagatccaccgccttgattacgccgatggccggttattcctccggcgccggcgaagacgaaagcgaaaaccgtcgtggcgaggccgttactgatgaaaccaccgactacatctccgatctccctaacgagtgcctggcttcggtgtttcagtttcttagctccgccgatcggaaccgctgctcgctcgtttgccggcggtggctccagatcgaaggacagagtcgtcacaggctttctctgaacgcggatgaggatctgtttccagcgattccgtcgctgttctctcggttcgattcggtgacgaagctcgcgttgaagtgcgaccgcagatccgtgagcataagcgacgacgcgctcgtgctgatctcgcagcggtgccctaacctcacgcgcctcaagctccgcgcgtgccgcgccctcaccgacgctggaatggaagcgttcgcgaagaactgc

SEQ ID NO: 141088 - DNA, 499 bp, Glycine max
  Clone ID: PAT_MRT3847_98414C.1
gatatccatctttgcttatttttttctctcccaacatttccagagaatgaaatcaaaatatattaaagagtagcttatatatttgttactttttcttttttttggagaaaatatatatatatatttgttacttattagtaagtcaatgtcaaacatgagacacccctcggttgtatgaaatgaaggagatgttacaagacccaaaaggttgattcaatagctcattactggaaataatcatatggtaaataatatatttttgttctactgactccctaaaaaattttatatcagttaaccaggtgatttcatttctgactgccaaaaaaagttagccacgtgatgccacctgaaaacattactgatagttctaggaagttgtaaatttacagcttatgctttcttaacaaaatatagaaatgctaaaaaaaaaacttatgctcttgatatttttgccttaagagaaaacctatctcattgataaacaattaattttttt

SEQ ID NO: 141089 - DNA, 345 bp, Glycine max
  Clone ID: PAT_MRT3847_98415C.1
gccacgcttacgggcgaagcgaggacacgcaggatcggcgggaaacaagatccgcatgtcgctgggtctggcggtggcgcgtaccgtgaactgcgcccacaacacctgctcgaagaacctctacgatctagtggttgatgagatcagggaccggctgaagccagtaccagcagactgcgtgtgagacatgggtattgccaccggaaggaagggactgcgccatatacggaagaaggcgctgcctgtcgatattatccgccagcgcaagtttattggcacaacggactgagtcttcacgtccttccaagatcatgctggagctatcactgatcccaccggtgaaat

SEQ ID NO: 141090 - DNA, 356 bp, Glycine max
  Clone ID: PAT_MRT3847_98416C.1
acgagacactgcagtccatggctagaatgggaagtagggaagggtatgttaaagtcctgggctgcgcggcgggcgaatttgatccggcgtattcgtacaaaggacccgtgatgatgctcgacatgaagtaacagatcctgagatatatagtggatcactatcgaagaagccaacatcattaacgtgaagctacagtgatgctaccgtatccaatgcatatccacctgcagatttccactacctcggcaaccattatatgcagtgctaccgcgacatagatttgagcatggacggtctgcacccatttatccacgctgacaaggatgaccctgttgagtatgaatgaccttactgtg

SEQ ID NO: 141091 - DNA, 445 bp, Glycine max
  Clone ID: PAT_MRT3847_98417C.1
ggggatggaggtcgaattataatttacataatttttacaagcggggaataataaataaagggcccgttaaaaatgcaaaaagccttgaagcttgagacattaaacggggaacaaagatgaaacttggaggggccggacccacaagtgaataaaacaagaagtcatttttttcaagttgaagctcaaggggaggttttaaagggtgggacagccccatatgaaccaatgaagaccttttcataaattaagccagccaaaccttctccaataaatgggcccacccaatagatccagtttgcagggaagttttcactgaccacagttgggcccaatgagcgagctgggtttattgaaccccccctgaatgggcctgcttctaaaatgttggcccccacaacgaacccaatagcaaggggggcaatgaaacccaaagaccccttttttg

SEQ ID NO: 141092 - DNA, 1380 bp, Glycine max
  Clone ID: PAT_MRT3847_98418C.1
gaaatctcttggagtttgacaaataggagatacactgagaaatgtgtttcctatgctgaaagccatgatcaggccattgttggagacaagactgttgcatttctcctaatggatgaagaaatgtattctggcatgtctagcttggttgatgcttctcctattgttgagagagggattgctcttcagaagatgatacacttcataacaatggcattaggtggagagggctaccttaatttcatgggcaatgagtttggccatccagagtggattgatttcccaagagaaggcaatggatggagttatgagaagtgcaggcgtcagtggaatctggtggatacagatcacttgagatataagttcatgaatgcatttgacagagcaatgaacttgcttgatgataaattctcattccttgcatcaacaaaacagattgtgagcagtgcagatgatgatgacaaggttatagtctttgagcgaggagatctgatatttgtattcaattttcatccagagaatacatatgaagggtataaagttggatgtgacttacctggaaagtatagagttgcattggatagtgatgcttgggaatttggaggacgtggaagagtggggcatgatgtagaccacttcacatccccagaaggcataccaggagtccctgaaacaaattttaataatcgccccaattcattcaaggtcctctcccctgctcgtacttgtgggccctattatagagtggaagaaagtcaagaagacgacgataataacagtttggttggggtagaagagacttctgctgcagcagatgttgcaaaaattcctgatgaatccgcttctacagaaagtgaagatatcaaattggatggggtgaaagagacattagctgcagcagatgttgcaaaaattcctgatgaatctgcccctttagaaagtgaagatagcaatttggatgtggtgaaagagccgttagctgcagcaaatgctgaagttacaaaaatttctggtgaattggtttctgtagaaactgaaggtatcaatttggataagttggaagagacaatagtagcagcttctgttgaaagtgaggtagttcgagacaaaccagaagatgcagccaactgagaatcttttttccttgtgaatattaagtgttttcttggcttcaagagcatgaaaatccagctggtggataggcaggcttttggatatcgttgaataaattttggataaatgttcgtcaaattatcgtcgtgtatgtatattatacatattatctagaagatgcagacaactgaaaatcttttttagttgcgaatatttatcatattatctggaacattgtcatataatagtatccaatcccccctgcaaaaa

SEQ ID NO: 141093 - DNA, 240 bp, Glycine max
  Clone ID: PAT_MRT3847_98419C.1
catcgacagcatgaatttctccgatcgcaaagttgttttggagaccagcagcagatcgtggaatgttcatttaaggaccttctactccatcgctcaatacgttggtgcgacgatcgttttggcgggtctgggagtcagcatgagcgggaatttcaaaaaaggtgcgaccagcggcggcagcttcctcttcgaattgatattcttctccgcgacgatccctactgccatatcgggcgtcta

SEQ ID NO: 141094 - DNA, 1362 bp, Glycine max
  Clone ID: PAT_MRT3847_9841C.1
ctggcttctccgccgcccgcgctcgccggaaaattttaccacgaattggatcaacaatgagtgctccatcgcgagaagaggagtcgaaggaggaggagagggacgaggaagcgaaccggcttctagaagaagaagaagaagcagaatcatcatcagaagagggggagaagatcctggtggcggatttggagttcgacagggtggacgatgggagcgttcctcctcctttctcgtggaagaagctctggctgttcacggggcctgggttcttgatgagcatagcgtttttggatccagggaatctagagggggatctccaggctggggccatcgcgggctactcgcttctatggctcctcatgtgggccaccttcatgggcctcttgatccagcttctctccgccagggtcggcgtcgccacgggccgccacctcgccgagctctgcagggacgagtatcccaattgggcccgcctcgtgctctggttcatggccgagctcgccctgattggcgccgacattcaagaggttattggaagtgccattgccatccaaattctcagccgcggcttcttccctctctgggctggagttctaatcactgcttcagattgctttttctttctatttcttgagaactatggagtgaggaagttggaagctgcttttgcggttctcatcgctgttatgggtctttcttttgcctggatgttcggtgatgctcaacctaatagaaaagagcttttaatgggtattttggttccaagactaagctcgaaaacaattcgtcaggctgtgggtgttgtgggttgtgtcattatgcctcacaatgtattcctgcattctgctttggtgcaatcaaggaaggttgatcctaaaaagataggtcgggtgcaggaggctctcaactactattcaattgaatcggcggcggcacttgcagtctccttcatgatcaatctatttgtcacaacagtttttgctaagggtttttatggaacaaaacaggcagatagcataggattggtcaatgcagggcagtatcttgaagagaagtatgggggaggagtcttccctattctttatatatgggggattgggttattggcagctgggcagagttacaccatcactggcacatattcttgccaattcataatgatgggtttcctcaacctttgttttaagacatggtgagagcattgatcactcgatagttttcaatagcgccaactataattgtagcgattgtgtttaataaatcagaaggctcattggatgttttgaatgaatggatcaatgtgcttcagtccatgcaaataccctttgctctaattcccctcctcacattggtctccaaaga

SEQ ID NO: 141095 - DNA, 324 bp, Glycine max
  Clone ID: PAT_MRT3847_98420C.1
cgagaatagttctgtttggaatttttctgaactggcacaacccatctttgagagccatgtgccaatgctctttcttccttcttatgtcaatctcaatcactactattatgactctttcacgcttttgcttgtcgatttttaaaccctaaatctatctatctgtctaatggataggatcgggcaaaaacaaatcatagcaaaatataaccctagccatagtaagacctggttgagcagctgctgcagagagagcgaggcttatggaaggagttccggacccaatacccagaactgtcgaagaggttgtcaccgattttaagggca

SEQ ID NO: 141096 - DNA, 137 bp, Glycine max
  unsure (1)..(137): unsure at all n locations
  Clone ID: PAT_MRT3847_98421C.1
agaacntgannggtgttcgangtcagcnttaatcagcttnttggtcccataccgaangcantntagaannngnagttagcttggagcagntcaatgtggcgcataacttgctctctggtcaaattccagntagcatt

SEQ ID NO: 141097 - DNA, 460 bp, Glycine max
  unsure (1)..(460): unsure at all n locations
  Clone ID: PAT_MRT3847_98422C.1
ggactagtggcagcagtaatattatatcttaactgattgagttaagcacaagctgaaacatcacatccagatactacctactaaaaggacagaggggaaacagggctgtgcaaatgccatcaatcaggaaggtgatggccagagaaccattatactgaaagcttctgtggctcatggctagcagaactgaattggcatgcataagcagtggtgtacagacggttagattcggccatatcactctcctcgccttccactcctaaaaactgagacgtctttccgctcgaacagctcctttcagagagcaacttctcttcggataaagccttctcgagcctctcctcaaatggcgttgcatgccaactcacctttttggtcttctttgtacttatttgntgaattgggaatgccatttccatcccgcaatttaaaggtaaaatttgctggcagtggcacctta

SEQ ID NO: 141098 - DNA, 272 bp, Glycine max
  Clone ID: PAT_MRT3847_98423C.1
ctgcgggttgacgacagacgagtgcagggtggatatgcaaacttaaacaagttgattctgtttgagttaggacagatgaggagtatttgggcgtgagcgaaaaatctctgcgctaacctgtttgcttctgcggcgttatgggactgtaattttgaggtctagatatcacataagggcctactataatgagtggccgaaggataaaattgtgccctaactgctactctggaggatgggatacattatgcttcaaggactagaggatggcgacg

SEQ ID NO: 141099 - DNA, 369 bp, Glycine max
  Clone ID: PAT_MRT3847_98424C.1
tttttgggtttttttttaagcagggaatggcgggagagatactgaacactagacagaagctcctgcttttattacattaaaccgaaacttgactggccttctatgagctattacaccatgcgttggaggacatacttaattttatgaaaagccctcgtaaatgaagtagagggaccctttttttccttgaacccctaccctttctttttagggagaccgttgggaagtccgattcactttggctcttttatactataggaacagcctgagcataccgcaggaaagcaggcccccgcccgtggctaggtttctggttgatcacattgtctggcaaaccttacacgaattgcccctggttattcccggacc

SEQ ID NO: 141100 - DNA, 594 bp, Glycine max
  Clone ID: PAT_MRT3847_98425C.1
ggacttggactccagagaagaggaaaaactacaaccttcttgatgcagtgagcagacacacaatgccagtgttcccgaaatcgtgggcggcgattctgttatcattcgataacgttggggtgtggaacttgaggtccgagcttgctgagaatcgctacttgggacaacaattgtacatcagtgttctaactcctgagcgttctctgagggacgagtacaacatcccggagtacgcgttgctttgtggcgtagtgaagggtctgccaaagccagagccatatcactgatgttgggccactatgaagggcctatagactatatatatatatgccatcagaacgtggagttctttgtgtggtgatctttttttatatggaatagtagagaagaagaataataacgtagggccttggggcatccagtttgttgaccggattgtggtcaactcgtttagaaatataagcaatttgttcttgtttcttgtttgtgggtgcatgaatcctacaattttacatttaaaaaaattgtactacttttttcttaaactgttgttgatttttcataaaaattattcatttgttgtcaaatcgagcc

SEQ ID NO: 141101 - DNA, 204 bp, Glycine max
  Clone ID: PAT_MRT3847_98426C.1
tgtaaaaaaaaatttttaaaaaaaaaaaaaaaaaacaaaaaaaaggggataaaaaaaggggtggtgcggttggcctaatgactgatatggttgctgaccccaacaaatttaaggcttatagccccatgttggctcccttggaagagatgcaggaaaccatgaaatattaactttcacaatttgaacctactacagcttggtcta

SEQ ID NO: 141102 - DNA, 134 bp, Glycine max
  Clone ID: PAT_MRT3847_98427C.1
cccacgcgtccgatggcgcttctgaagaggagattgctagtgctacattcgagaagtggattgatggacatgatttcagcaatagatagtctggctgcagaggaaaacacaaatcctgacacggagattataac

SEQ ID NO: 141103 - DNA, 325 bp, Glycine max
  Clone ID: PAT_MRT3847_98428C.1
ctcatacttcctattactcgttcttctgatgaacccacaaataaaaacggggcttttacaggcgaagttttctccataaaccctagaataaacgaaccgaccgaccaagcttgaacctcacgtggaaaaaaaacactgatttttccatctccgagggtgtcgagttagagcatacccatgttggtctctcacggaaatagatgattttacataacataggggtaacgcttcgctcgtggggacacatcgtaggagggaaaagtgactagcacaggggatgaatcgtgggatgcaagttgagtatgcatgaaaatgggacgacgat

SEQ ID NO: 141104 - DNA, 2740 bp, Glycine max
  Clone ID: PAT_MRT3847_98429C.1
atgggtatggtgtatcagcagattcatgcttgccccaatgattgcatgctctacaggcatgaattccaagaaatgtccaaatgccctgtctgtgggacttcacggtacaaagtgaaggatgaagaggaaagcaattatgatgaaaactccaacaagggccccacagcgaagattttgtggtatcttccaatcattccaaggtttaagcgtttgtttgctaacgaggacgatgcaaaagaccttacatggcatgcaaatggaaggatttctgatggaatggtctgtcatccggctgattgctcccagtggaagaagattgatggtttgtatccggatttcgggaatgagccaagaaatcttagacttggactagccagtgatggaatgaatccatatggcaccttaagcactcaacacagttcatggccagttctactagtaatttacaatttgcctccttggttgtgcatgaagcgaaaatacatgatgttgtgtatgatgatatcgggcccaagacagccaggaaatgacattgacgtttatctaagtccgttggttgaagatctgagaaagttgtgggacgagggggttgtagtgtttgatgcgtttcgcaaagagacgtttgaaatgcgtgcaatgcttttttgtaccattaatgactttccagcatatggaaatctcagcggttacagtgttaagggtcatcatgcatgccccatctgtgaagaaaatacaagttacatacaactgaaacatgggagaaaaacagtctacagtaggcatcgccgctttctaacacccaatcatccttacagacgactgagaaaagcttttaatggaagtcaagagcatgatattgcgccgataccgttgactggtgagcaggtatatcagcgggttcaacacctgaacactgtatttgggaagacccaaaagaaggataaaagtgagagttgcatatggaagaagaggtccattttctttgatcttccgtactggtgtgatcttgacgttagacattgtattgatgttatgcatgtggagaaaaatgtttgtgacagtgtgattgggacgctccttaacattcaaggcaagacgaaggatggcttgaatacccgtcaagatctagctgatatgggtataagagcacagttgcatccaaggtctgatgggaagaaaatttacttgcccccagcctgccatactttgtccaagaaggagaagataagtttttgtcagtgtcttcgtcaggtgaaggttccacaaggatactcttcaaatattaagagccttgtgcagttgaaggagcttaagcttgtagggttaaagtctcacgattgtcacgtgctcatgcaacaattgttagccgtggctatacgagacatcttgccaaacaaagtcaggttcaccataactcacctgtgctttttcttccatgctatatgtagcaaagtgattgatccagtaatgtttgatgagttggaaaatgaggccgcaattatactgtgccagttggagatgtattttccccctgctttctttgacatcatgattcacttgattgtgcatctggtcagagaaatcaaatgttgtggtcctgtttatctacggtggatgtacccgattgagcgatacatgaagatcttaaaagggtatactaagaatctatatcgtccggaagcatctattgttaagaggtacattgcagaagaagccattgaattttgttcagaatacttagaaaaggctaaagctgttgggcttcctgagtgtcggcatgatgacagagtgggtggtaagggttcaagaggactgcaggtgatcactccaagtgtagaagatttgttacaagctcacttgtatgtcttgaacaacagtaatgaattttttccatacatagttaagcatgaagctttagtcaaacagaataatccgaaaatgtcaaagaattgggcgttgaaaaagcataacaaaactttctgtgattggtttaaagatacaatctttgcagatgagaatgcttcagaaacattaagaaaactagcagatgggcctaaaagaaatgttataacctggcaaggatacgacataaacaggtattcattttacacaaaagcacaagatgacaaaagtacaatgcagaacagcggggtcaccctaagggctgaatctcaacactttgcaagtgtcaatgacgccaatccctgtgtagcttccatcccttactttgggttcattgatgaaatttgggagcttaactatgtcaaatttaccgtatgtgttttcaaatgtaaatgggttgatagcaacaccggtgtgcgcactgatgatataggatttacgctggtagacctaaagaaacttggttaccacaatgaccctttcatcatggcagaacaagctagacaagtattttacgtgcaagacccttgtgatgaaaggtggtgcgtggttctgcagggcaaaacaattggtgttaatgtagaagatgtgattcatacatggacacctatgttagtcctttgaccgctcaaatcactcctaacattgtcggagaagaagaagttgacgacgttcatgcaaatcgaaatgatcatgatgaaggagaattgattaacatcatctaatgtaattttctatttatatatttcattttcctagatggattttcacaaaccaatactacatttgtattcaaaacatgcatgtattgaatgaaagctttgataatggaacttat

SEQ ID NO: 141105 - DNA, 667 bp, Glycine max
  Clone ID: PAT_MRT3847_9842C.1
ccacgcgtccggcttccacaacttcaaccccttcggtgggaactgggtctcaaaaccccccaatcccctctctgtcccttccctccccaacaacctcaccgacgcaccctcctcccttcctcccaacttcgccgcaatctccctcccaaaccccttccgccgcaggcccaagcccaagcccaagcccgaagagcccgtggagcccgggcactacgaacaactcgcccggcaggtcctctgggagtgcgagaacctcccggaccaccgccacaccccggaggtcgacaagatcctcgctgacaacgacgccgccttcggcggcaacaacgacgactccgtcttcgtcctccgcgaggacgccacggaagaagaagtccgcgagaacgcggagctcgtggagcggctccgcagcagccccgtggtgcagttcatggcacgcgccgaggagattctggacaagatgaacgagatggagctcaaggagaacgagaggccctaccacaaggaggattgggaggtgtggaagaatgtgccgaatgttattgggcttgatgggaggcccatgcccagaaaagcccagaagacccgcgaggaggctgatgataaagtttgggattttgctagacagttcttttttgggctttgggattttagacagaggccctat

SEQ ID NO: 141106 - DNA, 355 bp, Glycine max
  Clone ID: PAT_MRT3847_98430C.1
ttgcaaactgtgtaattgtttgtttgtcacagaaataacagttaagaagaaactctcagttgaaaaattcaaccgcgcttagatttcgttttttctgaatgtggcccattctcttactcgttgccgtggccggatccactggtttcgccaccaaacgcttccttactcgcagaaacaccattgaaggtgaaaacgtcaatctccacgatccaagtgcttttgacttttccagttcggaaagcacttctctgatgcataacaatgatggagtgttcacgttttccagttcaaaatctgaatctctgacacaacaagatggacctgtgagtagacgatcccgtgctttaaatgactg

SEQ ID NO: 141107 - DNA, 412 bp, Glycine max
  Clone ID: PAT_MRT3847_98431C.1
ggctcgagctcgagccgctagttctagatcgcgagcggccgcccttttttttttttttttttttttcctctacttctgtagccaccgggtgagataccgcaacaaccgagctcggatgctctttttctggtttttcctgcactggtgcaacctcagtctgaggctgctcttccacttgggcacttgtttccaaaacttgagcctttatcaccacctctccttctgattctgtcagaggactactctcatgtgtgttgtttggttttacaaccgctgaagcctatgcttctggaacctattctgccttcggatgtgcttgtttcccttcatatggtaccacagggtgcttttctagcttctgagatattggtttcttcacctcttgtttttgggatggagcctgatgaactgg

SEQ ID NO: 141108 - DNA, 276 bp, Glycine max
  Clone ID: PAT_MRT3847_98432C.1
aaatcaacaccctttcaacatcatagtgtgtgttttgcaacaatggcttaattctttgctgctatgatcttcacactcttttccattttcatacttcaaacatttgtaatatcttctaataaacaaaaattccacttttattacaacaatatcaaatatttaattataagtttcaatatttaccaattctcattacaattcttcaggagatttaatcatacccaataccacaaaccctgcatgtttttctatcaaaaattcttcaatacattcttt

SEQ ID NO: 141109 - DNA, 378 bp, Glycine max
  Clone ID: PAT_MRT3847_98433C.1
gacttggtgagatgacattctttccttaattcaggagtgatttttccacttttcttttgttcattgtaatgtgatcgttgccgtcattgctttattatatgcacgggtgaatgctcatattcaatcatatcagaagcccaagttgtacttgactaatattgatcttaatgattgcaactacatgcatcatgggttttcgggaccagatgtcatgtgaaatcttcttgcagctactggtcccttcaaatttcatccaattaagcaaaattaaagaactttataaagaattattatgccatgtctactttttcattactatgggttgtgattgtttaattggcatttggaggctgaagtattcttttaaagaacacaaat

SEQ ID NO: 141110 - DNA, 2280 bp, Glycine max
  Clone ID: PAT_MRT3847_98434C.1
gggatttgcgtttactgatctcaagtcttctactctcactgtcgtagcgtagtgattgtgtcgtttctcttctcagttctcatggggacgatcttgctgctccgaaaaagggttttcctaacatcgaccattccatttccgggctgttcagttcgtgaatagactgttgcttgttttaacatgttatgattacgtcttttctttgtccacgcgcacgcggccacgcgggattatttgtgcgatgatgatgggatgcttttgctaacctaattttcttcttccgggggttctcttacgtttcctatcatacgtatttgcgtttcctgatctcaagtcttactcctcactgtcttatgttattgatcatgggatctatcctctttgatcaggtcaaaacgaaataactggttcttgttatgttgtgcctaacagcgatcaatatttattattttattctattctttattcttattcttgtagttatttaatatttatttgctattagctccaatcaaatgcccaaaaatgagtacgatcgttgaagaagcaaacacatataccgagataatagaaagatggccagtcttttattatggcatgggacacatgctcaatgacataactgctgctttttggttcacatatttattatttttctttacagatattggactttcaccaaggaatgcatctgttgtgatgctttctgggctagtgtgttatgtatttgtcaggatatttgattttgcacgaataaacagggttggacacttagaaatatggcatggtgctgcgatctttagtggttgcaatttcattttcttctgtttttgtgtgttcattaccatgcaaactgtttagttccaaatcaggtacttttgaaactttgtgttacagcatgtatgcagcaatcttgaatgtgggctgggccgctactcagttttcacacatgtctatggtaagttgcatcacgctgaactctgcaagtagagtggcactggctagctgaagcaatgcttataccatgtttgccaacctgtgtcagtatgcaggtgcattgattgttttcatatttatcaatggtcatacacatggtgatctttaaaatcataaaagatcgtgtacaattttttgaacctttaatacatgtttctattaatacgactttcatcttgcatccaaagacacctgattaaccgagggtggaaatggactggtacatgcaaggatttgctgtgtttactggttcaagagaattctatattatcaggttgctcttgtttatgttcttacaagattggttctcaacgtttcacaggcataccttgctttctttgtcatcaatgacctacaaatggcccaatcagccaaagctttggttcctgctctcatatacatctgcagctttgttgtgtctatagcattacaggagattgcatggactggccgaatgcttaaggcctactactctgctggatgcattctttggattttttgtggtgcagtgatccttcttttaaccacaaatatgagttatgtcatgtacatagtatcggtattcattggcatagcaaatgctctcatgatggtaactggagtaagcatgcagaattttctcattggagagaaccttaatggttgtgcatttgttgttggatcattgagttttttggacaaaatttcatgtgggcttgctttatatgttcttcagtcaaaccaaaatctctctccgcagctccaggcaacaacccaattccccttttcagttacaaggattggtttgggtcttgttcctgcattttgtgcactagttggggtggtagtgacttgcaccatggatttccacaatccttcaaagtctttgacggcaccactattagcctagctgtgtcattgatcataattattctcctttctctaacatacaaaggtaaatggttatatcatacttggagaaatttcagctgctcggacccattggaaaattcaagcagcaagtagtactgagaatattcactttatagtttatatatatgtataatcttgtatatttattgaattattaattgttacaaatattatatgtcaaatgtatataacgtgtccacattttattaaaatgtaacattcacagtttcgtgaacttctcgttgacgatctgagaaatggaaaatagttactatgaattatgtgttgcaaaaacaaaaaaccaaagcggcgcgccgcctctagaaggcatcccacagccttacggtacgccggtgcagtgcgtacgtcata

SEQ ID NO: 141111 - DNA, 874 bp, Glycine max
  Clone ID: PAT_MRT3847_98435C.1
cgcgcacgtaagctcggaattcggctcgagctttgcttcattttatttatagagacactctaatagatgatgaagagctctttatgtcacgttcatcattcttgccttcggtttctgaatcatttgcagcaaagttgttagctgctgcagaaaagtatggtttgccaagacttaagctgatgtgtgagtctgtactttgcaaagacatctctatagattctgttgcctatattctggctcttgctgatcgttatcgtgcaacagaattgaagtctgtctgtctacaattttctgctgaaaaccttgtcgctgtgatgcaatctgatggttttgagtatcttaaggaaaattgtcccttgctgcaatcagaactgctaaagactgtggctggatgcgaggaggaatttagtggagaaggaaagtgtcgaagtgtgtgggctcaattttctgatggtggtgacaccaatgataggagtgtaagacaacaaacctgggaaaatggtgttgaaagaagtcaaagcttatgggttcacctttcggatggtgttaacaacaatgataggagtccagggcaagaagcctgacaaggtaaggtaccatcatttgtctgttaggcttaaatggtagattaaaagttactactgcagggataagattaacaatgtaaagaaagaaggctgagatactaccgccattgtaatatgtcttataaatactgtttttctttgataatatgattacaaggatgtagtggcagcaataagtaataacattgatcattgtatgaaagtttgttgggaacattttcatgaagaaactggccatgctttacttggtgtttgtattacatgaagaaatttattttcgggctaaa

SEQ ID NO: 141112 - DNA, 1047 bp, Glycine max
  unsure (1)..(1047): unsure at all n locations
  Clone ID: PAT_MRT3847_98436C.1
aattcggcaccagagtcgatttctctgccttctttgtatagcagtaaaggctaaaaatttgttgaatggcgagtctaccaagagcaaactttggcttgtggatttggcaggtagtgaaagacttgcaaagactgatgtgcaaggggaacgactgaaggaagcacaaaatataaatcgatctctttctgcccttggagatgtaatatccgctctagcagcgaaaagcagtcacataccatatcggaattcaaaactgacacatttacttcaagactcactaggaggtgactccaaaactttgatgtttgtacaaataagtccatcagaccaggacgtaggtgagacactgagctcacttaattttgcaactagagtgaggggtgttgagttaggtcctgttaagaagcaaattgatacaagtgaagttcaaaagatgaaagcaatgcttgaaaaagcacggagtgagtgcagaattaaagatgaatctatgcgaaaacttgaagaaaatttgcaaagcttggagagtaaggccaaaggcaaggatcaaatttacaaaaatctacaagaaaagattcaagaacttgagggacagattgagttgaaaagagccatgcaaaatgactcagagaaaaaaatctctcaattatctgccaaattgagagggaaagaagaaacctgcggtactcttcaacaaaaggtgaaagagctagagaaaaagatgaaagaacaactgcagtcagagtcagcaagttttcaacagaaggtttgggatctagagaaaaaactggaagatcagatgcaagggtctgagtctgaatctgccattttgaaagatagatcaaggagcttgagagaaaactgaaagagcaggaacaaagctcaatgtccttgcttcgtcaacagatgaaggaactgggagacaggtaccgagagcgagagcaacagtggcaacaaactcattcttttgtggatgcagtaaaagcagccacaccagatgtatgtaaaagctgcatgagggaagaatgtncaagtgagattgagactggc

SEQ ID NO: 141113 - DNA, 656 bp, Glycine max
  Clone ID: PAT_MRT3847_98437C.1
ttttacggctgcgagaagacgacagaaggggcaatcagaactgctaaagactgtggctggatgcgaggaggaatttagtggagaaggaaagtgtcgaagtgtgtgggctcaattttctgatggtggtgacaccaatgataggagtgtaagacaacaaacctgggaaaatggtgttgaaagaagtcaaagcttatgggttcacctttcggatggtgttaacaacaatgataggagtccagggcaagaagcctgacaaggtaagggattccgttgggagaagttaacgtgtcatttgtacaggaccaacctgcagggattcctccattgcatgcagtgttgtttttcttttcttttaacgggggatagtggttgactggttgcgaatagtagattcatcttgtaacgttagtgatgtatcttttaacatcaatgaatgctagcaagttaacaaaatgagatgaagtgccaaaacaaaagttcttggttacctttggttgtatctatagatcttttctcttttagggttggaggttgtacaccccgtttgctgaacacaggacaactcatttatgattgctgtagctttaccccgtgggaatcttcatccttgtgaattgtgaaacctatggatcaaattagacttgtatatagccatt

SEQ ID NO: 141114 - DNA, 529 bp, Glycine max
  Clone ID: PAT_MRT3847_98438C.1
gaattcgagctctttacccggggatcctctagagtcgacctgcaggtttcttcttttcctctcaatttgtcagataattgaaagatttgtttctctgagtcattgtgcatggcatcttttcaactcgatctgaccctcaagttctttaatcttttcttgcagatttttgtaaatatgatccttgcctttggccttactctccaagttttgcaaactttcttcaagttttcgcatagattcatctttaattctgcactcactccgtgctttttcaagctaaagccaaaatgtaaaaggaagaaaacattaacttgtattctagaacgtggggaaatagaaaataaatttcaatgtgttcaagtaggatcatcaacctaccattgctttcatcttttgaacctcacttgtatcaatttgcttcttaacaggacccaactcaacacccctcactctagttgcaaaattaagtgagctcagtgactcacctacgtcctggtctaatggactaatttgtacaaacatcaaagtt

SEQ ID NO: 141115 - DNA, 830 bp, Glycine max
  unsure (1)..(830): unsure at all n locations
  Clone ID: PAT_MRT3847_98439C.1
tttcattcctcctctttctctatactatttacgtttcaagtaaaaaacaaaaaaaagttgaaggaaagccaaaactagattagattagaaccaaaccaacaacaaatcatctatctatctcgcgcagatccatttcccttcactttcccgggagaaaaagaaacctccgtttcgcgagaaaccccgtccgtacatggtctgttcacgcggatcgggttgattgaccaccaccaccaccaccaccaccaccatcgcgcgtgagatgcacaccgcgagcaggagcaacggcggcggcgtgctggcgtcgcggacgagttcgcggtcggtgacggagacggtgaacgggtcgcacaagttcgtgataaagggatactccctggcgaaggggatcggagtggggaaacacatcgccagcgagacgttcacggtgggagggtaccagtgggcgatatacttctacccggacggcaagaaccccgaggacaactccgcctacgtctccgtcttcatcgccctcgcctccgagggcaccgacgtccgcgctctgttcgagctcacgctgctcgaccagagcgggaatggtaagcacaaggttcacagccacttcgatcgctcgctcgagagcgggccctacactctcaagtatcgcggcagcatgtggggggtatagagatttttcaaacgggctcaacttgaggcgtcaactttcctcaaagacgactgcttgaagataactgcactggtgggnggtggtgggtgtcgtccattgattgttcccagttaacacaatacaggttcccgagtctgatattggggcacattttcgggat

SEQ ID NO: 141116 - DNA, 323 bp, Glycine max
  Clone ID: PAT_MRT3847_9843C.1
ttttataaaatacataataagatatggcatgcgaggcttatttccttttgggcctgagagctctagttcttggtagcactttcaaagttacaggcgaattagaagcacatacagattcaactgttattgacattgcactcaaccggaacagatttccagaagggttcatattcggggcgggatcttactagtaccacctacaaggtgcatcacatgatggtggaagaggaccaagcctatgcaaggcattcacccataattatcctggactgatcattgatggaagcaacggtgtacggtcaattgactcatatcaccactac

SEQ ID NO: 141117 - DNA, 136 bp, Glycine max
  Clone ID: PAT_MRT3847_98440C.1
aaatgtagctatcagatcttagctacatatctgtatatactacctagagggcgcgagactgacaagtaggagttcagctatgagtcctatatcctatagagctggtaaacagcattagcataaagtacaagggcat

SEQ ID NO: 141118 - DNA, 860 bp, Glycine max
  Clone ID: PAT_MRT3847_98441C.1
ccacgcgtccgaacctacctctttttcttctctctcaacaacttcaccttcttcctcctcgatcatgtctcacttcaagggcaagtaccatggtaattctctctctctctctctctctctcttgctttgatctatcttagtagtaatcgggactttctatatcttgttgtttcttgtttttatctgctgatccggcttttctttgttgtgtttgtttgaatcaatttgaatttgtctgcgttgatttagatctgagaggttcagatctggctttctatggaatttttttatgaaaaactagcgtgcgactgtttatctatgtgctcttccaagggtttttgttcaaatcatcaagttagtccatgaagtatcactctatttcctaaatagtctttgatttaatgaaattatgtaagcagtaccttaaagtgtttaatatccatgaatttagtccctgaattgatgtattctgctaacattgagagattaatttgatgaatttttcaaatcttgaaggattgtcacataatttctaatactttagggactatttgtataatctcattagtttaaggactatttagggatcaaattgatagattattcgtttttgttttagtcatagaattttgcatcacgattgatattcctttgtcttcaacttcttttaacctcacatccttgttcaactgatgaaggttcaacatgttgctaatttattttgttcatatatacttgggtttggcttttttttatgtttcttttttgggatttttttttaattttggtgtggttaatgtttgtgtggtgctgtgtttataattgatggcattgcttgcacatgagcttatcgcccatgc

SEQ ID NO: 141119 - DNA, 2229 bp, Glycine max
  Clone ID: PAT_MRT3847_98442C.1
ttagataaagccacattatattgatggtttaagggctatatacaagtctaatttgatccataggtttcacaattcacaaggatgaagattcccacggtgtaaagctacagcaatcataaatgagttgtcctgtgttcagcaaacggggtgtacaacctccaaccctaaaagagaaaagatctatagatacaaccaaaggtaaccaagaacttttgttttgtcacttcatctcattttgttaacttgctagcattcattgatgttaaaagatacatcactaacgttacaagatgaatctactattcgcaaccagtcaaccactatcccccgttaaaagaaaagaaaaacaacactgcatgcaatgaagatcagattatagcccgaaaataaatttcttcatgtaatacaaacaccaagtaaagcaaggccagtttcttcatgaaaatgttcccaacaaattttcattttagaccagaaaatacggctatttttatagctcgaaaacaaatttcttcatgaaatacaaccgccaagtaaacaagaccagttcttaatgaaaatgttctcaacaaactttcatacaatgatcaatgtaattacttattgctaccactgcatccttgtaatcatattatcaaagaaaaaacagtatttataagacataatattattacaatggaggcagtatctcagccttcgttctttacattgtttgcatttctaaccttttgccagtccgcacaattggttaatcttatccctgcagtagcttttaatctaccatttaagcctaacagacaaatgatggtgtaccttaccttgtcaggtttcttgccctggactcctatcattgttgttaacaccatcagaaaggtgaacccataagctttgacttctttcaacaccattttcccaggtttgttgtcttacactcctatcattggtgtcaccaccatcagaaaattgggcccacacacttcgacactttccttctccactaaattcctcctcgcatcctgccacagtctttagcagttctgattgcagcaagggacaattttccttaagatactcaaaaccatcagattgcatcacagcgacaaggttttcagcagaaaattgtagacagacagacttcaattctgtagcacgataacgatcagcaagagccagaatataggcaacagaatctatggagatgtctttgcaaagtacagactcgcacatcagtttaagtcttggcaaaccatacttttctgcagcagctaacaactttgcagcaaatgattcagataccgaaggcaagaatgatgaacgtgacataaagagctcttcatcatctattagagtgtctctataaataaaatgaagcaaagccttgaaaacttttggttccatgtcagtaacaactacatcatgatcatcctcctccatcccattaaaaaactcggtttcaaatgcagttgatcgagcagccaaaacaagcttatgtgcatgaaacctttctccaccgacagagaaagtaacatctgatccctcctcattctctaacagcatcccgaaatgtgccccaatatcggattcgggaacctgtattgtgtttaacttggaacaatcaatggaagacaccacaacaccaacagtgcagtttatcttcaagcagtcatccttgaggaaagttgacgcctcgagttgagcccgtttgaaaaatctcttatacccccacatgctgccgcggtatttgagagtgtaggggccgctctcgagcgagcgatcgaagtggctatgcaccttgtgcttcccattcccgctctggtcgagcagcgtgagctcaaacagggcgcggacgtcggtgccctcggaggcgagcgcgatgaagacggagacgtaggcggagttgtcctctgggttcttgccgtcagggtagaagtatatcgcccactggtaccctcctaccgtgaacgtctcgctcgcgatgtgttttccgactccgatccccttcgccagcgagtatccctttatcacgaacttgtgcgacccgttcaccgtctccgtcaccgaccgcgaactcgtccgcgacgccagcacgccgccgccgccgccgttgctcctgctcgcggtgtgcatctcaatcaacccgatccgcgtgaccagaccatgtacggacggggtttttatcgggaaacaggattttctttgcttttttttttcttctttttcggtcgagcc

SEQ ID NO: 141120 - DNA, 253 bp, Glycine max
  Clone ID: PAT_MRT3847_98443C.1
cacacatttgccatcggtctctcttcaccacgccaccgctccgccgtgccaactcgccactgtgccgcttcccttaatcagctattatgatagattgttcggtgtgagctttcctattggtgctttcttggtctgtagaagtaattgactcaagtgctggtgatactgatccgcgctataggagctctataccacgatgtcaagagcctggatgcattggacatagatgctttccaaactgtagattttcttc

SEQ ID NO: 141121 - DNA, 395 bp, Glycine max
  unsure (1)..(395): unsure at all n locations
  Clone ID: PAT_MRT3847_98444C.1
tggccggactcgggggagaggccgctaatataggactggacatctccaagcatacgtcctatatcgttggggcaaagaatgtgtggcaacctacctcagcacattagactcccatccctcaaggaatcataccttgagatcccaacatgtacatgattattactgaagggggtgaacacgagctatatgccaaagatatagaatggactctactcactggccattcgattgaacaaactttgcaattcgggcccaacgaaatggcgctagccagcataaaactggccgtcatgagcagcaaggcattacttgcacagattatacattcatctgtgcctcattcgagttggactatgagatanaactttatagaacctgacaatcacttgttaaaa

SEQ ID NO: 141122 - DNA, 581 bp, Glycine max
  Clone ID: PAT_MRT3847_98445C.1
cttgttctaactttgatgatgaaattatatgaaacgagtaccagatgagatggagatgaagaaaacaaactagagaagcattaaagaggctgaccttgatgaatctatgtgaaacaaaagtgaagttccaaacctgaggggggttaacaaaagaaacgagggaggggttagcattatccatgaacattcataccccgaatgagtgattgaccacgggtctgagaccttgacctaagagctcccaccctgtggaacgggcctcggtgctcatgatcgtaattgcctagacacgtgaggagagaaagccttctttattctttatgacgttgctaagaaaatttggaatctgtttataaccaatcacttgcttatttgtattagacggagacaggctccattaaaacacacccaactacaccggaaggcccagcacctgagtcgcttgcttttgacacggaagatggtcgccaaacctaggtgtggagatcaaaggcactccttgacacatcggatcgccaccgaattaacaccgcaaggcgttatgaacccttcaatgggatcacgcttcaatattagacctt

SEQ ID NO: 141123 - DNA, 192 bp, Glycine max
  Clone ID: PAT_MRT3847_98446C.1
cgagaaagagatatctctatgctctggtcatacataacatacacatatactagttattgacatttgagaagggggtaggggaacacacaatctctattcaaaatcaaataaaatccacgtgattgagtagagtttcatcgaataataatttcagatctgggagatcttgagcttcaacaatggcgaaaccaa

SEQ ID NO: 141124 - DNA, 568 bp, Glycine max
  Clone ID: PAT_MRT3847_98447C.1
ggaagaaccaattatgatgacataaaagttgataacaagagcatttcattaaaaaaaatatttctacaaactaactaataattactaaactaaattgttcatacaaagagagaacaaaagaataaaattaatcaaatttgaacacagatactatataagtttagtagaaaaactgtctaaaagtgttgctcactaaaattatatacactaaaagaaaatattcaaaattatttaaaattatcaaattgagcatgaaagttatatcaattaagtttataggaccgtgtagtttcaagttgaattctgtcctgcaagataatatataaatcttcatatttgaactattttataaaaatccattggttaaaaattttccttatataatttcccattacctaatatttttttcgaagctacacatggtcataaggcacattctttgcaatcatttttgatcatgttcaccaatattatagtctaattattgccgataaaatacgaaaaaaaaagttaactaagtaaagaatcgattaacttttaagcacatgtagtccttccggacgcgtgg

SEQ ID NO: 141125 - DNA, 286 bp, Glycine max
  Clone ID: PAT_MRT3847_98448C.1
gccacttacaaagagtgttgcttgctctttataatattgccatttacaggtacttaaaggggcttaagcttactttgactaagttttttacaaatacataccgggacaccattgcacatacattttgtttaaataaaagatgcccatatactcattagttttgcacttgttcaaccaagcattagctagttctgattcagagcaagccaatatttttatcaaatgccgtaaggtggaacactggggggtcgatttacaaaggtccctgccggggtgggaatgtccc

SEQ ID NO: 141126 - DNA, 241 bp, Glycine max
  Clone ID: PAT_MRT3847_98449C.1
gttctagtcgttttgaagccaataacttcaagacgtgtacaacattgcaataataacacatctcattttgtttctttcaagtttcaatgttgcgtgaagtagtgagaatttgaatccggtatcagattatattagatgtttctttaggaagttcagactccagagcatcacttgtgcgtgccggactcatagattctggcggaggggcataaggcgaaaaccatctctgacaactttcttg

SEQ ID NO: 141127 - DNA, 542 bp, Glycine max
  Clone ID: PAT_MRT3847_9844C.1
cgtccgggagtacagacgactttgagagttcagctcacgtgctcgagtacttacgctgcttcacgatggacctacatttggcggaggggcggcacgtacataagacgagagacctgaccactcatagaggactgggtccgtggcgacgaactgcgggaccgtccactgcttataactaggcaccaccgctgacgactataggtcggatgaccgcctaatattacacaaagatcttgtctgactgaatatacctttctagcacgctatctgttccagacagaagtgaactagtgttaactcgactctaccaactgctgagcctacttgtagctagtgctggtctgagctaatacaagggtctgtgagaacatctactgtaagactatatagcacggggactctgaggatctcaaagtctccaggggtacctcttgacactggagcttgacagttacagacgtgtgcttactggatgatggatgggaaggaggtacagacgtggttgcaactgcgctgggatggagacacatgtgttgtacttg

SEQ ID NO: 141128 - DNA, 152 bp, Glycine max
  Clone ID: PAT_MRT3847_98450C.1
ggttgggccaacgtggcagggcaatggccctttctgtagcgcggagcgcacgcaggtggctctcgcgtcttcacgagaatccctcatcagcatcatcacccgtcgaccttttgcccaaatccctctttccttgtggaagttccctgaaactg

SEQ ID NO: 141129 - DNA, 578 bp, Glycine max
  unsure (1)..(578): unsure at all n locations
  Clone ID: PAT_MRT3847_98451C.1
acccacgcgtccgattattgggagtcctaanaaaaaaaaaaaaaaaaaaaaaaaaaaaaaaaaaaaaaagaaaaaaaagaaaaaaaaaaaaaaaaaaagaaaaaaagccaaaaaaaaaaaaaaaaaaaaaaaggggggggccgtttaaaagaaacaaagttaacgaacgggggcaggcaaggtaaaatcttttaaaaaggggcaccaaaattaaaataacgggccgggttttaaaaacgcgggaaagggaaaaacccgggggttaccaaaataaaaagcctggaaaaaaatccccttttggcaagggggggaaaaagaaaaaaggcccgaacgaatggcctttccaaaaagttgcaaacccaaaaggggaaagggaaccccccctgaaccggcccataaagcgcggggggggggggggtaacgccaagagaaaccgaaaaattggcaagggcccaaacgcccgctcttttaggttttttaccttcttttttggcaacgttggcgggttttcccggtaaagtttaaaatggggggcccccttaagggtcccaattaagggtttaagggacccttaaccc

SEQ ID NO: 141130 - DNA, 480 bp, Glycine max
  Clone ID: PAT_MRT3847_98452C.1
agctcaagctttcagaaaaagaaagagccagattgcttctgctgttgaggatgctttagaagttgcagaatttaaggggtatagcctacgcactcgagattcgttgtcctgctggtgccctgactcaattggttttaaccttattgaacatgtgctttgccacattgttaagaatgaaaggccaggtgctgttttggtttttatgactggttgggatgatataaactctttgaaggatcaacttcaagttcatcctttgttgggtgatcatagccaagtattgattcttgcatgccatggctccatggccagctctgagcagaggttgatatttgaaaatcctgaaggaggggtgaggaaaattgttctagcaactaacatggctgagactagtattaccatcaatgatgttggctatggggttgcattggaaagcaaagaaacatcatatgacgcttaaataacacttcctggttggtt

SEQ ID NO: 141131 - DNA, 1003 bp, Glycine max
  Clone ID: PAT_MRT3847_98453C.1
gccttcatttaatgatatgtgatattgggatatggagagggttgcagagccaaaggtacttcctcggtccttgcctgttctagttgaggtatctaatggacacaccgctgcaataagagaagctggtcaaagactaaatgggcaggatgtttcgagtgtgtgtgggattccagcaagagaagggaatcagttttcaaaatcacgggatggccctatggcacgtcttgcctccatcagagaagtggctcagttatcgaatgcacgaatagttttggtaagagaggatatgggattcgatacacgctgtcaagagcctccctcccctgtgcctgtgcctacaagaacatggaaaggaaagggctctttaccagaagctgtagaacttgtgtctgatattgagaaattgaagggtagcaatgattcttttgtggaaactggtccaagttcatttgctggtgctagtcatcccccagaacctgttgatactgatcttatgagaacagtttttgtaccaataggtcaaactaaatctgaagctggatgcttaatgaagagcgtgtccttgaagggtcctttcttagaagatctttcaattcgtgttcttgcaaagaaaccaagcctggctgttgtttctcctgcagaaatcatggctgaggaatcaaatgagatgggtaacttatcctcaccattttcaggtgctcgtgcatcacagaatactgagaactctccccttgccccagactctgatgagaaagaatgtgtttgggatgcatcattgcctccaagtggcaatgtcagtcctcatagtagtattgatagtactagtgttgtcagaacaatgagcattgctaatagttgtgcaagttcatatcgaagtgatgcagacactagcgatggcatgcttagttgggacaggaattgtgatagcactaaaggaagtgtaagaggggattcacttgagagtgcaaaaactagtgctagtcgagcaagtgacagcagtggc

SEQ ID NO: 141132 - DNA, 422 bp, Glycine max
  Clone ID: PAT_MRT3847_98454C.1
gtaatgaaaatcattcaattctctcggtacgttgttaaacagaagaacggcataacttgcttggacacttcagattccaacgtgtctcacctaatcagagggggccgttcttacaagaggtggttcctgcttcaaccttgaaagattgttacatgctacatccttcaaagattattaccctatcgaatatgagttaaatcgacggagcacggaaaaagaacttcattgctggttctggcactacagcttcgaaggtgtatcaactaatctagagtgctgccacggcatttttactacacaatctgtaggtactaatacagagctaaaatctactctgacctcgctcatatttccaggcaaagaataatgtgccaccacctattgcattaacttgtgacacgagtctcaatcaagcatgaaca

SEQ ID NO: 141133 - DNA, 486 bp, Glycine max
  Clone ID: PAT_MRT3847_98455C.1
cccacgcgtccgtacggctgcgaagacgacagaagggagagatacatgcttgttttgtacgtgtacatgtatgtttctgagttcatatgtaatataggcatggtttatatcttttatcttttattttataacctttttcttccaatgttgcatacgattgggtgatttacttaaccttgtgttatatgacttatctcatatttcatttctatattgtgtagatgagccgggcaaacaggttaggagtgccatcaggattaaaaacaccagtaaatctaatgtagctttcaaggtatggtgaaacatgtacaccattgtttttgttcctgatttttatatttttcttttccttatttgcaatttttgtcatttaagtacttccattgagtcttgaactgaactctttattcttgctgctactatgtcacagttttgcaggagaataattaatttatttctttttaactgggtgaaatcacctatgat

SEQ ID NO: 141134 - DNA, 280 bp, Glycine max
  Clone ID: PAT_MRT3847_98456C.1
tacaatgatcgctgccccagctgtcaccactgtacaccatgccggagccggcatggctgctccattcactggacagaagtccatggtaggcttccccaccagaaagaccaacaatggcatttcctgcattggttacaactgtttaagattgcaatgcctgcaggtgtggacaccagtagtcaagagcgaagttgagactctttcctacctgccacaccttgtagatgcacaaatggcaaaggaagttctaataccttattaggaatggatagattgcttg

SEQ ID NO: 141135 - DNA, 408 bp, Glycine max
  unsure (1)..(408): unsure at all n locations
  Clone ID: PAT_MRT3847_98457C.1
gggggagcccgngcaagaatggcactncgaagcgaggagaagaccctttctgtgctcttcacctcttggcctcgcgagagaaagccatgcctgagacgaagatttttggcatgctgtttggccaaacactcccataccctgtacccctgctgctcnaagggggggagnncccacaagaggcgaagccgaagaaaaaaccacgcanagggggggggcacgggacccaaaaacctgccgcaacaaagaagaccggcacgcaggcaaaacaaggaaaggacaagcgagcaagccgcccggccaacaaccacggggagaagcgacacgggcaaaggaaaggaaagacaccaccaaagaaggacacagcgaagaagagccacgcaccaagaaagaagccacggagggagaaga

SEQ ID NO: 141136 - DNA, 443 bp, Glycine max
  Clone ID: PAT_MRT3847_98458C.1
gttcatattctttcagaagtaactgatactttcattgattagggatgaacacccttatacataaactactaaatcgcatatcatgttacaagacataacttgacaccaagaactcacatccaggacatgtaaacttataccaattcaagctagaattattcaaccgcatttaaagacacatttgcaaagaatattcctaaaggccacataattagcaaacccgtactatgatatttatgccatactatgcctacccgcttttgggaacaccgttatcccggcgccattagccacataagccgtgaccattcctgtgtggtgaaacgcctcactggcttcatcagcactggccgcttcattaacttggcataacttaaccatgtgctcaacgggcggtcaatgatcacgaacactcactggtacagctgcctacttaaccacga

SEQ ID NO: 141137 - DNA, 232 bp, Glycine max
  Clone ID: PAT_MRT3847_98459C.1
ccagacggctacagaagggtaacgctgagagcatacgacagtgtgggctacttgcagcacatattctcaatatgatgtgcaagtcaagactatgcacgcactgcataggggtcctcatcacacagacatacacatgagattgtatggtttccaacatgcagttacaagttcactgatgtcaccttacttacactacgtgcactatttatcatcaaccatgactcttacacca

SEQ ID NO: 141138 - DNA, 409 bp, Glycine max
  Clone ID: PAT_MRT3847_9845C.1
cccacgcgtccgttttatttttgacaaacctaagacgcgctgctgcactattctccccacggagtccaatcttgtggttctgcagaagtttttaaattgtgtgaggatcattatgacgaaaacggccaagcttacttgtcaagttgcaatcaacccatactccatggaatggactggtttgggcaatagattacttggtaagggcagcgatattctgtgctgcgactatgctagttttgatggtttgattaccaaacaagttatgcgcaagacggcacacatgacaaatcgtctttgtggtggagatgaaaaattgatgcgcgaaaggacacacctgctgttggctcgatggccacgaacggcactttgtactaaagatgttcggagagatgaatgaagaataccttgt

SEQ ID NO: 141139 - DNA, 382 bp, Glycine max
  Clone ID: PAT_MRT3847_98460C.1
tcgcgatctagaactagtcggacgcgtgggttttttttttttttttttttttgctattaatcgtttattttatttagagcaagtaaatgcaattgaagaattacaacatagtcactttatcattgtttcaaaatatgttacaacatatcacaagggaggattggagccctctctaacagatggagacctggaagccaagctcccatctctagcaaaccttgacacacttctactaacacttgtaggtgtagccaaagcaggagtagaaccgcggtaacttgcccgaagtgtttcatcaacagaagaggaggacttggcaaacgcattcctcacaaacttctgagctgcacggacgcgtgggcgcatgcttggactggcactc

SEQ ID NO: 141140 - DNA, 254 bp, Glycine max
  Clone ID: PAT_MRT3847_98461C.1
ggtcactggctgcttttcagttgtggctgagagctttaccccgactgttacgcaatgctttcctcttgaaacagagcctctatcgctgtttatctaaccataaatgctcttttgtttgaaccggcaaggggtttctacacattagaacactggctaaggcaaaacatatgccattggcttacactgattctagaactgccttgaacagctgtctaagactcccacttaagccttcagtggagcctatcttgctt

SEQ ID NO: 141141 - DNA, 523 bp, Glycine max
  Clone ID: PAT_MRT3847_98462C.1
gcacaactatccttctccttcttattcttcttccacacactatcatcttgacaactaccccagcgtggacagccctgagccatgtctctctgcttgctccgctgataacattacttttagcgcttccagtagttgcgctagtaacaatactaccagctcctctgagtttcccttgagaagcctttaccctctacttcctgacactactgatgaatttgttttccactcaaattcaacccaatctaccatcaatactccctttggattcttcgacaatcccctcgctgaaatttttgagagacgtgtagacctaggtactctgttccttcctgccaacacacctttttcctcttctttcacaaaggttcctcatgttgtaattaagacagaagcagaagaaggagatcattttctgacaggaaggaaacaaagggagcgggaagagtatgaagctgcagatgtgagaagcaggaagcaatcagcagcacatatggacgagagtgagctatccgaaattgttgat

SEQ ID NO: 141142 - DNA, 242 bp, Glycine max
  Clone ID: PAT_MRT3847_98463C.1
attgcatttcgttactgtcatttggtgtgcaatcttacaagttccaaacttgtctattctggcattattgggtctcacttgtcacacatacagatttgagccttttatattatcatggcttctaaggtggtttcggttttggtcatagcgatgatgttggttgccatgaactgcaactgcactagtgctggccacatgctcttggccaatgaggaaggtcacgattttcacgagtctaaagc

SEQ ID NO: 141143 - DNA, 1070 bp, Glycine max
  Clone ID: PAT_MRT3847_98464C.1
gtcccccaatagaagacctagtttttagtaggggggcgtacaaaaaaaaggaattcggctgcaggaagaagtttttttttttttaggaataatcatgtcaatgcaattaaagttgctaaaaaatttcctcagtttgaagcccgagggaagaaaatattatccatgaaaaaaattagggtaacgaacataacagtaccccagaataggaaaaatgtaaaattgaaaccccacaagaaattgacagcaatctgtaccttgtgagggggaaaaaacgaaaacaaaatgtcctcactatttgccatcaatttcttcaattaagagggtaaaaatgagttttgtttagcttttgggatctgaattctgcctttggtattgctcaagaataatattacagtcattcatggtccgagcatctagaagaccatgattgtataatttgaccataaatattctccaacaccctgccagtgagggagattgaacaaactcaggtgcatgcaattttgagaaagcctcacatgcccatgaaatgtgaccatctgcaatcacacgatgcttccgaacaaatgagttccacatatgcatgaaagtcttctcatcattgctcacatcaacaacattttcaagcatccttcgatcttcaaaatcggcaacatcatcatcaacttcatcttcgctatctttatcggatagaacttgttcaattgccattggctgagctttgtgtgaatgaaaaaattgtcgcttcctcaagaaggtactgtttcgtgggtcaggacgctcaattgacaacttccttgtcttggcaaactgaagcactgcttgatcacagtcagacattgactgaacagagtctcgatcaggacgtgatcgaataattgtggcagaaataccatcatccttctccaaaatatcagtccctcctgcaggaaaggaagactctaagcccactgcatttttcaaagattggtctgctgttgtcctacgctttagaggctttccacaaaagaaaaatgtttgcactcttggatcaacatcatcagaaacaatctccgatctcgagatatcat

SEQ ID NO: 141144 - DNA, 372 bp, Glycine max
  Clone ID: PAT_MRT3847_98465C.1
ctgagacctttgacgagcgcgttcttttctacggatccttcgcctttatcaatcgcccagagaacagggtctgagtgataaacatttagagagatgtatgatctgtgggatgcattctaaccctatttttggatatattggctatggctgccttcagtgattcgagaacttatgctccatcgtcaagctcgcctaacaggcctagcgattcgaagagatggtggtattaatgaggatcgtggagaacctcgacgttggatctgactgtgcaaggactcggaatttactattgtggcgggtacatcgctctgattgctgctcggagcagcatcttgtaagactctgtcttccatagaccataacgaccaaact

SEQ ID NO: 141145 - DNA, 383 bp, Glycine max
  Clone ID: PAT_MRT3847_98466C.1
cccacgcgtccgcacattctaatccttttaacaccgccccattattgcttgctcgttaattacggcaatgactcggctatttcgatccaagtcttgcggactggtcgagttcaacgctgctccacccagtccacttttccatgatgtgaaaagcgaggatgaatacaatgaagaagaggaagaagaagaagaagaattggacagtgatgatgatgatgaggatgcagacgaagatgatgatgattctagcaaccatgtttcaacgccgttcatgaatccatggtcaaaagggcattggtgccaatcgaaccagttttgtaaataggatattctggtggctgggtttgaggaacgcagcggcctcgagcctattcgcaaaccta

SEQ ID NO: 141146 - DNA, 487 bp, Glycine max
  Clone ID: PAT_MRT3847_98467C.1
ggctcgagctctttctttctctctctctcacagtctcacatacacattcgaatccttttaacaccgccccattattgcttgctcgttaattacggcaatgactcggctatttcgatccaagtcttgcggactggtcgagttcaacgctgctccacccagtccacttttccatgatgtgaaaagcgaggatgaatacaatgaagaagaggaagaagaagaagaagaagaagaagaagaagaagaagaattggacagtgatgatgatgatgaggatgcagacgaagatgatgatgtttcgagcaaccatgtttcaacgccgttcatgaatccagggtcaaaagggcatggctgccaatcgaaccagtttgcgatattggatattttggtggctgcgttgaagaagtcgttggtaacttgcagtgtggaaagagaggatgtttcttcgttggatattagctggccaacagaggtgcgccatgtctcgcat

SEQ ID NO: 141147 - DNA, 4413 bp, Glycine max
  Clone ID: PAT_MRT3847_98468C.1
tgccattttcctttgagtgcaagattaattaatgtctgattttatgtattggtgtgttactgtggatcatagcgtagacctttgtccatcttcaatgttctgttcctaaaaccacaccatattctgccacctctttctaactcccccaagaaaagttcctttttcccctttccccttctcttttcttcttcaaggtcaactccgtttactataaataatgaccactcttcttcaacttcaataatactcacctttgaatggattcttcttcttcttctccaaacaacaacaaccaccacaagctgggtttccaacctgccaggtctcgatcacgtcttgccatggcttcacctgccaacacctccgagcctaagatcgtcaccggcacagccggttacatcctcgaagacgttccgcatttcactgattacattcccaatctcccaagccgttatcatacgtaaaaaccctgtttataataacgtacactttttttgtttacatagcacctctcttcatttccattttctgaaacctattaacaaaagaaaatgagaagaatgactacaagaatttgaaatactaattacaggaaatatttgcaatcataataattgaagcctgcacctactactaatgttagatctatcatagtcatagtagagtagaagttaaaaagacaaaagagctacaaaatcaaatgtagaaaaaagagaggctaaaactactaaaaactgcaaatgcacttagacttgtgttgattgagcacctaatccaagccatgacatggattcagccggcttacttgaagcagagttgggattgtttatttgatagggtgctttggcagcaattctatcttttctcttaggaaggaatcgatgaagtgaagctttcctagcggtagtccgaagtcaacccgagggtaaggtctccgaagggaccgttttccttgatgtattggctcaatagactacaagtctgatagaaattggacttttcggccggagatttggccggggggtggccggaaaatgcctaaatattccaatgactctagattttcagcaagccgtacataaaaaaatgcaaacatgccaagcataaaagatcgtcaactgagcagctttaggctccttctccatagacttaaaagcacttgatttaaccatgattggaacctctgagtggtgaggataagcagtctggggagataggaaatccacagtagttgggttccgttgcgtgatgatcgtgggaaacaactccatggttgttgcagagtgacacgatgtctcaggggaaccgtttgtttcggcagtgcaagtcatcccgagggtaaggtctccgaaggtacccttttccttgatgtattggctcaatagactacaagtctgagagaaagtggacttttccgccggagagttcgccgggtggtggccggaaaataccaaatattccgatgagctggacattcttctagccgtaaaaactaaaatgaagacagagaaacagaaatccgaaagaaagaaatggaacagcttgcgaagcataatagattgtatatttagctgctttaggcttcttttctatagtctagatgaacttgatttgaccagggttggtacctctgaatggtgagcataaacaccctggggtggtaggaatgccacagtagttggcttcctgtcacgatgagggtgggggacaactccatggctgtttgtgcatgttgatgacagcgttcctcaaaaggtcgttgttcacaaagatggtgcaagaggggtacattttaggcgtgctgggcctcgtcaaaaggtgtactttgaagcagatgaagttcaggctgctattgttacttgtgggggtctgtgtcctgggctcaacactgtcattagggaattagtgtgtggcttacaccatatgtatggggtgaagaaagttcttggaatcaatggaggatataggggtttctatgctcgcaatacaatcactttaacccctaaaagtgtgaatgatatacataagcgtgggggaactgtcctcggaacatcacgaggtggacatgacaccaaaaagatagttgacagtattcaagatcggggaatcaatcaggtttatataattggaggagatggaactcagaagggtgcatctgcaatttttgaggaagtcagaaggcgtggtctcaaagtttcagttgtaggtatccccaaaaccatagataatgatatcccggttattgataagtcctttggctttgacactgctgttgaggaggctcaacgagctataaatgcagcacatgttgaagctgaaagtgttgaaaatggcataggtgttgtcaagttgatgggtagaaacagcggatttattgcaatgtatgctacacttgcaagtcgagacgtggactgttgcttaattccagagtcacccttttaccttgaaggtcctggtggactctatgaatatatagagaaaagactcaaagaaaatgggcacatggttatcgtcattgctattcggcaggagcaagaacttgtttctgagagcgtgcagtcaatgagcaaacaggatgcttctggaaataagctttttcaagatgttggcctatggatatcccaaaagattagggatcattttgctgcacagaagaccctgcccataactctcaaatacatagatccaacttatatgattcgagctattccaagtgccattttcctttgagtgcaagattaattaatgtctgattttatgtattggtgtgttgctgcagacataccctaatcctttgcaagacaaccctgcttattcagttgttaagcagtattttgtgcatgttgatgacagcgttcctcaaaaggtcgttgttcacaaagatggtgcaagaggggtacattttaggcgtgctgggcctcgtcaaaaggtgtactttgaagcagatgaagttcaggctgctattgttacttgtgggggtctgtgtcctgggctcaacactgtcattagggaattagtgtgtggcttacaccatatgtatggggtgaagaaagttcttggaatcaatggaggatataggggtttctatgctcgcaatacaatcactttaacccctaaaagtgtgaatgatatacataagcgtgggggaactgtcctcggaacatcacgaggtggacatgacaccaaaaagatagttgacagtattcaagatcggggaatcaatcaggtttatataattggaggagatggaactcagaagggtgcatctgcaatttttgaggaagtcagaaagcgtggtctcaaagtttcagttgtaggtatccccaaaaccatagataatgatattccagttattgataagtcttttggctttgacactgctgttgaggaggctcaacgagctataaatgcagcacatgttgaagctgaaagtgtagaaaatggcataggtgttgtcaagttgatgggtagaaacagcggatttattgcaatgtatgctactcttgcgagtcgagacgtggattgttgcttaattccagagtcacccttttaccttgaaggtcctggtggactctatgaatatatagagaaaagactaaaagaaaatgggcacatggttattgttattgctgaaggagcaggacaggaacttgtttctgagagtgtgcagtccatgagcaaacaagatgcttctggaaacaagctttttcaagatgttggcctatggatatcccaaaagattagggatcattttgctgcacagaagacactgcccataactctcaaatacatagatccaacctatatgatccgagctattccaagcaatgcctctgacaacgtgtactgcacacttcttgctcaaagtgcagttcatggagcaatggcaggttacactggctatacaagtggacttgtgaatggaagacaaacttatatacccttctatagaatcactgagagacagaaccacgtagtgataactgatagaatgtgggctaggcttttatcttcaacaaatcaacccagctttttggatgccaagggtgacaatgaagagaagaaggaagaagaagcagcattgaatcagttaccggatggacattgttccaaagacacttctttggctaacaaagaaatcaacagcagcatttatccaacagcttgctagttattattgttattatttgtcattacgtgatatatccttttatcatgcgttacacgtaatagtacataagagctgtcttttttgcccttgtttgtcaatcaataatatggctgtggaacactcagccttacacaatgatgttagtcaatatgttgtgctatgatttgtaagctttccaatgagactggtttatctggaaatgaactttattagtttgaatcaattaattaattatccatgag

SEQ ID NO: 141148 - DNA, 293 bp, Glycine max
  Clone ID: PAT_MRT3847_98469C.1
ggagctagagaatgatgatgaagtctgctatgtgtgcagtggtggttgtagcacttcttcttctggcggaggtggggcccatggctgaggctgtgacatgcaccccaacagagttgagtccgtgtcttccagcaatcacttcgcggtgctaaaccttttcttgctgggggcgcgaagctgaagcagcaaaaaccatgcttatgcggctacctaagaaacgctagctggaagcaatattgtaactctcctactgcccgaaaaaccgtagcttattgtgggattggctttacaac

SEQ ID NO: 141149 - DNA, 374 bp, Glycine max
  Clone ID: PAT_MRT3847_9846C.1
gggctaacaggttaatcgggcaacacattttcgtcaggcacctacataccatatgtatccaatgaatctatatacaccattatggatttggattccaagaactatatcaaccaatgcaagggtctttggccattagttacattaccggacctattttcgagcactaacacttatatatacactacctgttaatggggaatatatgtatatatatatatatgctcctagtgcacaattagaattgatatgatatatagtatttatctgcaatacatacaacaatagtatatattttataatgatggcactgataaattatggtaagtaccctgctccttcttcttatgtaactcagtgacagaataaacactgct

SEQ ID NO: 141150 - DNA, 210 bp, Glycine max
  Clone ID: PAT_MRT3847_98470C.1
atgtatagacaaacgcacctgtggcatctgttttaacatctggatataaaccttattgcattatggaggcttttgattttctctaactacggggtatgtcccgtttattgatgtatcattttgggtttaatataatttacatttctctaaaaaaaaacattacttaaaaaaaaaggattaaagcagatctatctcccctacaagggcctt

SEQ ID NO: 141151 - DNA, 355 bp, Glycine max
  Clone ID: PAT_MRT3847_98471C.1
aggaaaaataaaaaatattaaccattacgtacatggaattaatacatgctatactaataattacatgaagaaaaatggggtcctcactgttcaggttatggtgtttttaaacagtgaagaacttggctgtgttactgaattagggccaccatcttagaagtcagaatctaaggccaccactttgagtaagaaatgaagatcatcttgttacatgcgtagggggtgggacatgcacctccatctttttccccccttcttctgatttgttcagtagcagctgaaaaccaatatccatcatctccttccatttgttcatccttttggaaatgataaacaatattaggactagtgaaag

SEQ ID NO: 141152 - DNA, 165 bp, Glycine max
  Clone ID: PAT_MRT3847_98472C.1
ccttgctctatactacacagtacatacactataagaactacggcttccatcctccactactttttagttctctctcggtcttgctattttctctccttcatatccgactcagtcacccctacatgaccaataaacctagatgctcaacccgttcataatgatggt

SEQ ID NO: 141153 - DNA, 473 bp, Glycine max
  Clone ID: PAT_MRT3847_98473C.1
tgtcgacatacgagtccctagcagggatagctgacgacacgcgaagatgcagttaacgcctctgcccggttagacgcaaaaactcggctgacacctggcgatacggcgcgtgattgcaacatgatatcagtcaattacgcatagacagcagagctgaaccttatgaggtccagtccgcacaactgtggtaatcaaggcccttcagtcatcaatattctctatagatcattccagtgggtaacatgaactggttgaccacgttcgctttcaggtagaacaactttagggtaatataaaacgttccagagagaatagaatatctgtcgctccgagagtacttggttaaatacgtcattaatcatacaaagactagtattagcaatgacagtcagttatacaacttcgtgactgtgaaacacataagcgttaccgaagttaatagtattacagaagagcaccgtttggaaaaatgg

SEQ ID NO: 141154 - DNA, 293 bp, Glycine max
  unsure (1)..(293): unsure at all n locations
  Clone ID: PAT_MRT3847_98474C.1
gcagatcttcgttaagaccctcaccggcaagactattaccctagaagtcnaaagctncgacaccancgncaacgnnaangntnagntttanggacanggagggattccccccagacnagnanagnntgnttnngccggganncagctcnaggacggaggcacccttgntgantacaantccagaaggagtcaactctccacttggtgttgcgncttcgtggtgntatgcagatttncgtgaaactcttacgggtaaganattaccttcgaggtggaganntctgacaccattc

SEQ ID NO: 141155 - DNA, 153 bp, Glycine max
  Clone ID: PAT_MRT3847_98475C.1
gcaaaggacgatgatcgttctgctgctggaagccgtgctgggccaaaaattgaggaaggtgactaaattcacgcctaattctgctcctgatttactatttaattccaaatggctgatctccatgtccttcggttggctttagttcctcaagaa

SEQ ID NO: 141156 - DNA, 273 bp, Glycine max
  Clone ID: PAT_MRT3847_98476C.1
ccgggaaatttgcagagtattctagtacatagcattttatgatatgagcttcacttgtcaggtaatggacatttatttagatctcatttttagaaagattgccatctggtgatgggaaagagcttcttgtacaaggctttgctttgtcacccgaagttgacgttggctcatgaacaaactgtatgtgatagtggacgcccttactatgtgagatcgtatggtacaaacttctgctgaagagaaaatgaaaaaaagactctaagaccgcgaact

SEQ ID NO: 141157 - DNA, 539 bp, Glycine max
  Clone ID: PAT_MRT3847_98477C.1
cccacgcgtccgccggaaacttttaaaggaaatctggtagaatggattacggagctcacaagcaatgcaaaactccatgatgccattgatgaatcactagtcagaaaggatgttgatagtgagcttttccaatttctaaaggttgcatgcaactgtgtctcaccaactccaaaggagaggcccaccatgtttgaagtgtatcagcttttaagagctattgggggtagatacaatttcacaactgaggatgatatattggtacctactgatattggtaatactgataacatgcaggaacttattgtagcccaagaaggaagttattgaaaggtatgtgagatatatagggtataaatataatttatgtaattggtattaaattttaatgtgtaattatatatcttactttggtgtcctaaaataaatgttagtggtaaatgtagttttgaggatctagatccagttgtgtgctattgatattgaaacatcaatataagatcatcaatcaaggagtagatatagttgagttacttctttct

SEQ ID NO: 141158 - DNA, 948 bp, Glycine max
  Clone ID: PAT_MRT3847_98478C.1
cagagtaaactcaccaccttttgaagaaacacatgtttcctcggaaaataacaacagtgacctaatgcaagcacagtctgagccatctctcccagtgaaggaatcttccaagagtcaagcaaaaagggaaatggtaaaaaataagagtccttctgattcaagcagcagaaaggaaactgaaagtaaaatcaattcaagcaaacagaaaaagacatctttcactggaggcaaggaaaaaccaactccaccaagtcttcccttgtccccaaaacacaatgtcaagaaacctcaaagcttaagctccaagagtttaaagaacatggcaagagagtcctctctgaaacctcatgaaaatgttgaaatcaaacctgaactagctagcagtgacaatatcttgcatgtcacagagccagcctcagaaaattcatctgaggaccctactgtggcttgtggtgcaagtaagttgtcttcaccctcaccttcatcatcagggaacaaaagcttgaagcataccaatgagaaaactggcaagtctgcattgtctgcatcttcaaggaagggccttggatctgtggctgggaacaaagggaaggtaaatatgcgtagtgtttcacgaccgctatcggtatcatcatatgtttccacttccaactcttcccttcgtaaacaaaataatgctgcttctaagtccaacaaaagaggacatgatcatgaaggtgagaatgtgaagatggggtacaaaatcaggccaaaagtaagcacaaaagttggtgcagcaaataaatctgttcttgcagctcggaaattgaatttcaggagaggaaaagtgattgaacttcagcctcagagcaacgacgttccaaggagactcaaattcaggccggcacgcattcttggcgatgacatgaggagagacataaatagtgcaagaaaaaagaccattgtgga

SEQ ID NO: 141159 - DNA, 307 bp, Glycine max
  unsure (1)..(307): unsure at all n locations
  Clone ID: PAT_MRT3847_98479C.1
ttaaatttactccatacttttacaacccacnaactacaacccgccctgcttaaatttaaaacagttcccgcccncnaaaaaatannaatacaactttaatnncccttaaccttaanaaatctntatattctcctctcatcagtcctttaaaacttttttttattatanaatngaaaaaaaaaactctacctttatccaaaatgaattttcccattcatataactccaacaattttaaaaacataaccatcttatttaaaatatttataaataatttattaatatatattttctttttaaaaactaat

SEQ ID NO: 141160 - DNA, 332 bp, Glycine max
  unsure (1)..(332): unsure at all n locations
  Clone ID: PAT_MRT3847_9847C.1
acagcgcgaaggcaggaacgcctttgtccgggaccaagaaaggggggggaccaccgncganccggcgcgngagnncaccaaganncagncagcaccgcggaagcggcaggcagacccagaagagttcgnggccgnacaacaggcggaaacagggcccnncggggccanaggnncgcngtggttggncgccccggggggagannaacnganagcccgcctccgcacaaagggcccacaacggaggggggagggcgagccacaaaaggacgaaagaagaacgggcgcnccgagnggcagagcngaaagaggagcgngacgacacgaggccnaag

SEQ ID NO: 141161 - DNA, 732 bp, Glycine max
  Clone ID: PAT_MRT3847_98480C.1
caaacagcgtaggtgatatatttcctcaagtcagtttaaacttcatgggcggagcatctatggttttgaatccagaacattacctcatgcattatggtttccttgatggtgctgcaatgtggtgcattggcttccaaaaagtggagcagggattcacaattttaggagatcttgtcctaaaagataagatatttgtatatgacttagctaatcaacgaattggatgggccgattatgattgttccttgtctgtgaacgtctctctggctaccagcaagagcaaggatgcatacatcaacaattcaggacagatgagtgcgagctgctcccacataggcactttctccaagttgttagctgtaggcattgctgctttccttgtgcacataatagttttcatggagtgccaatttttgtaaaccactaccacgagtcaaagatcactctttgaaacttaaaagggttggctgatgtcttatttattatcggcatacccttgtattgaaacgggaggtggttgcagttttctgagctgtatttaatctcataggtatctttagcacgctgaaaatgaggatctcattgtaaagggtatctcttgttgggaacttgcataattgtatacagtattagtttatctctggatggaaattgtatcatttataaactgctctgactacataaaacagtgtactcctgatctgcaaggatatgggaatgtcatattcgtgg

SEQ ID NO: 141162 - DNA, 216 bp, Glycine max
  Clone ID: PAT_MRT3847_98481C.1
cccacgcgtccgtagcgattccggaaatcatgtctgtagctgctctttttatttgtgtgaggaattataacattgagtttcagagccttattctttgaagacaaaacataccgacacaacattcatataaacaaatttattgctctgccgctgctcaatcaccaccaccatcatggtcaggaacatctatacccaaacctttttattatcaacaca

SEQ ID NO: 141163 - DNA, 269 bp, Glycine max
  Clone ID: PAT_MRT3847_98482C.1
caacctatgggatccgggggattaatttttgaagaattagcggaatgaggttaaatgcgatcatgaaatagtgtatttaatccgtggaagagaacgaagtgaatcatgatggtaatggacacggttgttcttatgatgacgagaaaattgggttgggttcggatggatattcggatgtcaacggttcggatcaaaaaggaaccgtgggcgaagtttaagctgatattgcaagaaggtgtgatttccaaagggactcccactcagggggt

SEQ ID NO: 141164 - DNA, 174 bp, Glycine max
  Clone ID: PAT_MRT3847_98483C.1
cgggatttccggggcgcccccgccgccgctgacgcacagttcacaatgcccaccagccaaaggcccaagccgactctcttcgtatgtatcctacctagagcttaaccaacgggacgcccctcccactactggtttcttgtctttctaattgtcctttccggtggagaggtagga

SEQ ID NO: 141165 - DNA, 235 bp, Glycine max
  Clone ID: PAT_MRT3847_98484C.1
ctcggctgacgcttgtgctggcgcttgcgttgttggacgcggtgctacgactcttagttagctagggccggcaatgctcgtggctggtgcttggtcattatcggctgctacctggttgctcctgcgagtggtcatatgctattctcaaagattaagccatgcatgtgtcagtttgaactagttcagattgagcaactgcgtatgggtcattatgtcagttattgtttgcttgatg

SEQ ID NO: 141166 - DNA, 266 bp, Glycine max
  unsure (1)..(266): unsure at all n locations
  Clone ID: PAT_MRT3847_98485C.1
aggcgtangtaagctcggaattcggctcgaggatnttnaatnaanccnccttnggaattngttnttcctttcntctggtggcganaatgtcgactcntgntaggaagaggatgntganaganttnaagangctgnaanangancnngnntgnagggatcagtngtgntccccaggntaatnanataatgaagtnnantgntgtnatatttngttntgatgatanttcatgggatggaggnacgtttnaagttganatncaatttnt

SEQ ID NO: 141167 - DNA, 500 bp, Glycine max
  Clone ID: PAT_MRT3847_98486C.1
cacccaccaagctaaccttattccctgtgtttgttaatattgaaatggagtggaaatgaagggaaagtttcaaaatttagtgtgggttacacaccttcaccacactactttaatttagatattttttctgatttctattttattccatttccattcactctatcaaacacaccctgtatctccaggtaattaagctacatgattgccttatgtttatggaattgcatattttcaggccaggcacctgtatctaataggtaccataccttaaaacaattacaacaaagtccatgattttgccaaagtccatccatgtctgtgatttttttagtgtcacaatccattgccattggttttttatttttccttatctgttgtataactaaactctagctttttagctgcttcaagtatggattcctcaacttggaaaatgttctttgaagtcaataaagaacttttgaactttgtccaccaagtatctttcatctatcagttct

SEQ ID NO: 141168 - DNA, 551 bp, Glycine max
  Clone ID: PAT_MRT3847_98487C.1
atagtgtattgaggccttttgcaatgtaaaccattgtttcaggaataaacttaatgttaggaccatagaaaatgcccacgcaggcatacaaccttaagacatcataagctcatgtgctggcttcatcaataaattagcactagaaaccttaggtaagtgacaattgggcaaaactcctttaaccaaacccctttgtgccacggttgcaaattgcaatgactaattgagccaaaattccatgtgaaattctgagaagatcgtatatagaaacgtactttgcacctaaaacccaaccctgtccttcaactatgatttagttgattattgagttgatgtggaattagtaacccaatactgcttgacagcaaccatcaccttctcaggaacaagaggaccatcctcatggtcaaccattttagtgtcccatgttattcctccaactattttctttaccttaattagcacatcaacttcatcgctgaatatgacagcaccttccgttcgcaaaatccgggccattttcaaaagaatattttctgcattgcatttat

SEQ ID NO: 141169 - DNA, 434 bp, Glycine max
  Clone ID: PAT_MRT3847_98488C.1
aaggaacaagggccccttttttttttaagcccccaaagaaaaaacaaccttgggaaggctcttacctgacttggtgaccccccgctgaaaccacattaaggggagcttgggcccctttttgaaccccttttttttcatattgatagatagggccccgcttttttgttgggaggggaaggaactcctgaatgttttcccggggatttggaagcttaaagggcccgctttcccccttggggccccccgggggaaccccccattgggccccaaagatccccacaatgggggttccccgccttattaaattctctctccctgggggtttgtatgaaaccgcctttgggggggaagggtcttgggggctccttaaaaattatttttcccacgtgggggcgccccccccttttaaatttggctttgttaccgcccgtttt

SEQ ID NO: 141170 - DNA, 726 bp, Glycine max
  Clone ID: PAT_MRT3847_98489C.1
atgtaacccgggctgtatcgaaatatactatgtagactaggctggccttgaactcacagagatccacatgcctctgcctcctgtgtgctgggattaaagacctgtgtcaccataccagacccatccaaactgggttaaagggacaatatagcaagttgtaacagcaaaaccaaagctgacttagttcctgagtttataaacataatgtatctcccagatgactgagataggctctttaaaaatttaagacagtttagtgtttctattataccaatcacccacataattaactcttaacaagaacctatatcccttaaaaagctatttagcaccttagaactggaataagccagatatcacaaggccagagatagtctttttggggaaatactttcctcctcctagagaattttacatgcatgatgccttaaaagagaaaatctttaattggttggtaggccaggcatggtgatatatgctgtaatccagactagaaacaggagtgagttcagtgccagcctgactatattgtgagactcaaactcaaagcacacaatgtggtgcaatgcaataggccctaacaaaataattctcaggtaggtattccaaatcatagcaaaatgcaagaccctccctagaaaaacctgtgtgaaaatacacaaaccaccttggaatagagtctagagtcctagcttctaattatatgacaaagattgtctttttccc

SEQ ID NO: 141171 - DNA, 345 bp, Glycine max
  Clone ID: PAT_MRT3847_9848C.1
gacagcagataatagggtcaaagaataaaaaggaccgttagctgacacaaccatcatggccacctgtgctattcagcaatcatcagtcagtggtcaaactgtccagaagcagctcaatgagttcgtccgcaagagcggtggctccggcataagtctcatgaacattagctgtaccgtctcgagtgctccacagagcatttggtacggcgctgacagttccatggtactgggtccattgctggaccagtttctatcacatctgaccggagaattccctggtgactacggatgggacactgctggattattagatgatccggacatctttgccaggaaacggggaac

SEQ ID NO: 141172 - DNA, 240 bp, Glycine max
  Clone ID: PAT_MRT3847_98490C.1
cccactcgtccgcattctcaccctaccttttttccatatttttacatcacatcaaatttacaataaattatcgctattttccaaactaggtaggactcaaaacactcatttaccactgcaatgtaaacccttatgtacgtgttaatatatcaatattcaatgatcataagaatccaacactaacaattactaaagtgcaactataaatcacatcaattattacaaatccttatccttata

SEQ ID NO: 141173 - DNA, 207 bp, Glycine max
  unsure (1)..(207): unsure at all n locations
  Clone ID: PAT_MRT3847_98491C.1
nttggagatcgatcgtanacngntgaangttagcncctagcgcctgcgcctttcttcttttttgaataaagggaaaaggggtttttaattttgagcagaatacgcttacacacgaggtagaggaaccattgcggcaacatatccactactcccctttacattcgatgagcactgacgaatacagcacacaccttcattactcttcct

SEQ ID NO: 141174 - DNA, 1524 bp, Glycine max
  Clone ID: PAT_MRT3847_98492C.1
gaaaggtacaaaacaaaaacccctcgtccgctccaaaaccctaaaacctgaaagaagcatactctgctcgtgttttgcgtttcgttgcgatgttggaaatcaaaaccgccaagacccgcaagggcaagcgggagctcgagaagcgcgcccccaagctcgtggaatcggggaagaagacgctgatcctgcacggaacgaagaccagcggcgtgctgaacgccgtgctcgcgcagatttatcatttgaagaaggacagcgccgtcaagtacagccgcaagaacgagaacgtcaagcctttcgaggccggcggcgagacttcgctcgagtttttctctctcaaaaccgattgcagcgtatttgtgtatggatctcactcgaagaagcggcctgataaccttgttatagggagaacttatgatcatcatatctttgatttagtggaggttggagttgaaaattttaaacccatggagtcttttagttataataagaagttggctcctaaggaagggtcaaagccttttattgtttttattggagaaggatttgaggctgtggaagagctaaagcatttgaaggaagttttgctcgatcttcttcgtggtgaggttgtggagaatctaaatcttgctggagtggatcgtgcatatgtatgtgctgccctgtctccgaatcgagtgttttttactcactgcgcattgagactgaaaaagtcaggcactgttgtgccaaggatggaattggaagaagttggcccgtccatggattttgttgttcgtcggcatcgtcctcctaatgaaagtttgaggaaggaagcaatgaaaacgtcgagggagaagccgaagaaaaaggagaagaatgttaaaaaggacgaattacagggaaagattggaagtatttatatcccagatcagaaggttggagaaactcctttaccttacaaagcaaaaggagtgaagagggagcgccgagaatcgaagcggaaaaatgagagtgatggaagtgcttcaaaacggaagaaggaagattcttaatacttacaaattacacctgttgtctttccctggcatctgattataatagaatgatcaattgtagatcatatgatattaaactgcatgttgtttaggtgtcatgaatattcatgattttcccctataagggggggttttgccatcattttattcagcgtatttttttccccttcatattttgccaagttgaaatgcagtcctttgaaccatgagtcttagcttctactgttagtatatcagttcaaagtttagatggatgcttttcatttctaattaggtagtgttggattatagcattttattgtttgcagcgcccatttgcaagtggtctttggtatttttaatggtcgtgagcagttttgcaaactgaaccagagatactggatcttaattaacaaattatcccgctgttgtacttggtggaaaacattcccacttaacgtttatgaaaattatgatgtatgtaagcttctgattcctttggggggcc

SEQ ID NO: 141175 - DNA, 402 bp, Glycine max
  Clone ID: PAT_MRT3847_98493C.1
tttatattcctacaaaaatgtagaaatgtattgtatatgtaacccaattataactttcatttttagtcttacttttattctattatttttttaattttttttaaaaatattactaggaatattataatttaactgaactcatttttttaatgtactcaagaataatttttttttagttatagtattcccgagaatgtcattgctaaaaacgtagtcttataccttgaaataaagttaacttgtagtttaatgaaatttcaaggttaggctaactttcttttaaagtactcttgttttcaattttttaaaccagctttgaaacgaaaaagtagtttgatctattacgcctaacaatcaattctaaacaattgttaaagggaagatccgaaacgcatttcaatg

SEQ ID NO: 141176 - DNA, 3311 bp, Glycine max
  Clone ID: PAT_MRT3847_98494C.1
ggtgcttgaaagatgcaattgcagggcaggttcgcactgcgaataagagcttacgagaagaagattgctttggaggtaaaatggaaggttcgaggctcaaatatgttgaccatcatcttcggcaacagcgagctctccaacaattgggaatgatccagcacaatgcttggagaccccagagaggattgcctgaaagatccgtttctgttcttcgtgcttggctcttcgaacacttcctccacccttatcctaaggattcggacaagcacatgcttgcaaaacaaacagggttaacaagccactccgaaacaagtgaatagaaaagactggaccgtgaactaagagattattgcatggaatggtaacagttcagcggattcgtcgtgacaggacgctgctccacccgcacccgaaacatcagaatgaaacgaaacacggatggcattctcctgcaccctccttaaaatgagatacaacaactcatttccccactctttcctgtatacatctacttggtaattatttctcggtatttcttctttctccaaatatctttgtcgagcccctgagaacgtgtctgattctcctttctcgttccggcaacagggatcaaagtggttgtagagcgtcaacggatgtaacggagatagattcttctttcttacgttgcaaacattgacgcaatggtatcaacgaattaacttggtgtagggagattggaagctgaaatcgcttagtgatgaagccatggagcaaataatactcgcaagactagaagatgaaactcatactaaactgaaagagaacattggagcctcttataacttctgtcaacagtcaaaaggtgaggcaaccacgacatgttagacaccaaacacacgaaatgatggatacaagataagtacaaatgtccgaatttgaaaagcacatgaaaaaagctaacgacttaattcccgagtccccggccgcaaatccctcactacttatccatcttcaactgcggtcattccctgaacagaacttggatctttcaccagtaaaagctcgcaaggttgcacaggaggatcgtccaacctccaattggggatattcaaaggtttgagccagagccgtatacaccaagacctttggttcacgttgcagctcatccttcctggtctgttagcaacgccaggaacacatcaaacggttttcctaagtcaaaacagtcaactggtaagcacattagacacttggaccccagacgagtttaaagtcctaagcacttcgtcggatctgtcgatggctgcttacaacaatttgagtatgaaaaagcctgagatttttgctgatgaagtgttgcttgactgtgtaacagagattaaagattgaaaggagggcaacgtcgtaaaaacttactatgtcgggcaattaacaagtcccgcaagtggcctccgtagctttgaggtattgggaagtgggaaaagcaacaatgatttgtcaactacggaaagacaagaaattcagataaagaaagcaaagctaatcaacatgcttgatgaggtggagcaaaggtacaggcagtattcacaaccagatgaagatagtgatatcctcatttgagcaagctgctggaataggctcagcaagaacgtacactgcgcttgcattgcaaacaatttcgaagcaatttcggtgtttgaaggatgcaataacggggcaaatcagagctgcaaacaagagtttgggagaagaggattgttttggtgctaaaattgaaggatctaggctcaaatatgtggaccatcatctaaggtaacagagggcttttcagcacctgagaatgatccatcacaatgcttggagacccctgcgagtactggccaggatagcactttctgttctgcctgattggaagtttgaacactttcataatccttacaccaaggactcggacaagcacatgcttgctaaacaaacagggcttaccaggagccaggtttcaaattggttcattaatgctagagttcggctttggaagccaatggtggaggaaatgtacttggaggagatgaaagagcatgaactaaatggttctgaggagaaatcaagcaagagtggtgaagatcctgctacaaaaaccacaagtccacaagagaaacgtacttcctctgaaattgaatccaaaagtttcaattccaaacaagatgtttccaaacaaagccagaacactccaattcttccaacttctccaccatcaatatcacctatagggggaagtgttaagaaccaatcaggattcagtttcatggggtcatcagaacttgatggaatcacacaaggaagtcctaaaaaaccaaggaaccatgaaattcttcactctccaaaccgtgtcccttcaatcaacatggatgtgaaagccaatgaagcaaacaatgagcaacaactctcaatggatcacgagaggcagaataatagggatagctactccttcatggggaaccaaacaaacttcattagtggctttggacaataccctattgaggaaattggtaggtttgatgctgagcaattcacaccaaggttttcaggtaagaatggagtttccctcactcttggtcttcctcattgtgacacattgtcaggaacacaccaaagttttctcccaaaccaaaacattcaacttggaagagggttggacattggtgaaccaaaccagtttggtgccttgaacaattccaattctcacaattcagcagcatttgagagtatcaacatgcagaacccgaagaggtttgctgcacaattgctaccagactttgtggcctaaataagacattgaagaggggatagatcatagttggtgacattggttatatgggtctctcatattttcttctaatccatgtgcttgtttcttgggagtagtgataaaatcttagtgtaaagaaagaaggaattttactctagtataggtttataccttgcatagaaccattttagtttcttagatagcttagagatttgaaagtctatggttatttgaggttgtatattatttttgtaatttttgaaaatgggatagatgggttggtgtcataaaatttcaattggtaaagattacaatatatcttcgattgagagtatatgcaatgtaatattttgcaaggtagcttaggatttgaaagtatatgattgagattgtatattatttttgtaagttctgaaggtgggatagatggattgttgtcataaattttattttggtaaaagataccaatatatcttcgattgaaatctccatagaagaaagtggaaccaattacctttcc

SEQ ID NO: 141177 - DNA, 464 bp, Glycine max
  Clone ID: PAT_MRT3847_98495C.1
ggtttcctgtcatcactgtatgacgtcctccttctttgggggggggggggggggggggggggggatataaaggtataaggaggagagccatcaaaagggatcaatagtgatattggttacaaataaactacaatttaatagcccgaagttttaatttaatacaagtcagacgcgaatacaatgcttgggttgtattacgtagtataacgtaagccgaaaagctgacaattaagggcataaaaacaatccgtaaaaaagatccccagaagtaaatacgaagacaagcaaagcaacaaaatattaggtagcatgcccatcacgggtgcgatgataatccttagagatgcgtttgcacgtgtgcgtaacaattagtgtgcggggtatggcctgtgtgcgcgttagtattcgtaaatatgttcgtattagagccacgattattgtggagcgttgttagtggcaatagg

SEQ ID NO: 141178 - DNA, 612 bp, Glycine max
  Clone ID: PAT_MRT3847_98496C.1
tcgcccacgcgtacgctttgcataccaatttttattattatcattgtttcttcgtttcatatactctgttatcgtatctgctattaacataaaaattaaaaccaaagatgaagatgatcttaaaaaacggttcataaacgtcaagaaattttttgtccccacaatcacatggaaaatgtaattattaaaatcctatgagaggtaccttgatttattttaggattttactcctctaatcttgatgatatatatttcaatatattcatttcctttaatatgtaagtaaggttttaaattggaatcactatatcgttttattcttgatgttatgtgaaattacaaggcaaaagaaaccgatggggtggtaaacccaaaattcttgatgttgtaattaaaatttttgtcacaaattttctaaaacgtaacattgaccataattagtttttcatcaactactgtgatcactcacttcaaagtgaatagtagtcgtattgaaattactttttttagggctaaaagtcgttttgggattaaagagtgtagaattctcttccttgttctccctttcttggctgagaaattggccaatttcatgtgacatatcattaatag

SEQ ID NO: 141179 - DNA, 479 bp, Glycine max
  Clone ID: PAT_MRT3847_98497C.1
tgttggttaagccacgtatcctaaaatctacagcagataagaccttatctatcaatagaatgcttcggtgtccccctgatatcagcgtaggatagactgcaatacctagcccacacgagaaaacctgaagaagcatttgtcaaacaacaaatttcgcagagtaacatatttatgactacaaacagctgcatatgttgcacagaagaaatggttatctaagagtggacacctgaggccatccctgaagaccgatgggttactcaaaaaacacatttgtgcagcagaaaactatgatgggggaacctagatggtgactaatagaactcaatgattcatctgaggatgtagaggactgattaggaaaagttgaccacacatcttctaatgtcctatggccttcagtatcttcctaaaacagaggctgtgttatccaataaacacgcacttgatccttgctgcccctgtacccaatagggact

SEQ ID NO: 141180 - DNA, 360 bp, Glycine max
  Clone ID: PAT_MRT3847_98498C.1
aatttgacggtgtcggtgattcaccaaattctatctctctagctctctcaaatctcaattcactcattcattcaccctttcgtctctatctcaatttcactatgtattgcctacaattcagctaaccgcaccaattccgatggccgcgtagcggcggctacaggacctgcaatcccaaccgtcgaacaatatctgcgtcgactgttcccagaagaacccgcaatgggcctcggactcctacggcgtcttcatgtgcctggagtgctacatcaagcaccgctgcctcagcgtcacatctccttcgtgcgatccgtgacgatggattcgtggtctgaaatccatatcaggaagactgaatcc

SEQ ID NO: 141181 - DNA, 213 bp, Glycine max
  Clone ID: PAT_MRT3847_98499C.1
ggcaaaaaaaatggtttaattgagtccatccttccctagggttaatccagaagatacaacataatttaaatccaccatcaataaaaagtattgaaaaaccgaaagagggtaaattctggaattacatacgttcaagaaagggcgattctagcaatcaaataaagtaaaaaaaaaacaaatggtattcttaggggaggggtacaattgtaacat

SEQ ID NO: 141182 - DNA, 207 bp, Glycine max
  Clone ID: PAT_MRT3847_9849C.1
tgaaaataaggaacacccgatctttttattatgattaacggaaagggttccttatataaacatggccactcggcgtcaagcaatagtaccataatctcccaccgcaagagtggggcatgatgacatggcgaccatcggggtgcacagatggccatgcttcttgcccgggaactttcaatggtaaactgatttaaaaaacgaaattcc

SEQ ID NO: 141183 - DNA, 1355 bp, Glycine max
  unsure (1)..(1355): unsure at all n locations
  Clone ID: PAT_MRT3847_984C.1
ccacgcgtccggtcgcgtgctgtgtgtgatatcgtagcggagcgtttctgcaaaatcgaaaaactcgaattctcaacaacgaagttccctatcgaattgccatctattcattcttcattcaattctttcgcaatgcaaactcccgatgacgttcgcaaccttcccatcgacatcactttctctcgtctgggagaatggttggtggatcgcaagcgagtgcccgctgattggcgcaagcgcgtggcggcgatcagggcccgaatttccaaggagttcccctctctccctaaggactctgacccctttttccaaaccctagaccccgaagggattggttatttggaggctaaacagatatatgatgatctcttaaagtctacctcggagagcaggaacatatttggtcgcttatcaggtgctgcgggtgcgtgggaagcaattgtgcggtcctttgagaaggatcatgttttccttggtgaggctgcgcagattctgattcaaaatgtgagctatgaaatcccttatcagaggaaacaggtgcagaagattcagcagcatctgttagagctagatcgcaaggaggctgatataaaaagaagtgctgcgctttcggccaccaaatatgctgaagcttgtcaggagcttggcttacaggggaaaaatgtcagagtagaactcttggagacagcactattacttccgagcacgtttagcaaaattctggatgttgtaaacagtgacaacttgtcaagggcaattgagtattattccaattttgtcagggatgctcacattgaaaaggatagatctttgggagacgtactacaaaacttgaagaatatgcgcgaaaatcccccatctttaaatgttgctgttgactctgagattattaatgatgttaatgttcattcaagcaaaaatggattggatcctgcaatagccaatactgaaattgctgtgcctgacattgactgggatatttctgtggatagttcacaacttgattgggacattggaactgtagaagaaacagaggataatggtaatggattgggtccatatgaaatcattaatgcctctgacatcggatctgatctaacaatatcaaaccaagaaataggatcacctgcagatatatcttgggatattagtgtggatactcctcaggttgatgtcattgatgatgataatgccccaactgtagtgctggagaatcagacttctcttcctgattccctatctcaattgacaggaaacaaggaagaaggagccagcttttagatacggagtacagaaataaaattcttgatgatctgtatgagatgaaatnctttttaatcaacggttggctgaat

SEQ ID NO: 141184 - DNA, 627 bp, Glycine max
  Clone ID: PAT_MRT3847_98500C.1
gcatcttgttcctccgctcaacaacctttaataacatctttctctctccgaacagatcacactacggacgcgtgggcggacgtggggttttgcgtgtgaaccactcgcatcttgttcctccgctcaacaactataataacatctttctctctccgaacagatcacactatggccacctcaagcgccaaatcagtccatgatttcaccgttaaagatgccaagggaaatgatattaatcttggtgactacaaaggaaaggtccttatcattgtcaatgttgcctcacaatgtggcttgactaattcaaattacactgagctcagtcagttgtatgagaaatacaaacagaaaggtctggaaattctggcatttccatgcaatcagtttggggcacaggagctggatctaatgaacaagaaaatactcggtcgtgacagtgtgtgaacgctctacaagtatctaacattttgacaaggttgatgtgaatggtgacaaaactgctccactgtacaagtatctaaaatcaagcaaaagtggactctttggggaacaaaccggaagggctggaaattctggcattttcatgcaatcagtttggggcacaggagcctggatctaatgaacaga

SEQ ID NO: 141185 - DNA, 1206 bp, Glycine max
  Clone ID: PAT_MRT3847_98501C.1
atgaaattaagtaatatccagctttccatcacattgtgagagctgaaacactttctgctcctcttgtctctttttgatatatcttcatcataatttctccaactcacaccattttgtttaataaaacttgtgatggaaattcaattccaacaaccaaacctgcagcatcagaaatcaggcattgcaatcaccaaaggtggcaagttcaaagggagaagcagaaacaacaacaccaacaaatttgctggggtgagacaaaggccctcagggagatgggtagctgagatcaaagacacaactcagaagataagaatgtggcttggcacatttgagacagctgaggaagcagcaagagcctatgatgaagccgcgtgccttcttcgcggatccaacactcgcaccaacttcatcactcatgtctccttggattcccctcttgcttctcgaattcgaaatcttcttaacaacagaaaaggtatcaaaaaagaggaagatgctaatgctaatgctaataatgcacctgccccaagagttagcactactagcagtgctactagcactggtactagtagtaattcaagcaatggaaatgacaacaatgaccagtctctttctaccgtaacaactcaaagttcaaatctgtttgatgatgcctataaaccagatttgagcaattgcagggaggagtttgagtcaggtcatcagtccaatacttcatggtgttttggacctgtctttgatcgtttccctatggctcaaatattcgatataccaaagattgatgatggcctcactaatgcagctgatttggatctttcagaatttgaaagaatgaaagttgaaagacaaatatcagcttcactctatgcaattaatggggtgcaagagtacatggaaactgttcaggactccaatgaaactctctgggatcttccacccttatgctcattgttctgttaatcttgaaggtttaaatgatcctgcaattattccttctcaatgtcctatttattttactattattgaagatttgaggaaggggtgtgggatctaaggattgattgaaatattacaataacaatatagctttggtgagatataattttgtttttctaactgcttaatgtcagcaggaagatccatgagttgcattttgtgaaagctctttttcaatcattattatgtaaaaagtctaagcagttagtt

SEQ ID NO: 141186 - DNA, 463 bp, Glycine max
  Clone ID: PAT_MRT3847_98502C.1
tattttaatgtatctaagtttttaattaattgttctcataaggcacttagcttatgcaagaactgctcaaaatgaagacgagtgaacttataggcacttggattttaagtgcacaaatgaaagagatatgacttatagttctctagtaagaaataactacgactcaaaccaataccaaaatactaatggttaaagatcaagggacaagaagaggactaaacaatgtgattagttaacaaggaaaagtgaactcttcttcattcagagataactgcaaagcatgttctgcttctttcaagaataaacgagttagctgcttctggccacgcctatatactatagcagaccacttgtttctagtcatcaactttggctcctctgagacattttcctttgggcttaaattgctcaggcattgtttgctatcttcatggctatcaataataaaggctttcttgagcaa

SEQ ID NO: 141187 - DNA, 979 bp, Glycine max
  Clone ID: PAT_MRT3847_98503C.1
aatatctaaaatcaagctaataatcttcaattggaaacgccagagctccatcaccggaacaagacccaggcaggtgtcgcagtacgcggagaaaggacgctatataaatatatttgtccccgatgctctctatttcagccactcgtatattcttcctccgctcaacaactataagattatcttcttcttcttcttctcttcaattcttctccaatcccaaccgcaccctcttccgtccctttcttcacacttccttcaaaccacttccttcgtctttctctttccgaacagatcacactatggccacctcaacgccaaatcagtccatgatttcaccgttaaagatgccaagggaaatgatattaaccttggtgactacaaaggaaaggtccttatcattgtcaatgttgcctcacaatgtggcttgactaattcaaattacactgagctcagtcagttgtatgagaaatacaaacagaaaggtctggaaattctggcgttcccatgcaatcagtttggggcacaggagcctggatctaatgaacagatacaagaggttacgtttgtactcgcttcaaggctgagtttcccgtttttgacaaggttgatgtgaatggtgacagaggctgctcctgtacaaatatctaaaatcaagcagaggtggactccttgaagatggcatcaaatatgctgatagttcgccaatttcctgtgagggaaaggttgttgatcgctatgcatcgtagctttgacattagagccataagcaggacttgctgtagttgatattggcataaagttatgaatggcttccgttaaaaaaaaaaaaaaaaaaaaaaaaaaaaaaaaagagatgctgctgcacttacttgtgtcgcttatatctagcgaaacagtgcttcttgtagctttgacattagattcataaccatgagattgtgtacttattattgtgtgaatgtaaagttaagcttccttt

SEQ ID NO: 141188 - DNA, 240 bp, Glycine max
  Clone ID: PAT_MRT3847_98504C.1
acgctgcgagaagacgacagaagggaccaccacccaactaattctataactactaggtaaataactctataacttcccaacttcatgaattcatcacccgaaacttaacccccttctgaatggggaaaagtagcaaaaatgccagataacatgaaaactcatcttaagataagtttgacttttaggtataataatggaatatgcgaattgttttgaagagcttttattaaaaaattaata

SEQ ID NO: 141189 - DNA, 1119 bp, Glycine max
  Clone ID: PAT_MRT3847_98505C.1
cgcgtacgctttctggatggcatatactgccccatactgcatcctttcacaaagcaacgttagaaaactagatccttgaattgaggtattctataatacctctcttttgacttgaacccctcgcatcttgttcctccgctcaacaactataataacatctttctctctccgaacagatcacactatggccacctcaagcgccaaatcagtccatgatttcaccgttaaagatgccaagggaaatgatattaatcttggtgactacaaaggaaaggtccttatcattgtcaatgttgcctcacaatgtggcttgactaattcaaattacactgagctcagtcagttgtatgagaaatacaaacagaaaggtctggaaattctggcatttccatgcaatcagtttggggcacaggagcctggatctaatgaacagatacaagagtttgtttgtactcgcttcaaggctgagtttcccgtttttgacaaggttgatgtgaatggtgacaaagctgctccactgtacaagtatctaaaatcaagcaaaggtggactctttggggatggtatcaaatggaacttctccaagttccttgttgataaagagggaaatgtggttgatcgctatgcacccacaacttctcctctgagcattgagaaggacttgctgaagttgttggatgcatgaatgaagctatgaatgactggagctgccaataaatgaattgtgattagaatataaattatgaataagaaatgtattgcagatgctgctgcaatttcctgtgtgccttgtatgtgtaccgaaacagttactcttgtagctctgacattaggttcataaccatgagattgtgtacttattattgtgtgaatgtaaacttaagcttcctttagccatgccagtgatctacctattccatttaggtttgcttcctggtcttattacctgacgctgttttttctcaatccctatttcattcctataattaagtacgtgggagggagtatcataagtattttttttaacctatgtgctctaattgaaattttaccctaaaattgccacggctagtcatgcttgcctagaaattgtagagattttgccctcaattttggtgc

SEQ ID NO: 141190 - DNA, 255 bp, Glycine max
  Clone ID: PAT_MRT3847_98506C.1
agaaaaaaactatgaatgggttttgggggaaaaaaatgaacccgccaacatttttttttggttgaaaaagaaaggtacatttgatgggtgtcaaaagggatttcaagggtaggggaaaggcgaaagggttttttaacatttacatagacacctccaaaaatatcaaagtggttaatccctcattctagggaattttttaaccacatggagagagttgaacaacgaccttgtggctgaatatccagcttaacaacg

SEQ ID NO: 141191 - DNA, 2801 bp, Glycine max
  Clone ID: PAT_MRT3847_98507C.1
cacgcgtgcgtatcttaccactttcaattccaaattcactctcagaaattagaatggctagccaaggctcgccaggcggagaaaggacgctatataagcattttttttgggctcttgggtaccatgccttgtctcattttcattatcttaccactttcaattccaaattcactctcagaaattagaatggctagccaatccaaacactaaatcagttcacgatttcacagttaaagatgccaggggaaatgatgttaatctcgcccgattacaaatgaaaggtccttctccttgtcaatgttgccttacaatgcggctttgactaatatcaaacatatcaccagagcttaatcaatgtgtatgacgaaaatcactaaacggaaaggatcttagaaaaactagcattaccatgcaatcaaattggggctcatgcgccaggaactgattggggaaattgtgcattttgctaataaatcgctacaaaagtttgtttgtacttgtttcaagggtgagtttcccgtttttaaaaaggttgatgtcaatggtgacaaagcagctccactgtacaagtatctaaaatcaagcataggtggactctttggggatggtatcaaatggaacttctccaagttccttgttgataaagtgggaaatgtggttgatcgctatgcacccacaacttctcctctgagcattgagaaggacttgctgaagttgttggatgcatgaaccaagctatgaataattggagatcacattaaatgaattgtaattataatattaatgctaactaaaaagcctattgcatccgcaactgcaacttcaaatatgccttggacaattatagaaaccttggttattgaaaataaaatgttagattcataaccaatggtccttaacattgtgaattttccaatacaaattacagtgactaatttaaattacactaagattagtaacatatatgtcaaatacaaatagaaagttctggaaattctggcatttccatgcaatcagtttggggcacaggagcctggatctaatgaacagatacaagagtttgtttgtactcgcttcaaggctgagtttcccgtttttgacaaggttgatgtgaatggtgacaaagctgctccactgtacaagtatctaaaatcaagcaaaggtggactctttggggatggtatcaaatggaacttctccaagttccttgttgataaagagggaaatgtggttgatcgctatgcacccacaacttctcctctgagcatctgagaaggacttgcttaagttgttggatgctccgccacgttttattgtcagcttaccagagcctgtctactacttttatttttctcatactttatctatttatatacaaatgttttgctctctccaatgaatacactatcggcctatctccaccaccttcatttaatgaattttttactaacctcattccaacgaagacctcacactttcttccttctaagtacaaacatcctcatgtttttttctcttttctaactgtttttctttttcccactcaaagcaaaaaaactgtcattcatctcgtttttgacaattcttcatggaaacttcctgattctttagtttctctaccagctatgtccctgtccttatcacaggtatattcacaataggtttttacaattaaaaattacaaatgtaatttttttttttccttgtttcctataacaataatgttcgttaccatcgccaagctgttcttacgcttagaactaacgttttattctttccttttccgatccttatttcaccctttacttttctccgtcaacacttataagacttatttccttcttcttcttctcttcaattcttctccaatcccaaccgcaccctcttccgtccctttcttcacacttccttcaaaccacttccttcgtctttctctttccgaacagatcacactatggccacctcaaacgccaaatcagtccatgatttcaccgttaaagatgccaagggaaatgatattaaccttggtgactacaaaggaaaggtccttatcattgtcaatgttgcctcacaatgtggcttgactaattcaaattacactgagctcagtcagttgtatgagaaatacaaacagaaaggtctggaaattctggcgttcccatgcaatcagtttggggcacaggagcctggatctaatgaacagatacaagagtttgtttgtactcgcttcaaggctgagtttcccgtttttgacaaggttgatgtgaatggtgacaaggctgctccactgtacaaatatctaaaatcaagcaaaggtggactccttggggatggcatcaaatggaacttcgccaagttccttgttgataaagaggggaatgttgttgatcgctatgcacccacaacttctcctctgagcattgagaaggacttgctgaagttgttggatgcatgaagttatgaatgtttggagttgccaataaataaactatgaataagaaatgtactgcagatgctgctgcaatttcctgtgtgccttatatgtaccgaaacagttgctcttgtagctttgacattagattcataaccatgagattgtgtacttattattgtgtgaatgtaaagttaagcttcctttacgtgtgctgtggtctacctattccattaattggtttaaacccgaatttgtactgaaacagttgctctgctcatgcacctttgaataactatttgattcttcatctatatataaattgtgttgtgtatcaatttatatatgtaaacgaaattcattgctcgtt

SEQ ID NO: 141192 - DNA, 2257 bp, Glycine max
  Clone ID: PAT_MRT3847_98508C.1
cccacgcgtccggtgagattttacagtactttgaaacatacattttaatctgtttaggagataaacggcggtggagcaagagagagcaagagagagagagaaggtttggaagaatcgcgatggagggtgaggaaggaggaggcataaggctgagcaagcgaatcgcaaacggagaggttgactacaagacgaaatccggcaccgcctggagccactcctatctcaaccagaagccatggcaccctctttcttaccccaaccaacgccgcaagtggatcgccgaacagacccacgccaatcgccaacgccgcaccgaagaggtttctcgcgagttcgctcaggagcaagagttctttcgccaaaccgctctcatctccaaaaaagagaaggaaaaggtggagctcatgcaagctgttagtttcatgtacgttcgtcctccgggctacaacgccgagagtgccaaagctgctgaaatgaacgacgagaagaaaaaagaggacatgagcaaggggcttagtgctgatgagggaccttcctcttccatgccgccgcagagttcctcgcatttgaatgaagagaagaagaaaccgaggcccaaggatgttttcgggcggcctcttccgactgaggaggaattcgaagttcttaaaaatgcgcctaggctggaaacaggagctcctgccagggtgaaaccttttggaattgaagtccgtaatgtaaaatgcttaagatgtgggaactatggtcaccaaagtggtgatcgtgagtgtcccttgaaggatgctataatgcctaatgaggaaagcagattgaaaagagatgatccattgaatgctatccttgcccacacggatcctactgagcccctaaaatgggagctcaagcaaaggcctggaatcagtcctcctcgaggagggttcaaaccagatgatccaaaccagcagatagttgctgaggatgacatatttgatgagtatggaggttttcttagtatggataatatccccgagttattaaccaacttttctaagaaaccaaagaagtccaaaaagagcaagcacaaaaagcagctacaattaaattcagatagtgaagcatcatcggatgatggagagaggaggtctaagaaaaaaaaggttaaggtaaacaaaaagaagcgagatcgtgctaggtcaagttcatcagaaacttcagtctctgtagaaggtcatggaaagagcagacacaagagttcccattcttcagaagattcagacagttactggaatgatcgaagtaggactaaacgagagcgttccttttcatccaaaggttctgaccattctaggcatggtaggagtaaacataacagaagaaagcatgtttattcatctgaagattctgacagtcagagggatgatcaaagtagaaagaatatacaaaagcataagagcaaagatagcaaaaaaagacattcatattcatatgagaattctggtcctgcccgtgatcatgctgataacaagagcagggatgcactttcttattcatctgatgattctaatcatcaaagacaacccaaggttaagaggagcagcctgaagcactcatcaactgcccattgtgattctcaaaagcatgacagaaattatggttttgatcgctaccaaggagatcagagcagagctgtgtctgaagattctgatgtccacaaggatgatctaaatagaagaatgaaacaaaagtatcgccatacacccaagggttctgagcatcctgaaagtgatatggataaacagaacagaaaaaagcagtgttattcattgaaggattctagtgctgctgatggatatcatagaagtgaaaaaagtagatattatgagcattcttattcatctgattattctgatcatcgtgagaaacatcataagtcaagaaggagcagctacaagtattgaatagttcattgcaactgtcaagcatcacagaaattattatagaaggcggagtagatcttcgtaagggatgccaaaatagaaaacaccaatgtcatcgttttggccagtgtgtccatatgtctattaagttgtttaatgtattaaagaagaagtgtaaacatttcattaaaaaagaggaagtaaaaattagtgcaccatgaagtcgttgtattatttgtgttgttttccacattgccttcgtgtaaaagagttggcatacccttttttatttatttcctccttttaataaaggatttttttaaaaaaaataacccaacaac

SEQ ID NO: 141193 - DNA, 529 bp, Glycine max
  Clone ID: PAT_MRT3847_98509C.1
tacggctgcgagaagacgacagaagggggggctcttgggtatcaagccttgtgttggctgtaatagaataagcttcaattggaaacgccagagctccatcaccggaacaagacccaggcaggtgtcgcagtacgcggagaaaggacgctatataaatatatttgtccccgatgctctctatttcagccactcgtatattcttcctccgctcaacaactataagattatcttcttcttcttcttctcttcaattcttctccaatcccaaccgcaccctcttccgtccctttcttcacacttccttcaaaccacttccttcgtctttctctttccgaacagatcacactatggccacctcaaacgccaaatcagtccatgatttcaccgttaaagatgccaagggaaatgatattgcatatgcatgcaaattttagattttaggttaaccccccctttttttatccttttgcaggatgccaaaggaaatgatattaaaccttgtgactacaaaggaaaagtccttatcatt

SEQ ID NO: 141194 - DNA, 4095 bp, Glycine max
  Clone ID: PAT_MRT3847_9850C.1
agggaacaaaggctttgaatttgtttgcagttgagttagctttcactttcagtgtgagatcttcgtctcttctcttgcttccttcttcaattcatctccgaaccgcgtttctatttttgactctctctctctactcagtttcgtcatactgtgggaaattatggacaaggctgatgcaaccacaattgcggtcgcagagtctaaaaaccttgatgttgtggccgaaatcatgtaagaatgtatactaatattggtatgccaccgggggtacctcagcatcatcctcaacctccaacgagctcacaacctaatctgttcgggaatgcatttaattctgctggttctggactcattcgaggtggattgggtgcgtatggagaaaaaatattaggatcaagctctgagtatgtccaaagcaatataagccggtatttctctgatccccaatactactttcaagtgaatgaccactatgttaagaacaaattaaaggttgtgttgttcccattcttgcaccggggtcattggactaggattactgaaccagtgggaggtaggctctcttataaaccaccaatttacgacataaatgctcctgacttgtacattccattaatggcatttggtacctatgttgttcttgctggcatctcattgggtcttcgtggaatgtttagtcctgaagctttgaactggttatttatcaagggattggttggttggtttatgcaaacagcactgcttaaagttactttactttcattaggcagtggggaagcacccctgctggacattatagcgtacgctgggtatactttcactggcatatgtttagctgttctcggaagaataatattgggctactcgtactactttttgatgccatggacctgtttatgcatgggagtattcttggtgaaaacaatgaagagagtcctttttgcggaagtcaggagttatgactcaagcagacaccactatctcttgctctttattgctttggttcagttcccattgttcacatggcttggcaacattactatcaattggcttttgtagggtgatagtttttacactgtactagaagcgattcttagtgaatttttttggttgatgttggagcattgtaatatatggacgttttatttccccattgtttttacctgttggtaagttttcagaaatgcatatttacaggccttacgtgtgcgtatttttcctgatacatgataattgaaacattattcttttctaaaaatgtatgtataccactgaaaacaatgtgatgctagatttttgtagttgtgtctgtataccttatttacttttgatttggtatctcttacctaatatctacgcggctgcgagaagacgacagaaggggatcaaatgtgtgtggttccagttttttgggtggcaaagtggcagctgctgccaacaacgtcaatctccagaaccgaattctattttcattctcgtattagattatatactacacatgttgtaggcgtttcactttgtttcctcgtactcttcgaaaattcggtgactcactcgctctcatcgacttggacgatatttcgtggacaagagttccactttcccgcagttctcatttatttcctaaatggagctcaatgaagatcctggaccaattgataattatgttctttatgatcaagataatcatgtatcttcagcagtttgggatggacatgagcgtggtgtacttagatgccatgaacacacttcaatgcttgatcagtggaagctcacacctaaacagattaagttggttgagaaggctggtttcggtcacctacgattactttctgctatgagtcttgacaatgcattgatagcagctttggttgagcggtggaggagagaaacaaactcgtcccaattaccgtttttgcctctgctgtgggttccttctcagttctcagatctcactctgttccttcccctgggccattattcttgattccctcagcaccgtgattcttctttccaaacttcttctcatttcgatttagaatgaatagtaatgttggatcccaacccggagtactccagcctcaaaccagtttgcctccaaatccttttgggatcgtgtttattgttcatggttcaggactcattcaaggtggatttggggcgtatggagggaaaattctagctttgagtacggagtatgcactaagagttagtaattgtcatatctctaatcctcattactactttatggcgaataagcagtatgctaaagaacagatttatggtggttttgttcccattccggcaactggagtcaatgtactaaaacctctggagccagagtgggctatgaggtacaataatacaacattaatgaacatgaccgtttcattccgttcccatcctttaatagcggtggctgccttagtaatactggatcgggtcgaggtaggttttctagtaaagcaccaattaacgacttaatgaagatgtatcactattacttggattggctattgatggagaacctgtgataggtccaataagtgcaccaagttcagtttgtgaaaaattattagggagagtacctgaggacctgaatggtggaatggtgaagcttacttggctgaaggagttcttctctgagtgtcctgaagatgcatcacaggaggaaattgagcgatgtacttgtgctttccttttatacctagtaggcagtacattattttctacaacaacagggaacaaagtccctgttatttatctttctttctttgaagattttgataagtctggatagtttacttggtgtcgaaaagcattaatatatttattttgggcgattggcagtgtttacattaaatcagaaaccactattagtggctgtttatggctattgctgtggcagcattgtttaacttgcctgtgttctttccccattattttgataagatcgtgagactacttgtaatccctatttgcttgcattaggtgattattttggttttttaacttagacaagttgattgacatatgctttttctctctaacagattgcttttatgtgttggctatggagatgaataactataggccttcgtgctctccagatatattattttttagtactttatttgcattaacacaataatgttgattaggtgaatatttcttttacagaatgattatccaattgtaatcgaactctaagattaagattatggatggtgtcactgatgatgaaggaataatgtgaaaggaagagttaaatagtggatcacggggtagacttgatggaaaaaatggagtttggctctcagagtggtcagaaccttgggttatgttgttgaaggtggtgacattgctgatgagggtgagtacatgcagtggtatcagaagattacccggaaatatatcaggagagtcacatcatccctggaatcagagtatcaaagaacagtatttctttgcttagttatcattgtttgtcttttactggaatgtatgttaatatcaatacttttacttgactgctacatgcttttacaggttactgctatgagggaaattgcaaatattgctgatatagtctcagcagaagggttggattcttataatagagagttgcttgatgaagtgataaacattgtgcacaaatgtttaacagggcagtttgaagaaattccaaatgagaaagtgaaaaagaagggtaatcggaaacgtaggcaaaaggaccatctgagtatggaatatgaatagcagcagaatagagcactgtccaagctaactctgaccttagccctactgatatttataacttcaggttggtgaaggacgaatgtatataattaaatggtcaacaccgcatcaagaacatattctatagaagaggatggcatattttttaaaaaaaaaaaatggagacattcgaatgcagatagtttgtaagtatctactgtaaagctccatttgatatttgatcctttttaggcatttattggatcttctctcttcttgtagatgtatggcctggtttttaaatgtttattatattagtatggggctcttcatcctttgactcatcttgcaatatgg

SEQ ID NO: 141195 - DNA, 358 bp, Glycine max
  Clone ID: PAT_MRT3847_98510C.1
gaaaatttatttctcgttaaagattgtacttttttggtaatactctagctagcggtggcagcgaattgtttaggctcgcgccaccggcgataagcatcgaggggtagttacctgttaactacactgactaagtcactcgttcgaaaaagaacatatcctcttcgttggagtgttacatcactcccaaggggtccaagacccttgccctcattatgggggttatcgatggatcatcatctgatgggcacaccatgccatggacgcgatgcgtcaaaagaaacattccatccacagttataatactgcctgagggattctcaagcattgctaaaatacatggtctgagattacgcggcga

SEQ ID NO: 141196 - DNA, 453 bp, Glycine max
  Clone ID: PAT_MRT3847_98511C.1
atatctacagaattgggcttaagcagtggtaacaactcattttacgcggttattgacattaaacatttttagctaatctgaaattccaccatgaaacctaacacgttcatcatcttcatcatcttcttcttcacaatcaccacttgttcatcatcaactgattcagttgagatcattccttttaaagaagcgtataaagttcaagtaacagtttactatgaatcactctgtccatactgttaaaacttcatcgtcaattacctgatcgatgtgttcaatgaatgtatccattcaatcgcttatgtaaaactgtttccttatggcaactctaaagtcaactccaactgcaacatcacttgccagcatttttaacaaaattgtttgcttaacactttttaagcttgttcaatcaatacttgccctgatgttcatgatcactttcctttcatcttt

SEQ ID NO: 141197 - DNA, 349 bp, Glycine max
  Clone ID: PAT_MRT3847_98512C.1
tttttcaacccaaaaaatttttttttgggttttaccaacacttaaaatttcccttttgggttcttttttaaggggggttggtggaacaaaattggccttaaaatggatcttggtaaggggtttaagatgtgcctcttccaatttacaaaattaatggggccgggttttgtttttttttggaattacctcccggggtaaggttgggttatttggggccctttttgcttttttggaatggggaagccttttttaaggttccttttaggaaataaaactttatttttggggccccggaaacaacgttggggggccattttcctaccttggaaggtggttggggaaaaatttt

SEQ ID NO: 141198 - DNA, 259 bp, Glycine max
  Clone ID: PAT_MRT3847_98513C.1
gtccgaccacgcatccgtccacgcgaccggggacgcgtccggatgcagcagggggcccaaagcttaagagttatccaccgtcgaagccgacccctcttgaaaggtaagaatattcggagggccacaagctcaagaggagttctgaaatataaggaacgacggaaaatacgacacaactttcctggagtgggcgagccataacaaaactcccaccttgatattcggaaaatgacccgggttcaaaagtcgattccgagag

SEQ ID NO: 141199 - DNA, 639 bp, Glycine max
  Clone ID: PAT_MRT3847_98514C.1
cccacgcgtccgtaggctgcgagaagacgacagaagggggtagtacaccatagccatatcctcaaaaattaagtttagcttaccaatatcaacacatatatctcagctttcttccatagcattttctccttagctttcagcacattcagtttattccttactgtttggaataatattcgagttttgatcatccaatttgaagaaccaaaggatcacaaacagtcaacacaggaaggatcagttttgtttatatttcctcgttactttcgtgatggtctcagtattctttgcttctttactcggtgttggttttcttcaaactagtagcatgccatccatatccttaaatcatgtttagcatgccaacaaatctcagctttcttccttaattaacattttctcttttctcacattcagtttaatgcttaccatttggaatagtgacaagacaaatcacaactcacagtcatccaattccaataacaaaggtttgttcggttgttcctttctttatagcttattatattatattggctctttttttcatttatttaagatttgaagaaatttcactcatacaaagatggatatatatgaagtgcatgttcagatctttcaactctcatggctaatgttccc

SEQ ID NO: 141200 - DNA, 221 bp, Glycine max
  Clone ID: PAT_MRT3847_98515C.1
ggtcctcccaaatagtttttttttttttcggtacaacaaaaggggaggccaaaaaacccccccgcgaccgtgtaaaaaaaaacaagtgcaagaaagcaccccgccaaagtggctgcaacccctaacccccttgggcccgagcctttttagagtaccagggccgcgcatctgtgtagaaagaataccaaacaaactgctaaagggggagattccaaacaaaa

SEQ ID NO: 141201 - DNA, 337 bp, Glycine max
  Clone ID: PAT_MRT3847_98516C.1
cccacgctttcggccaagaatttgcttttcggaggaaaacagactgctcttgcatgggatgggtcttcactaggcaaaaacaagatacaacttcatggactaacttaaaattaacccatccgttccattgaaaactttgatccagatagtcaaagacttgaaaccaaccaaaccggattgttatctttcactatctgtcccagacattgcttatttcgtgccgcgacgctttctgtggcatgcgtatacaccatacaagggaatgcacccttggcattaccacttattcaagagggagaacaagccgcatgcgaaagcgtctttgatgggtgtcaaa

SEQ ID NO: 141202 - DNA, 421 bp, Glycine max
  Clone ID: PAT_MRT3847_98517C.1
gttcatctatctgatgactacttataggatttttcctttttctttcattttcaacttgatataaacaacaccaatctgagtccagaccagaagatactgaagaggagcaatctgtcattatggattttgagtcctcccgttccccatatctgcagaaaacactgaatagagaaatactttcgtctgggacatgatacttttctaaaacatgcatcctttgctcatgtgaccacacaagaaactcattaagcttgacccctgaagatagtatagagtgtgcagttaaaggatttattccaggaaattctgtaagaaatgactcggcaagagtcactgagtcaggcattttaggatacagacccctattcatattgttagcactcttaatgcagcttacaataacttcatttgtcaactcagg

SEQ ID NO: 141203 - DNA, 398 bp, Glycine max
  Clone ID: PAT_MRT3847_98518C.1
aattcggcaccaggtgttgctaaagtagctgtacaaaaagcacagaagaaattgaaatcaactcaagtgaaatatgagaaagaggttgaacagaaagaagcgaatcataaaggaaaaattcttgagcttaaacaggcagaaaataacaagaaagagctgtacgttaaaaacacggataagaatgccactgataaaccagaaggacctgatcaaacaatagaaattgttacgaaatattgggggctgaggaataatgaagcaagtgtgtgtgaagaacttgtccaggaaactagacataggtgtcaagaagtagtagatgaaacaaaactagttcaagagacacttgaatgtggaacaatggacaagagtttgaagtttaatgaaactggggaagttgg

SEQ ID NO: 141204 - DNA, 426 bp, Glycine max
  Clone ID: PAT_MRT3847_98519C.1
tcgacccacgcgtccgatgaaatggggtttattcatttcttaatacacaaagttcgagttacattttctcataaaaaaataattgtggtaggaagaatggatttctcaatgggaaatagcagatgttaagtttgtttttggtatttttttggtgtatagcatatttttggtattttttttaacttacatattgggcctattgtgaaccaatggccacaaagcatttgactgtttggtccttaaaattgggttcctccttgtgaaacgtttgtaacatgcaaacttgccaaatgacaatggactattgcttcctgcacctcctttatggcttatggaatggtcaatccagaatgcactccttttttgacttctggaatgatcaatccagaaggaaaaataaaaacacttcagaaaggatgtagaaag

SEQ ID NO: 141205 - DNA, 191 bp, Glycine max
  unsure (1)..(191): unsure at all n locations
  Clone ID: PAT_MRT3847_9851C.1
ggatctagcnggccacanacgtgctgatactgaagctcttcacccacacagcgctgatagcgcagatcctgatgctaccatggcttatcagaagcctcatctatcaaaccatgaccgtgtgcctgatagagcactgcccattttacaatctacatcggttcatgctcatatgcttacttaactccatgatg

SEQ ID NO: 141206 - DNA, 526 bp, Glycine max
  Clone ID: PAT_MRT3847_98520C.1
ttttctttctttttcttttatttttttatttttttattttttttttttcttttttaaaaacggcaggggaacaaacatccatatttatatatatggaaaatctggaggagggtggcaaacaactatttgattggccctagccggaacccacaaaaggggggatatcttaaaaactttttccaaagaccaaaaagagggggactaaggcccataaaataaaaaaaaaaaaaaggcccggcctgccccctcctatgaatgggaagcaaacaatggggtggacatttattcacttaggcggcatttttttggaaaggccacttatgctgcattttaccactaaaaagcttaaaatttcacgggtggcaaaaccttgcaaaaaaaaaacccccatggttggtagctttaagcctggcttgaaaaaaaaggcccattccctcggaaaaaatgggggacccaactatggggagggggctatgtctataaaaaaaggccgggaaggattaaaaaacgtccttgaccctgaaga

SEQ ID NO: 141207 - DNA, 333 bp, Glycine max
  Clone ID: PAT_MRT3847_98521C.1
cttactcattctctttttataggtttagttttcctttataacaacacacaattctttcaccaatactcataacaagacaaacacctgccaccccctaacggctaaccaaaaaaaaaaagtcctgaaaaaaaaaaggctagtgtggaaacatatacaaccacctaaagaacaccaaaaacctttttacccccactttacccttggccagatcaaaacccccaaaaaccaccgaaattaaaccaacctcccccatcaagtcaacaaaaaacaggacatacaccctatataaagccgcggaacacccccccctttggcaaaacaaatcttaaaaac

SEQ ID NO: 141208 - DNA, 297 bp, Glycine max
  Clone ID: PAT_MRT3847_98522C.1
atgcggtcaaggaaagggattaggaaaaaaaaaaaccaaaccgaacaggggttccgggttggaagaaaagttaaccatacgtaatatggtcccccgggttaaaagaggggtaaattgaaagtccaagggggaacaagagaatacttaggctccaaacaaaagtttaggaagcaccaaacctacttattccgcctaaccctggaaaacaaaactgtgaaactgttgaagccccaatcccgtttaaaataaacaaaacaggttgacgcactacaaaacctgactttataacctaaaaat

SEQ ID NO: 141209 - DNA, 196 bp, Glycine max
  Clone ID: PAT_MRT3847_98523C.1
tgataaaatagtttattaacttccgtgataggaatacacacataaaaagtacaccgagagtactcttgtaaatgtttagagcagtgctacttcatggcgttattatcagcattgcagattacaagggctggatgctttatttaatattgtagatattatttccggcagattattttattactcatgggaccaaatt

SEQ ID NO: 141210 - DNA, 149 bp, Glycine max
  unsure (1)..(149): unsure at all n locations
  Clone ID: PAT_MRT3847_98524C.1
gcgtggtcaagaagatcaacgtctcaaaattttgagtttttcccgcccaaagcaaaacgtgacnnnacaacaatcttgttgtaatatanatccaaaacgacanaacatcttaattcttcagttanananaactacgtcncnnnannnng

SEQ ID NO: 141211 - DNA, 341 bp, Glycine max
  Clone ID: PAT_MRT3847_98525C.1
tccacgcgtgcgagtacatcaatgaaggcggaggagcacactgcggcatcgagagggccagaactgctgctcactgcaactgcatccgcaagcgatcctgagattccctaggacgggtgaggacgtatgccccttagtccagcatctgctatatgcttctagcatcttgtgtactgcgaactcttgtctggctcgccgcccttcagcactctgtacctacacagcgggactattgctcttttggcgataagatggctggctcagctaaaggcgacgaaggctagtgaaagacgactggacatgtcctttcatgcacacggggaggaagctgacccagaggg

SEQ ID NO: 141212 - DNA, 2248 bp, Glycine max
  Clone ID: PAT_MRT3847_98526C.1
ggacgtaatcatgggtgtttcttcttcgaaatcggcacaaggatgtctaataggtgcagcattttcctatcctggcaaatgtaaaaaaacaggtattggcaaacagaaacaccctttctagcatagggatttgatctctccaccttggtgaaagccttgtgacccataaggcttttacagaaggtgggattttgactagctgggtgtttggctgttgagtttatggagggccaagttccttgttgaacagtgtttgtgttgcctttatctgcagcttttaattgaaccaatcctaccctctttgtttccatatgaaaagatcggttttttgtgattcctccgctcattgttgttgaagggtctcgtgaaatcaatctagttttgagacctgtttactggcagaggtgacggagtttcagttttgtaagtgcatgatcataataataaggtttttatagaaaagaaaagttgagaataagatgggggaagatggtaattcttggattaggaggacaaatttttcacacacagtgtgccatcgtttggatcctgctagattaggctctattcctatcagtgttcagtcagagcagaaatcaaggccttcctcaaaggctcagagacaccctatgacatacaagcagagatctttgtcaccattgcctgagacttatctttctgaggccttcagggaagctagacttgaacagaaaaggttctccacaccgaatccccggagggaaaagaggattatggggaagttgttgaacaaaggattctcgggagactaaggaatcaagttcaaagtcaccttcgcgtagtccaaataggcaagtgaagtcaaagaaccgcaaggattcagcatggactaagcttttggacaatggtggaggaaagattactgctgtggaaacagctgaagagtggaatgttgacatgtctcagttgttttttggcctaaagtttgctcatggtgcacatagtcgactttaccatggtgtatataaggatgaggctgttgctgttaaaatcattatggtacccgaggatgatggaaatggagctttggcttctcgattagagaaacagttcattagagaagtcacccttttatctcgtcttcaccatcaaaatgttataaagttctcagcagcatgtagaaagccaccggtttattgtattatcacagaatatctggcggaaggatccttgagggcatatttgcataaattggaacaccaaactatttctctacaaaagctaatagcttttgctctggatattgctcgtggaatggaatatatacattctcaaggtgtcattcatcgagaccttaaaccagagaatatccttatcaacgaagacaatcaccttaaaattgccgattttggcattgcatgtgaggaagcatcttgtgacttattggctgatgaccctggcacctaccgttggatggcacctgagatgatcaaaaggaaatcctacgggaaaaaggttgatgtctacagttttgggcttatcttatgggagatgttgactggaacaataccatatgaggatatgaatccaatacaggctgcttttgcagtagtaaataagaattcaagaccgattattccatcaaactgccctcctgcaatgcgagctctaattgagcaatgttggagcttgcaaccagacaagaggcctgagttctggcaggttgttaagatattagagcaatttgaatcttcacttgccagtgatggaaccctgagcctggtgccaaatccttgttgggatcataagaaagggcttcttcattggattcaaaagcttggtcccttgcaccaaaatagtggccccgtgcctaaacccaaattcacatgaatctttcaagtgtcctggcttttattgtaacaccaggtccattgtaattaaaaatgaaaggtttgttttttcaggttctctggttgtagtcactttatgaaatttctatattgatttttaggcttgcaaataaaggtgaaagcatcttttttttgcgcagtgtgcatacaaaacttatgaaactctggcttcatgtgtagttggttgtagttgacacttcatcccaaaatttaaacactcctcttccactttactcccttgtaatgaaaatttataattccggtgagtgctgcttccaataggtaaaaacacaatgtaaaggttttgtacattgtcatttatataatattagatttaataatccttaaaatttaaagtt

SEQ ID NO: 141213 - DNA, 2086 bp, Glycine max
  Clone ID: PAT_MRT3847_98527C.1
ccacgcgtccggcaggtattggcaaacagagtccccctttctagcattgcgatttgatctctccaccttggtgaaagccttgtgaaacataaggcttttacagaaggtggaattttgactagaagggatgtttggctgttgagtttatggagggtcaagctctttgttgaatagtgtttgtgttgcctttatctgcaacttttaattgaaccaatcctaccctttttatgaacatatgaaaagatcggttttttgtggttcctccactcattgttgttgaagggtctcgcgaaatcaatcaagttttgagacctgttttctggtagaggtgtaagtacaagatcttaataataaggattttgtacaaaggaaaagttgagaataagatgggggaagatggttattcttggattaggaggacaaaattttcacacactgtctgccatcgtttggatcctgctaggttaggctctattcctatcagtgttcagtcagagcaaaaatcaaggcctgctgcctcaaaggctcagagacaccccataacaaacaagcagagatctttgtcaccattgcctgagacttatctttctgaggccttcagggaagctagacatgaacagaagaggttctccacgccgaatccccggagggaaaagaggattatggggaagttgttgaacaaagattctagggagactaaggaatcaagttcaaagtcaccttcgcatagtccaaataggcaagtgaagtcaaagaaccgcaaggattcagcatggactaagcttttggacaatggtggaggaaagattactgctgtggaaacagctgaagagtggaatgttgacatgtctcaattgttttttggcctaaagtttgctcatggtgcacatagtcgactttaccatggtgtatataaggaggaggctgttgctgttaaaatcattatggtacctgaggatgatgaaaatggagctttggcttctcgattagagaaacagttcattagagaagtcacccttttatctcgtcttcaccatcaaaatgtcataaagttctcagcagcatgcagaaagccaccggtttattgtattatcacagaatatctggcggaaggttccttgagggcatatttgcataaattggaacaccaaactgtttctctacaaaagctaatagcttttgctctggatattgctcgcggaatggaatatatacattctcaaggtgtcattcatcgggaccttaaaccagagaatgtcctaatcaacgaagacaatcaccttaaaattgccgattttggcattgcatgtgaggaagcatcttgtgacttattggctgatgaccctggcacctaccgttggatggcacctgagatgatcaaaaggaaatcctatgggaaaaaggttgatgtctacagttttgggcttatgatatgggagatgttgactggaacgataccatatgaggatatgaatccaatacaggctgcttttgcagtagtaaataagaattcaaggccggttattccatcaaactgccctcctgcgatgcgagctttaattgagcaatgttggagcttgcaaccagacaagaggcctgagttctggcaggttgtgaagatattagagcaatttgaatcttcacttgccagtgatggaaccctgagcctggtgccaaatccttgttgggatcataagaaagggcttcttcattggattcaaaagcttggtcccttgcaccaaaatagtggccctgtgcctaaacccaaattcacatgaatcttccaagtgtcctcctggcctggcttttattgtacaccgggtccattgtaattaaaaatgaaaggtttgtttttcaggttctctggttgtgtagtcactttatgacattcatgtgatagtatattgatttttaggcttgcacataaaggtgaaagcatctttttttttgcgaagtgtgcatacaaaacttgtacgaaactcttgcttcatgtgtagttggttgtagttgacacttcaccccaaaagttaaacactcctcttccactttcctccccttacaaatgaaaatttataattccggtgtg

SEQ ID NO: 141214 - DNA, 399 bp, Glycine max
  Clone ID: PAT_MRT3847_98528C.1
aaatagtaaaaaaaaaaaaaaaaaaaaaaaaaaaagggggagaaaaaaaaaaaaaaaacgccaaaaaagaccaaaaaaccaaaaaaaagaaaaaaaaaaaaaaaacggggcggacgcacaagaggaaccaagctaaccaccccgggcaggcaacgcaacaaaccacaggagggggaccccaaaaaaaaaaaaacgggccggcgagtaaaaacccggggacgggaaaaaccacggcgacaccaaacaaaaaggccggggagaaaaaccccccggcaccagcgggcgaaaaaacaagaaggcccgcaccgaccgccctaccaaaaaagagcccaaccagaagggcaaaaggaacccgcccagaagcggccacagaagcccggcgggggggggggaaccccc

SEQ ID NO: 141215 - DNA, 430 bp, Glycine max
  Clone ID: PAT_MRT3847_98529C.1
taggaattcggctccagtttatctttttattgaaaaattttacatttcaggaactgtctacctcactacaccaaccggactttcccaaatttcaatccctaactttccccttcataaaaccaaacacccaacaaaggcagacgaaacatcaccccctgcaaaccatcccttggcatacccaagccagagtgttcttttgctattactccttcacacacggacgcctattacaagaactccttcttcataaacccgatgaacacccttcgatcccaggacttcctgaccacatagcccaattaagtctctcatccatcagcccttgtaagtcattctcaatcttccacttcttgccgccgtctcagtatactccccttctatccctcccttattatatgtctacgccattctctaccactgccactcttac

SEQ ID NO: 141216 - DNA, 573 bp, Glycine max
  Clone ID: PAT_MRT3847_9852C.1
cttggtgtagtggaatgtccaggtccgtcactgcgaagacattgcgccaaaggcgtgccgaccttatgttggcaagagagcgacggcgccggctagagaaagctggcggggttgggaggcgtgcaataggatgcggcctataatacgccctgcaggaatagggggaggggaggggagggagggaggggtggagcggcgggggggatggttgggaaagggggggagggacaggcggcggtgtttacctagatgtggggaagaaacctaataccaacctaacaagtagggaataaggaatatgtatggggggaatgaatgatgaatgacaactagggaaggaagacccgcgatggaagcggttggaagtaagatttgtcacatatgcaggaataacatttgggagccagactgggagcaagagacacaatagcacacaaacgcataaaatgaaacccacacagagggcagtgcaaactacgactgaaaatggcgagccaaggcaagccagcagttcacagtggaaataagagagagacggacacttagtggggtgatcccgatacagtacacaag

SEQ ID NO: 141217 - DNA, 1674 bp, Glycine max
  Clone ID: PAT_MRT3847_98530C.1
gctcgtcatggagaagttattggaaaagctgcgctgtcgcactttgacagttaccaacgggtctgaagctatacggtatgccatgggcgaagtcaaatttgatgtcatcatgatggagtttcgactacctcaggtcaacggcgctgacgttgctcgtatgatacgagatacgaagaatgccaacacccataccccgatcgttgctgtcactggatatctcaaggaactacaggcgcctcactactttgatgcactcattgaaaaaccacctacagtcgccaagcttacggatacgctgagtaggctttgtcagtggaaagcgccgccgccgggctggacaccgaaccaagtttacccatcaatgatgccctcgggacttcgacaggagtcttcgcgtcaagaagatagccccacaacctcgaactcttccggctatccacctgtgccttctgccagctatcgaggctctagccgcgaagattctattagctccagcttctttggcgacaatgacagtcgtgcaggcgaggatatgtcggtgagagtgcacaacgccgacgattggagggagcgcgacatcgcgcgagccatgagtggtttgggcatctcggatgacgcagctaatgccgatcacaaaggagctattcctaaccgtatcggtgcacctgacctaccccacggagaatctgcaccagccgttcttgaagaggcaacgatccgccgtcagcgatcggcggagcaagtaggcgccaaacgtcgcatattagagacacgtaaacacgagtcagcagaatctggagatgacgaggacgatgagttaggtcacgcccctgttcgcacacgcagtccaaagacaagaccgaaatccacgtccaagcttggcattgagatgatgcgaacaaacagcagaggcagtgtgatttctgttgaagatgttgggcaagcggactcggcattaccctcatctccacctccaatgatcacagaagatcccgctgcggaggaacatgaaagcaatcttgacgcacccaccgtcgctccggtgcttcttacaccgccagtaatgttccctgaagaacctggcgacgatgttgccgactttgtcattgaaacacctaagtcgcacaaggatgcaactagtccagatccagatcctacacccaaagcgaagtctgccagaacaccagactctgaacccacaggactcgacagtgcgacagacacctaggcggtgccacgcctggcgtttggtacctgttcagtaaattgtacatttgatttcaaagcttaaacacacttttcgcagcaaggcgttggcggtgtgttcactgggtagtgtaccgggaaagtgccattccagcaagcccttgatgttatttcttatcctccacgctctgactagctgcccttagcagccatttgtgggctgtgtcgagcgcttctttttccaaattatgtctacatactcagcgttttctttcctttacacgtcaggtgtgagtttacgcttcgagagggggaactctcatcattcgctttcaacattgttacccagcccacacacgaagtgctcgttgggtccagactgtcgctcgtttctcagatcctgcttgtactaagtgtactactattgaatcaaatatctagaggccctcaggctctcgtgcattctac

SEQ ID NO: 141218 - DNA, 339 bp, Glycine max
  Clone ID: PAT_MRT3847_98531C.1
ggctacaattttttcaagaggcaacttgcgatggtgcaggacctcaaacccgatgcagaagtactgcattagcctccacagagggcggaacaagattgacgaagtgggtgcaggctgagagctagagacgagagccctcttgttggagaagatagtgactcactgttcgtacattgataaagtcacggaacgcgagctgcagaggctcttttgttttttaagctgtggtggggggtggattacatgaagagagagcacagactaatcgacctctaacgatgcatgtgagaaacaatttaacaaggacctacgtccttgaacagacaggttaagagcatg

SEQ ID NO: 141219 - DNA, 250 bp, Glycine max
  Clone ID: PAT_MRT3847_98532C.1
acagttctcactgtaactttggactctgactttgcaatactgggtgttctccttctctctgtcgctgatcacccattcaaaggcgataattaccatgcaatccgcgggagatctctcagactcattaaacagggctatgtcaccgactggctgggatgatgtatcagattacagtgcacggcgtgcgatctttcaagatgtctaccgtcgcttgcctgcatgcttcatcgaaaaatcaaatctggaaaat

SEQ ID NO: 141220 - DNA, 279 bp, Glycine max
  Clone ID: PAT_MRT3847_98533C.1
aaaataaaaccccctcattggacaaaggaaggggctttttttaagggaaaaaaattttacatactagttcacaaatggaaaagggcccttttcaaccagatttttgagacttttacagttttaaaaaaatcgcgtcaacatagggttaggggggttagaactcaaaattttttttttaacaccaaaaaaaacagcccgtaaagcttctggaaaagggtcaacttttgtaaaaaaaacaatttttttacctttcccaagggctgggggaatctttttggt

SEQ ID NO: 141221 - DNA, 878 bp, Glycine max
  Clone ID: PAT_MRT3847_98534C.1
cataaatatgcgtctctgcgacatgttcaccaccacctccttgttcacatcatcatcatcatcatcatcatcatcttcttcttcttcaatcagatggagcccatggacatcgttgggaaggccaaggaagacgcttctcttcctaaagcgacaatgacgaaaattattaaagagatgttgcccccggacgtgcgtgtcgccagagatgcacaggatttattgatcgagtgttgtgtcgagtttataaaccttgtctcgtcggagtccaacgaagtctgtaacaaagaagaaagaaggacgattgcaccggagcacgtgctgaaggctttaggggttcttggatttggcgagtacattgaggaagtttatgcagcatatgaacaacacaagttggagacaatggtgattatgttaatgaccaatgtgcatgatatatattacaacttaacagcataattgtttttgtcttgtataatattcatccatcaattgtttattgggtgattagttttataagaatccatgaattttttgggagcatggcctgtgtggtttgaccgagccagtctgggctcccatataatttgttgagggacccattaaaatggtattctgtaggaaaaagcactggaaaggccctaatgggctgataacctgaccatggtcccctcttctgttttcattaagtgttttaaatatatgatgtctgagagctcagcctataacttttctggctggtgaaattgaaattaccaatgatttatgaatctccacttatgtgtatggtccattctatagttgttgagtatcccatttgtaaattactgagtgctctgcaattgtgatttgtgattcataatgtaaggtttggtcatgca

SEQ ID NO: 141222 - DNA, 713 bp, Glycine max
  unsure (1)..(713): unsure at all n locations
  Clone ID: PAT_MRT3847_98535C.1
tactgtacttgttcatatttatttgtaagttacatgaacatagggggggaaaattaaatgaaattaaagtaaggaaaaagcctcatcatccttcgttttttttttcttaaaaaaaaacgaccaaccatataaaaaccttggtcatcggagagggctctatctgtgtgctattttttttctttcggtgtgtgtgttttttttacaagatattggtattttgtttatacaaaaacaaaattcctgagactaaagaaattaaattaaagcagcactagctagtggtcatgtatgtgatgtcaagtccttttgttttagaaacaatttagaactgtgaaatgcaacgtctatgacaagcagtagtgcgctgtttcttttgcttagtctcatttttccaaacttggccaatatcttgagcaattttcacagcatcagaagaagcaccagagagccctctctttgtgaaccccacagcataaagtccagcatttcccttccaaccatgagggaatggcatctttgggtatccattctttgagaaaaattcaccttcctgcacataacataaccaaaacaacattagttcactattaaatttcagagataattaagaagcttctnnnncatcccccacccnaaaagtnnnnnaggacaaaacnnnaccaatctgcctcnnnagnnnnnctgaactgacnnncttctgngnnnaaaatatt

SEQ ID NO: 141223 - DNA, 286 bp, Glycine max
  Clone ID: PAT_MRT3847_98536C.1
aacgtgagaggggcagtgacccggattcggcttgtcgtacaaatgaagactatgcttagcagagacgcgattaacatccacggcggggtgagcatcagagagtatgccaaggtcatcaaagttgacgatacccgtataaaattggtgcgagacttcaagcatttgaatctggattctcagctgactactgacatatacggtagtacacagctgcttagcgacgcttggtttgtgtctcggaaatcatactacatcattcgcaccgatttgagccaactggagaata

SEQ ID NO: 141224 - DNA, 848 bp, Glycine max
  Clone ID: PAT_MRT3847_98537C.1
atctatcgcattgaaaagcagcaccatcaccaccccctcgtcttccccccttctttcataaatatgcgtctctgcgacatgttcaccaccacctccttgttcacatcatcatcatcatcatcatcatcatcttcttcttcttcaatcagttgactcttcgttcctccctctattcatctgatggagcccatggacatcgttgggaaggccaaggaagacgcttctcttcctaaagcgacaatgacgaaaattattaaagagatgttgcccccggacgtgcgtgtcgccagagatgcacaggatttattgatcgagtgttgtgtcgagtttataaaccttgtctcgtcggagtccaacgaagtctgtaacaaagaagaaagaaggacgattgcaccggagcacgtgctgaaggctttaggggttcttggatttggcgagtacattgaggaagtttatgcagcatatgaacaacacaagttggagacaatgcaagactctttaaaaggtgccaagtggagcaacagagctgagatgactgaggaagaagcattggctgaacagcaaaggatgtttgcagaggcacgtgcaagaatgaatggaggagccattacttccaagcagccagacgctcaccaaagtttagagagctaactttaggacacctttattttcttttgaagcataggcaagcacatctcttctcttactcttccctatgcgatgttaatttagctcgattttgcacaaatccccattcactagtttgctggcctatgtgaatgtgctcgccatttgtgttcttttagtaatccatatttgtaagtaatgtaatttattggagttcttcc

SEQ ID NO: 141225 - DNA, 1553 bp, Glycine max
  Clone ID: PAT_MRT3847_98538C.1
gcatgacggaagagctctctctctctcttgttcttatccatccccgtgaaaagcagcaccatcaccacccccacctcttaccccttctttcataaatatgcgtctctgcaacaacatgttcaccaccacctccttgttcttcacatcatcctcatcatcttcttcaatcagttgactcttcgttcctccctctattctttcggatggagcccatggacatcgttgggaaggccaaggaagacgcttctcttcctaaagcgacaatgacgaaaattattaaagagatgttgcccccggacgtgcgtgtcgccagagatgcacaggatttattgatcgagtgttgtgtcgagtttataaaccttgtctcgtcagagtccaatgaagtctgtaacaaagaagaaagaaggacgattgcaccggagcacgtgttaaaggctttaggggttcttggatttggcgagtacatcgaggaagtttatgcagcatatgaacaacacaagttggaaacaatgcaagattctttaaaaggtgcaaagtggagcaacagagctgagatgactgaggaagaagcattggctgaacagcaaaggatgtttgcagaggcacgtgcaagaatgaatggaggagccattcaatccaaggagccagaggctgaccaaagtttagagagctaactttataggacacttttattttcttttgaagcataggcaagcagcatctcttactcttccctatgcgttgttaatttagctcgattttgcacatacccccattcactagtttgctggcctacgtgaatgtactcgccatttgtgttcttttagtaatccatatttgtaagttaatgtaattattggagttcatctaaaccctcgtctatttagaattttacatgtagattatttcattaaactgatgaatctcccacaccaacaacagctattgccttgattttgacaatagttgctatattaaaaaggtgcaaagtggagcaacagagctgagatgactgaggaaaaagcattggctgaacagcaaaggatgtttgcagaggcacgtgcaagaatgaatggaggagccattcaatccaaggagccagaggctgaccaaagtttagagagctaactttataggacacttttattttcttttgaagcataggcaagcagcatctcttactcttccctatgcgttgttaatttagctcgattttgcacatacccccattcactagtttgctggcctacgtgaatgtactcgccatttgtgttcttttagtaatccatatttgtaagttaatgtaattattggagttcatctaaaccctcgtctatttagaattttacatgtagattatttcatttacctgttgtatctcccacaccaacaacagctattgccttgattttgacaatagttgctatattagaatgtaacaatctattatattctgttatatagaaagtcgtgaaggttttaccccagccaaaaaaaaaaaaaaaaaaaaaaaaaaaaaaaaaaaaaaaaaaaaaaaaaaaaaaaaaaaaaag

SEQ ID NO: 141226 - DNA, 457 bp, Glycine max
  Clone ID: PAT_MRT3847_98539C.1
gaagaatgtgaacatcgccagccatcaactcggtccacacggacaaaccaccacttagtggacgacaacttctgatcaagcgtgagtatggacaaaacggtgtcggccatgctgaagcagatgccggagaagattatagagattcaatcctacatgagagggaagcgaacaaggtccctctgtacctcttttacttcaaaacaccaaagcttgaatcatttcccaagtggcggtataacccaagtcacacgttgcagcattcacaagtgggtgttcccctccctctgccagcgtagccactgtgatcttctactaaagatagatctgctttaattcttatgatttttggtattctaaaattttgatgtagatctgttcaccgttggacatgtaaagcaaattatgatgctcagaaggtgtttgataaaagttgagtcaaattgtttcttgttaaaaa

SEQ ID NO: 141227 - DNA, 492 bp, Glycine max
  Clone ID: PAT_MRT3847_9853C.1
aaaaaaaaatttgggttcacggttaatggatcatgtaaaaaaattacctttgggggttgaagaaacaaaataaaatggggggggggaagaaaaagggggaacccccccccaattaaggtaaataaacgaaacaaattatagatttgattggggcaaaggttaaaaaactcccagcacacaacggtggggaaagaagggcctttggcccccccccacttgagggggttggccacttcccatgtgaaggcaggggcctcttttccaaagggtccatttgcaggcgtttttaaaaacctgttttttccacccctttttataccaacggtcgtggggaacatacccggcctggaatcaaagctctccttcacaaagtctaggctctccttggctgggatctttcccggggctttgggggcaacaaacacagacaatgggctgggccccccaatggaataagacactggcacaagggactgtctggcggggacactt

SEQ ID NO: 141228 - DNA, 252 bp, Glycine max
  Clone ID: PAT_MRT3847_98540C.1
ctggtggtgcaaggcattgttatagactggtaaaagaaaagggttttgaggaaagtctcgcagcttcaatggctgaccctgaagatggagtttcctttcttgttggtcagaccaaaatgtcagatacttccaatgagattaacaatggtctaacaaaggattgtgatgacctaactactgaagctgcagaaggcatgaggcatgctaatgaaatgaagacggatttatcaaacatgacacaccaggcaaaaa

SEQ ID NO: 141229 - DNA, 1076 bp, Glycine max
  Clone ID: PAT_MRT3847_98541C.1
gctggtacctacccttttccaagaactagttatgtcggttgagtaattttattttcggaaaaaattaaaaaatagagagaggaaattgattggtggtgcagggcataaagaggagaattggtggggatagggaaaggaggtgagtagtgaatagggtttttgattgattgagaattgaaattgatggatcgcagtgtgtcgcgctcacgctctccttcccgcagaagaagatactctccatccaccgtttctcatcatcgccactccagaacttcccacaggcgccgccgaaggcacagaacctcttcctccccctctctttcacgcagccccactcccaagcccaagaaagatcaaaagaaaagcaagcgtcaccacgaggaagagttgaaactattggaagaagagactgcaagaagactggaagaagcaattcgaaaaaatgttgaggaaaagcttaacacagaggaagtcaagttagaaatagaaaagcgcgtaacagagggagtgaagaaattgtttgatgatgttgaagctcaacttgaaaaagaaaaggaagatgctcttactgaagctagaaggaaggaagaacaagcccgtaaagaaagagaagagctggacaagatgcttgaagagaataggaggagagtggaagaatctcagagaaaagaagctctagagcagcaaagaaaggaggagggaacgacaaagggaattagagatgattcagagacagaaagaagaggctgctctgagaaagaagctggaggatgaagaagaacatgcgaatcgaattaattctttgggtaagaacaaatctaggcccaagtcttatggtttctaattattctaattactatgtgttatgtgatatcattttgtaccccaaattatttgtacccttatgtggaaccatgatcttcaatgaaagatttgatattcctatgtttgagcttgcaacctggtttattaaaaggcctaagaaaattgaaaatgttattttctcttcaaaaaaaaaaataaaaaaaaaaaaaaaaaaaaaaaaaaaaaaaaaaaaaaaaaaaaaaaaaaaaaaa

SEQ ID NO: 141230 - DNA, 650 bp, Glycine max
  unsure (1)..(650): unsure at all n locations
  Clone ID: PAT_MRT3847_98542C.1
cgctcacgctctcccacgcgtccaagaagatactcgacatccaccgcttctcatcatcgccactccagaacttcccacaggcgccgccgaaggcacagaacctcttgctccccctctctttcacgcagccccactcccaagcccaagaaagatcaaaagaaaaggttaatggcattcttctctattggctttgctgaaggaagttcaacttgctaaatatgatgaacaatggctgcctccattatctcctcttgctctagaaacttgttagagagcaagcgtcaccacgaggaagagttgaaactattggaagaagagactgcaagaagactggaagaagcaattcgaaaaaatgttgaggaaaagcttaacacagaggaagtcaagttagaaatagaaaggcgcgtagcaaagggagtgaagaaactgtttgatgatgttgaagctcaacttgaaaaaggaaaggaagatgctcttactgaagctagaaggaaagaagaacaagctcgtaaagaaagagaagaactggacctgatgcttgaagagaataggaggagagtggaagaatctcagagaaaagaagctctagagcagcnaagaaaggaagaggaacgacaaagggaattagagatgattcagagacagaaaga

SEQ ID NO: 141231 - DNA, 459 bp, Glycine max
  Clone ID: PAT_MRT3847_98543C.1
aattcggctcgaggttcattcattcatattttccactccctctttcgccactctcgaaatccgtgcactgatactcagagacaaagatgaaagagagaaggaagtgaaacgcaggacagccttgccgtttttgaaaggccgctaaacgacgaagcaaaacgcgttcgtaacagaagaaagaaagaaaagagtaactgacaactgtaccagtagaaaaatcatcgacggtatgctcatgactgtcactgcttcgtcgtttatttttttgtttcattttcaatttggatctgattcactgattctcaaattcttcaaattctctcactcgcaagacaaacattcaaacgattcactttttttttttttttttttgcaatgaaagcgaaaacgagaagcacgttttctcataaacctcgcactgaattattattgcggtttcttttattcaacgactcgctg

SEQ ID NO: 141232 - DNA, 606 bp, Glycine max
  Clone ID: PAT_MRT3847_98544C.1
ggaattcggcacgaggccaaagctgatggttccttttcttctttcttatttttcctaattacttcatccatgcatgcatgccttcaattctcacctatgttgctcatcaactgatgccaacatctattagtgttttcgtttaacggtgtttcatttcaatctatcctctcacatacttctccgttcaacggagtttgaattcgtgtaaaacataaaccatacacacgctagatgtttataatcatgacgcgtgtcctccttgtgtgtcttcattatttgttatatgagatttgaatatgttattaattattagtatagcatgtgcagcattctcactctcttaccaagctagctacgtttgcacgcacgtctataaatgtttaattgcttgtgtatgtgaaatgtgaaactaagtcatggtgagaacggcatcatattggtttgtactttatattcactctgtcatgtctggggggagccagccgaaaagggaaactcggaaaggctacctttgtggaaggaataattactttcatgccgaacgttggatccggccaatctgcattaacgactgattggaagggaagtgatggagaggcgataatc

SEQ ID NO: 141233 - DNA, 718 bp, Glycine max
  Clone ID: PAT_MRT3847_98545C.1
ccacgcgtccgggcttctcctgatgccaatctatctatggaagtccttactggatggcacctgaggtgataaagaattcaaatggttgtaatcttgctgttgatatatggagccttggctccaccgttttcgagatgccacacacaaaacctccttggagccaatacgaaggggttgcgcaaaagtttaagattggaaacagcaaggaccttcctgcaatgcaagatcatctctcaaatgagggaaaatattataacaagcaatgcttgataaggaatccagtgcatcgtccctctgctgatcaactgctgccgcatcaatatgttaaatatgccacactgtgtccactcgttctgtctgctcatcctttactagcaaaacatgatattgtacttactatgtgatttcaggctattggacctgcaaaacataatttaggcttagtttcagaagcagctggtacatatctgtctagaagcttgagaactggctcaggatcaagtgaagcccatacaccaaggaacatttcatatcctgtgtctcctactgggaacccacttttgcctcctaggttactgcatgtgagtggaaggctgtctccatctagtcctcacactgcatctggctcatctacaccgctcactggtggcattggtgcagtcccttttcatcaaacaaagcagccaatgttctcacatgaaggtatcagtgtaataca

SEQ ID NO: 141234 - DNA, 313 bp, Glycine max
  Clone ID: PAT_MRT3847_98546C.1
gctactctgtacagggcgtaggtcagatgcgagcacggcgtgcggaaggctcttggttccttgaagagtgttgagaacgctgagggaaatggaggcccaggaaccatgaagaagatcactttacttgaggatggagaaaccaagtttgtgctgcacaaaatagaaaggattgatgaggcgaactagggatacagttacagcggggaagggggggcctggttgccagacacggcggacaagatcacattcgtactccaaataggttgctggtcccaatggaaggtctgttgggaagctaactggaaataccaaa

SEQ ID NO: 141235 - DNA, 465 bp, Glycine max
  Clone ID: PAT_MRT3847_98547C.1
aagtcaatgacttttatgttttaaaaatgtctcctctgttatgggtgctgcaactcattgtgactgataacaattggtgagattctaatagtatgataattgcaaaaacgactcagcataaactgaaactattcctataccttgtgtcaccttctcaagctctcagctgagactatatcaagccttgcccttatagttacaggatgaatatattgattatcagacaattatttcaccactatcatgccgattgaaaaataaatgtgtccggaactattggcttctgcaaccttttagttcccatcaaatggaaaagctgacagatggctggctgctaatgtgacaaacttaattgcttagcgctgctaatcaaagtttaactgtgatgtatacactggaaccaaatctcatcaactttgacaacattcatacttagatatctgcatggtcgctgaactccttatt

SEQ ID NO: 141236 - DNA, 277 bp, Glycine max
  Clone ID: PAT_MRT3847_98548C.1
tactgtttcaaaaagacaacatacggctcctataagaatgatagctcttggctgcaagtggttgtacaacatggggcttatagtatacggaagtgttaatgcgttcaaagcatggatagtaattcttggcaatcattaaatataggggatcgatttcacatagacttttgacccatttctaaaatggttacagttcgcatattgttagccggaacagccacacatgcttgagaattacatcagatttatgtgcataatgcctttttacacggggacc

SEQ ID NO: 141237 - DNA, 477 bp, Glycine max
  Clone ID: PAT_MRT3847_98549C.1
gaaaatttagatgcagaaaggtaaaacaaaaactgccaagagaattagtgccttcactgccccctggcattagtgaccccaaatgatggtaccccctgcacctcccttcaaattcaccctcacgccccactcatgcttgctgcgtcatcctctccaatatcctgctgcttagtatcccctctgtttgagacatgcagaacatatttctccacttcacttcccaaactgcccttattcctcctctcccttctggggtttactttaacaggaggcccatagtgttgaagcacgctagttagtcatgttagaagtcttctctagtcgtttgcttttacttacaacatataggtagggctaccataaactttgttactctttttcagattgtcatcattgaatatcttcgggaagttcactaaaacagccaagcttaattggaagcagtggctcatttcagttattatagcatttatcagc

SEQ ID NO: 141238 - DNA, 464 bp, Glycine max
  unsure (1)..(464): unsure at all n locations
  Clone ID: PAT_MRT3847_9854C.1
gacccagcgggcgcaancntgtttgggcaacngaagcanggggaggcgcgacaagccngggcnnccaaccagaagcacagggcgacaacncaaggancangacannnngngaanaangggccagcccaagnnnngggcgaagaaannngannngagggacannngganngannagacnnnannnacaannncacaaagggacannannacatggcaggggggggcgggcaaaaaactcttttttttgangnngcaagcgcngaacgaannncaacaacgaggcggggggcaggaanccagcagagnacgganaaggagacangcacccngcnngnngaggcanangcacnngccagnaaccccgancaggcaagaagccannnngacggcanganaaaancngggcancagcccgangaaaggngcacngcnagcangancnnggcccacgagaagaaaaacga

SEQ ID NO: 141239 - DNA, 406 bp, Glycine max
  unsure (1)..(406): unsure at all n locations
  Clone ID: PAT_MRT3847_98550C.1
accagtgacaattccacccgttgtgcttgcaccaatagtgaaacccccgggttttctccctccaattcttaacccaccaaatacaccaacaccatcgccagggaagggagggaacactccatgtccaccaccaaantctcctgcacaagctacataccccattaacacgctcaaactaagttcttatataaatcttcttagtaacttagtcacattagctttagagaccctagtactaaaccaatctatcccgtgcttcaaaagcttatttaacttagaacctacaattattgttatcacaatcttaaaccttaacctcttaaacctcacatttatagtccaccgtccctttcaattgttataacttttaacgaatctgcctgcttctatgtacacctactccctc

SEQ ID NO: 141240 - DNA, 109 bp, Glycine max
  Clone ID: PAT_MRT3847_98551C.1
cggctcgaggtaatctgagagagaaacaaacacaatgaacgtttccactgccaagttccactcacttcacctatgagtttcccttctcatggccttcaacacaaaaccc

SEQ ID NO: 141241 - DNA, 487 bp, Glycine max
  Clone ID: PAT_MRT3847_98552C.1
tttttttttttttttttttttttttttttttttttttttttttttttttttttttttttttttttttttttttttttttttttttgggaaaaaagggaaaaaaaaattttttgggccaaaaatttttcccaccaccccccccccaaataacctttaaaaaaaaaccgccccctcggctccggtaggtaaaaaagcccggggatggcccccaaaaaggggttaatcccacccaccgcccaggggaaggtggtaagcccctaaaacaaaaagaaataccccccccacccggtataacagggggaaaacccttaaaaccccccccgccctgggaaaaaaaaagccccggggaaaacaaatttggacaacataatggcctaaaatattccccccaaaaacaaaaaaacctatcccccggcccccttaagaaaagttgcccttcccattcattaaagcccgggaaataaaccagcccccccaagggttcccc

SEQ ID NO: 141242 - DNA, 239 bp, Glycine max
  Clone ID: PAT_MRT3847_98553C.1
ctacagtcacttatcccactatagatttaaattctcagaaagcataaaaccccaatgggacagaggcatttcaacatttggcatgtccacaactacttactacacctaatataacatatgatgacttgttaattatgccagatgttgacaatatttccaatgctcacactatcaactctctaactgttctcacaccacgtacctacactacttcatcttcatcttaataactatctata

SEQ ID NO: 141243 - DNA, 227 bp, Glycine max
  Clone ID: PAT_MRT3847_98554C.1
aaaacccaaaagagacttttttggctgttttaattggggaaatagtaaaagggggtgggagaaaaagccccactttttatttggagttttccagggggtgtttttttggggaaaaataaaaacaaaaaaacccttccactgaaaaagatttttttttcgggaaaataacctccgctcattttttatccggttggaaaactttctagaggttatattggccacccttt

SEQ ID NO: 141244 - DNA, 350 bp, Glycine max
  Clone ID: PAT_MRT3847_98555C.1
tctgatttggaaataacagatgacggggaagagattctaagtacttgtcaagccaatgtggtactgttacacaggataaaaacaaaggattagatattcattgaatagtcagaaatactaactgcgattcctgcatcaatcgcaacgtcagtctcgtctggctaatcttttgaaccggtaaattcatccagtcaccattttaacgtgattctaagtcatgctagcaagctacaaaggtcatatggtcctccagtttataatcaattcgtgcattcataacctgaacctctcttcgattgctctctaacatgatgacccataggtatagtctccgaaaatgctcctcaggg

SEQ ID NO: 141245 - DNA, 881 bp, Glycine max
  Clone ID: PAT_MRT3847_98556C.1
ggctcgagcggcaaataaaccagagggcagagagaatcgtaccaaaggagccacgagtggttcctctgagccgggtgatgaggatgatgaagcaggggcttgtgaacagagcacaaatccagctgatatgaagcgccttagaaggaaggtttctaatcgcgactctgctagaaggtcaagaagaagaaagcaagcgcaattgtctgagcttgagttgcaggttgaaaaactcaaagtggaaaatgcaaccctatacaagcagttcacggatgctagtcaacattttcgtgaggctgatacgaataatcgagtgctaaaatcagatgtagaagctttgagagccaaggtgaagttagcggaggatatggtcactaggagctcttttactacgttaaactatcagcttcttcagacacaacaacatcaaatgagcacacccccgcaactgaacacgactaatcttcgccgcatggcgcatgtttcgccaaccatcaccgtccatggtaatgatgcctcatacaatggtgtaacagttggtgaacagaattcatcagcacttggaaacttggatatgactttcaacaacatcaacaatggagtcatgaacaatgctatgagttgtgggactatttggccacttgattagactctagctatgttatttgtcttgtctaatttgattagtagcctatgttaatgtcaagctgtgttatttgtcttcgcttgattcctctttaatgatgcctctgtttaaaatggtgtcttctttcgttgtatctagttttgtataaaaggacatgattgctttatccatttcccggaaggtaattgtaaaaagccccaaataaaaacttgccggatatatcatctaatagacagac

SEQ ID NO: 141246 - DNA, 3306 bp, Glycine max
  Clone ID: PAT_MRT3847_98557C.1
tacggctgcgagaagacgacagaagggtaatatattttttacaggcaattttctttttgagacatgtaccgaaagaaacatgttttaaaataaacaagttttacccttatactaaattactaatgcattattatattatttaatgaatttaattttttaacataattaaagtcattaagtaattatccataaaagtatttatagtaacaatgcatcaaaattagttaaaaaaaggtttaggaagtcagattgagtcattgaccaatcaacctaattcaactcaattcaagtttggtatctgcgtctccagtactgtcggatgccccaatttcttcaactcgacctattctctctcctactgttaacgttttctgtttttctttaagatggcgatgacgacaacgacggagtccgatctcgattacgagcttcgctatctcagtctcgccgtaaccgataccttcactgctttccaaaacctcttaccggatgcgatgacttccttttcagcttgtggactaatagaccctctttgttctcaaaacctcactcccaagcattccaccatcactgcaaccattgattctcagtcatcgatttgcgccactagtaatgttgggagcccagtctcagctaataaaccagagggcagagagaatcatacgaaaggagccacaagtggttcctctgagccatctgatgaggatgatgaagcaggtgcttgtgaacagagcacaaatccagctgatatgaagcgccttagaaggaaggtttctaatcgcgactctgccagaaggtcaagaagaagaaaacaagcgcaattgtctgaccttgagttgcaggttgaaaaactgaaagtggaaaatgcaaccctatacaagcagttcacggatgcttagccaacattttcgtgaggcagatacgaataaccgagtgctgaaatcagatgtagaagctttgagagccaaggtgaagttagcataggatatggtgactaggagctcttttactacgttaaacaatcagctttttcagactcaacatcatcaaatgagcacaccccagcaactgaacacgactaatctgcggcgcatggcgcatgtttcgccaacaatcaccgttcatggaaatgatgtctcgtacaataatggtggacagaattcagcacttggaaacttggatatgagtttcaatgacatcaatgaagtcatgaacgatgctatgagttgtggaactatttggccactcgactagacagactctctctgtagcttccaattagatcgatccatcttttatattttacgtcttgtctaatttgattagtaggctatatatgttaatgtcaagctatgctatttgtcttcgcttgattcctctttaatgatgcctgtttaaaatggcgtcttctttcgttgtatgtagttttgtataaaaggacttgattgctttatccatttctgattgtaattgcaaaacaaaatgttttctaattagggtcatgccaatgcttatggagcatttggctgacaaaatataatacatgagttaattttgatttagtcatcgatttgcgccactagtaatggtatgagcactagtgcactacgtacattattacttgcatgccaagtgccattcatcttagcatattattattagaggaaaaaaggttgcgcacagtatgcaaattaaattaaaagtcatactaatagtaatttgtgattgaatgacgttacatggtaaactttttaacattctggattgaattgcaaactgtgcagttgggagcccagtctcagctaataaaccagagggcagagagaatcatacgaaaggagccacaagtggttcctctgagccatctgatgaggatgatgaagcaggtgcttgtgaacagagcacaaatccagctgatatgaagcgccttagaaggtatctcaaagataaagcattaaacttaggttgtgtttgggtaaatttttctgtgagaagacgactcacagaggtgcataagttggttttagccgagaggaattcaattaattttactttcttatttttttcccctgatattttaaattatgttatggttttaggaaggtttctaatcgcgactctgccagaaggtcaagaagaagaaaacaagcgcaattgtctgaccttgagttgcaggtaactgatctgttgggagagtacatgaatggtatttaatttgataagtctttaataagggaatgaaatatagtgatattaattcttagagctatattttcgtacgaacagttgttgataaagacagtggaacgttactagcactctgaatctctttgtttttggaatttaagcattaacattcaatatttggtaaaatgcacaagaagcaatacaatgtttttttcgtttgaattttgctttctcaggttgaaaaactgaaagtggaaaatgcaaccctatacaagcagttcacggatgctagccaacattttcgtgaggcagatacgaataaccgagtgctgaaatcagatgtagaagctttgagagccaaggtataataggttcttctgcaatattattctatagctaagaaaaggagattacaactttataaaagcagggaaaagtagtaataaccaagaatgaaggaagcttggtttttaattaaggttgatgaaaaatatctcaatagaatttcaactgagtactgctccgaagaattaagataagctaatctgtctaggttaatttaaaaagagttttaagagagttattataaaagtgtataaaaatgtttgatattgtctggctggcatatataggtgaagttagcagaggatatggtgactaggagctcttttactacgttaaacaatcagcttcttcagacacaacatcatcaaatgagcacaccccagcaactgaacacgactaatctgcggcgcatggcgcatgtttcgccaacaatcaccgttcatggaaatgatgtctcgtacaataatggtggacagaattcagcacttggaaacttggatatgagtttcaatgacatcaatgaagtcatgaacgatgctatgagttgtggaactatttggccactcgactagacagactctctctgtagcttccaattagatcgatccatcttttatattttacgtcttgtctaatttgattagtaggctatatatgttaatgtcaagctatgctatttgtcttcgcttgattcctctttaatgatgcctgtttaaaatggcgtcttctttcgttgtatgtagttttgtataaaaggacttgattgctttatcc

SEQ ID NO: 141247 - DNA, 124 bp, Glycine max
  Clone ID: PAT_MRT3847_98558C.1
acgaccacgcggacgatgggtgaccccgcgcgtgctgcgactgtgggggattacctaccggtgctgctgaacactgacggtgatgagactacagccgcacagctgggatgacaatggccggtta

SEQ ID NO: 141248 - DNA, 699 bp, Glycine max
  Clone ID: PAT_MRT3847_98559C.1
ccacgcgtccgaagaaactatcatgatagtatctgtgagtccacatctttcaaatccatgccccgcacctgttcgatgaaacaacgatccagcagcatcaatcaatgccaatggcgtgcttctccattctctctcctcctcatcccactctcactctcactctcctccctccctcccactctcaatgcggcggcttcaccgttagagttagtgttgctctcaccgaaaggctctcccagcaccacaagaccaattccattattccttcaactcgcgctgctgcgaatggtggcggtttcgagacagaaactgcggtggtggaaaagcctcaattgaagactctcttccaagcttccagaggctacccttccccctttggtgccactgttcgagacggtggggtcaatttcgccatttcctctctcaacgcactttccgccactctctgtttctttactctctctgatttccagaataatcgagtgacggagtatgttcctcttgatccgttgattaataggactggaggtgtctggcatgttttccttaaaggagattttagagatatgctttatgggtacaaatttgatggcaagttttctcctctagagggacattactttgactcttctcatatactactggacccgtatgccaaagcagttataagcagaggggagtttggggctttaggacctg

SEQ ID NO: 141249 - DNA, 203 bp, Glycine max
  Clone ID: PAT_MRT3847_9855C.1
cttacattttttttttttatcttacctttacccaccactttataacaaaaggggccagggggtatcaaaaaaatctcaaccccccaaaatcctaatatcctaaaaactcctcatacccatccaatcggagatgatcccataaccttcatgatgaccactgccttagattaacaaaataaacaatctttcttataacaaccccc

SEQ ID NO: 141250 - DNA, 242 bp, Glycine max
  unsure (1)..(242): unsure at all n locations
  Clone ID: PAT_MRT3847_98560C.1
ttcggatntgttggtcggatcggatccccattcctcagatctctgaaccacgatgccattcggctcttgacgtgacacctcagctngcttgatgatggatccaangnaacntttgncactgatggnttgaagnntcaacaaaatggtgtctgncgactggctattcnggaagntgaaatgcctccatgngactgtgttaccaaatatagaactgcgtacaatggattgaatnctccnttgta

SEQ ID NO: 141251 - DNA, 918 bp, Glycine max
  Clone ID: PAT_MRT3847_98561C.1
cggctgcgagaagacgacagaaggggattaacagtcctatttcatttcataaggatcaaacggatagcaccagccaaagtaatttacccctagtttacttttgcctcttataatgaatggatgcaacaatacatgggtgccatataggaagggatgaagaagaactcagagcttgtggctaatgttgaaaagcatgtccatggaaactggtgttcagttccagccaaaaagcagatgtagaaggaccggagctgcagactgaggtggattaacgacctcaaaccagagataaaatgaggaaactttagtttagcagaagatatatcataccattaaaatactccatgctcttggaaacaaatgatcaatcacaacatctcacagcttgtccaatacaacaaataatgagatcaagaattgttggaacaccaacatcaagaaaaagcttatgagaaagagaatacattcaactacccacaaaccaaaagccaactcgcttgtatgtacacctagtcgaatgatgttatcactaagatccagaattgatggcaagccaacatcaagaatgcgcttatgagaatgagaatacattcatctacccacaaacccaaagccaacaggttgtatctacaccagtcgaaggatgttatcactatgaagcacttagtacaacaagaaagtgctagatttgcagctaaacccatggaagttgaattcagctctttcattcccccagttcattagattcattatcaacaaaacaaaacaacaatgtgtatatcatatatgtcctcatgcttgttacatattatgaccttcaattacttatatccacattgagtttcttaggtagaaaacttattgtctcaactaatgtaggaaaattaaccaatatcgaaagttactctcaacaagaga

SEQ ID NO: 141252 - DNA, 627 bp, Glycine max
  unsure (1)..(627): unsure at all n locations
  Clone ID: PAT_MRT3847_98562C.1
cacgcttaaggctttttaaggcctgaagctcttgtagcccgtgcataatcgcgtccgggaagaattaaaaaaaagaaaagaagaaaaaactgtggattttctttctgattctcctatgttctaaagatcaatcttacctttgattgatacaaattttgcttcaatcgggtttcaggaagtcatatattctaggctgcaatactgagattcagagataaatggcatcattggtagccagtggtagcagtcaaatggctccttcagtttctgtccaagaaaaagggagtaggaataagagaaaattcagggctgatccacctttaggcgagccaaataagattattccttcccctcagcatgaaagcctcagcaatgaattttctgctgaaaagttcgaaataaccacaggtcatggacaagctagtgcttctgacatgtgcagtgtaagccaagatcattctgatgggttgaagcttgaccttggattgtctagtcctttaccttcatctgacgtcaggcttagccaacctaaggaggaacttgaggttgatgaattccatgatgctgattggagtgatctcactggaagcccagttggnnganttgttntgagcaatttgggacacc

SEQ ID NO: 141253 - DNA, 251 bp, Glycine max
  unsure (1)..(251): unsure at all n locations
  Clone ID: PAT_MRT3847_98563C.1
atnacaacaacaanaactcccaccaancanctccaccaanaaatatgcntgagatccttncccaagccttcttgacttccnnttngcttgctctnagcgctgtnacancattgaatgatgacccttttgacaagtcntctgcttcantggggaantcatcanaggaggataaagncatagtgaaaagggctnctacttgcatcccctnccatgaccantccaagagantnagaacaagctcttncgntgcc

SEQ ID NO: 141254 - DNA, 733 bp, Glycine max
  Clone ID: PAT_MRT3847_98564C.1
gattatcattcatcattcattattcattctgggcgcaggaacaaaacagaatcagtgaatagtgaagagtgtggaattggatcagatccgttatagagagatgtcacgggggagatctgattcgggagggtggttgaggggctgtttggtggtgtttgcagtggtctcagcgttgggtgtgtgtgggcctgctctctattggcgattcaaaaacgcaatcactcttcgcaattcccacagcagcaaactctcttgccctccctgcctctgtgattgccctccccctctctcgctcttccaactcgctcctgggttggccaatctctctatctcagattgtggaagtaatgacccggatctgaaggaggagatggagaagcagtttgtggaccttctcagtgaggagttgaagttgcaagagtctgttactgaagcaaacacccggcacatgaacataactttggctgaagcaaaaagagtggcttctcagtaccagagagaggcagataaatgcattgctgcaactgaaacatgcgagcaggcaagagaacgtgctcaggccatacttaccaaggagaaaaagatgactttggtgtgggagaaacgagctcgtcaaatgggttgggaaggagaataactgcataagttttgttatttatattctttatggctataatcatgatcgtggttttatacaagtatacaagcaaaatgcttgagttgtcaaatttaa

SEQ ID NO: 141255 - DNA, 356 bp, Glycine max
  Clone ID: PAT_MRT3847_98565C.1
gtaaaggcagcatctttatgggtgggactataggctgacctgaactaagatgcctacaaatctgcttacccacgaactctggctactgcttgtcatgtcaaaagaacatgcctatggcgtgcatatatccaccgcggttctacatagaaaacacttcaagctcagatagcggctcatatacaatatctcacacttagttgaagttctggctgattaaatgctttacccttacacctataacgtactgagtatcattatgtgcagttgcaagcgcgattctttaacaagtattaccgttaggctcatgatgctctgtgatagcctccaaaacaataacgagcactgttgtggtttgg

SEQ ID NO: 141256 - DNA, 2489 bp, Glycine max
  Clone ID: PAT_MRT3847_98566C.1
ccctgaaacaatttctccaaccctagcgcgcacacacacgcacaatcctttctctctctgaaaccgtacggttacgtaaccgtaggcgatatcagaattcacggcacacacacagtccccactctctacgatgaccggtcaacgcatctcctacggcaaacgctcccactcgcactccgattccgacgccggctccaaaaacaagcgccgcaaccccgcagctgatgactcctcctcctccctcatcaccgccgacgacaccgtcttccgctacctctgccccgtccgcaagattggcagcgtcatcggccgcggcggcgacatcgtcaagcagctccgcgccgacaccaaggccaagatccgcatcggcgacgcgctccccggctgcgacgagcgtgttgtcaccatccacagctcctccgaggagaccaatcacttcgacgagaccggcgatctcgtctcgcccgcgcaggacgcgctttttagggttcaccagcgcgtgattgccgaggacgcacgtgaggacgaggacgacgagaggaatcacgtgaccgcgaagcttctcgtgccgtccgatcagatcggatgcgtgattggaaaaggcggccagatcgtgcagaatatacggagcgagaccggcgcgcagattcggatccttaaggatgaccgcttgcctccttgcgcgttaagcaacgatgaacttgttcagatttctggtgaggctgcggttgtgaagaaagctctgtttcaaattgcggctcagattcgtgataatccatcgcggtctcagcatctgcttgcttctgcagttcctggtgggtatgcagctggtggtcctggtgcaggggctccaattatgggagtggctccttttgtgggtgcttatggggggtataagggtgatactggtgactggtcacggcctttgtatcctgccccaagggatgaagcgtctatgagagagttttcagttcggtttgtctgtcctactgggaacattggtggtgtgataggaaagggtggtgccataataaatcaaatcaggcaggattctggggcaaccatcaaagttgatagttcagcaactgaaggagatgactgtttgataatcatttcgacgaaagagttttttgaggattctttctctccaactatagaagctgctgtgcgattgcaacctcggtgcagtgagaaagtggaaagagattcagggattgtctctttcactacccgtcttctggtgccaacctcccgaattggttgccttattggtaaaggagggacaattgtgactgaaatgaggaggcttacaaaagcaaacattcgcatcctgtcaaaggataatcttcctaaaattgcgtctgaagatgatgaaatggtgcagatttccggagaccttgatgttgctaaggatgctcttgtgcaagcacttacacggctaagagcaaatctttttgataaggagcgtgctgtctcaggatttcttccggtgcttccatatcttcctgcttcagttgatggatcagatggtttgaactatgacagtagagatggtaaacgacatggacgtggtggatattccagtgggtatggaggttcaagtgatttggcatctggtgaaggttatggaagctatggaaattcacagcttggtagtggtggtggtgcttatggagcttatggaaattattctttgggaaggactagtgcatatgggtcttctcagaatggttcttctcggaggagaaaccatgcttactaaaacttgatgggtccctgcaggtgtcaacatcttcctctgtcattaacaagttatgggtattcatcatttttgactttgataaatcatatttatggatgtactcacatacttcagatatgatgaattggaggtatggaatctgtttatgtgcttcttggctaaggtaatacatttggaggcatgtaaaacctttcatgattcagaaatagaataatatagtaaatgcttgttgcaagccatgattaaatagggtggagtggcccatttgacagtcctagttttgggcagctttttgcaataaaacctttatatgcctaacatggcttttacacaaaaattatgacatgttgatgtctctctttttgtgtgtgtggtctgtgtggtgatacattgtagttcatgcatgcacctgaattaatgctccacataaatgcttaaaagaaaaaggaaaacatctattctttagttgttgactagtatgctttactatctgatccggattggtatgcctacatgagtgttattaaatagcagccatggtcgaaagcagtgctggattttttgtcaactgccataggaaatatatgaaaataggcccaccatggtgtgtttatatggcggagtttcagccttccaccatccaccattgattacactgcattaccttaagtacttgtctggaaattctagctgtaatgaacaggaggcttggaggacatggatttct

SEQ ID NO: 141257 - DNA, 3152 bp, Glycine max
  Clone ID: PAT_MRT3847_98567C.1
ggggggcgctaggagaagggaaagggagaagtagaattatgtgagatagtgaataataataataataataataataataataatagtagtgtggaattggatcagatctgtttgttagagagagatgtcacgggggagatctgattcgggagggtggttgaggggctgtctggtggttttcgcagtggtctcagcgttgggcgtgtgtggccctgctctttactggcgattcaagaacgccatcactctccgcaacaacaacaacaaactctcttgcccttcctgcctctgtgactgccctccccctctctcgctcttccaacttgctcctgggctggcgaatctctctgtctcagattgtggaagtaatgacccggatctaaaggaggagatggagaagcagtttgtggaccttctcagcgaggagttgaagttgcaagagtctgttactgaagcaaacactcggcacatgaacataactttggctgaagcaaaaagagtggcgtctcagtaccagagagaggcagataaatgcataactgcaactgaaacatgcgagcaggcaagagaacgtgctcaggccatactcacaaaggagaaaaagatgacttcggtgtgggagaaacgagctcgtcaaatgggttgggaaggagaataactgcataggttttgttatttatattctttatggctataatcatgatcgtggttttatacaagcatacaagtaaaatgcttgagttgccaaatttaggttaaagtttatatccttactgtgtctgtaactgtatcccttataagctagtatcaaataattttacatcataagataccaatgaatacgcgtgcaccattagtctgatgccacggctcagtctcctgggcacttaaaactcatgtttatggacttgattatatttatacagtatatttagctctgctttcaaagtgatttggcatctggtgatggttatggaagctatggaaattcacagcttggtagcagtggtggtgcttatggaaattattctttgggacgaactagtgcctatgggtcttctcagaatggttcttctcggaggagaaaccatgcttactaaaacttgatgggtccctgcaggtagattacagttttcattatttttgtattttatctggcaacttcctataatataggccattcacattatagtagtatataacagattgatatcttaacctgaccagtgtaccttttagaattctgatgctcttgttttccctttgttgcctttcccttcccatccaaacagctgagttctatgaagcctgaagcccactgcctaaaccggaagaccagatcaaccaggttttgacaaactcatggcccaccttgacacctctacctaggggaccaaacatgtggagactattgaaattggccaatgtccattttaccttatttcacaagcttgataactaatgctcccccaagaacctataaagctggcttgccattttggctgcttttcaattcctgttcagttgtctttagatttaaagcaccatgtagctatgatcccttgacagttgtatacctatattgtcattatgattgggttttgttttcatgacagttcagtgttacttgcaaagcgaacttttttagttattttaatcaaaattatgttgattcctggtaaaagttgacccactcttatacatcaaaatttggtagagcttttctctgtctgtctgtattgcaggtgtcaacatcttcctctgtcattaacaagttatgggtattcatcatttttgactttgataaatcatatttatggatgtactcacatacttcagatatgatgaattggaggtatggaatctgtttatgtgcttcttggctaaggtaatacatttggaggcatgtaaaacctttcatgattcagaaatagaataatatagtaaatgcttgtcgcaagccatgattaaatagggtgggggggggctcatttgatttgggcatagcttttgcaataaaacgtttagatgcctaacatggcttttacacaaaaaattatgacatattgatgtctctttttttgtgtggcccatgttgtcatacgttctagttcatgtatgcacctgaaataatgctccaggtggactagtgtgaatgcttaaaaagaaagaggaaaacatctattttttagttgttgatttgtatactttactatctgatccatattggtatgcttacatcacctgagtgttgttaatagcagccatagatccgccacggcagaaaggcatgttggatttttgccaaccgccataggaaatatatgaaaggaggcccaccatggcgtgtttatatggcagaatttcaaccttctgccattgctaaccctgcattaccttaagcacttgtctggaggattttagccgtaacaggcttggaggacctgaatttcttagatgttagtgtcttgtattgtatttaggaagttcaataaaaaaggaagaatcaaatgctaacatatgctattttgatgattcctgggattttggatatcgagcaatatttttagttaacgtggatagttgaaatacggtgacttgtggtatgtattttctttttgcccacttttcatctgtagctttgattgaatgcaaaactgaatcacccctaatttgtaactcattttgccaggtcatttcatgtatcgaacaggtaagctcccctggctcaggtcatttcgatgcactgttgtgcagaagcaaatgtggctaacataggattttctaaatcaaattatgtagatttggatctggtattggatgatggatccagttgagaagtgttttttttccttgtcttgagcagattagtatagagaatagatctgatgtttgtcattttactgaagctggcaaagcatggtggtacaactaactgctttgttattctgttctcaaacattctgccacttttcgagtagtttgctatttgcacctataattaaacgaaatattgtagaattcctatgaaagagtgactttttatcgttctggattatgagagatgtgattgtgattcaaggatggtgagtctaaaaggatatggatgaaaaaatgtatgcaaggtcttgacgtgatgttttggatgaatc

SEQ ID NO: 141258 - DNA, 320 bp, Glycine max
  Clone ID: PAT_MRT3847_98568C.1
cctgtccaacataaaaaacattatttaccgggaatcttcataaaacacgaaggtcacttatattaacaaaaaaaatgagaattcatattaacataaaaaactgtgaataaaaacctctttttatctcaagctacacccactccctaaataatccccgccctaaaaattaaccacgtggctgcacatattaaaaaatcaatcgagttctcacacccaagttcactttttcagtctctgtcacatatcaggcgaatcctctaattttcaaacccaatccctcacccctggttccctgccttataaaaatatttttttgtttc

SEQ ID NO: 141259 - DNA, 278 bp, Glycine max
  Clone ID: PAT_MRT3847_98569C.1
tcgggattcggatcgagactcactctccttctcgttttcgatctcgcgggtgtttgtgaagccaaaaactttcaagaaagacagaatccgagtttgctttttgctgttaattgcttcgtggggagagagtggaagtaaaaggagaaaaattcatttatgttcatattcattcgaattaattgcattaattttaagagaagaagaagaacaaaaaggagcagttttttgcgatctgggtgtgcgctgttttttggcgtcatttgatgacaaagcgtcat

SEQ ID NO: 141260 - DNA, 494 bp, Glycine max
  Clone ID: PAT_MRT3847_9856C.1
cagcaaggggcgtttcactgattaaacttcttcctctgttccgcttttgcttcaaacactcctctgcggtttcgaaaaccatttgactggggctagtatgctcctagcttcaactgtcccacaagtgacactgggtaataaaggagtgaatgcaaagtagttacgtggggaaacaacctgaacatcatataacgaagcgtggagatccttaaggaaactggtaccagcccatcctgttccaagaaccaacaaatttctttttctttggctcattaggatcaatactaggaacatgaggtttagcatcagattttgattctgagtatgaccccacacctccaccactgcaattttcaattttcacttgcaggtaaagtccattaccataaactatgaaatacaatataagctgcatgcaaggcaagaagcaagagtgacatttatggatgcattacataatatacatagatactatgcatgatttgtcccatttt

SEQ ID NO: 141261 - DNA, 641 bp, Glycine max
  Clone ID: PAT_MRT3847_98570C.1
ggcaaatggattaagcaataaaatagtagccattaattttatgaaatatgcaaaaagatgttagttttgcaggtttgttgcctttgaaatgttaattaaatacactgagaagtttaatttcagaatatataaatagttttccaaaaaaaaaaaaaaaaaaaaaaaaaaaaaaaaaaaaaaaaaaaaaaaaaaaaaaaaaaaaaaaaaaaaaaaaaaaaaaaaaaaaaaaaaaaaaaaaaaaaaaaaaaatatattcaatgtaggatatgatagagatagaattgccccggctgataaggagcaacaggattttgggcaaaataatcagttgaaagctcggaaaaaatcacaaggtaaactagagggaaaatcattgaaggagttttatggtagctggtctccttcatcaactacatctggacaatttcagaatcagctggtgtcttcagtcatacagtcttctccctcttcaattcttgggcagtggaatgagcttcaaggacctgagacactataccaggacatcacaaatacatatgtgacatcctctgcatatgggaaccttacaaatacatattcttctatgtcaatgctaccacaggctcagtcaggagttcttatgcgacagcctctgctttctc

SEQ ID NO: 141262 - DNA, 857 bp, Glycine max
  Clone ID: PAT_MRT3847_98571C.1
tcgcgtagcgcgtcgtcccccgcaacgacgtcgtttcatggtcgcgttgttgttgtgctggttctctatgcgaaaatcttctgagggcttctcggcgatgagtggagtaattcattctctggtgtttgattccgcatttccatttttaaatttctctgtctcccatgtaagaaatgtttgattggaacgacgaagagcttgctaacatagtatggggtgaggtgggtgagggtgatgatcatattgtgccttatccggaggcaagtgaagatcttaatgacaagaaagaatggagtcaggaagcttctgctactaaactgattgactagaagagaatagaggctaaaactgattttcatcaaggaaagctcggaagcagttccaaacttgatataattgagggacaatctgcctcagaatctggcacaaactcatggcctgatttatctttatccactgcggctaaaactgatcagggttccctgggtgctgctgatgtatctaaaactttagaggctactcagctgccaaggaatgttgataagcacggtgatcactaggataggatctatgcaaattaccatagcagtgaaatgacctcctggtggttttcaatgtggctgtggccagtctttgtttcaacgcaatgatgtagtggcaaatggattcagcaataaaatagtcccccataaagtttacgaaatatgcaaaagatgttagtttttgcaggttgcctttgaagtgtttatcaaatacacttggaagtttagtttttgaaaacacaaatagatttaaaaaagtccccaaaaaaaaaagaagggcggccgccgtatttgagctcgtcgacaccgggaatt

SEQ ID NO: 141263 - DNA, 3416 bp, Glycine max
  Clone ID: PAT_MRT3847_98572C.1
ctactccactcgctctctctctctcgctccgtcgccgttttaccaagacacgccaaccctctcttccaaactaactaatctctctatcttcttctcttcgcgtagcgcgtcgtcccccgcaacgacgtcgtttcatggttacgttattgttgttgtgctgattctctctccgaaaatcttctgagggcttctcggcgatgagtggagtaatacattctctggtgtttgattccgcgtttccatttttcaatttctctgtctcgcatgtaagaaatgtttgattggaacgacgaagagctcgctaacatagtatggggtgaggcgggtgagagtgatgatcatattgtgccttatccggaggcaagtgaagatcttaatgacaagaaagaatggaatcaggaagcttctgctactaaactgattgagcagaagagaatagaggctaaaactgattttcatcaaagaaagctaggaagcagttccaaacttgatattattgagggatcttctgcctcagaatctagcacaaaggcatggcctgacttatctttatccaatgcagcgacaactgatcagggttccctgggtgaagaagtttattaaaataaagtacaaattgcacagaaagcaaatgatgtagagaagtatgtcatattttattaactaggcctgggatgacataacaatctttaatgttctcaatctaattttaagcaatgatgacgctatatttggctttgtaagtcttgagaattctgatgtgctcttggcttccaaagacaagtgtaacagtgcagtatgcatactcatggtatcacgaaaccaagcaggtgctttaagcaacagatctgagcctttggaaattaaagctgaatatgttcaacagaatgatcaatcattttcccctagatttaagaagattggcaattcttcatctcatgatattgcgaatgctcctgcaaacacattcaatgtaggatatgatagagatagaattgccccagctgataaggagcaacaggattttgggcaaaataatcagttgaaagctcggaaaaaatcacaaggtaaacaagaggtaaaagcattgcaggagttttatggcagctggtctccttcatcaaacacatgtggacaatttcagaacctgcagtcttcagtcatactcccttctccctcttcaattcttgggagacggtacaagcatctgagacctgaatctcaaaatctcatcatccgaaatacatatgtgacatgttctgcatatgcgaaccttacaaatacatattcttttatgtcaacgctaccacatgcacagtcaggagttcttatgcgacagcctctgctttctgggtatgaagcatctcttggtgttatgaatcctgtgagcaagtctgtggacttagttaagcctcttacaatgactccccaggaaaaaattgaaaaattgaggaggcggcaacaaatgcaagcaatgcttgctattcagaaacaacagcaagaattcagccatcaagttcctagctctaataaatcaatgaatgaaaaatgtgccatagaaatgcatagtcaactctgtgatggggctgatcctgaaattgaagatttaagaacaactctagatccaccaactgagcaagatgattctaatacaatctctctggcaattgatgatctttttgttgaagacaccatactgtacatgcttcaggatgttatatcaaagttagatgtcaacataagactctgcattagagatagcttgttccggttggctcaaagtgctatgcaaaggaattatgctagtgatacaagcagtacaaacaacactagcagagaagaacttaaagttgctgcaagagaagaaagaagtagccaaaacagatatgctaggattgctgatgttgaaaccaagacaaatcccatcgatcgaactgtagctcatttgctctttcataggcctttggatttaactgggaattatcctgataagcttgagtcacctatttctgctaagatacaatatgaaagcaaagaagctaacctcgagaagtttcctatgggatgcttgccagatgaggacatgaaaagtaatcaacaaatttctccccaagtgcttgaggcccagcctcaggaccaatttaaaaacagtcattgcagagactcctcagagaatgcttctaacaatgatctagctgatgctggagatcaggtgcttgaagcctctcaatgaagaaaaaggttccccagaaattggagatatgcaaatgttctctgttattgtcagctgtctggatcataatcaaggcaaccgttaaagtctatcatcatataatcctgaacagctgtttcgcatgtgcatgttatcattaatatttatgtttcgtctgtcaaaatcttgacaatatatgtatctcagcatatgaacttactcaacttggtcagtgctgacttatgttaataattacttcagacttgtgtagtagtaaatgctcctaatgtcaaagactacgtcagatttgtgtagtagtaatgccactcatgtcaaatagtcaagtcttcacccaactggtttggatgaagcttaaagttggtgttagatttctgtattatgtaactcgttttagttgccccacatcaatagctaaacctgttgactgtcattgagattgagtcttgatatcaaattatggtttttattaggtttatgtatgtttctggtttgaccggttggtcatggattcaaatccagaaacatctttgcatatgcaagggtatgactgtataatggcgtccggatccgctccatttctaatgtactgaatcctgtgtgttaaagcttttaaacgggtgtgactttgtttacttagctcaatttttttatagataaaggctgaaatgcgtgagaacaacatgcaaaatgattctcgaagcaatgacactgccacactggtgcccttgaagtcaagtcgatgcttattttttgccatgcttttgaaggcaaagtatattgttagtggcattctgataatgcagtgaatacgtgctgtaagattaactttctaatttgagtaaaaatattatggtccttgcccacagcttgagtgcttgataggcaatgaactaagaaatcattgctttaactcagagtcccagattttggaggaagttgaagaaatgaccgctttttctgttgcctgatgttgaagactgtattattctggttcttgacatgaaagaaatagtttttgggagataacagcgatgaggacacatggttaggatagcgaaacgaagcaaattaacatagcagtaaaatgaactcctcgtggttttcaatgtgactgtgagcagtcaatgtttcaacgcaatgagtgatggtggcaaatggattaagcaataaaatagtagccatt

SEQ ID NO: 141264 - DNA, 581 bp, Glycine max
  unsure (1)..(581): unsure at all n locations
  Clone ID: PAT_MRT3847_98573C.1
aaattcgccccccttttgaaacactcataccttgcattcccctcaacccccttgcccaccccagcaccccagatagctccaagcccctgcctcacaatgtagaacccccgctctcgtcagggacagcttcctagccagaaacaaaccgaacgtcactgcgggctttatgtgcccacctgatattccagcagtgcagtagacaagggcaaagatcatgccaccaaaagcccatgcaattccttgaatgccaacagaagagcacttgttgggtgccctgttgacacccatgacagtcaagacagtgatgtagaggaacaagaatgtggccacaaactctgcgatcccagctctgtaaaaagaccatgactttaactcccctggctcaaacaagggtgctggtggtgcctccttgtagtccttgtcactcttagctcctgtacccagtgcttgcctctccgagaatttctgtgctccaaccttaacatcttcctccctctccatgctgttaactatactaaaaaaaccttctttctttctcgagccgtcgccccgggaattcggcaccggaacntggaggcgta

SEQ ID NO: 141265 - DNA, 461 bp, Glycine max
  Clone ID: PAT_MRT3847_98574C.1
tcgggacgatcacattaatgaatcgttctcttcagaaattctgccatctgtgagagaagcgtgagagcctgatccgatcaagatgagagctaagcgcaacaacaagcgcatggaggaggggaataggaagcgtcgaacgatgagacaaagatctaagtaagagcttgagcaggagctgagatgatctttccatctgctaccaggctcatgacacttttaaggtggtatgactctctatgatcttgaggcctacgcgctaggagagcttcactcttgactatcaccttgctttactggacctgggcctgggctagactatagagtgcgactcaagttgagatgtctagggtgttgtggaatcaaattatgtactgatgtttatactgtgtgctggaatagctatatagttagcatcgagacttccatgaaaatttgctcctattacaaaaaaaaaggaccct

SEQ ID NO: 141266 - DNA, 1259 bp, Glycine max
  Clone ID: PAT_MRT3847_98575C.1
ttatatttttttttttttttttttttttgtttttttttttttttttttttttttttttttaggcaaaaatctccacaatctatcgagttcacaaacaagtaggtagtaattaaggtcataatttacacacatgatggattttaaacaaaaagatattccatatgaattgggcaaacatacaaaaagacccccactaggtagataattcaaacacagagatggatgaaggattggttaaccccttgtcttgaaaggaattgctcggatcactatctggtgatatacagcagcaagggcagctccaatgaaaggtccaacccagaaaatccaatggtcatcccaagcatggtctcggttgtatattatagcagcaccaagactcctagctgggttaatgccagttcctgtgataggaatggtagccaagtggaccaaaaacacagcaaacccgattggaagaggggccaaaatcgggacgtgagagtctctagcgtttctcttggcatcagtggcggagaagacggtgtaaacaagaataaaggtgccaacaatctcagctccaaggccatcacccttggtgtatccatggctcacaaaattcgctccacctttgaacaactcataccttgcattcccctcaaaccccttgaccacaccagcaccacagatagctccaagacactgcatcacaatgtagaacaccgctctcgtcagggacagcttcctagccagaaacaaaccgaacgtcactgccggatttatgtgcccacctgatattccagcagtgcagtagacgagggcaaagatcatgccaccaaaagcccatgcaattccttgaatgccaacagaggagcacttgttgggtgccctgttgacacccatgacagtcaagacagtgatgtagaggaacaagaatgtggccacaaactctgcaatcccagctctgtaaaaagaccatgactttaactcccctggctcaaacaagggtgctggtggtgcctccttgtagtccttgtcaccctgagctcctgtccccaatgcttgcctctctgagaatttctgtgctccaaccttaacatcttcctccctctccatgctgttaactcaactcaagaaagcttctttcttttacttcgtcgacctcagctcctgtacccagtgcttgcctctccgagaatttctgtgctccaactttaacatcttcctccctctccatgctgttaactatactacaaaaaccttctttctttttactcgtc

SEQ ID NO: 141267 - DNA, 264 bp, Glycine max
  Clone ID: PAT_MRT3847_98576C.1
ttttcaattctgtattttttttttttcccaaaagcctattttggctccagcagagtgttccttttattttgcaatttccatttttcataatcgtcatcaccacccataccatgatttcttatttatcattcggccctagttggggcccccggagaaaccttcccggagagacgtgcaaaaacccatttttttggaggggccaacctgcgaaacacccacactcaggccttgttgaaaaaaacgctgtgaccccaccctgcggcc

SEQ ID NO: 141268 - DNA, 296 bp, Glycine max
  Clone ID: PAT_MRT3847_98577C.1
agaacaaaaacatgtttttttttatgtgcttaaccagaataaaacacaggcttttttttgggttaaacctgcttttgaaagaagctcctatttttccccaaaaggctgcacaggggctattctttagctacccccacagatggccgagcacttgtttctaccgtttttcacaatttacgcacaaaatgcaccgatttttatcaacaatccactcttaggagacgagggtgttttccacagcccatttttaggggctgaaatcgattcctaggggctatttttaattttacaaaggc

SEQ ID NO: 141269 - DNA, 1530 bp, Glycine max
  Clone ID: PAT_MRT3847_98578C.1
aatttcacaagtagaagaggaatcgtcttttaacatacgtgactacatgcatagggaggcagatgctttagtggtattcctaaaatgctctttacattctacgctgcacactcgatctaagacagcacacgacacaactaagtaccaccataactctgtgtacgtcacaggatcacctactacatgtggggactttgaactacactgcacattctctgaccaccctagctagctaattagatttctgagagaaaggaaagggtgtgagaagagaatggagagtaaagaggaagatgttaacgttggagcaaacaagttctcagaaaggcaaccaattggtacagcagctcaaggttggtgagagaaagggagaaagggtgtgagaatggagagcaaagaggaagatgtaagggttggagcaactaagttctcagaaaggcaaccaattggtacagcagctcagggtgacaaggactacaaagaaccacccccagcacctttgtttgagcctggtgagctaaagtcatggtccttctacagagctggaattgctgagtttgtggccactttcttgttcctctacattaccatcttaactgtcatgggtgtcaacaggtcaccctccaagtgtgcctctgttggcattcaaggcattgcttgggcctttggtggcatgatctttgcccttgtctactgcactgctggaatttcagggggacacatcaacccagctgtgacctttggtctctttttggcaaggaagctgtccctcacaagggcgctgttctacattatcatgcagtgtcttggagccatctgtggggctggtgtggtgaagggatttgagggcaatgctaggtatgagatgttcaaaggtggagccaattttgtgaattctggatacaccaagggtgatggacttggagctgagattgttggcacttttgttcttgtctacaccgttttctctgccactgatgccaagagaaacgctagagactcacacgttcctattttggctccacttcccatcggatttgctgtgttcttggtccacttggctaccattcccatcacaggaactggcattaacccagctaggagtctcggagctgccatcatctacaacagagaccatgcatgggatgaccaatggattttctgggttggacctttcattggagctgcccttgctgctgtgtatcaccagatagtcatccgagccatccctttcaagacaagggcttaggctcttgtttttgtatgtgcttgcttgtattagttgttatttatgtatctggagtcttcttcatttggaaattcatgtgaatctttttgttttaatccattgtatggatgtaaattatgacatgattagttccttgattgtatttgtgacactctgaatggattacttgttttattttatttgtttacaatggattacttcttttagcttaaaaaataaaaaaacaactgacacctcttttactttactctccctttctagctaggttccacaaaccaaaa

SEQ ID NO: 141270 - DNA, 370 bp, Glycine max
  Clone ID: PAT_MRT3847_98579C.1
cggtctcgtgggcggacgcgtgggcggacgctgtgggcggacgcgtgggatctagttctacatagggaaaagtatactgtacaaaagcacaaaaacactgtggaaaaacctctcaaatatgatataattggtgctggctgacactatcaagatgattgtgctgacaaggaagaccaagaaagacccaaacagattgatgccagattgtgacatagaatctatcctcaatacattgaggctgaagctcatatggaaacatatgtgtacaaattggatctagatgatgtcataactcctaactgttgcatgtaggaacttaaaatatctgaatcaaagatagcacttcccaaaaacacacttggaggaacca

SEQ ID NO: 141271 - DNA, 250 bp, Glycine max
  Clone ID: PAT_MRT3847_9857C.1
tcgcactcgggaaaggtaagaaaattgattttcttactagagttgatccttttccagtagctttactggctgatctttttggcgttaagaatgaaattctgaggttctaacgccactaaccctatgctgacgcgactttttgagaactgtaagagtctcaaaaatctggttgacgaagtgtccttttgcatttgtgaactaggatgtaattactgtattcacttaaataaagcgcattactatgtgcaat

SEQ ID NO: 141272 - DNA, 258 bp, Glycine max
  Clone ID: PAT_MRT3847_98580C.1
gccatgagccacacatctactggactgagttttcagttttacagttactggcaggcaaacagcgaccaagagtccatgctgtcagatgaaacctgcccacgggccgtgtgcgacaactttgagcttgcaaaagcgtgccataccaagagcaaaatgatgagcacttttgtcaccatagcaaatgttgcaagaccaaagccgcgtctgacattcattggccaccttcacctcttaaaagataaacttcacacataaatt

SEQ ID NO: 141273 - DNA, 325 bp, Glycine max
  Clone ID: PAT_MRT3847_98581C.1
gcacgaaaagcgccaaggaaaggaaagtgaataagatgaataataccatcactaggattatgatcaagacaaacagagccaaaaatgtgaatgtttttagtctcaaggagaaccacgaagacataagaattagaacccttttcacttcaactctaataggttccacactttcttcagaaaccaatatggtcacgttcgcgtcctctagaggttctacaaacgctcccaacagcttcaaaatctccgacactaccgcattttggagttcgactccaaaccctacacccttattttaccctaccatgctgacgctgattacctcatc

SEQ ID NO: 141274 - DNA, 1186 bp, Glycine max
  Clone ID: PAT_MRT3847_98582C.1
ctgcttgtacctaaagccaatgccatctttttctgtggggatcgagttgaagggactggtaacccagtgattgagaggctatcaaatttacaaaaactatctgaaattattgtgtccaaattcggttcattcaccaatgcttgggttattgaggcttctgcttttaatggacctttcgctgtctataaagacttcataccatctgtgaatcaatatggagagccaagttcataccatccaaatggattcccagcatctacatcaactgtctcactcttatctaattgccttgaagaagccaaaaaagtcattttaggaacacaagtagatacaaagtctggcttgagtccttcgtgttctttctctcgatccaagacattcatccttggatttagcaaaggtggagctgtacttaaccagatagttactgagcttggattctcagatattggatccaatgcgaattcacctgatgtgggacagcttatgggcagaaagttcgccggatctgaggagatttatgttgtacctaaaacaaaggaagacttgctgaacagcattagtgagattcattatgttgatgttggtctcaactctgctggggcatacttaactaaccatgatgtgtttgagagaatctccaagaggctcatgcaaggagcttctgaactccgttttatcctacatggaactccgagacaatggagtgacaagcggcgagattggatacgaaacgaaaaggacaaaatgctgcgtctgcttgaatctgaagccccaaagagtgggggaaaattaaaagtattagaaaggttttattttactgataagcctccaagcatgcagatgcactttgaaattatagaaagtttagatgcaagttagtagttcattcttgataggtctactggagtctttgctataaaagcttttgagggatggggggctgaagaccctgctagcccccgcataaatccgtccctgatcattaaccagtcaatattctgcaagaatatgtcatatctgagaattatcaaaagaatagtaaaattggaccattgcatcttttgttatctcctcctacgtgtcagactatctatgaccaaaaatgattgtaatcattgaagtggttatcattgtaattataatactccaatttaaatcttctgtagataaacaattggtgatc

SEQ ID NO: 141275 - DNA, 243 bp, Glycine max
  Clone ID: PAT_MRT3847_98583C.1
caattgggcaaatgcatccatagtgactagggtggatatctggtatccgaaaacttgcagtttgccctgtcaatcctccagggtccaaataactcagttttctctcatgaactatttgggtcaatggattagtttgatccaaaacttgagataatggatgtaatccaaaaaaagattcataagtaaaggttatgatgttcaatacagaaaaacttcaactgtatgtcccaactccagtgacag

SEQ ID NO: 141276 - DNA, 465 bp, Glycine max
  Clone ID: PAT_MRT3847_98584C.1
tggacagtgcagggaggcaaatggaacatgccaataatatagctctcaccttgtcacaccttaagcaagcaaatgaatggttggaaaaactgagaagcacttcaaacttggaaaatgatgagctggtggaaactgttgacagattgaagcaaaaagtttattcttgtttgcttctacatgttgactctgctgcatttgctttggaaaaccgagcttgattctaggacagtgatatgttttaaagcaatatattctatttaatgttgtttataagttaaattatcttatttggttgaaccaggcatggctaatggaagcttggccggctgctattcaaaatgtaatgtgatatcatatcatatatggccaatggaagcttggccggctgctattcaaaatgtaatgtgatatcatatcatatatgtataccatctgtggcaagaataagaaagactatattgaagt

SEQ ID NO: 141277 - DNA, 188 bp, Glycine max
  Clone ID: PAT_MRT3847_98585C.1
ctctgaaataacaacaccttcaacaacccgttcaagccggcctaaaccctattacgctggactctctattttttctttgcttgaacactgtctattggatcatcacatattacatatcattttattcagaaatccccttctcaaaccctctagtcttactggagagtgctctttttgtgaatgatgag

SEQ ID NO: 141278 - DNA, 295 bp, Glycine max
  Clone ID: PAT_MRT3847_98586C.1
gatattaacagccttaaaacattggatttagggtgggatcttataataagatgaaaattgcgcttctcagattgacacataagaatgtttaaccaatagtatgaatggaggtacaagtccagcttaagttgaactttattaagggaaaaaacacctatataaccatcatgacctcatgttgaacagcgtagctgttagtcctttactatgcagggcaattactactagcgctgacatcattattggactagcattgaaatagtcaccaatttgaatcagcttgtgcgactgaaca

SEQ ID NO: 141279 - DNA, 381 bp, Glycine max
  Clone ID: PAT_MRT3847_98587C.1
gcgcgcacgcgttcgcccacacgtgcgcccacgcgtccgtccacgcgtgcgaatttaccagcggtactcgtgggttttgaaggctagaagtgctgcaatacaaacaatggcagctactcaagaagaagtgaagcttttgggtattgacggaagccgctttgtgtgcaaggtccagattgaccttaagatcaacggagttgaacacaaatttttggaataaaatttggacaataagactgatatgcttgttacatacaaccctgttcacaagaaagttccagacgatgatcactatgagcagcccatagcagacgctcttgttaatgttgaatacattgatgatacatggaagatcaaccacatcttaccttctgatcccta

SEQ ID NO: 141280 - DNA, 269 bp, Glycine max
  Clone ID: PAT_MRT3847_98588C.1
attcccgggtcgacccacgcatccgaacaggcgtcagtacagcagcgaaagggcaacaaaaggggactaagaaaaacaataagatcaatggttggtcagcctcactccatctgaatacatccaacaaaatagaatatatcttataccctcatcaactatcaacgatagcgaatactgatgatctcgaccttgattcatgggaaaccctctatcaaaggctgagcgtcggcgataatcatctccgatcggtcttcatccgcaaggtctac

SEQ ID NO: 141281 - DNA, 454 bp, Glycine max
  Clone ID: PAT_MRT3847_98589C.1
atcgtataattgaagaagaatctgatgcaccaaaatatcacatatagattcatagtttagtttttatttatcatttaacacacacaaatatagcggaggctgaagcaaattactacaaaaatttgttggattaattcttcatcaagaacaaccatatggcagatgatgatcaatttcaagcaagtgggaactggtgggaaacatcaagaagcgtgaggtatgagagcggggcatcccagtcatcttcctcagccatcaccaacacaggcaacaactttggttggcaaggttcggatatggcagacatgaagccaaggtcttccatggattcttcttctgtggtttttcatgacacacagaataataagttttaacaaccagattctgccactttcagtgaccccaacttgcatatgatgggcctaggccttttattctcagccatggattggaa

SEQ ID NO: 141282 - DNA, 354 bp, Glycine max
  Clone ID: PAT_MRT3847_9858C.1
cacgcacgcgtacttaagctcggactctagctcttatattcattactttttttccagatacaaatatgcataattggtcacgtatcaactgtaattatatgtatactcatcatgcctatcctgaatccaaacataattatatctgtattcctcattgaatatcaataccacattttcaataaataactacgcaaaaatgttcatatatgaactgcacattatttgacatcttatcacgcctatcctgcagccaaaataattgagatcgccattcctctgagaataccaattgcacatttttatgaaatcaggcatctcatatgtacatatcttaattggaatcaatttgatttc

SEQ ID NO: 141283 - DNA, 1575 bp, Glycine max
  Clone ID: PAT_MRT3847_98590C.1
gcgcccacgcgtccgtacggctgcgagaagacgacagaaggggaatgaaaggagtgatatattgtctttggaatttgactgtgttgtcttcttctttgtgactcactctctcttcagctcttgaatttgatccacctgtgttgcttttcccaccaaaccaaacaaaataacctgatattaacgtaatagtagttcttttatcgaacattgtccaattcataatgcactaataacatcaccgttcagcttcagcaacaataaataaaatataatcataacaccgttcatcaatggcggttcggctgcattcctagactactctctttttccgcaatttttcattggctgcgttcgttcgttcgttgcgtgctttagttgttacttttccgttacggcgatggagttggagcacccgaccgcgacgccgctcaactccgccatgacctacgacgaagcctccatggagcgcagcaagagcttcgtcaacgccttgcaggaacttaagaacctaaggcctcaactttattctgctgcagaatactgtgaaaaatcttatctccatagtgaacagaaacaaatggtacttgacaacctgaaagactatgctattagagcccttgtgaatgctgttgatcatctaggaacagttgcatacaagttaactgaccttcttgagcagcaaacatttgatgtctcaactatggatttgaaggtcgcgaccataaatcagaaacttcttacatgccaaatttacactgttaaagaaggtctacggcagcagcaattgttagctttcattcccagacatcataagcactacattttgccaaattctgtcaataaaaaggtacatttcagtccaccaatacagattgatgcaagacagaatccatttcataccagaacccgttttcaatcttcaggtacccctgcagcgaaaactctttcatggcatttagcatcagagacaaagtctaccttaaaagggtcttcgcatgcttccccttccccaaacactgagaacccaaagttttctgccaaggcctctggagttttccatctcttagataatgaagagaacacctggatgaaatcctcacctgcacaaatttactttccaaatggagttcctacctctagtacacccatgcatactttaggtggtacaggcaaggatgcattggagggatccaaaccattgacagcattcagatcattcgactaccaaaatcggcgtgagactgtccaagtccctactcgaagcaaaagtgtgctatcagctttctttgtcaagcagaaaacaccaaagttgaaagccagttctttcttatgaatacctctaaagccatcccctcccctatgcaaatgctcagaattaattagtttctgaatcaagcctttaaataatgatcctgtaagtagccggttccctggcaatcataatggttgggatcttggtcttctaatcgctttatgttactcttgtgaattgtgatctatgagttcaggcaccagtaaaatgtatatttttcgtatgctatgcaaaaaaagtttcattattttttcttgtccttg

SEQ ID NO: 141284 - DNA, 393 bp, Glycine max
  Clone ID: PAT_MRT3847_98591C.1
tgctcgagccgattcagatcgagctccagccgctctagccgttacactggatatttggaggctcagtcatcatattttaccctgatctgcgctctagctcttgcaggagagagccatgctcgtgctttactaacctgaagacgattatctggaaagctcagctcacaacactgcgattgccactgcactgcgagagcttcttaatcctctacctgctggtgcactagatgaagaactacatattcgaactgaggatgcacatggccgagatcacatgctcttattaaccataccttgcttcaaccgaaacactgaacatgctatacaccttccgtacctatgccatcattctggtgcatctacatggctaacgcatactgttcacacctataa

SEQ ID NO: 141285 - DNA, 765 bp, Glycine max
  Clone ID: PAT_MRT3847_98592C.1
tctggaagtaattattggaactaaggatctatagctttagtttttacttggttctgtatgtttgtttaacaatgcaagctagattctgtcaataaaaaggtacatttcagtccacaaatacagattgatgcaagacagaatccatttcaaaccagaacccgttttcaatcttcaggtacccctgcagcgaaaactctttcatggcatttagcatcagagacaaagtctaccttaaaagggtcttcgcatgcttccccttccccaaagtaagtttaggaatttaatagtctgtgaccgtaccaaaactgctgcattttgtgtttttgatactcagcatagagggtattatatcagcatagatggtattatattacactttcacattgacttttgcagcactgagaacccaaagttttctgccaaggcctctggagttttccatctcttagataatgaagagaacacctggatgaaatcctcacctgcacaaatttactttccaaatggagttcctacctctagtacacccatgcatactttaggtggtacaggcaaggatgcattggagggatccaaaccattgacagcattcagatcattcgactaccaaaatcggcgtgagactgtccaagtccctactcgaagcaaaagtgtgctatcagctttctttgtcaagcagaaaacaccaaagttgaaagccggttctttcttatgaatacctctaaagccatcccctcccctatgcaaatcctcagaattaattag

SEQ ID NO: 141286 - DNA, 315 bp, Glycine max
  Clone ID: PAT_MRT3847_98593C.1
atctgaccgtgctagcaacgatagcaggcagacacaaacatggctgcaaagcgagatcatgccgtcgcgcgcgaggcgcgtgtgtaactattcctctgcgttctagccctacacgatgtatacggaagcatcactgtggcacgatgtcgcgagagatgcaaacctaggcgacgacgagcttgttggcactgatatgaaataataggatcttatgaacaagatggggaggagttacgggacagaggaggagtatcatgcttcggtcggggattatagtacagagcattgtcagagctagctggagcttagcgcgct

SEQ ID NO: 141287 - DNA, 276 bp, Glycine max
  Clone ID: PAT_MRT3847_98594C.1
ggctcgagcttcttcacgacttatctatgacactgaccatgtgcaagcgcatatgttgtgcaatgctgagaacgtgggactgagtgtcagtgtcctggccaatatccacgtttgtctgcttcgatgatagaccgtcgtcaaatgcaccatgtgcaccgttgaaatgctagtctagcgctggtggacagagactcctgtgatgattcacttgctactcctgctcgtgaaaatgggacaaaccggcctgcactatcggcagtagattacaggactcaa

SEQ ID NO: 141288 - DNA, 268 bp, Glycine max
  Clone ID: PAT_MRT3847_98595C.1
gaccgactggtccattttagactacgcgctatgcatccgacccctatcgcacacccatctgatacaaggttcatggctagcctaaaggatgcatgtttcggctgtcaggctatgcatggctcaggagagtgcaccgatggcacatgcagctatcacgtaccgacaagggactagtgacctgtccaattgcatagctactcttataaggacgaacgtcctttgatgaatgctgcgacggattcaacagcctctatgccgacgacaagac

SEQ ID NO: 141289 - DNA, 471 bp, Glycine max
  Clone ID: PAT_MRT3847_98596C.1
tcgtgaggggttgaggggtgctgcttttggcttctctaaaatagcaaaacaagcagggggtgttcttaagccatacttacgttctttaattccaaggcttgtacgctaccagtatgatcctgacaaaaatgtgcaggatgcaatgatacatatatggaagtcacttgtggatgattcaaagaaaaccatcgatgaaaatttagatctcatcattgatgatttactagtacaatgtggatccaggctttggcggtcacgtgaggcatcatgtcttgcccttacagacattattcaaggacgaaagtttcatgaggttgggaagcatttaaagagattatggtctggaacatttcgtgtaatggatgacataaaggaaactgttagaatttctggtgaaaaattatgccgtgctgtaacttccttgacaacaaggctctgtgatgtctctctaactgatatgtcagatgcgca

SEQ ID NO: 141290 - DNA, 1559 bp, Glycine max
  Clone ID: PAT_MRT3847_98597C.1
gattgagcatcagagaaggaaggtcaaactactatctatgcttgacgaggtggacaggagatacaaccactactgcgagcaaatgcaaatggtagtgaactcatttgacctgatgatgggatttggggcggcagtgccatacacagcactggcgcagaaagcaatgtctcggcatttccggtgtctgaaggaggcgataacagcgcagctgaagcaaagttgtgaagtacttggagacaaagatggggcgggaagctcaggaggtttgaccaagggtgagaccccaaggcttaagatgttagaacaaagcctaagacagcagagagccttccaccagatgggcatgatggaacaagaagcttggagaccccagagaggcttgcctgaacgttctgtcaacattttgagagcctggcttttcgagcattttctccacccgtatccaagcgatgcagataagcatctgttggcacgacagactggcctatcgcgaaatcaggtatcaaactggttcattaatgccagggttcggttgtggaaacccatggtggaagagatgtaccaacaagaacttaaagaagcagagagtgcagaagagagagaaaaggaccaaagcaacaacattagtggcaaccaagcacaaattccaacaacaccatcagcggccacaacatcaacagcaacagcaacagcgccaccaccaccaccatcaacaacgacaaaaacaacaaaaccgacaggcaaaagatccgataccatcaatgcccccgaaagcgacccttcacagcaccttgcaatgaataacagacaaggcttctcggaaaaccaagcaaagaagtccaccgcatccaccaccaccaccaccatcgcctctgaggtggcgccacccgtgtctcagtgcttcgacgactcagacctgcccgcacacagattaatggcctctgatgacacgtgtcatttggtcacagcagattttgggaccgcatctgcaagtgctgacattggatccacactcattaggtttgggaccacacccggtgacgtgtcactcaccctagggcttcgccacgccgggaacatgcccgagaaatctcctttctctgttagagactttggagccatttaaacttcaatatatattatatagtactacttcacataataataatcaaaataataataaatattatataggaagatgctttatcatattattatgtatatcatatcatcaaaagaaaacatttttcccccctttattgtttctcagttattcctcgatctgtcttatttgcattgtggaaggacaggagaataaaaaaggcaatacgatatgagaaaggtagtctgaaggtagctattaattaggcgcaacattaatatggtatctattgtataactgtatagcagattgtttttcatgattatttttcccgatatatgtactttattatttttaaggtttgtagtttagtttgataggacttgatctagtcaatgactgaaataataactgttccttttttttttaacttttaagataatgaaatgttatacct

SEQ ID NO: 141291 - DNA, 258 bp, Glycine max
  Clone ID: PAT_MRT3847_98598C.1
acggctgcgagaagacgacagaagggattaaaaacaattacaggatgacaaccgatacagtgctgggcgaggtgctcacattaatcttaaacgtgcagaacatgctagaataactataggcaaaattccaggtttgctttcatgaatggctatgaacctatccattattgacagtgccatttgaacttctgatgacagtatgttttctttcagctatggttgacaatcttataaacaaaacattagcctgggaagatg

SEQ ID NO: 141292 - DNA, 517 bp, Glycine max
  Clone ID: PAT_MRT3847_98599C.1
aatttcggcaccaggctgtcctcctcatccaccagggtattttcttgtgcctcaactcagattgaggtgaatgaaaaaccatttgcaagaaggggaaccctttggaatgttcatgtggaggctcactcaattgcataaacaacttattaacaacaccaaaaccaagccttgaaatagcctcggccttgaaagagggtaaagggggattaaacattaacatacctgaatcatcatcacgaatagaagccttcaacactccaagtgaaactgtgacaatgacatgatccgcagacataatagagccatcacagaaatgtagcatcacaggcctagaagaacatggtcttccattttccaaattcatcgcctcgtgtctctccggctgccattcaattcttgtgacttttctacccaactgaaccaaaccaggaggtagcacagatgctaaagattcaattatgctcaagtagcctttagcaattgtgatttcctcacctggaaacatttggtattcacc

SEQ ID NO: 141293 - DNA, 1634 bp, Glycine max
  Clone ID: PAT_MRT3847_9859C.1
ctccggcccatgggctgaagcccgaatgagtgaccgcatagcccggcccgggctcaagcccgaaccttacatacccgagtttctgttccccgtccattgtctccgtttgaaacagtttcagtttctgcctctttcggctgctacgttctctgaacttccattgacgcgccggcaaacatcttctgcacgcttcgtgtaacagcagaacccaagagaaaatgacaaatgagaatacaacaggcattgagatagattatgaatatgaagattgcagtaattctaagcgcccaaaaatgacttctaaagtatgggaagaaatgcagcgaattcaaaccactgaaggtagtaaagttctgtgcagacactgcggaaaactgttgcaagataactgtgggacttctcatttaaagcgtcatttgatcatatgccctaagcgtcctaaaccactggatattattactcaagattcaatgcctacagtgtgttttagaggtcccagtagtgtcaaagattctggattaaatacagtgcttatggttcgcccattaaaggtcgaacctgaatctcaaatcccatgtttttctcagactccaaatattcgagttccaactgctattgcatccattgaaaattctcccagtcccgtacaagaactacatccaaaaactagttctgctcttttgctgcctagcatagaatctcccaagaatcaaggggaactgactctggatgatgtagaaatgaaagcattttatgcttctcttgatgcccagacctcagatatgtcaccttcccaagacaccgctgtcattactgaattatccaattcaacaccttgtgaagagaccaagaaagcattgacaacgctgaaggaccttctttgcaaagacttctctgatctattgcatactggacaatctggttccatcaaatcttccatagaatacctttccaagttgtctgcagatgatggagtctcagcagaaatgaggttgttgatattagaagtttcaagagaattcactcgctggagttgcgactacaatgatgccagtaggaaaatagagtctgccagcaccaacatctcgaaagcagataaactagaaggaaatcttgaagctaacaagaacgagttcaaggaagttatgtccttagaaaatgagttaagcaaccagttatcatgtttggagaaaaggaagaaagagctagaagagcagataaatgcaattaaagctaacatttctgtttttcaatcggccaaggtaacaagtacaaagagaaaaagggaagtttttgaagaagcaaagattctgaaagtacaaagagatgagttgagggaacaagtgcctcacttgagaaatgagttggaagtggccaagaaaaaccaagctcatattcgagctgaatggtcaaagcttggagaaaaatttaacaaaagcttgaatgagatgaattgtgagcacttgcatggcaaatctatcgaggattgtcctcaggaaaattccatttaagaatctgaatttcaattttaactaatatcaatgccttcataccaactccatgatgagctaaaagtaagctctgatatttgttatacctctgctgaaaaatgaagcattttcaccgttgatttt

SEQ ID NO: 141294 - DNA, 230 bp, Glycine max
  Clone ID: PAT_MRT3847_985C.1
agcggccgccctccacgcgacccgcgttatgtttgttaacatgtgaatagacactaagaaccgagaggcaacaggggcctcccaataaacaggagccccgccgaacaaaacggaattgagagccgacaaaaggcaaaaaaacaaaaaaaaacccaagcacaagggcacagaaaaaaaagccggacagcggggggcgacccgggaaaaccgaaccggaaccggcgggcaga

SEQ ID NO: 141295 - DNA, 340 bp, Glycine max
  Clone ID: PAT_MRT3847_98600C.1
aacctgtactaccaaactgcgaataactcaaccaatttttttccaaatccagttctgtaaactgtagactaacgacaaaacgacttgggaataactcgataaaatttcgttacttttgaccacgatttgatatgacgaaactgaacaaaccataacgattctgctccttctctttctctatctttttctcctttataaaacgaaaagtggctaactaaatctctaatttcgagtttccttcttttctaggcacaggctaaggtttccaattaacccaaccaattaaagcggatgatttaaaaacaaaacctaaccgattttccggttcacgggcgttaca

SEQ ID NO: 141296 - DNA, 531 bp, Glycine max
  Clone ID: PAT_MRT3847_98601C.1
tacggctgcgagaagacgacagaagggggagcatctttgcttgttaatgcccttagctttttactcctcttattctttgagctagttttagcatggatgctcatttttttcttaggaattttactgctgcttaactactccaagtaaaggtgcaaatcatgcatatacaaagttggaaaaagttgaccttgtaaagttgtgttatttcaggaaaagtttagtgatgttgtcaactggctcaaagcaaatgccactaaggcagaaaatttggctgctgatgctggtgttgccttttctgggaaaaagctcttgcctgaagtaataaacaaagaaaataaaccttttggagaaaaaactgggtctactcctgttagtactgctacaaattttactagttcttggagccctggattattttcaaacagtcaaggcatttttggatttggtaggtctcttctcacttttaaaaaaatatacccaataacttttcttctcataattcaaagtaacttctagaatgaggtcacattg

SEQ ID NO: 141297 - DNA, 464 bp, Glycine max
  Clone ID: PAT_MRT3847_98602C.1
acctccctcgcgaccgaagcggaagagcaagcaaagcgagctcatgaataggaaaaacacgtagctcacgaaagcctcaaggatcaaataccagctgcagacaagcgggacactacaaaggagaagaagtgcgcaaaaataaagaaccctagacaaagaggtgaaggagatacaaaaccacaaacagatgggaaagagcacgagggaaagcataaaaccagaatcgaaaaagagcgcaggggagaatcatgaaggacaaatacccccaagggcacaggaggaaacgccggcaactaaggcaagggatatcagaactgcaaaggagagcaaaaacagcaagccccaagccaccgcaaagcaagagggagccacagaaaaaatcaatgaaaggaacagaagaccagacagcaacaaagaaggagcaaaagcaaagggtgaaacagaacaaaccaaaaccgaaaaag

SEQ ID NO: 141298 - DNA, 1885 bp, Glycine max
  Clone ID: PAT_MRT3847_98603C.1
ggagcatctttgcttgttaatgcccttagctttttactcctcttattctttgagctagttttagcatggatgctcatttttttcttaggaattttactgctgcttaactactccaagtaaaggtgcaaatcatgcatatacaaagttggaaaaagttgaccttgtaaagttgtgttatggccgtaccctcccaccttcatacgctggattttcagcttctgcatctgcataagcataacccgttaataattactgcaaagccctacttccccaaatcgatgatgaaaggttcgaagcgttgggccgcgtcggaaccaatccaggtcgataccaacgaatcggggtacgtgtataaaagaatactggtaggatacatcatcgacaaccaaagcagcaaaccatcctaacaaccaatggtctgatcactaccattgaaaatgaaacgggcgaattcatcacagcaacaagtgagagctttaagaacacagtgggtcagttcgtttcaaacacaattaaagaattactcttattagcattgcgaagatattgtcagagattacttagatcttggttcaagcattatggaaaagtttagtgatgttgtcaactggctcaaagcaaatgccactaaggcagaaaattcggctgctgatgctggtgttgctttttctgggaaaaagctcttgcctgaagtaataatcaatgaaaataaatcttctggagaaaaaactgggtctactcctgttagtactgctacaaattttactagttcttggagccctggattattttcaaacagtcaaggcatttttggatttggaaatcaaagttccttcagatgatgtagacggtgaatgaattggagcagcctagcagcccatcagttaagaagtcagaagagaaaggtgtagcagttgtacatgaagtaaagtgcaagctttatgtgaagtcaagtgatccagcagataaagatgtatggaaagataaaggaatgggccaactgtccattaaatgcaaagagggtgtcagcaaggctaccaaagagtccaaacctacaattgttgttcgaaatgaggtaggaaaaattcttctcaatgccctgttgtatccaggaatcaagacaaatctgcagaaaaactctcttgtcacaatattccatacttcgggtaatattgacggaagtggtggagataacgatagtgttgttgcacgtacattcttgatccggatgaaaacagaagatgatcgaaataaactggcttcaaccatccaagaatatgctccggtgtcttgagagtacaagagtcattattattgtgcccccttgagccatttaaagtaatcgaatactggatccccaccttcaatttttcctttcaccattttatttttttaaggtgtcatttgttagattctgtgtttccaaaccttgtgtttggaggctgttgcttatgtacaatatgagaaggttacatttggtcggataaaataccttagattaatgcaattgtagttaaaagtgatgcattcattaccttggacctgccgttctattttttaaagccagccaaatggcaggtattaaaccgcatgtttacagaatttgaagactaggtggaggattagaggatgtttgtttcatataaaaatgttgagaggtcttttttcccttttaaaaaaaaaaacccaaaaactttttttttcataattcaaagtaactttagaatgaggtcccattggtggtaaaatagactggttgcatttggtgcttcaatgtgtgcccctcaaggggaatttaagcccaatttggtaacagtttccccttttggcccccaaaaaaaaaaaattgtttttttgttccaaaagcatttcaagaattttgctc

SEQ ID NO: 141299 - DNA, 354 bp, Glycine max
  Clone ID: PAT_MRT3847_98604C.1
gttgttcttttttttttttttttttttttttttttaaaacaaatgtcctgtttttgttttttgggtttttaattcttctaacacttttttttttttttatattaacgttctcctctcaacaaggagggagcttttaaaatttgggcggtcgaagaggctcttacccgggggaaaactttaaaggggttccctttaggggggtaacctacccggcaacaaagggggcccccctgtgcggggcaacacctttaacgcccccaacaggggcatatccgggggacactcccttttcaaaacctacacggggggggttatgaccgtcttaaaaccaaaacatcctttttttttcaaaat

SEQ ID NO: 141300 - DNA, 409 bp, Glycine max
  Clone ID: PAT_MRT3847_98605C.1
gcgcccacacgtccgtccacgcgtccgtttttgtttatcccttcttctctcctataaaaacaccaacacacaaattttcacaacatttgcatgatctgactcacaaatcatcctcctattcctcggtcgtagcctgttgttccctctttcatcttttttcgccgtcacaacagccaccaccatggtcgaaaccagacgcggcgcctcttctttcaagcgttctctctcttcgccttcttctgcgtccaacaccaaacgatccaaggtgtctgaggattcctctgtggcggctccggtcaacgaatcttgaaccggaaatgaatctggggaaccggagctacgaccctctgatctgccagataccgcgtcgttgaaggtcgcgggtggtttgtgattaggcctccttctg

SEQ ID NO: 141301 - DNA, 542 bp, Glycine max
  Clone ID: PAT_MRT3847_98606C.1
ggctcgagctttgttcttttaccttgtgcgaaagagaaaggttaagctttggctgatgagatcgcttgtgcctccccccacaatactctcaaaaatgactgctatcaaaatggcgactttgtttacatggacgccatgggcgatcgtgacactgttagatacagaggatcatgtttgattaccgtttgcacatatcaagtcattacagagcgccctgaagaggctaactgcttgaacgtggacagtatttttatacaccgagagctaagactactccctgggaataggcttccagtcatcaacatatgggatactgatgatgttgtgtggagtacttcagctgacaaagttgcatgcatgtgcctaccagaaattgagcactcaggatgcctctttgctctattgcaaaccctaaacggttttggttatcgatataggtgatggaggggtcatcaagaagtacacgcccatttttaattgaaaagatgacatttgtgaaatgacagatggttgttgatgtctccaaacatacttcctgatgt

SEQ ID NO: 141302 - DNA, 757 bp, Glycine max
  Clone ID: PAT_MRT3847_98607C.1
gattagagcgatgatttcactaatatggtagataaagttcacctacaatcacaatccacttctactgtgatcaacactgttggtaatgaaaccttaatctagatttaataatcaattttcagctgaagatgggtcacattataacaaagaatgcaagattttatgattaacattacaagacatgacctgttgcagggaccaacattagactgtgtataacagcttttgaagaagtgaggtaggtgccaaaaactaattcctgttgaccactgtaacagataaatattgcaccagcatgtttttcagcctttactgcaacttaggcatttgaatgtgtcatctcctcttcttctgggaccatgttggtccataaattgccaagagtgtccgtccaaaccgtctgtcggttatctttacaagacttccacaagaatccagcatgtcagtttttaaaggatactcaactacaataaacgtgttctctccaatcaaggatgattctgatatctgcctcatcagcaccccatagtcaacttgtgtatatggaggggtgacactaatgtaatcaaatgggccactgtttcctacaaattgctctgcacgctcaaagaatttttctacacggacagtatgtatgactgaagcatctaggaatccagtttcctccaggtttggacgtaaaacatctgatacaacccacggatccatctcaacaaaatgcacctgagaacatcctcggctaagtgcttcaattcca

SEQ ID NO: 141303 - DNA, 350 bp, Glycine max
  Clone ID: PAT_MRT3847_98608C.1
cccacgcgtccgcccacgcgtccgacgcgagaagacgacagaagggtgaactaataaagtgatatgttgagtgtgggcgattatatcatgtttatatgttgttcttgttacaagggaacataatgtctattagttgttagactacaattgagaatgagttagtacaataagaggaataatattacatgagttaaggtaaatgtctagagtgtcctagagcattaatgatgttagattgatcttgttaaatacttttaagtgtttgatagagaagagtatgttaggtcctgacgaccagtcttctcatctattttggatttgatgaataacaataagtataaattactgat

SEQ ID NO: 141304 - DNA, 400 bp, Glycine max
  Clone ID: PAT_MRT3847_98609C.1
cggacattcattacttccggttgggcctatgcgcctatactaccagtttgactaaatcattttcgccttaagcaatgctcgatctcggtagggcagggatgcctgaatatcgccagtatcctgcacttaaccattgacaactacccccccgttggcggggattgtctgacccgaaatactcctcgaatccatgctggccaaaaaaacaaaacagctcgcaatctcgctcgggtggctggggcgccccattggggacgtaaattgatcctgggcctttttgttcatgggtgcagggatcaaaggggtccaaacaggaccgggagcgaaagggttgacccaaatgcccttgctgacatattggttggagagcccacaaaggaaggaaacgatggcccccttg

SEQ ID NO: 141305 - DNA, 440 bp, Glycine max
  Clone ID: PAT_MRT3847_9860C.1
aaaacaaatgcagttgtttaaattgcaaattggcccaacggttaataaattccctcccctttggaatctgtcttaactcataagcttcaatcttttttacccgttggggccctaaatcctatttttctgttaacaataatccaaactgtttacatattatatactcgggtcaacatgttaaatttactttttccctactagttttaggagcccaaagggctaaaggccctttactcactttcctgcataaaaaaccaatgttccaattgactagggggggaaacccttttcctaattaacatttcaacagggggacatgtttttttccttcctcccctgggccttgacctgaacttttaataagttttttaaaaatccccaagggtaaaaacatgtttagcagttttttcatgattatctcgcccatgtttgtaagcaaa

SEQ ID NO: 141306 - DNA, 221 bp, Glycine max
  Clone ID: PAT_MRT3847_98610C.1
aattcggctcgagtttattttttggctaaacaaatggttgatgatgaagctaattgttacttaacatgtataatgcttttgtaattgtattacactatcacagattctggggcaatagatggcagctattggttgttgatatggaatttgattttttgagtttgttttgtgtgttgtaataataagaatttgacttgtgtatggagccatgtttttttgta

SEQ ID NO: 141307 - DNA, 398 bp, Glycine max
  Clone ID: PAT_MRT3847_98611C.1
gcgactcttacgtccacgcgttcgtccacgcgtgcggtttcatttgcaacctatgcgtgatcagaagggagaagagcaaaattttattgttgttcaactagatggttgtcaacatgtatagcctcttgacaactgcataagataaaatactgctgaggaaggagacacaattgctaaaacatactgcataaaatgtcgatggggcagtgagagatcttgcgtatgctaataagaaaccagatgatttatggactaatacattaaaaacagatgacccgtaacctgataggaaggatgaccctgcatggaaagctatacagatagtcctagtaagtggcgaacagctatgctttaagcatttcaaggcaattcatccatatgggtcaggagatactggc

SEQ ID NO: 141308 - DNA, 230 bp, Glycine max
  Clone ID: PAT_MRT3847_98612C.1
tagggccttcccggtgggtacgcttcagtaagggctggctcactccgcttagatcagtctggtgccacctcgcgcgtgaacatgagtccaggaagggaccgctgaagatgccgatcgtcatgatcaaagtcctgggggctacaaaggcaacgtccttatcattgtccgagttgcctcgccatgtagcatgagttattcaagtttagctgtgctccaacagtcgtgcgggt

SEQ ID NO: 141309 - DNA, 235 bp, Glycine max
  Clone ID: PAT_MRT3847_98613C.1
gtactcgaccggaattcccgggtcgacccacgcgtacgcgtacccatgtgtcacccacgctgttctaaccactcggttcctcacccttgcattcgggccagcctataaacgtccgggacaaacacatctattatgtgcaaacacattcataataccatctcataaatctaaacaagaacattcaaataaaagattcgtgtatcttaatgtgtgccatgccttatgagataatgta

SEQ ID NO: 141310 - DNA, 442 bp, Glycine max
  Clone ID: PAT_MRT3847_98614C.1
tacggctgcgagaagacgacagaagggccattcacatgaaactgatgatcaatatgatgaaaatcttgcaagaaaccctgcgtggaaggagttccaaaaggaagctgatcttccatgcttggtttcaagtagttttcatgcaaatccattggctgtgactgtgaggcacagttttctgtgaggtttgtttcaatgtccatgagaggagtaacagaaactgagggcaacatctgcgtttcaagccatctccgtttgtgttccttaataggagagagagattgagaacgcattaattacagggcaattgatatgaagcatcaaatggccaaagattgtttcacatctagaaacttgaccataagttacagttcaagtataataattttattgcggttacgttatttgcatggttaaccacattattgtggtcaaaccttgcttt

SEQ ID NO: 141311 - DNA, 392 bp, Glycine max
  Clone ID: PAT_MRT3847_98615C.1
gaaagtcaaggcgaaagtagtgaccgaaaatatctcctaggtggtgaaatgtcaaagatgaggaaccatggaaaagaacttgcttatgaaaaagaactttgtcaattgtcttttgcaatatctcttagtttgcaaggtctggattgtgctaaagggaaagcttgggaggttaagagagttatgttgtttttataaatatgaataagggattattgggaggtttcgatgattatctgttatttattttttcattctgaaaaagtatcaatcgtgtaaaaaaaatgtgttttgtttcgtttgtcattattgtagtgtttttgaagagcacggcaaattgttcaagctatatctctattgatatcaatttattttaaatgaatgacatttgcaac

SEQ ID NO: 141312 - DNA, 329 bp, Glycine max
  Clone ID: PAT_MRT3847_98616C.1
catactcataccatacaaattacctcactgaatggacgcatacgaggcacttattgtcactacgcatactctgcacactgctcctaatctctctcgtggcgactgagccatacaaagatgctacacatgcggaagaaccaacgacacggacagatgcctgtacaactgccgtaagcaccttacatggcggctgtcgtagatatggcagaagctagggacacgcttcaagctatgcacatcctggacactggccacacgatcctgcacgttgtcatgaatgctcataccatcagccaaaggcttacataacctgctaactaataaaagca

SEQ ID NO: 141313 - DNA, 388 bp, Glycine max
  Clone ID: PAT_MRT3847_98617C.1
gttatggagcgcgtgaagtatgtaggtgatcacttcccattagctgctatgaacccttctatcttcatatggatgtacaaggactcctcttctctcttttggaaccgaagctgttgataccacccaatgcctgaatggatctctttgctgaagacattggacaaatgcttcaaggagaaaaggtgctagataccttcccttcgaggaggttatggcagatccttcaaaacctgcgggctctagcacgactccccaaattgactgtagatcctattctgctgcacaccgtcatgatatattactacacccagttcctgcctattgattctttgcggtcaattggtgacctaccaacaaatatgttctttggactccatcgttgtattcc

SEQ ID NO: 141314 - DNA, 217 bp, Glycine max
  Clone ID: PAT_MRT3847_98618C.1
gatggaaatcgtgcacattcaggctggtcagtgtggcaaccagataggtgccaaggtctgggaggtgatcaatgatgaacatggcatataccccaccggcacctaccacggggacagcgatctgcagctggaccgaatctctgtgtactacaatgaacccacaggtggcatatatgaaccttctgccatcctgttggatctagaacctgggaccatg

SEQ ID NO: 141315 - DNA, 239 bp, Glycine max
  unsure (1)..(239): unsure at all n locations
  Clone ID: PAT_MRT3847_98619C.1
tcgagcgcatacgagccggaanttgctctacnaattatggatgnagatgaagatccanttgcttantgncntcctgantntcttcangcnttttctggggcaattcatcntcctccacagttngccttcatctttgancatgctttgagnagaganagcnaagggacaggtgtatttatccctcaggcaacacagccaanaaggnagcngaggaaaggaanggctaataattcatatgc

SEQ ID NO: 141316 - DNA, 270 bp, Glycine max
  unsure (1)..(270): unsure at all n locations
  Clone ID: PAT_MRT3847_9861C.1
aggnattgttgtaactttttgattcctanntctctaaaattcgaaattctaatntcgtnaggggnnagagatttctntgtgtgtagagtgagtatggctggnaaaggcgagggncctgctatcggaatcgatttgggaangacgtactcttgngtcggcgtgtncacaatacgatcntgttgactntcatagccaacgatcagggtaacagaatancccatgcctacgtgggnttanaccganacagaacgnccgatcggngatgcggcg

SEQ ID NO: 141317 - DNA, 369 bp, Glycine max
  Clone ID: PAT_MRT3847_98620C.1
caattgcgatgaaggactcaacatcttgacaccaccccatttcctaagtttgctcctttctctgctccttcttattggttttcatttttgtcttctggggttccctttgttcttttcacgtgtgatgtgttcatgattcatagctccacattttgcatctatcaatcagtcatgtcagttgatttggattagtcgtgttggacctggatgctgctgctaatacagttgatccacaaatgagattccgcattgcattgtttctctttttggcttctcttcaagccactttaagtcaagatattggacatggctcacttctagtatatggagctcaaactaaggcttgaacaggtgattactttatttgtg

SEQ ID NO: 141318 - DNA, 158 bp, Glycine max
  Clone ID: PAT_MRT3847_98621C.1
ctttggatgacaatcttatctaagagaaacgttctgttgctgtttttctgttctctactatatataccgatgggtccccattcaattctttataattcccacaccctctacttaagaatttggattattatactgctcaaatactatccctaccaagt

SEQ ID NO: 141319 - DNA, 333 bp, Glycine max
  Clone ID: PAT_MRT3847_98622C.1
gatagtctttcgttacgcggagcgatacgacgagctctgttttcacatatgcctgtacaatgacaccactagcgggggtgagctgatccttaaatactccaacctcaaggcaattgaaaagtggatgcgcatcataagtcgcaggaaagtgtatggtgaaagcatccagtggctaatacattgcatcaaacccagtccctattgattcttaattccactttgtattgtatactacccctgtctacggtgacatcataagatacacgtccttactttatgctcaacacgatttctgattgaatcatttgatacacctgctgagatggtacatga

SEQ ID NO: 141320 - DNA, 504 bp, Glycine max
  Clone ID: PAT_MRT3847_98623C.1
attattttcactttttcttccttctcagacctacgtattgttacattctccaggacccctgtactcttattttttttccccctcaatctggattattcggtaaaaaaaaaaaaaaaaaaaaaaaaaaaaaaaaaaaaaaaaaaaaaaaaaaaaaaaaaaaaaaaaaaaaaaaaaaaaaaaaaaaaaaaaaaaaaaaaaaaaaaaaaaaaaaaaaaaaaaaaaaaaagaaaacaaaaaaaaaaaaaaaggggggggccttttaaagaggccaaattttatcccccctggggcggggaaaaaatttttttttggggggcccaaaacatttttagggggggggggtttttaaacaccgggggttgggaaaaaaccgttgggtaacccaaattaattcccttgggaaaaacaccctttttgcccgggggggcattaaatgaaaggggcccccaaagggtccctttaaaaagggggtcccccccttggggggggaaaaagggccccccc

SEQ ID NO: 141321 - DNA, 158 bp, Glycine max
  Clone ID: PAT_MRT3847_98624C.1
cgaccccttccttaaccccggaaagggttcaagcccccttcgtccaacaaccgaaccaacaaaccgggaaccactttgttcgcacccaaatttaacccccccaacaatttttaacgggacttgaagggcaaaacaggtggggcgcaacccagtctacg

SEQ ID NO: 141322 - DNA, 539 bp, Glycine max
  Clone ID: PAT_MRT3847_98625C.1
tttttttttttttttttttttttttttttttttttttttttttttttttttttttttttaaaaaaaaaaaagggggggaccaccaccccaaaaaaaaaccgggggtccacaaagccccaaccaaccaaaacagttaaataggggggaccccggaaaaaaccccaaggcaaccatccctagggggggccagacccccccatttttaaggtaccccggtaacaaacaattccgggtccagaacctaggttccaaaaaaaacacggttccaaaattcaaacccaaaaccaattatatcaggggcggggattcaacaagcaccctaagggtcttcccctttttcccccaccttaaaataggccaaccccgggttcccctaaaaaggcaaaaacagtgggtggaaatcccccctgggaccaatcaagggaaacaagttcgggggcatggccacccaaaaaagtggttctttaggtggccacccacttttgaagttaagaagaaaggaaaaggggttttgctccaaaccctatcagagacttttt

SEQ ID NO: 141323 - DNA, 346 bp, Glycine max
  Clone ID: PAT_MRT3847_98626C.1
gaaataggcaaaaggagcaaagaagcgggggagggggaagagaagacaaagaaccccggaaccaccgcagaagaggcggacaacaagctaagagaggaacacgagaaaagggccccaacaggggacggcacagaaagacccaaggaagagaacacaccccgccgcaaaaagggagacaaacccaagacgcgcagcaacacaaagcacccgatggaggcaaaccaggggggccgccagaagacaacaaaaagagggagggccagcacgaagaaaagggacaagcccagcagacaagggggaacaaacccaaacaccagggaaggaccggcagggccaacaagggacc

SEQ ID NO: 141324 - DNA, 445 bp, Glycine max
  Clone ID: PAT_MRT3847_98627C.1
acggctgcgagacgacagaagggggctagggttccataacattagcgatagtaaaattgtatgatagtaaaatcttgataatggtcgttactgctgcggtgctgtcctattttatttcaataagaatccttgagccaaacaaggaacacacaacacatttgtcctgaaatagctttcaataatatgcggctcattcagtttctgacttcctgcctccagcatcacagaataattatctcaagttgatttggtgttccttccaatgctatcatccgtgcaaaatgattgttcatttccccaagggtcgtcgattcttctatctttctaactaagcactgctgcaccatcatatggatcgctgatatttaagaagtagtgacttcaaccagataagtatctttgggtagataattgaaactttggagcattgacagtgagttaattg

SEQ ID NO: 141325 - DNA, 344 bp, Glycine max
  Clone ID: PAT_MRT3847_98628C.1
ctataacaatgcgcacgcttgcatgcccaatataatgcaccaatacccatagcactccctatatctggtgaatatacaaaatctgcttaatactagatgacttatttcaagatgctacatctaaggcaacacgatccctagtatattcctaagaaacggatacctctcttaatggaccaacagatgcagagttctttactagctcctctgatcagcacacgcttaaaaaagacctatagcttcccaaaaaaccaatcacataggtaaaggcgggtttaattggaaaccggtgaattccccaccaaaacctgtggtcaaacgggggggccaaaaattaaacccaa

SEQ ID NO: 141326 - DNA, 379 bp, Glycine max
  Clone ID: PAT_MRT3847_98629C.1
gggctatggattccaaggtttccaagtcctggactgtgctttcaaaacctacgtcatggaatttctcaaaaaggtttaagttctttggcgtggattcatatcaagttgcatttggattttgactttgagactctgcttggggtgctacttacgaatgttttcccggaaaaacgtaaatttcttctaatgctttatgaaaagaataacgaacaagttcaatgtataccgcctttataaaataataacaagtttcatattgtggttctggttcatatatagttctagctacgcgttctcttaagtgccaacccttataggagaaatttgttgttgtttttcccaaaaaaaaaaaaaaaaaaaaaaaaaaagtagatcgcga

SEQ ID NO: 141327 - DNA, 199 bp, Glycine max
  Clone ID: PAT_MRT3847_9862C.1
acggctgcgagaagacgacagaagggtgagttgcatgcatttggtggaaacgctaattatatataattttcttaaaataaaacttgaacttaaaagtacgtaaaagccgattttttcacaggccttagataaaaggaagaggagtgtaatcatgtataaggatgagagtaagatgaaatagggaaacgatgaatatggg

SEQ ID NO: 141328 - DNA, 772 bp, Glycine max
  Clone ID: PAT_MRT3847_98630C.1
atcatgtgatgcatcattcatatgttgtctattgttatgttaattggtcttgctagttgctagcacatcaatttctattatgtgttggatgacatcatggttcagccagattctatttttttctggttcttttccattttcatctttggtttatgattgatcattgctgagaaaattatcctcaactgggattttcatttccggggggagcatgacctgaattgcatggtttttttttttgttttttggctagattatatcaaatcaattaagattctgggttggatggcatgatggtttagccagattctgttttttctggttcttttttagtttcgatcgttggcttatgatttatcattgctgaaaaagttattctcaactaagatttttcttttctgggggaacctgaaatgaattgcatgtttttttggcttgactatatcaactcagttaagaatttcgccacgtaactcttgaagtacataaggtgatttaagagtttgagatcataaaattttatggttttaactcttaatatgcctttttctgcttctgtgggtgcaactttgtgccaaaatcaatatggtatatttttacaagtgtctaagtaaattatatttaattgatgatgttgttctatctaaagggcatcatttttttatatgcccttcagtcaattcttatttcattaaataaaatgtttgaaatatcagatctttatctgtggtttataataaccctgaaaatttgattaatttctatctgtttt

SEQ ID NO: 141329 - DNA, 615 bp, Glycine max
  Clone ID: PAT_MRT3847_98631C.1
ggctcgagggcttccttatgctgcttagtgctgttccttgcagctataattctatcccctcaagctgttgcccactatgagaatcccacagtgtacaagcctcccactgagaaaccaccagcttataagcccccagttgagaagcctcctgtttacaaaccttcagttgagaaccccccaattgataagcctacagtcgagaagccaccaatgtccaagcacccagctgagaagcccccattgtacatgcccccagttgagaaaccaccagtgtacatgcccccagctgagaaaccaccagtgtgcatgcccccagtgtgcaaaaccgtcagtttacaagccccacattgaaaaacctccagtgttcaagtccccagtagaaaaaccacgagtgtacaagccctcagttgacatgcccccaggttacaagccctcagttgagaagtgaccagcttgcatgccgccagttgagcatccaccagtatgcaagccaccagttgagaagcctgcagtgtacaagcctgcagctgagaagcctccagattacaagccaccagtagagaaacctccaggttacaagcccccagtgataaacctactattacaagccacctg

SEQ ID NO: 141330 - DNA, 403 bp, Glycine max
  Clone ID: PAT_MRT3847_98632C.1
ccgggaccttgtagacacatcatacttctgactactctccatcttttctgacaccaaactgtagttgggggaagccccttcatcttcttcttcaaggctccataaccatgccaggcaccaaaatcatgtgcactcagatcaagtgcaacaacaagcaccaccaccaagcaccatgatgagtagcactcaaatggttggaagcagtgctcacttctcgtaagtctgtcatggatcaactataccttgatctatctgccaccccaatatatgtttcacaacatattttaagtatatataattaggtcactgactctaattaattatattctaaatatatattggtgtagtgagtctagctattattaactttttaatgtgttaaattctatgcccatttctggcc

SEQ ID NO: 141331 - DNA, 423 bp, Glycine max
  Clone ID: PAT_MRT3847_98633C.1
gacggctaggaatccccctcccatccctaaactatatagatggaggtttatgattaactttacactgcatttggtaaggatgtgtgaaacgaaatgaaaagtaaggttgtttaactgagatgaaaaatagtgtagaaaatatgaaatacttgaattgaagtgattaagtaagtaagaatctttggtgaaggtgttgttatactgtttatacaatgtccttttctactcggatttggaattggctggaaagcaaaatccttgatcattcttttgatccctcttcttaatatctgctataactagctagtgaagcccgcatctgaaagtgacaggacttggtgtgatcttaaacacttttgggatgatcaaatgaggtttcagaataaattaaagttatatcttttcagcaagtcacaaattaac

SEQ ID NO: 141332 - DNA, 592 bp, Glycine max
  unsure (1)..(592): unsure at all n locations
  Clone ID: PAT_MRT3847_98634C.1
cccgnggtcgacccacgcgtccggnacaacaacacagggtgccaccactggtgaatgctgcaaactacgttggtggaatgttcggagggaatcacgtgaacgaacaacagagtaacagtaacctccaagacctgatgaactcgttcgctgttggtggaaactcttccattttcgaagctggtggctttgaagcatatgatcatagtaataacagtaataatagggacccaaaagtgcttgcaatgagtggaagtaacagcgttggagggtctgatagactcacccgcgattttctgggtgttggtcagatagtgaggggaatgagtgggagtggaggggttgcacagagagaacaacaacagcaacatggctttaacttgagttctttggaagctgaaagaaataataataataataatagtaataatgctgcgccgtcatcagggcaagcttttggaggtggtggagggaattttcagtgattagaaaattcatatcctccgtgatgccaacaaagtacaaggggatttcaacttgttccatttgaaacttgacttgtccagcttatcgtaattaaggctttttttaggtg

SEQ ID NO: 141333 - DNA, 411 bp, Glycine max
  Clone ID: PAT_MRT3847_98635C.1
ggcactaactcatctggccatcgcacggatagtcctaatcatatggagcatccatgcacttgggatttgctggcaaattcatgcgcaacatgtattataatttacgattcagcattaacgcggcaattgaattaggtgatgcaagagtcttgaatcagtgttgctcaggtgacgtcaaagaccagcaggacgtgttaatgggcatgatggtgtcatgcataaggagacagacagctcatagtgcggcatacttacgtggctgatggaatactgagaaacaacaatcttcgtatgatattatatgatgggacacccgaggatacagttgttggagagaagtgtaggtcagcaactgcgggtaagataccattgtgcgatagggttggcgacagagctcttattgctatagct

SEQ ID NO: 141334 - DNA, 488 bp, Glycine max
  Clone ID: PAT_MRT3847_98636C.1
cagatgttgctgctctctacatccacactgaggggtggaacgaaatatgaagtgcgcaaggcctctagtcgggatcgggcttgtgacgacgtggactcgtggaacattgaggggctgttcctagacacgaacctcctctaccaactactggctcgaccctccctatcttactgaccacgtgacacacgaccgcttgcatccctcttgatcatcgacaccgtcagctgactcaagatggcgcccatgccgaccatacgcttctgtctccagacactccagatcctcgccctggacctcatctcctggttcagagcccatgttggccacctgtatctgcgatacctgcccggctctccgaaccagtccgcgatgacgaccacgcccttcttcaccggcggggtggcgcacagaatgaccttattgctcgaggcctgactgagccatcttgccctcggcccgggcgaaaccgcacgagtacttgccagagc

SEQ ID NO: 141335 - DNA, 315 bp, Glycine max
  Clone ID: PAT_MRT3847_98637C.1
ggcaaaccgaccgctaaagtacttttgaatcatcaacacaccttcagacaatgtattagagccgtaccatatgagaaacaaatgctaccggcacctctttacaagggagaaacaagtaactccggaataccgcacctaaaccatgaaaacgcccaattgctgatagaatgaacctactaatatggaagaaccagaaagcattggccttcataatcgatgcacaagcataaactgtaagcaaataggaaacattacttgtgctataaaactatacacctcttggagctccaattgattgagcgttcgccaataaaa

SEQ ID NO: 141336 - DNA, 291 bp, Glycine max
  unsure (1)..(291): unsure at all n locations
  Clone ID: PAT_MRT3847_98638C.1
gggaaggaagggcagggaagaatagaatgggatctggtagtggaaaacacgctggacaggtcttcagggagaagggatgcaaggagcgaagcattcgatgctcaccaatcagatacgctcacgccacccctggcacttggcatcgtcgtcgccgcctgcggaatctacctggagcgcgaacaggattacaataaagctgtatgtctaccgatcctcaagtggggtgatgacnggtaatgctgtgtgtttcaccactaaacggtgaggacaggacgcacctccatctccatc

SEQ ID NO: 141337 - DNA, 709 bp, Glycine max
  Clone ID: PAT_MRT3847_98639C.1
cccgcgtccgcagctctccaagtgctggatttgtctaacaaccaactatcaggtgtggttcccgataatggctccttctcattattcactcctatcagttttaacaacaacttggacctatgtggcccagtcactgggcatccttgtcccgggtctcctccattttctcctcctcccccttttgtcccaccatccccaatctcagctccagaaggaaatagtgccactggtgcaatagctggaggagtagctgcaggtgctgctctgttatttgctgctcctgcaattgtgtttgcttggtggcgtcgaaggaaaccacaggagtttttctttgatgtgcccgctgaagaggatcctgaagtacaccttgggcagcttaagaggttctcattacgagaactgcaagttgcaacagatactttcagcaataagaacattcttggaaggggaggatttggtaaggtttacaaaggacgtttgactgatggttcactggttgctgtgaaaagattgaaagaggagcgcacgcctggtggggagcttcagtttcagactgaagtagagatgattagcatggctgtgcaccgaaatctcctccgtttacgtgggttctgtatgactcctactgaaaggctacttgtatatccttacatggctaatggtagtgttgcctcatgcttaagagagcgtccggcacatcaacaacccc

SEQ ID NO: 141338 - DNA, 610 bp, Glycine max
  unsure (1)..(610): unsure at all n locations
  Clone ID: PAT_MRT3847_9863C.1
tagggaatttggccctcgaggccaagaattcattataggacttggaaatgagtacctagagaacatgacaaacccttataaagctcaaacttggattcagcagcatgttcaaccttacctttcacagactaaaatcacttgcatcactgtgggaaatgaggtgttcaatagcaatgatactcagcaaatgttgaaccttctcccagcaatgcaaactgtgcatgatgcccttgttaatcttggactagaccaacaagtaaccgtcacaaccgcgcattccttcaacatattatccaattcctaccctccttcgtccggagcttttagggaagatcttgtgcaatatatccaagcccttcttgactttcatgctcaaatcaactcaccttttcttatcaatgcataccctttctttgcatacaaagacaacccggatgaggtttccttaaactatgtgctttttcagccgaatgaaggcatggctgatccaaacaccaatttccattatgacaacatgttgtatgctcaaattgatgctgtctatgctgccatcaaacaaatggggcatgatgatgttcaagtnaggatntctgagaccggttggccttcg

SEQ ID NO: 141339 - DNA, 1094 bp, Glycine max
  Clone ID: PAT_MRT3847_98640C.1
cggacgcgtgggcagccctagaatgttcctgttccagaaggcttccgcttctcatgtccagcttctgattgggtcaaagaagtactttcagttccatcttccccgtgacgcagttaacattgccgaggcctcagacgcaaccatagccaaactagtcctggaatcagacccacgcaccctctccgaagccctaaccaagcccagaatccactggaccccagagctagtaaacaaaacccttaagcgcctctggaaccacgggcccaaggccctcctattcttcaaacacctcgaccgccacctcccttcctacacccactccccctcctccttcgaccacgccgtcgacatcgcggcccgcatgcgcgacttcaactccgcctgggccctcgtgggccgcatgcgctccctccgcctcggcccgtctcccaaaaccctcgctatcctcgccgtccgctacgcctccatcggcaagccccaccgcgccgtccgcaccttcctctccatgcacgagcacggcctccaccaagatctccactccttcaacaccctccttgacatcctctgcaaatcgaaccgcgtcgaaaccgctcacgacctcctcagaactctcaaatctaggttcagacccgacaccgttagttacaacattctcgcgaacggttattgcttgaaaaaacgcacgccgatggcgctgcgggttttgaaggagatggtacagcgtgggattgagcctacgatggtcacgtataacaccatgctgaaggggtattttaggagtaatcagattaaggaggcttgggagttttacttggagatgaagaagaggaagtgtgagattgatgttgtgtcttacaccactgtgattcacgggtttggagaggcgggtgaggttaagaaagcaaaaagggtttttgatgagatggtgaaggagggtgtggctcctaatgttgctacttacaatgctttgattcaggttttttgtaagaaggatagtgtgcagaacgcagtgggcggttttgaggagatggtgagggaggggggtggtgttccccgaagtggttactttcaatgttggtataccaggtttgggg

SEQ ID NO: 141340 - DNA, 667 bp, Glycine max
  Clone ID: PAT_MRT3847_98641C.1
caacactaagtacacagccgtgaacattagcttttaactcttcacaactttaaccttcaataaattaaaacaaaaaaaatgcttaagtttggattcatgctcaaccaatcaaatcatagaactatatgaacatcctagccgacccaacaaaaaagggggaaggggtgttgtaaacactcatccaatcttgtttcttgaagaaatcttcgaacacatgcaactttttgggaggctgaatctattggtatccaagatgattttttttaaaatcaatgtctggggggtagtcatcaggcagaacagaatcagcaagaatttgtctctgaacaatgttttcatttgtgcttgggagttgcattccgtttggatccagtgttgtgccctctttaagtgctgctggggcttcattctctatcccaagtcctgtgagggtaacagactgaaaataagatgctgtgtgccataccggggaaatgacttgtgcctgcattgcagtcgtcagtgaggcatgccactaatgagatatcacaaactgcgccgtgcgaaaacggttggagaaaccattgttccagcatctatgaacaaagactggtgagcataaggccaagcatgcttattaaccccaatcatcattgggattctccagctttctttataaacaacattt

SEQ ID NO: 141341 - DNA, 533 bp, Glycine max
  Clone ID: PAT_MRT3847_98642C.1
cgaaaaaaacaaattgattttagttattctctcttcatttccatcgttattttgctccaataaatagcataatgaataacaatttgtaaaattagtgattaaataagaattttttttcaattcttgtattgttttgtttaatcaatattctttttgcttcggcaactaaacagaatcaagcctcaaaatacgactctcagccttaaaaagaatgccaatcatttcgttaattcttaatggaagaatccaagtggatttgatacgccccaaccagtgtttttcaaggccgaccctgcaattaaaaaaatgcaaagcctgcatacctgttaaaatccaaggtcaaagcttgggaatgtttcgctttcacacgagaactcctcaccactcttccctccattggtaatgaggcagggttgacaaccaaaatctgcctcactactcatatttgtctgggcatccttctgcgagtcggactggtgggacatgttgacattctcggggaattggaaactaccaccactatatgctgcttc

SEQ ID NO: 141342 - DNA, 206 bp, Glycine max
  Clone ID: PAT_MRT3847_98643C.1
tccactcatccatccaatcgtccgctcacgtttacacttttccttaagcttaaattttcttgtatcggactcatatatctattataaccaaacactcttctacatattctacttcttctacctactactatatctccgactagcatcatgacacttagagcattgctattgcttgctatatattcttcttccatccatggatcaaa

SEQ ID NO: 141343 - DNA, 879 bp, Glycine max
  Clone ID: PAT_MRT3847_98644C.1
gttggtgaagtggggaggcataatttaattctaaaacattctaagtgtacatcaccagggattgggggagaaagtacttggcctctcatatggctcacactccccttcacataatcttcctttttggaaacaagaaactaaagcctaagttctaccaatagtacattattgggggtcctaatctggaaaaactgctcagtctctgagcacgataaaaagtaaaatgaaataatgactttgtcattttatgcatgcaactgggcaacacagcatgggatgatgaaaaatgctcatttgtctctgttggcaatcaattccggctgttctggatttggtttggatgctcgtgattttgctgaattcgactccttttttgctttctctttggtcttggcggccaacttgctagctgggaaatgtagtctagccatcagagggcggggtgctcgtgcttccctgtcaaacccccgcacacagatataccctctccaaaagcattgttgagtttctttgtgttgttaaacctttaaatattgttgttactggaggtcccaaaatatactgttcgcctgttgagctgccagatccaacttcggggcacactaacggggggctcgaccttgagtcatgaacccccacacacagacagacccggaccaaaagcattgttgaatttcttgtgttgttaaacctttaaatattgttgttacggaggttccaaaatatactgttcgcctgttgaggttccagatccaacttcgaggcacactaattgggttgagacttgtggcctcgtccgccttgaccgctgcgactgcgttctgggggccgttcagtggttgccgcccccccggggctcctcgtcgcgggatcaggtcc

SEQ ID NO: 141344 - DNA, 481 bp, Glycine max
  Clone ID: PAT_MRT3847_98645C.1
ctcgagccgaatcggctcgagtacggctgcgagaagacgacagaagggtagctagtaaattatgtgaggaaagtcatattagtctgagttcaagtttggagcaatacaacctaccattttttgttgttgtttggattaggttaactctagaggtatataactggaggtggaacggcctaaggttcatggctaaaaggagttgaacaaatgctaataattgtgcagtaattttttgagtttaatagtcatatttattcgtttctattaaacatatatgatatatgaaaagagtagacatatgaaaagttcaaactagacatctgggtattgtgaaaattttaagcatattcacactcaccttcacccaagcttcatcgacacaagcttcttcaattcatcattctcttcatctcttctctacgtcttcgttcttcatcgacccgagcttctccattgacattttctctctctctcttcattc

SEQ ID NO: 141345 - DNA, 1232 bp, Glycine max
  Clone ID: PAT_MRT3847_98646C.1
ctggaaaacatacatttagaattgttaaagtgttgttattccttctgccaaagagtaaagaaagttttttcataatccaaaggtggtacaagctacacactattgttggaaaccaccggaagcaccaaaaaatctaatttagtcaattgaacaggatatatgattgttataaatccttaaatactatctttgattcctacctataaaaaaaaaccactagaagctactatgagagttagcaattaagatcttcttcatttactagaagccaccaataggaaaaagaaagacacaacactcttgtggggttcaccaggtgcttctagttactggagaggcaccgaattcgagatttaggaatgggtacaagcttgaccattgccctgacaaaatactaatggtgtatatttagtgtgtgtgtcttagtttaaccgtttcaacaactgttacacacgtttcgagaaattaaccgtgaccgtagaaatttgatggattcacgtttggcggaaattgaacagtttaacaaacacactagttgtccaagggaatctacaaaaatgcttcacgattgtttgtgggcagctctagatcaggttcagattcactcagaggtaagaagtagtgatccaccatatcttgagacaccttttccaaggttggaggatcccactttggtgcaaagtccttgtccaccacgcgtgccctcactccctcacaaaagtccccaggtatcggcctatgaattgcttgtaaagtcatacggtactcacgcaacaagcattgatcaagtgtctgaaatctaccttcccgtatagatctcaaagcaaccttcaagctcaatggagaagcttctttgagtttatttagggtagaaatgcaccatgcatcatttgtttcacttgccgcattttcctaatggaatttgagaataataagaataataagaataatagaagaactaaagtattcaccaaaatgccaagcaacaacacaaaaagcaaaaagggcatgcaagagatgccaaaatatattttcaaaatgccattgatatatagataagaaaacagtaaataggtacaaataaacatcctaagcaatattttatttcaatgccgctcctttcgaaacaaatctgggaaaggaaccagaaaaaggaagggtggagccttgggaagagaagaagaaatttgcttcccccatcgcatcaacaatctcttcaactgtgctcgtgc

SEQ ID NO: 141346 - DNA, 327 bp, Glycine max
  unsure (1)..(327): unsure at all n locations
  Clone ID: PAT_MRT3847_98647C.1
atggcttcaaatcaaaaatacgcgacgcgcttttttaaactactggaagcccaattttttncaatattcatatttccctcaaattgaaacagttcaatacaaatatgtccaataaaatttgatgaacaagagttaactgcttctcaaatccaacccatttcacaagaaggttccaatttttatttacaattaaaatcccataacataatctcttgttattcttgaatacatttattaaacatttaataacaaccctatcttacctttttatccttaccaaaaaacctttactcgattctcttccaaattcattcattataatttttt

SEQ ID NO: 141347 - DNA, 504 bp, Glycine max
  Clone ID: PAT_MRT3847_98648C.1
ttgttttttttttttttttttttttttttttttttttttttttgttgttttttttttttttttttttttttttttttccttttgttttttcttctttctttgtttttgttttctgaaaaaaaaaaaaaaaggttggtttttttttgcgcgggggggggatggtttttttttgcgggggagaaaaaaaaaagacccccccaaaaaggggggggggcccacccccccggggatgtgcgacggcctcgggaaaacaaacaaacaactcttggggggctgccccccgagtttcccccccagagaaatttttttgggggggagccaaaagtgttggggggagccccttccctaaaaggggcggccttgggggaaaaaccgccggcggggccaccaaaaactggggggggggggggctccccctggtggagccgtgtttttttatgaacaccgctgggttcattgctgagaaggaggggccgcccacccccgcctttttagcaggggggg

SEQ ID NO: 141348 - DNA, 434 bp, Glycine max
  Clone ID: PAT_MRT3847_98649C.1
aattcggcaccagggataataggtgtaagaaaaacacagtaacagaattaaaaaaatgaaaaagataaaacgggcagaatacaaacaaagcagagagaggcgagaacaaaaatagaggcaaaaatagagcagaatataaacagaaaatagaaagtgaagataaaagggatatacagagggagaaaaacagaacagagatgttagttgccagagttagagttgggttgatggaggtccctgttgctatagatggaagagagatggaaaacttgagcgaaaatggaatggtggagtaagaaggctggggatgtgagtcttttgttatttatagggaagctggagtagtgagtgagatttctattatttagggtcaactggacacatcttttgtttttcattctttttgggggctatttctgccataatcaccacct

SEQ ID NO: 141349 - DNA, 201 bp, Glycine max
  Clone ID: PAT_MRT3847_9864C.1
aaaagttagggtttgtaccttggcctttggcttgcaaatctgatgggattagtattcattcattcttaaggtcgccggcaaaaaaaatccccctgaaaagtccgaccgccaagctttccaaggggaccaagccgttgcccctgaatcttaaaccattaagcccctgatccaagaccactgggcccaccgcggcattccttt

SEQ ID NO: 141350 - DNA, 308 bp, Glycine max
  Clone ID: PAT_MRT3847_98650C.1
tgtgctggttcacattcttcagaagatggtggtgtaatttaagatcagcgggagacccaaaaagattgatgccagattgagacaaagaatagatcctcaatacaatgaggttcaggctcagatggaaacaaatttggttaaattgtctcttgatgatgttgaaactcctaaaggttccatggtggatcttaaaatttctcaatctaaaattggtcttcccataaacacagtcggaggaaccattctgtgcaccgttctattgttatattcttctacagagggctactcttacgagcatgcgttgattt

SEQ ID NO: 141351 - DNA, 397 bp, Glycine max
  Clone ID: PAT_MRT3847_98651C.1
caaaacccgaaaaaaatttacgggcccccttaaaagtgggtggaataaaaaaccccacatgaattttaaaagccagatagcttataataaacatgaataaactttttcctttattggggattttttttaattacaaaaaatttttatttcatactacgggggcaagactgaacaacaccttggtaataagcgaaaaattgaaaataagggacctggtaatctttacgcaaggctgaaaaaagggcaacccattttagcttccatactttggagcaagctttgccctaaaaatatataaaagggtgcatgtgggacgatcggaattttccaaagggggaatgatccctctcctggccaaatttgttagtgaaggaattcaatcagttggagatacccc

SEQ ID NO: 141352 - DNA, 728 bp, Glycine max
  unsure (1)..(728): unsure at all n locations
  Clone ID: PAT_MRT3847_98652C.1
tttttacttgaaaaaatcattatctgtgtatttaagaccaatccaaaacaaaaaaggtaaacttgtattttaactaattaaaaaaaactattttctctttcacaagttctgatccccgcagagcctcttttctctttcccatcaaaacccttttctctttcacacactttgatccccgttgatgcttgtttcagatctccaatcagaattagcgagacctccgatcagcgatgacacaacaacccacccttccttgcgaaccctcgtcattcggctcgagtacggctgcgagaagacgacagaagggggagcctctcggacatggacaacgtcctccagagctgggacccacgctcatctgtacttggttccacatcatctgcaaccaggacaatctagtcactcgagtttatcctttctctttctttgttctgtttatttttgttctttgcatacatactggaacatagtcctttgtctcataatcactgatgctggatatgagtgttgtcgtgtgttacgagattttttggatgtcatagggtggcgatcttgaggggggggttggttgcagggctccaagtataattttttgtataatttttgggtgcttagaattggtggcaaggtttactaatatataaagtagggtgacatatatacatgtgtttggtgtaaatgttggtactgaactgttaggggtaatttagaaaanaaaaaaaangaaa

SEQ ID NO: 141353 - DNA, 104 bp, Glycine max
  Clone ID: PAT_MRT3847_98653C.1
gtcgtggagaggcttgcggtctacacttccgccctcatcgtcgaaacggaactcggcttaaccgcggtcttggcggtccttatcttgaggcagaacatcactga

SEQ ID NO: 141354 - DNA, 563 bp, Glycine max
  Clone ID: PAT_MRT3847_98654C.1
acagtttggtggggaatcgcccttaacatgatcgcatattttgttgcttctcatgcagcaggggcgtgctggtacttgctggggatacaaagggcagccaagtgtctcaaagtgcagtgtgcgaaaacaagtggttgtggcatgaaaatcctgtcttgtcaaacgcctatatattacggaagcaacagtttgctagttagggataaggcaaggttggcttgggcagagaacagggaagtgagacacacatgcctaaatggtcctgacagctacaactatggagcttatagatggactgttcagcttgtcacaaacgataatcgattggaaaagatacttttccctatcttctggggcctaatgactctcagcacttttggaaacctagagagtacaactgaatggctagaagtagttttcaacatcattgtgctgaccagtggccttcttcttgtcactatgttgattggaaacatcaaggtatttttgcacgcaacaacgtcaaagaagcaagcaatgcaattgaagatgaggaatattgaatggtggatgagaaaacgacg

SEQ ID NO: 141355 - DNA, 347 bp, Glycine max
  Clone ID: PAT_MRT3847_98655C.1
ttttttttttttttttttttttttcttttttgggggtggggtttttttttttgggcccaccccataattgacctttctttttggtacaatattaaacatcttgctctcattattgggcattaaaacaagggttttacttgggcatacaacaacatttttgggttttactatgcccaatacatttcttgggtgatttttccagctttctaaggggttgcccaaatttataaactttataatatcctttcccaaccttcccacaattaggtggactgaaatttgaaaggaaaattgttaccatcttttaaaaaattgggcctttaaaggatttcctagcttcccggacc

SEQ ID NO: 141356 - DNA, 494 bp, Glycine max
  unsure (1)..(494): unsure at all n locations
  Clone ID: PAT_MRT3847_98656C.1
cccacgcgtncgcggactttgttctgacgcgtgggtgtatttctactcaagctcgtcattcttgatgtgtttggttagtaaactaaacctgtgccgagcaatatcaatggccaaatttattatgaacagagatgttcttacttatatgaaggcgtttattttttccttgtcaattgctgtagcatttcaaagatgtctggttttattgtatcatgtatcaaagttttgcagcttattgtgccaaacagaagtgtaccaatgcataatttggagtcgttatttaaacagttgtatctccaatagaagtgtaccttctttattttatatattattcttacacattggcaatcattgttttaagaaaattagttatacctccctatttttttatctgaaccatacacatagtacccttaaaaatatcaaatcaagggaggtgcataggaaggaggtttcattctccaattgagaagggtgtaagtgtaaccaacact

SEQ ID NO: 141357 - DNA, 368 bp, Glycine max
  Clone ID: PAT_MRT3847_98657C.1
ctgccggccggcccggcggctctcactatccaggcccctggtgctgaaccgtctgcgtccacttgacagggggggcgggaaagcccaaccgggctcgccttggcggcggagcaaacgctaccgctgcatccgagggcgtctctagaaagcatctgccaacacgctctccaagacctcccgccatgccactgatggcggcaggaggcccttcctgcgcacacgccggatggatcctgcatgcaactgtagccgttccctggccagtcgggcagagcatcgcagtcagaccatcatccggcaggcgctgcaccgcaaggagaaaaggaaggagtacttgctgtactacaaccgctttagccagtgcaacc

SEQ ID NO: 141358 - DNA, 1694 bp, Glycine max
  Clone ID: PAT_MRT3847_98658C.1
tgacacaagtcatcattaactctatgcctattcactctttcctcagtttctctatccatccatctctttcatcactttcctctatctatctatatatatatatatctccctctctctattctcttttactactgttctgcaaaaaagctattttggccctgtgccaccaaagccatctcccccatttttgctcctctatctcttttttctaatcatcacaattgggtgagaaaaaaacacacacacaactcaacaatgggtgagaaagatgatggcttgggtttggggttgagtttgaagttaggatggggagaaaataatgataacaataataatcaacaacaacaccctttcaacgtgcacaagcctcctcaatcggttccaaaccaaagggtttccgtcaatagcttgttccattttcatgatcggagctccgagatgcggtcgttcttccgcggaatagacgtgaatttgccaccgcccccgccttcggcggctctggcggcgttcgatgacgagaacggggtgtcctcgccgaacagcacgatatcgagcatcaacgggaagcggagcgagagagagggaaacggagaggagaacgagagaacgtcgagttctcgcggcggcggcggaagcgacgacgatgaaggcggcgcgtgtggtggagacgccgacgccgatgcgtcgaggaagaagctgaggttgtctaaggaacaggccttggtgctggaagaaacagtcaaggaacacaatactctgaacccggagcaaaagcaagctttggcaaagcagttgaatttgatgcctaggcaggtggaggtgtggtttcaaaacagaagagcaaggaccaaattgaagcagactgaagtggattgtgaatatttgaagaggtgctgtgagaatctaactgaagagaataggaggcttcaaaaggaagtgcaagagctcagggcattgaagttatccccacagctttacatgcaaatgaaccctcccaccactctcacaatgtgcccttcatgtgagcgtgttgctgtctcatccgcatcctcttcctcatcggccaccatgccctctgccctgcctccagctaatctcaacccggtgggccctaccatccagcggccaatgcccgtcaacccttgggcagcaatgttgaatcagcaccgtggccggccataatcaaaccctccaggccgtaggtaatagggtaaagttcaggatggaagctaggacattttagttgtgctagacagaaatgaatcaaagaaataggaatcttatgtgttggttaactttactaggactttgagagctcatggtttgggaaattctatttgcatccttttttttttcattgcaccttccattctcttttacattgcagaaattagttttcggaatctacaatgcaattatagaaattaatttttgaaatgtaaaagaaaaggtagagattttgaagagttaaaaaaaaaggatgcaactagaatcatcctcatgcttttggttaactctttttgtctaggcttattttactttgagcatagatagaacatgtttttagtcaactttaggatgtgtaaagtttggacatgttaaagtagttagtgttttcatctgctgaacagtgtttgttatttgttaaccttggaaagttggaaaagggaattggaatctgtattttattttaa

SEQ ID NO: 141359 - DNA, 253 bp, Glycine max
  unsure (1)..(253): unsure at all n locations
  Clone ID: PAT_MRT3847_98659C.1
agcgttaatctgaatgggntacatccaccatggaagaacggtctcaggcacatactcagattcagaaccgccaccgggtggtctcaaactccggcagatcgcaatcgcgcgntgcattcccctcncattcccctatctcggnaacgtggtttttttctcaanaggggataatactcaagaattaccgcagaagtggaacgcgacangccanggagcgaaacgaggttgcncctnggcttcgacaccgcganat

SEQ ID NO: 141360 - DNA, 151 bp, Glycine max
  Clone ID: PAT_MRT3847_9865C.1
aaaagagtagagtgaaaatgttttcccgcggttcgcttcaaaaggacgtgacatggaagagcatcaccttcttctgctatttccacccccagaattcatcacagctccccttcttcgccgtttactcgaacacctagtttccagattacgc

SEQ ID NO: 141361 - DNA, 330 bp, Glycine max
  unsure (1)..(330): unsure at all n locations
  Clone ID: PAT_MRT3847_98660C.1
gagttttgcagtttttcttagtttggaagctggttgatgcttccctgcattaattttgggagggttttttgttttgcttcattgctttgttttaattgtacgttctttttctagagagagataaattgggtttggaacctaggagaggtggtgatgatgcggtttcaacgcaactataccatctgaacagtcattgcccaactagttaaattgatgttattttccccccatagctcaagttacaaacagattgcaagttttgaatatcaatatatcagctggctttttttttgggttgcnnnaaaaaaaaaaaaaaaaaaaaaaaaaaaa

SEQ ID NO: 141362 - DNA, 348 bp, Glycine max
  Clone ID: PAT_MRT3847_98661C.1
cactcaaccatgatgactacaccatgcccctgttgtccatccaagtcactgaactggttgatgctgatttcataggttgttccatgaaccacgttattggccatgcaactgatgtgcccatcgacaatcgttggtttccaaaagattgcgctccaccaataaatctccctttcaagcatcatgacgagattattagcagatatgaaacacccttgctgagatagagaagctatcacttttcagcagaatctattgcaaaactgaaagcagaggccaactcggagtccaatacccccaaaatctgttcgttccaatcattatcagcgcttgtttggagatccaacttgc

SEQ ID NO: 141363 - DNA, 316 bp, Glycine max
  Clone ID: PAT_MRT3847_98662C.1
ctaaacattcactcatgccactatcccaccacgcactctaaatgccgcaccacccactccaaagactacaccatcaactgcgaagcccacaccatccacgccaaaatccacaccaactactgcaaagtgctagtgatcatcttcgtctcctgcttaaccaccatgaaacaaagcctcatgccctaatgacacattaaagctaggctcttgtgctcatctattaggacttgcttacattattgatggaactcctccttccaacccgtgatatgcattgatcaaagctttggcggattatgaaacttcacttttccta

SEQ ID NO: 141364 - DNA, 421 bp, Glycine max
  Clone ID: PAT_MRT3847_98663C.1
gtgcacaaaaagttgtttttctgaacaagtactttataaccatattagaatgagggcggcaccatctactcaaaagtgggaagaaacatattgaggaaaatatggtcgttttagtacatgttagaaaaaaacacatataaatggatttctaaaatgtcgaattctaactatccaaaatgcttttttgttaaacagattagttttaaaaaatagagattatatttattaattataaaaatctgttaaaaaagattgaaaaataaaatatatacataattcaaactagaaggtccaaaagtagaaattaaactaaaataaacatcaaagcaagatggagctcaactttgccctctagacaaccttatattttaggtattttaaatgatatttacatttaaaaacaataacctatatactttct

SEQ ID NO: 141365 - DNA, 134 bp, Glycine max
  Clone ID: PAT_MRT3847_98664C.1
tacggttgtgaaaaaacgacaaaaggggaccacattccagaacacaaactcctgcgttggtaccatcacttttgtcgccgtaatttgttcttttgagctatggggagcttaaaggctgtatagaggggtttgat

SEQ ID NO: 141366 - DNA, 256 bp, Glycine max
  Clone ID: PAT_MRT3847_98665C.1
aataacaccattttcgctcctaaccaattcaatcacccccgaagggattggtgtctgggaggcaaccaaggagactcaaaagacactcaacattgtatggtaccaagactcccatagccaagggaaaagctgcatcacaacaaagcccagacgactttctcatgaataaccggagaaacatcaattatgaaggagcgtgcccactcattcatatttacatggcgccagcttatgcatcctaattcatgcccatgca

SEQ ID NO: 141367 - DNA, 250 bp, Glycine max
  Clone ID: PAT_MRT3847_98666C.1
ggttgtgggacgccctgttactgcccaaaaatataaagaaataacctctcctattctctccccggatcccactactaatagagacgttcatttcttaaaatatcctatatacgtacgtgtgaacagtggaagccgtcacctgtatctctccgccagcaagagtaataataatgtgtataatgctacaacatgcggtatggttcaacatctcctccaatattaaacagggtgatacgacactaccatactg

SEQ ID NO: 141368 - DNA, 165 bp, Glycine max
  Clone ID: PAT_MRT3847_98667C.1
gttatcatacacatactactactcgtttcatttgcctctggtgggagccaatagccatggggtttcaaacaagcaataattcccatttactattgtatcccctaatatgtcaacgccacatcatccttttgattgacattgaacctctatcgttgcctcacaatc

SEQ ID NO: 141369 - DNA, 427 bp, Glycine max
  Clone ID: PAT_MRT3847_98668C.1
ctatgtttatgtaaacggggggagaggtagaccaggagtatgaataaaatgccacagcagatcaatgaaatatcaatactaatggcaccagagacataagaaaggaaggctggcccgcaaaatcacaaaggatcatgcatagaagagaaatcgcttacgacaatacataaaatgctcaaaagaaatgatgactccaaaacctaataagctggaacgggaagttgaggacagaggcactgcctgtatgcttttaatacaaaaggaaatcttcgcacaaaagcaaggtgttggacctagcaaccagtattcaaaacttcttccccaaaaagagagacaggcaatacccccactgctacaaaagtccagcaaacaaggatcgaaaggaataacagacaggacctccgaggccacctcaaaagacaaggag

SEQ ID NO: 141370 - DNA, 379 bp, Glycine max
  Clone ID: PAT_MRT3847_98669C.1
ctacacaaacgggatcctgttgtgcttaggcagagacgagaatacattcctccacaaaaactctgctctgtttgcaggtaatgaagcctagccagaagaacatattgttgccgcggtaggtcgtggacatctgagggtagcactaatgctacctactgatgaggatatagacgcgtgttatagcagtcaacagctgtggattctctcaagcaggggagtctgctatatagtgcccttactaagtgctggactgctgagaattgtcagacaatgattccacgacctaagcctgattatcaatacggcgatggaggccacattaagacacctatagtcgttgctgctccaaaacatgtagaacatctaatcgactggatag

SEQ ID NO: 141371 - DNA, 244 bp, Glycine max
  unsure (1)..(244): unsure at all n locations
  Clone ID: PAT_MRT3847_9866C.1
cgctgtctctcccatcctttngcnttctcaatacccttttganttgtganaggaacagcaaacatggttgaacangnncaanancctacaatnatggncaaggtngcnggnnagcncccatcnccgnnctggtctntcatcnggtattagangtnatgacggagcctaccgccacccagctatgtaccanagancctctttngggaatnctcgaatgctgcntgcagccncctgtgatgcccag

SEQ ID NO: 141372 - DNA, 250 bp, Glycine max
  unsure (1)..(250): unsure at all n locations
  Clone ID: PAT_MRT3847_98670C.1
atccnnnnnnnnncccccntnttctaaaanncccatgggaaaaacatttgggttatactacataacatcctaaatcggggtgcttatcccgaaaatcgtttgaccagaccaatgcgggaggtcattctaccaaaaggtttatgggaagctttgcccaccctcgtaagccggggtttctaacatggtcctagacggagcggggaaaaaaatgagcgggctccctaaaagaaccgttttaatcaactggggg

SEQ ID NO: 141373 - DNA, 611 bp, Glycine max
  unsure (1)..(611): unsure at all n locations
  Clone ID: PAT_MRT3847_98671C.1
acggctgcgagaagacgacagaaggggggagattagggtgagtgatgcgaaactcgctaaaacagaaacaaatccaattacgaagaagaagaagaagaaggggtttgagcctgaaagaacataacagtgggactgtgggagttggggactcgtttgccaagttgcttctcttctatctccgtgcttctggatgatcaaaattacagcattattattattattgaagtgatttttgcaggtttgcccaaaaatggaatcggtgccaaacccaaacaacggggaggaacccacttcgtgggatgagctatacaacatcaatttgatgccttcagagttatttctcaagttccgaaaagaacttcagggcattcgagttggtctcaatatggagttctataatgccccagtcaatgaatatcaagcaaagcttgtattgaagcctttgacacctgaatgaaaggcatggtactggttggaaatggaagctcaccacttgtttgggtggagatggtatatnccggatccgaaataagacttccgttggcttgtatcccggttgtgatatacggtttggatggagggcagactatgttcttcctaaaattactgcg

SEQ ID NO: 141374 - DNA, 446 bp, Glycine max
  Clone ID: PAT_MRT3847_98672C.1
ttttccacgcgtccgcccacgcgtccgattctttcttgctcacacttgcgataccgacttcaacacaagaacaagaaccatctgttactttgcgttgcgatatctctctttttctctctttctgaaactcaatttatcaccaaaattctaggattttgtattgactgcaccggtgttggtgttggtgttgcgagttaggttattagaagattcacagagaatttctgcatctgcttttgttttattgcattaaaggaaatggagttgcgaaaatccttcatctgccactgggttttcctttttgtcatcgtctttgttcaagtagtcaatggtttttatctccccggaagctatatgcacacttactcaaataaagatctcatatacgctaaagttaattcgctgacttcgattgaaaccgagcttccctacagctactatgacct

SEQ ID NO: 141375 - DNA, 1164 bp, Glycine max
  Clone ID: PAT_MRT3847_98673C.1
gaatccaagttgaaatttctctacaatttcatttccattcatcaaatcaaatacatacacagtagtactttacaattttaccatagttggagactcatatctcagcttgaaaatagccatgaaatcacagcctccattccgatccgaacccgggacgactcccaccctttgccatctcctggatcgacatttcttgaaaccattcttttttttgggtgtatactgacgacaacgaggatcaaacatataaaatcctcgtacatctatctcaaccattactactagaccgatcctagttggattttctcgaaccgttctctcatacaaatcacataaagaaatacatacactcactaacatctaataaaatgagatcgaccataatgtaataatgcgcttctccctatgtactcttaaaatcccctcaccccatcttcatgaggtaataataattatataaaaaacttgtcttcactcaaatctcaaccaaaatgaggggttaaaattgtcgccctttgcaaaaactcggccgagtcatcattgaaccgaaccgtctccgtaactaaccctcaaaaaagcataaaaagccgaatattataaggtttagtttggttcgattgggaagttaccaaatggttttgtcagtggggccatgtaggagcggtctggactcgggccagaagtcgaggttgttgctgatgccgacgtggcagtagtgtctctgaaagtcgtcgagttcgaggtttaagaaccggttcgatttggccgggtcggaccgggaaatgaaccggagaacgtctcggaagagcgtttcgtcgcaggggatggctaagggtccgtggttggtgaagccgtactcttcctctgcttggaggaggagcttcttgaagacggggtggttcaagtacgtggcgcgcaccacgaatctggtgaggttgctgcccacgcacaccgccacgtgtcccgctggcacatcggacggtggtgctctgttcgccgacatgcgggccttgttgcgccaccgccgcagcatctgccggagacgtacaatgtgtcggatttggctgcatttcgctgacattttgatttgcttgttctgtgttttgttgttgcaatttatggaagtgatgatgaacgcatgaaagagagcgagataaaaagtgg

SEQ ID NO: 141376 - DNA, 2289 bp, Glycine max
  unsure (1)..(2289): unsure at all n locations
  Clone ID: PAT_MRT3847_98674C.1
ggtccggnnaattcccgggggagacccattgatccaagcaaataacaacagagaaaccagaagaaatgaaagcagagagagagagatcaaatgaaatgatggagaggtggtgaatgattttgatgccaccaaacacatgtcctttggatccaacagaacaattattttctcccttcaactttctctctttctcctcattctttcattcaccctccttatccttctttttttctttcctaacaacacttcaagagagagagaagacaagaaaaaagtgttgtagtcttgctttagtaacttgcatcaatgggagctggttgttctaaattgtgtctatgctggtgcccctccaactccaaacccaatcttcatgacttacctgataatgagaatgagaaggaggagtcttgggttggcttcaccgagttcaccttggatcaactgagaagtgccacatcgtcattttcacccgacaacatagtctcggaacacggtgagaaggctcccaatgttgtctacaaaggaaggactgaagatgataggttggttgctgtgaagcgcttcaacaagtctgcttggcctgatcctcgacagttcctagaggaagcaagggcagtggggcagctgaggaatgagcggttggctaacttggttggttgttgctgtgaaggggaagagagattgcttgttgctgagtttatgccaaatgaaactctctccaaacatctctttcactgggagagccagccaatgaaatgggcaatgaggctgagagtggccttgtatttagcacaagcattggagtactgcagcagtaaaggaagggcattgtatcatgatcttaatgcttatcgagttttgtttgatcaggatggaaaccctaggctctcttgttttggactcatgaaaaacagcagagatggcagaagctatagtacaaatttagctttcaccccacctgagtatttgaggacaggaagaatcacccgagaaagtgtaatatacagttttggcacactctgcttgatcttctgagtggaagcatacacccagtcatgcacttgacctaatacgtggcaaaaactttctgatgctggtggactcatgtttggaaggtcattttgaaaatgatgaagaccctaagctatcgtgatttgcaccccgcagaatacagaaagatgctagtgggaatcgaaaaattttggcgcttgcgactgctctatctccgcggcagagaggaacttccgtaccatcaaaagttttcatgggcagaccagatcgggcttgatcatctaaggaaacagtttaattgaccccttttggtgatgcttgttctagaagagatctgacttcaatagatggaattttggaataggtagggtacaaggatgatgaaggtttgacaaatgagctttcgtttcaattgtggacaaatcaaatacaagaaactctaaattctaagaagcaaggcgattctgctttccatgccagagacttctcaagggccatcgattcctatacaaaattcatcgatggtggaacgatggtatcaccaaccgtgtatgccaggcgctgcttttgttacctgatgatctacatggcacaagaagcactgggagatgccatgcaagctcaatcagtatcgcccacatggccaagtgcattctatcttcaagcagtcgctctctttcagcctaggcatggaccatgatgcacaggaaagtcttaaagatggcaattctccttaccatgccagagacttctctaaggccattgagtgctatacacaattcatcgatggcggaacgatgctatcaccaactgtgtatgcatggcgctgcttttgttaccttatgatcaacatggtacaagaagcactgggagatgccatgcaagctcaatcagtatcccccacatggccaattgcattctatcttcaagcagtggccctcttcagcctcgggatggaccatgatgcagaggaaagtcttaaagatgcaacaactctggaaaccagaaaacatagaaactgaagtgtacatagctttttgttttctttcttccctttcttttggttccctttcatttctcaaggaaatgttacaagcattagctgtatgtatctttgtctgtccattatttccttcaacagttttgaaactcttattgtctatgcctcctaggattttgttttcctaaaaaaaagctgtgaaattgccctagttcgtataaaaatattatatacaataacttaaacattcaatattcagctgctttgatagtaaaaaa

SEQ ID NO: 141377 - DNA, 304 bp, Glycine max
  Clone ID: PAT_MRT3847_98675C.1
acgcataaacgtccatagtcgacacatccaacgtctctatccaaattgtagatcgtgcttaagagtacatgctctctattaccgttatacactactcttcacgttgtattccaacttcaactagtttccaaaacctttcattactttgctgaaaccatcaatgattgggaatgctttctcccatcttattaaccatgtataatctgcaactctactttccctcctccctttctctgtattaaggatctctatctctatctatcctatcgtatcaccattatcgatcaatgtatacatattcttc

SEQ ID NO: 141378 - DNA, 139 bp, Glycine max
  Clone ID: PAT_MRT3847_98676C.1
tgtcacagttagagcaatgcaacaatgatctacatatgccagcactttttctgccatatccagccatggccccaaccgtcgatctctccatccaattgccaatgaataatctggagatactacattcacactcttacca

SEQ ID NO: 141379 - DNA, 455 bp, Glycine max
  Clone ID: PAT_MRT3847_98677C.1
gagactcttctatttccgatgcgtgtacgctcactcgctgttcgtgctcacttgtgaatcatattggatcacacaatcatggatgtcgctgagccccatttcaagtccaaggccgacgccggagcctgcacaacctaccctaaccaagccggcaccatcctgcataacagctacatcgtcatcaatggccgcccctgcaaggatgtgagatggcccgacttacaaaactggaaagcacggacacgctaagcgtcactttgctggaattgatattatcactgccaagaaacttgaggatattgtgcactctactgacaactgcgatgctccttatgtgaatcgtactcattaccaattgatagatatacccgccgatggatttttcattctgctcactgaaaatggtgacactaaggatgacctcaagcttactactgatgagagtatgctcactt

SEQ ID NO: 141380 - DNA, 562 bp, Glycine max
  Clone ID: PAT_MRT3847_98678C.1
atttctctttcaaaaacttgaaaacaccagtgaaagatagttgtaattaatggatttacggtaattatcgaaactaacataaaatgtatgtagtcactcttccttgctgacaagtgttaaaaagaacttctgccattcatagcatataaacatgggctttacaatcctcaagaaagaaaaattgtagaaaattagtcaaacataatatagttaaccgatgaaacaataattaatcgatattcaatcttatttaaaaaaatgatgaatctgattgtaagaattcaatccaatgaaataatctaatgcaagtattttttttggtacattgttttcttgagatgaaaaaaataaaataaaaacattttggtatatctaatgcaagtattttattttttcatctcaaacaattttcgacgcaaaaatgatcaaatagaattattttctcaaagctttttaaaaatcttcaaaatatttttaaaatgaaaaggcaaaggagaatcaaacatgtcacgtggatgcacagtaaatgacacaacagctcaactcatttcaataataataa

SEQ ID NO: 141381 - DNA, 514 bp, Glycine max
  Clone ID: PAT_MRT3847_98679C.1
aattgaaattgaagaaacggtgtttctagggttcgctttcgcagttgagatttgagaattgactttgagaattggaaaaatggccggtttaccagcgaggatccgtctccaacccaccgacgtcaaagccgccgccttgtggggcgtcactgccgtcaccggcgctctctacctcgttcagccatggggatggttgaagaagacattcttggagaagccagatcctgagcaaaaatgagttggcatctgagagagtgatttgaattttttgatcatgcaaaggatgggtcaaagaataacagttgaataatgttattttctgctgaggtcttctcgcacctgtattgcgttctgaatttggatattaatttttaatgttctgtgctggttttcacttggagattttctgttttaaatcatcttccttctggctcagccatgttgaatgagtgaactacagaatttatggcaataggattctttgctgaggatgataatgcaagatatgtttggt

SEQ ID NO: 141382 - DNA, 587 bp, Glycine max
  Clone ID: PAT_MRT3847_9867C.1
cgtagaaaagatgctcgggggaaggaatatagttgtaaaatatgctgattcccacaaaggtaaaactggccagccgccatttccttctggagtggttccaatggcacccttacctatgaacccaggatacatgcaacctggaaaaggtcatgttggttcagggcccccaatcaattacagttacccccaaacagtagcaccatattctgcatctccttatccaaaccctcctcccactgcaccctcactttatccaatacaatggcagattccttatcctcaagtttctgcaaagaaagaccaacatggggatccgcctgctgctgtaggaatgaacccttattactatcccaagcaatgaatgtatttaaaactaaagatgatgattttggtactcgtttcttttctttgccttccttttcaaatcgttttagaccctagttacctctcctatccccatcacttattaatgcagttctgcgacctttctttgcagctattgatctcttgtagagttttgacattcttttttattacttgtaatattgactataattttttttattagatttttttcataatatttt

SEQ ID NO: 141383 - DNA, 328 bp, Glycine max
  Clone ID: PAT_MRT3847_98680C.1
acccgccttcctacggctgcgagaagcagacagaggggagccgcatggggaagctactgaatagattgacttgccagaagctaacgctagaaccaggatgactacttagtggagcagatgagtttcaagaactaggacctaacttacaaacatggcttatgtgagtagggagaaggattataaatccctagcgaggagcagaacgagtactgggtgagaccaatcgatattggttaagaaatatggtttagtcaattacggctgcggggtagtgaatactcaggaataaactgctatagcgatctagatgaatgtccaattcgaggaa

SEQ ID NO: 141384 - DNA, 295 bp, Glycine max
  Clone ID: PAT_MRT3847_98681C.1
gtgcacaaatgactatattcatttacgcgccgttaaattttgatcagctatcgctactcttaaacatctatactataaaaagaattactcatttaattcttctcagacagaaaattctaaatatctttcatccaaacaggcactctttaatttggctcaacttcttcagtatcatcaggattccttacatgcaaagcttaatataacataaactgaatacccctgtttcatttttcacacctcatatactacaacactcaatacatgattacgtctcaagtttccacatttaaca

SEQ ID NO: 141385 - DNA, 370 bp, Glycine max
  Clone ID: PAT_MRT3847_98682C.1
gtggttgggatttttttaaaacaccgggggcaaaaatccccacctaagttaaaagaaaccccccaaccttcccccaaaggtcttaaaaaaaaacaccccattcatccatgcaccggataaactacctgcaaaacacaaaggttacaccccttcaatacccccaaaaaaacaatctgttttttaaaacccttcttacaaactttaaaccccccttgttaaacccggggaggtacccccccccccattttactgaaactgaactaggggttggggggggcccacattctggaatcttttttaaaaaccagacccaagaacccccactcccaaggttcccttatttagagaatttcaacctttttcatacaaa

SEQ ID NO: 141386 - DNA, 262 bp, Glycine max
  unsure (1)..(262): unsure at all n locations
  Clone ID: PAT_MRT3847_98683C.1
acggctgcgagaagacgacagaagggaagacaaaaggtcaataaagccagatgatgttgagtttgaaccaaagtcaagagattctgatataagggaagataaaaaatcccgtaggagggacgatgatgattttttaagcaagtcaagagaacctcatagtaacagggaagacatgaagtgaagnnagcacggtgaagatgaatctgcaccaaagtcaagagaaaattatgctaggaagcaagatgatagatcatatagaaat

SEQ ID NO: 141387 - DNA, 254 bp, Glycine max
  Clone ID: PAT_MRT3847_98684C.1
ttctcttcctcttcctccttcttaacttcctcaatttagcaactactgaggcacaggatgaaagctccacccctgtcgagttatcccatgcctgctacgttggcaagtctatcgctagcagtgccttccaaataaacgtcagggccctcctctcttccttatcatcaaacgcccccggcgacaacggattctacaacaccacagtccctgcactaaacccttctgactctgtctttggactcttcatgtgcagg

SEQ ID NO: 141388 - DNA, 403 bp, Glycine max
  Clone ID: PAT_MRT3847_98685C.1
gatcaactagggttttggctctctaagatgttattaggccgactacaataatggtgcattaatcgcaaaatggataattgaccactctatggtctgaactatactggatatttcgtacacgttgtaagctatgtgcccatatcactctgaatatgcgtgaaaaaatatctacaacgtgagcagtatcatggcacctgataccatcccagcaagggtggcaacctatgtcggaatctcagataagtagaaaccgaaggtggcaaattccactaagggtgcggcctcgatcttgaataaagggcctttcccaatcagctatatcctgaaatgcatattctggaaaaacctcaaatggctccttacaggatcattcttagccaaatcgtaagaagcgccacgtatt

SEQ ID NO: 141389 - DNA, 339 bp, Glycine max
  Clone ID: PAT_MRT3847_98686C.1
tttcttatgtgagtttgttgatcgagataacggggacagtttgattaaaatgaacgtccttgttttcttctttgctacaatttttgtagcatggcaatgccatgcttacgatatgttctcttctctaatgaacactgtctatttgttcccgtactctagatgtgaaatgctcaatttttacgcttgctttttaagcacacaacatcttttggcttttaaactcatctttaatatttctttttagctatataaataatacttttattgccaacaatattatattttttttttattcagttaatctatttttttttttttatttcttcaatctttttattt

SEQ ID NO: 141390 - DNA, 596 bp, Glycine max
  Clone ID: PAT_MRT3847_98687C.1
taggcaccatgttactgccccctttaccccttctagtttggatcatcttcaataagtctttactcatttcattttcctaaatgcaatatagatattcactaacaaggacagtttttgcttctttgtacttttttgtccatcaaattgacaatgactgttgactgtttgctgcaatgcgggatgtttgtttttttttttatttgccaatgcgaaattacacttatggtcttgtttctcaattttggaggatccattgttctccccaagtggtatttcatcaaatgatgaaatgaaagcatttctgcttctatgcataggctatattttgaattcatcagtatgatgcattgatattgcttctataacctattgactaaattctgttaagtcattattatgtcatctatgtcatatgcatcatatgtgcttgccatgttatttttgttctcgatttggtcttttaactgatttattctattttgtttagaggttataacagcagctgaatttcatcctttgcattgtaacctcctggcatatagcagctcacaaggttttattcgtctatctgatttgcgacaggcagcaatatgtga

SEQ ID NO: 141391 - DNA, 192 bp, Glycine max
  Clone ID: PAT_MRT3847_98688C.1
agggggggggaaccagacacacctctatttttctgacattccatgaaaggttttattcctatacaaagtgttccagttgcattaccactaaccttatcatgaaggtttatttattgggatcgctgaaacccagatctaagccttagaaagtcaccttcgtaggtgtgagggctagcacccacgcctccgcga

SEQ ID NO: 141392 - DNA, 291 bp, Glycine max
  Clone ID: PAT_MRT3847_98689C.1
actgttgacccgtggttaacggagaactatgggtatgacacgggggggttgtgacaaatgtctatggccctctgggatggaggaaacagagagtccaaaacgcatggttagcgtgaacttattcaaagatcgccatgacaaatctctgcgccaggctaagattggaagaatggctgtacaatgcttcaaatagtgcggtccctggcggcagcatggcaaaggtgacattgtgcctgatcatgacaagtccttgacacactccagggctgcacagatgataaggatgcatag

SEQ ID NO: 141393 - DNA, 397 bp, Glycine max
  Clone ID: PAT_MRT3847_9868C.1
tttattttttttggggaaaacttattccattattgaggcttgaatgtcagctttaaaaggccatgtacacttgtgactattctgaaaggttataaccacacatataacagatgtcccgcacggtttagcacatcacagctttttgagcaactaaagatgaatactcttttgtcccttggcaggggttatagtacatatttgaaaaaccgtatctgacctatagagccaaacaaccttgggattctaaatgctgcggattatcaaccccttctattcgttgcgagaatctcaatgtgttcacacctgtcatcttgacttttgcagcatccattttctgataactgctgcacagctgctgctgcaccatgaggctaacgctagtgttcattgccccgga

SEQ ID NO: 141394 - DNA, 1212 bp, Glycine max
  Clone ID: PAT_MRT3847_98691C.1
agtaatgtatgatattcatcagagatcccactgggcttggtcagctcgctcagaacacagtttgagtgccgacagttcaactaatggttctcaggatgtgtttcctagggaaagatcccatcaaacatttgatatggaagttgaaagactcaaggctgaacttgctgcattggccaggcaggcagatgtgtcagacttggaactacagactcttaggaagcaaattgtaaaggaaagcaaaagaggacaggagctctcaaaggaaatcattagcttgaaagaggaaagagatgcactcaagcttgaatgtgacaatctcagatcttttcgcaaacccacgcgtccggccaaagtgagtagcaggcctccattggatagtggggatctttgtactcttgttgaagaaattagacaagaactgaagtatgagaaggagctgaatgcgaatctccaattacagttaaagaagacccaagacgcaaattctgaactagttcttgcagtgcaggacctggatgaaatgctggagcagaaaaaaagggaaacatgtagtctttccaataaacatgaagagggtaaaaactcctatgagttagggtcgaagctctctaattgtgaaacagatgacgaagaacagaaagaattggaagagctagttaaggagcacagcaatgccaaggagactcacttacttgagcaaaagattatagatctctatggtgaaatagagatgtataggagagacaaagatgagttagagatgcagatggagcagcttgcacggctcgatgagatattgaaacaggaaaaccatgatattgcatataagctggaacaaagtgaactgcaagaacaattaaaaatgcagtatgaatgttcatctcctcctcctgctgttgatgacgttgaggcccatattcagaatctggaaaatcaactcaagcaacagtctgaagaattctcaaattctctggctactatcaagaaacttgaaacccaaataagcagattagaggaggaactggagaaacaagccgcaggatttgaagctgatctagatgccgtgacacgcgacaaagttgagcaggagcaaagagccatccgtgccgaagaagctttgcgaaacaccagacataaaaatgctaacactgctgagaggcttcaagaagaatttagaaggctctcaacgcaaatggcttctacatttgatgc

SEQ ID NO: 141395 - DNA, 688 bp, Glycine max
  Clone ID: PAT_MRT3847_98692C.1
cccacgcgttcgcggacgcgtgggaaaaaacccgaaaccaaaaacaacaaagttctattctattgaagagctccagcacgatggcttccctctctacattgctcccgaacccgaaccttatttccaagcacaacagcaccctttcttccactcacccatgtgcttattcctggaaaaacaaaaccccaaccagtaagggtcggttctccgtttcttgttcttcttcgtctcaagcatacgacgtcgtcgtagttggcgctggcgtcattggcttaaccatcgctcgccacttcctcgtttcttccgacctttctgtcgccgtagtcgataaggctgtcccttgttccggtgccactggcgcagggcagggacatctgtggatggtaaacaaaacccctgggagtgctacgtgggatcttgcgtcaaggagtcatcaactttggaagacgctggtacagagcatagaagagcaaggtttggatcctatggtggagttgggttggaaacagtctggaagcctattaattggtaggactgatgctgagtcagacgtgctaaaagggagggtgaaactactatgtgaggctgggttgaaagcagagtacctgtgtagcagtgatttgattaaagaggaacctgatctactggtggacaaagacagtgcagctgcatttctaccagatgactg

SEQ ID NO: 141396 - DNA, 587 bp, Glycine max
  Clone ID: PAT_MRT3847_98693C.1
agccataggaacacacccattccttttaaaacgggccccccaatccgaaagaattttgggggaggggtcaaatattaattaagatcacccccacacaatatctatctgtatatatatatatatagatataatttattaataattagaactttcttttttcttaaaaaaaaaaaaagtaaataaaaagatttgatagaatcgtaatttcaattcgattatatagatacatagaaaaaaagaatatataataatagaagtaggaattattgatagaaattcattcaaaaatgaattcttaattaatagtaatagtaatataaaagattttatttagaagagaatatctattataatagattatatctatatagatataatctattatatacatttattttgaattacccctaatagaatatcaggccgatctctgtacaaataaaataacatatcaagtacattaaaaacgcggatatagtcgaatggtaaaatttctctttgccaaagagaagacgcgggttcgattcccgctatccgcccctacttagttaattaaatatgtatttaatagtcatagtaagaaaaat

SEQ ID NO: 141397 - DNA, 469 bp, Glycine max
  Clone ID: PAT_MRT3847_98694C.1
aacacaaaatcatatttcatgtctttgcagcgtagctgaaatcatattcatatttcatgctttaatgattacaaaaatcatatatctcataaagcaatcttttagtttttagatgaatcttgcactataaatctatccagctatcaaggatacacagcctgtgcatatatatgcatgcactcgtaattcaactaggggtctttatggttatatagagaccctctcacaccgtgttcagttgaaatgggaagatagatatccatactcgtctccattacaccaccttagcatcttatcccacactgtttgagtgctggacctgtctgcttgggcaagaaaatatcaattcgcacccaaatcattgagaaaattatggctagaactattgaccagaggactacaatggtagggggttctgttttgccttcccattagacctttgaggaaaggatataagtgcaaaatgacc

SEQ ID NO: 141398 - DNA, 293 bp, Glycine max
  Clone ID: PAT_MRT3847_98695C.1
ggctcgagagaaccctgatcactccatacatattgaatgttcgagccgtgcatgtcagccagtgggcacagaggtgtctgtccagtccatcagctgttgggtaaggacgtggatgatgaaacacctcgttcgctcgtaaccctggcactggacttgcctactgatgaagattcaagaacggttgctgctaagatcctgaactgtcacgcgccgcccaaactatgatatcaagcttcccatgctcattactagattgctaaggctgatttggctctaggtcttacagacggact

SEQ ID NO: 141399 - DNA, 240 bp, Glycine max
  Clone ID: PAT_MRT3847_98696C.1
cggctcgagcggctcgagatgattttgatgggaataactcatgaatagagattctcctccaagcctagaatgagtactatttacaatatggagggcaataggaacaaaatattaaaatgtcactggaaaagaactgatacttggaggagaatctctattcatgattttgatgggaataactcaccatttggtttactcttgtaactaagataaagtgattgtatacaaattccacgacca

SEQ ID NO: 141400 - DNA, 410 bp, Glycine max
  Clone ID: PAT_MRT3847_98697C.1
atgccggggaaaaatttttttttattcgtaaaaaaaattaaaaaaaaactcacactaagcgaaaaaaacgaaattatataaaacagacttgcccgcaaaaaaatgttttttgataaattaggggggaaaatgtgtgagattgcgtactgggggaccaaaaggaccaaaaagtggccccacgatatattcagagctgaatggaacactccttttgggtaaaagaaaatgaaataacacaccttgaaaaaaggtgcccggttttttccccacaaattattggggggcgaggaacatggaattggtccaactaactcaaaaaaagataaaggggacaacttcttttggggggggcatttttttttttcttttatcaaaagaaagggcgacggcccacttcgttgttttttggg

SEQ ID NO: 141401 - DNA, 365 bp, Glycine max
  Clone ID: PAT_MRT3847_98698C.1
gaaatactaattaaaataagattcttagttgacaaaaatggtacactgcccaaaagatggatccaaattcaaattaaataaatcgaacaatacagggggccatcaaatacaacagccacatgtcaaaatggttcttagtagagtttctggctgatttgagattctcaaaaaattagttagatgctttgccataggcgactgttatttaggggattcatctgattacgtctttctttacttatactttgatttgctattcttggaggaaggaggattctcactatggacatcatgttccattaaatgctcaaactcttcataacttgcatatggagacacaccactcttaccaccccttatatggt

SEQ ID NO: 141402 - DNA, 437 bp, Glycine max
  Clone ID: PAT_MRT3847_98699C.1
ttcgttccaaggaaggtttcccgtcatcactgtatgacgtcctccttctttggggggggggggggggttacgcaaaacctgggaacagggtaggagagaagagcaacataatgagtgaaggcgtagagagataggacagctggcccataattgagatgatgtagaaatgtaataggacagctggcacaaacacaaacgtgtaattagcacgagcaatacagtcgcaaccgtagagggctgagagtgaacataacgattggatagtgacaacccatggatatcttagtacaaagcaatcgatagcatcgcagcggatagaggcgggggacattactgcgatggcagttaccacatggttggtctacggtaataaaaacaatagtaattataggagcgataggctaatcccggacagcgtaagacgacaataccatagg

SEQ ID NO: 141403 - DNA, 507 bp, Glycine max
  Clone ID: PAT_MRT3847_9869C.1
gtttaaagagacaagtctatcctggtaattcatttcatcaagtaaaaaacaaaaccttcacgaaattgtccagcagttctttttccccccaacctgataatgtaatttcagccttcaagtatttaagtttaccttgttaaaatgaaaacaatagttattataaaaatgaaaagaagttttaagaatattgtacagtaccacagtatataccagaggatttggcctaaagtgcggttgcaatatggtataaaattttgagattcttgttaaactgttgaagccattcagcttgtagttgttatcaaatgagcacagatgttttgaagggtatcataccttattaagctgttggaactgttgatctcgtaattattagcaaacacttgatgcttcttataatcttgtatgacaaacattggatcctagcataatttgtagtgcagtaaagaatttgtttactattcagtattcacttgcccaactgcaatgcactggtatttttggctg

SEQ ID NO: 141404 - DNA, 680 bp, Glycine max
  Clone ID: PAT_MRT3847_986C.1
ctgtaattgagagtctcccttatgttggtgcaatggcggtttcaaaccttgaagctcgacagtctttggttccactgggcagtgtagaagagttattgacagcatatgactcgcaacgtagggagttgccaccaccagtaattgtgtgggaatggggatggaccaaaagtgctgaaacttggaatggaagagcagctatgcttgctgtgcttcttctgttgtttttagaagtcaccactggtgaagggtttctgcaccagtggggaatattgcccttgtttaggtgagtgagtcctcacctaccctccatggcaatggaatttagttttgcttgtatatgtataccattagcatcatatgccccttgaaggaatgcattcaggagttctcaaatgtagtttagacacataatttgtggatggaaacgagagaaaaataatgtatagtgatttggtttgtatactacagagtacctcttgtatctaaagcaattttacttgggttccatgattcgtgatacctactcggtgatgtagctgaaaagcagtttttgacatcacagtttccttgtgaactcttaagacctctctctcttgtgtgtgtgtttgtatttttgggtcacaagacattagtacgaagtatttactagttttattgacgagtaatctttgttagaaaaa

SEQ ID NO: 141405 - DNA, 803 bp, Glycine max
  Clone ID: PAT_MRT3847_98700C.1
ccacgcgtccgctctcgctttctcgctctaacttttcaaaacccacgccgcttgcgttgcctatctctcccgctgcatcgctctgactttctaaccgagcttcctgcattgtcttctctctcctagggttttctgattccttcttctgcttcgcgcttttgagctatgcgttctctctctaccggctcggtctgctgccgtctccaccatgaccgccggcggctgctctgccggaatttcgccacctgccggtcactcctcaaagcctcttctctctcctgacgatgctcttcgctggtgtcgtgttcggcgagagagaatgccggtgtccgtcgtcttcctcctcgctcttctcaacttgcttttctcttgccaagtgaagtctatttctctgagtgtgtcatttgcttcatctgaacgggctaaaatgtggcttgtgaaaccttcttctggaccatcttctgcacccgtgccatctccatcttatcatggtcctcatgtgactccaagaccaagacatcattatcatcaccgtcaccatcacagcatgaggccttatgtagcagctccacccccttcaaaagatcaagcttgtgaccaaacctgtactgatccgctcacatcaagtccctttggttcaccttgtggttgtgtatttcccatgaaaatcagacttacactggatgtagctccttatgctgtttttccggtaatgactgagttagagaatgaaattgcattaggcacatatttagagcagagtcaggtgaagataatgggtgccactgctgacagtcaaaatc

SEQ ID NO: 141406 - DNA, 409 bp, Glycine max
  Clone ID: PAT_MRT3847_98701C.1
tcgccctcgcgtccggctggcacctagagccagtgttggcggtcaaattggtccctttgatttccaaaaaaggcccaatattggtgcttacttggatgacaaaaaattacattatcagaaaactggtgctaatttgaattctaataaagatgggctattacaccctggttattttggacacccttcaaatttgggttttgtaccccagaattcaagttccccactttgtagaccagttttatcatgatacccagaaagttagtcttggccttctaggtggaaggaaatgaaatgaaacgctcttcaactttttggtgaaatggaggtttattatttggatggcaaggttaaagtgccttttacagtgtttacgacctcaaaattgttttttttcttgaaagtaaaatct

SEQ ID NO: 141407 - DNA, 398 bp, Glycine max
  Clone ID: PAT_MRT3847_98702C.1
ccctcctcttttttttttttttttttttcccaaagttctcccgggaaacacaaaaagctggaaccccccagcaattaaaggggtaaaaagcgacgggaaattttcatgaccaaaggggggcccaaaaagcccttcacacctggttggccccgggaatacccctaattttgaaacccccaggaaaaaccccactttttcttgaacgggaacaaattgagggggggtccaaagggaaccaaccctccaataagggggggggcttaaaaaaaaaaaacccccccctttaccgggggtcccagggggaaaaaaaaccaacaacctttcttttttatgaccaaacaccacccgccaaaaaccccccctttttttttccaaaacccccgggggaggaacttggc

SEQ ID NO: 141408 - DNA, 419 bp, Glycine max
  unsure (1)..(419): unsure at all n locations
  Clone ID: PAT_MRT3847_98703C.1
ccgcggcagcaangaacgacgggggcnccaaccccacgggcatgggcggccaccacctangggcggaactcggcgtctgcgttggcgccgccatcgtcctcatcctcttcctcatctccgtctggttagccttcaagcgctccaaaaccaaccccgtttccatccccgacgtctccaaggagatccaagaaatcaggctcgaccacgcgcccaacctcaaccccactctccaacccgaacctcctttatccgaacctgaccccgttcctcccaccgaagaggaaaccacccccctcggctaccaccgaatccagttcgagattggcaagaaccaccgaatctcttaccccgaacgtccctnggttcgctccagctccaatgaccccaacaactgcgaaggtcaggttcccaccgtcatt

SEQ ID NO: 141409 - DNA, 483 bp, Glycine max
  Clone ID: PAT_MRT3847_98704C.1
tgtcctcgcgtccgcccacgcgtccgcccacgcgtccgaattagttgaaaaccaaaaattaattggccgtgacgaaaacaatatcatcaaccacagaaaaatgaactgctccagcgctgcaatgttgatgctgttgatgaccattttcactgtgctgtccaatgtcaacgaggtagcagccgaggagcacgagctggtcagccgcattaagcgcaacggctacggatacagcagcggttatggtggtggctgttcagcctgccaaagcagctgcaccacctgtggttacacatcctaccataccgtgcctgcggctcctgttcccccgccaccaccgccgcctacgccttcgcctgcgcccgtctacaggcagtcttcctactcctcctgctccacctgcgggggcagctcctactcgtcttacccgtcttcctcttactcctcttatcccgcttcttcctcttgctactcctgttaccccgc

SEQ ID NO: 141410 - DNA, 392 bp, Glycine max
  Clone ID: PAT_MRT3847_98705C.1
gtcgcatgccgcgtcgtagctcggattcggctcgagttttttttttttttttttttttttttttttttttttttttttttttttttttttttttcaaaggaaaccccggtaaacaggggggggcgaagggaccaaaattggcccaatgaaaaaaccgtaacttacaaaccaaacattagtcattcaaaaatgggttaccctcagggcccaaaaaaaaacattcaaccccaaaggggcccgaaacccccaaaaaacattcaaaaactgggacaagggtttgtatggacacaatctcaaaaaaacaagggggcttctaaaaaagggaaacccccaggtaggtgtttattaaaaaaaaactccaaggccaaaaaaaataattgaattcccccctc

SEQ ID NO: 141411 - DNA, 227 bp, Glycine max
  Clone ID: PAT_MRT3847_98706C.1
cccacgcgtccgcacaggtgcattacgacgtctgaagggggcggccgtcagcgggccgatgactagagctaccttgccttcaaacattccactcttctttactttgccaatcctgggaataatatatattctagatattccgaaaccacggctcacgccaatcctatgatttttgctgtaggaattctaagtaacacatgacttcttactgttgctttctagcacca

SEQ ID NO: 141412 - DNA, 392 bp, Glycine max
  Clone ID: PAT_MRT3847_98707C.1
atctcgaggagactctggtcgaggcgtagaggaaggacaggagggatcaggttaacaatcaatggacactactgctctaacctagtcagaatcacaaacgggggacgagctgccgacatgcattctggatcaagtaacggatcaagaactgattggatgccaatgcaaagaaactggcgctagaactggcacagcacttgctacctcgatggacaaagcctataatttaagggcaccacaaggggatgcggaacgtatcgatgcaacaatgttggcccatgtggctgggactttggacagacctacactggtgctcaatgtcgctagatctggttgaacaaagttctaagtcacacattgaaactctacgactacatagcataatagataca

SEQ ID NO: 141413 - DNA, 469 bp, Glycine max
  Clone ID: PAT_MRT3847_98708C.1
ggctctctcaatgatctcttccccagctgataccactataaaccgtgccggtgccggcttggatgctccattcactggcctcaagtacatggctggcttccccaccagaaagaccaacaatgaccttacctccattgctagcaacggtggaagagtgcaatgcatgcacgtgtggccaccagttggcaagaagaagtacgagactctttcctacctgccagaccttgatgatgcacacatcggcaaaagacagtcaaatacccttcttaggaacggatggattccttgcttggaatacgcattggatcacggattcatgtaccgtgagcacaacatgtcaccaggatactacgatggacgctactgaaccatgaggaagctgcctatgcttgattgcactgtcgcttctaaggagtgactgagcgtaagatgctaatactgcataccctactgcttcatccgtatcatc

SEQ ID NO: 141414 - DNA, 298 bp, Glycine max
  unsure (1)..(298): unsure at all n locations
  Clone ID: PAT_MRT3847_98709C.1
aaagagctctttcttttccttcctatctccatttttacaaaactgtctgagttcataaaagtcaaaatagcgttcagtgcttttgatgcttctgctgtccttccagatcttactcaccattcaattcttctgcttcttcttcactcagacttttgtggggtgtgcctcatatttaggaaataaaggcataaggaggtttctcttcttacccatatgaacctttggtgttgaatttggtgggtgtgtaaattcttgaagggggtgtattggttgtggagaaggaagtgntgaggntgat

SEQ ID NO: 141415 - DNA, 1434 bp, Glycine max
  unsure (1)..(1434): unsure at all n locations
  Clone ID: PAT_MRT3847_9870C.1
tacggctgcgagaagacgacagaaggggggagaggcaaagacaacaaactttgcacactctcgccctcgtcgatcacttgagacacaaactcacacactttgtactctccgtccttccttcttcgatccagatctctctccttctccctcaaatggcttcccttctgcaatgttccatgcccctcgtctctctttccaatcgagctctggtacccggtaccaggatctccaacccaagttcagtttccctttcaattaagggaagaagtttcccatccgttacattgcagcccagagggcgtcggtttcagcttagatgtgcggcaaaaccagagacagtgaagaaggtgtgtgacatagtcaagaagcaattggcactgccagatgaatcagctgttactggagagtctaaatttgctgcgcttggagctgattctcttgacacggttgagattgtgatgggacttgaggaggaatttggtattaccgtggaagaagaaagtgcccagagtatcaccaccgttcaagacgctgctgatatgatcgataagcttcttgaaaccaaggcttaaactagtaaaaaggacaagcatgtccattttagagttttttgctatgtcgacggaaggggtttttaatctttatctttggtattacaacttgattgtctaagtaactgctagttcttttctggattgtattgcgattactataataatagttttaagaactcagtcattttgtttccgttgaatgaaattgattgtcaggtttataaaatctcctttctcgctctcttcatttcacttgcttctgttccatctgcttcttttgtaaacctgttttcttaatccttttaaaaggaaacccatttgattaattgattaatattgtgttgttgagttggttaagcaagggagatattttcccctgctatttccatctcttcatcttcactcacgttatatcgattgcatttccatgccttcattgtttttagagatatataatattaagctattctccttgagaattcatagacgattttactagtcgattggactttcaattaaaggggtggtctgactctaatttcccttcaacaccctaccttttatctatttttatgttaagtttttaagatttttagcagctaaatgctcttggtcttggggtttggctataatttattttacttaattgccctagattttacagaaccaactctattctaaaatttggtgtatatgttgaagaaaaatgctagaaacacactcacgaacacactattttgcacagactctctttgataggttacaatttattaaaaatggcaattttttttgtggatttcacatcacatttaatgattctctctatgatttggngggtttttgataaaattttaaccaattaaaaagagtgtgttgctag

SEQ ID NO: 141416 - DNA, 554 bp, Glycine max
  Clone ID: PAT_MRT3847_98710C.1
attcggctcgagaaggactaacccttccttggatctctttctacctcttttctccgcgactggtttcagtttgaacctaaggcagagaagccagagagtctcctctgccttagagaaactctcacaatggcgtttcaggactttgatctcatctcagagaggagaaggaacgagaagaggcaaaaggcgaggaagaggatcatgattggcgtggtctcttccgttgtcctcgttgccatgataggtgcagtactcttcgttgtggttagaaacgacaacgaagcaggcaacaaaaaaagcaatgaaaataagtcacatggccattcacaacaatctaccacccccggcaaggatcacgttgtggcgcattcgaagatggtgaaattggtgtgcagctccgcggactacaaggaaaaatgtgaagacccccttaacaaggcaatggatgatgaccccatactcacgcaaccaaaagaccttcctcaggcatatgttaaatttgctgaggatgaggttagcaaggcctcttaacaaaaccatctccatgaagtttg

SEQ ID NO: 141417 - DNA, 117 bp, Glycine max
  unsure (1)..(117): unsure at all n locations
  Clone ID: PAT_MRT3847_98711C.1
tcntctttattttcacnagctacatattttngttatcagcaatggncttctactttggnaacncccttatncgtatgnncactatgnnngcaatatacattgctacatnacttntgg

SEQ ID NO: 141418 - DNA, 468 bp, Glycine max
  Clone ID: PAT_MRT3847_98712C.1
ttgtttttttttacttttttttgttttgtacccacaatcaaatagctatatttaatgttcttgaaagcgtgttctatacctaaacccttcctttggaaaagagtttccggaattatctgggaccatgctaattaaatccacatatttttaggtaaagaaagccctagttgggaaagtacaatatctaattctcacaggcatcgcccaaccaaggtttgattctcaaacaccaatttttcttagaaacgattggctctcttccatggcctctccttcaataacttccaccttactcttaaacggggtaatctttgataagaggacctttgtctttttggggaaaccaacgcctttgggattgacatacctacaaggattgggaaaaacggggatactgagatattccttgagccccttggttttgacacagaagcaaacacaacttccgcttcctaggctgttaaatat

SEQ ID NO: 141419 - DNA, 368 bp, Glycine max
  Clone ID: PAT_MRT3847_98713C.1
ggacaagaacattgatatatcttcagataagcgtgctttgcaaaagctacgccgtgaagcatagcgtgtcaagcgtgcattgtcgactcaggctcaggctcgtcttgaaattgagtcgctgctggacggcgaagacttcaccgagtctctgagtcgtgcacgttttgagaagcttaacgaggacctgttcaagaagacccttggcccagtggagaaggtgatgaaggatgctgacctcaagaagtcggaagtcgatgagattgtgctggtgggcggttctactcgtattccaaaggtgcaacagctaatcaaggactatttcaacggcaaggagccctcgcgtggcgtaaaccccgacgaagccgtcg

SEQ ID NO: 141420 - DNA, 513 bp, Glycine max
  Clone ID: PAT_MRT3847_98714C.1
gcctgctgttggccagggccttaacaaggcagctgaagtagttttggtattagacagtgaaatattgaagtctaaggagggaaaaaaaaaaaaaaaaaaaaaaaaaaaaaaaaaaaaaaaaaaaaaaaaaaaaaaaaaaaaaaaaaaaaaaaaaaaaaaaaaaaaaaaaaaaaaaaaaaaaaaaaaaaaaaaaaaaaaaaaaaaaaaaaaggggggggcctttttaaaaaaccaaattttactacccgggctttgaaaggtaaaatttttttttttggggccccaaaataaaattcctggcccgctttttaaaaacgccgaacggggaaaaaccttgggtttcccaaattaattccctttgaaaaaaacccccttttcccaattgggaaaaaaacaaaaaagcccccaccaaatcccctttccaaaaagttccccaccctaattggaaattggaacccccctttaaggggcccataaacccgggggggggggggggtaccccccaagggaacc

SEQ ID NO: 141421 - DNA, 2217 bp, Glycine max
  Clone ID: PAT_MRT3847_98715C.1
gtctagaatattcctatctgaaattaaaaaaaaaaaaagaaattgtcttgctcatagttaggacgtctataacctgtcgacattgaaaataacaaataatataaattgatagacgaaaagagtagcgggcagtgacaaagcaaaagcgtggagtgggtcttgcgttgtgttggaatcccaaattcatttctgtttctcattctcaattcttcttctattctcattctgatttgccacacacacacgcagaaaggttgaaaatagtgggacttgattcactggaggtggagagagatggctaacaacgcagctgcttgtgctgagagagcaactagtgatatgctcattggtcctgactgggcaatcaacatagagttgtgtgatatcattaatatggaccctgggcaagcaaaggatgctttgaagatactcaagaagcgtttggccagtaaaaatccaaaaatacagcttctggctctttttgtattggagactcttagtaaaaattgtggtgaaagtgtatttcagcagatcattgagcgggatatcttacatgaaatggttaagatagtgaagaagaagccggatttaaatgtgagggaaaagatactgattttaattgatacatggcaagaagcttttggggggccaactggagtttatcctcaatactatgcagcatataatgaattgaagtctgctggagttgaatttccaccacgagatgagaatagtgtaccattcttcactcccgctcaaactcagccaattattcattctgctgcagaatatgatgatgctactattcaggcttctcttcagtcagatgcatctgaccttagtttgctagagattcaaaatgctcaaggactagctgatgtattgatggaaatgcttagcgccttgagtcctaaagaccgtgagggtgtgaaggaggaagtgattgttgatcttgttgaccagtgccgttcataccaaaagcgtgtcatgcttcttgtgaacaatactacggatgagcaacttttaggtcagggattggcactgaatgacagccttcagcgagtactctgtcgacatgatgacattgtgaaaggaactgctgattctggtgccagagaagcagaaacttcagttctaccacttgtaaatgtaaaccacgaagatgatgaatcagaggatgattttgctcaactagcccataggtcatcacgtgatactcaggcacagaatcaaaaaccagcctatgacaaggcagaaccagggaggataaacccactcattccaccaccaccagcatcaaagaagccggtctactctggcaccggcatggttgactatctcagtggtgatacatacaagacagaaggatctcctgaaaactcagaacccacttcatttacagctccccttcattctagccctaatccaacctcgtcaactattccatctctgtcttcctctcgtcctcatgctgtgagtactacctcatcaccaatttttagcagcgagcctgtgtatgatgaacaaccatcttctgaggacaaatcttcggagtgtctgcctgcagctccctgggatgctcaatctcctggcatcattccgcccccaccttcaaagtataatcaaagacaacagttttttgagcaacaaggtgtatctcattcaagtagtggatccagttcctcttatgacagcttggtgggacaaactcaaaatctctccctgaattcatccaccccaaccaaacaacagaagccagaagatgcccttttcaaggatcttgttgattttgccaaatccaaaacctcatcatcttccaaacccaataggtcatattgatatgttgtgtttgtttgattgcttatgctggtacagtttataaatgttgtttatcacgttttacttcagaccgctgagacgaccgttttgtggttggttaggacccttcggatatgaactgaccatgcgtgtacttacatatatttcttatattcatgtatattgttcatattgaatttgttgccttatgttttcaataatatcagattctttaagtcggatatgaattgaccatgcgtgtacttacatatattgcgtttattcatgtatattgttcatattgaatttgttgccttatgttttcaataatatcagattcttttcaggaaaaaaaaaaaaaattatatccactataaaaaaaaaaaaaaaatatttttg

SEQ ID NO: 141422 - DNA, 120 bp, Glycine max
  unsure (1)..(120): unsure at all n locations
  Clone ID: PAT_MRT3847_98716C.1
ctgcttccaatcatatttaaatananacacacactcctcatcncanancctacattttcntcaaacgtgcggtgngatcaaattccccnttaaggatggaggntnggngaaaaaccnngc

SEQ ID NO: 141423 - DNA, 468 bp, Glycine max
  Clone ID: PAT_MRT3847_98717C.1
gctaaataagaagatctttgtcggcaccggggatattggagtattctgccataccaagaaacatgttaccgaacctcaagaatttcactttgccacagacgaaaggattccgccacctgctgccatggctgatttatttggcaagctttctttgaagtctgaacctgcacgtaatcacaacccaatcccaagaaacacgactccaaatccgtttcatctccacacagaggaaagaggtgctgagaaagagaagaagctggtcgtggaccttctgcagaaacagtgggaagaggaaaacgcaaggattcccaaggctaatccatacccttacaccactgattaccctgtgatcccaccaaaaccagaaccaaagcaatgcacaagaccagagccattccaattggagagcctggtgagacacgaggaagagatgcaaaaggaacacgaagaaagacgcagaatggaaaa

SEQ ID NO: 141424 - DNA, 463 bp, Glycine max
  Clone ID: PAT_MRT3847_98718C.1
tttttttttttttttttttttttttatccgaattaaattcttactttcgtttgccggcgaggcaaaatcatagctttagtaggggggaaagcaaattcattgccctgtctttggcgacccaaaaactaggaaaggggccgccgtgccaaaccaaatggactggaaaaacatgggcctcccccaacttaagggggtggaaaagagaaccgcttccgccgggggggcaaaaagaggaggggcccgaacggataggggtacgccacctgccccgtcccataaaggaaaagggggaggggccgggtaccccccccattaacccgcccaggggggggggcattaccgcagggggaccgccttcctttcccttcccttaacgcccgggcgggggggttggcccccccagttaaaaaccaggggggggggttatgcccgagagccaataaattgggggccctcttcaggg

SEQ ID NO: 141425 - DNA, 1015 bp, Glycine max
  unsure (1)..(1015): unsure at all n locations
  Clone ID: PAT_MRT3847_98719C.1
gacccacgcgtncggtgctacaagacgacttattggtactgtttttttaaagacgacagaaggggaaggcaatatatattcaaaataaaacaacaatcagttaggagtgttgagtaagatcaaaatatggcagacttgatgaaaagaatcctcgaaatgattgaggccgagcaagctaggaaagggtccaatcatggtacctcaaactcacataacacctatggcagcggaagccagaatggatcaaccatcaacagcggcaatcatcataacaacggcaactggtatgacgactcataccactatggtgaacgccctatttataacgacggtactttcaatggtaatggcaacggggcacatgttgagggtggctttgactcctcaacaaggaactactatggtcgccgttatggttattaattatctgtatttgatatatagtatatgctgggcaacatcatatagtatgttatgttgtactacccataaataatgttgagctaaagctctaatagtccaatgttctatcataaatataatggttttagggcttttcgtcttgttttttttttttctaccttaacaaaatacaacaaacaagaataatccctattataaaagtccaacttctctgggggggcccggaactgaaaaatcccctcatattttccccaaagcgaacccaggggggaataaattttgacctagaagggttgcacccccaagaaagtctccccttgttattgggaacccaaaatgcccaaaaacttccatgcctaagcaaactgttgaaagaacgttccaatttctgactgggttaccctgaaagggctggccccacccttgtttctgaccatgaacgcccccaagccaactggtaatttaaaccttcagggcaattaccagcttgatatcaaaaccctctgacttgcccgttcggttatgggtaaggcctagcccgaaggcaggactttccagtccccgaaaggttccttcaaacggaatccgcttc

SEQ ID NO: 141426 - DNA, 907 bp, Glycine max
  Clone ID: PAT_MRT3847_9871C.1
acggctgcgagaagacgacagaaggggggagaggcaaagcgaacaaacggctactctcctcccacttgctatcctcgaaattaacgaaacgtagttgaagaacccacagaatcagaaccccaacactgccttatgctttccctataaatacacattgtcccttcctctcgtcatttcaaatacaaactcacaacacactttgtacactccgtccctcttccctgtctctcaaatggcttccctgacgcaaactttcatgtccctcgcctctcttcccaatctagttatggtacccggtaccaggatctcccacccaagttcagtttccctctcaattaaggagggaagaagtttcccatccgttacattgcagcccagaggatgtcggtttcgatttagatgtgtggcaaaaccagagacagtgaagaaggtgtgccacatagttaagaagcaattagcactaccagaggaatcatctgttactggagagtctaaatttgctgcacttggagctgattctcttgacacggttgagattgtgatgggacttgaggaggaatttggtattactgtggaagaagaaagcgcccagactatcaccaccgttcaagaagctgctgatatgatcgataagcttcttgaaaccaaggcttaacaagcgtgtgcattttggagttttttgctatttcaatggaagggggttttaatttttatctttggtattacacctagttttaattttataaaactcgtgccatttcattcccgttgaaagaaattggtcctcaaagtcatgagtatttgcattttttagacatttcaaattgaccgtcaaactcctaccattttgctccctatttcaaaatatgcttctcattattccatcaaaaaaaaaaaaaaaacaccc

SEQ ID NO: 141427 - DNA, 393 bp, Glycine max
  Clone ID: PAT_MRT3847_98720C.1
ccacgcgtccgcgcttccttgtctttggcgatgcacggctctgagagagtgcttattgcctcctaagactgataggggagcgttcttggctcctgaccttgccgctactcatctcacctttgacgatactccgaccttagaggatttaaccgtggaagatgaggataaggtacgatgctgcattacctcttatcaaaggcggagatgtccaacatgagcggggttgctgcttgtactaatattgccgacatgtgcggccgaataccatgaaaatctgttgggagaggaacgatgagatgactagataaggctacatctacaagcattacccttcctgcctctggacacatgctgttgccaactgaaccgtttttgctggctctcccccaccat

SEQ ID NO: 141428 - DNA, 229 bp, Glycine max
  Clone ID: PAT_MRT3847_98721C.1
gaattcccggctcgacccactcgtccgcccacgcgtccggaggttgtctatttgaattctccttcatcctttcctttcttgttgaagagtttttgttattgttttaaggaaccagcagttcttcagttttagaaagactcatgttgaattatcatagcatctgtgatggatttatacagcattatcacaatgtttcaatttcactcagattcattcatgggtgaaacta

SEQ ID NO: 141429 - DNA, 485 bp, Glycine max
  Clone ID: PAT_MRT3847_98722C.1
ccccccccaaaatttttttttttaattttaaaaaaaccaagggaatggaagggcccccccccattccttggaaaaattttttttttttccctcatacctgttttttgggggccttcccataaaacatacctgcctagttcctataaaaaaataaaaaagctggctggctcaaaaatccaactggaaaatagggggggcaaagcccaaagttgttaactcaaaccccccccactgaaactgttttccaaaaaggaccttttaaagctgagttttttttttttggttgggccaaaaagaggggaaaccccccctgaaaaacttaaaaaaagacccctattcatgccttttttttaccacccccactaacttggatgataagtaacatgggaccaaacaaaaacttttggatacccatgactactccctgaatttacataaccactggtgtttttattgaaccaggccctggccttttttctttggga

SEQ ID NO: 141430 - DNA, 558 bp, Glycine max
  Clone ID: PAT_MRT3847_98723C.1
cggactgaaaaacaaacgcgaagtctggagagtgaagctcactgtggccaaaatccgtaaggccgcccgacagctcttgacccttgacgagaaggatccccgccgcctattcgaaggcgatgccatcctccgtcgcctccatcgcctcggggtgctcgaggagtccaaaaacaaactcgattacgtcctcggtctcaagatccaggacttcctccaacgacgactccagacccaatgctggaagttgggactggccaaatctatccatcacgctcgcgttctcattcgccaacgacacattcgagtcggacgtcaactcgtcgacattccctctttccttgttcgagtcgagagccagaaacacattgattacgcattgacaagtcctttcggaggaggtcgccgcggtcgtgttttcaggaagaagcaaaacaaaggctcgggagacggcgaagacgcggcggacgaagaataaacaatcgtcgcatccaccacagcaaaataaaactgaaaaattcaagatacacatcaaggaaaaaaaaaaccaatttttgttcg

SEQ ID NO: 141431 - DNA, 146 bp, Glycine max
  unsure (1)..(146): unsure at all n locations
  Clone ID: PAT_MRT3847_98724C.1
attanaattggggagannaanttggaaccctaagcangtccggtgccgncatggnctttaagaagtcctcctnctccaanggntcanaatagggatttncccttggaagcttccngcgaattnaccccccaangcccgnggncccc

SEQ ID NO: 141432 - DNA, 185 bp, Glycine max
  Clone ID: PAT_MRT3847_98725C.1
ttttgttttattcccgccaaacgacatagggctaattgtcgacattcttggtaggatgtcttacggttgctcattacgttatcagccccatgagaaagatttgttggagggaaacttttcctctgatattaaaactctctctagatcggaaaaagtttcccttccaaaagcctcaatttgtttgt

SEQ ID NO: 141433 - DNA, 408 bp, Glycine max
  Clone ID: PAT_MRT3847_98726C.1
tggacttaagcttgtcaagcttagaggagaggccatgcaggatgcttcagatgctgctagtagtgccatggttagtattataggattggattcagagaaggttcaattgttgtgcgatgcagcaaatgatgaagtagacgagaaagacagagttcagattgcaaactttctttgtccaggaaattatgctgtctctgggggtgtgaaaggagtggaagcagtagagtccaaggcaaagtcatttaaggctcgaatgactgtgcgtctatcagttgctggtgctttccacaccagctttatggaaccggctgtctcgagattggaagctgcactagcggcaacagatgtaagaacgcccaggttaccagttatatccaacgtggatgcacgaccgcacacagatcccga

SEQ ID NO: 141434 - DNA, 480 bp, Glycine max
  Clone ID: PAT_MRT3847_98727C.1
ccgttaaccagttttgtagatgcttacaacaagctaataattgaacttgagaaaagcgctcctacattggttggcattgaatgtcccaaggatgacaaacttccttgtggaaaatttttgacaaacctatgacgcgctgcttcactattctccctatggagtttaatcttgaggtccgttaaacgttcttcaattttgtgaggttcattgtgaagaaaagggacatgctcagttgtcaagttggaatcaacccatactccatggaatggactggtttgagcaatagattacgtggtaatggcatctatgttctgcgttgcgaatatgctacttttgatggtttgattaccaagcaagttttgagcaagaaggcagacatgatgaacagtctttgtggtggtgatgaaaaattgatgcgcgaaaggacacacctgctgttggcttggtgtttatggatggcaatttgtaaaaaagatattt

SEQ ID NO: 141435 - DNA, 247 bp, Glycine max
  Clone ID: PAT_MRT3847_98728C.1
cttagccttccctacaactccaaacattaagacatcttcatccatggctgcctccgtctccactgtcggagctgtcaacagagctcttttgaacctgaatggttctggagctggagcttcagctcccagttcagcttctatgggaccagcttgaagaaggctattgcctcaaggagtcccatcagcaaggcttccggtggaagcttcaagattgttgctgtagaagacgtgatagagattgatgaga

SEQ ID NO: 141436 - DNA, 270 bp, Glycine max
  unsure (1)..(270): unsure at all n locations
  Clone ID: PAT_MRT3847_98729C.1
gaaagaatcaaagtggcattcatgtactggatactagtaatcatattgtagaacaagcatgggtaagatatgtttgtatcgtgttgtaagtctaactgtaaaaaggatcttaacacgtgaataacaattctanaagtatttctgccctcctgcaccctagtgtcatgtccaaattctaaaatttctatctttcaatgttttgtgctgtattatcatttgactaaatttagggataatattctcgcccttattttctcgggcaatatattt

SEQ ID NO: 141437 - DNA, 497 bp, Glycine max
  Clone ID: PAT_MRT3847_9872C.1
aaacttaatctctttgttattaccatttttttttgaacggcacttcattattactggatgaactatgtcctatagcctagacagaaacatgggactgcctatgttgatatcttccccccatcattcaatcatcatcatctggaaccaccttcttgatcttggcgtggccatcttcatcaggcttaagcctgatatcaccggagtcgtaatagctgactttattgactgcctccgctacctcaagcacagtcggagtcggaggacgggccagcccctcgcacaccttgggaggatggcccttgtaggccttgcagatgtaagcctcgaagttctcgtaatcctcgtagagcggctgaccgtcgacgaccacccagggaacgtacttgtggggaggctgcaagcgtcagtctgtcttcctacttgagcgaaagctggtggccccgttcgcccttgtagcagtcgggacaggcttgggatcgagggtgagcttcccgaag

SEQ ID NO: 141438 - DNA, 320 bp, Glycine max
  Clone ID: PAT_MRT3847_98730C.1
tttcaaaactaaacaaatactaaaaccatataagatcgagttcttcatacccttatatttttagattatatacattaataacctcattaattaattcactttttttccattccaaatttttttccccctttccccaaaaactatatcaacttcttattatcgccacaaatatataatatctttcaaccaacttccactcaaacttctttttgttcaatatttaatttttttctatttttctttcaccctatccttttcttatatttccaaagatcttttccaaaattaaattttaaccccaatttatttataaatttttt

SEQ ID NO: 141439 - DNA, 372 bp, Glycine max
  Clone ID: PAT_MRT3847_98731C.1
gtcacatcttatctctttttttagaacgaaggaacacacccccacggtttattgcttaaccataaatatcacacttaaactccttccactctacaaaaaagggcggcgggacttctttttaatatggggacaactccaaacaaaggttccttgggctattgggctccatccaaagtttggttctttgcggggagattggacaaaaccaggtttcggagaaggggcccggatctttctataactcatagatttgaggaagtttttggggtgccccaccacacgggtttgtgctgtgctttgaaagaagaaggtaaagctctttggaacttgagggagagaatagagagagaccaatttgatgctttgtcaaac

SEQ ID NO: 141440 - DNA, 383 bp, Glycine max
  Clone ID: PAT_MRT3847_98732C.1
gctccattcgttcgtattaaaatcgttttttgtggttattatcagaacgagttttgatggatatgaatttttattttagctagatagggaggaaattgacgattatattggtatgatctgataaataggggggactggcggggaagatcccattttacttcaaacttcaagcgcggtatgtaaattttttattctgggggcagtgtttgagggggcacgtgatttaatggcgtgggagggaacagacgggttttttaccgtgcaaaatggacggccagatgttccgctttttacaattaggcgaaaagagaggagggttcaaaaataagctccatccaaaattttgttttccccctaggggcgggggtcagcgccttgaaatg

SEQ ID NO: 141441 - DNA, 288 bp, Glycine max
  unsure (1)..(288): unsure at all n locations
  Clone ID: PAT_MRT3847_98733C.1
nagtcgcatgcacgcgtacgtaagctcggaattcggctcgagntttctctnnaannntnnngnnncttnnacancattngccattgnantnangtnanccacatcctcagggngcngaatatggncctgtnancgnngtctncgtnccntgccancgaangagtgnaagcttanattnngttactggcnaaggcntatgnngtnntgnatgatgcatgctaccatnanatcattagccattggcnaagcactcangcaattgttganccattgncatancaacaaaca

SEQ ID NO: 141442 - DNA, 367 bp, Glycine max
  Clone ID: PAT_MRT3847_98734C.1
tttttactaattcttttttttttttactttttttacagccccccctttatcttttgtggggctattgggcatttttttttccaaaaaaaagcttcaaactcatatatttaagggggccactaaacccaatacaaacatgtccctgttaaaaaccccgaatctcccccccccaatacttttttataatcccccaaattaacccttacccctttcccgtggtggtcacttaaaacccgaaatactcccaggtgtaaagggtcatttgttaaaaaacacttctttattatatacatccggggatatttaaattcccgcccaatgtgttcaaagttatttttgtcccccaatattgtaaaattttttcacc

SEQ ID NO: 141443 - DNA, 450 bp, Glycine max
  Clone ID: PAT_MRT3847_98735C.1
atgagtttgatgggtgctggttgcagagaccgagtgcacgttgttgtcttcctgaatcttttggtactattctctaagggcgatgttctcccttcggaggtcctgcatctcttgggcattctgctactacatgccattcatctccctttgcaaggcaacgatcaaggaatgttcaccaggcacctgacacaagattttcaccattgttgttgggctctcattttcaaggattctcatggctggcatgccaaacaagttggccacctaccccagtggtggtctttggttgcctgtggaggaaaatttttccttggtctcacggtggacgccaaatgttcttaccatattcaacaagacctgctcacgatggtgctctttcataagcctctccatgaattgcgatgggaaggtacctgtaaagacactttgatgctcaagttagaggcgtag

SEQ ID NO: 141444 - DNA, 392 bp, Glycine max
  Clone ID: PAT_MRT3847_98736C.1
ggggaaggtcaccaatcattaatttaaacaggtaggaagtgttacagttggggtcttctattaataacttttacaggtagaaactgtaaaaccttacctgaccaatattggaaacaagctattatatataacataaactatgcatataaacccgaaaaaattttagctccaaaacatgttttgatgcagtaagttatgctccttcagatgtatacatatttgtgacccttataactcccttgaaaacaacacgttattttatcaaacaggaaaacttttggtcgttctttattgttttaccattaacatgctcaacattccttttttttttatgctagtgaacgcgaagtccatcacaacgacatatttatattcggcatagataacaccgt

SEQ ID NO: 141445 - DNA, 879 bp, Glycine max
  Clone ID: PAT_MRT3847_98737C.1
ggtccggaatacccgtcgacccacgcgtccggtggtttgcctcataagcatgagaagaggggactattgaggggcaatgaagttgtaaaggctttgaacagtgaagtggaggcttatgatagaatggggcccgaagggaattcttggaggagttcgaacttgtcctttcccaaggatgctggaaatgagagaaatggtgttggtgtgaggtcgtcaagtgggagtaaggatgtggggaaggatagtaacaagtatgttccgtcgccatttagggatgatgatgctggaaagagggattttgtaaggagggatggtcagggtgggaaacagcagccttggaataatgtggtggaaccgtatggtgatcggcatcgcgagcaactcaacaggaatagagctgattctgtccagagctcggtgtcaagatcagctttctcgatgggtggtaaggggctgcctgttaatgatcctctgcttaattttggtagagagaagcgggctttgccaaagagtgaaaaaggtttcttggaggatccgtttatgaaagattttggaggttctagttttgatgggagggatttgttgggtggtcttgttggggtggtcaagaaaaaagaggatgtgctgaagcaaactgatttccatgatcctgtgagagaatcctttgaggcggagcttgaaagggttcagaggatgcaagaacaggagcggcagcgaatcattgaggagcaagaaagggcattggagttggctcgcagagaagaggaggaaagattaaggcaggctagagaacaggaagagaggcagaggagattggaagaagaggcaagagaggcagcatggagagctgaacaagagaggattgaagctttgcgaaag

SEQ ID NO: 141446 - DNA, 278 bp, Glycine max
  Clone ID: PAT_MRT3847_98738C.1
gggttcacgaatggaagcggatccacgaggaagagagtttacagaggtggaccctctcggatggacatgctacccataagaaggagaagctctacgtatacgagatcgagagtcgtggacctcgtaactggtccctcatcatcaggtccatcccgggccgctctggcaactcctgtaggctttactggtgcacgcagctgtccccttcaggctcgcgcactcggccttcaaccactaatccgacgacaccactatcccggccccatgcccccttcggc

SEQ ID NO: 141447 - DNA, 746 bp, Glycine max
  unsure (1)..(746): unsure at all n locations
  Clone ID: PAT_MRT3847_98739C.1
tctctctttccgatcagatcggacgccctgtgtctgaattccaatacacagcacacaatttcgattcctttctttctctcaacctttcaattcccaattttcatcaattcgaattttatttttttacactgtttccgttcccaatttttgcgctctgggaaattcctggttcgcaatttttgcgatctgtgtaattccttgttgcatcagggttaagatcgttcgttcgtggttctctaatggcgtcggctcaggtgctgccaaacaccgccgcgtcgtcgcggaagcaagagcatcttgaagctggcaagcgccggctggaggagtttcgtaaaaagaaagctgctgagcggaccaagaaggctgcttcctctggccaagttcacaattctgatgctagcttgaataaaaaacaatcttctgaagttgaaaatgtacgtgttaacgagtcagatggagttagcacgtctgatggtgttgggggatctgttactggcacatcaactttggggatgaggaatgataagaacctgaatttgattagccaaagtagtaatcaagggtctttggctggtagtacttttcttgccagaaatgatcttaatatgttatctacaagtctgggggaggcacattccaatattgatgaatgtaagagatataatgcttcttctgttaccacatctgctgattntagtcaaaacaatgagacaaatagggngatgatatacatggaacncatgctg

SEQ ID NO: 141448 - DNA, 472 bp, Glycine max
  Clone ID: PAT_MRT3847_9873C.1
aaggaaaaactaacttctgcaaattagcttatgtataagctcatttaagacactggggaaaaaattatttcatttatttcttcttttataagcgctttaaggagaagtttctcaaaatagggtcataattattatattttttttgtgaaattatttcccctaaacaatggttagtatgattgccaggttttagttttacatatctgacacttggttggatgctatgaagttgaaatcaaattatacgaaaagttgataataaactggcagtaatagggaccaggggctaatgatttttttttaatgttttgttgttgaggttattgtatcgttacttgtttaggaattttgttgaaatgccatcggtgaattggagagaggtggcggacaattggtttggagcttgctgttgttcgtttggagggataagtgagaagatggtgatgagatatgtgagttcttatatgtgcag

SEQ ID NO: 141449 - DNA, 297 bp, Glycine max
  Clone ID: PAT_MRT3847_98740C.1
caggtcgccggcgagtggcgcttaccggcgcgcccgtgcggcggcgtcgacggggcccggcacgtcggccgaggccgcgtccggggctcgccgggctcgccggtgcggtcctcgcgcgggcctgccgcctctgcctgcgccggctcctcggcctccggctcgggccggtccgggcccacccgcaagcctgaatcggctcaaaataatagcaacaccaacactcacactcatagtctcagcaacaacaacaactccggtgaactttctggttcaagtgagaacagccccaccgcgcgt

SEQ ID NO: 141450 - DNA, 526 bp, Glycine max
  Clone ID: PAT_MRT3847_98741C.1
gatttatttttttttttttttttttttttttttgactttttttttttttatttttttttgggggtgtgtttttttttttatagtgagttttttttttttttaaagggtcatggggataagggaaaaaattttaaagacccatgggcgaaccctggggacaacccaggaattccgaacagaaaccgtaaaggctaccagttttcttaatagagggaactaaaaaaattggggggaactaagggaaaagtttttaccggggaaaaatggtattcccgttacatttccaaaaaaaataaaagccggaagaaaaaagggaaaagcctggggcgccaaaggggggggtctactcacaataaaggcggggggcaaatggccgcctttcaaggggggaaactgggagagccacaggaattaaaaaacgctccaacgcccggggaggggaagattctgtttgaggccccaggggggttttttttttcacgagctggagggggaaaagttgtatgccattacccagatgtcctta

SEQ ID NO: 141451 - DNA, 362 bp, Glycine max
  Clone ID: PAT_MRT3847_98742C.1
gcctgtcttccttttttttttggatttaacttaagagcagtggattatcatcattatcagcgggtgatgaaacaatattcaacaggtgcacgaactgtatgaatagcaatatgcgttcatcctcaacgggatatgaaagccctctgccatttaacacactatgctgtggctacagctcgcacttaacagcctgagaagctgtcaaaccgccgcttactatgttgggggcaccgtacacacgttcagctctgttctggggagggccagaactctcaagcacggaccctaggtgctgggaatgctgcgtatccccttgagtctggatttgtccatgccttagcctttagcattgctcccagatg

SEQ ID NO: 141452 - DNA, 257 bp, Glycine max
  unsure (1)..(257): unsure at all n locations
  Clone ID: PAT_MRT3847_98743C.1
aagtaagataggaattaggatagagaagagaagattgaggaagatattgggtttgggaagaagagtgaagatgttaatgagataaaaattaaataaattaatattaaaaaagaagatattgttgttgatgtgatcataaagaaaaagaataaggtgaagataaatcagattgacatagattaattggttgaaagtgatgngaggaagatagtttaaggattgataaatgatgagggtaaaataaatgaaaatggaga

SEQ ID NO: 141453 - DNA, 398 bp, Glycine max
  Clone ID: PAT_MRT3847_98744C.1
cgtccgtccggttgtaaaaaaattcctaagggtttttaccggaaaaccccgggtgggcagagggtctcctactaaagagctgtatgtcaagaactgaagaagatctgatcgcgaccatcggtgacgattgtaagatcaaaacgctcacagagggtggcaagagattgaaattgacgaatggggatactgctgggcaagaaaggcccaggactctaaacagatcttactatagaaaagcacagggaatcatactcaatgatgatgtcacaaggagagaaacctataccaacttattacaagagtggtctaaggaagtggaactctactcaactaatcatgatagagagaagatactagaacgaaataaagacgattgatatactgaaaggactctgagc

SEQ ID NO: 141454 - DNA, 301 bp, Glycine max
  Clone ID: PAT_MRT3847_98745C.1
cccagatgacgggagagccgataagtccatagagcaccaggtccgccagtcttaatgactgtccatagttgcgactctattacacttggctcttaacatctacagaggctcttctgggggatatctcggcaactctgcgttacgcctagagcgctatattgttagtgactaccttattattaacctctcgccacatggctgtactatgagacgctactagacgacgcggtcggaaaaccggtctaacagactccctctacagaatatagtagacgctccttacactttttcttatttttaa

SEQ ID NO: 141455 - DNA, 1182 bp, Glycine max
  Clone ID: PAT_MRT3847_98746C.1
gaaaacatggactcaatcggggtgttaatgacttgcccaatgcacagttacatccaagaagagctcgcaaaacgcttcaacctcttcaaactctggcactatccctcgttctccgccttcgcccaagcccacgcccattccattcgcgccctcgtcgcaagcgccaaagtcggagtcgacgccgccaccatcgattcccttcccaacctcgagattgtctccacctacagcgtcggatacgacaacatcgacctccacaaatgcagacacagagcaatccccgtcaccaacacgcccaacgttttaaccgacgacgtggccgacgtagccatcgccctcgccttgtccctcctctgcagaatttgtccccgaaattccacttggcaattcacaccaaagcttagtggtaaagcggttggaatagttgggctgggaaggattggttgggcgattgcgaagagagccgatggttttgggtgtccagtgagttaccattccagatctgaaaaatcagagacagggtataagtattactctcacatcattgatttggcggctaactctgaagtgctctttgtggcgtgtacccgtagtgaagagacgcgtcacattgtgaaccgtggggttattgatgcggtgggcccgaaagggattctgatcaatgttgggcgaggcccgcacgtggatgagcccgaactggtggccgcgttgattgaagggagactaggtggggcgggccttgatgtgtttgagaacgagccggaggtgcctgaagacctgctggggcttgagaatcttgtcatgacccctcatgtggggactgacactctggaaacttgcatcgctatgggagaccttgtaattgctaacttagaggcacactttcttggcaacccacttttcacacctgtcctttagatcgctggctactaccttgccagagctcagttacatttcaatttttctacttcagtgagttgtggataacagaaaataaaaataaaaaatcatccattccacttcctgttcacaaaatgcacatcacgaattcattctagataaacacatcccaagttatttgtatcaagcgcacaaataaccacccttaaacgatatgaattcatatagaagagacaatacatagattaagcatcttcatatgccatccggataacatagacc

SEQ ID NO: 141456 - DNA, 300 bp, Glycine max
  Clone ID: PAT_MRT3847_98747C.1
actcgctactgcacactgatccgcattgacgtttaaagaggccctctccgaaaaacaactcgacgatggagctaaggactgcttccgcgatcatctgtggagacagcaggctcactgacaaaacaaattttactcgcaaagactagcacatcgcgaacgttgatcatacaataacaactcaatttagaaaagtcctaccgcattacattagggggcagtggcataccctccgatctacattctctgcaaaagtgtcactgatcaaaaaaaaggtgcgcgagacgtgccgaatattcacca

SEQ ID NO: 141457 - DNA, 171 bp, Glycine max
  Clone ID: PAT_MRT3847_98748C.1
acccacgcgctccggtgccacatccttggtataggagacaagactggtgcaacattatgctctatgtatggtattgtcaagctccaagcacttgctcgtggaggactagttagatattctatcgccggatctgagagcaggagatgtgcactctattgaaccctctggatg

SEQ ID NO: 141458 - DNA, 852 bp, Glycine max
  Clone ID: PAT_MRT3847_98749C.1
cgtttggctatgacacatattaagtaactgccattttctttcatcattaagtacttattcaaaaatgcattcttgttgccaagaatgcgcattcatacaatggtatatatcagaggttggattgccattgtcacatgaagtacaaattcaaaatgcattcttgttttaaaatttcacaaagcagttacaaatgttccagatacaaatttatttaagagactggacaaaagtaccagcatgtaatttagagactggacaaaagtaccagcagcatgtaatgaaagaagcagatagagatggctgaaataacatcaccatacatcaggacgcaactcaccacttgctgggggcacccatctcccagagtgatacacactttcaccaactttccaaccaggcacatccttcatcacttctgcctcatactcgagatatttatgccactctttaacaaatctctcatcctcttcagcctgtagcacaggcagtatggatcggcgggcagcatacttttcttccttcagtgcccttcggatcttgttgccctggccgacctggtacatgccccaagagaaagcgccgaaagcagtgaggaagatggcaacggcgctggggcccttgttggggatgcgccgggcgaaccggaccggagcgaacccgcctggtggtggaccgtcctggagaaccggcatgtccttcacgctcgccatcccgggcttcttccttatatatgcctccgtcatctttctttcttcgccgctatctcttctcttcttctccggctacaatacaatataacaacaatggaatgctctcgctttgcttcccttcggtcgtcttctcgcagccgta

SEQ ID NO: 141459 - DNA, 477 bp, Glycine max
  Clone ID: PAT_MRT3847_9874C.1
gtactgatgatcttggaggaacaccctgaaaattatcgtaacagactttaagcatctttaagcatactgtgccaaaaaagaagatactgtaccaaaaaagcatctctaagcatgaaaatgagttatttttttaatgcaacatctggataaaaaaaaagttctaacacaaggcttctaatcaattgcattagctgatacaataacaatccacgaatatcaaccatgtaaataggaagtttcttctaacacctataaacttcatggaaaaagggcaaaaaggagagggggtaaaagattaccccgatgattatggtttacctagaaggatgcttgagcttaaactaatataatttgttccccacaccaccttagaatcacctcagaagtgttaatcaaattgaaaataccttgcagaaggtgggaatgggagcataaaagggaaagaaaaatgaaaaggtaacccacattggataaact

SEQ ID NO: 141460 - DNA, 401 bp, Glycine max
  Clone ID: PAT_MRT3847_98750C.1
acaaattcaaaatgcattcttgttttaaaatttcgcaaagcagctacaaatgtttcagatacaaatttattttagagactggacaaaagaaagtaccagcatgtaaagaacattcaagaagcagaccaaattctgatagagatggctgaaataacatcaccagacatcgggacgcaactcaccacttgctgggggcacccatctactagagtgatacacactttcaccaactttccaaccaggcacatccttcatcacttctgcctcatactcgagatatttatgccactctttaacaaatctctcatcctcttcagcctgtagcacgggcagtatggatcggcgggcagcatatttttcttccttcagggccttcggatcttgttgccctggccgacctg

SEQ ID NO: 141461 - DNA, 328 bp, Glycine max
  Clone ID: PAT_MRT3847_98751C.1
acaccaactatgcctgctgccgcgtctctttcgactacgtctgctttgacggatagccgccaccggaccctatgtagcacttggcgacagcttgacgatctttctcaacgtctcgactagtacgtctagggctagaagagcaaataggagaaggaggagctgagtcaacattctatgactcattgacttcttcatgtacctgctccacttcttctacgagattagcacttgccattgattatggatgatggtcattcaaatgtgtatatgcccgtgactatcgctcttggacagatcttgctgttccgaagcgggggtgagtttgcga

SEQ ID NO: 141462 - DNA, 472 bp, Glycine max
  Clone ID: PAT_MRT3847_98752C.1
tattcggctcgagaggtactgcgttaagggagcagactcagatggctcgtacgaagcaaaccgctcgcaagtccacaggaggctaggctcctacgaagcaacttgcaaccaaggctgctcgtaagactggaccaactactggtggtgtgacgaagcccgaccgttatcgtgctggtaccgtagctcttcgagagagtaggatataccagaagagtaccgagcttatgatccggacactgcccttacagaagctggttcgagaaagggctcaagactcgacgactgagctgcgagtgcagagccacaccgtgcttgcattgcaagaagcggctgaggcgtaccttgaagaactctgtgaagacactagcccgcgggccattgacgccaagcatgtgaccattatgccgaatgatattcagctgacaggaaagattcgaggcgagcgtgctagagatggaagctggaaagatga

SEQ ID NO: 141463 - DNA, 611 bp, Glycine max
  Clone ID: PAT_MRT3847_98753C.1
aattcggcaccagctttgttcttaaaatccacatggcagaattcactgcagatttgcaaagtcttagatttcctttcttagatattgacaacatggaaatgcagaacttgatgatgccattctcctgtgaaagcttcttaggttctccagaagctgaatttgcaggaaacttggaagagaattttcctgatcacaatgaagttccagttttagttcctattattaattcagttaaaaatgaaatccatgaaggtcaaaagaggaaagcaactgatatatgggagccaagttctgcaaattcaactcctgctgtttttgagagtggaagcaagacaaaaaatagttgtggaagaggcaagagagtaaaaaggaatatgatagaagacaagaaaccgaatgaagtagttcatgttagagcccaccgaggtcaagctactgatagtcacaagtttaccagaaagggttagaagaggggaaattcattgaaaaccttaggtgcttgcagaaacattgccccaggatgttacaagacaatgggtattggcaataatgttggacggagaatataaaccttgtccagtccttgcagcacccaagtggggtcctttcta

SEQ ID NO: 141464 - DNA, 265 bp, Glycine max
  Clone ID: PAT_MRT3847_98754C.1
ttttaggacagcacggagaacaaatcaaacataatgtcacattctctattagaagagtaaccatgtttcatgcggttgaacataggctagcaagcataggaaactgaacatattcacgaggcgatagatcatgctccagatgcatcacccgttttttgttccacggcgctggctgtaactgggtagtttggtagtgaagtgtcccgcatcatctccgaacaatttctagcatacattaggacccatatagttaacgctagcaact

SEQ ID NO: 141465 - DNA, 223 bp, Glycine max
  Clone ID: PAT_MRT3847_98755C.1
caccattccataaacaatcctttttttttgaaagattcgtttggactcccttttcccccaaaacaatatttacacccacccgcgaagggacccttaattggtataaaaacccaacctataaagttcctaaacattcccgaccttgggtgaaaggaaccttccctttttttgatgggcccaactttttttgttaaactattttacagatcacacgccttaattt

SEQ ID NO: 141466 - DNA, 242 bp, Glycine max
  Clone ID: PAT_MRT3847_98756C.1
agggacttacaggagcacaccacatgaagtatatgctccataccatcgtcaccaggaggggcgagaataatggcaatggccattggatcaactcgaggcacagtcaccgtggttgcggctagccccagtgttggcatcaggaggagtgcgaagaggaatgtgaacttcaggacgtggttcaattcgtttgcggggttgagggctcagtacaatgtgacattactatgccttcctgtgtgcac

SEQ ID NO: 141467 - DNA, 265 bp, Glycine max
  unsure (1)..(265): unsure at all n locations
  Clone ID: PAT_MRT3847_98757C.1
caccgggggtttttttttggacttcaaacggaaggatccagagngccttttggtgttcctaaccctccgacctgatgaaaatttatggaagtaagcaagccttatgtcgcgcatgggccaccaatgatcaatgatggaactgattcagtcaagctttcaaacttttcgccccctaagaggttcttatcacgtgggtggaaaaatagttcaaaaattggaccccagtttaaagccataacccaaggccaggcccacctttaagtct

SEQ ID NO: 141468 - DNA, 225 bp, Glycine max
  Clone ID: PAT_MRT3847_98758C.1
ggagacagggatttccatagctcgcaatacatcacacatgtctgagcacatccctgcgttaaaaaatgggagcaggttcttccatgggatctctcatcgacatccgtgggtgggaatgccgtgaagctgggcccatcagccccacaagtgggaaaggtgagcatgaggaaaaccgtcaccaaacaggtctcctcaggaaacccatggtatggcccataccgactc

SEQ ID NO: 141469 - DNA, 242 bp, Glycine max
  Clone ID: PAT_MRT3847_98759C.1
gtgaattttgaggagctgctacgtttttcaacattgagtaaggtgtatgtatcagacaagtatttgcatggaatcacattgttaattcgcttctagagatttcattcgttcatcttcggtatttaaaggcgcgccataatttctagttttgcagatacatttttctctggaaaaatctctgaatttcggaactctggactatctgctagattgtgcctgagtttgtacttgtggccatggtt

SEQ ID NO: 141470 - DNA, 183 bp, Glycine max
  unsure (1)..(183): unsure at all n locations
  Clone ID: PAT_MRT3847_9875C.1
caaatancctgagccagacangtacaggaacncagctncangncntanggtcatcagtgcccgtncgngcagcancagcangatacctnccagtnccaganttgcaagnaccgttgccacacaacaancnatcgaaaganngggtggganataaggaaggctcactggagaccgatccagttc

SEQ ID NO: 141471 - DNA, 320 bp, Glycine max
  Clone ID: PAT_MRT3847_98760C.1
cccacctttccgcccacgcttccgaaaggttttactttaataggcacattttggggccaagcggggggtaaaaaaattttttaggcttccttaattttaaaaggttccaaatttaaaggaagggcttttttctctaattagtcctatggcctgtcaaattgttttgggaagacgttttaccctggacaaggtctacaaccaaagtgggcagtaccaccaaaggggtttttccaaagggtggggtcggttttagagctgaactcaatttaccacttgtcataagcctaagaactgggtttttcctttttttgggggggttt

SEQ ID NO: 141472 - DNA, 476 bp, Glycine max
  Clone ID: PAT_MRT3847_98761C.1
cgcaaatgtgatgcacgcatcgcatcaggaatgcctaaagcgccatctgggtcgacacgagggaacactaatcgcagacgaacacttctcaacacactcactaactcactcactccaagccctagatgactgctccattctttcacatgccacagaagtctgtgatctacgcttatgtcgctcgaggaaccgacattctcactgaatacaccgagtacagtagcaatttcaatactatcgcttttcaatgcctccagaaattgcctactgccattatcacattcacctacaattgccatggccacaccttcaattatctcgatgacaacggttacacatactgtgtacttgctactgaatcagcaggaagacaagtgcctattgcatttttggagcgtattaacgatgattttgtgtcgaaatatgcagggggaaaggctttcacggatcctgccaatagacttaacaaggaattt

SEQ ID NO: 141473 - DNA, 672 bp, Glycine max
  unsure (1)..(672): unsure at all n locations
  Clone ID: PAT_MRT3847_98762C.1
atattacacttttattttgcaagaaaataaattatacaacttaaaaaataaaatccaaaaattaagcgttcatcaaaatatttcagcctactgcatacagactgctaccgtgggaaactgtacagtgccatccgggtatgtagtggtgcacattcaaaactgtacaggtcacgatgagaggctacaccttaggaactccagaccacacatagtgcagatgacaggaacgctctccaacagtgtttctctcataactgtgaccttgggacaacttgtgtcagcatcccagtcattcacacaaaaacagaagagccagctattgatatgatagcaaatctttctgtaaactagcaaatatttcacccagattaaacttgaaaatttgcccttggagcagagctaatgatatcatattcaatttaatgaagagttaaaaaaaataagaatgattaacagttcaccttttcggagactttaatatttctgcacaaagagtgagagctttcagtgagcccgctggtaaactcagggatcccttccaagaactgtgaaagtcggagacttcagaatttgattgangatccttataaattattagactgatgacggcctcacatttgtctacntgcgcgtncaggagtctcccctttccactgcatgcatctgttccct

SEQ ID NO: 141474 - DNA, 279 bp, Glycine max
  Clone ID: PAT_MRT3847_98763C.1
gtctaatcactctagctgatgcaaatttctactatttttcaatggcttctgcataggtcaaattgggatactttcatgctgggcttgatatgttcaccggcatactattccctacataaagcctttacaatctactgctacatctatcaatctatagctatcaactaccgtgatactgtaaagttcagaggattccgatctgttacctttggctcatatcaatccatgaatgatactatctgcggaatgaacaaccaatacctttactgattcaacatc

SEQ ID NO: 141475 - DNA, 299 bp, Glycine max
  Clone ID: PAT_MRT3847_98764C.1
atgtagttgttattttttttactctagcatcagcgtcaattctgggaaggggaccagcccgctctatcgctaacaaacgcgccggggagtggcattcaaaacgcctttttgttcggggaataaataacggttgggactcccaaaaaaaaccccggaacaaaaagccccctaaagaaagctgggggtttaacccaaaaaaggaactttagatggaagggggccccttgggaccacaccgaggggcattagagaaaagggctaaaagggtgaacgggggaaagtttttgtctaaaccgggc

SEQ ID NO: 141476 - DNA, 175 bp, Glycine max
  Clone ID: PAT_MRT3847_98765C.1
gtgatttgggggatgactgtgaaatgctatgggtaagtatttgctgggcgcgaccacgacacactctagactggaaaagtctttggtgaagctatatactagggcatggactgtgtccatttgatcgactactatactgctaacaatgctgtggttacttgtcatcactattgtc

SEQ ID NO: 141477 - DNA, 954 bp, Glycine max
  Clone ID: PAT_MRT3847_98766C.1
gcggcctccctgcattggcaagaagattccccattgggttccgccacaggcttcaaccccgctacgaatctcgatcaatctgggcctccctccattaagatggccacgaagattccacattgggttctgccacattcttcaacacagctacgaatccgcccaatctggtcatcctccattaagatggctgcagaagactacacttttgggccttacaagatacaccacactgaagtgttctactccaccaatctctcttacgccatggttaacctgcgtcctcttcttcctggtcatgtgctcatctgtccaaagcgtgaagttaagcgtttcggtgatctcactgctgatgagacttctgatttatggctcactgcacaaaaagttggtaggcagcttgagagctaccataaggcttcatcgcttactcttgctatccaagatgggccacaagcaggacagacagtaccccatgttcacattcatcttatccctcggaaaagtggtgattttgagaagaatgatgagatatatgatgcaatggatgagaaggagaaggaattgaaacaaaagcttgacttggacaaggagaggaaagacagaagccttgaagagatgagtcaagaggcagatgaatacagaaaacttttcttatagcatgtttgctaacagtagaaagtgaattctgtgtgcattgtgcgaccagattttctgagtgtagacaatcttaatgcacttccttgtagccacagaaaagtttattccgctgctttagactttataaattttaagttgcactggatcatacaagtcacacaaattatagtcttctggggaactttttattatttatggttacattgtactaaagtttcaaggaacaatgacaatttggttgaactaaaaacacttggttgtctctgtttattttagcctcagctttgcttggtagtg

SEQ ID NO: 141478 - DNA, 780 bp, Glycine max
  unsure (1)..(780): unsure at all n locations
  Clone ID: PAT_MRT3847_98767C.1
ggatgcaaacagtgttgcttccctgcattggcaagaagattccctattggtttctgccacagtcttcaacacagctacgaattcgatcaatctgggcctccctccattaagatggctgcagaaggctacacttttgggccttacaagatacaccacactgaagtgttctactccaccaatctctcttacgccatggttaacctgcgtcctcttctccctggtcatgtgctcatctgttcgaagcgcgaagttaagcgtttcgttgatctcactgctgatgagacttctgatttatggctcactgcacaaaaagttggtaagcagcttgagagctaccataaggcttcatcacttactcttgctatccaagatgggccccaagcaggacagatggtaccgcatgttcacattcatcttatccctcggaaaagtggtgattttgagaagaatgacgagatatatgatgcaatagatgagaaggagaaggaattgaaacaaaaacttgacttggacaaggagaggaaagacagaagccttgaagatatgagtcaagaggccgatgaatacagaaagcttttcttataagttataacatgtttgctaacagtagaaagtaaattctgtgtgcatcctgtgaccagattttctgagtctagacaatcttaatgcacttncttgtagccacagaaaagttaattcctctgctttagactttataaattttgagatgcactggatcatacaagtcacacaaattatagtcttctggggaacttatta

SEQ ID NO: 141479 - DNA, 1854 bp, Glycine max
  Clone ID: PAT_MRT3847_98768C.1
gcatgctgtgttgctggaagagttgatctggctcaagacatttatagggaacttaagcatttggaatcagtgggacagctaaaattagatgtctttacctacagcacaattataaaggtctttgcagatgtaaagttgtggcagatggctctaaaaatcaagcaagacatgctgtctgctggtgtttctcttaatattgttgcatggtcatcattaatcaatgcctgcgcacatgcagggcttgtagagcaggcaattcagttatttgaagaaatgcttttggcaggctgtgaacctaatacgcagtgttttaacatcattctaaatgcatgtgttgaagcttaccaatatgacagggcttttcgctttttccattcttggaagggaaaaaagatgttggggtcatctggtgaaggctacaatagcaatatagggcagggacacatgcatgatgttacttctattccaaatggcatttctaattcacacatcttgaattttgctgagaggttccctttcacaccaactacaacaacatacaatatcttgctgaaggcctgtggtactgattattaccatgcaaaagcattaatcaaagagatggaaacagtaggtctttcccctaatcagataagctggtcaattttgatagatatatgtggagcatcatcaaatgtggagggtgccattgagatttgaaaaccatgggtgatgctggaattaaacctgatgttattgcatatacaacagccattaaggtttgtgttgaaagtaagaattttatgcaagcattaacattatatgaagaaatgaaatgctaccagatacgtccaaattgggtgacatataacacacttctgaaggcacgcagtaaatatggcttcctacatgaggtgcaacaatgcctggctatataccaggatatgcgaaaggcagggtacaaacccaatgactactatctagaagaactgattgaggagtggtgtgaaggagttatacaaaataacagagagaagcaaggagaattttcttccagcaataaatctgaatcagagagaccccaaagtttacttcttgaaaaaattgcagctcaccttctaaagagggtggctgatatcctagctattgatgttcaagggctcacaaaggttgaagctcgtttggttgttcttgcagttcttcgaatgatcaaagagaattacggtttagggctgattttgcatggtcttttgtacacataagcattcatattcatatgagcttagaaaggaagcaggtggaaacactaaaaaaagcagaatatccatgtgactaaacataactcggtttttgtgatacaggacattctgtaaatgatgatatcttgatcatcataggagctactaaagtagacgaaaatccatccaaacacatattagaagtgcaagaggcaataataaaacttcttaggaatgagttggggcttgaagtttttccagccaaaaccagattagcactaagtgacacagcaaatttagagtaccccaacttttctaatctgagcatagaagcacaacctggagagaatgcattggggtttcagacaaggaggcctggagttctagtaaggttgaaggtcaccaaaaaatcattataccgttggttgcacaggaagtaagcgttaaatagttctattataacttacagaaattttgtacaaatattagataagatatgccattttttttctcccaaccctgtatatattgcatttgggtatagctgcctatgtatctgtaataaaataggtgtaacataatgaatgatacctagtaccgtggaatcaaatcattttcttaattgaacagattcact

SEQ ID NO: 141480 - DNA, 174 bp, Glycine max
  Clone ID: PAT_MRT3847_98769C.1
ttttcgttttggcgaacggggaaaagaggcaggcaaaaggaaagaccgggcctaaaagcaacaagtatttgtaacaaacagcctctgaacagagcactactatgcttggaacgagacaaaatgggaaccacattcctgctaagtgatgttcacaatctaggtgagtggttccat

SEQ ID NO: 141481 - DNA, 347 bp, Glycine max
  Clone ID: PAT_MRT3847_9876C.1
ggctcgaggctcacagaccgtgcatgctggcttttgtatatgcatgcaatgactcttcccggggagacaaccgagatccccggagcggcttctctgcaataccatggatatttctttatgaactgcttacacattgagaaacaaggggatgctacggcgcctggttcataactgaatataacaccctatgaaaaaaacgaacactgcgatgtggttaggaagatccctagagatacctatgatgaacagagcgctgtggaggataaatagctccccacgatactaactagtgtatgatgaacctgagccaagaccgaaagaaactactggattgggcagacaccact

SEQ ID NO: 141482 - DNA, 543 bp, Glycine max
  Clone ID: PAT_MRT3847_98770C.1
taatctctctgtttttgatcaatcttctctgatttccaatcatggcggtcgacccagcatttgttggcgcaggtagagcgcctggaatggagctttggagaattgagaacaagagaccagtcaagcagcctcagattgatggcaagctgcacactggtgactcctacatcctacttgttaccaagcaacccagcggggctctggaatggaacatccatttctggattggatcagagtcttctcaagacgagtatggtattgctgcgtacaaaaccgtggagctcgatgagtcgctgggaggaggtccagtgcagtatcgtgaagttcaaggcagcgaatctcagctgttcttgtcgtacttcaagagtattggcctggaatacgtcccgggtggtgttgcttctggtttcgcgcatgtggagcgcgattcctaccgcactcgtctgttgcattgcaagggcaagcgcaccgtgcgtgtcaatgaggtggaatgccataaccgatcccttgacacgggagatgtgtcattctgatctgggatga

SEQ ID NO: 141483 - DNA, 961 bp, Glycine max
  Clone ID: PAT_MRT3847_98771C.1
ttaggaaccccgtcgcccagagtttcaccgagttctacgataaatgggtttggaagctcgaggagatcctccaccagctccttgaggtgtccaagcagagaacccaggtggtgaaaactgaacaagagctgcaggttttgatttccaaggtcacatcccatttgaaggaatattacactgtcaagtgggcttcggctcatgaagacgttctcgtgttcttctcgccaacgtggctgagtcctttggagaatgcttatttgtggatgacggggtggaagccatccatggtgttgaagcttctggaaaccctgaagaagcaggcggcgagtggtggtgattttgtgatgacggaggagcaggcgaggaagatcgaggagctgaggaagaggacgaggatggaggaggagaaggtggagagggagatggagaggcagcaggtggccatggctgaccgcaagatggtggagctggtcaagctcaccactcgagcaaggaacggtggtggcggtggtggtgatgcggtggcggaagtggcgttgaaaggggttcttgcggggttggagagggtcatgaaggcttcggattgcgtgaggctcaagacactcaaaggggtgttggatgtgcttagtccaatgcagtgtgtggacttcttggctgccaatactgctatgcagctgagactcaggcaatgggggaagaagaagagggacatgcctgcaggctccacactcaatgccaatcatcataacaactaatccatctgtgattcaactagctagctagccaaaaacaaaaacaaaaaaaactgtacatcttttaattaggctaagtaagttgttcagtacctcaatatcattagcacaaaattaagaagttgtttagtgtggtttatgcgatggtactagctagtagtactcttgtagttgcaatgtaagaaaaggaaagaaatagtagatgaatc

SEQ ID NO: 141484 - DNA, 373 bp, Glycine max
  Clone ID: PAT_MRT3847_98772C.1
tccggggttcgccgcgacccactccacgctttgcgattgggtaggctgctttgcttgtagagatgcttgcttgctctatgcagaaggaagggtctttgcttgcttttggagatgcctctgctgtgagagctgattaaccctaacgtcttggaaaccagcgagaaggggatccctgaggacatatggactggtggatcccgaacggacctgaggagcggagggaggactattccaagaccaggcagtgacgcttcagagcttgccaggaggaacgatgatggctgcagcacaggtctcgcttctggcgcagaccgtgctgtgatgagatacccacatgccattgtgaggggtccattcagcaggggtaacaatg

SEQ ID NO: 141485 - DNA, 247 bp, Glycine max
  Clone ID: PAT_MRT3847_98773C.1
tttttgtttttttttatgttttttgttttttgggccgagagcaagagaaatgtttttttagcccgggcccgattcaagggccgggcccgtcctaaaaggaaaataagaggaacccttttccatcctgaaaagaactttagctacaaaaaaggggatgggccttgcttccacacaacaaaaaattggggcctcgcttttataactaaactagaggcgaacccgagtccaaacttacactgcctgggat

SEQ ID NO: 141486 - DNA, 395 bp, Glycine max
  Clone ID: PAT_MRT3847_98774C.1
ttataatatattgctaggttatactcagctatggtgacaaactcccgggtgagtcatctattaaagtggaggctctccaacgtctcctatacaatgtccatatttctaacaagaacacaaagcccacatactcacttgtacgatgttaactcgtaaagagggaagacaccaatgtgtctgagatagcgattacgtatgactataatatcatttgtggcagatcctctcaataggctaaaactgagatcataatatctggatgtaactgttctttctgcagctctataggtggaactgcaatcgtgatattcacgcgtacctcaactaaagattaactccacttccatttcgttaccaaacctgaacttgcactttaaggattcacaggaccacga

SEQ ID NO: 141487 - DNA, 212 bp, Glycine max
  Clone ID: PAT_MRT3847_98775C.1
gtcagtatgtaagtgtttcaccttcgatccagctccttaacattgtaaacacaacttcacgggggttctctctaaactggggtctacaacgccttcactatgaaactctgttgcttctgcctataaagcttgtgtggctttggaaacgagcgacgtatctacttatttagtacccagttagcagccattgctactcttgcagcgaataggaa

SEQ ID NO: 141488 - DNA, 508 bp, Glycine max
  unsure (1)..(508): unsure at all n locations
  Clone ID: PAT_MRT3847_98776C.1
gtgtcatgatgatttccgagagacatacatnggtcgacatctcacatatatatactggactaggctgtacgatatttattcagcactgattacatgatacttaaagcacaggccattggctcggaggaccgggcacttcgtaagtgaaactagacctggcttataaggcctaacccggatgaggcatttgtaactattctaaaccatgatataaacggctgcagaatctctggagctacatgcctcccccttgcgggcaccgacattttgagctcgcttatgtctgtatgagtgcccggcataactggcgctataaagtcagtgagtttgtgcttctgcatgtgctgacaggggtaatctcgtttaaggaagctaatagcatatccctgaacaggctttctcctgagtacttggaaagcctcggctctcattgagagaaatctgagaaattttttggtcaatcagcatagaaggtgatcagaccgctgcaccctgatacttattcgca

SEQ ID NO: 141489 - DNA, 257 bp, Glycine max
  Clone ID: PAT_MRT3847_98777C.1
taggctctctatttaaacaacttgttttttatattctgttctgtttcacttttgcgaggggcatatcctggaattcatgacctgcgcttcttccaattaatacataaagcttctgctaacattgcaactttagtttcagattattttccttatcttgaaaagggacaaatccctcccaacgtatcctatcttaatgtgaaaaccatataattctactatgcatttaaaccttattgtctaattattctaatttatta

SEQ ID NO: 141490 - DNA, 211 bp, Glycine max
  Clone ID: PAT_MRT3847_98778C.1
aacggagacgtccggggagagttgtgagttatcttgtcatttattataggcggtatttgatgaggtacaggatgttcgtgtagcagtgtgtggttgtttgttccgttgtcatttgattcaatgatttcagttaggttttctgttctgtgagtgagatcatcagttatagatagagttatacaaagtcttgtactagtcttaacaatgtgaa

SEQ ID NO: 141491 - DNA, 414 bp, Glycine max
  Clone ID: PAT_MRT3847_98779C.1
cggggacacaacaactgaactggtaatcgaaggtccattatgcagcgctgatttcatagggactgtgaaggtgcgtctggctggtataggagaccacttattatctattgcagcagaccagcccttgcgagctgctgctacatctacgtttgtagttagagaccttctcaaatctgcggcctggcatcagccaggggggctatgagcctacgcttacgacctggattgagtacagccaagaccttaccccctgtagatgatcaggtctacatgaagctggggctgaagttgcccgtacggacttcgggaagagatgggatcgacagtcccacgcatattacagcttattcagactaactgatacaggagacaagcctgctgacattatccactgaccggagcaaggtgatctaa

SEQ ID NO: 141492 - DNA, 647 bp, Glycine max
  unsure (1)..(647): unsure at all n locations
  Clone ID: PAT_MRT3847_9877C.1
gaagattatggtggttgcaatgatgcttatatttcttctaatttctacgcaaatggagagctttgagcccgatgctgcagattgcttggatggttgcactactgcctgtgttcaaagcgactcgaggcttcaagcacggtgtgatcgcaagtgcagcattagatgcggtccaggtaaccaacctaatcccaaatatttcttcttcatacttacaatgctatatatcgatatttcatggatggataaaaaaaaagaaaaagacaaaatgatattttgtcttttgacctagtatatgtgtttgtttgaacaattgaactaattcaatgatgtgttgtttaaattgattaacataaatgaaatataacatatcaataggaaaacaatcttaagctaataatttaaaatgaaataaaatagaatggatttcattattttgaatatcttttcatctaactttttcttaaatttaaaagcatttaaacagaattattttaatttttatttgaaatttgttgaattatactnttttatccattggaacctaaagggctaaacgcctaaacccactaataatcatattatataaaagcaccaggggtacanaaagcaataacataagagaaaaagcanagaacccgagagctatg

SEQ ID NO: 141493 - DNA, 113 bp, Glycine max
  Clone ID: PAT_MRT3847_98780C.1
gaataactaaaacattatagattcccagcttagtatatccaggcattcagacatttataatctatactttaacgagaatttaatccagaaacacatttggactttaggggccc

SEQ ID NO: 141494 - DNA, 367 bp, Glycine max
  Clone ID: PAT_MRT3847_98781C.1
taacagtggttttttttgattgggaatgagggggggggacagatgcgaatttggggacttggacatattttttgttacatacccaaaactggggtacttgccataccttcggctgtagacgatgacctggattatcaacaatacaagcaataacgggaaatggaattttgtttcaacacttaagggcggcctcgatgaaaatatttgaatgggaactttagggggggggaataaaaataggagatggaggcctttttaaattaggtgtctagaaagggtctatggctgaaaggtgataataatcaccaaggcggggggatacttcgaattgatataacgttattcaaattaaatttggagccgctct

SEQ ID NO: 141495 - DNA, 454 bp, Glycine max
  Clone ID: PAT_MRT3847_98782C.1
atagcatccgtgtgacatacagtcaatgtatgccaatggctctacaaccctaacccgagctgtaagcccctgtgcgccctcttgacttccccctctctcgaaccctaatacatctacctacgccttcatgacctcgagggacaagctggacaacgaccggcatgtcgccaagctgggctttgacatcatcgaggcactgcttcacgccgcctccatgaactactgcaagatcgtgaaaatgatcgtccaagggtaggccctgccggacacgacggctacggtcccgctatctgcggactctcccactgcaacgagatcgacatttgaactgcctgcgaggccgataagtactccaagaggtccaggattcacacccatatcgccagcaacgcccttcacatggagtacacgttgagaatgtccaaagacaaagtcgtcaacattacccgcaata

SEQ ID NO: 141496 - DNA, 283 bp, Glycine max
  Clone ID: PAT_MRT3847_98783C.1
aaaccaacaaaacccctctttttactaggaacgggatccatggtagggccgggataaaaaaagggagataaaacctaaaaagagattttttttcttcacccttacaaatggaaaataaatcggtctttatcccggatccctattttcggttccaaattggaattgggccttctattggtttggggaaaaaaaaaactggggtgggttaaagatcctagggagggggcaaaccccgcctggcttaggggctttccgccccccttttttttgggggggggggggg

SEQ ID NO: 141497 - DNA, 1052 bp, Glycine max
  Clone ID: PAT_MRT3847_98784C.1
ccacgcgtccgcggacgcgtggggtgaacatggggacgagggaggaggtagtggaaatagagaggctggaggagagtttgttggagaagaacgagcgagaagacgaggaagcggtgctttatgcggcgtcgtttcgggaaatggaagagggtttcgtcaagtaccaaacggtgcagtgggtgctttactcggtgttgctgattttggcgtggggcattggaattctgatgctgctttatcttcctgtgagaaggtttatacttaggaaggatgttcgttccagaacgctctatctcactccgaatgccattgtttacaaggttacgaggccggtatcgtttccgtgctttggagtgctgaagaaggagaaacacgttttgctgcactctgtggcagatgttgtgattgaacaaggatacttgcaatcacttttcggtgtatattctcttagaattgaaaatgttggagttagaaggccacccagtgatgatgttaaaatccagggcgttgcaaatccaaatgcttttaggaaggctgttatgatgcgtctatcgaacatgagaaatgagattttgtcaagacaggtctctacattagaagatgttccacatcatctgatgatgtctccatcaatgtcattgaaacatgatcctaatccttctggggagctgctactaatgcagaaactagaggaagttggaagctctgtcaagagaattcaatctttatttgaggagcaacaatctcaaataacagagtccatagattgagggaatatggtagataataatcaatatctcttccagggcagttctgattaggtttacttggttaacagcccctagaactagaagtgtttgttgccaccacctgcaataatgtccccgttagtttgtattctatattgctcaagtgcgcctcgtatttctgtttttatagaaaaacttgtacatcttgattgttattgtggcttgaacgtatctatcttgacttgacataaatacttttctatttttttgacgtaaaaaaaaaaaaaaaaaaccaccccccag

SEQ ID NO: 141498 - DNA, 238 bp, Glycine max
  Clone ID: PAT_MRT3847_98785C.1
tggtttcttctttctttgtattgtagcaaaaaagtccaatcaatttatgtatgttttgaaaaccgttattggacattttacggcggtgcttgcacagaatgaagttctttcggttacccgcttcaatatgacagagagagatgacttcaccacagctagcagagccattgcttcgtttaaccacaactacctttaacccaggaattttcaccaccgctggttttccagagaccccaag

SEQ ID NO: 141499 - DNA, 609 bp, Glycine max
  unsure (1)..(609): unsure at all n locations
  Clone ID: PAT_MRT3847_98786C.1
atgggggctgccattgccattttaacatttgcttcctcttcctctcagacttctccctcgtgccacccctactacctccgtccagagccgccgtgccacgcctccgctgcgcgccaccaccggcgtcgtccagcgcgtgcatcccatgtgaaacctggtcaagtcatccatagcaaatcatattgctattaatagtgatccaaaaaaaatagaaaccccttcaaaattggcatagaagtagaagcattctttttccttgacatgattgattgaacaatgatgtgtgagtttttgtaaattttttaataatatctttgatttatatgaaccaaaaaaaatattccacctctctctcatttacacaatgaccttggtcgtgcacgaccggggtcaatgtagaaattcttaaatttccattatactgttgataaattattaataatagtgttatcgaatttctgtgaggcaacacaacaacacaagacaccgacgaaagggtctcattctcatagtcgaaccaacattagtttttctgttcggcagtagaaagactctcgctggnggcaagggagaatgatggccaaaggatctcatcaggactcgccatca

SEQ ID NO: 141500 - DNA, 474 bp, Glycine max
  Clone ID: PAT_MRT3847_98787C.1
tgaatcagtttttctacgagacagggtgagatattttaacattgagacttattgttatttcaccacctctctcatcccctcttcctttgagccaaagcaaaagtatgaaaaataaaatgaggtatttaatttgggtactataacaaagtaataactttcatttgctcaagtcacatttttaattctgatagctttgtaggaagtacctatttctgtttaaatgttttattcgagaatacatgctacaggacatcccttcattggtgcatgatggtcagtacttgcagtctgagttatttcctcgacctcaatttggaattactctttcaacttaattgcttattctaatgatgtgcagtttatatacttccattgctgatataatataataatagcctctatagttgcatcggtgagttatttatataagcacttgagcagaggaaagagcaataagttcaccaaatcactacg

SEQ ID NO: 141501 - DNA, 233 bp, Glycine max
  Clone ID: PAT_MRT3847_98788C.1
accttcttattttaaaaaaattatcattttgtttcaatctttaattttgctaatatttaattcttacattttgattaattaaatcaatttaaagatcccctcaaatgtttttccatcatcattcatagtcactttccatgttttccatagccttcatcgctcttggtctctgcatccaaaagagaattagggggaaaactcatgcctaatttttagtgggttacctgatgcgt

SEQ ID NO: 141502 - DNA, 363 bp, Glycine max
  Clone ID: PAT_MRT3847_98789C.1
ctcgacccgtctagtctccagtacggatgccctcagacgacctatgggtgcgtggattctcaattaaggggggggtccttccattaaaaagcgggcccccactagctagctcgttgcccccccaaactatctcgctccgctccctgtcttccctccacctatccctatagtcattcttcttatagctcggcgtagtcatcgtcatagccgtctacagcctgaaacagcttctccccacaactccacacaacatactcaccgttaccataaaacatcaagcctgctgcgcctattgagagacctaacccacatttattgtgtagcgctcacttgcctttttactgacaggaaacctgactttcc

SEQ ID NO: 141503 - DNA, 824 bp, Glycine max
  Clone ID: PAT_MRT3847_9878C.1
agttcgtattcggctcgagccaccctcaccattactatcctcaccaccccaaaaaaaaacaaacccctcgtttccactctcctctcctcccacccttcgattcaaaccctaatcctccccttcccctctcacccttctctccctcccggcatcgaaaacgccaaagacatgcccctctccattcgccccatcatgctctctctctccaacctccaccaacctctcacgaactggttccgctcccacccttcccctccacgcttcatcatctccgacatgttctgcggatggacccaacccctcgcttccgagctcggaattcaaagactcgtcttctccccctccggcgcctttgcgtactccaccatgtgctttctctggaaggaaactccaaaacgcgaaaacgaacaagaccaaaacgaggtcgtttcgtttcacaggcttcctgattccccggaatacccctggtggcaagtgtctccgttgttccgcagctacctggagggagatttggattcggagaagttgagggattggtttctcggaaacattgctagctggggacttgttctgaattcattcgcggagttggagaagccttattttgagtttctgagaaaggaattggggcacgatcgtgtgtgggcggttggaccgttgctccctgaggacgcgaaagaggagcgaggagggtcgagttcggtgtccgtgaacgacgtcgtttcttggttggatgaaaaggaagatttaaaagtggtgtatgtttgtttcgggagcatggctattctgtccaaggatcacacggaggcgattcaaacagcgtt

SEQ ID NO: 141504 - DNA, 272 bp, Glycine max
  unsure (1)..(272): unsure at all n locations
  Clone ID: PAT_MRT3847_98790C.1
gctttgaaaaagacagagggggaagagnggtggactnaggaaggaagacnnaccccgcccagaacgagaacgagccccaagagagcgangggcgggagggaaagaaacgccccgacagcaaaaggcgccgaacaaagcgaaacagaaggagcaccaaaagaccaaagggaagcggagaaaccgacagcgcggacacaggcgcggcggaggaggagaccggagcaggngacgccaagaggaaagcacaggccgacgaggcgaagacgacggcc

SEQ ID NO: 141505 - DNA, 326 bp, Glycine max
  unsure (1)..(326): unsure at all n locations
  Clone ID: PAT_MRT3847_98791C.1
ggaanncggctggaggtagacggggaatagaattgtgttcatctttgttagaaaagaacgacacacactataagatggtgaaaccgaaaatagatgaacatgaagaaagctgaacatcagacacactaatatgatgctacgaacactgatcaatgtccttcttcaacaatcatacgaaaagagttttgaccctggagatcatatagcttctgatgatcaacaacaattttctaagaaagaccacagtgatgtcctacttgcctgaagatctgctggaaaagagagctactggaagttctgtcccacacctgatatatctacatcta

SEQ ID NO: 141506 - DNA, 1122 bp, Glycine max
  Clone ID: PAT_MRT3847_98792C.1
gttttgttctggtcttttcgtttttttttcttttgccctagtttccctccccccacccgcaactctctcctctgctgatatatatatatatatatatatggtctcgtgagtcatccgatcatactttccctttcattttatagtacatataatcatataccatgtttggaaatggaaaaaaaataaagaaaatcagaagcctaaaattcaaattttacaaaagttatagtaaagacaaatacagtaattgacatcaaaagacagtagctgggaacaagtcctcaattcttggtgctggctatttgtaaataaaaagagaagccatatccacaaaagcctgatatccatgactcctgcttctagtgagagaagttcagtaatcttcattgttctatgggcagcatgagcaggcaggcacaaaaccagtatagtactggtcaattcgattatttatctttttatataagtttccactcagggagatccttacgtggcgtagcgtaacagagaatagaacgcccgagaacggagagagaggaaacgacgccagcgacgtaaaacaccataaccaatccgagaacccacggcatcagcatgaacccgatgaagaaagtcaccgatccacacagcatcagcgccaccgaaatccctagcagtagcgacgcgaaccccgccggagtaatctgcgcccccgccggcgaacgcctcgccggaggctccggcacgatcgacggtgaccggagaaggttgaagaccagagccgagagctcacagaaaaccctagattgctgatcttcctgtcctctcatggtgtctttgtatcagaggaagaagaaaaagatgtaacaataataataatagggagaggaataggatagaaaaggaaggagatgaaaattaaacgtgttgttgttttgaggaaatcaggaaatggaagtatttgcagaaagaagaaagaaagatgtaaatgaattatgtttgcatttggggattcgcgttgcaagtaatgacacgttgtcgttttgcttagattaaagacgcagaagcagaatagaagccttgaagaaaaagtgttgcgtgacgttaggattttggttttgagggatggagatgtgagtggtt

SEQ ID NO: 141507 - DNA, 742 bp, Glycine max
  Clone ID: PAT_MRT3847_98793C.1
tttcaatccaactccaactcactcagatcatcaatcatgctatattgtcatcagtcatcttaattaccattaagggttggttagatcattcacattcaccctttgttcttttggtctaccctgtaaatggaggaggagaaacagagaggcaaagggcacagactattgctgatgccatcaccattacaaggccacataacaccatttctccacctcggtgacatcctcttctcaaagggcttctccatcaccattctccacaccatcttcaactccccaaacccttcttcctaccctcacttcaccttccacgccatccccgacggcttatcagaaacagaagcttcaacactcgacgccgtgctcctcaccgacctcatcaacatcagatgcaagcaccctttgaaggaatggttggcttcttcggtgctgtctcatcaggaacctgtttcttgcttcatttccgatgctgcacttcacttcactcaacctgtttgtgacgagttgaagctcccgcgccttgtgctcagaactggtggagcctcgtcttttcttgtttttgcctcgtttccacttcttagagaaaagggttacctccccgtacaagaatctagattggatgagcctgtggtggatctcccaccactcaaggtgaaagatcttccctaagtttcagtcgcaggatcctgaggcattctataaactagtttgtcgctttgttgaggaatgcaaggcatcttca

SEQ ID NO: 141508 - DNA, 143 bp, Glycine max
  Clone ID: PAT_MRT3847_98794C.1
agaaaattctctttctctggtgcggtgtccaagaacggccccgcccaagggagggagctcgtggagcttgttgaagggagaggacgggaagaatagttaaatcgtaagaaaaatagatagactaaactaggaagggacacgtt

SEQ ID NO: 141509 - DNA, 320 bp, Glycine max
  Clone ID: PAT_MRT3847_98795C.1
tttttgttttattcatttttttttattttgttttaaccaaattcaattttacaaaaaaatgagggtgcaacaccaagggaacagatgccgacccagccagataatttaaaggagcggacccccgaaatctaaaagcaacggagcagagacaggagcggcgaccaacatatgagggggggggcgatcctgacttttgagggagggggaaaactacaagggcggggcgggaacccaaaaagaaagggcagttgctgaagggtcaaaggaaccacgacccttgtgaaataaaaaccccggggggtggggggggtggcctccac

SEQ ID NO: 141510 - DNA, 362 bp, Glycine max
  Clone ID: PAT_MRT3847_98796C.1
gcaccagatccgttacaagcaggttgttcctgcttattttctggagaaatgtcaagacatctttaaaaaattgaactgagaaatgagttatttgtctaaaaaaaaaaaaaaaaaaaaaaaaaaaaaaaaaaaaaaaaaaaaaaaaaaaaaaaaaaaaaaaaaaaaaaaaaaaaaaacctcgggggggggcccggcccccatttccccttatagggattttttttaccccccctcattggccgtgttttaacaacttgtgaatgggaaaaaccttggctttcccaaatttaatcccttggcacaaattccccttttccccacttggcttattaacaaaaaggccccccccaatcccctttcca

SEQ ID NO: 141511 - DNA, 263 bp, Glycine max
  Clone ID: PAT_MRT3847_98797C.1
acggctgcgagaagacgacagaagggtccacatgcattctcataaagcaattattgatgtatcatttgaaatgactccacacgatttctaacaggacatgtggtaacgctactagtgaagaaacattggccatgtccgcaaaatctacacgtgacgtgattatcaaacgaagcttcattaattcatagcttacgtagcatgggttcagcctggaaggaagacaagcccaacttggcattttataaaggatttgatgcctatga

SEQ ID NO: 141512 - DNA, 352 bp, Glycine max
  Clone ID: PAT_MRT3847_98798C.1
cccacgcgtccgttctaacaaattaaaaattttaaaaaaaaaaaaaaaaaaaaggtaaacgtgaaaatataaaaattgaaaaaaaaaaaaaaaaaaaaataaaacttaatataaaaaaaaacggttcgcccttttaaattatccaattttacttcccctttcttccaacttattaccttttttttggtgtcacttaaattaaatttattggccgtcattttacaactttaggacttgaaaacccttgcctttccccaacttattccctttgcacttcatccccttttaaccatttgttgttttacctaaaagccctttaccaatctcctttcccaacatttacccaccttta

SEQ ID NO: 141513 - DNA, 718 bp, Glycine max
  Clone ID: PAT_MRT3847_98799C.1
cagggacatcctgaaccggtgagctatatttgtgggatgggaatggtgatgccttggcatctgtgagtcctaatttggtgaaggtttggagtttgacctcaggaggagaatgcattcatgagttcagctccactgggagccaattgcattcctgtgtttttcatccaagttattcaactttgttggtgattggaggaagttcgtccttagagttatggaacatgactacgataacaaaagcttgacagttcctgcacatgaaaatgtaatttctgctttggctcagtcatctgtcactggaatggttgcctctgcaagttatgacaactatgtaaagctgtggaaataaaattcctgatttaggttctaacatcacatatattcgttgtcagtagtactttatctaaaagagttcagagagaggtcttgaaagcaaaaagggggtctccaaacttggttttattttttattttatatttcattgtggaaatgaggtttgaatcctatccaaacccctcatcattagcttaatcttagttggtttctcccaccgttgatgttgcaataaggtatactagacttctagtacataaatataaatacaattttgcttttagaatcctaggcactgtcaacttagacattgcaccaatctgcaatgcaatttttatttatatggttaatatattttatttggattgtaaaagggcggcccgtt

SEQ ID NO: 141514 - DNA, 439 bp, Glycine max
  Clone ID: PAT_MRT3847_9879C.1
gaagaaactatgaaggagatacacgtgtgctagatcaagggaacgtgtaattgttctatacaatgacatctggagaggatgtggcttatctggatccaacttgatagtatatgcatgcgacccatgacagacgtccgaatggtatttactatgtgtggacgctgatgataatatgaccaagtgattgtctgactaacatgggtttacagacactggaactctgacttggaagttacagaatggaaggagagacatggaaaagatcactgacttacataaaggcgtgcactaaatctaattgaggctggcaaggcctatgacgaccagacatatttaaaagcttggtggagaagaaatttgctgctttggccagtggcagcaccccagatgttatgtatggcagcacctttagggtagaagtactttatgtgatcacacc

SEQ ID NO: 141515 - DNA, 246 bp, Glycine max
  Clone ID: PAT_MRT3847_987C.1
gaggtcgagtttcacagcagcaatggtgcgtttcggatccctcttctatcgtctctgtagcatactttgttattttgcagaatctgaattttagttatccattttttattcaagctatgttcccatgttttgcattcatatagaatttgagcgttaagtttttttggtagttttaatggaaggaaaggttctcacttatggtggggttttgtttcttgctgttacttccatgagtgccccttttag

SEQ ID NO: 141516 - DNA, 300 bp, Glycine max
  unsure (1)..(300): unsure at all n locations
  Clone ID: PAT_MRT3847_98800C.1
gnnttacncaactctctcctncccctcgcgnccacgtctgtnctcanttatcanggctcnnaattagcctcacaanaaatctttgtaaganatcttcacacnctattttngcatcanttacgctgcctagaccgnntcttcagatttgtggtagaccttcanacattgatttgtacgtcaacccgantctcttctggagcacatagagcannaatatctgctgaanctggaagacaagattgggantttggaagattgttaaaacatgtncttcgncaatgggttcccatctcctgctag

SEQ ID NO: 141517 - DNA, 732 bp, Glycine max
  Clone ID: PAT_MRT3847_98801C.1
tccgcccacgcgtccggacagaaggggggtgatgttccttgtttttgtttctggtcagttttgtgatgacatcagctaagtggcggcgaatttttggttgggtgcacaaagagtagccacttgggtgatttagactccttgctccgctacttcaccaagttaaataaactctgcatcccttaaatagtgtgttaccttacccgtatccatcacaggaagaggctggatagtttctctttctctctccatggatcttcaggatttccttatccgtgctcgggtcttgaggctttacagacaagcattgagaattgctggtcgagccccttcttccgctaaagctgaactgaggcagacaattaggcaagagatggaaaataatagaaactgcaatgacaagcaaaggatccgtttcttgattagtgagggattggataaactgaaacgactggatgaaatgctagatatgcaaggttatcgttgatggattgaatacgtatcggtaggtaataaaatatcttccccttgttagaagaggagtagaaagtcaaaatagttcatgaaggatatggcgtcagtaaaattatgatttaattttttaaagtctccgttgattaatgacttggctcgatgattatccctttccagagagattcttcagtgaattacactatgggtgatgtaaaatatcttttgatgcagtacttatagattcttatgtgttattactta

SEQ ID NO: 141518 - DNA, 258 bp, Glycine max
  Clone ID: PAT_MRT3847_98802C.1
cataaatgtgggaacagctgcctgaaatcttcaggccccaccaaaagcaacccccaatcagctaccatatctacaccttttagattcagaagtgaagaaagagcagttaaacgacaaagagttcttgcagaggatggatgaaactaaatccaaggaagaagagaaagttaagttgcaacggactctcaagggtaaaacagagcatgatcacaagaagctgcggcagcgcagtggctctatatccaaactaaacgaaga

SEQ ID NO: 141519 - DNA, 173 bp, Glycine max
  Clone ID: PAT_MRT3847_98803C.1
cgctaaacctagaagtagtcacctgacaagtgagagttctaaagtaaggcgatcagagatagcaacccaagtcaccttttacatgatcccagcgctgcttcttgcctccaagaacagcataagtacctcccttctggtcggcgccgtgttccatcaagtatacatgttccaca

SEQ ID NO: 141520 - DNA, 481 bp, Glycine max
  Clone ID: PAT_MRT3847_98804C.1
aaaacaagagggtttccaacccttattaaaaaaaaattttccgacctgcctaaacccaggggaggggggcaaaaatttccttattaaatcatagggggaagaagggggctaggccccttcattgcaaaaaccccccacccctaagcatggcccctatagcttccaagggaaaaggggggccccatctttaacttagggaaaaaaaaagagggcattgaaaaggggggagggccataccgaaaaagaggatgccaggccaaactgaaggccccaaagctcaaaagatcctttaacaaaggcaaagaatccccctttcaaggacaatgttttgttcaccaagccatttttaacaaaggggtaagttaacaggtttccaagggaaacattcaaaaattccttctcacagggggggcccaactcaacaaaaggggcatccccatgctggggcttcacctttgcctttgcaggcaagccaattttg

SEQ ID NO: 141521 - DNA, 1376 bp, Glycine max
  Clone ID: PAT_MRT3847_98805C.1
aaggggaataaaatttattgtttaaattagataacaatgaatgtacagaaagatatcctggtttacacaccctatttaccatgaaggcacctatgattcaagacacatcaagcaagatgcactccactcagacatttggaattagaaatcccaatcccaagaacacaatgaagaaaactgaagattttatacacttccaataccagtaaacaagaattcaatacctgtaagagtacaatgagcagtgccctataaggaatacttgggatgaatcgtgtgaatgcaaaatggatatagagttggattacagagaaaccttgttttggtacttgcaatcaataattatgtgttggctagacctgtactgcaaattttagaatgaaagaaagggtttaactatacttcattgttcactttgttgctggaatgcaacttggctgataaatcagtaggtgttgttttctattcatcatctcttatgattttttgaatgaaaactagctcatctgctctccaatcaaatcaagccccacaaggaggaaggtcaccccttggaaaagtagaaagtagaagtgaactccttgtgcagataacagactcctgacagaagcggtgagaaggaggaatgccaaagtcagctcttttgtatatatcttattagatttcttaacttttgctggagctgcttctttgtgttccttcaattggtttgactcaataagctcactgtcagaagctcctctatgaatcttttgttctattgacttggcttccctttctgcagcagccagtaaatcagactctgatgacctgccagctttcttggtgacaacccattcataagagctgcccaattggaagagaccagagaccattgcattgaatttggtgacggacatggtgttttcgaaaaggaggtagggaacaatgaaaggaaaggattttggagaaggaagagcattaaggagtgacataaatacaggcacatagcagatcacccacaaaggaagctctgcctctggtacaaacatggttagaggaagaattatgcaaaataaggtgaaggagtaaaagggaaggatcagtttcctcaacagaaaaaatagcagtattaagtttgctttcttccatggagacaccttagatctcacaattgctggaagagacaacctaaaaagttgcataggacctgaatgccagcggtgttgctgcttcctataagcttcatacgactcaggaacttcacaaggtacctttacatcatttaggaagataaatttccaaccattcagatgagctcggacagcaatgtccatatcttctacagttgtcctctctaaccatcccccggactcttccagggccttgattctcgt

SEQ ID NO: 141522 - DNA, 215 bp, Glycine max
  Clone ID: PAT_MRT3847_98806C.1
ttcagccccaatcgttgatttgaatgcttcctcacgtcgggaataattttctcctggggcggaagatcggaagtggctcctttggtgaaatctatttaagcactgataatcagacttatgaagaggatgctcttaaacttgtaaatgacaagacatattccccaaaattgttgcatttgtgcaagttgaacagatattcttcatggaggaactgg

SEQ ID NO: 141523 - DNA, 491 bp, Glycine max
  Clone ID: PAT_MRT3847_98807C.1
ttacttgagctcggaattcggctcgaggttactgcactgactcctgtgctcacaaatcgcatgcattgtcaaggccatgtggcggctgctctaacgagaggcggcgtggatatcactggaccttacgcgcatactattaatgattatgggacaactgacaccctgccatttgctgcaatgggatcaggtttacaggctggaatgcctgtgttcgaggctaagtacagtgaacgccaggagtagcgatgaaggcattgggctagatgatgacgcgatctgtgctggtgtatttaatgagctaggacgtgataggcatgttgatgttggcgtgattgccaagggacataacgaatatcacaggaaccaccttctaccaggtcctcgtacctatgataatccacacggcgttagatttcccaagcagacagctgttctattaacatagattacaccgtcgaaggagaaggttgaagtgattgaaggatatgcta

SEQ ID NO: 141524 - DNA, 477 bp, Glycine max
  Clone ID: PAT_MRT3847_98808C.1
cttgggggtggggggggggggggccagacaaagagtaattggtagggtacaaaaaacactagagttgaagcgcgaagggggaaaaatcgcgagagagaagtatcaggggaaattatacaagagcaaaagagaaggctaggatagcggattactggccgcgccgaagattagaagagaaacttaaagccatagaagcggggaacgcgacggccactaattcggttattggatgagagccactaaaggggtccacctagcataggggttaccaaatgcatggctatcttgtacttggtggtgctgtgggtctaccgggtgtggtggtgtctgggggactactagcggattgggctgcatcgaggacactgaaatcggtgaaagttggtgggctggcgatgcggaggttggctgtggctacttgcagagactctgtagccctgtgagccggcgcgagtgatgagtgcgtatcttggcaaa

SEQ ID NO: 141525 - DNA, 335 bp, Glycine max
  Clone ID: PAT_MRT3847_98809C.1
gaccgcacgcgtccgaacggacaaaaaaacacctcagagaggactttacattatagcgtattatttttttaatggacacagcgaaattttaaaatcgattagcttaaaacaaacaattaaaataattaattttaaactataaactattaatatgaaaaaaattcactttcttcacctttttagcagtattacgactttttcttaacactaaaatatattcattaatttaaatctacatgaacattatttttcttattgtttaatctttttaaataaccattaaatccatactatgaaatatactaaatactattttaacttttaatgatatattt

SEQ ID NO: 141526 - DNA, 474 bp, Glycine max
  Clone ID: PAT_MRT3847_9880C.1
gcgtcttactccttttgcattttcttgtttttgtaaaaatcaagaaacggtaaggttgattgtgatacacaggattattcacattatcagaagaacattgctagtaacatattctttaccaaacacaaatctaaaaactttcaaaagtccacaagtcatacttttttttcatgctcacttggcggggactaaataggtggcttaagcccaggcattgacgtgttacagggtccgcatggtgatcagttaggatttccagtggaccctaaccgttgacaatggcgttaacaaataacccgctcatagagaacatgtgcaatttaccgttcttgagtgccttaaccttaagctgatcaaaagcctctgggtcatcatcaaggcccaatgggtcaaagctgccaccagggtatattgggctagtgacctcaccgagggatccaccagtgatacgataaccctcaacagcacccatta

SEQ ID NO: 141527 - DNA, 546 bp, Glycine max
  Clone ID: PAT_MRT3847_98810C.1
gatacatagaaacgggaacagtgcacatgcactgcaagtttcttcctattccagagtcacagatgattctggacctttggatggggtgacagatggtgtaccaggagaggactgtgttggtgagaagcaaagagctcgtcgtttgctggacgagcaatttgatttgctcgaacgccaagaatatggaactgatgatgatgatggtgattattatgaaaattatgaagccgatgaagatgagtcccttgctgagaagctcaaacactctcttaacaaccatgtattggatgatctagaacttgatgatgacaagtataaggttcctgcagacttattgaagaataaagatgctccacatgaggaacaagaggattctgctgctgatgtgattcgtcgctgcaaggaatatgctgaggagtatgaaggtgaagatgatcacaaggatgttgtacttgtacaagaaagtagtgatgaaacagaaagttgggattgtgagactatttgtttccatgtactcaaaattaaataacccccctggaaagattg

SEQ ID NO: 141528 - DNA, 581 bp, Glycine max
  Clone ID: PAT_MRT3847_98811C.1
tttagtatataccgagatatattcatttatttattttcatgtacaagttgaattaactaaacatcttatgataacaaaatttgagatgggtggagggggttttggctttgggttgtgatcaagatagaaatttggcaataaattctaatctgctgcagacaaaattgaaaacggaggctccttcaatatgagtgtgacacaagaagtaatggaacaaatgtcactttggaatatctagtgtcaagatgattcagagcaagcagtaaatctccacaattgtcccttcagaaaatcaattcacgatgaaaaggaatcgagttccatccccagttgtgagttctgatcccctttggaaccttccagagtctagacaacaaattgatgattggagagctgaatgaatggattttaagtctaattgttgatttactcatcaataaaatgaacaatgaagtgggtgctgaatgctggagtcagagttattaacaaaaatcttacaactttctcatattacaacccatgtattgagcattatatacaatgattcgtgaggacctgatccgtgtcacctttcctccaaa

SEQ ID NO: 141529 - DNA, 236 bp, Glycine max
  unsure (1)..(236): unsure at all n locations
  Clone ID: PAT_MRT3847_98812C.1
cttcttcagaagatgaagcncttcntagattcantggattaagatacccatcaataactcgcctctgggtataagtctaaacgaccatcaacctcctaatcaccacccgttttttttcccttttccccatcatatactctcaccatgttctttcatgcggagggaacatttattttttcatctattccaacttaaaccaaatctttatattatactaatttgttttacttattttt

SEQ ID NO: 141530 - DNA, 293 bp, Glycine max
  Clone ID: PAT_MRT3847_98813C.1
gggaaagggccccaaaaccctttttggggaaaggtttttttggacgttaatacctttttagcaaaaaacaggggggcctttgttttttttgggtccataaactcctccaaacggaaacgggcaaaaaaacaagaatttaagggcggggctttttttaacataggccaacaagaagaaacggggcggggccttttttgggggtttgccaagggacaaaagggtcaaattcggggtgggaaaactttttttggcttttgtaaagcagggccctttttttgaaccttttttttttt

SEQ ID NO: 141531 - DNA, 553 bp, Glycine max
  Clone ID: PAT_MRT3847_98814C.1
gattccgttccaaggaagcgtttcgccgtcatcacgtgtatgacgtcctccttctttgggggggggggggggcaatgtagggggtgctgccgttatgggacaaggaaatcgggaataggtaaggaaacgtataccgggataacaataggttatggcgggccctggggacatctctgccgccgtggacaatggccttgcgctgttattaccaaaaagaatagaatgcatcaaacgaaaagttaaggggggcagaaaggggataaattacccgttggtatgtaggcagaatagagggcaataccaatggcaaccgagtccgtaaaaccgtgaaagatagtcgccccaaaaacccgggcttttatagatttggtacttaggctttgttgtataggacaggtaaatagtggacccggtgtgtgtaatatagtactagtagtagcaggtacgccagttgtcgaagggccggtgtgcaacacagcaggtaacttagacagcatacgcgggagaggaaacataccgggttaagtggtgcgaacagcggcacataaatagg

SEQ ID NO: 141532 - DNA, 313 bp, Glycine max
  Clone ID: PAT_MRT3847_98815C.1
aaaatcataagaaccagtctttaatgcatgtaatatagtagcgcttaaaggcgaaactgcatctaccttgtggatagcagcgcgggacatatcattcgttcggcctagaatgtgcaatctacaactcaacctactaatactaatggcgggatggaaagagaaagttaaaacaacccttgcactatactctatacgcctaaatccaacaaatgagagactggattttctctaactgcgtcatgctagaaacagctgggcacccaatgttatgccgggaaatggggtttcagcttctatactctctctggtccca

SEQ ID NO: 141533 - DNA, 148 bp, Glycine max
  Clone ID: PAT_MRT3847_98816C.1
attcctcaacctggttcccttttccaaatgggattcctaaaaaaaggattcttttatggcttttgccttttttttcccttaaacctccatttttcttattaaggcctattggcccaaattattaaaacttcctgccacctaaaaacca

SEQ ID NO: 141534 - DNA, 508 bp, Glycine max
  unsure (1)..(508): unsure at all n locations
  Clone ID: PAT_MRT3847_98817C.1
ccacgcgtccgtattcttccagttgttctagactgcaagcggtaaaatcctaacataacaatggacgagctattgcatgaaaactcgagtggaggtccttttaacgccatcatgtgaaaccatcttccgcaatgttgagatcaatgtgagaaggttcatgacagtcacgacagtgcagtcgttatttgtttatatattcaaccaaatagtttacagagctttttagttgcaacagaggcaaaatgtttccagcagactgctttcagagcctttagaactctgctggacaaacaatttgatcgttgaggtctgctgagccgacaaccgtatgcctcctgtaaaattctggtatttttttttaattttttttttgcatatgtgggcttacgtgggtgtaactgaaatttgaaagtaccgcttgcacagcaagaattgccggtggnggttgaaagtggtaaatgaatgtaacttgtaagcgttgttacatgaagacaaaaatttccacccg

SEQ ID NO: 141535 - DNA, 415 bp, Glycine max
  Clone ID: PAT_MRT3847_98818C.1
ggaaagggtttcctaaaggatctcctcccatgttgttacaaccgtaaaccgggccggggccggcttggttgttccattaaccggcctaaaatccatggctggcttcccaacggggaagaccaacattgccattccttccattgttggcaccgggggaggagtccattgcatgcagggggggccaccaattggcaggaagaagttcgggactttttcttactggccagacctggttgatgcccaattggcaaaggaggtcgaatcctttttaaggaagggatggattccttgcttggaattcgggtgggagcacggtttcggtttccgggggcccaccagtttacctggttcctttgatggacctctctggaccatgtggaagctgcctatgttgggctgcactgatgcttttaag

SEQ ID NO: 141536 - DNA, 502 bp, Glycine max
  Clone ID: PAT_MRT3847_98819C.1
aaaggggaaaaaaagaaaaatttccccttccaggagaccaaccaaaaacaaacccatagttgtttacaagggataggggaaagcaaacagggctttaaaaaaaccccattggggaaaaaaaaaaaaaaaaaccttctcctaaacaaaggggggggggggcaacagccccccccccccaattaaaaggggcaaaaaaaaaaaaatcccctttttaccagttttcaaaaaaaaaagggggaaaaaacctttaaaaaaggaaaaaaaaaaccccccaaaaaaaaaaaagggccccaaaaattaaaacccccctttggccccaaaaaaaaggggccaagaccccttttaaaaaaaccccttaaccatttggggacccaattggccccccccccttttttttccacaagggggcaaactatataaaccccttaaaaaacaagcttttttttgggggccatatcctaccccttaaagggaaaaattttggcctaccctttgggggggg

SEQ ID NO: 141537 - DNA, 1392 bp, Glycine max
  Clone ID: PAT_MRT3847_9881C.1
tacggctgcgagaagacgacagaagggggaatgataaacttgtaaatcattagctatttcacacaataatttctaaatgaacagaaatcttaaataaatcactacaaatacgttccatttccatacaaaacaaaccaactcttttcttatctttccacactcaatttttcgtcatcaacatgaacaatccaactcttataatcttcttccttgttattttctccgtcttcttcgcggcgtcggcggacggcggcgacgatgagccgctgatcatgcaggtggtggagggcagcggcgtccggttgggagcagagcaccactttttggacttcaagcgcaggttcgggaaggcgtacgcttcccaggaggagcacaattacaggttcgaggtgttcaaggctaacatgcgccgcgctcgccgccatcagagcctggacccttcggcggcacacggcgttacgcggttctctgatctcacggcgtcggagttccggaataaggttttgggtctgagaggtgtgaggttgccttccaacgcaaacaaggctccaattctccccaccgataatcttcccgggttcgtgcggttcgtgttggagcttcagcaccactggggctctcgaaggtgctcactttctgtctacaggggaacttgtcagtcttagcgagcagcagcttgttgattgtgatcacgagtgtgatccagaagaaccaggatcttgcgactccggatgcaatggtggattgatgaatagtgcttttgagtacatccttaaatctggtggggtcatgcgcgaggaagactacccttattctggtgctgatagcggaacctgcaaattcgacaaaacgaaaattgcagcatcagtggcaaacttcagtgtcgtctcactagatgaagaccagattgctgccaatcttgtgaaaaatggccctcttgcagtggccatcaatgcagcatatatgcagacatatatcggtggagtatcatgcccatacgtatgttcaagaaggcttaatcatggggtcttattggtgggatatggttctggtgcctatgcacccattcgtatgaaggagaggccattttggatcattaagaactcctggggagagaactggggagaaaatggatactacaagatttgccggggacgaaatatttgtggggtggactccatggtttcaactgtggcttctgttcatacaactactcagtaggatgttagttgacataaacatagtatttgctatctgttttttttactgtaaaacattaatagctgctcttttttaaaagcggtgccaaaacaattaacctattcaatttaaacagttttagagtaaaaaaaaaaaaaaaaaaaaaaaaaaaaaagcggccgctctagagga

SEQ ID NO: 141538 - DNA, 293 bp, Glycine max
  Clone ID: PAT_MRT3847_98820C.1
aagcacatataactaaaatatcaattgaggtgtggtcaactgaactaaaaaatatacagtggctaacccatacggcgggcttacaattgaagatgaaaatgaaaattcggtgaaaaagaagacgacagggggtggctgctttgtcttgcgtaggggggaatacaacggtcaaacctccatactacaaatttcaaagcaaagcgaaaagaataggggcagtatatcccaagaatgacccccaccttcaccaagaggtcttcttggagtaaaattcaaggtaccacttaacaaac

SEQ ID NO: 141539 - DNA, 505 bp, Glycine max
  Clone ID: PAT_MRT3847_98821C.1
aaaaaaaaaaaaaaaaaaatttaaaaaaagagaaagttatatgttttttaattatggagggtccgttttggaggtcccgatttttgctacgtagtaatttagggggcggcgttttttaaggttcctacttttgttccgcttctttgcgcggttttatttttttttttgtggggcttaatttcatttcttggcccgtttttttacaacgtttagcttgggaaaaccttggcttgccctactttattggcttggctgcccatccccttttccccatgtggggttatagggaaggggcctggaccgttccctttttccaccgctttgacctctttattggcaaagggaaccccccttttgccggccctttaagcccgggggttgtggggttttcccctagctggccccttttttttgccggccttttttgggccccttttttttggcgtttttttccctttttttgttttgcccttttttggggctctggttttttcccccgttttaa

SEQ ID NO: 141540 - DNA, 573 bp, Glycine max
  Clone ID: PAT_MRT3847_98822C.1
ggctcgagattagaaaaacaactatggaatgagaaaattttaagatgctgaaaatattgtgcctccatggatggagaacaagggggagtatacttaaaaagcaaatcaacagatgggatccttctattttcactcaattagatatggcagtcccaaatggaaaataccctgtaagaaggaagtctgacatagaaggcatcttccctccaccttactttgagaggtttcaatataaaaaggacttcacagggtactttaacttggaagaaagcatctcatacttatgcgaatatattacaaccacaagaccctctgatgggttccttggctgctcacagggagcaactcctttcagcacttttgataggacaccaggcccacggatagtttctatatgagccttcaccaattaaatttcttatatcaatatcaggatgccatttcagaaatcccaacatatgcgacgtcgcctacaaaaacaccaacaaagctaaatctgttattttctcggggaaaaagattggcttaaacttccttgataggatcttacatcttgctttgacaacccctgat

SEQ ID NO: 141541 - DNA, 283 bp, Glycine max
  Clone ID: PAT_MRT3847_98823C.1
cccacgcgtccgcccacgcgtccgactctgaagtaaggttttttctttttcttttttcttatttttcatattacgttgggaactcctcaacagaagcctggttctttggggagtgaaagcagctttgcgctagtgacaggaaacacaactatggattcagcagagaagaggctcaatgagcttggttacaagcaagaactgagaagagaaatgacgactggttctctgtacttttgggctgcccatttagctggtccaaaatggggaccattttcttcatggt

SEQ ID NO: 141542 - DNA, 1848 bp, Glycine max
  Clone ID: PAT_MRT3847_98824C.1
ctttgttggttatatttatgaggtttctgaactctgaagtaaggttttttctttttcttttttcttatttttcatattacgttgggaactcctcaacagaagcctggttctttggggagtgaaagcagctttgcgctagtgacaggaaacacaactatggattcagcagagaagaggctcaatgagcttggttacaagcaagaactgagaagagaaatgactttgtttaagactctggcaatatcattttccacaatgacccttttcactggaattacacctctctatggttctagtcttcaatatgcaggccctgcaactcttgtttgggggtggatagtggtttctttcttcacttggtttgttgggattgcaatggctgagatatgctcatccttcccgacgactggttctctgtacttttgggctgcccatttagctggtccaaaatggggaccattttcttcatggtgctgtgcttggcttgagaccatagggcttatagctgggatagggactcaggtaatatggtgaaacttctattttctagtcaatattttcagagaatgtttacatggtataacccatgcttttcatggttggaaaaggcatatgcaggttcacaaacgttgcagagtataatcctactctcaactggcacaaataaaggtggaggatacttcgctccaaaatggctattcttatgtatgtatattggcctcactgttatatgggcagcactaaacacatttgcattggaagtgattgctttgatcgatatagtttcaatatggtggcaggttattggtggaattgtgatagtcataatgttacctctggtagcactgactacaaaatctgcttcatttgtattcacacacttagaattggcccctgaatcaacaggagtatcaagcaaaccatatgcagtcattctatcatttcttgtcagccagtattctctctatggctatgatgctgcagcacatttaactgaagaaaccaaaggtgcagacaagaacgggcctattgcaatactaggtagtattgggatcattacagtatttggatgggcttacatcttggcacttacattcagcattcaggattttggttacctttatgatccaaacaatgagactgctggagcatttgttccagcacaaatactctatgatgcattccatgggagatatcacaattctgctggagcaatcattctactatttgtcatttggggttcattcttttttggtgggctttcaattactacaagtgctgccagagtggtttatgctttgtctagagacaagggagttcctttttcacacttatggcggcaactgcacccaaagtacaaggttccttcaaatgcagtgtggctctgtgctgcaatctgcattcttcttggtctcccaattttgaaggtcaatgtagtcttcactgcaataacttcaatatgtactattggatgggttggtggttatgcagttcctatctttgcaaggcttgtgatgtctgagaagaacttcaagcccgggccattttatttaggcaaagcaagaagaccagtctgtctggtggcattcctatggatttgttacacatgttctgtattccttttgccaactctgtacccaattacttgggatactttcaattatgcaccagttgctttgggggtaggtttgggtctaataatgctttggtggcttttagatgctagaaaatggttcacagggccagttaggaatattgatattcaaaatggcaaagtctaacttttataagtttaaagaaggaataattggtggaatatcatttatctttttttcctgtgttgaaaaa

SEQ ID NO: 141543 - DNA, 470 bp, Glycine max
  Clone ID: PAT_MRT3847_98825C.1
attctgtgggaaaaactagtcttattatgattgtgttggagtccttcaaactcaatgcctctctcaagcttcctcttcctttctcacatataaaaagcattcattactgcaaaatggttggttggttttgagggtcgacggtggcactgccccacttgcttccctcgacatttcaacgtacattttctttagccccacgccataaacatcccattttttagtactcaggacccattatttggtaacttttatttcttagtaagagtttttcgtgtaatagtaaattctgtccagtatttgttactactctgcctgtttgattaaatggtgtctcatctgatggcattggctttgactatggctgccctgagtctctcagatggcctaacgttggcaagtataaagtcgatgttgcttccttcgagtcactagcactgctcgagttacaggttagagaagacaccgatctc

SEQ ID NO: 141544 - DNA, 454 bp, Glycine max
  Clone ID: PAT_MRT3847_98826C.1
gtttttaacgcagttagttcatcttactctctggggtttaactatattaaatttacgttgtgcaagcttattcaatacactctttgctggcaggatataaatgctttacctgtctaatacatttcgagctttgcctttagtggttgtcctatctcttggattgatgcattgcaaaccatgcttcctttacagctaatgaggcccctacctcatccttaaggacagaacccaccaaccagtataccccaccattgctggtttgttctacaaaaactacccatttacactcactctgtctttacatttttttactctccatagaaatagaatttttgtctggcactgcaatataactttggtgaattattccttggcatcttagagtttatggcctgaggttatatgggacccattagaggtgacaatcctctatagcttaactccacattaaaaa

SEQ ID NO: 141545 - DNA, 486 bp, Glycine max
  Clone ID: PAT_MRT3847_98827C.1
gtttacacaatacatgtgaaagaaaatgatctgtagcatacattttaatactgagcctagtgccttccccttagattaagtattggctgcaattcattgctgctgagcactatgctatagtgataccgacagatatgcctctttgactcaagggatcgttataccatgtatatcaggtatgagacatgatccattgttccgagttcaatgcaattgctacctactggacgaagcgcttacgtttcatccctgggtgacatggtacggcttgatgcaacggacattgatgttcatgaaggtgcagaatggctgaacgttaagtatgatgcaatttagacagagtgctgtgtttttggagataacacactggggattgtaccctaatggatcatacagatgactgtgagggagtgttggcactattcgtgcgctctgaattaagatcaccaggccactcgcttacattcactagcagagccttataag

SEQ ID NO: 141546 - DNA, 295 bp, Glycine max
  unsure (1)..(295): unsure at all n locations
  Clone ID: PAT_MRT3847_98828C.1
gcataacaatgttntccccantggacacttccgtaagcactggcaganctatgtgaagacctggttcaatcagncagcacggaaganaagaagacggttggcntctcagnngaaagctgtgaggatttccccagacctanaggtggacctcttagacccattgtaacatggtcaaactttgaaatacaacatganagtgagagctggaaggggattttcccttgaagaactcaaggcagcagggattcccagaaagcttgcaccancaattggtattgctgttgatcatcgccgc

SEQ ID NO: 141547 - DNA, 332 bp, Glycine max
  Clone ID: PAT_MRT3847_98829C.1
cttctagtaagactactataggggctgatctttttgaacagttctctcttgtggatgggaagattgttaatattactggtattaacgagattgcgaagaccaccactgttctttaacttgggtctaatcagcctgtgctccatgaggcctagcggaatttgctccatgctttgtgtgttgctaggtgtctggtttccaagaggtttttcattgtccgcggttgtgccccttatattgagcttttccaacagctgggtgcctgggctaaagtgttgtatgggatagtgggttactgtgtgagggcttttcttgaggcgccttaaattatttcc

SEQ ID NO: 141548 - DNA, 239 bp, Glycine max
  Clone ID: PAT_MRT3847_9882C.1
tgaaaacccaaagtgcttctctcctctgtctttgtctctctcttgctatccttatggctagtagcatgctgcaagtgcaattccaagaagcgcagtgccaagcaaccatgttgcaccattcaccggaagcctttttccttcaactttcccctttggaattggtccttctgcttaccaggctgatggagcagcaagtgtagatgggagaggaccaagcatatgggacaccgacactagac

SEQ ID NO: 141549 - DNA, 168 bp, Glycine max
  unsure (1)..(168): unsure at all n locations
  Clone ID: PAT_MRT3847_98830C.1
agcggcgggctacatcttgaccgccggcggaggaacaagagcagcaagagcaggaggacngagcggcgggagctagaacgagccaagaactaggacgagagagccggcggagaccagctttctcaatggtgaagaagaagctgctggaagggcggggaagctgctgga

SEQ ID NO: 141550 - DNA, 616 bp, Glycine max
  Clone ID: PAT_MRT3847_98831C.1
cgttcttttttttttttttttttttttttaatagcattggtatcggataactgctagaaaaaaaacatcgccacatcgcacatggatatctgaccaaccaataacccctccctgagctcccaacattgtcgaaaatgaaattaagaacttcgtttcagtgcattcatgcgcaatctctccacaccctcacttgaacggaggcttatcagccgcactctcctccagactcgctgcgctcaatggctgcgagcgcgcgccgctaagatcgcccgagtgcgtcttgcgcagtgcttgtcgcatcgtttcaatctggactggcagctcttcgcccgatgctgggttagggctcccgagcactataggggacgtaggactcgcgggtgaccgcgtgcgcgccagatccgcatgcttgggcgaggctgctccactggtggttggcggcgaagacgcggcagacctcactggcgagggcgaccggttcgccgtcgacgacaggctcataaactgcagagcctcgttggacgtggcacccaagacttcctgtctgtcgtgctcgacgtgttctgcctgcaccacgtctgcgaatgagatgaagctcaagcctcgagccgaattc

SEQ ID NO: 141551 - DNA, 128 bp, Glycine max
  Clone ID: PAT_MRT3847_98832C.1
gcattactgctatctatcagttaggaatctcgggtaaaaaatacatataaccacccgtcttaagtaaaactcgaacaggttctacaagttcgacaccttgtgtggaacctctaacctaactcaaaacc

SEQ ID NO: 141552 - DNA, 422 bp, Glycine max
  Clone ID: PAT_MRT3847_98833C.1
gagaaaaacaaattgcatactctacaggagatgactcccatttacatccatctgatgcgtggttggtatcgcccttcactagatcgaaacctccatacaggtgactctaatatggataacctcacagaaactatacagctccattgcaaaaaaggggggtaacatagacccctacctttggccacagacacaaacaatgccctgcagatggccaaaactaaaacacaatgggaggaaagaggagtatacagaaccagccgctgcattctcaacatcgtggtgaacaccctcgttggatgagcgaacactgaccctgccaagaccttaactagaaccatgaatggaatccgtttagtaaagccgaccatgaacaacctttatctgcaccacagctagaggaatggtgagctacatacccaaag

SEQ ID NO: 141553 - DNA, 300 bp, Glycine max
  Clone ID: PAT_MRT3847_98834C.1
gcgtactggcagaacaagcaaatcatgacatttgatactacttctacagacaatgccgtggaaggcaaatgtttatccgcggagccaccaaaccatcatgatattcggactaatccctcaactcaaagcatttgggtgcttttctgaatcaccctcaagtgttgcgtcactcattcatttttccaaccatggtaaacggcatgactgccaaataagaacatgacatgcatgtccctggtttaccatcaagttcacgagaactggtgaagccacatgctcatcgcggcgacttcggcatgg

SEQ ID NO: 141554 - DNA, 481 bp, Glycine max
  Clone ID: PAT_MRT3847_98835C.1
accatgcgttcggtttttcattgtgagaggttatacataatgccacacgtgtaagagagtatacactgaaattattatgttatatgataaaaacaatcagatcggttgtggaaatctggaattctaatgaaatcagtaggagacacatgtggctggctataataaacagatacatgtgtttgtttgtactaatttcaaagatgagtttaccgtatgttcacatcgatgatgtgaatagtgcacgaatggttatctaataggcgagtgtgtaaaattcattcaaacgtggactatctggggatggtattaaatggaatttctacaatttccttgttgataaagagggatctgttgatgatctttatgcacttcataacttcttctctgagcattgagaaggacttgctgaagctggtggttgcatgaatgatcctatgaatgactggagctgtcaatgaatgaattgccattagaatatagg

SEQ ID NO: 141555 - DNA, 235 bp, Glycine max
  Clone ID: PAT_MRT3847_98836C.1
ttcttatttttcaaaagctgtctttggaagctgacaaagaaagtaattggttttctaaaataaattgaaccaaatatgttcttgaattatcccatgtataaatgtattaaaaaataacaaagtcagatttaaaacttaaaagtcaactgcatcatctaaaaggctttaaagcttgcgtgtcaaacagtggattgctgtaaactgcattatttggctgttagctaatggacagggg

SEQ ID NO: 141556 - DNA, 323 bp, Glycine max
  Clone ID: PAT_MRT3847_98837C.1
aagggggaaaaaagaaaaaaagaaattgttttttttaaaaaaaaaaaaccgggcggttatgctgttgggtttaaaagggtgtaaaaacgaaacttttgaaaggaagctggggggggttttcagaaaaattttttttattgggggggggggtttttttgtccttagggaggaaaaaaattttcttttgtctcttcgaggggggaaggacaaaaaaatttcttgttttgtgggaacccaagtgcccacaaggttgttgaaagagtaaaaaccccctctagttttgggccagcaaaaaaaagtgtggggcccccgccccaacaggg

SEQ ID NO: 141557 - DNA, 1245 bp, Glycine max
  unsure (1)..(1245): unsure at all n locations
  Clone ID: PAT_MRT3847_98838C.1
gtgtacaacccgacgaagctatatatttgaagatcancaataaagttcctggtcttggaatgagactagacagaagtgacctgaatttgcttttccgggcaaggtatccaagagaaataccagatgcatatgaaaggttactcttagatgccattgaaggtgagcgaaggctgttcattagaagcgatgagctagatgcagcttgggcactattcactcctttgntaaaagaaattggctcgaggaaaacaagaagattgctccagagctctacccctatggtagcagaggaccggttggagcacattacctttctgcaaagcacaatgtaagatggggagatcttggcgaagactaataaatggcagagctctcttgtgatcaagcacactcattatcagtttcttttccatcacattacaggacagctccgtgcttacctcgcctcggttggaaagaggaagtttcatatagaatgatagcatacttttttatatacgatagcctgtgctttccacactgatggcaagttgatttaaaataataactattgcatagtatgatagaaactggatcagaaaaggaagaaagacaaaatttcttattgattgagtgtatctctacaaacaaatcccttggatattcaagagatacaggcctctatcccttaaataactaactgacctatcataaaattagtaatgaagaacaactgaagcatcgtcaattggagcaaatgcagctcaacctcaaaatctgtatcttttgtggttgatttaatggaacattctttacagtgaaacttctagagtttagcatatgaatgatacaaacaagtacaaccaacaagttaagaaagtactatgtgcagcttcaagcaacctgatgagtaccaccaataggagttaaattcagtggaaggaacttatcccccataacgtagcaaacttaagttaaaatctccgttgagagaggtatccattgtccacatctaccatccgaagtgtctctaacagaattacctctgaaagaggacaccggagttcaggtacttgtctcattttctggatgggtgatggctattttttctttgtcaaacccatctggcaatagacgcctcacttccatctcactacaaagtgccagcgccaactgatttttcccacacctgcaaagtccatcacagagctcagacatgggactcaaatctggactcattaatcttcccaacannnannnnngggt

SEQ ID NO: 141558 - DNA, 301 bp, Glycine max
  Clone ID: PAT_MRT3847_98839C.1
ctcacgaggagccacttatttcttcacactgcacggtgccaagtgcagacccgaggggaaattgctgacgttctccacctaacaagacaaacgcaacaactaccggtcaccttaatacaggttcgactgggtcatctaaagcgatcaggaacgttatctatacttctactactacgaccactactacttcttctggaagtgtgagcatgtacataaataccaggttgtcatggtttagcggtcggcagacttatacatatggacatgatcttacctacctctaatttgaagagcttcactt

SEQ ID NO: 141559 - DNA, 639 bp, Glycine max
  Clone ID: PAT_MRT3847_9883C.1
ttcccgggtcgacccacgcgtccgtacggctgcgagaagacgacagaagggggaatgataaacttgtaaatcattagctatttcacacaataatttctaaatgaacagaaatcttaaataaatcactacaaatacgttccatttccatacaagttaaaccaattcttttgattcaaacacgggaagggtgaaaagttattaattagctattgtttcttgcttatcttgtctaaattcgacctattcctatgtgcagtgtgatccagaagaaccaggatcttgcgactccggatgcaatggtggattgatgaatagtgcttttgagtacatccttaaatctggtggggtcatgcgcgaggaagactacccttattctggtgctgatagcggaacctgcaaattcgacaaaacgaaaattgcagcatcagtggcaaacttcagtgtcgtctcactagatgaagaccagattgctgccaatcttgtgaaaaatggccctcttgcagtggccatcaatgcagcatatatgcagacatatatcggtggagtatcatgcccatacgtatgttcaagaaggcttaaatcatgggtcttattgggggggatatggtttctggtgcctatgcacccattcgtatgaag

SEQ ID NO: 141560 - DNA, 429 bp, Glycine max
  Clone ID: PAT_MRT3847_98840C.1
catttaataccttatgtccttattatgctggccgagatttcataacttctattaaactataacaaatttctccagatctatttaattttactgtcgcaaatacttggaattcatggcaacaacctcacctcacaagaggaggaggagcctctcaaactattcatgaaacacaacttaaggcatattgctacatggtaatgtgcacagctgtcaaagcaacaaatacttcttttgtagctaaaaacccacaaagcggatttggctttttttaaaggacgctctgttcatctagaagaggaaaacaaaatgctgtgtgaccgcgacggtaccgactagggacaaaacagtacctcttcggatgatgatttgatccggctttttctatagacacttcttgctgttaaaggtggattagcttctgagaacgag

SEQ ID NO: 141561 - DNA, 300 bp, Glycine max
  Clone ID: PAT_MRT3847_98841C.1
ctaaagcctggccctgcaagtgttgaaatcgatgatcaccctatgcaaattgaagaaacacagtacccgaaaaccttcttctataaagaagaccttcatccaggcaaaacaatgaaagtacaattcagcaagcctcccttcctttaaccatgtaccaacaccccatggttgttgaaagggaggcttgctgaattgtactttcaacaaccatggggtgttggtacatggttaaaggaagggagggacgctgctaaagacggatatagttttgacgagctgtgcatcatgaaagaagccatt

SEQ ID NO: 141562 - DNA, 557 bp, Glycine max
  Clone ID: PAT_MRT3847_98842C.1
ggctcgagtttttttttatgtgtcgtttctcatttcttcatgtctctgcgtcgttttccccttacacccaacgcagtccttgtttcttacctccttcgtcttcttgtttcttcatgtttaatattgctttcaaggttccaacgatgtagctcaacccaagtttatcttgttttaaaaacgaagaggcttctatggatgtgtgagggcatagatccattacaaagagagccctacaactagggtttcgcaagctattcgtgcctgccactaagagatgtctaacgaggagagcaatatgggctgggttaatgcagtggttgttctcttctgaaaggttttctctgaacaagaggttttgtcattaattggtgtgttggaatgagcaatttaaggcctgaatctcacgtagcacaacaaattaggcgtgaaaaactgagaatccagaacagttatcagccttcacacgaattccctaacaatcttgaacagttatctttacacccggagtttaacaacttggaccttgttcaagtaggaatgtcagaaatgctaacatg

SEQ ID NO: 141563 - DNA, 425 bp, Glycine max
  Clone ID: PAT_MRT3847_98843C.1
tgtcgccctttttttttttttttttttcttttttttgaaagccatatttccctttattaaatagggattgggtattggtttataatctgttcctcctaattacaaatataatgagtataaccttttctttattcaattattttggggtaatacaagtataattttcttccccaaactgataatttcttttttaaaaacaccaaaggaaattgcatagctatacttattgctcatcttcagttttaacctaattgggcacacataactcgggttgtgctcttacaaacagatcaagtttgggttctgaattacacctaagcagcaagtaacctctggataatctttttaatttgaaaaggagacgccgttggggggaatctttcaataacctttacccttttttggcccccagaaattgtcaaaaa

SEQ ID NO: 141564 - DNA, 367 bp, Glycine max
  Clone ID: PAT_MRT3847_98844C.1
gagccacaaagaacaaaagagcccctaattatgctaaggggtctttggttcaacatgcttaggcctgtcccaagccttcctaattcggtgcatctacattcgggttgcgccctcccaatggtgaaagcatacctttaacattgcaggcactcccatatgctgtgaccaagagtgtggctcatgccactattcttggaaaacctaacataaagactgttcgcatctttcccaaaattttaaaatggtttctaaggctggcgggatatattgcatcatgtcttgggatcatcgaatatgacagggcatccagctttctttgtccaaagggccaacaaacttgttgggcaaaatcttgtgagacaacttt

SEQ ID NO: 141565 - DNA, 372 bp, Glycine max
  Clone ID: PAT_MRT3847_98845C.1
cccacgcgtccgcacacacatgggttcttcaagtcatcatatctgaatgagagaaagctaacgtaacgtggtgattccaaaaagatagcgtcacgctaaacattgctgcaggtgttagaggcatcgccgtcctatctggacctcaacatgcctatagaagacgtcgaagacggcaccacttacaaggactatgaaagcgacgcctggttaaatgatttgtgtgatcaagttgaagaagaagacccttctaagccattaaactaggactctattggtgaaatatgaatatactgtattgacacgcaatttgaagagatgtaaggatcagagattatacttgaaatagagtatgatgtcatcacacagagactt

SEQ ID NO: 141566 - DNA, 1070 bp, Glycine max
  Clone ID: PAT_MRT3847_98846C.1
aaaaataataattatttgtatcatttcattcaacactggaaacttgaaaaatccatccattgttctatgcaaagaaccttaaatcaagggtcatattctttaaatgacatttgtcagacttggccatcacattcccaagcttgaaaggaattagacataccgcaagtaatagtaactgaatataaataaccgaaaacagaattggattttcaagaacagagaaaaaaaaaatgctctggggcatatgtaaattacaatatatgtccttccatggaacgatgcttctaacccgtgaagggaatgggggctattaccctgttaatatgttactataatggttctctttgccaacacatgaataactagtttgaagtcaaagtcaaagtatttgctgacatgtaaggtgagatgcatccctgaacctgcaataaacaagatggaatttggatataaccctgtagcaagacgttgactttttcgagagaattatgtgggacaggagtaatgacataaagcacacctttgactgtgtcaattcccctcacaatcccaagaccaagacaccaaggtgtgctttatgtcattactcctgtaccacataattctctcgaaaaagtcaacgtcttgctacagggttatatccaaattccatcttgtttattgcaggttcagggatgcatctcaccttacatgtcagcaaatactttgactttgacttcaaactagttattcatgtgttggcaaagagaaccattatagtaacatattaacagggtaatagccaccattcccttcacgggttaaaagcatcgttccatggaaggacatatattgtaatttacatatgccccagagcattttttttttctctgttcttgaaaaaccaattctgtttccccccattaaaattcagttactattacctgcggaatgtctaattcctttcaagcttgggaatgtgatggccaagtctgacaaatgtcatttaaaaaatatgacccttgatttaaaaaaaaaaaaaaaaaaaaaaaaaaaaaaaaaaaaaaaaaaaaaaaaaaaaaagggcggcc

SEQ ID NO: 141567 - DNA, 183 bp, Glycine max
  Clone ID: PAT_MRT3847_98847C.1
gatagtttcattatacaaagcgttgaattcaaaaactaggttcattaaatgtgctttgctttgttcctccaaacccaacatgttttacacatgccgcaactgtgacttctctgaccaaactaactcgcccaaagggaacaccttttgggttataccttaaactgggaaaagcttcatggatac

SEQ ID NO: 141568 - DNA, 622 bp, Glycine max
  unsure (1)..(622): unsure at all n locations
  Clone ID: PAT_MRT3847_98848C.1
aggagcatagaatctaggcgtgtatatataacttaacattgaaatctatacaaaatctgatccagcgatgcaattattcctgggtttgttagaagcttaaaagagagcataggagatctctgatttcctgcaagaaaattaagtggaagcagttcttccgggatttgccaaaaagctaccacaatcaagacaagagaagaggcatggatagtagttattttggagaaccaaacatgggaaatgaaagagtaagtggttcttcttcatcatcttcttcaagaaaagggaagaagaacaatcaagacaagtcaaagcaaccccaaagaggattaggtgttgctcagttggagaaaatcagattacatggtcaaatggcttgtggtggctatcatcctcctctgcactctccttacccatctaactttaacaatgtaagagtacctttttcttttctctcaaaaactatgatagcaatatttttggcttggattttggacttcaatattggggggattntgctaattaattcctgatcaacatgcaggaagatccaagggtgcaaacaccctattcatcagtaccatcatcatcatcatcatctttttcttactcatctacctca

SEQ ID NO: 141569 - DNA, 1026 bp, Glycine max
  Clone ID: PAT_MRT3847_98849C.1
gcgatgcaattattcctgggttttgctagaagcttaaaagagagagagcataggagatctctgatttccaagccagaaaattaagtggaagcagttcttccgggatttgccaaaaagctaattaccacaacctatagctctctctctctctctctctctctctctctctctctatctatcttcaagacaagagaaagtcatggatagtagttattttggagagccaaacatgggaaatgaaagagtaagtggttcttcttcgtcttcttcaagaaaagggaagaagaataatcaagacaagccaaagcaaccccaaagaggattaggtgttgctcaattggagaaaatcagattacatggtcaaatggcttgtggtggctatcaccctccatacccatctaactttaacaatgaagatccaagggtgcaaacaccctatttatcagtaccatcatcctcatctttttcttactcatcctcatctacatcttactcaccttcatatggctcccaacccaacattgtgatgggctcgagcgaatatgaaagaacaaacattggatatggagattcacagccaacaaatattgcaagatgggaacattccactgctcaaactagacctttacttaacctatatgactcacaacacatagataccaagaagtatataagtggttccggtggtgcaagcagtcagaactctgaatcaagtgacactcaagaaccagatttggagctaagactttctctttaatctgccactatagtaagagtggcaattctagtaattgtaatgcttttatttacaattatgaattgaaaaagcacatgaacaagccaatgtgtttgttttaaagtttcatcctgagatatcatatatatactcttgtgtcatgaaagatatagattaactactcttttgcataatagcaatgcaaacttctcttttaacgtatattatcaaagaaactaaagagaagttattgtatgatctcttgctcttaattatcattttattaggtt

SEQ ID NO: 141570 - DNA, 313 bp, Glycine max
  Clone ID: PAT_MRT3847_9884C.1
ctaaaaaaggaaggacccaaaaaggggggccaatctggaccccttttggaaaaaacaccctggggcctctaaaaggctaaaaaaaaaacaattctttttctaaaaaaacgcgaaaaaaagaaaccgaaggaaaaaaaacacaaagttagaagttacttctaaaagaaaaaaaaaggggcaacacgagggtccgagggaaaatttgggagaatgtttttatgttaaaaacggaagtgaaaaacccaactggggctccaaatgggggggccaagccaggcgaagggggaaaaaatgggccccaacaccacccgga

SEQ ID NO: 141571 - DNA, 450 bp, Glycine max
  Clone ID: PAT_MRT3847_98850C.1
ttgagggtctgcctatttcctgtcgcacccatctatttggctttgttcagtagttttttattttcaccatgtgaaaaagctaggataatgcagttgtgtaaaaataaaacccttttgtttgccgttgcattcttaaaccagaaaaacaagaaaaggagtaaaagaaatcactgcagcagtttattaagcttgtctttgccgggtatgattaatccaaagcaattcaggactaaaaaataaatctgtgtttgcctgtatgatcctaaatacttcttgattttaaaaacaaaagatgaaaagtaccttgttttgcttttgcttcatttgggtgagtgttctggtaaaattttaaatcacctgagtttactatgtttacaagccatgactgttttgcatgcatgtaactttgcttgataggagtatttcgtttaaagtgcatttgacatgaca

SEQ ID NO: 141572 - DNA, 200 bp, Glycine max
  Clone ID: PAT_MRT3847_98851C.1
ttttttttctttgtaagattttttctttattttcattcaaaatactccatacatgcttaaactagggtacatccagaagaaccaataatacctttcggttactagcagcaaaataccaaccgttttatctggtcgtaaaagtacaattttaaaatgtggcataggaacagaaccagctcataccaagcaatatacttggt

SEQ ID NO: 141573 - DNA, 264 bp, Glycine max
  Clone ID: PAT_MRT3847_98852C.1
catcccttaaaatgtgtaggtactgaaatatcacattctcgtcctcataaaacggggggattttcttccaactataccgaaatagtgggtccgaattggactgctgtatggagctttacagaaaatctgagctgttcaatacacacaaagccatctgcttgcaaaagtcccttgccaagagtgggggaacccctcttagttaaggcggtcccttattccccttgcgtgtctgcaccactccatatgtgcaaacactgtcacctg

SEQ ID NO: 141574 - DNA, 314 bp, Glycine max
  Clone ID: PAT_MRT3847_98853C.1
caaaattggcctaccggacgttgcctttaaaaaaagggcaatggctcttgaaattacaaaacgtctgccattaacccgaaaaccttttctgactgtaaaatacaagtgtttacatccttataacaaaagggaagagccattttatgatatttagtccgctattagaaccaatgcatggatgggtttacaactaagagaaaccttaacttatttctataaaggaacagaaaatttttttggctgcctttaagggcccaatgtgcaatagtaactgaaacttcatgttctttacaaccttacctgcttttggattc

SEQ ID NO: 141575 - DNA, 1458 bp, Glycine max
  Clone ID: PAT_MRT3847_98854C.1
cggtttcgtggggttgcggaaaatcaaagcatggaggtggaagttcatggtgaagatggttccaaattcgcactgggaagggatcagaaaacagtgtttggacgaggctgcggattcagcacccacgaccgcacagtgtctcgtcgccacgtgtccttcgaactcgaccattcacactcagaggatgctaatgctagggtttctttccaagtcatggggaagaaccccttttgggtgtacgacggagaagcgcttcggctcttcagaaagttcgacaagggtcacctgcaactcggacaccgtttctgcttctctcccaacacacccctctggttcactcttactaatattcagcctctgcctcaacttaaccttgatgaaattcacgtttcggaaatcgatcccgttaaagagtttgaaaatgcatagtttggttttcttgtgatggggcacgagtttgaccactatcccaaggggatgattcggaatgcgaagaattggaagtggttccttcaggaacctaggaaggatagtgaggatgaggaagatgttgagaaggagaggaggaaaatgacgggaaagcgaaaaaatgggtaaggtgaatgaagatgacgagtggactggtgaaagtgatcataagaaccttgttgccaatatgcggaaaggtaagccgcccaggtactccacaaggtcaaaagagagtacaggaggtatcaaagataccaaagctagtaaaaattctaaactaaagaaagcgtctagtgttgatgaaactggtgaagaagtagatgatgatgatgagacactagtaggcttcattgttgctgatgaaggtgatgataaggaagaggaaaatgatgaagaggaggcagagtttgaagatgatgatgatgatgaattgaatgattaatgccaagtctcaatggaacaaatccacaccgaaacatgtaacccatctctgtctcagacatcatcaaaccgggagctctgatagtaaaacatccctgagggaaggacaattggagcttccgagaagccaaatgattgtggccaaatccacaacaccaccaatgcttccctgaagagagtttaattcagtaagtgtattcgtgcagtcatgcaggtgcatcttcacaagcatttcttggcatgttaggttcagccaagcttgagattttgatagcacaagtggaagtgggtatcaaaagcaagagggacgtgactgagttcatgtacctccaaatgtacaaacaaatccaaaccctgcaagaaagaacatatgggtttctggaacaaacatttttttttcggcccgaggttttcttgttttctattttaatatatggaaattgtgggggtgtgggtaagaaaaaaggtgcaaccatgcacccttttgagtatagtgcattgtagaattgttgcttgtttccttatttaaaagtctcatgtttagtttct

SEQ ID NO: 141576 - DNA, 486 bp, Glycine max
  Clone ID: PAT_MRT3847_98855C.1
aatgataatgttttcacaagataaacgttcctgaaaatattaccatggttaacaacgaatttacaccacgttgggctgttatctacctttactttgaaagctgcgtgggcggcttttagtggcaacaaatatttgcattagatgccacagatgatcatatattctggggacatgatggtgattcttctaagataccaaaatttcaaaacttgcctgctaaaagacacagatgactggatgctgctcttttgctcagttgaaaagatcattgagctgggaggtgaagcttgcctaatgatacagcacacgaatcagatgcatccattcaactttaaacttcgtccaaaggcatgggctgggaactaagaagtctttcagcctcatcatttgcttctgcttgtattttccatctctcctccaaattttcaagctccatgatttgctctatctgttctttgatactatccatattactagcagtttcag

SEQ ID NO: 141577 - DNA, 278 bp, Glycine max
  Clone ID: PAT_MRT3847_98856C.1
cccatgcgttggagctaggaccagattgggccgaggaggaatcaccactgccagaaatgttaacgaacgaacggatcgattgggtcgataacctaacgctatagacgatacgtagtaaggctcagacagtgcatgctttggaggtgaacacataccatacacacagattgaactgcaattgcggaaaactaggcctgggcagatgataatgactgtcgtggataaatctgtatgcgagtaatttgggagtgtgtaatttgcacgtatcctaaaggaag

SEQ ID NO: 141578 - DNA, 694 bp, Glycine max
  unsure (1)..(694): unsure at all n locations
  Clone ID: PAT_MRT3847_98857C.1
ccacgcgtccgggctgattttgactcggacatatcatctatgtacttatattgctgacgtccttcgcgctctataatactgtcactagcaccatcatcattacatatcatactatgtcagaatccagaatcagaaatgctcagtgtgatcttttcttgggtgctggaattgggctgtagttctaattgcacaccactatggtagatagcatgatgatgattgcctttccattgatggtggctccttgtgttgatgattgcgcgtccatgatatgcaaaatggccaaagcactataacatagcactgattatggcaatgtgtacacactagcttcagagatggaggatatgattaggcaagaggataccataatttatggtattatagctagagccaagttgcctatcattcctcacacctatgatgaatagtatgctcaatatcagcgttattgctgttcatgtggtagaatgcgtggctaagaatacagaagccattcaagctaatgctgaatgatacaaaatctctgaacaacacgccttcttaccagaatacttaccatcatctatcagtgccatcttactgcttgagacaattcactcatcctcaagctgcttgattatcattgactgctncatctgcaaaatgtatttccaagagttacttccattggttgctactttcgnggatgatg

SEQ ID NO: 141579 - DNA, 397 bp, Glycine max
  Clone ID: PAT_MRT3847_98858C.1
gtttatctagtaaaatataattttttactttgcatttaaatcacgtaaaccttaatgataaaaattaaggtctcactatgcatatatatatatatatatatatatatatatatatatgcttgaaacttatgaatcattcattttacatgtgcatagtttattttttctcctaaaattaatctcaattacaaattttatattagaatatatgtatggtataagaaatcgattattagaataaaacaaacaggcttgctgagggagtatttttatataaaaatgctatgaataaatttcaatcgttttttatacaaagttatcaaaaataaaagttactatcttcagcatagcttcatccaaattaaaagttaccaaacattagtaacaacgtaaaaga

SEQ ID NO: 141580 - DNA, 350 bp, Glycine max
  Clone ID: PAT_MRT3847_98859C.1
gtagacatgatattacacctttctcttcttgattgccgtgacgcgctgatcttgcaaagaaatatatacacttgggaccaatcaagtctcgttacgctgtgttgattgacgactgatctgataaagatgagccaattcattcaaagtcacttctttcttgttcttagaacacatggattgggcagattatggaggagagatgttcattccatggcatacttttgagttcaggttccagcaatgcgtttatacttaggcctgccatacttgcccatgtgggccatatcatacactacccggtcatccgagttggaatccgcacactgtgactcaaaggactcatggtcctt

SEQ ID NO: 141581 - DNA, 126 bp, Glycine max
  Clone ID: PAT_MRT3847_9885C.1
caaattgctaacttttttatttatagaccggcatggctacatggagaggaactatattaaaccactctgggggggcatcaaaaatctcttatcctaagatctatcctttaaaagtgatgcacttct

SEQ ID NO: 141582 - DNA, 324 bp, Glycine max
  Clone ID: PAT_MRT3847_98860C.1
gctaatgtctgtcgaggtagatgttgatgttttgggtgcttcttttgttgtgcctgagatgaaggatcttggggcggatggggatacttggggctacgtaccctggatcgcctaggctgctatagtcgatcattgatatcatgggatgattttttcaggcttgggaaatgtgttactagagtgttatggtgtggaattcgtcaccttggatgttcactgttcggcatcatcgtggtctcttagagtttgctctctcatcacctctgtggttgtgttgttgtagtcttcgagacgggggaacttgatttctttaaggacagcttt

SEQ ID NO: 141583 - DNA, 265 bp, Glycine max
  Clone ID: PAT_MRT3847_98861C.1
gccgccctttttttttttttttaaaatgaagccatgcttttcaggttcacagttaatgagacatggagaagccatctacgggattaaaccatttgatgcaattcaaaattggggcaatcattgtctaacatgagggcatttctctactctttaactataatgcatttacaattggtttttatatcatctgtgtagctatccacctgggccaaaaaaacatcctacacataatcgtgcttttaatttgctgctgatctcactaggg

SEQ ID NO: 141584 - DNA, 200 bp, Glycine max
  Clone ID: PAT_MRT3847_98862C.1
cccatgcgtccaaccaagttgtggagaacttttaaggggagccaaagggctccctgaaggaggttttcccaagttgttacaactgtcaaccgggccggtgccggattggtggttcaattaacgggcctaaagtccatggttggcttccccccccggaaggatccaccatggccatttccctcccttggttaggcaacggg

SEQ ID NO: 141585 - DNA, 417 bp, Glycine max
  Clone ID: PAT_MRT3847_98863C.1
gaatcatgcctcttacgagtttttctataacttatctcaataatttttttagtgaaactcatcgaaataagtttttttttaaatttattttgataagtttcataattaaatttatatcatatataaggcatggcatcatgtgataataacttatttaataaataattaacacatttccttaatggctctttaaagacgcaatacacaaattgtttgtctgattaagtcagatatataataaagtaattttgaaaacacgcccgaagcttgatattgcttttcttttttaaaaaaagaaatattgtttattaattatatgcccaaaattttattcaagtgtttaataacatttcgttgatgatatgaagattagagggctggatccaaaattcgatgttcaacatttcaatggagcgt

SEQ ID NO: 141586 - DNA, 389 bp, Glycine max
  Clone ID: PAT_MRT3847_98864C.1
ggggggggaaaagaaaataacaattctttcctcatagccctgcaggatgcttttgctataaaaagaatccttgggtttaaactagactttctatttccaaccctttctcaacttaaggcacttttgcctttcatatagggaaaaaactgggcccatgacctcttcataagattaatatttgcctcactaaaatattagttggctttaaaaatctttttttgtgtgcgattaaagacctttcccggaatgtaagacattaatcttcaatgatcccagatgaaatgcttacttgtcccatttttcaaacccaataaccttgaatccaactcacaagttttttttgtttattaaaatttattggggtggcaaccctaaaccccccggggaat

SEQ ID NO: 141587 - DNA, 389 bp, Glycine max
  Clone ID: PAT_MRT3847_98865C.1
ctcgactaatattctgtcattcagaccagcttcctatactatggtataggaccaaacgtgaaagcgaaaaaaaagattcttaagaaatataactaagcctctcttgaataatcaaaacgaatgttgaatccaaatcaatttgatatagaaaaaagacttaaaaaggaggattcgcaatgcgagatctaaaaacatatgtttccgtggcaccagaagcaagctctctatggctcggcgcgttcgcgggtctcttgatagagaccaaccgatatttttccagaggcatagatcttcccttgttttacattctaggcattgacaccgaaaggggtgaagaagattatacagccaattaaacattaaatatatgcaatgaatgtctaataaat

SEQ ID NO: 141588 - DNA, 920 bp, Glycine max
  unsure (1)..(920): unsure at all n locations
  Clone ID: PAT_MRT3847_98866C.1
tacggctgcgagaagacgacagaagggggacacactcatcttcttcttcttctttttggttttctctctcacagtgagtcagcagcaatggactccatttccccaagagctcaagagaataataacactacggcgaaggccatgatgacgagatccgaaccagcgaacccatacccgacaacgttcgtccaagctgacacatcctccttcaagcaagtagtccaaatgctaaccggctcctcggagacagcgaaacaagcagccgccggcggctcctcgaaaccttcgaactcgatcccacccatgaaatccatacccaacaaaaagcatttttctaagctctacgagcgcagagcaaactccctgaacctcaagaacatcaaccccctcacctcgtttttctcgaaccacaacactaattccccccgaaaacccgacatcctctcccccagcatcctcgacttccccgcactcgttctcagccccgtcacgcctctcattcccgaccctttcgaccgatccaacgccgccatcgattccgaagctgaagacaaagccatcaaagagaaaggtttcttctttcacccttctcccagagacaaatctcaaccccgcttgctccctctcttccccacaacttctcccagagcctcctccaatgctccttcttccgctcctccttcttaattttgtgtaagattcttaatttatgttttaattatttactgccattcatgccgattagagggctcagtgtttctcaaatttgtaatggctgataatcaagagaatggaataatcttaattaattgcttcaattgtatgtactgtacaaatcattatgctgtctttcaannnnnnnnnnnnnnnnnnnnnnnnnnnnnnnnnnnnnnnnnnnnnnnnnnnnnnnnnnnnnnnnn

SEQ ID NO: 141589 - DNA, 645 bp, Glycine max
  unsure (1)..(645): unsure at all n locations
  Clone ID: PAT_MRT3847_98867C.1
ccacgcgtccgctaacgggcttctattgtcagaatcagaactgctacctttcttcttcttcttcttcatctttctctctgtatagtttggtaccaccgactttaccttacaccacagaatcaatctcttttattatttattattggtcgattttgtgtatgagcagttgtagtttatgttttgattgataaatttgctgtttttttttgtgattgttgaagctaaaactatagcatggatgaagactttgttgaccaccgcaacccaattagaagttgccgaggaatcacagcgccaaaacaaagattcaccccacccggaatgccgaaaaatcttaaaatccctagaagccttcatccctgttaagcaggactactcccagataccacctcgggaatatgatggcattctacatggtaaaaatgtagttgaaggtattgatcatgcagatacatcacagcatcctcatgtaagcctttttatggatgatgctgatgttatggttgaagagttaacagtaaaaagttacaatggctcaagtttggatattggtacatcaaacaaccgagagcagatatataatcggcagaaccattggcanaatctttatcagctagcaagtaattcaggaattggaaattcact

SEQ ID NO: 141590 - DNA, 142 bp, Glycine max
  Clone ID: PAT_MRT3847_98868C.1
tcccagcatataataacctctgcagatctggctgaataccctacttgtactgaatctctgcttacacattatcaatggtatcagagctttccacctacaaggatacggatatacctgtcagagccttcacaaatatttgcat

SEQ ID NO: 141591 - DNA, 877 bp, Glycine max
  unsure (1)..(877): unsure at all n locations
  Clone ID: PAT_MRT3847_98869C.1
ataattatgatccaatggtaattaatattacacgccctctcttcctttctctctctctcattctctgtcctgcctccggaaaccctgaaagaaaccccagcaaacgggatttgtattgcatttgagctctgttgtagtacctgaaaaccttaatcatcctatggagaccaacaacaaacaacagcagcagaagaagaagtggtttatgccactggttctgtctctactactgtccaccctgctcatacttttttccatcttcgtctcctccgattcctcctctctgctctacctctaccgtacacgtggcagactcgaggagcctcgtttcgtggagtcaaagctgaggctgtccgccacgtcatccagcgattccgttcccaggatcgcgtacctgatctcggggtcaatgggcgatggcgacactctgaagagaaccctcaaggccctttaccatcccaggaaccaatacgctgtgcacttggacctcgaagcttcttctcaagaaagattggagcttgcaaactttgtgaagaacgaccctctctttgcggaagtgggcaatgttaggatgattgttaaggccaacttggttacttatagaggacccactatggtcactaataccctccacgctgctgccattctgttaaaggaaggtggactctgggattggttcatcaatctcagcgcttccgattaccctttgatcactcaagatgcagnacaggcttgttcctctttctctctctttcgttgtanccccgngtggtggnggaggaggaataccaggtttcagaataaaatctgctgcatacactgtcatcaattccaagacaccttaactttattgagcacaccagtgatattggctgga

SEQ ID NO: 141592 - DNA, 297 bp, Glycine max
  Clone ID: PAT_MRT3847_9886C.1
gcaggcggcacatctaggtgttaagaatcaattaaaaaagcgcattaattgaaaatggatgttacatacacatgtccaaacacctacttaacacagttctttgaacacatgacccaacatttgccattgggaagggaaacatattttgcgggcgttcacttccagggacacattgtgaagttccaacaggaagttggcctgaaacaaagggtcactcctcactctaccaaatgtgctgcatgagaaaaggtaatgcctcatgcttcaaacgcatggttgtgcattgcaggagaagcc

SEQ ID NO: 141593 - DNA, 233 bp, Glycine max
  unsure (1)..(233): unsure at all n locations
  Clone ID: PAT_MRT3847_98870C.1
tgacnaccatactcttcctcttcgcagggactcttctactgctncnnctctcactctccacggaggtgttatccgccacctgatgggtggcgtgcggcatctcaacggcgccgttttccctgagcacaaccccaacatgcggcgatcaccgtgtacaaaataggaggcagccgctctnacacccatgttttcgacacgcttaacaactcccacccgatcgagtccattgaccc

SEQ ID NO: 141594 - DNA, 236 bp, Glycine max
  Clone ID: PAT_MRT3847_98871C.1
gagaggactttacaatggagatatggaatagttggtgttttttgcttattatgcaatttctaaacttttttagttgttggatttcatttgcaaagtggaggactttattctcaagagcttttggttatggccacaaagttgtgaagggtgacttcagtacttggatctttagttccttcaatgggttatgtcacagtaggatctttcatattcttcctcttgttcctttcctgggc

SEQ ID NO: 141595 - DNA, 389 bp, Glycine max
  Clone ID: PAT_MRT3847_98872C.1
ccccgccaggccaaaatgaaatccaaaaatcaaacccttcgttttcaaatatggggattaaaattaattttgcccaaattaaaatccttaaaatcctttttatcccgaactttatacaaatttctaacctaatgggaaactttgaaggagggacacccaagggaaaaaaacctttttttcccaccctcctagttttgccccagggtcatagttaaaaaacagccgaaactcatttccaagtttgctaaagggttgaggcctaaaaccacagggatgcaagcccaaaatctttggtgccgtttttttttgcacttcacctgttagaaaaagcaaaaatgactttccaggttgtacaaccaaataaattgtttcagcaactttttttaagc

SEQ ID NO: 141596 - DNA, 801 bp, Glycine max
  Clone ID: PAT_MRT3847_98873C.1
ccacccgtccgaccggttgcaagaggccaacagaggggggccggcaaaataaagagtcctaatgagaagttgagtggtcctcttgatgagattgtcaagaggagaatggaagacaagaatagaacttcaaagaatttcttgtcactcattttgaatgcaagagaatcaaagaaagtatctgaaaatgtcttttcacctgattacattagcgctgttacttatgagcacttacttgctgggtcagctaccacagcctttaccttgtcatccattgtctacttggttgctggacaccgagaagttgagaaaaagttgcttcaagagattgatggatttggtacacctgataggattcccacagctcaagatcttcatgacagttttccttatcttgatcaggtgattaaagaggccatgaggttttacactgtctccccattggttgcaagagaagcatcaaatgaggtggagataggaggttatcttcttccaaaggggacgtgggtatggttagctcttggagttctagcaaaagatccaagaaattttccagagcctgagaagtttaaaccagagaggtttgaccccaaatgtgaagaaatgaaaagaaggcatccttatgcattcataccatttggaattggtccccgggcatgtattggtcagaaattttccctacaagagatcaaactttctctgattcatttgtaccggaaatatgtttttcgtcattcacttgacatggaaaaccctgtagaaatggaatatggtatggttctcaacttcaagcatggtctcaag

SEQ ID NO: 141597 - DNA, 653 bp, Glycine max
  unsure (1)..(653): unsure at all n locations
  Clone ID: PAT_MRT3847_98874C.1
ctcgagccgaatcggctcgaggaaagacgtcagagaagctgcgcaccttttcacactagtgctgattgctgaaactggcatcgctcgccatttgcacaaagatcccaacaacacttgaaagttgaaacagaaaaacaccaatccctcatcgtactgttccgttatcaattctcgtgtttaagtctgcctacgttccgcttcctttgccatcagagcaagtccacgctttgaacccggtcgggtcacacatggctacaccaccacaatgggaatttagctggtatctctctctctctctctctctctctctctctctctatatatatatatatatatatatatatatatatataccttttcaaccaagttttaatttttaggtttttgcattctgtgaacgatgatgcaacacatgtatctctctcttgatatttgcattgttcccgctcctactgtttcataacttattcttttcttcaagttcgttgttggtggtgttattattattgntgntgagaattttgagtgactctaatttcttatttccggaggatttggaataaaccatcaatttggtccctcaactattatcttctcttctcttaagcaatgaaattttataagtagtctttanagtattaaatatatatatt

SEQ ID NO: 141598 - DNA, 770 bp, Glycine max
  Clone ID: PAT_MRT3847_98875C.1
ggaaattcttcacaagtaaatggaagtacttcacaatcagcagactcttgcggctccaatctaaacctcagtgttcctctcctcttcggcacaaccaacctcaattgtcttcctgtttggaatgctcaaggatacatccttagatattctcagacatctcaaaacatatggagcttcattctctcagcaccaaacccaaattcatacatagcaattgggttctctcccaatggaggcatggtgggttcaagtgccatagtggggtggatctcatcaaatggggcaggtggaggcatgaaacagtactatctaacaggtctcacaccaaaccaagtggtgccagatagaggcaacttaaaagttctcaccaactcaaccttcatcacatcacagtcctcacgtttgtacatggcattccagttagagactaaccaacctctttccaagttgatttatgcctttggacctaacggtgtgttcccttcggcaccaagttttgcattagcgctgcaccaagacaaagtctccatcacgttgaattacgcaacaggttcaagtgcaacaacaggaaagtcatataacctgaaaagaagccatggattgttgaatatcttaggatggggcatcctaatcataatgggagcaatagttgctcgctacttcaaggaatgggatccattttggttttatttccacgcttcagttcagtctttgggttttgttctgggagtaactggtgtaattagtggttttgtcttgaataatcaact

SEQ ID NO: 141599 - DNA, 524 bp, Glycine max
  Clone ID: PAT_MRT3847_98876C.1
gagattgaaggggtagtatttttgcttttgcatgcatcaatcagaaacgagggattcgatctagtagctaactaaaacaagctttttgattgcgtttacacgtgtttgttaaaggtggcaaatcctaaagagaagaagggaaacgaggttgacaatatattattccatgaagggatgatgaacaaccctgcattattgtcaaggctgtttccgggtatcaatagggagagggagatgtctgccatggtctcagctttgacccacgttgtctccggagaggttccaaccggtgattcttcttcagttcttcatcatcaacctcatgatgatgatgctgttactgttaaaccaaacatgccttctacaacacccttttcatctacttatgttgttgccacctcttctctcaagagaagtagacaacatgatacatatacaccatccttctcacatccaccttcatcattccctgctatgccaacaagtgcagaatgttcaaagagtggaatgggaaatgctgtgta

SEQ ID NO: 141600 - DNA, 968 bp, Glycine max
  Clone ID: PAT_MRT3847_98877C.1
cgtacagtatgactaggaattcggcccgcacacactacgaggacaagttttcccacaacaaatttcaaacttaaatatgagttttgagtggagtgaagttactagcactttacactagggagaaacattgaagccatcactgaaatcaagcaaatggggaattgctcaatgaagggtaccactggagaatgtcaccactctattcgtgttatgtgtgacagtggtgccattttgcagttaaaagctcctaaaacagtggctcaagtgcttcaacactacccgggttatggtattttccgccagggtcatgcttcagcacctttgccagagcaagagagtttaagctatgatcttttctattatcttctccctttgaaggaggttcaagtggagcaccaaaaaagttgctgcgacaaagtccaacaagtggttcaaagatcagaggaaatgtgcaaatctgcagcatgtgattatgttgagaatttgtcaaatgggtcagcgcttgaagtgctgccaacagctaagaatggggtgtggagagtgaagttgttgattgaccctagacaacttgagaagattttgtctgagcaggtgaatactgaagcgctgattgagaagatgaggatggctgcaactgcatgttctactactactccttctccttcaaggaccccaaccccaaccatgagctctaggaaactactggggtggaagacaacactcttcaatgcgaaaattgctaaagacacttcccctgcagcctctaatttctttttgggttcctgttagggaaagcttttctaatttctatttgtataatctatctatatatgcagaaaagcatttagtatgctagctagcttttctctaaacaatagtgggtccatttatgatgtatttggactacctgtccaaatattaatcttgtgatatggatgttatggtaggattataaaactttttcattt

SEQ ID NO: 141601 - DNA, 353 bp, Glycine max
  Clone ID: PAT_MRT3847_98878C.1
cccacgccatcgacttgtggttctatcctgcggagcattaggtcagataaactattgaccctttcacagggggaatttggggggacaaaactgttactggggccactgtacaaggtctccatatagctgcttgtacattggtgctggtggaaataatggctgtcaaatgcctataatggcacaggcggaaaatgcgtcttttaaagggagtgattgcacctctgtggtgcagggttttattacaaacagtaacactactgagcagcatgaggcatgtatggagactatcattgatcgacatgcaagtgccgagtgctacataataggggcgatgctttcggatgatgcttatg

SEQ ID NO: 141602 - DNA, 464 bp, Glycine max
  Clone ID: PAT_MRT3847_98879C.1
tccatctttgttgcttttgactgtcttttcttctccgaaatattcatgcatggctactaccgctcactgggcaaacatggtgttcgatttttttctcttgtcttttctttgatgcacaaattccgagctgttcattctgagctggtgagatccatggaagatataggtccgaattcatgcacaaggccagtgacagagaagaaagcaagacccctagaacaattgaattgtccaaggtgcagttcaaccaacacaaagttctgttattacaacaactacagcctcacacagccaagatacttctgcaagacttgtagaaggtattggacagaaggagggtctctgagaaacgttcccgttggaggtggctctaggaaaaacaagagggtcacctcatcaaaggttcctgacttgaatccaccaattagcctctcatcagtctcagccatttcttcccaaaaccc

SEQ ID NO: 141603 - DNA, 339 bp, Glycine max
  Clone ID: PAT_MRT3847_9887C.1
aggaaggttaagacttaagagaggttgtagcaatgttctttttcttcgtgggagggttacagcaagagttgcggcaggtgctgaaatctggtgtgggcaagtgcacgtgctgcgccaacaaccgcgtcgatctcgtcaactacgacaaggttctcaaactcttcttcgttcctgccgcccggaaccgccgccgattcggcgtcggcgaaggttcccggcgccttgcgctgccgtttatgcgaccgcgcggtggaggctgacttccgattctgccccttctgtggctccgaactgtgaagagagatgtgtcaagagaggttttgggaaaatttaaaaaaa

SEQ ID NO: 141604 - DNA, 339 bp, Glycine max
  Clone ID: PAT_MRT3847_98880C.1
ccgaacacaaatgggaagttggcatttaaaaagcaaaccaacaacgcaacggcaaagccctaaaactcggtgtgcttaacaaaaatgtaattaggggttcctacaaacccaacacatttaaactgaatgataaaaggggtcttgcccccgttgatcaaaaacccaattttgggaacaaaagttgctagatgatggtggggactttaaactttgtccgaaaaacaagctacctataaacgaagacacaagggcctgaaaccaacattttttgttaccattagaaacgacattccctgttgaaccaaaccgcacgattcacttttttttttgggcagcctt

SEQ ID NO: 141605 - DNA, 2013 bp, Glycine max
  Clone ID: PAT_MRT3847_98881C.1
gttcgcgtccggcagctgcagacaaacgcggtgagttctctttacatatccatctttgttgcttttgactgtcttttcttctccgaaatattcatgcatggctactaccgctcactgggcaaacatggtgttcaatttttttctcttgtcttttctgtggtgcacaaattccaagcttttcatactgaggtttggtttggtttagttagaccctaacacaaataaaaacttccacaaggtattagatttaattgtatcttcttttaaattttctagttatatctagcacatataagatatacgtggcaaacttattaaaggtctcgatccaccggatattggcctcctatctttcccttttgtaccaaaaatattaataaccataatcccaaacactcaaagcactgccacaactttaacctacactctttaacaaccttcttggccgtttgatgattattatcatatatataacaggaaaaagaaaaggattaattattgatttgttattattgttgattcttaaagtttactcattcctcttgttttgactgtcttgtaaattacctccttaatctgttcgcgtaatgaagttaattattaccaagtcatatgcaataggtcttgaaattttaatttttatctgtgtggattcttatcacgctaaagagcagcttacgaaaataaagcctcttttggggttggattagctggtgagatccatggaagatataggtccgaattcatgcacaaggccagtgacagagaagaaagcaagaccccaagaacaattgaattgtccaaggtgcagttcaaccaacacaaagttctgttattacaacaactacagcctcacacagccaagatacttctgcaagacttgtagaaggtattggacagaaggagggtctctgagaaacgttcccgttggaggtggctctaggaaaaacaagagggtcacctcatcaaaggttcctgacttgaatccaccaattagcctctcatcagtctcagccatttcttcccaaaaccctaaaatgcaaggagtccatgaccttaatctggcttttcctgcagctatggacaagtatcatcatggcacgtctccgtatgttgagatgccaaaacttgaaattggtggtgatcacagtactagtcatcatagtcaccaccatagccatagcccttcttctgcagttgagctactacggtctggcatggattctaggggtttgaatccttatgctcctaattccttgatgtcaggctcagatcattccctttatacacctggctatcccatgcaggaaattaaaccaaaccttagcttttcagttgatgatggatttggaaatagatcatatggggttcaagagaatggtggagggaggcttttgttcccttttggagacatcaagcacctttctgcaggtcttgaagtggaacacaataaagaacaaggaaataattcaactggatattggactggttggtgaagggtcttcatggtaaggaaagaaaagaaatattgggagaacataaatatcaacctgcattgttttctttctcttcactgtttctatctatccgcttgaagttgttcagatcactaacaataggatacacatggttactctattttgtatacattattattattattacatttctattcgagcaatgtgaggattttacagctcatcttggttatttttaatatgtttagagagagagagatagaagaagaggtgaatatagggtctgcttttgtccaagtcatgcaatgcaatgacctgtattcatgaattcttctgtcaaggagtagatacatatctatcgatcacctttattgatgtatgcatgctttcaaagatttggtacaaaatgacttttgatgattaaggaaagagtcagatattcaagtttgtaaccataattatacatgtattggattggtttgtgtgttctttcctattacaaaaatttctatctatgtcgatctatgcaaaaccc

SEQ ID NO: 141606 - DNA, 500 bp, Glycine max
  Clone ID: PAT_MRT3847_98882C.1
ctcggaattcggctcgagagattattggagcagtgggaattccagtggaacatttatgtagtggaacaagagttgagggctttttccccatccttggtgctaatgggaaaccatgtaagggtggatcagtgttgagtttatccattcagtacacccctgttgaaaaggtgcctctttatagccatggagtaggtgctggtcctgattatgaaggggtccctggcacctactttccccttagaaaaggtggaaaagttacactttatcaggatgctcatgttgaagaaggttgccttcccagtttgaaggtggatggatatgtgaattacaagcatggaagttgttggcatgacatatttgatgcaataagtgaggctcgtcgattggtttacattgtggggtggtctgtgtactacaatgttagtctcattcgggatagtgctaatggaaaatcctacactttaggtgatcttctcaaaccaaatcacatgaaggtgtga

SEQ ID NO: 141607 - DNA, 1303 bp, Glycine max
  Clone ID: PAT_MRT3847_98883C.1
atttcttctaaaactttattttctctttgcatcattcataaagtaataagccagcagatggctcgagtaaagccattccacaaacgaactaaaacattctttcttgcactaaagagcagctgcagacaaacaagtaggttggattagctagtgagatcctccatggaagatatcggtccgaactcatgcacgaggcaagtggcagagaagaaagcaagacctcaagagcaattgaattgtccaaggtgcagttcaaccaacacaaagttctgttattacaacaactatagcctcacacagcccagatacatctgcaagacttgtagaaggtattggacagaaggagggtctctcagaaacgttcccgttggaggtggctctaggaaaaacaagagggtcacctcatcaaaggttcctcctgacttgaatccaccaagcctctcatcagtctcagctatttcttcccaaaaccctaaaatgcaaggagtccatgaccttaatctagcttttcctacagctatagacaattatcatggcatgtctccatatgttgagatgccaaaacttgaaattggtggtgatcacagtactagtcatagtcaccaccatagcccttctgctgttgagctactacggtctggcatggcttctaggggtttgaatccttatgctcctaattccatgatgtcaacctcagatcattccctttatacaactggctatcccatgcaggaaattaaaccaaaccttagcttttcagttgatgatgggtttggaaatagatcatatggggttcaagagaatggtggtgggaggcttttgttcccttttggagacatcaagcacctttctgcgggtgttgaagtggaacacaataaagaacgaggaaacaattcaactggatattggactggttggtgaagggtcttcatggcaaggaaattatgagaagaaatattgagaggacatataaaccttcactgttttctttatcttcactgtttcgatctatcctttctcacatggatcattatgatctatctgcttgaagttgttcagatcactaacaatagggttactctgttttgtatacattattattattactacatttctattcgaacaatagcaatgtgagggttttacagctcatcttggttgcttttaatgtttagagagatagatagaagaagaggtgaatatagggtctgcttttgttcaagtcatgcaatggcatgtatttatgaattcttctgtcaggagtagatacatatctatctatcacctttattgatgtatgcat

SEQ ID NO: 141608 - DNA, 358 bp, Glycine max
  Clone ID: PAT_MRT3847_98884C.1
aattatcaggtcctgtgactccagttaccggtggcatgtcacaagccgcaagtggtactaataatgatccaacaactacaacagtggataatggcactacttgggactttccatctacttcagtagggcagacaactgcatcacccaacaatactagtgtttggtcattcacatcaaccccagccactgagtcagcacagccttctaacgaagttcctctacatactgaagtttcatatgcatataaaacatcaagcatgcaatatgttccttctgtatcaacagtttgtagttcaaccacacaaccaataaattcaccagtcaaagatgtagcttcaaataatcagccatcattagc

SEQ ID NO: 141609 - DNA, 257 bp, Glycine max
  Clone ID: PAT_MRT3847_98885C.1
aaggactaaagataacaatttgttgggcaaatttggactttcctgcattccccctggccccaaggggggtccccaaaataacgggtgccttgacaatgatgccaatgggaatttggacgtccccggcgaagattagaccaatgggcaaaaaaattagattaccaaccacaattgcaagggttaaccggccaagggaaaattccgaaaaaagggttaaaagggctgaaatttaaaactcaggggttaaagcacacaaa

SEQ ID NO: 141610 - DNA, 656 bp, Glycine max
  Clone ID: PAT_MRT3847_98886C.1
gctttctttcgtccgcccacgcgttcgaccacgcgtgcggatgtcagaaaccgcttgcgcaacaagaggtatgttgacttgtttgatgacatatggaatgaaaaattctgggatcacattgaatgtgctgtaattgataataaaaatggaagtaggatattaatcacaaccagggatgagaaggttgcagaatattgtaggaaatcatcatttgttgaggtgcataacctagaaaaacctttaactgaagaagaatctttgaaattgttctgtaagaaggcatttcagtatagttccgatggagattgtccagaagaacttaaagatatatctcttgaaattgtcagaaagtgtaaagatttacctctagcaatagtggccattggtggtcttttgtctaaaaagatgaaagtgcacctgaatggggacagtttagtcgagatctaagtttagacttggagaggaattctgagttaaatagtataacaaaaaatttaggtttaagttatgatgatttgccgatcaatctcagatcatgtgtattgtatttcggaatgtatccggaggactatgaagttaaatctgatagattgattagacagtggataactgaagggtgtgtcaaacatgacaccggaaaatctgtggaagaagtt

SEQ ID NO: 141611 - DNA, 272 bp, Glycine max
  Clone ID: PAT_MRT3847_98887C.1
ctcgagctcgagccttctgaagtatcagtgtatgtaatgcttgtatatcttgtctatgtttcatcactagaaagatagattattgttattatttaactgttggactgtgatgttttggatacagggagaagacaaaaccaaaatcattgagaaaaggacccattgataaagttcaaggagaaggagaatcttccttaagtaccaacacagacgattccaaacctcaaagggtgaggacacttccaaattatggatccagttttaagtgtggt

SEQ ID NO: 141612 - DNA, 576 bp, Glycine max
  Clone ID: PAT_MRT3847_98888C.1
ccccccaaaggcgtgaaaacccccatcccgtaaaaaaaaaaataaatttctcaaaactcagggggagtttttatagaaaaaattcctgccccttttctaaaaaacgggagccgtcccatttttaatttcccccccttttttaaaataaaattaaaaaggccttttgtaaaaaccattttccctgccacataaaaaccctttttttgggacccggtttttttccccccctgactggggggggggttccccccttaaatacaattgttggcccaagtacttccttccccaattttggggccttttgttccccattccccccttttgaaaaaacattttaattgccgcccctgcccttggatttacccggggggggcatttaacaactgggtttttaaaattgggggggactttattggttggtgggcactgtccctttccaaaccctataaaaaaaaaggaatagcccgcgatgttccctgactgcccaaagtcctcccaattttggaacccaatctccccgaattgatggaaattagccccccttacaaaagtttgggaataggctttttttccccc

SEQ ID NO: 141613 - DNA, 261 bp, Glycine max
  unsure (1)..(261): unsure at all n locations
  Clone ID: PAT_MRT3847_98889C.1
cgcttcctcttaattactctantattctttntcctcctcagaacctcaaacaccgaaaccaagcattacaattcccaatttcatagaaacacnagaatncaanaanaacaatancaacaaaagcagtgaaaaatggcgagctcggtggaganggagngtggcgcgagcgaggaaactntctctttggagctgcntgctccaccnagtgggaagaagnagtgcaatccagaaaagtgggtacccnaaggaaaatgagntgtg

SEQ ID NO: 141614 - DNA, 356 bp, Glycine max
  Clone ID: PAT_MRT3847_9888C.1
aaaaacaagctggaatagaaatttttctaagcttaaaagcccaagttttaaacattcaaagacattgttgtaaaccaagttttacgggggggggggtcatagatcagtttcaacctcaaacaatttaaagataaatgtttcggggggacaaaaatttagggcctgttacttctccccacacctggcagttcaatcattaatcaccccccccttgccttttccaggggttttccacaattagtttattaactccccaatttttatagtttccattaggcaagtagcgcccaattgtaaagggttttttccgctttcgaagctccttcatagcaatttcgggggggtcagtttccccc

SEQ ID NO: 141615 - DNA, 294 bp, Glycine max
  Clone ID: PAT_MRT3847_98890C.1
gtgtggttttattttttggtttaattgagtaactgggattgcgatgaaaaagaacgggatctttttgttactaacctattggaccccccaagaaggtttgaggaccccattcaaaaaattttccccccagaatgttcttcccagaattattttgacaggtggaaaaaattttttttgatgacgatccccataaagtataaagccttaaaaggggcagcttttggtgtttggtgggggaagattatatgccctttggcccccctaaatttcggggtcccctttgtggaaacactt

SEQ ID NO: 141616 - DNA, 148 bp, Glycine max
  Clone ID: PAT_MRT3847_98891C.1
gaaaagtaaacataggtatttatcgttttatagcttacaaaagtgggaaacatagctcttcgtctattatattatgaagagcattcagttgcagaccatgccatttattggagattaaactaccatacaaaacaaaggattctacagc

SEQ ID NO: 141617 - DNA, 268 bp, Glycine max
  Clone ID: PAT_MRT3847_98892C.1
acggtaaaatatatacataacaagatatggcattcaacggttattttctttagggcctaataggtattgttcttgataggtcttacaaagttacatgcgaaattagaaacagattcagttttacctattattgacatttcactgtgtcggaagaagtttcccataagggttcatcttttgggcgggatctttctcgtaccaattctaatgtgcatcaaaggaaggtgtttgagaaccaattgtttggaatacctttacccataattat

SEQ ID NO: 141618 - DNA, 436 bp, Glycine max
  Clone ID: PAT_MRT3847_98893C.1
gagaacccgaccccttgtgtgtgtaatttagttgtttattgtttatagcaccacacgcacaaagtgagatagaaagagagtaaaaagaggttgttctgttcatccaactcttaaaaaaaaaacagtgaaagagtgtaactaaagtttcttagagtatcactcgtcatatatgttacatggacatggctttggctgtgtttccaagttcaaaatcaaaactcagaaagacacaaactcgttctcttggtgaaacaagacaacacaaatgtggacaaaaacacacagggaaacgaaatttcataaacatgaattttagtctatgtttgcgctccccaatcgctctcctccttggacattttctctttggcttttctaccctttgttctgttcattcttaacaaattggtgaccaccaccttgttgcaaatcaaacttt

SEQ ID NO: 141619 - DNA, 142 bp, Glycine max
  Clone ID: PAT_MRT3847_98894C.1
ctcgctccaagaagacgacagaagggcgtcgcggaatttggcactcagacagcgtaagtgttagggatagacgtatatgcccagcatccggtctatcatgctatggattttagtgtcgcttttacgttttctggaagtatca

SEQ ID NO: 141620 - DNA, 322 bp, Glycine max
  Clone ID: PAT_MRT3847_98895C.1
atgggaggatcttgatattggagagcgccttgcatttggttcttatggtgaattttatcgcgcacgactcgaatgggactgaagtagctgaaaagaactttctggaccaagatttatgtggcgatgcactatctcaattcaaattcgaagttcacatcatgttcatggtgcggcattcgaatgtcgagctattcatgggagctattactcgcttcccacatgactctatattgacggaatatctttcatgaggcaccttatataggctattacatcgacccaatcttctactagatgagatgaaactgttgctcatggatat

SEQ ID NO: 141621 - DNA, 1620 bp, Glycine max
  Clone ID: PAT_MRT3847_98896C.1
atgcgcgagtgtacgggcaatagttcactgaagaggaaattgcacaatatcaatatctggagttggattcatttgatgctgatattccaattgtgcagaggcatgggagcagttttcggcgcttgactctaattggctctgatggttcccaacgccattttattgtccagacatctttgactcccaatgctagaagtgatgaacgcatactgcagcttttccgtgtgatgaaccaaatgtttgagaagcacaaggaatcaagacgccgtcacatatgcattcacacaccgataattattcctgtttggtcccaggttcgcatggtagaagatgatttgatgtatagcactttcctcgaggtctatgagaatcattgtgctaggaatgaccgtgaggctgatcttccaataacctatttcaaggagcaattgaaccaagctatatctggccaaatatcaccagaagctgttgtggatcttcgtctgcaagcctataatgaaataactaaaaatctagttaatgacaacatcttttcacagtatatgtacaaaactctacctagtggcaaccatagttgggctttcaagaagcaattcgccatccagttagccctttcgagtttcatgtccttcatgctgcaaattggtgggagatccccgaacaagatcttgtttgcaaagaacactggaaaaatatttcaaactgattttcaccctgcgtatgatgcaaatggattgattgagtttaatgagcctgtcccatttaggctgacaaggaatatgcaagccttcttctcccatggagtggaaggccttatcgtatcttcaatgtgtgcagctgcacaggctgtggcttcacctaaacaaagccagcacctatggcatcatctagcaatgtttttccgtgatgagctactgtcttggtcttggagaagaccgcttgggatgcccattgcctctatggctgcaggtggtactatgagccctgttgacttcaaacagaaagttatcacaaatgtggaacatgttattacaagggttaagggaattgctcctcagaatttttctgaagaggaggaaaacgttatggatccaccacaacctgtgcagaggggtgttactgagttggttgaagctgccttgaacccaagaaacttgtgcatgatggatccaacgtggcatccctggttctaagttctgattcttgagaagtatgtagcaggaccgtaaatatgtgtgtacatattccagctactaattgtgttgaaacccaattgtaaatcattatattgggtttcatttatcttcttataggctatagagcgattcaccgtagagtattagccacaagaacatgacccggtaggtacccattttaatattacgtggtcgttgttttgtacaagtgatccgcgggttatttaacgcggttcgacgcgtgtacatctgtaaatcatgagtagaagacgatttttaaaatttgtgcagaattaacctgttacttctattatttaactcaatagataactacaacagttgccccccaacggtagggattttatccatcaaatgaaaaactatatttctataacaaaaaaaaaaaaaaaaaaaaaaaaccaaa

SEQ ID NO: 141622 - DNA, 917 bp, Glycine max
  Clone ID: PAT_MRT3847_98897C.1
agaaggccccccacgctgtcaacacatttttgctccagtgtggaacgtgaagtgacaatctctgtactgaaacagcctacaccacctaaaggaatcagttgcgtcaatcgtgctaattttccccccagccttagttctctgaaacaaagcacagtaacaaccaagggaagtcctgtacatgttgggacccgggtagatcaccgttcatttcccaaaactcaaaacaccctggccccaactatgtgcccaccagctctggctccacaggtgatgcgcgctggttttctcaccaggtatcatcgaaagaagacatcccttcagcttcaaatatgtgcagaccagagttgtctccacttctgtctggatttgccaattccagcacaccacttaacaacaatcgtggctctactcctgtccagcaacaccacaaaactaattgtaccactgactgatatattcttaagtgagattttaggaaaaaaatcaatctgtggcagaagaaatgaaattaaaccttccagagaaaacctccgtagatgtttttatgacggatcacagccatagtgaatcagttcaagagggtaaaatgtcatttgataattctcagagttcaaaaggtcaaaaggcactcttatcaactctagcttttgcagctgagcatgaatctgacattaagatgaaataccctactggtgctgaaagaaatttttgttgaagtttcaaaacaaggcacttcccaattttgtagaagataaccaggtggtagtttagttatgtgcggagctgtaatctttcagcaatattactctcgaaccgtttttttttattggaatatatgattgaacgtatataatagcactcatttacagtccatggagtattaatgacaattgtatataatagcagtcatttatact

SEQ ID NO: 141623 - DNA, 387 bp, Glycine max
  Clone ID: PAT_MRT3847_98898C.1
ggccaccttggaagaatcttccccaaagatacaagctcatcggcaccacttcattggcctttgttatttgtaacatggataaggtgaacttgagtattgccataattccaatgtctcatcaatttgggtggaactcaacaacggcaggattggttcagtcctccttcttctggggctatgcattgagtcaattgcctgggggttggctagccaaaatatttggtggcggaactgttcttgaggttggagtattgatatggtcagtggctacagcttttgttccttttatttctggatatatgcctggcttactattgtcaagggttttggttgggataggagaaggtgtttcaccatctgctgctactgatctcattgccaggtcaa

SEQ ID NO: 141624 - DNA, 125 bp, Glycine max
  Clone ID: PAT_MRT3847_98899C.1
gataatctggctgaggcaattccgcgtgtcggtttctgggtggtcatcgtgttcatacatgagttgcgggggttagctttctgatgagcccgttccttggccgtcaggatgcgaccatgtgctca

SEQ ID NO: 141625 - DNA, 918 bp, Glycine max
  Clone ID: PAT_MRT3847_9889C.1
aatggctctatccctgatgctcttcagattttcccgaattcttcctttgagggtaactctctatgtggattacctctaaagtcatgctctgtagtctcctgtacacctccatcaactcctgtctcaccatccactcctgcaagacacagctccaaaagtaaactgagtaaggcagctatcattgcaattgcagttggtgggggtgtgctattgcttttagtagctctcatcattgttctttgctgtttaaagaaaaaagataacagaggctccaatgtaattaaagggaaaggtcctagtggtggtaggggtgagaaaccaaaagaagagtttggaagtggggttcaagaacccgagaagaacaagttggttttctttgagggaagttcttataattttgatcttgaggatttgctgagagcttcggctgaagttctggggaagggtagttatggtactgcatataaggccatactggaggagtcaatgactgttgtggtgaaaagattgaaagaagttgtggtaggcaagaaggactttgaacagcagatggagattatgggaagagttggacaacacacaaatgttgtgccacttcgcgcttattattattcaaaagatgaaaagcttttggtatatgactatgtcccaggtggcaacctacacacactcttgcatggtggtaggacaggtggaagaactccattagactgggactcccgaataaaaatatcccttggaacagccaaaagtcttgcccacatccattctgttggtggtcccaaattcacacatggacatatcaatgccccccttgcgcgcctcttcctggggtgtgggcgctgcatttctgattttggcctttcgccccttatgaatggtcctgctaccacttttagagctgcaagttatcgtgct

SEQ ID NO: 141626 - DNA, 187 bp, Glycine max
  Clone ID: PAT_MRT3847_988C.1
tcggaattcggcctcagcggctcgcagtagctttcaagtttctaacaacaacacgccaaaactgtttcatacgtcctcctggggctatccttgcacctggtgagagtatcatcgccatcatggacatgtatatactccagccagaaacttctgccaagcctggtataactggaatcaattttcaaat

SEQ ID NO: 141627 - DNA, 337 bp, Glycine max
  Clone ID: PAT_MRT3847_98900C.1
ggggaccaaatttttgaggaaattaagggtttcgtttgtttaaggaagttcccaaaaattccccaattttaaaaaagggtttttttttaaaaatttttaaacaaaaaaattgtcaacctttccctttaaaaaggaaccggaaaaccttttttggcctttttttcaaaaaaattgttgggggtttgaaataaccccaaaatttggtgggcccattgttgaaatttttaagggtgattggaaaaatgttttaaagccttaacctgttaaataaagcccctcatcctttcctaaaaaaaaatttttggggcttttttttgggccttgggaggggggatcc

SEQ ID NO: 141628 - DNA, 197 bp, Glycine max
  Clone ID: PAT_MRT3847_98901C.1
acgctctagaacgggtggagactttgatccatatgaagcacagtaatctcttgtaatatcagatgctaattaggataaggcggaaggcatgagacatacaatagatgcagatatagctactatactaactatgacacgagtagaggctatcaatgcgatttcataactagctgatgcgtacgaatatctgaataact

SEQ ID NO: 141629 - DNA, 516 bp, Glycine max
  Clone ID: PAT_MRT3847_98902C.1
gcgttgagatatgtgtgatttctgattgcatagtgtcgctcgaagtcacagcatttgtgactcgacgtgcatcgtagagaccgcggaaagtcgatgagtcccgcggtaccacaaaataaagcaatctcgttggtatgagcagtaccaggtcatacaaactacaaggctctgtataaacattccttccgagcaccaggtagtgttgcctgagcaacgcagccgctgtaaggctgaagcaagcggtcggcaagactggcttagtacagacctgaatgtcgtctatttaagcttaaattgcgacgctgtaagatgctcatcattgatgccttgtaaagcccctcaggcttatctcagagagtatccctcgccgtccaatccttgtccacagccatgaacaggtccctcactgccacatgcctgttgaggcagctgctcggcgtacgctggtggcccttccgattaaaaccgttcgcaagcgtccggtttgccgtgagggaccttggatgcgcccataaa

SEQ ID NO: 141630 - DNA, 236 bp, Glycine max
  Clone ID: PAT_MRT3847_98903C.1
aacaaagttgatagcaaaatccttaatgatcaaatactgaattgagtgcctgctttatataccagaaatatattcaaattctagaagagaagggaaacatcagaagccaagatatatggggaagaaatataatctatgcacaaattaacaatgaagggggggcactcgaaactcagttaactgtcattggaaggccaaagtccttgaaatatctaggatacttggtggtttgttta

SEQ ID NO: 141631 - DNA, 770 bp, Glycine max
  Clone ID: PAT_MRT3847_98904C.1
ttttttttttttttttttttttttttcaaaatggttttgctaccttttcgttctattactacgtataacaaagtggcatctacagtgaagagactaggcatttgagcttccctactgtagttaattatagaaacgtgaccttggagacaagaccgtaccatagcgattcttattgtactcttcgtcgactttttatttttatggtaaaaattgaaaaccgtacgaaaagatttataatactcacagactctttatcaactttctatttacttgtagcgttttgtcaaaaaggtccataagatgatgtagttttctttctacgcttcaaaattctgaagagaagccagccattgttccatgtaattcttcccagctgaagaaaattcattggagaggttcttgatgacacccaaaagcgccttgtttgatgcctcctccaccaccttgcagcagctaggtttatagcaaggaaccagcactgcaaaaccatcatcaccattgctccgaaaatcagaggctagaggctccaaccacccaatggaccaatctgagtcatcagattcagaaccagacaagcaacaatcacagttacaatcattatcacatggtaccaacacaacatcatcatcgtactctctatccactcttctctcttccttgttccttccaactttcctatgtggtgggcccatctttgtctccttagcaagaccccattcagaagattgtttggaattcaaagcagaggcttttggaagaaacgggctttt

SEQ ID NO: 141632 - DNA, 326 bp, Glycine max
  Clone ID: PAT_MRT3847_98905C.1
gccgcccttccttttttttttttttattttgcaaacttattgacatactgatggagaactcaaggcgcggtcaagaaagccactttttcccatctttgtttattaaaaggggaaacacaactcactcacttcagggaacatcttttttttaagggggcataacatcttattcccaaaggtaccatgggtgaaattcatggatcaatgatgctttttcttggggtgcatgcttctctccaccccttgaacgtgaatcatgtgttctccaatttcaattactggggtgaccactactcggggtctgagcatggagaactttttttcta

SEQ ID NO: 141633 - DNA, 862 bp, Glycine max
  Clone ID: PAT_MRT3847_98906C.1
agttattgcttaattgcttccatagctgatggcgttttctcaggttatcacaacacttctttttgcattagctatagccagaattagcccctcagcatgccaaacggtagagggcaaagtctcttgcactgactgcgctgacaactacgatttctctggcattaaggtctcagtgaagtgtgaaggtgtgaaaaacctggctatggcgaccacagaagataagggcttcttccaggttgaccttccctcagaccaaacaaaacctccctcagtgaattgctttacaaaacttctcggggggccaaatactaatctttatgcctcaaagaaaaacctggtctctcaaattgttaagggaaaagagaaaaacacatacaccatctccactcctcgtggtttcttcacatcgtgtccccagaacactgaatgcaaggctgctaattataaccagttcggttcatccaaaacctttgatcttccattgcctcgggagtggggtttggctcctagtagcttctatgttcctttcttccccatcatcggaattccttaattattgtgtacgtacgttccactgttatatgctcttgttctttaaatgtttatatatgcatgctgccatgtcatttgtgtaacttatgaaagaatgccatgtatatgcagttgtgtggtcttaaattttaatgcatgcagataaacgtcctgcgctgctttgtgcatttatatgtatcacccgtactatcttatgatcgatatttgatttgaaaaaaaaaaaaaaaaaaaaaaaaaaaaaaaaaaaaaaaaaaaaaaaaaaaaaaaaaaaaaaaaaaaaaaaaaaaaaaaaaaaaaaaaaaaaaaaatt

SEQ ID NO: 141634 - DNA, 375 bp, Glycine max
  Clone ID: PAT_MRT3847_98907C.1
aattgaatgctgcagctcatggggatgctcccgatcaaccacgtgggttttggttatttggatttgagaaaagaaacaatggttggttgcgcctgggtgggcttgtgcccctaaaagcttttgacagtgcttacacaagcgttcactttacagaaaaatgagcatggaacagcttcaaagttgacttgggactatattacttagaccaattggtaaagtaaaacaatcatccctatatatacacaaacctctaactgagcagtgccaatcagatggggagatcagcggttgtatcaccaggcagaccattgatgagctgtttgacccatcttcaccattttattcaacatgcgctcagcttcttaactcacacag

SEQ ID NO: 141635 - DNA, 471 bp, Glycine max
  unsure (1)..(471): unsure at all n locations
  Clone ID: PAT_MRT3847_98908C.1
ggaagatatagaataaacagcattctggacacacaaggggcattatgaattccttgttataccctttggcttgaccaatgccagcctcaccgttttatgaatgatgtggtaaaaccatttttaggtgtgtgcttgtcttgtctaaatgaaggctcatgagtgctttatgtctaacaaatgtaatatatggattcagtggaactttaacagaaccagttgagaaaacaggtgatcaaattaaagaaatggaactgaaggttcatccaaaattgagacaacctttgacagcactatgcagtgatccaaataccacagttgttgtgctcagtggaagcggtagacaagtcctagatgataacttcaaagaatacgacatgtggttggcagctgagaatggaatgtttttacatgcttcanagggtgagtggatgactacaatgccagagcatctgaatatggaatgggttgata

SEQ ID NO: 141636 - DNA, 252 bp, Glycine max
  Clone ID: PAT_MRT3847_98909C.1
atgttcttgcaggaagggtttgcatttgctcactgcactacttgcaaggctccataccatttgagtgttcatagtgcttatagacaatggcgtactttcaaacttcggttttttgtaaccagagacattttgtttatatttctggttgttcagcatgtagatggttacgagcagtattggcttcgtcttgttgggggttttggtagcgagctgagcttttactatatatgtggtaaattgctatggacttga

SEQ ID NO: 141637 - DNA, 627 bp, Glycine max
  unsure (1)..(627): unsure at all n locations
  Clone ID: PAT_MRT3847_9890C.1
cgcgtccgagaatgggtatatgaatgggaggatcagagtcaagaagttgaaccagaagctaaaagtcattgaagtcccttgtcccattcaagcacttgatttctagttacataacaactatatgcatcttgtaactacttaaaccgtttcctacgatttgactctacttttgattccctttccagccaccaaatcaaaccaatacctcactgtttcatagcttttttcttcaacccaacttcgtggcttcaatgatggattcaaaaggagcactgccccaggttcaggaaatagagcaagaaggtgtcggtggagggactaacaagaagatggaggtaaaaaatgaaaccaagaagaagaaaaaaaagaggagttcttatttccccaggtttggttgtttcagaatcgaacatgatgcttctggtgaaggttttgatattgaggttgttgatgaatctggtacagcacccaccccctccccacttgatacttatgattaatggtcttagaagcaacgcaccaaattggaaaattgctgcanaaccatttctgaaaaggtatccgaaagaactattgaacattgcagggaaccagattcttccaagttggaattttgacagagttgat

SEQ ID NO: 141638 - DNA, 247 bp, Glycine max
  Clone ID: PAT_MRT3847_98910C.1
gatgctcctattaatacctgtctcatatatattaggccatcttttctatcctgggagacacacttaattattataatctccaactattctctttaaaatccttttctaatataaatattatataccgattgaaatgtaaccacacgcttaaattaagcatattatgaaagcattcttatgcacagctacttattcttccactcttctatcctcttccaatttcttcataatgaaacacgtttataaa

SEQ ID NO: 141639 - DNA, 423 bp, Glycine max
  Clone ID: PAT_MRT3847_98911C.1
ctcagcattttacatggcccacacattacattgacaaggttgtataacggaatgacttatggagactgctggcccacaatatggcctattctatctatccttaaggctaagcactgcctctagtacgatacctgaaccattatacacaccatggcaattggtttttgctcacctagcagaagaactaaaacattgatgcagcctagcatggcgcgctagctccatggctaacgccattgctcactcaggtttcttgtataaagaagcaaaacaagccttgctgaacttgagcactggcgtgatgtgccatgggaatgaacgagtaaataaatgtgtcttcatgggaaacggaagtgctgacagaagaatggctatgaacgcttgaaatactttagcatggtgttattgaccattgtctgacac

SEQ ID NO: 141640 - DNA, 306 bp, Glycine max
  Clone ID: PAT_MRT3847_98912C.1
ccaaggcaaaaaaagattgtcctacccccagagggaaaaatcctccccttttttggcccgttgaggacgaggagggattctaacccccgaccccgagggtcgcacccacgttgctctaatcctaagagctacaggccccaccccgtcatttccaatggatatctgttccccggagtatcctaaaaaaagggaacattccctttcccgagcctaagaagatgtgaaggcccctctctctataaaaacggggcgttccgaggtgtgaaggggaagataggggatttcataatggcggccccggggggg

SEQ ID NO: 141641 - DNA, 669 bp, Glycine max
  Clone ID: PAT_MRT3847_98913C.1
tttttttttttttttttttttttttttttttttttttttttttttttttttttttttttttttttttttttttttttttttttttttttttttttaaaaaggggcccccccccaacaaaaaaaaggggaaaaaaaaatgggaaaaaaaaaaataacccttttatccttggttttttataaaaaaatccccccggaaaaaaaataaaaaccccaaaaaaggggttcactaaaggggccaaaaaaaaaaaaaaaacctgggggggggggggacccaccccccgtttttttgggggccggaaggggccggaaaaaattaaaaaatttccccccccaggaaaaaagttttgttccaaggggtggccatggggggggaccaaaccccccctcaggggggggacggacaaccacaactgggttttttgggccccttttacaggaaataaacttaggggttaatcctttaaccccccaaagttccccctaataatgggggatgggaagggggccccaaaaaagttcatagggaattgggcccgaccccttaaagctaaaacccaccaaggacaacccccttttttgggaaagggatttttaatgcaaaaggccaaaatttttaaaaaagggggaatgggcaccatgaaattctttgtttccctccacccctggggg

SEQ ID NO: 141642 - DNA, 352 bp, Glycine max
  Clone ID: PAT_MRT3847_98914C.1
gttacttactgatttgtttctacatccgaacaacatgagacgtgtcacattaataaactcatggatagaaaaacaagaaatactgaaacccgtagaccactattatgaaaccagagccacaatccaaatttctacctagatccatggctttacttatcataaaatggctcaatagggccacgcccttgctatttaagatttttgtcatcacaatgattaaaactatattcaccaaggacttaatcaactcctaaggctaactttaacataaagcgggttcataatctcccacgagagcctacacaccttcgctaaaacaacctttctctcctttatggtagaccattaaaca

SEQ ID NO: 141643 - DNA, 516 bp, Glycine max
  Clone ID: PAT_MRT3847_98915C.1
attctttcgtttattctttttattttttttttttatttttttttttttttttttttttttttttttttttttttttcaaacccgggggcggacgcgggggcccacccggaaaaccgggaccgggcccgggaggggaaccatttttccctaaaaggagtcaaaaaaaactggggggaaccacgggaaaaaccccccccggggggaaaaaagaatccggtaacaatccccaacaacatacaagcgggaaccaaaaagggcaaagccgggggggccaaaggagggaccaaaccaaaaaaaatgggggggggccaacggccccaatacaaacgggaaaacccgataggccagctgcataaaggaaccgacaaacgcccgaaaaaaaacggatagcgtattggcccccaggggggtttttcttttaaccagggaaacgggcaacagttgaatgcccttcccccccgggcccgaaaaaaaagaaaaaaagcgggccccccgggattgcccccttaggcaaaa

SEQ ID NO: 141644 - DNA, 586 bp, Glycine max
  Clone ID: PAT_MRT3847_98916C.1
ggaaggccaaagcttctgactccacattaactcaattaataatatatagtttgaaatgggacttgtagcttgtcagaggtgggggtcttggattgcattgcaatttgcaacctcaccctcaaattatttgatttctcctcccaagtttgtttgtcctttgtgatgtcacatgttaatgttcaatctgtgagtctgtgatcccccaaagaacctggtgattttgtttgtctttcatcttgaaattttccctaggcttttatttttttcctgactactatcgtgtctcttatatgcctttgcaatttgagagttatgagctctgcattcccttctgtgcttcaaattgggtggtttgtcaagttgtggaaactttaatatgtacgttcacctgagcaatgaagactagttattaagactagggacatccttcaatgtgactcatcagacaccacatctttatcatctgccaactctacagcttggaccatggaccatcctaatttgctaaaatgagaaatatttgtggtagtatgaagataaagatgcacagtgtttttactttttaatataaaaaaaagaagtatat

SEQ ID NO: 141645 - DNA, 994 bp, Glycine max
  Clone ID: PAT_MRT3847_98917C.1
cccacgcgtccgggagaatggtggtgttcctcagtctgcatgagtgtagaggcaacaaagacagcagactgaccaaaccttttctcaaggctcatttgtgacataagtagtgatttctcatcatcaaatccagcaccttccaccccctcttctatatcctcaagactaaagatgggcacagttgggtcaacattcttgctagattttttcttgtctgagcctttcttgctagattttgatctcttctttcggttaccaccacagagtgaagaaagcaacccaggctttttatgcttgggtttaataggaggctcgtagcggacgcgtggggggtttttggagaggaccaaggagaagggaatggtggtgagggactgggccccacaggcggcgattctgagtcacgactcggtgggtgggttcgtgactcactgcgggtggaactcggtgttggaagcggtgtgtgaaggtgtgccaatggtggcgtggcctctctacgcggagcagaagctgaatagggtgatattggtggaggaaatgaaggtgggtttggcggtgaagcagaacaaagacgggttagtgagttccactgagttgggggaccgagtgatggaactcatggactcggacagagggaaggagattagacagaggatttttaagatgaaaatcagtgccaccgaagcaatgtctgaaggtggatcttctgtcgttactttgaatcggttggtagatatatggagggagcactaattaatgtaatgtttatgcagctaagcataatttatttggtagagaattactgtgagagaataattaagctttgaaaagtgtgatttagttcagaagggaagttcctcctcgataaagaatgagcacgagttaatttgttgtgctcaagactgtgtaactaggttaaaatatcaaaagtttgactgtgcaattgtgtttggaatgttacaaaacttttaaaaaaataaaatatttaattttt

SEQ ID NO: 141646 - DNA, 806 bp, Glycine max
  Clone ID: PAT_MRT3847_98918C.1
cccacgcgtccgtacggctgcgagaagacgacagaaggggggcacagagcaaaaccaaaaacatggcgtggcgctgcggatctctctctcggtcggtgctctcggccgcgagaaccattccaactcgttcctccatttctccactctcgccttcccttcgctctcatcttctccactctcgccgccccctcaatacactccctaggactgtgggaattctcgtgtgcacgcattcgctgatgcctctgcacagcgctgacgcctccgctcgtctcacttctcacatttccgtcgaatcgcgcgcttgctgcgaattgtctcagggtacttgaatagactttacaatcagcatcagttgtgattacgtttggcatgatgtgaaaatggtggctaatgctttgtagcaggaggcttgtggaggtttggtagtgcatttgagaaagataaatattataagcagttgtgattataagtgtttttatcttttttataaaagataaacaagtatatctattcttcttctgttagaatcttttcaggctaattgaacgtcatcaacattgtttttctttgtatcagataataatagcagtgttcaagacttaaagttatgttgaaattaagtgttgtataggtgttagctggtagcatggatgctcttttgttcaagtagtttaattgcactggttttgttttgttcttgcataaaattagactgttttatggggctagttgaaccagtgttttggcttaattttacaaggttgtctcctcccaagaaaaagatcaaacgggtggaaaagaag

SEQ ID NO: 141647 - DNA, 384 bp, Glycine max
  Clone ID: PAT_MRT3847_98919C.1
tgatggttatgaatatcatgtggattatgaggttcagggtgtttcaatggtactcgatgaagacgaaaatagtgaaggccacaaaactagtgaaatttgtgagattgatgagagcagtgaaaacagatatgcaagcctagagaatgatgatgataatggaattagccaggagaaccaaattcactcttctgaagtgccagatgaaagcaccatttgtgttcacgagcagaaattatcggatgaaaatcaagttaaaggtagtaaggtgccgagcacaggtggtagtgaagagcagctcacgggcaataatatgcaatgtggaactaagcggaagagacctattgaagaggatgaggaattgagaaagatcaactcacgaaagcc

SEQ ID NO: 141648 - DNA, 447 bp, Glycine max
  Clone ID: PAT_MRT3847_9891C.1
acgagcttgaaggacccccaaatagcgcttcgggccaccgttttcttctgctttaatcctgcctctatattttattcatccatatactcggagagtttgtacgcgcttctgtgtttcggaggaatgtaccacttcatgtctggtgggaacaatttggctgttcttttctttgcgctctccggttgtgctaggtctaatggggtgctgaatgctggctatctctgctttcagactatgcatcgcgcttatcatgctatgtttcaagaaaagcgtgttactttggctttgcagattgttattgctggagctttacgtactgcatgtatttttgctccatttgtagctttccaggcttatggctactacaatatgtgtgttggacgttctcctgatgaaataaggccatggtgcaaggcaagaataccattactttacaattacatccaa

SEQ ID NO: 141649 - DNA, 640 bp, Glycine max
  Clone ID: PAT_MRT3847_98920C.1
gttaatataaataaattgtttcatatagagatagctatctccaaattaagcaacagccatacaatttcgattaaatataaccccccgaaaaattaaagttctgctttagactcatgctcagagtgagaactctccttcaccttttctgttgtcttatgaattgcttcttcaactacttttgctgctccttcagcactctcctcaaccgtctctttgcttttgccaaaaatcttctcaactgcttctttgaacgttcctttggaaccatcatattctacccatcccgtacccctgaaactgagaagaagaaaaatacataattgctacttatatggaaatatgaggtcgtggctgtaccagtttttgggagggtgggttgtggagacaagttcagattttgggaagattcatgggcaggcaatgacagaacactaatggcaaaataccctagactgtaccaggtttcaaatcaacaacagcaaaccatcaactgtatgggagggcataatgctgcagggtgggactggaactttagcgggaggagaccccttttcgaaattgagattgctatggcggctgattttctagaggagacagcacagctaacaattcaccaaaatactacagattcatggatatg

SEQ ID NO: 141650 - DNA, 443 bp, Glycine max
  Clone ID: PAT_MRT3847_98921C.1
cgagacatctctttgatccttggcctcaccctgttgtgtctttacatctcttgaatttgcaccacattccttcatagactgcgtatagaagttcgccatcatgtcaggtatcaccacgcaccctaggatcccgccggtcgtgatggacaacatcacccagcagattggcaacacgccgctcgtgcgcttgaacaagatcccccagtcgctgggcatcgaggccaccgtctacgtcaaggatgaggccttcaacgccggcggctcagtctaggatcgcattgcgctgcgcatgatcgaggctgctgagagggaggggcgcatcaagcccggcgacacactgatcgagcccacctgtggcaacacgggcattggccttgccctcgtggccgccgtcaagggctacaagaccatcatcaccctgcccgagacgatgagccccgaga

SEQ ID NO: 141651 - DNA, 342 bp, Glycine max
  Clone ID: PAT_MRT3847_98922C.1
gggcggcccaacccttccgaccggttgcaaaaaaccacaaaagggggcttttaaggggttgaaatcctattcctctaaatgcctgggggcaaacctaaaatatttcctttattccaccgggttttcccttccgggaaattaacccaacccttactttttaaatgatgaatgggtttggaaaattttatattggggttaaaaaaaatggggggggggggtttttgttcctttttgaaaacataaacaacttttttgggggggttgaaggggacccctttaaaaaccggggaaccatttcacctggtttttgacctggtgggggaagggctttattggcaggga

SEQ ID NO: 141652 - DNA, 304 bp, Glycine max
  Clone ID: PAT_MRT3847_98923C.1
cgacgcgatcgtacgggtgtgagaagacgacagacggggacagaaatggctctcaagggcggccatgtttccgggggccctttcatggagctggtgaccgagaatgcctttttgtacctatgcttctcccgattacccaacggtgtggaaatgtgtcggagtgacttcaaaatgccaaagttcgttgtgatcggacacagtggttttggcttgaacgttttggagttttacgatcgaagaatgagagcgatcaaggaatataccattttggttttaaaaaagaagtctctttttagttagtata

SEQ ID NO: 141653 - DNA, 1348 bp, Glycine max
  Clone ID: PAT_MRT3847_98924C.1
ctcgaccccaacttcaagctctgaaaccactctcgcgttcgcagcttagggttttaccgttaaacgattctcttcgtctttctgtgttctgaaaccactaccgtttcgtcgtcaccatgccgcaaggggattacatagaagcgtcacagaagagactatggctaccgtctggatcacttcgagcggaagcgcaagaaagaggcgcgtcaagttcacaaacgttcttcaattgcccagaaggcttctgggtattaagggcaaaatgattgccaagaaaaattatgctgaaaaggtgacacgatgaagaagactttggctatgcatgaagaatcaacgtctaggcgcaagactgatgataatgttcaagggatggagctgttcctgcttatctccttgatcgtgataacacgaccagagcaaaggttcttagcaacacaattaagcaaaagagacaggagaaagacgggaaaatgggatgttcatcttcctaaggtaagctccatggctgaaggatgaaatgttaaaagaagaccgtaatggtaaaagcgattcattcgtccgacaggattgcggttcactaaagctcatgtcactcacccagaacttaaatgcacattcaatctagaattaattggagtgaagaaaaaccccaatggccctatgtacacctctcttggtgtcattaccaagggaactataattgaggtgaatgtcagtgaacttggtcttgtcacgccggctgggaaagttggcccgatttacacctctcttggtgtaattacccggggaactattgttggggtaaatgtcagtgaacttggtcttgtcaccactactgggacagatgtgtggggtaaatacgctcaggtcacaaataacccagaaaatgatggttgtataaatgccgttttgcttgtttaaggtcatagcaagcatcagggttccagcttgatttcaaaggcagtggtcaagtccctctcctatgatttttgtggtcttcaaccccaatcttgtagggaaaatcttacaaactttgttgctaccagagagaagattgtctgagaaaatagtgaagcatttttgtttcttgtttggatagtcaatactcaatgcaatgatctgatctagcacttgacatttaagataactattgtacaagagttaagacaaacaagtctcataaatttatgtagtttatttacaagacacagcattttgagtagctgtattttttttatggttcgggtattatgtactgcgaaatctattatctaaataacatgatgtacaattgaaattacctccaaattttaatgaaaccccggggacattttttaaaaccggtttt

SEQ ID NO: 141654 - DNA, 1031 bp, Glycine max
  Clone ID: PAT_MRT3847_98925C.1
cacgcgtccggttctgaaaccactctcgcgtcgttaccatgccgcaaggggattacatagaacgccacagaagagactatggctaccgtctcgatcacttcgagcgtaagcgcaagaaagaggcacgtcaagttcacaagcgctctgcaattgcccagaaggctctgggtattaagggcaaaatgattgccaagaaaaattatgctgaaaaggcgcagatgaagaagactttggctatgcatgaagaatcatcgtctaggcgcaagactgatgataatgttcaggatggagctgttcctgcatatcttcttgatcgtgataacacgaccagagcaaaggttcttagcaacaccattaagcaaaagaggaaggagaaggcagggaaatgggatgttcctctacctaaggtacgtcccgtggctgaagatgaaatgttcaaagtggtccgaactggtaaaagaaagaccaagcaatggaagaggatggttacaaaagctacatttgttgggcctggttttaccagaaaacctccaaagtacgagcggttcattcgtccgacaggattgcggttcactaaagctcatgtcactcacccagaacttaaatgcacattcaatctagaattaattggagtgaagaaaaaccccaatggccctatgtacacctctcttggtgtcattaccaagggaactataattgaggtgaatgtcagtgaacttggtcttgtcacgccggctgggaaagttgtgtggggtaaatacgctcaggtcacaaataacccagaaaacgatggttgtataaatgctgttttgcttgtttaaggtcgcatcagggttccaacttgatttcagaggcagtggtctggtacctctcctatgatttttttttgggcacaggttctaaaattcttgtttggattgtcaatgcaatgatctgatcttgcactttgacatttgagataactattgtacaagagttaagccaaacaaatctcataaatttatatagttcattcgcaagacaaattttta

SEQ ID NO: 141655 - DNA, 1179 bp, Glycine max
  Clone ID: PAT_MRT3847_98926C.1
aaatacttcgatttcgcactcctttggtcaaccttcttgacatttgttcttttttattattattattcttatgttgttgtcgtgtgttgtgtaattgcagccgcaaggggattacatagagcgtcacagaagagactatggctaccgtcttgatcacttcgagcggaagcgcaagaaagaggcgcgtcaagttcacaaacgttcttcaattgcccagaaggctctgggtattaagggcaaaatgattgccaagaaaaattatgctgaaaaggcacagatgaagaagactttggctatgcatgaagaatcaacgtctaggcgcaagactgatgataatgttcaggatggagctgttcctgcttatctccttgatcgtgataacacaaccagagcaaaggttcttagcaacacaattaagcaaaagaggaaggagaaggcgggaaaatgggatgttcctctacctaaggtacgtccagtggctgaagatgaaatgttcaaagtggtccgtactggtaaaagaaagaccaagcaatggaagaggatggttacaaaagctacatttgttgggcctggttttaccagaaagcctccaaagtatgagcgattcattcgtcctacaggattgcgattcactaaagctcatgtcactcacccagaacttaaatgcacattcaatctagaattaattggagtgaagaaaaaccccaatggccccatgtacacctctcttggtgtcattaccaggggaactataattgaggtgaatgtcagtgaacttggtcttgtcacacctgctgggaaagttgtgtggggtaaatacgctcaggtcacaaataacccagaaaatgatggttgtataaatgccgttttgcttgtttaaggtcatagcaagcatcagggttccagcttgatttcaaaggcagtggtcaagtccctctcctatgatttttgtggtcttcaaccccaatcttgtagggaaaatcttacaaactttgttgctaccagagagaagattgtctgagaaaatagtgaagcatttttgtttcttgtttggatagtcaatactcaatgcaatgatctgatctagcacttgacatttaagataactattgtacaagagttaagacaaacaagtctcataaatttatgtagttcatttgcaagatagcattttgagtt

SEQ ID NO: 141656 - DNA, 407 bp, Glycine max
  Clone ID: PAT_MRT3847_98927C.1
gagtctgtacagcgctcattatatagcctttgtaccatcgctatttacgatgcacttatgccaccttggatgatctggggtctatgtgcattgaggggctctgaaagaagaagctttgtgtcgtgtcttgtgacactacctacctcacttggctagaatgttgtcttagcatccacttgtgagagatcgagatctaaagctgccggcattgaatgcttacaagaccaaggagaggcggatgacattccacaagttagattctctcatagactgacaccatgttcatcaaaacgcgtgagagtcagtgatgatatcttatacagcatcattatccactgcacaatcttatataatcaagctacttatatacgtcacttcgatcgctaatttacttaactgcctacccg

SEQ ID NO: 141657 - DNA, 205 bp, Glycine max
  Clone ID: PAT_MRT3847_98928C.1
tcttttttgtcggtatcggagtctttcggtggttgtttggttggtttaactctcaccccaaaaggggttgctggggtggtaactgtggttgccgaagcccctcctctgatctgtaaaagaggagaaaatgcaaccactgtaataattcacctctgcgctccagtttaccacctacaccatattcatgggagggttacttctgcag

SEQ ID NO: 141658 - DNA, 559 bp, Glycine max
  Clone ID: PAT_MRT3847_98929C.1
tcgcgccactaccatgttcttgcctaacaagaattgactaaggaatatgtggttgaagatcgagaacatgtaaagaatgtgcctgaacttgaccccagccatgtgacagagctaaggatgttgggcctttactagttggatgcatcttctgcatagtcacattgaatttgttgtatttgcggcttgtctccatggtccccttcacatttgtagatcacattggtctgttcagagtgatgccccattaatatggctgtttgggcaccaactggcagtgcacagccacatgggtgttgtttattgtactctattttgattctttatttttaatttatatttttctggcgaaacttgtgaaagaaacatgcagttcacctagaaaattgctcttgtgaatcaatgttgtttggtggagtataaaggaaaaaggtgcagatcctatgaacatgagatattttgtatttgtaacttgtataagtcccttgatgtaacttattttacaatatttttttcatttctatacaaaatattataatcgaatgtaaaaaaaaaaataaaa

SEQ ID NO: 141659 - DNA, 480 bp, Glycine max
  Clone ID: PAT_MRT3847_9892C.1
caacagcggactccgagaccagcggatctcggcaaaccctctttctcgaccacccacctaccattcttggaaccatggcggcagtggcggcggcctcggctgaactgctcatcatcggctggtacatcttccgcgtgctgctgcaggtgttcctggaatgctgcatttactgggtaggattcgcttttcgaaatcctccagggacacagcccattgcgagaagtgaggtgttcaggtactccctgcagaagctggcatacacggcgtcacggactcgggcggcaagtgttgggggagcgcaggcagcgagcccccaactgaggccccagctcccagccctgggcggccgtatcatcaggtgctcctgtgcatctcggccagcacgggagccagtgccgcgcaggaatgtggggtcccctgtgttccctcgccagaggagcacttggcaaggtcagtgaggggccaatagacctccggaga

SEQ ID NO: 141660 - DNA, 1491 bp, Glycine max
  Clone ID: PAT_MRT3847_98930C.1
cacacacaccaaccatctcattataaattgctaagtttttcaactcatcatcaattggcaccttttgcttcagaatgaatgcttgaggttgaggagaaccagaaccagaagcatgaatcaacttggtggtgttagcgttatccttctggttctctcagtcttgtgtttccatgttagagcacagacttctgcaccttcttcaggagatgctgtctccaatttccagccaagccttgctgttgtcataggaatccttggtgtcatgttcttactgacattctttcttctcatgtatgcaaaattctgtcatcgccgccatggcggcgcttcggccgttggagactcagaaaatcaacttacttttgtgagatcaaggtctagattctcaggaattgacaagactgtcatagaatcactccccttcttcagattctctgcactcaaagggttaaaggaagggctggagtgtgcagtgtgcttatcaaagtttgaagatgttgaaattctgagacttgtaccaaagtgcaagcatgcttttcatattgattgcatagaccactggcttgaaaagcactctacctgtcctatttgcaggcacagagtcaaccctgaggaccacacaaccttcacatattcaaacagtttaaggatgttagcaggtgaggaatctaacatagagatcttggttcagagagaagaggaagagcatcatggttcatcaagattcagtgtaattggaagcagcagctttcggaaaacggtcaaggaagaagaattactcatccaaaaaggagcagaagatagtgatggtaaccagaaagggtatcataaacacaaccacaggattactatatctgatgttgtgttcaagcacaggtggagcaacgtgagttcttcagaccttatgtttctgaattcggagatgctcaatgatacatcaagcaacagattcagcagcaacctggaatcaattacaagaggggtagtggtggaaaatgagcaaattatgaacatcaaggaggagatggagaggaagatttcctttgagaacaaagttgttggtgcactaaacaacatcgtttcagatcataaggaagatcctccttttacatcagattctgcaccaaagtatgtgaacccgggtgagaaaaggtcaatgtcagaaatcactgctgtttctagatttggagatttaggcatgaaaatgagggtcttgaaggattctgattcccttcaaaacaaccttaaagaggaaagaatgaggcagatttggtttccaattgccagaagaacagctcaatggtttgtgaatagagaagaaagaaggtctctgcaatctcagaataataaacaacagccattagatgtataatccaatccaatccaaccttcccgaggtacacatgtttggtttcattccttgattaacaactacatgtagatttcaggctgtttttttgttgattagtatatagttaagtaaagcaaaaa

SEQ ID NO: 141661 - DNA, 228 bp, Glycine max
  Clone ID: PAT_MRT3847_98931C.1
aatccacctagagtacccgtggttctataattttgtgaagcatggcggcgggaccatgaatgtgaccagttcatttgctgatcctggaagatactggaagctctttgatagcaaaagctgcaacatgcatggcaaggataggagagtgaccattgtctacgaactaggaggacaatctgagtacactttttaagatgttaaagcgcacatgctcaactatcccacata

SEQ ID NO: 141662 - DNA, 436 bp, Glycine max
  unsure (1)..(436): unsure at all n locations
  Clone ID: PAT_MRT3847_98932C.1
tcgacccacgccgtccgtaccggctgcgagaagnacgacagaagggggacgccgggcttaggcgtatgtggcattctacaacgagagagaggtgttcctcacgaacagaggctggcgtctgggcgtgacaccgccgcccgttctgaagcagccatagtttgcaggcgccaacgagccaccgtacatacaatgggacacttcaaatgaaatttgtagatcgggctttttcctaccttggggaggatgtcaactcctgccctctgacatttcctatgagactgcctcctcaaatggcttccacaggatgtggctctttactaaaagatccagctctaattggtttcaaattctagtgactatcccaatgctgacgacctcgggccctgaaacggttcctataacaacttccgggctctttccttaggtcgtacttacc

SEQ ID NO: 141663 - DNA, 485 bp, Glycine max
  unsure (1)..(485): unsure at all n locations
  Clone ID: PAT_MRT3847_98933C.1
ttttttttttttttttttttttttttttttttttttttttttttttctttccatttttttttttttcagcggggcccaagggaattttatttttcaaatttttcggtttaggaacattacaaacgccaaggggggggtgggtgttttttttttttattcctcccataaaaaacaacccgggacataaaatttaaaatacccctaaaacaaaaattgttttgcaaaacaaaaaaaagccgggcccccttcgttttttcttttttttttaacccaaacccgttttccagggatgcggggggcaaattaaatttcctttggaattaaggccccccctttggggggaatcccccccaagggggggtcctcaaacaaaccccccaaggaaccccccccgtttttctgaaacccaaaaaccgggggactttggaaccccaaaatgggcctgacaaaaaaataaaagctttntttccccccaaccctttaac

SEQ ID NO: 141664 - DNA, 152 bp, Glycine max
  Clone ID: PAT_MRT3847_98934C.1
tcggtgaattccaattgcacattttcaagaaattaggatgcaaaaatgtggatgtgtgaattggaattatttggtttcgtaatagggctatactggagcccaatgaaatgagatcgggattcctcggggaattccaatttcacattttcaag

SEQ ID NO: 141665 - DNA, 377 bp, Glycine max
  Clone ID: PAT_MRT3847_98935C.1
ttggtgaccacaggttgcccgaccttaaagccggaaacaaaagaaatcgctacttgattgcatagaatctgtcaattgatgactacttgttcgtgtacgagttcttaagggaaagaaaatcactctctgtgctggtcacagacttcgtgaatcattttcttttccactcttagtttatttgctgaacactctcctatttgatataggacttcgtgtcagatttaaacttgttctgtttctttctcaggtctctgttcaatttcaagtgcaagctggtgaaattttggatttgtgcttcccactctcctatcaggtattaggactttgagggtagactttattattcctcctttttttttcaatatcttttatctcac

SEQ ID NO: 141666 - DNA, 352 bp, Glycine max
  Clone ID: PAT_MRT3847_98936C.1
ccatctcttcggctatgcacagggttgctcatacacggaaaccttaaacacagatcggggttatcttgatttcaagaatttctcaatttcttcctacttctttgtgtacgatttcttaagggaaagaaaatcactctctgtgctggtcacagacttcgtgaatcattttcttttccactcttagtttatttgctgaacactctcctatttgatataggacttcgtgtcagatttaaacttcttctgtttcttttctcagttctctgttcaatttcaagttcaagctggtgaaatctcggattagcgccctccacttttctctctggatttggactctcttggctagaccttt

SEQ ID NO: 141667 - DNA, 223 bp, Glycine max
  Clone ID: PAT_MRT3847_98937C.1
gatattacctttggacctacctattaccacacattattggtaggttccccttcctgcattaagattggccttaaaaaaggtccctggactcccgaggaaattcaaaacctattccaccccttccaaaaccttggccttggaagttgagaagccctccctaagttagctggcccaattaaatttggaaaaagtggtaggccaagggggcctaactttttaaggc

SEQ ID NO: 141668 - DNA, 1113 bp, Glycine max
  Clone ID: PAT_MRT3847_98938C.1
agtgaatattaattgataaattttaatatttattttgactagtttacaattatgtttttttttttattggagatagtttataatgagataaaattataattgttaaaaaaattgaaaacctaaattattgtaggcagaaaaggcaaaactgttataacaaatatagtaatgtataccttattgacataatataacatacggacgaaagaagtgaaggcatcgttagcagttttgtagattcaacctcaatttgcagagttacgttctaatatatttacacaagactgataagagaaaatgtctctgattccaagtttcttcggtggccgaaggagcagtgttttcgaccctttctccctcgatgtgtgggaccccttcaaggattttccatttcccagttctctttctgctgaaaattcagcgtttgtgagcacacgagtggattggaaggagacaccagaagcacacgtgttcaaggctgatattccagggctgaagaaggaggaagtgaagctggagattcaagatggcagagttcttcagataagcggagagaggaatgttgaaaaagaagacaagaatgatacgtggcatcgcgtggagcgaagcagtggcaagttcgtgaggaggtttagattgccggagaatgctaaagtggaccaagtgaaggcttccatggaaaatggggttctcactgtaactgttcctaaggaagagattaagaagcctgatgttaaggccatagacatctctggttaatctatgttgctctgttccttcgttgaaatgtgtttatgttttcttattctgaggatcatttgtgtgagtcgtgtgaaaaatatgtcaggttttatgttggctaagaggcctaatgtttgggccctagaaatctctggttaaactgtgtaaagatctgttacttggtttaaagtttgtgtgttttgttcacttccaaggaatttatgtgtgcaagaaagatgtaattgaaaaatttagcaatagactaatggttttatatattctatgttgcaataaatcttaggatatgtatatcactggaacagattcactatgccagtgtgtgagaaagcaatgatagttctaaatcctccc

SEQ ID NO: 141669 - DNA, 247 bp, Glycine max
  Clone ID: PAT_MRT3847_98939C.1
gtaccagggtgctggtacatctttgctatgatgggcttacaaatgctctccagctcctccatcttatcacagatgtagcagggtgctggtggtgatgcgggtggagccatggatgacgatggtgtgcagctggtagtggaagcggtgctggactcagaattgctgaagtccattacgcagaacattctcatgggttgttcttgattttgtcgaagagccttttgaggtttaggtatcagcgtgtcat

SEQ ID NO: 141670 - DNA, 1398 bp, Glycine max
  Clone ID: PAT_MRT3847_9893C.1
ccttctcgtccgaccacgcgtccgtacggctgcgtaagactacagaaggggactggcgaccaatccctagtaaaagaaaaaaaaacgtcttcaaaattacgacaattattatctgataagctgagggtagttatagagaacaaggacatggttttctcttcacttcgcaggtactttagtatgaggcaccaaagctccaaggttcaggctttgtatgaacattgcaaaaccatcttatcgccctctggatcaccccctccttcgtcccaagctttgcagaagctttcttcgattctggacactattcaacctgctgatgttggccttaaagaagaaattgcagacgatgatcgagggcatggattttttggcgctaatgcacttagtagattagctcgatgggctcaaccaataacttatgtagacattcatgaatgtgatagttttacgatgtgtatattttgtttccctacttcttcagttattcctctccatgaccatcctgggatgactgtatttagcaaacttctctatggctctttacatgtgaaagcttatgactgggttgagcctccctgcatcatagaaagcaaagaaccaggatatgctcaagtaagactagcaaagttagcagttgataaggtcttgaatgcaccgtgtgatacatcagttttatatcccaaacacggaaatctgcactgtttcgcagcagtgacaccttgtgccatgctagacattctcacacctccttacagagaagaggaaggaaggagttgtacatactatcatgattatccttattcagcattctcagttgcaaatgcacctatatgtgacggggaagaggaggaatatgcatggctcacagagttagaatcacctagtgatctttatatgcgccagggggtatatgctggtccagctattcagctttagctctgcttgcttggatttaaaagcaattgcttgtttcctgctgtgaagggtggatgatattaatgcctgaaaatatacttatcccattttgctcctggaagctagtgacaagaggatctaaaatgctgatggatggaatgttctggtttatttgtgcctccttgtgctggatgcatattttgagcaaagattttcgtaaataaatctgcattttctcattagcttggaacaacaaatctttgctatagttaccagtggctattgtgtttcataccatgttccctcattgttacaagttatagatgttctgtccctgcacattaatataagcataattgttttgtaataattatcataaatatggtatgtacaaaacggattcctgtgtagccgtaatcaagtatggtaatacttttagtataatggaaaaagatgccctggcatcatcagtctgtgggttgc

SEQ ID NO: 141671 - DNA, 385 bp, Glycine max
  Clone ID: PAT_MRT3847_98940C.1
gaagacgacagaagggagataaatagttctttaaaacatccatactagtaaaaagttttgcaaaattactcattttgataaaaaaatatgaattaagaaaaaaaaatgttaattagtcctcttaagaaactaaaagagaaaaaatatgcgtaaaattacattactaatgaatttttttacattctcctactatttttacatcaaatattttttttattttaatttcttaataatactggttataaaaaaaaggataaatatataagtacacttaaatttatgtaactctcataggaaggaaaaaataaataaaaaaaataaaaataaaggtacattttcttttctttggattaaaagaaaatgaaaaggaaaaaaattacttatg

SEQ ID NO: 141672 - DNA, 267 bp, Glycine max
  Clone ID: PAT_MRT3847_98941C.1
ttccggggccgaccacacccttccgccaattcttccggcctacctcctcctttgttattggagggccttaaggacctaaggagggggttcctccaaggaaaatccttgattgcccttccaagcctttcaatgtgcaaaatgttgttaaaaagccttgaatccgccttacccccgggggggcaaaattggaacctatttgtattgccaagctgtaaaattttaaaaggaattccagtaagttaccttttggcctgataggtttttttt

SEQ ID NO: 141673 - DNA, 290 bp, Glycine max
  Clone ID: PAT_MRT3847_98942C.1
agactatcctgtgtcaccagctatagcaagaaagaagcctagggtgctatgtgcaattctctaaggagagaaagctccacaatctactgctaggggagcattaagctttctgctgctggagaggcttaagaagtatttgatagagggttcctgcagtgcttacagtagaggcagctcagactataatcgctcaattgatggtggcaggatgccatttgaagagcaatagatgctttgcttcatcaccaacatagctggagagtgagaatttctgatcctttttcccaata

SEQ ID NO: 141674 - DNA, 369 bp, Glycine max
  Clone ID: PAT_MRT3847_98943C.1
gttgttcaaaaaggattgaacggtcataaattaattgaaacacaattgcgaagtcgtcacattgatagatattcaagggccgctcatggacccgggttgcacacacacgccaagttctggaccataaaagaagaaaggaccttattatagacttttacatactttagatcacaccaaacaagggacctgcagaccattctcaaactcaaaacccaccacgaagacgcaagacaaggggaagagtaaactctttcttaatgttgtaggcaccaagaggcctttcatcctccagttgcttaccagcaaagaacaacctctgtgggtctggggagataccttccttgccctgtatttttgccttgacattat

SEQ ID NO: 141675 - DNA, 208 bp, Glycine max
  Clone ID: PAT_MRT3847_98944C.1
attagctatagaacttatgtgtgcatctctgcttgatttatgataattattttgtttagggaaaaaaggggacaggtaaaaggaaatgaaatatatatatatatatatatttaggtctcctttgatgttatgatttatggaagggagcatatggggatgggatagagtctttcatttatgtgtgggtgtgtgtataattatgtattgg

SEQ ID NO: 141676 - DNA, 374 bp, Glycine max
  unsure (1)..(374): unsure at all n locations
  Clone ID: PAT_MRT3847_98945C.1
aattcggctcgaggctcccttacccttatggctaaaataaactgctaggccctgaatcaaaggcgagccatgtgtgtanagcaatggctttcttgggtgaaaatacaggcccatgctcacaaaaaaaaaaaaaaaaattttggagtgtaaacatatacatcatcttaatttgagtccttatgtgttgacggtgtgcagggaagaatgggaaagtaactgtaagtggagcccagaaagaactaacaaattcatgaaaaagtgacattattgctggtctatttnttttttaattttctgcttcctcacactctcccatactaaatgaattattttagnggggtttttttttgggttttntttttggggttnttttt

SEQ ID NO: 141677 - DNA, 444 bp, Glycine max
  Clone ID: PAT_MRT3847_98946C.1
accagcccagattcaagcaaaatattagcataacttaacacatctgttgccatggacatggatactgaaaataacgatgtggttgatgctcacagagaaacaagctttatgcaagtattcccgtgtactcaaaagactatgatgaagttgtggttggataatggatatgagtgtgtaacataatagatgaaaatgtcattcctctgttattgtttagtaaatatcgagtgaccttttgctgcccaggatacgggtgaggtgataaaagattttgtactcaaatttcaagcttcatttgtctctctcattatttggtggaaaaagagttctgctgcactattcttattttttgtttgatcagttttaggggttatttggtctctgtttataattttattttttagaaatgtttaagtggtatgatgtgtctttcccccctgatat

SEQ ID NO: 141678 - DNA, 255 bp, Glycine max
  Clone ID: PAT_MRT3847_98947C.1
cacgggttacctttgacttccggttctagcaagcaaagcttctgtaaattttctatagacctcctcggaggacgaaaactagaggacactactggagattggaacacacgtgatacaaaattttacaataagtaactggaggagagttgatgttcggaagagaggctgagtaatgattaagatagcgaggtctgtgaaagcaacttgctcaaagagcgattgccctgatagtacaagtattgcaaatgaacatca

SEQ ID NO: 141679 - DNA, 337 bp, Glycine max
  Clone ID: PAT_MRT3847_98948C.1
tcgtgatattcagggaaaatttcaatacaacttttccctgaatctctcggacgcgtggtatgttaaggaaattttggtcaggtttatgttggcgttattgcattactaattgtgtgcagactatgagataggcgtagaaaaggcaatagctgtgttgtcgacagacttcccaaattattatgctatccactatgaaattatatgctctacactctcatatgagatatacaacttcgtgaaatactcaaacttatacaatatcttttcaaattctctcaataatttcaatttaaatcttcttaaattctgcattattgctcacactattctataataa

SEQ ID NO: 141680 - DNA, 559 bp, Glycine max
  Clone ID: PAT_MRT3847_98949C.1
gggaagccaaaagacatgcctttgttttattaaaattaaaaacaggtttagcaagaaaacaatagctggtttttccctaccaaagatcctcaaagaaacaaacaattacaactcaaatgctgcactggaatgcccgaccattaaacaaacaaccaaaacccaaaatcaatcaattgggggccccaactccagccccactattgggagggagtttcgcccactcgggatgaaaagccccagggggaacaacccttttgtaaggatgcgccccaaaaaagtccctttgagcctggacaaaggttgccggaagtcttgccctccgatagggatcaaaaaaagcaagactggcacacattccgggaggactaattccaggcgaaaacggcaaccccaaaaacctttttcaagaaagctggttttggaccatttcccttggaaactccggggccacaattaaactcgccaaaataggggtcctctgataagcctttttgatccgggccaaaaacacggcccttatgaagcaccctcccttccaaaacctagctaactcccccaa

SEQ ID NO: 141681 - DNA, 324 bp, Glycine max
  Clone ID: PAT_MRT3847_9894C.1
aatttccttcgaccctctccatcacttctgtgtttctctcttcacctgcactttcgtctttcaattcaattcaattcttctttttggtgcagaaactctgtacagataatcaaaccctacctcacctcaccggtactactcctactaccacttccgtcgtcttcttcttcttcttttcagatctctggtcggaaccgatttctttttatcctttgtttcgtattccatgttagagaagataaaccaacactttccttctccagatgtgactcgatgttttcatgccttagttgaagtcacgatattacagtgtatgatgtgatt

SEQ ID NO: 141682 - DNA, 205 bp, Glycine max
  Clone ID: PAT_MRT3847_98950C.1
aatccctaattccaggcaggagtcacgccacccttccgttccgataccacaacacaacattaaggttaatgtgtaacagtttgttgttagctgtaagctagcatatcgtgaggagaatatgaaattgactctttactttgctgctgcagttataatactagcattgccatgccatatctcaagctaccaaatgttccctctccaa

SEQ ID NO: 141683 - DNA, 250 bp, Glycine max
  Clone ID: PAT_MRT3847_98951C.1
tccacgtgtgcgaccacgcctgcgtgcggctgctaaaagacaacagaagggggttctagtgtgtgattgcttgccgttgcaactaatacttatatttttgttgagatgcgtatgtgtaagatctttatcttacatgaaaaaagctctgctaccatggtaactgtcgatgccgaaactcatgacaaggcatgaatcgctgcggacgataaaagatgatctcagacttgaagtacattgaggacaccaccac

SEQ ID NO: 141684 - DNA, 1243 bp, Glycine max
  Clone ID: PAT_MRT3847_98952C.1
gggttgcaactgttttagataatttttttatttttcgataaatttttcacttgttaatgggcaaactgttatatgcgattttgctcggttcattgatcgggggtcttttgattgttactgttggggttgggaaggaagtgaggattttttcgacatgaaatttgaccctttttaagtttcgtttggctgtgaaattgttgagtacttattggaatcttagtcacttttcctttcacgttgggtatgatctcacttagtcgatcaagtttaacggaagagtttttttttctcataaaaggagattttttttgtttgaaattcgtaggtgcagaaaaaaaagtgattgatactattacttgcaatgtaaatacggtgatgcttacatattgcttgattctttttgcatggattcatggaatttggctgttgttttattttgaattgaaattaaaggggaattgacttgaaaccagggaatagaatagcacggaatagggatgttttaatttgtatatcaactattattgttaaaatgcaactgtgcataaactttaggggtgttgctttacttgttttatgaaatgtacaacactttgtcaactgatggacttaatataagctaagttgctggttgtaacaattgatggacctatgcatgcgcaatcgtttaggaatgttgcatttgtaacatgcactatggtttttcaaagatcaataaacattttagtttccgattttgatttagttcatatttgattgttcctgattttcatgttttaatgtgggatgtgattttcttttttctctttatcttttgcttcttccatccatatcaagtcccagttcccttctgtcgtcttctcgcagccgtacccttctgtcgtcttctcgcagccgtacccttctgtcgtcttctcgcagccgtacccttctgtcgtcttctcgcagccgtacccttctgtcgtcttctcgcagccgtacccttctgtcgtcttctcgcagccgtacccttctgtcgtcttctcgcagccgaacccttttgtggttttttcgaagccgaccctttttgtggttttttcgaagccgaccctttttgtggttttttggaagccgtccctttttgtggttttttgccaggcgcccttttgtgtcgttttctcgcccccgcgcacacgcgtgggcgcgcgcgtgtctccccccgggtttcccggcccggcctgtgggggcgcaccatttttctcta

SEQ ID NO: 141685 - DNA, 250 bp, Glycine max
  Clone ID: PAT_MRT3847_98953C.1
gttcactgtgttttttttcaaaaaaaaacaaaccgcgggggcctgtttttgcttagtttgcaaaccatgtaattttttttcccccgaaaaaaaagttttgttggggtttttaaaaaaaaaaaccccaccgccttttcgaaaaattgtctgggacctgggcaaccccccccctgggttaattaaacaagttccttggccccctgagccatattgtaggtttacataccggtgaatgcaacttaatatcttt

SEQ ID NO: 141686 - DNA, 2115 bp, Glycine max
  Clone ID: PAT_MRT3847_98954C.1
agggtcgggggcgcgtccgtacggctgcgaagacgacagaagggtacggctgcgaagacgacagaagggtacggctgcgagaagacgacagaagggtacggctgcgagaagacgacagaagggtacggctgcgagaagacgacagaagggtacggctgcgagaagacgacagaagggtacggctgcgagaagacgacagaagggtacggctgcgagaagacgacagaagggtacggctgcgagaagacgacagaagggtacggctgcgagaagacgacagaagggtacggctgcgagaagacgacagaagggtacggctgcgagaagacgacagaaggggggtgaccaaatgcaaagacggcattgaaattgaacacaatccatgactaacacaagcgcagacgacaacataacactgctccaaacatatcaatttcaataatgttttcttctgcaatttctccgaagcccttccttcggtccctcgtcattgatcgttacgctcagagcacaactactgcaaccaggtgggagtgcttggggtttaacaagtcagaaaatttcagtaccaagagagagttgtgtgctgaggggttcaagctgaattgcttggttgaaaatagagagatggatgtggagtcatcatcatcatcatctttggtggatgatgcttccttgagcttaagtgaagaggatttaggggagcctagtatttcaacattggtgatgaatttcgagagtaagttcgatccttttggagcaattagtacccctctttaccaaacggctacttttaagcagccttctgcaatagaaaacggcccctatgactataccagaagtggaaatcctacacgagatgctttagaaagtttactagcaaagcttgataaagcagatagagccctgtgcttcaccagtggaatggctgctttgagtgctgttgttcgtcttgttggaactggcgaggaaattgtcgccggagatgatgtatatggtggctcagataggttgctgtctcaagtggttccaaggactggaattgtggtgagacgggcaaatacatgtgatctaaatgaggttgcagcagccattggacccaagactaagcttgtgtggcttgagagtccaaccaatcctcggctacaaatttctgatattcaaaaaatatcagagatagctcattcacatggtgctcttgtgttagtggacaatagtataatgtcacctgtgttgtctcggccattggaacttggagcagatattgtcatgcactctgctacaaaatttattgctggacatagtgacattatggctggtgtgcttgctgtgaagggtgaaaagttgggaaaggaattgtatttcttgcaaaatgcagagggttcaggcttagcaccatttgactgttggctttgtttgcgaggaatcaagacaatggccccgcgaattgaaaaacaacaggataatgcacagaagattgctgagttccttgcctcccatcctcgagtgaagaaagtgaattatgctggcttgcctggtcatcctggtcgtgatttacactattctcaggcaaagggtgcaggatctgtgcttagcttcttgactggttcattggaactttcaaagcatattgttgaaactaccaaatacttcagtataaccgtcagctttgggagtgtgaagtcccttattagcatgccatgctttatgtcacatgcaagcatacctgctgcagttcgtgaggccagaggtttaactgaagatcttgtacgtatatctgtgggaattgaggatgtgagtgctcgcattgctgatcttgacaatgcacttagaacagggcctctttaatgttttttttgtctaaatattcatccttaggaagttgcattggcaagatgttagttagcatgttgaggatttgagagcatgcattgttatcttttctttggattcttgtgagtggaaatttgatgtgtttcttacgtgcatgtaataaaatccgtatttcctgtaattttcttgttacaattgttatcctcaccttcaaatatcgggtcataagttattaaagagtggtaaaagtattggcctatgaagattgacagagcctagtcc

SEQ ID NO: 141687 - DNA, 1633 bp, Glycine max
  Clone ID: PAT_MRT3847_98955C.1
actacagagggaaccgctgcgaggaagacgacagaagggtacagttgcaagaatacgacagaagggtacggctgcaagaagacgacagaagggtacggctgcgagaagacgacagaagggtacggctgcgagaagacgacagaagggtacggctgcgagaagacgacagaagggtacggctgcgagaagacgacagaagggtacggctgcgagaagacgacagaagggtacggctgcgagaagacgacagaagggtacggctgcgagaagacgacagaagggtacggctgcgagaagacgacagaagggtacggctgcgagaagacgacagaagggtacggctgcgagaagacgacagaagggtacggctgcgagaagacgacagaagggtacggctgcgagaagacgacagaagggtacggctgcgagaagacgacagaagggtacggctgcgagaagacgacagaagggtacggctgcgagaagacgacagaagggtacggctgcgagaagacgacagaagggggaagaagaaggatgtggcacgaggcgagaaggtcggagaagaaggtccacgacatgatggacgcggctcggaagagagcgcaacgacgcgccgtttacctcgccaagagacgcggcgatcctcagcaatccattcagctcgtcggctttcctagccgaacctatcgcgacgacgctctctaccaagcctcacaggatcagcagggcctgataccttggaatgggaaacaggatgtattgatagaccgatttgatgggcgtgctctccttgatttcgttcgcgattctagtcacaggcgcgctccggagaagtctgaagaagaagaagagttagaagagtttgttaattttgagcgttatcgggatttaataaagcatcgccgtagaggatgtcgtcactgatgaggaggctttggagcatgtaaatcaagagatggaggccaaggctgctgctccatttacatcagacagatctaatttgttgcagcctgctgcaagcaaaggatcttactcgcaggtcaggttttcttatgatgggaatggaaaagagaactcatatttcagatgatgaagatatgataacgaggaagatgaagatgatgaggatgatgaggattttaacagagatgatagcattgatgaaggaatggaaataattgcaaaagaatatggagttaaaaggtatggttggcttgtttacatggataagaaggctaaggaggaagaaaaaaggcaaaaagagttgatcaaaggtgatcctgcaattaggaagctgagtcgtaaggaaagaaggaaggcttctcagattgaaagggagagagagagagaagccacacggatatctggaactcgtgtgctgcatcatgatccctaccggtagaaaatattgatattttcatccttcagattgagcgaagaatatatgatattgtgctccttctaacgtatgggattgctgattattcttccttgccactcataatgttgcactcaatatatatatatgcagggaaacaaggcaaagtcctacatatgaagcctattctcgatctagaaggtcaaggtctccgttgcggtcatactctccgtcgcattcaaggcgttattc

SEQ ID NO: 141688 - DNA, 226 bp, Glycine max
  unsure (1)..(226): unsure at all n locations
  Clone ID: PAT_MRT3847_98956C.1
acatgcggcctgctagtactgcttgcgagaagacgacagaaggggngaccaagttgtctggagtatgcactctgttcgaagataaccacatgtggacccattgcttgatgccgatgcattctacacgactcatttgtagaagaagaggatctcataggtgatggctgaagactgagaactttgtgctgcgtgctgatgtctgccatggatttatatgccttccaca

SEQ ID NO: 141689 - DNA, 448 bp, Glycine max
  Clone ID: PAT_MRT3847_98957C.1
accaacaaaaaaaacccaaacattaaaaaaggcaaagggaaacctaaccgggaaaatctaaaatggggaaaagactcccttaatcaaaacgaacacttaaacaaggcgcggtttggtttcaaaggccccaaaaaactaaaagcccctttgccccaggccaaagggaattggccaaaacccccaaacagggcctttatacaaaaacccaactttcactttcacttttaaggaagggagggctaatcaagcgggcaatttttaacatttaaacttggactttccctggaaacacctttttaaagttctaaacccaatttaaagcccccttggcggaaggggcccgaaaaatgctggccctaatggaagcccaaaaccctttgaggacctgggttctagccatcttgggagcccccaccagggctttcctcttgggggaaactttgcgggg

SEQ ID NO: 141690 - DNA, 416 bp, Glycine max
  Clone ID: PAT_MRT3847_98958C.1
ccctgtcatgcgggttttcccgctgaggctaagcctcccaaggagggcgcgagaagatgggaagctcatagagatagctccctccagctgcacgttgctgactagagcgtgagatctgttgaaagaatgcccgaatatagagggtgcagaggactcgggtgactcatgcgaacgggcttgcatatacagaggggccccacagaacagaagggaggccgaactctaatgcggaccaaccaaaattcgggtatgtccaaagagaatgaacctgaagctcatgagaaacacagatgctacatggcacggacgcgaggggatgaaaacaatgccgtgtcagtagggcacagaggcaactggagactgctgcccacaccacaggaaacagggcggccgcccacaaggagcccagctgacga

SEQ ID NO: 141691 - DNA, 730 bp, Glycine max
  Clone ID: PAT_MRT3847_98959C.1
agtgtaacttgtagaatcttttatttatctcaatcaaatgtttggatatataagagctcatattcattaaaccaatgacgaaagataaaagagttgacattttattgcctctatattctatcttgcatctaattgcaggaattacaggctcagctaatcggcggccgcccttttttttttcatttgatgagcataatttgcaatttacttcagttataattgtctcattgtaaaaggcaggaaccgttggttctggcaataatttctctccattcaacattggaaccactgatgacatatctggtctgtgttctggtcttctttgtacacataataagcccacttgtatgcatcgtatgacttcaaatggtctacattgttcttctaacactttatccaataggtctagtgccctctcttctacccataatctccatgcatgtccaagaagattatggcagtgttctgggtctgaaaattccctgtttttcttcccactaacaatctctagtattattacaccaaaactaaatacatctgatttcaccgagaaattcccacgtacagcatactcaggaggcatgtaaccgtaagttccaaccaccctattggtctttgcttcaaattgatcttccaaaaatgatcgagccaagccaaagtcggatatcttggggtcccaatttgaatccactaaaatgttgctagttttaagatctctatgaataatcct

SEQ ID NO: 141692 - DNA, 680 bp, Glycine max
  unsure (1)..(680): unsure at all n locations
  Clone ID: PAT_MRT3847_9895C.1
cccacgcgtccgaaaagctccaaggttcaggctttgtatgaacattgcaaaaccatcttatcgccctctggatcaccccctccttcgtcccaagctttgcagaagctttcttcgattctgggtttgatttgttctgcaaaatgaacttctgttttatctctgcacattgttaagatgctacattgctttggataatggaatcttgatctttgttaattcatgacttggcagacactattcaacctgctgatgttggccttaaagaagaaattgcagacgatgatcgagggcatggattttttggcgctaatgcacttagtagattagctcgatgggctcaaccaataacttatgtagacattcatgaatgtgatagttttacgatgtgtatattttgtttccctacttcttcagttattcctctccatgaccatcctgngatgactgtatttagcaaacttctctatggctctttacatgtgaaagcttatgactgggttgagcctccctgcatcatagaaagcaaagaaccaggatatgctcaagtaagactagcaaagttagcagttgataaggtcttgaatgcaccgtgtgatacatcagttttatatcccaaacacggtggaaatctgcactgtttcacagcagtgacaccttgtgccatgctagacattctcaca

SEQ ID NO: 141693 - DNA, 383 bp, Glycine max
  Clone ID: PAT_MRT3847_98961C.1
acggctgcgagaagacgacagaaggggtagtgtggatccgtatcctcaattttaaaaacgtcttgagacctctcacttggcttttagaagaaatattattttagtaagctaaaagtttgattttttaaaaaaatgtatttaagatgttgtttggtaaaatatattttttaaaataaatttattaatgtgtttctatttatttttatggaaaatattgaataacttataatttttatttttaaaaaaacctgtataaaaatgtaacttactaaaatgcttatatagaaatatcacccaatcccttaaagaaacaattactctttataattagtcttttcccaaacacctggtaagaggatccctggctaattataattatattt

SEQ ID NO: 141694 - DNA, 335 bp, Glycine max
  Clone ID: PAT_MRT3847_98962C.1
ctcatgatgtgccgaacgtcgctgcgttatgctcgcccactctcgagaccgttctcactgtcttcgctgcttctgtcaccggccgcatgctcgaaccaccttcactctctatactctccttatggagccctctcaaggtctgcacattgcgcccagctacgggactggccatgcccatggcgccgctttgtctgcataggtacaagtgcctgagactttcgacgacacgaaggaggacgactgtgctgatggctgcacggacaccaacacgcagacgagcagcaagcctaagaaaggccaggcctcattgcctctcagagggacaggacgagatc

SEQ ID NO: 141695 - DNA, 542 bp, Glycine max
  Clone ID: PAT_MRT3847_98963C.1
gggacttgggtctataccagtactgctgcttaattgaggtctattgcacaagctccaacctttatgaggtctgtgtggggtcgggtttatgctgtcttgcccatgaacatagatgctgtttttgcaactaaaatggtggtcacacgacagcaatcagtaggacggctttaagatttcctaaaagcattcttatttgttctataaaatgctaaatggattagacattaggattggactagatacattacttttctgtttggcactgcacttggaaaataatttgtacattttactgacaatggtgaaagagttactcaaagaattgggttgatattgtgtcatttttaaacatagtaagtgacttcaggaattaggttacaaacatttagactattttccatttctgaatgtctaaccaaaagtgagtttgattagtgtttgtaaatagttaactactgttccactatcatctcttgcattatatttaacgttcaacttaatactctgaacatcaggatacctcaaaatgcattttatgtttc

SEQ ID NO: 141696 - DNA, 132 bp, Glycine max
  Clone ID: PAT_MRT3847_98964C.1
gggccaaggggggcgttcacaataacattaccacccgaagactaaagggactacaatgtctctgtgttaacgaaaaaatcctaaccaatgtcaaaaccaagaatatctccttggttcataataccacaacac

SEQ ID NO: 141697 - DNA, 272 bp, Glycine max
  unsure (1)..(272): unsure at all n locations
  Clone ID: PAT_MRT3847_98965C.1
ctcacattgctgtcaagttttctgaaatcttgaccaagattgacaggcgatctggtaaaggngcntgnngaagnngcccaaatttttgaagaatggtgatgcaggtatggacnagatgnttccaaccaanccccatggtggntgaactttcnctgngtatccnccccntggtcgttttgctgtgagggacatgccgtcanactgtggcngtcggagtcatcaagagtgttnagaaganagaccccaccggngcnaaggtcacnanggccgct

SEQ ID NO: 141698 - DNA, 495 bp, Glycine max
  unsure (1)..(495): unsure at all n locations
  Clone ID: PAT_MRT3847_98966C.1
acgcacacatacaattggtatcttatgtcaaaaataaacaaggctgttaagctgggcaagctgttatagactaactggtgactcatccaagcacattgttttctggcaccgctcaaaaatcatcaggtgggactcatttcttctccctggagcaaaactctctgccctggtaaggtcacaaagccctcccatcntgcagccaatattttgtattctcataatgctctacgtgggatttttctttcttagcttaagggccttccgctgtaacttattctttgacgcgcttgtaggttgtgaccgaaactaatacgcgacattgttttaccctgggaccggcatctaaatgcaatgctctgcggtttactaagctggggggacccctgctaaactgcaaactgtggggccaatgtaaccaaacttcttgagccaaagacagatttaccaatgtgcttccttacatgctccaaacattgtcgttacttcccttaaacc

SEQ ID NO: 141699 - DNA, 1294 bp, Glycine max
  Clone ID: PAT_MRT3847_98967C.1
tacctctccggtctccaacccctaatttcctcccaaacttcgtgtctcacaccatcacacgctttccctctctcttctactctatataaacacccgtcacacagcactcttcgacatctctctttccgatttccctcatggagtttcaaaaacctctatggctattcttgcttctcctcactctcctctcaagctcccaagccaacaaattcaacgttggtggaagcaaagggtgggttccaaacccttccgagagttacaacaattgggctggaagaaaccgattccaaatcaatgacacaatagttttcaagtacaataagggttcggattcggtgttggaagtgaagaaggaagattacgacaagtgcaacaagaccaacccaatcaaaaagtttgaaaacggtgacactgaattcaagtttgatcgatcaggaccattctacttcattagtggaaaagatgggaactgtgaaaagggtcaaaaattaatcgttgttgttttgaccccaagaacaccaccaacaccaaaaacaccaccgtttccaaaaacttcaccttcaccttcaccttcacaatctccaaaggcaaacccaccaaccgtatcgccgccgttaccgtcaccgtcaccatcggttcattcaaaatccctatctccggcgagttctcctgtgccggccgtcggtactccggcaatatctccggcgatttctattccgacactggcaccggagacggggactccaccgccgtctcttgggccttcatcatcttcaccaccgtctccgggtccttcatcttcttcaccgccgtctccgggtccttcatcatcttcaccgccgccggcggggccaacttcaccgccgtcgttagcaccgtcgtctaattcaactgcgccgtcaccgaagaacagtggattttctgtggctccttcaagcgttttgatgtattgtgttacaattgttgctggtgctgcgttgttgcgttattgaacaaacattttgggttgaaattgagacatactttagtgacatgcttcgtgctagaacgttcttgttgggacacatgtggtgatcatttaggatttgatcgttgttgtttttaatttttacttcgatttgcatatgaattatttgttaatagcatgattttgtaatcgtgaggatttcgttggaattttactctcagatgcgattttaatgtggctcaattatgtgaataaagtttttggtatcatttttgttctacgtgtttgaaaaaaaaaaaagttgtcatctcagaattttaaatattg

SEQ ID NO: 141700 - DNA, 784 bp, Glycine max
  Clone ID: PAT_MRT3847_98968C.1
aaacagccttcatttatttccccctcaaatccgaaaggtttctcttgatggtcagggatatttgcaccaaggctttcaatatgctcttagattgtgaacctctttgccttcatcttttccatttagtattgcaaaacattattgcagctgtctcatttgataccattgactgctactcagagttattgaggggcaaaaatgagtacacatagtacgttggatattgttgtaaatgatatacttcgagtggtcacaccagtacaagaagattgggagatacgatttgcaattattaatgatttacgaagtattgttgaatctgtagaaagcctgagagtggatatcactgaacctaatgttgcttgttgtagaccatctaaaggagcaactgttgagccatttggatcatttgtatctaatctcttcacgcgatggggtgacttggatatttcaattgagctatcaaatggtttgcatatttcatctgctgggaaaaaacaaaaacaaactttcttgggggatgttttaaaagctttgagaatgaaaggtggagggagcaacttgcagttcatctccaatgcacgagtgcccattttaaaatttaaaagctaccggcagggtgtatcttgtgacatttcaattaataacctgcctggtcaaatgaaatccaagattttgcttttggatcaacaagatagatggcccgttttcgtcatatggttttactggtcaaggaatgggccaaagcacataaaatcaataactcgaaagctggaactttcac

SEQ ID NO: 141701 - DNA, 849 bp, Glycine max
  unsure (1)..(849): unsure at all n locations
  Clone ID: PAT_MRT3847_98969C.1
ggcgtgcagagaatctcacaggtgcggaatatgaagccatagaaatgggtaggtggaggccgagcacgttggttttcactattctctctgcgccaataataataataatagcattgctctcctccggaggaaccaccacggtggaagacgtcgacaatgatcacacaatggctgtgacgggtctgcttcacacggattcccgatggatcctcaaccaagatgggcaaagggtgaagcttgcatgtgtgaattgggtgtcccatttggaagctgtggtggccgaagggctcagcaaaaagcccgtggatgtcatttcaaagggaataaagtccatgggcttcaactgtgtcaggctcacttggcctatagttttggtcactaatgactctcttgcttctctcaccgttagacgctcctttcagagccttgccctccttgaatccattgctggtgtccaaaccaacaacccctccattatcgatcttcccctcatccaagcttttcaggcagtggtgaagagtctcggtgacaacgatgtgatggtgattttggacacccacatgacccatccagggtggtgctgcagtaacctggacggcaatggcttcttcggtgacaaattttttgacccaaagcagtggatatggcgcctcaccaagatggccacccttttcaagggagttacagcagttgtgggcataagcttaaggaatgagctccgaggatctagacagaatgttaatgattggtacaagtatatggtgaaaggagcagaagctgctcatgcagcanatccagatgttctagtcattctatctggcctaaattttgacacagacttgtcattcc

SEQ ID NO: 141702 - DNA, 202 bp, Glycine max
  Clone ID: PAT_MRT3847_9896C.1
ttttaagtttttgattacgatgttttattgtggtcaattgatggatgatattaaatgttaatttattttataattgtatgttggatgtaaatatatttctccgaaggcaatggtggttcagaagttacagggaggaaagaaaggtttatatgttaaatggattttgttcataacttttttagtttatattcaatggttgttg

SEQ ID NO: 141703 - DNA, 1442 bp, Glycine max
  Clone ID: PAT_MRT3847_98970C.1
aatcagccttcatttatttccccctcaaatataaatggtttctcttgatggtcagggatattgcaccaaggctttcaatatgctcttagattgtgaacctcttgccttcatcttttccatttagtattgcaaaacattattgcagctgtctcattgatacattgactgctactcagagttattgaggggcaaaaatgagtacacatagtacgttggatattgttgtaaatgatatacttcgagtggtcacaccattacaagaagattgggagatacggtttgcaattattaacgatttacgaagcattgttgaatctgtggaaagcctgagaggagcaactgttgagccatatggatcatttgtgtctaatctcttcacgcgatggggtgacttggatatttcaattgagctatcaaatggtttgcatatttcatctgcagggaaaaaacaaaaacagactttattgggggaggttttaaaagctttgagaatgaaaggtggagggagtaacttgcagttcatctccaatgctagagtgcccattttaaaatttaaaagctaccggcagggtgtatcttgtgacatttcaattaataacctgcctggtcaaatgaaatccaagattttgctttggatcaacaagatagatggccgttttcgtcatatggttttactggtcaaggaatgggccaaagcacataaaatcaataactcgaaagctggaactttcaactcctattcactaagtttgcttgtgatattttattttcagacatgtattcctgcaatttttccaccgcttaaagatatataccctggcaacatggttgatgatcttataggcgttagatctgatgcagagaatcttattgcacaaacatgtgatgctaacataaaccggttcatatcaaacagggcaaggtcaattaacagaaaatctgtggctgagctttttgttgaattcataggaaagtttgctaagatggattcaatggccgtgaagatgggaatttgcccctattctggaaaatgggaacaaatagaggacaatatgatttggttacccaagacttatgcaatatttgttgaggatccttttgagcagccacaaaatactgcaagatccgttagcgcaggacaactgaagaagataactgaggcatttgcaaggacgcatgacttgcttacctcaacaaatcagaatcaaatttcacttttgtccaacatggcacctgcgcatgttataagatgtatcacaaggccttatggtggaggttactttcacccaactcagccacaagtgcagagggccatacgcccacaactgcagtcgcaacgtcattttcaaaatgtcagtcaaggaacaagctccaacagttcatcttcaaaaggacatacattggtgcatagaggccaacagatatggaggccaaagagttaa

SEQ ID NO: 141704 - DNA, 1765 bp, Glycine max
  Clone ID: PAT_MRT3847_98971C.1
atgagtacacatagtacgttggatattgttgtaaatgatatacttcgagtggtcacaccagtccaagaagattgggagatacgatttgcaattattaatgatttacgaagtattgttgaatctgtagaaagcctgagagtgttgataagggttcttctttatttatttacaatttctacgcatgatcatatttgctggcttgaagtggatatcactgaacctaatgttgcttgttgtagaccatctaaaggagcaactgttgagccatttggatcatttgtatctaatctcttcacgcgatggggtgacttggatatttcaattgagctatcaaatggtttgcatatttcatctgctgggaaaaaacaaaaacaaactttcttgggggatgttttaaaagctttgagaatgaaaggtggagggagcaacttgcagttcatctccaatgcacgagtgcccattttaaaatttaaaagctaccggcagggtgtatcttgtgacatttcaattaataacctgcctggtcaaatgaaatccaagattttgctttggatcaacaagatagatggccgttttcgtcatatggttttactggtcaaggaatgggccaaagcacataaaatcaataactcgaaagctggaactttcaactcctattcactaagtttgcttgtgatattttattttcagacatgtattcctgcaatttttccaccgcttaaagatatataccctggcaacatggttgatgatcttataggcgttagatctgatgcagagaatcttattgcacaaacatgtgatgctaacataaaccggttcatatcaaacagggcaaggtcaattaacagaaaatctgtggctgagctttttgttgaattcataggaaagtttgctaagatggattcaatggccgtgaagatgggaatttgcccctattctggaaaatgggaacaaatagaggacaatatgatttggttacccaagacttatgcaatatttgttgaggatccttttgagcagccacaaaatactgcaagatccgttagcgcaggacaactgaagaagataactgaggcatttgcaaggacgcatgacttgcttacctcaacaaatcagaatcaaatttcacttttgtccaacatggcacctgcgcatgttataagatgtatcacaaggccttatggtggaggttactttcacccaactcagccacaagtgcagagggccatacgcccacaactgcagtcgcaacgtcattttcaaaatgtcagtcaaggaacaagctccaacagttcatcttcaaaaggacatacattggtgcatagaggccaacagatatggaggccaaagagttaaaaggggatctctattactccgaaaatgccatggttttagctttgaacaggtttttactattgcctttcagtttacttgttaacacaagtgattgaaagaatgggattttgattttttttgtgcccttgtggatcaaaaagtgattaaccgtgtatattacatgaggttttggtggggcattatattgacgtttttacaactcttatgtacttgtggtaatattcggagcatgcaagagtttgcaaaatggaactttgtatatgaaccataaatggttttgctcttttacaagtcgcattatagtggtattggtaaccgacaaagatttaataagggtaatagagataaggcgttgttgttgttgttgttgttgtaatagagacttataaatgtcgtaacgcacttt

SEQ ID NO: 141705 - DNA, 258 bp, Glycine max
  unsure (1)..(258): unsure at all n locations
  Clone ID: PAT_MRT3847_98972C.1
gcggctcatgggtcaatagctggtacggattcgagtggaatcttctacgcggatcagcggtctgtcgtactcccagttcagatgtccgctgatggagccacggttgaggagagcgtcagcatatatggataagtctaacttggacgatagtgataggatatacgatgtcatcgtcatcgagctttacgcaacatacaatcctacactgnaagaagcttgctccggagtatgagaaagctgnttctatcttgagtagtc

SEQ ID NO: 141706 - DNA, 160 bp, Glycine max
  Clone ID: PAT_MRT3847_98973C.1
gcgcggctgagacaacacaacgggaggtgttagttttatgcaacccaagatccaaatggggtggggcgatgatacatagagtgactcgcctcacactttcatcataattaaaaaatcgtagcagcggcaagcaagtgacggtgctactcccacctatgat

SEQ ID NO: 141707 - DNA, 227 bp, Glycine max
  Clone ID: PAT_MRT3847_98974C.1
ctgtctcagcggttattgtccccctctcattttctgtctctttccacgaaatgcgtagatccacgtcacccaccttgactcaaatggataagaacacttccattccacctcagattctctcctttttaccattcattatttttcctatttaaatctcttccattccaactttagagtctacttcatttgcgtatgctttcctttgatctattctattcttcaatatc

SEQ ID NO: 141708 - DNA, 320 bp, Glycine max
  Clone ID: PAT_MRT3847_98975C.1
ctcgaggtgattcatgaaaaagttgtattgaatcttttcaaactgcaccagcttgtggggaaaagcctcaaaattgatggtgtagtttggagagattcaggaaaaagttgtattgaaattttcacaagaggaatttcttacagcttggtcaactcaggtgcgtcctgcaacaactctgttggctgatgggtgtccatattcgtatgctatggtgcatgatagttcagtgtctacaataccaggtgattttgccattggtgttaaattgactaccatatacaatatgtcggcatattgggctcaatcctggtttatcaggt

SEQ ID NO: 141709 - DNA, 400 bp, Glycine max
  unsure (1)..(400): unsure at all n locations
  Clone ID: PAT_MRT3847_98976C.1
attatacncctacacacgnggtggtggngccgaacgagcccactgcctcgagggangacttatgaagagcaggcctgagctatgacaatttggtgccgttaacaaagaccataacgatgtgaggggttcttgctgataacggctgttaagaagactgtacagccaaaagggtaagggtgcgagaccactcacttgatagggaaccacagacctgagcggaatggcttccattgacaaagtgagaacggcaaaacccaacacctgtgaggcaaagatcatacagtgctcgcgatcgaccaccatgaacgaggacgactcctttattgatacggggagtggagagatttacaaccatgaacagctcaggaaacagctgactcatcacaagaaacgcactgga

SEQ ID NO: 141710 - DNA, 323 bp, Glycine max
  Clone ID: PAT_MRT3847_98977C.1
agggcactggaagatcttcatccttctttaaaaaaaccccaccgttttttaactttgtctcaaagcctcaacccagcgcttttttccccacaacatgggggtactaaacatcatgcctgatctatatattattacaataacccttctttccccaaccctccttcttgccaaatatcttacatagaacattttcattcaacaattacaaactctttcataactactatagcccccccacttatcacatatatcactaatacagccacagaagctgcacaaacactcctataatatagaagaactaccaacaacttaccaacccc

SEQ ID NO: 141711 - DNA, 321 bp, Glycine max
  Clone ID: PAT_MRT3847_98978C.1
acttcccgggtcgacccacgctttttgtcagttacccaaccctaactaaacgcacgcgcggcgtgcgctgagctcagagtgaagaaagaaagagaagagaagtagtaacagtttcaatcagttgaaagaagaagaagatcgagcattctttactgatcggagaaatgggagatccagcggaaaggttgggatcggaaggattggaggggggcgccttcgttaagaccgacgacctgtgcatggaaatcgatccgccgtttcaggaaaacgttgccaccgccgaggactggcgcaaagctcttaacagagttgttctcgccg

SEQ ID NO: 141712 - DNA, 546 bp, Glycine max
  Clone ID: PAT_MRT3847_98979C.1
atggaatctccctctcgctccttcgtcattatcgtcggtgctggtgtatccggtatctctgcggcaaagctgttggccgagaatggcgtaaaggatcttgtaatcctggaggcttcaaactgtattggcggtaggattcggaaggaaaacttcggcggtgtgtccgtcgaactcggagctggttggattgtcggagttggcggctttgagtccaatccaatttgggaactcgtcgctgaatatggccttcgaacatgcttctctgactacacgaatgtgccatacaacatatatgatcgcagtggaaagatattttcgagtggaatcgctgcggactcgtacaaaaaagctgtggactcggcaattcgaaacttaacgaaccaggaagaagccgatcgcgaaggcaatagctccaaaacaactgaaccaccttcgtcgccattagagctagcaattgatttcatcctccatgattttgaaatggcagaggcagtaccgatatctacctttacagcgtttggcgaaagggaatttttggttgcggat

SEQ ID NO: 141713 - DNA, 162 bp, Glycine max
  Clone ID: PAT_MRT3847_9897C.1
attcttagagcgggcggacggtcaatagtcaaacgtccttatttgatttggaatgctctgcagttcttttaatcagggaatggactcaaatatgtggagtggggaaaataatgtagggactggtgtttagatacatcatacatagattaatatttgtggttt

SEQ ID NO: 141714 - DNA, 161 bp, Glycine max
  Clone ID: PAT_MRT3847_98980C.1
gtaatcagcacaatcttttgggaagggttcgtaagatgtaaactatatctttatatattgtcacttatatcatattcgtagtagtaaaaatgtcctttaatttctgtaaaaatagatcccattttgatttaaaatgagtacaaaccctaattgttttgtaa

SEQ ID NO: 141715 - DNA, 140 bp, Glycine max
  unsure (1)..(140): unsure at all n locations
  Clone ID: PAT_MRT3847_98981C.1
attgcatgtaagcgatacacttttgggccnaaatggaagcccccggcaacaagttgatgcctttcatcaggtacccggtagttgtcatgtagcaatatatgcctccggccaccacggatacctgccatgatcatgttgtt

SEQ ID NO: 141716 - DNA, 442 bp, Glycine max
  Clone ID: PAT_MRT3847_98982C.1
ctcacactctcaagcgaggtaagcgatggagacatatctactcagtcgcgattaactgaccctaacgtttctgaacatcagttgggctcttgtctgaaatgagctattcgagcactactactatctaaagccagagctttgccacatatctgaagccgtcaaacgcatgagtcacaccgtgggcagcttcacctgggactggatgcgtcttctagaccgaccgttaaacctctctatacgccactcttcagatcgcccttggaacgcttgacgctctcagtaccgatgctctctacgacctactgcaggacgctgacgacacctcctccgaccgatatgtacactacaccgccggcctacaccagaagctcaacgccttctgcctacggatggacgcgaccggcttgttaatcttcttgatcgcccagaagaaggagctgga

SEQ ID NO: 141717 - DNA, 322 bp, Glycine max
  Clone ID: PAT_MRT3847_98983C.1
tagtcattatttacaactaatttttgtattgaatagtttcatgaaattagcatttttcctccaatttatggttctttttgtaggaattatacatatttttatgtttagtttgattttatacagtagatactctcattctgtgaattaatgatgaaaccacttcggtttcagaccaaaagaagagaaggtcaagcaattggtgtctcactaagcgatgcatatgcgcttagcgagtgacatccgctaagcgaggcattcagctcgcttagtatgaagggaaaccctagaagatgatcagtcagagatgtgctcgcccagcgcg

SEQ ID NO: 141718 - DNA, 236 bp, Glycine max
  Clone ID: PAT_MRT3847_98984C.1
ccaatttgcaggcatcacggccaaggctgttcaatgtgtacatagatgtgcatcgggaaaaagatgttgatcttgatattctacttgtttgcgatgattcaaacattcttaaatggaccgttcttattaagggaccctctgagacttcttatgaaggtggtatgattcagattgcgttttctgttccagagcattatcctctacagacacctctagttccgtttttgactcagata

SEQ ID NO: 141719 - DNA, 542 bp, Glycine max
  Clone ID: PAT_MRT3847_98985C.1
ccataaaagaaaccccggtttatttcacaaaaaaggaattaaaaccttaacgaaagggtgggtcaaatttcaaaagggaaaaacccacccgggccccagggatatttcaaaaagaggggcttattgaattcaaaaacaggggggggctttagttccccttacaaaaaaaaaaacagaggcatttattgaaccccgacttaaagggggggacttttttcaacaaacggggggaaaccctaaaataaaacccaggaaggaccctcttcaacaacatatgggtttccggaccccatttttaaaaaacgggccaaaagccccctccgagggggccctggggcagcttcaagtttcctaccatggcagcagcttccttgggattatttcggatcttttttccttcccccaaaaccaagggttggttaagggaagcggcaagggcttttttagggaaggaccccccttcattttttttcacttcaaggggtaaaccctttttccaccaaaaaccttggaaaaaagggggggagctatattaaaggggg

SEQ ID NO: 141720 - DNA, 586 bp, Glycine max
  Clone ID: PAT_MRT3847_98986C.1
cccacgcgtccgcccacgcgtccggttttcacttgctctagtactttccatttccttcctgtggaggcagcagaagaggcaagttgaaggagtaatggttgagtgcgatgaaaacgttaacgaagcagcaatgtcaatgtccatggaccctcgcgcgaggcacgcacaagccataacatcacacatcaaagaccgcgcagtgtggaacaacctcataacccactactccaaatccgacctttcttcctacgccgtttctctcttccagcgactcccttttcctcccaacgttgtctcatggaccgcattaatctccgctcactccaacaccctcctctccctccgccacttcctcgccatgctccgccacaacactctccccaaccaccgcaccgttgcttccctcttcaccacctgcgccgccctcactgccgtctctttcgccctctccctccactcactcgccctcaaactctctctctcccaacaccccttccccgcctcctccctactctccctatacgccaaactccgcatgcccctcaatgcacgtaaggtgttcgacgaaattccccaaccagacaac

SEQ ID NO: 141721 - DNA, 330 bp, Glycine max
  Clone ID: PAT_MRT3847_98987C.1
aacccaataaacaaagggggggcctttttaaaacgtttttggccccctttaattccaaaagggagccaatacctacattggaaatattccccaaacctttaggggcattaaattttccccccaaaagaaaaaatggccccagaaaaaaaaaaaaaaaaaactattgtatgaaattagaacactgttatataacccccaaaagttttttttataagtatggcgctttttcttacctatctaaacgtttttaccaaatgagatcttaaccgggagaaatttgatcaaaggacaaaacctttggggatttcgcagggaaggaaaaagggaaag

SEQ ID NO: 141722 - DNA, 371 bp, Glycine max
  Clone ID: PAT_MRT3847_98988C.1
gggaccctaaggcaacatgattttcgggaaggggcctctcgtcctccagctggatcgtccgcaccaggagtgtctaaatattcttcttgacttacgaagtggatctaaaaggtcactaagctgatcctactaaacatgtccttgctctaaaatcatgggatattacttcaactagaccacatttgcttctagccgatgggagtgatccctgctcacgcttatacgatagaatgatgctgccgactgttacctcatgttggacaagtatgtctccacctccttgtgtcaattattactgacgaatgcatatctctgatcatggacatacaagcttgcacttaactcatgtgacatacagtactgatggacac

SEQ ID NO: 141723 - DNA, 1131 bp, Glycine max
  Clone ID: PAT_MRT3847_98989C.1
gacaattttagtaccatagtttcagctgttgctgagggtcgctctatttataataacatgaagtcatttatcaggtacatgatatcatccaatgttggggaagtaatatccatattcttgactgctgctctggggatcccagaatgcatgattccagtgcaacttctgtgggtgaatttggtgactgatggtccacctgcaacagctcttggttttaaccctgctgatattgatatcatgcagaaaccacctcgcagaaatgatgatcctctaataagttcttgggttcttttccgttatctggtaattggttcctatgtgggactagccacagttggcatttttgtcttgtggtacactcaagcatcttttcttggcatcaaccttgtgagtgatggtcacacaatcatagaattgtcccagcttcgcaactggggggagtgtccctcatggtctaatttcaccattgctccatttgaggttgctgggggtagattgatcacattttcaaatccatgtgattatttctcagttggcaaagtaaaggccatgaccctctctctctcagtcttggtggcaattgagatgtttaactctttgaatgccctctcagaagagaatagcttgaggaaactaccaccttggaggaacccttggcttttggtggctatgtcaatatcattaggactacattgcctcatactctacaccccattccttgcagaagtgtttggtgttattccacttagtttgaacgagtggtttatggtacttttgatatcagcacctgttattcttattgatgagattctaaagttagtggtgaggagtcatagaaggttgttgactaaggagaaagaagcatgaagtctcaggcacatggccactataggaagcaataaaagatggagataggatgataaagtatcaagccaaattctttgatatattcttttctctagcctttaggaaaactacagctcattaatttatggcaagaaatttgtcactttttatgattattacagtaagtatatcttttatgaacattttgttcaattgctctcttttacttttttcctttgagaaaatctaaatgttgagtcaagggacaaagaaagaggaagttcg

SEQ ID NO: 141724 - DNA, 390 bp, Glycine max
  Clone ID: PAT_MRT3847_9898C.1
cataaaaagaccaattcgactggtgtagatcctaaagtgtgtacattaaccttacttgatctgtggtcatagacagttacatactctctcgggcattgggcaacatgctagagccatgaatgctacaataatcacacgccagatcgatctgctcatcacaacttctgtcatgtacactattgctagtctgagagaacatcagacacccttcataattatggcctggttgccctaacatgcaagcgcatatagtgaccgagctaagatggtattcacatgtggcaaaccgtacagaatcgcatcgatagagctcacccgaacagacgatgcacatgcccattctatacatttatctgactgaagtcacagaaaccgtattacagacgctac

SEQ ID NO: 141725 - DNA, 394 bp, Glycine max
  Clone ID: PAT_MRT3847_98990C.1
ctcgtcgtcggccgcccttttttgtttttatttttttttttgtgttttttttttttttttattcttataagggctggatcagccaaaaaggctattgataaacaatcaaatggaatgtttaccaaattgcaattgttcagtatttactatgggtttctcaaactcggatcaaatattttgtgagtctaagtattcaaaccgttaataagtacataacccttattacctgataaaactgtcactggtacttaactcaaccttatagtctctaaagattgtagagggcatgattctttaataaattccaaatactgttaatattcattgagattaatagtgccttcaggggcatgatctttttggtgggttactaaacatttggcttctaaaggcc

SEQ ID NO: 141726 - DNA, 969 bp, Glycine max
  unsure (1)..(969): unsure at all n locations
  Clone ID: PAT_MRT3847_98991C.1
ttttttnntnttttagggggcgaaaaaagagaagtaatttttaatataaaaaaattcatccattttaaatatcaacatcctatcacacttgttttgtttcatttcatctaaacaaaagtgttggaaaatacccagtctcacatcggttgcctcactgcttggagtgcagcttatacatctggtggacaacttcacttaacgtcaattgattttaagatgaagtctaacatggtatcagagctggactctgtttctgggacatcgctttagcttccgctgcgatcactcatcatttgttgttcacgcaccaagcccaagaagtgttgtgcatgcgggagtgtgttgggaaatactcaagtcccacatcggctgcttcactccttgaagtgcaacttatatatctgttggacaacttcacttaatgccaattgtacatatttacatcatcacaactatgcataagggaggagagggaatgagggagagatgacaatgacagtcaaataaggctacaaaactggcatacacaaattctattctacattctggaaaatggaaggcattgacgttgataatctgctttctctcagaatattgtacagttgctgaaaacattcagtatgaaccgagaacaactctattaatgttgaaggcaaaacagttgtacttctaagatcatccgatcaaatccaaatggaaggatttctaaattgtgttgccatagcatccgatagaaatttgactaggtttttcttctcaacatttttctccctcttatgttcaaggtgtcgaaccttaacagaacctgtcaaggagaaatctgtatctgtgatgatgacaagacatttgataccatgttcattagcatactcatactgctctgtaagactgggatcaggtgtaggaacaaattcagccttaaagttctcctcccataattcagcaactagctccatgcgctccaccaga

SEQ ID NO: 141727 - DNA, 459 bp, Glycine max
  Clone ID: PAT_MRT3847_98992C.1
aaaagggggaaaaaaaaaagggggcaaaccccaaaaccctggaaaaaatcttgttttttttgggggggccaacaaaatttttaaagggaaaaaaaaggggaccccattttgggggggggaccccatgcaaaaaccgtttttaaacccttttcagggggaaccccaacttaaaaccccttggaaaaaagggccccgcccaaaacccccttttttttttcccccaaaaaaaaaaaagggggttcacccccaaaaactaaaccttttcttttgtttaaaaaagaggggccaaattttcccatttaaagaaccttaaaaaaatcccccccccccccccaaaaaaatgctttaaaccaaaaattttggggcaaacccaaacgggtgaaatttatttaaaaggggggcggtgggaaaaagcacaaaacgggtttgtaaaaaaccccccaaagaaaattgtttttt

SEQ ID NO: 141728 - DNA, 391 bp, Glycine max
  Clone ID: PAT_MRT3847_98993C.1
tttttattgatacctaatccataagcttcccagtgctgatggaatagaaggcattgatctgattgcttttatgatgaaaagctatgtaatctccactgctgatggtgaagctagatactcatttgagcctataagaagaaagagagagcttcttggatggtcagacaatactggaaggggcgtctcattcctggagaggagatcacgcacatcatgcctataaggatattgtgatctcccagcgcttatgggggcacctcctcaagatagagcgcgtcgcgtcaaagagagattcagtgaatgaaagtgctaggttgctagtttgtcaagactgggcattaggacttatttttcacaagatatgaactagatatgatgttgacgaccacat

SEQ ID NO: 141729 - DNA, 396 bp, Glycine max
  Clone ID: PAT_MRT3847_98994C.1
gccaccagctagccaaaaactggatcattttccagtttcaaccaaaatcttcttaacctatttgccaatattttactgtgggggaccacagtattagaaagttctgaccccaagcctaatttctgtggaaaaaacaaaaatggaagctccttgccagactcccaacaaaatgggaatttaggtcgaacgttgctactgtggagggtcccaccccactttacagaaagacctaaagatgctacagcaaaaccagagcctacgtacttgaaggactgcgggtgccacaattaaatcaataacccaaggccttccctttcgtaaaaaatttatattgcatctttttgctgatgggaaaaagcagtgcccatcatgtatacgactcatcatttcacgatt

SEQ ID NO: 141730 - DNA, 496 bp, Glycine max
  Clone ID: PAT_MRT3847_98995C.1
ctggctggtcggcctttctttcttttttttttttcaatacagacataataaatatttcatatccatttccccagaaaaataactttatttcttacagacccgtattgaaaaaagaagagcctgtgattcacatccccgggacattgtcaggcccatattttttaagcagagactgagcttaatctttgggtaacaagctgaggagatagacgagaaattttggtcggaatacggggttcaaccacttgcaaaaggccagcggccacccttgaggttaacggatgggccggtacctttacgcaataagcctcatttcaatgaatggcatatgcctactaggtcaatacactaccaccggttgtgatgccattcaataaacgtgagtagtcaccatacagatgggcgaggagagcgcatgctcgaaaggtgccctctatgatggaaactgcttgggcagtttgccagattctaggacgccagctttgcaataaattgc

SEQ ID NO: 141731 - DNA, 244 bp, Glycine max
  Clone ID: PAT_MRT3847_98996C.1
cgccgtgccgctactgatctcaatctctcgtctctccgcgtccaaacccttacttcctaccctatggggctttctctcatccatcatgaaaggaggaaagtccatgaccgcttctaaaacagccgatgcccaacatcgctagtgaataagaagggcaccgccccaacaccaggaaacccgtcggaaaggggcggccaccgatggacctaacaagccaaagaggcctccgaatgcctaatgcgac

SEQ ID NO: 141732 - DNA, 1155 bp, Glycine max
  unsure (1)..(1155): unsure at all n locations
  Clone ID: PAT_MRT3847_98997C.1
aattcggctcgagcaaggggcttatggtcctgtacttctttctccaggggttgtccaatttcctggatggagtcattattcggcacctgtaagtcctgtgctatctcctggcgctcaacctactgttggggccacttctttatatggagtgacccagttgtcatccccaacatcagcttttgctagaccatatactcctctgtcctctactaccggcccttcaggaagcaatctgaaggatcaattttttcctgaaagacccggtgaacctgaatgccaatactatctgagaacaggggactgtaaatttggattagcttgtcgatatcatcatcctcgggatcatattgtggcacggccacttcttagccctgttggacttcctttacgtccgggggttcaaccttgtgcattttatttgcaaaatgggcattgcaagtttggcttcacgtgcaaatttgaccatcctttgggatctacgagatacacaccnatgggttcttctttcattgatgtgccagttactccantacccagttgggtcgttgctctctcagctggctccttcaacaacatcttcagagcttcggcctgaactgatgtcagggtccaaaaaggaatcccttgcagccagaatatcttcttctggaaatagttctggtacttctgtgggtctaattttctcacaaggtgggtctgtttcgctatctaatgtgcaactctcaagtcagagttccgccccctctaagcagtagcagaagcaccagacaaagccgcgagatacgggaatgcaaacttgaaaataactcattatctattggatgtgatttcacaagcctccattacttctgtctatagtcctcagtactttgaaggcaactgttcaaagtttcacattcgctgttgaaaattcatcatccaatcctgtttatagccgatactaggccattctcttttatgctcatctcatctgattatattagtatttcaaataagcttcaatagaaaactccatattatctactcttcctctcttctgcacattactactattctttgtttatagcgtttgtgtgatgattgtcattacatttatgcgtgtttgagacaaggcctagtccctgcccccctaagatgatgagagagcttatgttc

SEQ ID NO: 141733 - DNA, 190 bp, Glycine max
  Clone ID: PAT_MRT3847_98998C.1
ggcccacgaaactatcctatccacatctgaatcaatgaacgatgggcacccagacaagcactgtgaccagatctacgatgctgagctcgatgcatgcttggagcatgaccctgacaggatggttgccggtgaaacctgcaccaagaccagcatggtgatggtgttacgagagatcacaaccatggcccac

SEQ ID NO: 141734 - DNA, 2290 bp, Glycine max
  unsure (1)..(2290): unsure at all n locations
  Clone ID: PAT_MRT3847_98999C.1
attaaacctacacactctcttttacagtgaaagtgtgagaaaaacccgtgtctctctctcgggttcgcaacgaggagacaacaccggagctctccgatcttncagaacattctagagtggcaacgggattcattcttcgcttcaatggctcgaggcacactagagagtagagaccgtacagtcctagtcagagagacacacaacactacaccaaaccaacgcacgcttgtacagtgaagtgaagctgtggaaatttccttcgaggaaacaagacaacctcgccgatctcacggaacattctagtagcaaccaacgagaatcttcacttcaaacaaccaaacactaaatcgtttgcatggacttgtacggtcggggtcaggccagaaatggatccaacccggtgaaccagcctgaatgccgctcgccgggcaccgacactggcctcgaagaatcgatttggcatttaacgctgggatcaggtgaatcttacccggagcgacccggtgtgcccaattgtgtgtattacatgcgaaccggtgtgtgcggatatggtagcaggtgtcgttttaatcaccctcgcgatcgtgctgcggttgctgcggcagtaagagctacaggggactacccagaaagggtgggggaacctccgtgtcagtattatttaaagaccggaacctgtaaatttggtgcatcttgtaaattccaccatccaaaaaatggaggtggatatttaagccaagctccactaaatatttatggatacccgttacggctgggtgagaaagagtgctcctactatttgaaaacggggcagtgcaaatttggtatatcttgtaaattccatcatcctcaacctgctggcacatcattgccaacttctgcacctcaattttatcaacaggtgcagtctcctacagttcctcttcctgaacagtatggaggagcttccacaagcttgagagtggccaggcctcctgtattgcctggttcatatgtacaaggggcttatggtcctgtacttctttctccaggggttgtccaatttcctggatggagtcattattcggcacctgtaagtcctgtgctatctcctggcgctcaacctgctgttggggccacttctttatatggagtgacccagttgtcatccccaacatcagcttttgctagaccatatactcctctgtcctctactaccgacccttcaggaagcaacccgaaggatcaattttttcctgaaagacccggtgaacctgaatgccaatactatctgagaacaggggactgtaaatttggattagcttgtcgatatcatcatcctcgggatcatattgtggcacggccacttcttagccctgttggacttcctttacgtccggggttacaaccttgtgcattttatttgcaaaatgggcattgcaaattcggctccacttgcaaatttgaccatcctttgggatctatgagatacagtccatcggcatcttctctcatcgatgtgccagtcactccatacccagttgggtctttgctgtctcagttggctccttcaacaacgtcttcagaccttcggcctgaactgatgtcagggtccaaaaaggaatccttttcagccagaataccttcttctggaaatagttctggtacttctgtcggtctaattttctcacaaggtgggtctgtctcgctatttgatgtgcaactctcaagtcagagtaatgcccctccaaacagtagcagaagcaccagacaaagcggtgaaatacgttgacctgactcgtacaaacttgaaaataagtcctcgttatatattggatgtgatttcacaagccttcattacttctgtctatagtcctcagtattttgatggcaactgttcaaagtttctctatcgctgttgagaattcatcgtccaattctgtttagaagccatactaggtcattattctcttttatgcttatgctcaccccatctgattatattattatctcaaataagcttcaatagaaaactcattttggtctttccgtcccccctccggatttttttttttttccctctattgagcgggcttttgacagcccataaaaaaaatgggtataaatcacgctccccacacgagcctttttggcttgacatgtggaattcaatttcttatttagaagaaagggatagctaagattgaactcatggtcacatggtcatagaagccatcatttcatgtcaaaaaccccccttcgtaaatagtttaagctgttgaataaaagcatgtgattcccctctttttcc

SEQ ID NO: 141735 - DNA, 1061 bp, Glycine max
  unsure (1)..(1061): unsure at all n locations
  Clone ID: PAT_MRT3847_9899C.1
ctggcaactttaccaaatacaatgcagggttgaacattactcatgctgacctcattgcatctctaacactaaatgacaaaggtgacaaccttactgcctcatattaccacattgtaaacccgctgactaattcggctgttggtgcggagctttcacatagcttttctggcaatgaaaatatactcacctttggtacacagcatgctctggacccgctaacgctgttgaaagctcgggtgaacaactatggtcgtgcaagtgctctgatccagcacgactggactccaagaactcgattttcgcttgttggtgaggtggatactggggccatcgaaaagagtgcaaaggttggtcttgctgtggccttgaaaccatagaccaagtcgttttgtgagtgatatatgggatgcttctcgtggtggaggataataagttgttgtagactttcactttcccaatgaacatctagtgcttcattttggagctatatcaatttcttcatatcttggtggacttgagtgtaaaatcaataagcacaaaaagaatttgaatttgtacttattcaacagatccacccgaaagccattgatttaggtgcatctttgagtaagctttttgagcatggaaggtgattgcccagcaatttggttgttttagggtgtatatcgaagctttgatttagatgcctagtaaatatttggtaataaaaaaaaaaaaaaaaaaaaaaaaaaaaaactcgagtttttttcttcttcttcggctttgggttgtaattaaacattttctacatagctggattagtagtacttgtgaaaaacttgtaacgtgaaattggagaggctaagcagaaatgcttctgcttgatgttaagtgttctcctgtgaatgttaattatgcacgaaatcnagagggaaggacgacggtaaaaaatactgatgaggttaagatcactatgaaaggtaatggcaggaaattggattgaggccattggagattttaatttattcattttattaagtttgattctacataaacgctgatttgctgcagtacagaaaata

SEQ ID NO: 141736 - DNA, 252 bp, Glycine max
  Clone ID: PAT_MRT3847_989C.1
cataccataggggaggcacaaatagaagcattggcgactagaatcaccaacaactagactcagctgaaatggcctaaccactaacggcatttgtcgaccttaaaccttcccctttcactgacttcaagccctgactgctatgcctagcctctctatcaaggaactcgttaatcattcagagttaatcacattggcaaaaagatcaaaaccttacttccttatggaaccactcctgtcatcaatgtgatggat

SEQ ID NO: 141737 - DNA, 359 bp, Glycine max
  Clone ID: PAT_MRT3847_98C.1
atatctagattctcttcatctgcctttactaggataattaatattgatttcattttatttttttacttaggctgaaaacaattcaaaaatcaaaatgaaatattttgaatttacaggattctttttgaagaaactaactagggacacataaagtaagtcttttacagtcagaaataggtttttaactttttactacttgactgtcaattgaatcagttaaatggtgtgaaagacaaacttatgttggttagttacagtgtcagaagcctgggagtgctttctggttgtagctttggctttatatgtttttcaaggaattacttacttatcactctgataaaaaaagaaaaaagaaaaag

SEQ ID NO: 141738 - DNA, 533 bp, Glycine max
  Clone ID: PAT_MRT3847_99000C.1
cggacgcgtggggtgattttgcccagcgaagctatgaatctgttttaagaaagcgaagagaagagctcattgtgagtgacattgatctgatgtatgtcaccaatacgtttgagttggatgctatatcaaatgttttgcaagaagcaaaagcaagaaatgttattcaatgtcgctatgatgaaacttatgctggtgtgactcctcagctatgtgacttggaatctggtgaagaagatgaatggagaatgaaagattacttgcatgaaatggatggttgtattgaaaatgctattcagagactgaaagagcattgtatctatagagcttagcaaaattgatgcccgattaataagaagtgtttcagagatgcagcagctggaattcaagcttgggcctatttgtgctaatgattatcgagcaatattagtgcctgtagtgaagttgctcctatgggctctattggaagatttggctgagaaggatgcgagagagaagtctgatgctgtaagtgaagcactgtcggctgcacttgc

SEQ ID NO: 141739 - DNA, 231 bp, Glycine max
  Clone ID: PAT_MRT3847_99001C.1
tacgcgctggagaagacgacagaaagggcgactatgggcggttctgcgccaattgctacaaaaccaacttgttcggacagtttcgtagggcccgcactctagatgccatgataactcccacaagacaaggtcctagtatccttctctggaggcccttcatccagggtagctttgaatatgtccatgacatgcaagagagggctcacaggaacttccatgcgaatagggacc

SEQ ID NO: 141740 - DNA, 525 bp, Glycine max
  Clone ID: PAT_MRT3847_99002C.1
tcctctagagcgggcgctttttttttttttttttttttttttttttctgaaataaagaggtgatatatatctgtgagagagaaaccaccttgtcccttcaatggtatttttgggacctttttggaaactatttttttcatttggttaaaccattttttttatatggaaaaaagggttcaacctacctatggtggttaggctttaaagaaattttttaaaaaagggttttcaaaatggatttggttattggaacttcacctacactatgtatctgtcggtagaaatttttaaactttatctatactaatggactataggtataagatttataagattttacctacaccaagtgatcataagtatacattttgtgaaattttacctacattaagcatttgtaaatcgaaggtattttgacttttacctataccaaataatagtggatacaaatttttgaattttacctatgataagcagtggtcggtataagcatttcttttacttttacctacagaaatttatgtc

SEQ ID NO: 141741 - DNA, 285 bp, Glycine max
  unsure (1)..(285): unsure at all n locations
  Clone ID: PAT_MRT3847_99003C.1
ggcangcancctngggtctggctcgctatgctgcaattgctcaggnccatgggttngtcccaattgtggagccaagagatctanctnctagnggancctggtattgataagnattttgaaatagcccaaaaagnctgnggcanaggtttccttcnaacctgctgaaananatggccttttaaaggnattctccntaangcnagcntggtaacnccggaagcnattccangnccaggccaancctcagannttncgattannacctcaagccctncnnaggaattc

SEQ ID NO: 141742 - DNA, 314 bp, Glycine max
  unsure (1)..(314): unsure at all n locations
  Clone ID: PAT_MRT3847_99004C.1
gaggcggcatngatgcaagacgattatgattttgtttatatgagggaagaagatgaaaacaagttctttatctcttacaagaggcacaactgattcccagtttattgtggacaaaaagaattcaaataacttgcaacaagatgagttcacatcacaagtaggtagttatgacataccaaatagtgagaaaagaaatggatcaattgctgaagcaacaccatctactttagaaaatgatgggggaacaagcaaaattaaaacttaatcattgaaacttggttaaacccaaaaatgacccctgattccatgcttaa

SEQ ID NO: 141743 - DNA, 255 bp, Glycine max
  Clone ID: PAT_MRT3847_99005C.1
tttaagcgttttatgctaaacgcacatgtttgtatactggtagatttccaacagcgggttgttttctcccgagcaggagtgtgactctatctgtctaagccttaatgtgatcatggatgataatctggaagggccataaatataagccgtgactgtggagaaagcactaaaagcacaggctggtgacaagacggagtagggcctacgggggagcaggataggccgatgttgtgatgcaaaggccgtaaaaaggtg

SEQ ID NO: 141744 - DNA, 694 bp, Glycine max
  Clone ID: PAT_MRT3847_99006C.1
tcgactacgcgtccgattttgtcgccattagaagatttctggcgttgggaaaataaagcatggaggtggaagttgaagttaaggtgaagatggttccaaaacggcactgggaaaggatgagaaaacagtgtttggacgaggctgtgggttcaacaccgaagaccgacattgtctcgtcgccacgtgtccttggagactcgaacattcagactcagagggtttcattccaagccatcgggaagaaccccttttgggtgtacgacggagaagcgcttagactcttcagaaagttcgacatgggtcacttgcaactcggaaaccgtttctgcttctctcccaacacaccactttggttcactctcaacaacattcaacctcagcctcaacttaaccttgactaaattcacgtttcggaaatcgatcccgttaaaggtattattattgcctttctttttcatctttcaattttgttgcatttctcgtgtgaatttggttgcttgcttgcgctgtaaatatgggtactttttcagagcaacattgtgtaatgtactatatgatttgaaattaaaattgtatttttgctagtttgtgaagattatatgagttgcgagtgcttgtgtaaccttccaatggtagtataatttaaatatgattacatgtttttttttttttgagctcacagggagtttttttg

SEQ ID NO: 141745 - DNA, 470 bp, Glycine max
  Clone ID: PAT_MRT3847_99007C.1
aatgaaacacagtttgttttttttacaatctaatccgaacagttggtaagttgaagtttctgatgtttctttggccgtcctagtttctttccacagtcacctaccactatgggatcaacattaaaaatacaccttgtccccatgcccagcaggaaggggggggggagttataattaacccgccgaactggtaccgttaaaaagatagggattcccaaccccgttgccaaaccaaatgtatcaagggcgtcatatcaggggataccattttcaaaggggtgggtttttataaagggggagcctgctgataaaagggagccaaaacatttaaaatagtcgccctctgcactgaggacagcacaagggaagctgccgggtaaaaacctgcaatagctggggcccgctcgggtgaataaccaacaaaaagatttgctgggggacttctgctgtcccacatggggagaggggaag

SEQ ID NO: 141746 - DNA, 1320 bp, Glycine max
  unsure (1)..(1320): unsure at all n locations
  Clone ID: PAT_MRT3847_99008C.1
acgtaggactaagtagcaaccatggcaggttcaatttctttgttggagttctctttggtcatttttatccaaatcatgacacactgccatagcagcatcaccacatgcttgcctgagaaacatgctgcactattcatattaggagattcgctatttgataacggaaacaacaattacatcaacaccaccacctcttaccaggcaaactatcctccctatggagaaactttcttcaaatacccttctggcaggttttctgatggacgcatgataccagatgccgttgctgagcttgctaagttgcctatacttccaccgtatctgcatccgggtcacgttgaatatgtctatggtgtcaattttgcttcaggaggggccggtgctctgcgcgaaacatcccagggaatggtgagacccccctcaactctggttagttactgtgtgagtgtttagaatctcttttgtctttgcttcgggcttgctggagccgaggaactcctgtcctgatctgtctacttgtttttctctggagcctatgactatggttctctactggatccaaactcaaccagtgtacttcttccggttgatcatcaaggatttgtagacattgtaattggaaacctcacagacgcgatcaaagaaatttataatgttggtggaaagaaatttggatttcttaatgtgcctccgataggttgttcccctgccgtaagaattttggtcaataatggaagcacatgctttgaagaattttcagccatcgcaagattacacaacaatgcactctcaaaaaggcttcacgagctagagaaacagctcaagggattcaaatattcagtcatggatttttacagtgcattttctcaagtgttcaacaatcctacaaaatatggcttcaaagtagcgagcgtggcatgttgtggaagtggaccatttagaggagtggatagttgtggagggaacaaagggataaaagaatatgaattatgtgacaatgtcaatgaacatttgttcttcgactctcatcatcttactgatagagctagtgaatatttcgccgagttgatatggaatgcaaatcgcactgtcacaagtccttacaatctgaagcaactatttgaactttgaatatgttctaccaagcaagatatatctaaagaaagacctattatcatgataaatttgtttccaagttctgtattttggttcactctggtattttgtgttcaataagtgggttgagcttgccaaataaaatggtcttgatgacttgaattcataattattatttttgcactgcaaaaaggnnnnntataa

SEQ ID NO: 141747 - DNA, 300 bp, Glycine max
  Clone ID: PAT_MRT3847_99009C.1
ttttactgtttaatccaacatttaaaagttaaaaccgtttattgcttacatgtagaaactaaaaatatttggttttttataacataaaataaatgcccccttttttacccgctggttgtccctgtgaaaacccctatgggtgttcctctggctttcttttatttgacccttcttcgaaggtcgaaggatttttttgcgttctgcccccccttgtgtggaatctcttttaccccaacgtgaaaaatttgtgttccactgttggagattcccaaaagaagggggtacaaattggctccgggg

SEQ ID NO: 141748 - DNA, 481 bp, Glycine max
  Clone ID: PAT_MRT3847_9900C.1
aagggcccgggcaaaagcaaggggtccgcaaaaacccggaaaaccccccccccccttacacaaaaagaagcccccccctggaaaaacccccaaaaacggggaaaaaccctaaataaacccccccccccccaaaaaaccaaaaaagggccttaatccccgaggggccaaaaagtttgaaaaaaccccctttccgggccctaaaagtaccccgggcaaaaccccacccgggggggtttaaaaaaaaggggggccccccaaaacccggggccggattgggaacaaacaacaaaatgctaaaaaaaggcccccccccccgggaaaaaagcaaccacctcccctccaaattccccaaccaaaaacccagggttgaacccccggggaaaggggccgggccccttttccgaaaaaaggccccgggaaagaaaaacgccaaccccccgggggtcttcccccccaggcaaaacaactttttttcccaccc

SEQ ID NO: 141749 - DNA, 2365 bp, Glycine max
  Clone ID: PAT_MRT3847_99010C.1
ctatacttggtgagtctaaaattaaattcacagatagtgagtctaagcttcaggatttgcttgtgcatgttttggataccttgcaacctgccaaatttcactggcagtgggttgtactcaggttgctcttaatgaacaagccctcgttgaaagactagagaatcgtgatgtgtccttggttgatgctataaagttgtcctcacctagtacagagaaggcttctgctgcttctgagaatgagaacaattttattcaaatacttctcacaaggttactggttagacctgatgctgcaccccttttttcggagttgattcatctctttggcaggtcactagaggattcaatgttgttgcaaggtaaatggttccttgcaggccaggatgtcctctttggtcggaagaccattaggcaaaggctacataacattgctatgaaaaaaaatctttctgttaagacccaattttgggagccatggggttggtgtagcccgtctactgatccattaactatcaaaggggataacaagaagtttgatagcacatcccttgaagaaggagaagttgttgaagagggaatggatttgaaaaggtgccagcagcaagtgactgagagggctcttattgagttgcttcttccttgcataaatcaaagttctgatgaatcccgcaattactttgcaagctatatgatgaaacaattaaattatattgagcaacaaataactgctgttacaggtggaagtaaatcagtaggaagtgctcctcctggagttgaaggtcagccgaataaagtaaataaccgcaaaaatatgagaggtggaggccctgcattagctagacgacaaacagttgcagcagattcttctccaccatctcctgcagctctacgagcttctatgtcattacggttgcagttgctcctgagatttcttcctattctttgcactgacagggagccatctgtgcggagcatgagacaatttcttgccactgtaatttttcgtctccttggtagccgggttgtgcatgaggatgcagacatttcggtgaatgctgtgccatttctgtcgataagggaggcggagtcatcttctgaagttgcttctgctgcttttgtggattcttcttctgggagtctgtttgatcgtttgttgttggttttgcatggattattaagtagttatcctccaagttggcttagggcaaagcctgtttcaaagacaatcagtgaacctacgagggaaatttctggaattgaccgagaattgttggagactttgcagaatgacttggatcgtatgcaactgccagacactattcggtggcatatccaggctgcaatgcccatactcatcccctctatgcggtgctctttatcctgccagccaccatctatttccaattccgctcttgtttgccttcaacccagcattacaaatcctgggtctaactccagtagttcaactattcctcagaggaacccagttctatcaagggttgcttctaatgcatcagggaaatcaaaacaacaggacaatgatttggaaatagatccttggacactcttagaagatggtactggatcttactcttcggcaggtaatactgctagcataggaagtggtgaccatgctaatattcgagccaccagctggcttaaaggggctgtaagggtgagacggacggacctcacatatgttggtgctgtggatgacgatggttgattaacaaaattttgttggtttggcctttggagtatacaaagccttcagctgacagccagtgcaattgcggttttgttatttatatttgatgcatgaatggcatgaagataccattttgtgcttgtccttcttgtgttgaagtttaaaggaagctggaggggcattgttttgaaaaaaaaatgggtgaagggatgggttcaaaacagctcatgcaatggttctggcctggttgactactaacctgcttgatctcccccatctggattgtgcacttgctcagtttagaggtttgttgtatatatagggatgattgttttactttaccaattggtctgagtaatatagtctcaagtcatatttgtagctgtttcatgctcatttttctgtctagtgaacgcttgtgtgagcactgtctatagcttttaggggcacaagcccacacaggcgcaatcaaccattgtttcttttctcatattcatattatcaaaagttatgtggttgatctggagcatcaccatgagctgcagcattcaattattttgttggcaattctggatatagtttcatttctaccgaaatattttatcatgaaagtaaacctatgtatgaatgagtagcaagggaaagaattagctttcc

SEQ ID NO: 141750 - DNA, 230 bp, Glycine max
  Clone ID: PAT_MRT3847_99011C.1
attattatcaggaacagaggaaaatataacattcaacacaagaactgaaccacaatataaaaggttctactcggcacttcacctctgcatgtacatagaactggctgctgatgatccagctggcacagccactgctatctattcatcatccacagactcagaacatgatggactaaaccttgagggccagggaaacagaaccggacaaccttatatcaagcaaaccactg

SEQ ID NO: 141751 - DNA, 533 bp, Glycine max
  Clone ID: PAT_MRT3847_99012C.1
ggcagcaacagctggatcttctacttctgcttcgacaaatgtaatacttaaaagattttgttgcctgtctttaccctgtgattattctgtatcaggcttttgtagctaatttgtttgtatatttttctcatgatttttctgagatttaataattttaaatttaaaatttcttccatatatgcaatgttctcttatttttgacacattcaaggagtgttgatgcagtgagaaataaaggagtttgttgactggaatgtatggtgtcatttcgttgacaattaatggtcttaaatgttaatttttgtatgataattttgtttttttgtagtgagtaggaactaggtgactaaggtatgcggggcacaaattttataggatgggctcatactttctatcatcacagcacttaattgactttgtatgcatcttaattatctaagtgtatacaggctgagatagattggattaatgtcggtggattttttctttgaagagaatactatatgtattttatttttttgataaaaaaatag

SEQ ID NO: 141752 - DNA, 398 bp, Glycine max
  unsure (1)..(398): unsure at all n locations
  Clone ID: PAT_MRT3847_99013C.1
tgccctcgcgaancgcgacgcttgacccgacgcgtgggattacccaaagaaaaccatctcgcaacgggtcacgtgcatgtagcatgcgctgctgttggcttgaccatgtgttacactccaactccaacgtcggaatctgcgctgcaacaagacagagggtcaattagtggaacatctctggaaggatatcttacgctgctcataccgttaaccagccccgagcgaaagacccgtcggagggaacacttccctttgacagaaaacactcaccctagagcggcaaaaggtacccctgccaaagcacaacttataggggcagacctcaatgtacctcattgggctggccacactcttaaaaaattttccctcccaagaacagcaataaataccccccccag

SEQ ID NO: 141753 - DNA, 939 bp, Glycine max
  Clone ID: PAT_MRT3847_99014C.1
cccacgcgtccgtagacagtcagtggctcgcgcttatttttttccacactctctttctctatcttattttttcttttcctcactttctctctctactttttttttctctttatttctagtcttctctgtctatcacagatcttgaactgttctggcaagaactcagagcacttacatcttgcagcatcaaaatgggcttctctctgttaccaaaagcaactccttgcattttgttcttggctctgctgtcttgtacttgcttcacttcaacagatgcttatgatccgcttgacccaaatgggaatatcacaatcaaatgggatattataagctggacccctgatggatatgtggctgttgttacgatgaacaacttccaacaatatcgtcatatcgcttcacctggctggtcaatgggatggacatgggcaaaaaaggaggtaatatggagcatgatgggagggcagaccactgaacaaggggattgttcaaaatttaagggaggcattccacattgctgtaagaaagatccgacggttgtagatttgctacctggaacaccttacaatcaacaaattgcaaattgctgcaaaggtggggtgctcagttcatgggtgcaggatccaaccaatgcagtttcctcatttcaagtcagtgttggtagagctggaaccacaaatagaactgtcaaagtcccaaaaaacttcaccttgaaagcaccaggaccaggttatacttggtgggccagccaagattgtggcacccactaaattcattacttcagacaaaaggagagtgacccaagcactgatgacatggaatgtgacatgcacatactcacaatttctggctcagaaaactccctcttgctgtgtctcactttcatctttctataatgatacccttgttccctgcccaacatgtgcatgtggcttccaa

SEQ ID NO: 141754 - DNA, 252 bp, Glycine max
  Clone ID: PAT_MRT3847_99015C.1
gtcacgcgttcgcccactcgtacggagactttttgtgggagagtgggccattcttggggcgatattgctgttgttggggtcaaaaatcaaagctttagcttctgagggataaaggatcgcatgaaagacgctttattctacatggttgaaaatgcccaaaataaataagatggtgtcacttcttcttctattgatttaactcacgaatgttcttatccttctcttggatggcctatttagaaggttactctc

SEQ ID NO: 141755 - DNA, 478 bp, Glycine max
  unsure (1)..(478): unsure at all n locations
  Clone ID: PAT_MRT3847_99016C.1
ggtggtgtgcgcatctattagatgccacccgagacggaaaaatcctttctatgtcaagtaagaggcaactacaggcacccagttatacctgtattaattaggagcttgattgctctgaatctatgaacgtgctgtgtggcccttaaagcgtattatagcaggaaaatgatggggactatatataattgtgcgccctgcctcttagtacttgatcccttggagaggatactgttaaagggttgaaggtccatggggccggccgcacatatatttatatcacctcctgcttattctggggtaaaatgaccttgatgggctcataccctgtngagcattgtggagtgggtataaaacacctaatatctggcgggctaggcggggggcctttggtatcaatcttcctgagtgaggaagaactccaacgtctgttggagcctcctaaagagaggctgtcaaaaaaacatggtggggggccgaa

SEQ ID NO: 141756 - DNA, 406 bp, Glycine max
  Clone ID: PAT_MRT3847_99017C.1
catgtataccttacatcacattgtcttctttaagtaacgactttttttttatgtgcttattttctcccttaatgatgacctaattatatctaacttatgtttttaattttcttttaaaatctaatataagtagtgtcatgtatagtggaacgaagtacctatattgttaaacaaaatgtttatgcaaataatatttggatattgataaagtgtaaatgaattaaattatttacaaattagttgaacttgcatgcatggttcgttcattcttaattaagtccattttaattagctcaacaaatgatatcgatcttaaagttggactcaattatttaacaagttatgctttagttttatagggtttcacattaataactggttcgtacctatatatatatttgatagc

SEQ ID NO: 141757 - DNA, 754 bp, Glycine max
  unsure (1)..(754): unsure at all n locations
  Clone ID: PAT_MRT3847_99018C.1
ccacgcgtccgggtgcgtatgcatgacaaattatgaatgtgttgaaatgtgaagcatcaacagtttatttttctcaaatcatatcattacttactttatctctattcattttagaagagcctaatccaagaagctttgggtgaaatcatgccacttgtcttgtgtaaaactttcgtgcaacagtgttgtaccaaatagcatttttgaatgaaatattgtttcattgcttagccttaagtccttaacttcttagttgacatctgcgtgaatgtccttgaatattgagagctagattgattttcctttcctgcacggataagaaggaattagtaattttctaacatcattcaagattgtaatatttttagagtgaggatgaggttgaagtggagtttgttacagatgcttggttgatctgattactttgctttgccagggcttcgatctttaggtggcttgggtggtacactatgaagtcatgagcatgcctttgcatgtgtttttgtgttggttggagcaatgatacttctggtcatttagcttgttattttcagtctacagctgtctggcactggggcaccttggagtgggtttttgtgtcccaaacaataatgagttaattgtgattctaccgctattattggtctgttatacttctatgtaatggtccaatctgatacttacaatccccaattttctaatttctatacatatataccattgtgggcctgaggtttttctnggggttctagaa

SEQ ID NO: 141758 - DNA, 168 bp, Glycine max
  Clone ID: PAT_MRT3847_99019C.1
tggacaataaacatagaacgattccacaacctaattcagagtaaaaagggaagaatatgaatataccattggggaggagcatatattatagacgtcccaatgtcgacagaataatggggagttatgattcttctttgtaaaccagatatcaatcttaagcttcatttt

SEQ ID NO: 141759 - DNA, 457 bp, Glycine max
  Clone ID: PAT_MRT3847_9901C.1
ggctcgaggaagggctgcttgctcttgggcatcaacagtttgagcaagcaggactctgctggtcttatttgattgcgaacaataaggattcggacaccctgccttccgatgaggatctgcagttctataacagagctggggatatcatggacaaaggcatgttgatgagcgaggagatagaggagcaacgtttgaatggactgtgcaaatcggataactataaagagcagctagagaaaaaggggttgcatggtcttttcagggatgttccttatgatgaagctgatgaccaggctgcaaagatgaagctgcaaggatatcttttatggggaaccttgcagtatgagcgtactgtcgtggagtataagctaggcctgccaacatgggaggaatgtttagaggttgcatgtgaaaaatgtgaactggctggagcttctcaactgacattggagtcatg

SEQ ID NO: 141760 - DNA, 248 bp, Glycine max
  unsure (1)..(248): unsure at all n locations
  Clone ID: PAT_MRT3847_99020C.1
aggtgtagcaatgatgataagtaatgactaaaattaagtttgaacagcnnaaaaaaaaaaaaaaaaaaaaaaaaaaaaaaaaataaaaaaaaaaaaaaaaaanaaatattgggtgtgaagttttggggggtccaagtttaaggaccccgggcttgcgaaagccttaaattcttttataaaaggaactctaaataaaataaactaggtcgaaatttaacaaaagcggaattaaaaaaaaccctagtggt

SEQ ID NO: 141761 - DNA, 158 bp, Glycine max
  unsure (1)..(158): unsure at all n locations
  Clone ID: PAT_MRT3847_99021C.1
tctgcanatanacgtcgtganggtaaaggctacgngaaattncgggcntcggaggntttttcccatttcccccaattttccccananncggtngtttgggggtagggcccattgggattttctnctaanttggggnggaaactaatnggcnttctnnn

SEQ ID NO: 141762 - DNA, 355 bp, Glycine max
  Clone ID: PAT_MRT3847_99022C.1
ggcatgattaaacaaagttttactagatccaataataaaaaaccagttcatgcaaaaaaaattggcatttttaggctaaaagccacaataaataaaatataaaactaaattttacattaaaaatgcatcgggtccaatgaagcttactctcttgaaatctatcatttcaagggtttaaaggtaaaggccaaattatatcgcaggggggcttttataaacaaacgctggtccatatatagaaaaggtaatgccatcaagaaatttagggaactctaaactttatccattatccatgccggtgacgtcatcaagagattagaagaatttgctacacccggtcttggtcttgatcaaa

SEQ ID NO: 141763 - DNA, 310 bp, Glycine max
  Clone ID: PAT_MRT3847_99023C.1
tagagggtggagcggacatccttttattgggggagaaattaagctgcttcattatcataatgtttcaaagggcacaagggcccagagcctcttatatatggtggcaggggaatatctgtcaaagatatgagtactgctatggctcctggaggcattcaaatgagaacccgctgctctcacatctaagggatttggtgaggaagaataaaaaaagtagctgacatacttatatccaggtgacaagttaaccttgcagattaaggaaaacactcccgggacaaagtggatagattttgtggctactataaaa

SEQ ID NO: 141764 - DNA, 467 bp, Glycine max
  Clone ID: PAT_MRT3847_99024C.1
aattcggctcgaggctgtgccttctctccatccgctgctcagatattcatgaaccgttgcttcttccagcctcgccttctcgctccctctgcctttctggcgctgttgtccctccctccctctggcttctgctctttcttactccttctctcagctgcttaactacagctcccactggaacttgcacaatcaaaaacaactctcctctctcaagccgcctccaggagcgcatcacctggagaagagcgactcgctccccgcgccggccgcggaagagcagccaggtagctgggggcggggaggcgtacccttctcccgctcggtaagagccacagcatctccccggagattggtcgtatcccaccgtccggcccccatggtcctgcagcggtgatgcatatgtttcggagcaatgatggaaggagaaaagccgctgtcggtggcaactgaaagtggggagaggttgc

SEQ ID NO: 141765 - DNA, 217 bp, Glycine max
  Clone ID: PAT_MRT3847_99025C.1
gaaacgctgtcgttgcgccaatcgcggcgttgttgatgttggtgctactcgcggcgagtgttgtggtggacgctcatgagaactcgaacgtgttgacgctgtcgtatcacatgcacggtaagaagcccttgtacaaaagctgagaatgtaacgtctgtcaattgtactgaggtgagcttactattactgattatttccagacctaccacattcgagt

SEQ ID NO: 141766 - DNA, 2049 bp, Glycine max
  Clone ID: PAT_MRT3847_99026C.1
caggggctgatgagtgatggttgttgatttgattgagaagagaaagagaaagtaatcagaagaattggagtgagtgagaagaaagaaatgggttggggaaggggaatgttggaaggggtggtggtggtgggatgtctgtgtttactgggttgggcgggtctgtggtttttgaaccgtcgactctacaaagagtacgaagagaaacgcgtcctcgtccaaatcatcttcagcgtcgtctttgccttctcctgcaatcttctccagctcgtcatcttcgaaatcattccaatcctctccaaagaggcaagagtggtgaactggaaggtggacttgttctgtttgatcttgttgctggtcttccttctcccctattaccattgttacttgatgctcaaaaacaatggcgtcagggctgagagggctgcacttggtgctattctctttttgttcgcttttctctatgccttttggcgcatgggcattcactttccaatgccatctccagataaaggtttcttcaccatgcctcaactggtgagtcgaattggggttattggtgttactgtcatggctgtgctatctggttttggtgctgtaaacctcccatacagttacttatcacttttcatcagagagattgaggaaacagaaatcaaggccttggaaagacagctaatgcaatcgattgagacctgtgtatcaaagaaaaagaaaattattctttgccaaatggagatggataacaagcaaggatctgaagagaagttaaatgctagatctttaattaaacgaattgttggtacggttgttcgatctgtgcaagaagatcaaaaagagcaagatattaaagggttggaagcagaagttctggcctttatcgagctttccatgcaactccgcttgtttgatgcaatttttggtcaagcagaataagtttcactgcttttactttctgcacattatacatctcgccatattgacaaacatccaattgattaacaggaaacatactccgtagatgcgtgtatagtttttaatgcctcgggaggtttgatatcaggccagtgaacatatatgtttaaatcttccagatggatgcatttgaattcattttatagttgatagaggtcgttcaatttttttatgtgccagtgaatagcttgttagaacatctgatgctactggagcaaatcaccagtgagagggttgatattgttatagttaatatcaacagatgcgcattgtgcaaaatcttttagtatacccatttgttttttaataggaatggagtttgtatcttctattcttttaatcaggaaaagcttagcaactgaatacaggattattataacagaggtattgggtggtgatatccagtttgacttttatcaccggtggtttgatgcaatttttgtggctagtgcattcctttcactgcttttactttctgcacattatacatctcgccaaattgacaaacatccaattgattaacaggaaacacacgccgtatagtttttaatgccacggaaagtttgatatcaggccagtgaacttatatgtttaaatcttccagatggatgcatttgaatttatttgatagttgatagaggtcgttcattttttttatgtgccagtgaatagcttgttagaacatccgatgctggagcaaatcaccagtgagagggttaatattgttatagttatatcaacatatgcgctttgtgccaaatcgtttagtatacccatttttttttgttaattttctattggaattggatttttctgagcagaaatattgttggacaatatgttcaatgtagatttgcttatgctgtgttaagtagagaatgaattggatgtgaatagtttttgcacttgggattggtaccatggacctaaagaacagttgtatagttattggtgattggtaattttggattagcagtggttgaaattcccactcaaatactttggccgtttattcaaaaaaaaaaaaaaaaaaaaaaaaaaaaaaacggccgctctaaggatccagcttcgtcgcgg

SEQ ID NO: 141767 - DNA, 689 bp, Glycine max
  Clone ID: PAT_MRT3847_99027C.1
gccaaatggagatggataacaagcaaggatctgaagagaagttaaatgctagatctttaattaaacgaattgttggtacggttgttcgatccgtgcaagaggatcaaaaagagcaagatattaaaggcttggaagcagaagttctggccttagaagagctttcgaagcaattgttcttagagatctatgaacttcgtcaagcaaaggaagctgcatgcttattctcgaactcggctcgagcacatgcagaatctacttggctatgcttgttctgtatattgtgtgtataaaatgatcaagtcattgcaaagtgttgttttcaaacaggatggttctgttgatcctgtgacaaggacaataagtatatttcttcagttctttgatataggaataaatgcagccttattatcacagtatatttccttgctattcatcggaatgttggttgtgatatcagtgcgtggattcttaaccaacctaatgaagttcttttttgctgtttcaagagttggaagtggatcttcaagcaatgtagttctgtttttgtctgagataatgggaatgtattttgtatcttctattcttttaatcaggaaaagcttagcaactgaatacaggattattattacagaggtattgggtggtgatatccagtttgacttttatcaccgatggtttgatgcaatttt

SEQ ID NO: 141768 - DNA, 184 bp, Glycine max
  unsure (1)..(184): unsure at all n locations
  Clone ID: PAT_MRT3847_99028C.1
atattgcatccttgttctgcgaaactacactttcattggatggaaccctgaggtcatccttagtcccaccagcttcagccagcatactcacactatcttccttctgtatctcagtgagtcgcgtagccctgccttctacatggcgaacctctccgntctcgcaatatgagacactaacctccag

SEQ ID NO: 141769 - DNA, 1264 bp, Glycine max
  Clone ID: PAT_MRT3847_99029C.1
actcaattagagccgggtgcgtacgtcgttccaagtaaatcactttgtcgagccctaattttgaatttgtgcgccattcctaaaacagtgcagtgaaaatcacgtatttgcgatggagattctgtattcgaagctctacgacaagtacaccaaactcaagtctaaaaaactctccgatttggatcacataaacaaagaacaagaagttaaattcgtgaattacttgacggctgcggaagagttgatagagcacttgaagagcgaaaaggaagggcttcttgaacaagtcaatgagttgagaactgaattggcttcacttagggctgccaaagagaaagaggttgcggattatcagaagcttttgatggaggaaaaagacaaaaatgaagctctttctgaagaagttgagaaattgctaaagcttcaccaggaaagaacatgtcatgatttatataataacagcaagatcatgaccgtagatgatcagtttaaggctaactctaacagctcatctataagaatgacaagaaaacgtacaaggcagaatgctttggagaaagaagcaaggcttatatcttttgaaaatgatcaagctaattctgtggagagagagtcaactgaaaacacttgcaaggagactgcttctggtaagctgctggagtgctgtaccaaggctaatgatcaaccaggcattgatgtacatgaaagtggtcatggtaactggcttattcaagttctttttgagtatgcactgggcatgaaattatccactgactatcaaacaggacgaatatgcctgtctgcactgcatcaatcaagcggttactccttcagtttatcgtggattggcaaatcacctggagaggaggaagcagagctgctgtaccatgttatatctctaggcacatttgaaagagtggcaccggaatggatgaaggaggacatcatgttcagccctagcatgtgccccatcttctttgaaaggatatctcgtgttatcaagttgaaccactagtgttcttctgtagcattgatccgccgaatctgtatttactgtacatattaactgcttaatttttatttggagaacactaagttgatttttgcgtgtagattagtttgtttctctccaatcccatttcatattccattagctaattcaaagaatctgtaaggttatttggaagagcttgtatagcttagctcgttgtgtgctacagcaagaatttaattaagcttatgaagggaacgtgattttaagaaa

SEQ ID NO: 141770 - DNA, 484 bp, Glycine max
  unsure (1)..(484): unsure at all n locations
  Clone ID: PAT_MRT3847_9902C.1
atatacacagtctatatgtattntctgtgacccgcggcaagcggcaagcgcggttgcccggcggaagactgtctgacactttctgccgagaatatttcttccattaccccgtggacacacgcgatggtggcgctctgagattcccacattccttccgatacgcgagcggcgggtcgcgggttcctttttcgcggggtttcttttcataatgtgcggttcgcggcgtgctcctccctttcttcccagaacggggcggtgcgtcttcgcttggcggaacacgaacctcatacgcggcgtttcttttatatgcgcctcggtgtgcgtagcggcgcttcaatactgtgtgaacagaaacactgcaanttccgagcttcgtatttctccgcggcagatgcgccgcttgccgcttccctatcgagtgtcggcagagaacatctccggagtttctncgacggagaacgtcttccggcgagggagaccttcg

SEQ ID NO: 141771 - DNA, 392 bp, Glycine max
  Clone ID: PAT_MRT3847_99030C.1
tatcaggccagtgaacatatatgtttaaatcttccagatggatgctttgaattcatttgatagctgatagaggtcgttcaatttttttatgtgccagtgaatagcttgttactcgagccgctcgagccggagcaaatcaccagtgagagggttgatattgttatagttaatatcaacagatgcgcattgtgcaaaatcttttagtatacccatttgtttttgttgattttctgagcagaaatattgttggacaatatgttgaatgtagatttgcttttgcattgttaagtatagaatgaattggatgagaatagtttttgcacatgggattggtaccataagaacagatgaatagttattggcgattggtaattttggattatcagtggtcc

SEQ ID NO: 141772 - DNA, 125 bp, Glycine max
  Clone ID: PAT_MRT3847_99031C.1
ttaatatgtaaataaacacatttgatatacaatatggagaatttgtttatttacatagcaatttagtcatttgattttatccgaaccggttctcgggcccaccgaggccgaattccgcttcctca

SEQ ID NO: 141773 - DNA, 498 bp, Glycine max
  Clone ID: PAT_MRT3847_99032C.1
cagcaattgcatccatgtgtgtgcaaccagaagtcactcaacgtcctttcatgggtgaagttgttcaggcgttgaagctggtatgcagtgagttggaggaaacaagttatgtaagaccaaaaagttttcgagttccaggtgggagagtgggcttttcagagtaaaacataacactgcctcagccttttcttataaacctggttaagaaccaaggtagcataatcttcgtaagagatgctcagtacacggggcaaggaatttgagtcgttcaggttgtttgtgtagagggagcatgaattttcaactaaattacatttatgcaaatgatattcacatacccctttttgatctttactcatcaagcctggacatattacaatcatatgtcttagcctctacctgtatgtgaaactttaagtacataaatcgactcatacatcaagccaactagacaaaacaatgagaaatcttcgcataatgaaacaaaactaaataatg

SEQ ID NO: 141774 - DNA, 173 bp, Glycine max
  unsure (1)..(173): unsure at all n locations
  Clone ID: PAT_MRT3847_99033C.1
accagaatgacagtgatgaagaggctaagaggagtaagatggtaattgcactttcatgaaaaacctggataattcataattagttatatttctttaataataccattcttacaccatctcataacccctcacagaaanatgatttctgctaattctaccattgaattatatct

SEQ ID NO: 141775 - DNA, 535 bp, Glycine max
  Clone ID: PAT_MRT3847_99034C.1
gcggctatcttgcccctttcagaaggaacatatatcatttgcgcgatttttgtgaaggatgtggacgtccacatggaaaagaagaattattcaattacagacagtcttcattaaggaatgtcattgaaagatgcgttggagttttgaaagcaagatttccaattttgaaattgatgccaagttatcccattagaagacaaagattaattctcattgcttgttgcactatacataattttataagaatgcaaaatggcgtggatacactctttgaccaatatgctgaacaactcgtggacatggatgagcaatggttaagtgtagagcaacaaggtgtcaacaaaaatcaagcagctaaagtggcacaagttcgacaaaccataacaaatgaaatgtgggaagattaccgtaaatcttaaaagaatttatattaaatgttaagcttttattagcattcagacataagaacttcatttatattaatggcatgtatatctaattaataattagagtaaaatgcacatgattttatttc

SEQ ID NO: 141776 - DNA, 245 bp, Glycine max
  Clone ID: PAT_MRT3847_99035C.1
cagatctgagtctctgtaaagatatttattgcagggaaaaggatcttctttctggataatctgtgctgtccatttattccattgagtgcagcactcatgattgccaaacatccaatagctgctaagtttgatttagctttatgagaacttccatcaatgtggtctaattgggatagagtggatggatgtatgtgagtcagagcaagcattaaggaaacacagaactagaacaagacaaccttggt

SEQ ID NO: 141777 - DNA, 405 bp, Glycine max
  Clone ID: PAT_MRT3847_99036C.1
gtaaactcgagtagaaatggcgccgcgctacgaaatggctgtgggcctccacaaggggcacaaaaccaccaaaatccgtaccctcaagacagttgctgctactgttgacaagagaaacaggatgcgtccctccaggaccaagggtctccagaccaagcacaccaaatttgtgcgagacctgatccgtgaagttgttggacacgctccctatgaaaagagggctatggaattgttgaaggtttccaaggataagagagctctgaagtaccttaagaggaggttgggcacccacatccgtgccaagaggaagcgtgaagagctctccaacattctcacccagatgcgtaagcacgccaagtaatctgtccttttctaagccattaaactttaaaaaacccaaaaaaa

SEQ ID NO: 141778 - DNA, 248 bp, Glycine max
  unsure (1)..(248): unsure at all n locations
  Clone ID: PAT_MRT3847_99037C.1
aagncgngtgcaagcgtacgtnagctcggaattcggctcgagttctgaccctncttcttcttcttnatctacattagtagntcntgtnatncattattcnncataatcnnanagcttnnncctgngggcaaaangggtcattattncagatccgaggttgagctcntctacccatcatganggagctcggataccngaatcagggtcagcctnctnnaggaacnacaccacttggncatcttccatgn

SEQ ID NO: 141779 - DNA, 354 bp, Glycine max
  unsure (1)..(354): unsure at all n locations
  Clone ID: PAT_MRT3847_99038C.1
attccgagaataactatctgctctagttttctctcataatatgatcactactaaaagaaaggctttttactatgtacctttgaggtcggtcgcaatatgagcattgtaatagggaggacatgacatttatgtaaatatcttacattctcaatgatgctttcgtgtaagaccattttcgtatgctaggcaggggcatttgtttaattatgaaaaaatttactaagatggtgtatatgaaacaccgtcgttgaaatcatcaaatataaagacgggttttaatatgcattgtcgntaatgatagtttataaaagctttttttctgtctcgcgctaggtcttcctcgaagtccctctc

SEQ ID NO: 141780 - DNA, 1952 bp, Glycine max
  Clone ID: PAT_MRT3847_99039C.1
ccacatcttacatctagctagcaagctgagctctctgtgcctctcatcttctcttctcttttcatctctttccactccaagtcatgggttcttcctctagtcgacttgggtctcgcccttcttcgtcttctagtcacagtcacagggtcaaccgcttcagattatcgtctcttctatgtggcacctccacctctcgctccgttcatcagatggaacaaccttctgctgaacttcgggttgaagcaacaaggggtttttgtggtctaaatgtcattaatggcttaaagaaatacatggtgtatgtcctctgtgtcgcggcaatgtctgtggagggtccacagagtcttctgccaactcggaagtgcagtctcattgacattgtacatagaatgtaaatattaaaatttagactaagcttccatttgggtcctctgaagatacacttgacatcaaattggtctttcaaatatgtgtcatcaaaatggttcaagcaattgtcacataccaacttgaccaaaagactgttttgctgtcacccaaattctttaaaggactaatttgacattcgtacatcacagatctttaagagactaaattgatatgaagtgtatctttgaattgccaaaaatgatggtctaaagtatattcgacccatgacaatgatatgcataaaacggtcgtttagagtccggagtacaaagtgagattttgtatccgaaatttatgatgcttccgtagtcctattccctagtacatattccatgactcttgttatttctcttgtgtcgttcacaaacccgtcaaaaccgaaaacgtctctttctttcatcatcgaaatcaccgccatgtgctcagtgataagcgcgcaaggggtggccgttgcgaccgccatggccgtctccggcacggttgatcctcctcgccctccgtctccagaagtctttcccaccaccccaattctccgttcaccaccaaatccctccttctccttctccggttctgagatcttgaatatccaatgtagggaagaagaagaagaagaagaagagaatattgggattctctttcacgacaaagggctagaggggttggagagactcttaccgttggcttctctgctgggggggctgatgattctggttctcaagatcgtggctagttgattttggtggtgatttgtcaaatgatggggttggagccgcctccgggtatacgggttccagaagtctttcccaccaccccaattctccgttcaccaccaaatccctccttctccttctccggttctgcgatcttgcatatccaacgtagggaagaagagcaagaagaagaagaaaagagtgcactttgcggaggacgtggtggagtcgtgcagagacggagaagagttcaggaagcgaaactcacgatcgaaggttctgaagagttattataacaacaacaacggggaagaagaagaagaagaagcgaagatcggaggagtaatgcctgctaacagggtagctttgtataacggaattcttaggggccgtgtggcccaacgtttggcctactcttgttgattttggtttttctgtgaatattctccgattatgcttctttcttttcttttctcttatttttacaacagctagtagtaataaattaagaatttagaagcagatctagagggtgggtccaccacaaaggctgatattagttgttgcagtgcagtggttgctctcttcgatgagagagcttattggacacagggtgtatgtagtgtagtgtcttgtgaatcgtgaaaaggattttgttcatatttttaggataggataatcttctgccccctctccatatttgtacttcaacccatccattttctgcaatttgttcttgtattgtcatttctgacatgtaaatacaagtagttctagttttttttaaaaaaattccaattatccaggttgttg

SEQ ID NO: 141781 - DNA, 1351 bp, Glycine max
  Clone ID: PAT_MRT3847_9903C.1
ccacgcgtccggaaaaaccaaaacggggaccgcttttggtagatgatgatgatgacgacaaggatttgcaaacaatggacagttcaagtcaaatgttaagtgcagaagacaataaaatatcaccaaagacatttgaccagaaaatcattgagtcctctcaaacattcatgaaagatattaagcccaaaaccagttcacaagcatcacatacaatgttgagtgaggtagaaaagatctcaaatttacctcgtgtggcagctaaagacagaaaatcataccctgagaatgcatcatctgcagttgagaaagagctcgtgaagccaagaactaagaaactcaagatgcaacttgcttcaacgaatcatattggtttacctgatgcgtcggatgaaaaactgtgtctcaaacctctgtcaactcaggatcaggatatggaaagtaaagatgatgttatatccgcctgcgaccgtaataccccagcttataatggaaatattacgattgctagttcttcacgtctgggagaagtaaaaatatctttgaattgtgactctgcgttgggacaaccaaacttcagtattcctaatttggatattgttatgaagttcatggacaagaagtacattcgctcttgcaacgctgttgagcctcaattttctatggcaaagctattggatgacctttgcaggatttatctcaagttgggatatcgaaagggatcaaattccaagcgtgccaatttacagcaatatgttaatcaaggtgaaaggaatccctttcgttttatcagtgacataacaaaaggttcagaaaaggtgaaaatatcattaatagatgaaactggcagtgaagacttgccaaagtttaattacataccatgtaatataacttatcaaagtgctaatgtaaatatttctttggctcggatttcggatgagggttgctgttctgattgttcaggcaactgtctttcctcaccattgccttgtgcatgtgctcaggaaactggtggagagtttgcttacactcctcatggtttgttgaaagaagaatttttaacagcttgtgtatctatgaagaatgaacctcaagaccatcattatgtgtactgtcaagagtgccctttggagaagtccaagaatgagtacatgcccgaacgatgcaagggccatatggttagaaaatttataaaggaatgttggagaaaatgtggatgtgacatgcaatgtgggaatcggatagtgcaacggggcatagcatgcaaattgcaggtgttttcaactcgtgaaggaaaaggctggggccttagaacgttagaagattacccaaagggaactttgtatgtgatatg

SEQ ID NO: 141782 - DNA, 2541 bp, Glycine max
  unsure (1)..(2541): unsure at all n locations
  Clone ID: PAT_MRT3847_99040C.1
aagcattcaataattgaatttcccaaaagtttcccgagtgttaaataataaaaccacaaaaacacatctgaggaacaagaacatccatagttttgccggtatcacaaatgaagatagcccatgtcccaagaggtttaaacaaagaacaagaaccataccttaaaatatgaccaagtaatttcttgagactgaggatcccccattttgaagagggaataatttatcattcaatgcctctttcttataatacatgaaactggaaagagaataacactaaaacccacagaaaatataatcaaagaataaatgaaaaaaccctattacaaggtaacaatgtgtcagccccctccccttcctctctttaatctctacacacccgaaaaataaaacttccatccgaaaattcgtgcaactttgtgaagcatgtgctggctgcattcttcaacatgactgcagtgtagctgaaaaataactaacccttcttcttcagcttttctttattcacgactcgtcgcaattcaatccacaaatttctaacacggggccgtctcttgacacaaacgggttaattctgacccacatgagagtcaagatggaggccagaaggattgaccaaaccaatataatggttggcattctatcttgttttccaagcaaccccttcaagaaggggtagagatgggaggatcacccacaatgcaaagaacaatctaccaaagagaggtccccatgaatcataaccattgttgatggcatctgagaccccaacaaccaccccaacaatattcatgattagtagggtcattggagggatcaagagtgatgtccacttgaagatgtagagttctgagaattctccatcatctgctgcttttgacgtcacagtgaagtttgtgttcacaccagccaagaccttcagtaaaccctgaaatagggcaaaaagatgagaagatacacctccgatcacccaaaactgttcgttcctccaccagtcgtctatgctaacaccgccccattgcatctcaaggatgcgagttgctgcaatggatatgaagagggccatgaacacaagactggcatagttgctaatctcgggtacgataaattttccagtcagaaggcatatggctggtagagtacagtagacaagcaatgggagggaagtccagggatatacgaccgagttaatgtaggaaaatcgttccaacaatttcaacccaccaccatagccataccagattggacaatgtctgctgaaaaaaatctcaacagacccaagagcccaccgaagaacttgatgcagacgatctgaaaggttgataggcgcagaccccttgaatgcaggccgcttaggaatgcaatacacagaccgccaaccatggcaatgcattttaaatccagtcaagatatcctctgtcacagaaccatatatccacccaacttcttttccccattcagttttgtcttcataaccacaactgatgacttggatggcttcttttaaaagtgatgcaggactcacgccctgtggaactccaccatcatccaagagtgtggaggctacaaatactggagactgtccaaacctcttctccaactttgtttgagtcagattggatgtcttctcattgttggttccttcattccctgcctcaatattttcaagtgcatgtatctgctttgatgcttcactgtgcttcaccttcctctttttctccttcttagtgttggcattctttttctttctagagccacaacataggcagcaccactttggccaacagttacaagttttgctcggtggtttcttcttggcaggtgcatcatatccataaagtgcgtaccttctgaaaacacatcccgttccgacatatattggaccttgtatcccatccaatcctttcatgttaatatcgaaaaataccacatttctgtttgaatatctatcatgtctatcaattccatcaaatcgctgaggaaattgcacatagcaaacctttttccctagttgaggatccatcataaaacacatagcttctctaagtgccttgctattgttaatgtagtgatcacaatcaacattcagaagatagggtgcatttgtgataattgctgaagcccgtaccagagcattcattgcaccagcctttttgtggtgatcaaaccctggcctcttttctctagaaacgtagaccaagcggggtagctcatttccttcaacatcacgaacaccatcctgcccaaggaagacctgaatcatgccaggatgatccctcacattatttccaggccaaggagtcccatcttgcatggtccatccatcctcaggaaccttttgtgctgttgccaccaaactgttaatcctcaccttaaattcttcataatccctcttcattgctctcctttccctgacaaatgctgggtgtactttatttttcagatagtccatcttctgaccaaagtaccattctggtgcccggggctcaatnttgtatntcttacaaaatggaacccatctcctagcaaantcagatgtctcag

SEQ ID NO: 141783 - DNA, 125 bp, Glycine max
  Clone ID: PAT_MRT3847_99041C.1
cctaggcttccggggagtatgatcatctgaatatcggatagcatcgtgattgagtggagggaacgggaaggatatagtggtgcatattgctgcgcatggggaaaacatgccctcgatatcttctg

SEQ ID NO: 141784 - DNA, 567 bp, Glycine max
  Clone ID: PAT_MRT3847_99042C.1
gaacttgaagactaggaggaaataaatatattgagcataggccatttacatctagccctctactaattaacagttaacagaaaacagttagagtgttccttggcagttatcaatgccagtgtatggctctcaaaattgcatattttgatacaattgccagaggagagttggtaagtacatagatcaagataatgaattagcctcgtgaactggcatatcccgtggaattccttcagagcagccaatgccatggtagatgaaagcattcgtagaaaacaaatattgaccaacatatccacatcaattttacagtctgaaaactgaaaagctcatccatgtgcacctttaaaatgtaatggccgtagcttcagtcaagtttgcctttcctattcatcaagtcatggtagtatagcagtacacacatatgttgaccaaggatactgaatatgaaccaaaaaatcatatttccaaccattgagtatctgaatttattatgcagataattagtgatcaagaccaaaggaaccctggaacataattccatccgaagcccacaacttgaatatg

SEQ ID NO: 141785 - DNA, 243 bp, Glycine max
  Clone ID: PAT_MRT3847_99043C.1
aattactgtcaaactttcttttatctatcaccatcacctctaatttacactgggggttacctttaacccatttcaatcttatgctcatttaaaacccccattatctttcttatcttccatcactaacatcataatatttgacaacactctctgctccgataacgtcctaatcattaacaaacatgtttggcattactacttctctcctcacattaaaagttgtccttcctctacaatcctaat

SEQ ID NO: 141786 - DNA, 250 bp, Glycine max
  Clone ID: PAT_MRT3847_99044C.1
aagacgacagaagggatcttacaagtgttaaggcattgccaactagcaactctccccaatatattggttaaatttgaagtattagaattatagttcaattttcatgctctcggtgtaaagatttttacactaggaccttttaagtatctagtacaaaagtcaacaatcgtagtcagtgtaaaaaacttttacactattagtgcatttaaattaaattcttcgacttaaagtttagccctgctttacattg

SEQ ID NO: 141787 - DNA, 178 bp, Glycine max
  Clone ID: PAT_MRT3847_99045C.1
gtgtcctcgctgctgagtaggtaaacaagttgaagcaatctctgtccccaggtttgaccgtcgacgaggtctgagtggatacatggcaacgccgtgttgagctaggcaagcttctggatcagtagcagagcatgctactctatgcacttttggaggctgagctattagacctgtcagt

SEQ ID NO: 141788 - DNA, 298 bp, Glycine max
  Clone ID: PAT_MRT3847_99046C.1
cgcttgtggtcgtcgcatgtacatgtgcctctgcccatactatgcaccggttagaccaggtacgtagatgatttactcactgtcacccccacagactagcttagttaacttgtttatgatatgctcgaggggggctcgatatgctgactggtgtgtcacacagatatgtcaatctcagtcgcctcgtcttgagtggctcaactcttttataacagcaagatggggaacattggcacatctggatcgtgctttgccgacgaagtgagcacaatctatccgcttatgatggcattgtgcc

SEQ ID NO: 141789 - DNA, 369 bp, Glycine max
  Clone ID: PAT_MRT3847_99047C.1
gtttgttataatattttttctttttttttttatggattattttgtaatttttataatgaaagacatgtttatgttaaataaaaaaaaaaaaaaatattttgaaaagaatgtttacaaagacaggaataatgtgctggaaataaaaaaaaaaaacctccgcataaagggggccatatcatgtgggtgtgagagcatggaaatcggtgtaaactaaagcaagagtactaccggccgggtacaagataacaatcgtgtggaaacacataaaaaaaagatccagtgtaacgtattaaaaaaaaagggctaaataagaagtgggagaccaaaaaagaagtttcacaattaagaaatgccgcgtttcatgtgaag

SEQ ID NO: 141790 - DNA, 397 bp, Glycine max
  Clone ID: PAT_MRT3847_99048C.1
ggctcgagaaaaaaaaaaaaaaaaagaaattttaaaaaaagaaaatttaaaaaaaaaaaaaaaaagggggaaattggaaaaagaagacaatttttttgatgtcaccgatccatctgaaaacgctgctcacaatacgtgatttatgctcctttcgtgtttggggcgcgccccctttttgttgcttggtgtcgtttttttgttttctggacccgcccccacggggcaccacctctttttctttttatgggtcaggttcttctcctgaccaagtgcggcacagagtgtttccgaccgagaatatttttcgttttggcagcagacaaagatcgtggggggggtcctcttttttgctgctctcggggctgtgggtggactccttgctctcttctttttgggg

SEQ ID NO: 141791 - DNA, 1124 bp, Glycine max
  unsure (1)..(1124): unsure at all n locations
  Clone ID: PAT_MRT3847_99049C.1
ctaactctcagcttcggctccagcacaatcacagacacagtttcgctctactacttgaaccctatttgcagcaatggctgaaaacttcgacgacctaaataataaactccctgagctcaaattagattctaagcaagcgcaagggtttctgtcatttttcaaaaccctacctgatgatccaagggctgtacggttttttgatcgccgggactattatattgcccatggtgagaatgctacattcattgcaaagacctattaccacactactacagctatgcgacaactgggcagtggatcaaatgctctttccagtgtaagtgtcagcaggaacatgtttgaaacaattgctcgtgatctccttttggagagaacagaccatactcttgagctctatgaaggtagtggttctaattggagactggtcaaaagtggaacacctggtaatattggcagttttgaagatgttctgtttgctaacagtgaaatgcaagattctccagttgttgttgctttgtcacttaactatcgggaaaatgggtgcaccattgggttaggatttgttgatctaactaagagagtacttgggatggctgaattccttgatgacagtcacttcacgaatgtggagtcagcatttgttgcacttgggcgcaaacagtgcattctgcctatagagtctggcgaatctactgacaataggatgttgtgtgatgtagttgactaaatgtggtgtgatgttaactgagagagagaaatctgaatttagaactagggatctggtacaggatcttggcaggcttgttaaaggccctattgaaccagttcgagatttagtgtctggatttggatctgcacctggtgctttaggggcattactatcttatgcagagttactggcagatgaaagcaattatgaaaattatactctgcgtagttacaatcttgacagctacatgaggttagactctgcagccatgagagcacttaatgtcctgnaaagcaaaactgatgcaaacaaaaatttcagtttgtttggtctcatgaataggacttgtactgctggaatgggaaaacggntattgcacgtctggctaaaacaaccattagtagatgtaaaagaa

SEQ ID NO: 141792 - DNA, 435 bp, Glycine max
  Clone ID: PAT_MRT3847_9904C.1
gacccacgagtcagcagtgaaagacgtggtgtcgaaattgacgccgcttttgacgaagaacaagcttttggtttcggtcgctgctggtaccaaattgaaagatcttcaggaatgggctgggaacgacagatttataagagtgatgcctaataccccagcagctgttggccaggcagcatctggtattatatataacttcttctttttttttactttttaagagcatattgtgtttagttcctcagttactttcaatacacagcagaatgtgagaatggatgctgcgtgaattatttgtttaacttggtagttccgtaattgactctctgaattcaatttataattgtcagttatgtttatgatgaatgaggctattttatatgatggaagttgcacatgatttgctataatagtctatgttttgttcttcattat

SEQ ID NO: 141793 - DNA, 408 bp, Glycine max
  Clone ID: PAT_MRT3847_99050C.1
aaggcatatttaccgtggcaacccgggctttgactgttcccattttcttgtcatatgaattgtctgtagtcttccaattgcttaagatttctgcatcagtgtggaatgggggaagcttcctaatagatgtgatgcctaggcaagtaattctcaaggagaaaaagaaatcagagatgcaacttgttcaaaatcaaaaagatcagtgatatatggtgatggaaagtcgtaggtagttcaacaattcttgaggcatcttgatttcatgatatgaattaattatccatttagtcatttaccatattagtcttaatctgtataccatgggagtgcagcttagttgattaaatagagtatataagttgttgtaaactttctcccaaaaaaaaaaaaaaaaaaaaaatttaaaaa

SEQ ID NO: 141794 - DNA, 468 bp, Glycine max
  Clone ID: PAT_MRT3847_99051C.1
aaatttaagatggattggacattcacaaggattcaaaccaatactttgtatttagctatatttagactacatattagaccttaagtaaagcagtttaatactttaatcaacttaaatggagaaccaattaatatttaaattctcagatattggaggcagagcgtgtctcccaatctcctatagagggaattatacaaacttctgttgtatcataaagtgttcttgattttgctgtgtatcaaattcacactgatactggtgtagagattcattgactagctaaaaagcttttgtatactgttttaatttttaaacatagtgggattcgcttatgatggcgagacttaccacacaatctcctcaccattaaatgactttttatatatgtttaatttcatcatgcctactgttaattgaaaatttacccaagatagatatcttctattgcctcttgaggtctattttttg

SEQ ID NO: 141795 - DNA, 701 bp, Glycine max
  Clone ID: PAT_MRT3847_99052C.1
ttccttttgaccatgttcctgtgttaaaagtgggttcacattacgataatggagtctcaaagcccatgagcattggggtgggggaggaagggaatatgcccacacctagggactcggtaagccatcaaatgttctcacctgctgttagaacaccagtagactttaggagcaattcatttgaaggtggaaatgatttcctgaatgtatagaaaaatcatgtcttaaatatgaacttcaattcacctccgctgagatcctctagtggatctgttagtaattctttggcatctcctaatcatcattttatgtcaccaactgcttcaacaaaaggtcaaattgtctggtgctgtgatggggatcctgcagccatggatattgtctctgcttctaagcagttatggataggctatgtaggtcctgatgtgcctgaaaatcctattaggtttcacttagaaagatttggtactattgaacaatttattttcttcccagtaaaaggatttgccttggttgagtacagaaggatcattgacgcaataaaaactcgacactgtttacctggatgttttccttgccgtgtaaaattcatggatataggacttggaactaggggtgcaatgaatggtgttgcagttggctctagttctcatatttatggtgggaaatattcctagtcaatgggcccgggatgagatcttgct

SEQ ID NO: 141796 - DNA, 476 bp, Glycine max
  Clone ID: PAT_MRT3847_99053C.1
ccgttagcttgtctcctcgggggcggccgctccttctcccccctttttttttttttttttgccgtaatagcatttaatattataagcagagggcgtaattcagattagccgaactttatacagaagcgaccaattaccaaacattaaaaaaaaaaaaagaagcacccctgagcttaacacacccatcacaaggcccaaaccctcgaacttgctgaaaggcaagacctgacccctttattctaaggatggttggttaacccaaaacaccggagtgcccgaaacccctcacagacctaatacataaggttttagctccacattaataggttatcattatccctaattaaggcgcccccctgcttgaagcttgctctcccaaccccccacttgcaagtgccggggttcccgtacccgcttggtcgcccatttgcagccaccggtcctcgggggctcccccctttcaaccccccccaatc

SEQ ID NO: 141797 - DNA, 122 bp, Glycine max
  unsure (1)..(122): unsure at all n locations
  Clone ID: PAT_MRT3847_99054C.1
gttaatagctgtacataatatatttactttgtataactacaaataatggcagtgacgggctggctaataanaatatgttaaatggcaaggcgaaacacaagatatgggcgggtccgcttcta

SEQ ID NO: 141798 - DNA, 1091 bp, Glycine max
  Clone ID: PAT_MRT3847_99055C.1
ctgacattcatgctacccttcattacggctgcgagaagacgacagaaggggtcaaggaagggatttacgaggaaaatgtggaaattccaagctataagaccaacattatgatgcttggcgatggaagtgatgtctctttcataactggtaacagaagcgtcggtgatggctggaccactttcagatctgcaactctagctgtttctggtgatggttttctggcacgtgatatagccattgagaacagtgcagggccagagaagcatcaagcagtggcattgagagtaaatgcagacttagcagccttttacaggtgtgcaatttatggctaccaagacactctatatgttcactcctttagacaattctatagagagtgtgacatttatggcaccatagattacatatttgggaatgcagccgcgattctacaagaatgcaacatcatatcaagaaaaccaatgcctggccaattcacagtaatcactgcacaatcaagagatagccctgatgaggacactggcatctcattccaaaactgctcaatcatagcaacccttgatctctattccaactctagtagcttcaagagctaccttgggaggccatggaggatctattctcgcaccgtttaccttgagtcctacattgatgacttcattgacccaaagggttggacaaagtggtctaatgagcaaggattggaaactttgtattatggtgagtatgacaactatggacctggttccagcatagataagcgtgtacaatggttagggtaccatttgatggattatggtgatgcctataatttcactgtttcggagttcatcaatggagatggttggcttgataccacttccgttccttatgatgacgggatttgagcaaagtaaaataggtttagtttgctaaattgttaaggtacttacaatttgtcactatcctctggcttaaggccactaaggttgttactaaagtaacattgtaaaataagaaaagttcacggctaattagacagctgatttgccaaaaaaaaaaaaaaaaaaaaaaaaaaaaaagcggccgctctagaggatccaagcttgcgt

SEQ ID NO: 141799 - DNA, 689 bp, Glycine max
  unsure (1)..(689): unsure at all n locations
  Clone ID: PAT_MRT3847_99056C.1
aggcagaggatgttattgaagacatcaaagcctggggattttccccaaacatagttacttataacactttgattgatgggcattgcaagaagggcagtgccggaaaaatgtacagagctgatgccattttgaaggaaatgcttgctaataaaatttgtccgaatgagattacctttaacactcttattgatggtttttgtaaggatgagaatgtgttggctgcaaagaatgcttttgaagagatgcaaaggcagggactgaaacctaatatagttacttacaactcactgataaatggtttatctaataatgggaaactacatgaggctattgctttgtgggataagatggttggcttgggtttgaagccaaatattgttacttttaatgctctaattaatgggttttgtaagaagaagatgattaaggaagcaagaaaactcttcgatgatatagctgaacaagatttggttcccaatgcaataacattcaatacaatgattgatgcattctgcaaagccgggatgatggaagaaggatttgcactgcctaattcantgctagatgaaggcatttttccaaatgtttcaacctataattgcttaattgcaggggtctgccgaattcataatgtaagaactggcaagaaccttcttattgaatgggacactttgaattggaaacccgtg

SEQ ID NO: 141800 - DNA, 620 bp, Glycine max
  Clone ID: PAT_MRT3847_99057C.1
gggtttgtatccatatatacacaaaaaaacaacaccaatttgaagcagttagctagttaattaattagtcatcttatacaatgagttccggaaagaagagcattcagaattttcttgcccacacaacaaggccagcgcctaagagtagtaactccaaacccccaagcaatggagggataagcattaagaatgttcttgcagctacaacaaggccacctcctaagggtacaaactccaaacctccaaccactggaactaaattgcccactatccaaaaggctttttactagaaggagatgattctaccgtgtttgttatcacatggcaggttaattacttataatattctcaattcgtatatacatttataattatagcatttaacaattcgtacatggagattgatgtataatttaagttggaattataggagctttattgaaggtgaaaaggaagcaagtacatgtacaatgtagggacggagaacaaatcatctcagctattgtatttgttaatttactgtatttgtttattgatcacaaaaaatgtcatgtaccaaaaaatatagtcatgtattaattttataaaattatattatattatccatcaaaaaaaaaaaa

SEQ ID NO: 141801 - DNA, 590 bp, Glycine max
  Clone ID: PAT_MRT3847_99058C.1
cgcgctggttcgtcaagcagggccggctcgaagaggcgtcccgctcgctccagcgcatccgaggtcagcccgccgactcgtcctacgtccaggaagagctcgcagaaatcgtcgccaaccacgagtacgagatggagctctcgcctcagggcggctacttttcgtcgtgggccgcatgcttttcgggcagcctctggaacccgggaagcaacctccgtcggacgatcctgggcacgtcgttgcagatgatgcagcagtggacgggcgtcaatttcatcttttactttggcacgacgttcttcaaggacctgggcacgatttcaaacccgttcttgatctcgctcattacgacgctcgtcaatgtgtgctcgaccccgctgtcgttctggaccattgagacgcttggccgtcgaccgctcctcatctggggcgctctcggcatgttgatttgcgaatttattactgtcatcattggtaccgcgcgccccaacgacgaggcagtcaccaaggctcagatctcgttcatctgcatctacatcttcttctttgactcgacctgtggtccccgcgcgtgggtgtgcatcggcgag

SEQ ID NO: 141802 - DNA, 235 bp, Glycine max
  Clone ID: PAT_MRT3847_99059C.1
tggggtttaatgtttttttttttgaaaaaaaaacgagaagggcaacccccacaagaagaatccacaaaccaaattaccttattcaaggatttaacaaaggtaaggacagcggggttttttgccatgccggtgttttactatacatgggggggggcagaccaaaggaagaagccttaggagaaattatctccaagtgtcggctactgtggaatggaatacaaaggtcggtaatgtt

SEQ ID NO: 141803 - DNA, 369 bp, Glycine max
  unsure (1)..(369): unsure at all n locations
  Clone ID: PAT_MRT3847_9905C.1
gcggaagaagaaacttaatcgatcatcacttcacttcactaatacatcatggcagacgagacccagaacactttatatatttaaggaattaggtattgcatggttatggtaaaaaattttaaacttgtattccaatactaataactatgtattgtaagtttttaacttttacgattactattttaaaaagtcttatcaatgggtgattctaattggttggntgtagtgtaaagattttataccaacagcgcataactattaaacttgtatcatttaatccattggctttatggatcactgctgtgaggttatatttatganaataagtcagaatcaagttgagtgttaattgtgaattcttgatgttac

SEQ ID NO: 141804 - DNA, 255 bp, Glycine max
  Clone ID: PAT_MRT3847_99060C.1
ttttattcatccattcatacactaccacctagataacacaacacttaacaatttacattactcattacacttacttaatcctcaatctatccaaattcttcaaccatgtcattttcttctgcatctgctttctccaaacttatactatttccccattcttcaacttcttcccttatcttcacaccctttcgttccttcaacaacaacctttaactattccctttcttctacttctttcttcaacccaacaacctt

SEQ ID NO: 141805 - DNA, 299 bp, Glycine max
  Clone ID: PAT_MRT3847_99061C.1
ccacacgcgtccgccaacgcgtccgccaacttttcttttggcaaccatggcattggcaaccgaggcgttttttttaacccaagccttttccggtttaaaggccggggaccgggcttccgggccagggaggcaaaactccagcttttctttttccagcccgaagcccttaaggttttccagaacaatcaaagcagcagccgccgccaggaccacaaaggccccagcaaaagtgggggctgcaccggtcgggttcaccccaccagaacttgacccaaacaccctttcccggatttttgggg

SEQ ID NO: 141806 - DNA, 251 bp, Glycine max
  unsure (1)..(251): unsure at all n locations
  Clone ID: PAT_MRT3847_99062C.1
gantatnancangttacaccacnggatncnacgnatctcaggtctaccacaatttgcanggcgttgancancatnacaacgagnacttcagtacagnaaatcgagataactcngtggganctccaattcgtccatatggaagcatccatagnggntcttcnaantcgcaangacaaaatacacagtagatggtcanatcgagcatctccaatacgcactctcagccnttctcgcacacatgncacacctng

SEQ ID NO: 141807 - DNA, 1479 bp, Glycine max
  Clone ID: PAT_MRT3847_99063C.1
atggaaaaacaacttatcagcattttgtggtcctttccacattggcacattcacaagagtgaaaaattcaaggactttaacccctcatggatctcattcggaagataccaccatcacaccaagcagaagaaagtttccactgctcctaatgattcttctgattctccaagtgttccttccgacccttcagcttcaccaccttctaattctcctagtccttctaattctcccagtgttccttctgacccttatccaaatgataaccaaacttcctcttctgactgtgttttcgatgtgagatcctttggggctgttggagatggctgtgctgatgacacacgtgcattcagagcagcatggaaagcagcatgtgctgtggactctgggattgttcttgctccagaaaactacagctttaaaatcacttcaactattttttcaggtccatgcaagccaggattggtattccaagtggatggaacactaatggcaccagatggaccaaattcgtggccagaagcagatagccgcaatcaatggcttgtattttatcgacttgaccaaatgactcttaatggtacaggaaccattgaagggaatggagacaaatggtgggatctcccctgcaagcctcacaggggtcccaatggaaaaactttgtcagggccatgtggtagtcctgctatgatacggttcttcatgagctccaatttgaaggtgaaggggttgaaaattcaaaacagtcctcagttccacatgatattcaatggctgccaaggagtactgatcgataagctctccatttcttcaccaaaactcagccccaacaccgatggaatccatgtagaaaattccaaatatgttgggatatataattccatgataagcaatggtgacgattgcatttcaattggacccgggtcctcaaacgtggacatagctggtttaacttgtggtcctagccacgggattagcataggaagccttggagtgcacaactcccaggcatgtgtgtccaacttaactgtccgtgacagcatcataagggaatcagacaacggactcagaatcaagacatggcaaggtggaatgggatcagtgtcaagtctgagattcgagaacatccaaatggagaacgttggaaactgcatcataatagaccaatactactgtttgtcaaaggaatgtctaaaccagacttcagctgtgcatgtgaatgatgtgtcctacagcaacataaagggaacctacgatgtgagaactgctcctattcactttgcttgcagtgacactgttgcctgcacaaacataacactctctgaggttgagcttttgccattcgaaggagcattgctggatgaccctttttgctggaatgcttatgggacacaagagaccttgactatacctccaattaattgcttaagggagggtgaccctgaaacagtgggcgatctttctgaatatcaatgcagttaa

SEQ ID NO: 141808 - DNA, 1554 bp, Glycine max
  Clone ID: PAT_MRT3847_99064C.1
aattcggctcgagcctctcaattctcaaacttgttacagataaaaaccctttcttgaaacctttctccaaaatttctcacaacccacttctactctactcattccacacccaacttacaaaaacccattcttttgctcactcattttcttaacgtagattaatcattatgtgtggcggtgccatcatcgctgacttcataccccgccgtggaggccgccgcctcacggcctccgagctctggccaaactccttcgccaaagacgatgactttgacttggattactcccacatcgctacccaacaaccctccactctcaaaaggtcccaacctcccaaagttagcgagcaggttgagaataagccggtgaagaggcagaggaagaatctctacagagggattcggcagcgtccgtggggcaaatgggccgcggagattcgcgatcctagaaaaggggttcgtgtctggttgggcacctttaacaccgcagaagaagccgcgagagcctacgatcgtgaagctcgaaaaatccgaggcaaaaaggctaaggtgaatttccccaacgaggacgacgaatattccattcaagctcgtaatccaattccaccccttcctttcgctccacaacaccctcccctgtaccagcaacagtaccgttgcgatctcaacaatgcccctaaaaatctcaactttgagttcggttacgacctgaaccacgcggaggcgttcccatcccgcgtggacgccgtcaacgctgactcggtggttgtctccgttgatgaaaattcggggtcagcgtcgggttcagagggtgcttattcgacaacggagttcatggggtccgttcagaacgggaacggttatttgggtggcacggtaatggagaagaaggagaaagagacagaggttattgaagctgaagaagaaaagaacaaagtgctggagctttctgaggagctgatggcgtacgaaaattacatgaagttttatcagattccgtactatgatggacaatccacgacgaataatgttcaggaaagcttggttggggatctctggagtttcgattagcgaggaatatatcaaggatgttcttttcatgcatgtgttttgtttcttcgtcaatgctgtgaaagcttttgctttctccctccattctgctgactaaactaacatctctggcgttttggcagggatgcacaggaatttaaattgagtgcttcggtagaaatggtctcattagttagtgctatgctatcatctggttttgttgaattgtaattttttgttttggtggtatgttgaacagtaattttactggatatattcaagtctatttgaattccaattccaattattctttcagtgaattttataccttaattcgaattcctagttgtttatgaaaatgtcgtctccatccctaattcgaggatggagaacagtcaagagcatgactcgggcaagcattaccgcgtgaggtcctacaatgggaataatattccaagcatttttggttacgcgccggaaaaaacatttaatatactgtctcgac

SEQ ID NO: 141809 - DNA, 434 bp, Glycine max
  Clone ID: PAT_MRT3847_99065C.1
gctaccgattccgttccaaggaaggtttcccgtcatcactgtatgacgtcctccttctttgggggggggggggggggggggggggggggggggggggggggggggggaactataaaaaatcgcccagaatggcagaggaggggaggatagatagctagaaagacttgctgtgtaaagaacgtccctcccaataaacgagcacccgaggtaatcagtggtaaagggtatagggcttaaaaagggggaatacaaaacaccccgagcccagagcaaggaacggggcagtataggtaatgatatgagtttaaattcggatgtggaaaatgggcaatggtatggcgatgtgaccagtagcggcggtgtaccactgaagttaatatacctttgtaccagcggggttaatagacatgcctggtggggataatctaggtatt

SEQ ID NO: 141810 - DNA, 880 bp, Glycine max
  Clone ID: PAT_MRT3847_99066C.1
attcttgtgcctcaacctctatagtcaaattagtcattttcttatttttggggtgaaaattaaaatacatttttctcttgtcttattattttcattttcatggtctattaactttaaaatagttatctttaatatcttgaagtattcgttttatataaataacaaattggtttttccgttttaaccatgttaattttagatgatacaataacatttatatagtttgacttttttcataaattaatcaagttaatgtagtaagctaacagaaaggaatcaactttgtctaaaagagatactttaaagaattaaaataaaacttgtaagcttaagaattaagaaaataagatgaaagactaaaaatgttttttagtcttattttttatgtaggagtttgaaagtgaaataaaattaaattaaatggacaaattttcaaagtaaatattatctttaattatttggactttagaaaaagatgggagtaataaaatgagtttaatacatgaatttttaatattttcttatacatttttagggcattatgtggtttgttaatttttttaaacagtaaccctctttttttcttagtctaaatgattttttaatttttaccaaattatattattttcattttgattatttttttcatatttctgataatttttttggttgcattttagcctttatgtttagtgatgacgttattaataaaaattaaacaaaaaacctaatatttcttaaatagggaaactaaatgtaaaattttcaaaacaagagttatttttggtcctattaaattaatattttttcatttctgatctccgtaagtttgtttttttcttttttgaaatttagtgtatgtcaattggtgcttgtttaa

SEQ ID NO: 141811 - DNA, 227 bp, Glycine max
  Clone ID: PAT_MRT3847_99067C.1
gactaaactaacatctctggcgttttggcagggatgcacaggaatttaaattgagtgcttcggtagaaatgggctcattagttagtacaattcaacaaaaccagatgatagcatagcactaactaatgagaccatctggttttgttgaattgtaattttttgttttggtggtatgttgaacagtaattttactggatatattcaagtctatttgaattccaattcca

SEQ ID NO: 141812 - DNA, 151 bp, Glycine max
  Clone ID: PAT_MRT3847_99068C.1
taccaattcccaattcgagccacgcgtcacacatacgcctatcaacatcacaacatatattataaattaaacaaactaattaggcctatccggtatggagaatctaagttacagtacccttccttgcaactaatacgatatttataatgga

SEQ ID NO: 141813 - DNA, 433 bp, Glycine max
  Clone ID: PAT_MRT3847_99069C.1
acacaaaacaaatataccacattcaattaagggtaatgggtttatgttaaaataaggcagctggtaaaacaaaatggaaaaataaatatgcatgcatggggagaccggaaatctcttcggtgaatacgaaaatagacaccaactgcccaacctttataaggatattcattcggtgaccgggtttgagctccatgtttttcgctaatgggggctgcttccattgcattagccatatcgagggacacaaattgcaaacgaattgctttaggaacaatcctcctcatattggcgggtctccctttcctctccatagcagaggttatttatcctccccttgagctctttagcatgaggtgtggatcatccaccaacttgacactcgatggtcggaactggattggagacaccaacaggaactcctttgccaaagcca

SEQ ID NO: 141814 - DNA, 1908 bp, Glycine max
  Clone ID: PAT_MRT3847_9906C.1
ggctcgaggttccccttccacctcacatggttccgagggaagggggttcactctctttttgtccaaattcagggtttgtcttagtaattatccatttattcatgtgggttttcctttgccttcaattttattgaaaattcggcgtgatcgaggctaaaaatgtgtatatgtcactctgggtacccctagtgcttcgtttctttgacaaaaggaaaactttttcttaacaatttcgcaccttttcccatgtttggggggtttttgttaatcttgtgaggggtttagagcaattggggaagtgggaatggactgcaagaggttttaagaaagggggggttgacgatgtcgtttaggagtatcatccttgaaaggaagggatttgaggtgaagtttggatatagcatgagatccaggtcacagtcacacagtgatgctattgcccaggatagtttggtggtgcttgatggattgaagcagagttgttgggctaacatgccccctgagcttttgagggatgtgctcatgagaattgaggcctctgaggattcctggcctgcccagaaacatgtcgtcgcctgcgccggagtttgccgcagttggagagaaatcatgaaggaaattgtcaagtcccctcaactatccggcaagctgacattcccaatttccttgaagcagcctggtccaagggactctcttcttcaatgctatattaaacgaaatcgcagtaatcaaacatattatctgtttcttggtttaaaccaagcctcaactgatgaaggcaagttccttctttctgcacgcaagtgccgacgtgcaactcacactgactatattatctctctaaactgtgatgatgtatcaagagggagtagtacctatattggaaagttgagatcaaactttcttggcaccaaattcacagtgtatgatgcacaccctccaatttatggagccaaagttacaaagtctcgttccaccaggctagttagtctcaagcaagtttctccaagagttcctgctggcaactatcccattgctcatgtgtcatatgatctgaatgttttgggctctaggggccctagaataatgcaatgtgttatggatgccatccctgcctcagctgttgaacctggaggtgtggccccaacacagactcaatttcttcatagcagaattgatacttctccatccatccctttctttagatcaaaatcaacccggatggacaatctcccaacagtacctttgacttgtcaaaatgaggggacactggtattacgaaacaagtccccaaggtggcatgaacaccttcaatgctggtgtctgaacttcaatgggcgagtgacagttgcttcagttaaaaatttccagctggttgcttctcccaaaaatggagtttctgagcaggctcaggaaaatgtaattctacagtttggaaaagttggaaaggatgtattcaccatggattatcagtatccaatctctgcctttcaagcatttgcaatatgccttagcagctttgacaccaagattgcttgtgaatgattgctggcatagacagatgttaaccagtcgtgctgctgattggaattgcagaaacagtgatgcgggtcaaataccgactatagatttttctgcttttctatttagtacaaccaagtttcagaatccccctccccttccctttctttttatctattgtatatatggttgtttgtgtgcattatatttaaccagcgctgatttgtatgttatgttttttgtgtgccagtttgcagacgaaatttctttctttttttttttttttgagtttgtagatgaccttggttgtgattggtttgtgagctttctggctgtttttgtttgatgtctttggcttttgcaaaatacccctgcctttgaagagcc

SEQ ID NO: 141815 - DNA, 306 bp, Glycine max
  unsure (1)..(306): unsure at all n locations
  Clone ID: PAT_MRT3847_99070C.1
tagcggttgtttggacagagccaagggcggaaatcacaaacaaaatggggggagccatgaggccggaagcaaaggaagaccgggaaaggcaacaaggacaccatagggggagccagangngcaagcgcaaagggacagacgcngactttgacttgttgcctagggagggcgataggcaaaaaggagttgctcacagtggagagttgaaatctggtggatatgcgccaccggctacaaaaactaacatggtggaagcgacgcacgaaagatatcggtatgaaccatgactgcgacaggctaaagctt

SEQ ID NO: 141816 - DNA, 393 bp, Glycine max
  Clone ID: PAT_MRT3847_99071C.1
cgcggctgccagaagactacagaagggattgctcttttctacaatagtattacactacggtgttcaatattacatgttggaacaaattaaagtgagattctggtatctttactctacttacccatgtatttccttcttattttgatctatataaaattacttatattataaccactctatgtactaaaacccccaatcccttaacaccatcagctccattaactcgaacaaatcatggactttaataaaagaaattttttaaaacattcctcttttggtttctaaacagtcgttaaaatgataatcaattatcgattccctaatacaagcatagggagtcagacctttcatcaaacaggtcgtatgcatgtcggtcaagtcacccaagtcctc

SEQ ID NO: 141817 - DNA, 476 bp, Glycine max
  Clone ID: PAT_MRT3847_99072C.1
gctcaatactggtatttcaggttctcgactatggggcaccattcctcagtccatttcacagctaactgtatggaatcaaatggcaacagtgagaacaccattgaattttgagtctagcaagcagagctgttgccagttgtctatagaccttatcggtggaggaatcttagtggacaaaactggagattgcatcacacttatacaaaagtctgcaatgagtaacttatggagagttgctgctgggaagaaaggctggctaagtggcaagattgtgatgtgtggaaatgcaccagtcaaaaggagtgattgtgcctcattgcgacatgtgcttttaacaaacagtaacagctcagagcattttgatgcatgtaagtggacaaaatcacaaccacattcctgggaattgatcttcccaatagaggtatgtgggcctaataatggctccgaaatgtggagatctgagcgggcaaatcaaa

SEQ ID NO: 141818 - DNA, 381 bp, Glycine max
  unsure (1)..(381): unsure at all n locations
  Clone ID: PAT_MRT3847_99073C.1
gggcccctaacaatcctatcggtaatttccttggctgcctcaaatgtcattggactagatttttctgtgtgggtcatcttccacttcacatgtcgtctaatggaagatggacgatcaataattgtgtcagtgctcttggattgngttgtttcctctaattgtttctttttcttgtcatccataaacttttattctagaaaagcataacctccacgagacaacacgtgagggacaatgttttgtttcttaatggcctgcgccatctttcaaacatcttgtaatagttacagattaagataacttaatatgtttgacaataatgcgtaaatatgaagtttataaacaatcaaaatcaactaaccctcccatgaaggatctcta

SEQ ID NO: 141819 - DNA, 710 bp, Glycine max
  Clone ID: PAT_MRT3847_99074C.1
atcgagcttctctgtcaagagttttggtggattactaccctttagctgggaggttgatcaggagcagcatttgtgattgtgaggatgatcacaagcttgaggtggattgcaaaggagaaggtgctgtgtttgctgaggctttcatggatgccactgctgaagaattgcttgaatcttgcaaggtcccaaacgattcatggaggaagctcttgtacaaggtggaagctcagagcttcttagatgttcctcctcttgtaatccaggtgacaaatctccgatgtggaggaatgatcttgtgcacggcgatcaatcacagcctatgcgacggcattggctcgtcacagtttctacacgcttgggcccatctcaccagagagcccaacaccgaattgacaatattaccctttcatgggcgacatgtgttaaaacctcgtaacacttcccaggtgcacttcacgcacccgcaatacaccagaacacacccctcctctcacgtggacctgcacaagctaatgatgcagtcacagtcgctggttgccacgtcattcaccttcggaccctccgaagtgcatttcttgaagaaacagtgtgttctatcactaaagtgcatcaccacctttgaaaccgtagcagcgcacacgtggcgcgcgtgggttaaatcactaaacctctgccccatgcaaactgtttaacttcttttttctgcccac

SEQ ID NO: 141820 - DNA, 124 bp, Glycine max
  Clone ID: PAT_MRT3847_99075C.1
ggtatttgtacacactctacctgtgaacagtttcgcgacccgaaagcccttattgtgaaagtacttcaattaaatggctcttgtacatataaaattaccctttccttctacttgataagccctc

SEQ ID NO: 141821 - DNA, 451 bp, Glycine max
  Clone ID: PAT_MRT3847_99076C.1
aacggagcgttttgcgtaaaaaatataaaacaagataaatttggcactcaagtttcgggaacaataccaacaaagggtaacaccaggcaggattcagggtgagcaaagggctattaaatataagtataaaaattatggagagcaagacagtacaaaaaataaaagctggcaacgacaggattttccatacacctacaaaagaacatctatccaataccatcctgcctaggaacagattaattgacatccattcgctgccaactcccaacaaaagaagccaacagatcgacctaggcatacaatcctaggaggccacccgaatgtaagaagaggaccttactccttacccacatcaatggaacgacagaaataacttacagcaatgcaaaaagcaagccaaccactggatacgggggaaagaacaaaaccagaaggggcagcaaccttccat

SEQ ID NO: 141822 - DNA, 431 bp, Glycine max
  Clone ID: PAT_MRT3847_99077C.1
ctcgagccgaccggaattctccaaagattattgaggcattgagtgtggatggatcttccgggccgcacatagaatcctcaaacactgatctattgtcagggaaaagtggtgcctccttatctgagagatatgcagttgttccggatgaaactgtaagtgtctcgttttagcatatacattatgtgctacaattactatggatctttgctcatgatttaggaaacctagaaagagtggtaacaacatgtgggactatgagaaatttaggagcgaacagggtctccttttgacttggtatgaggagtaattcttgcatgagcatagtgttagtgtctatacctacacctaatcaaatgcaagatgcattaaaataatagtctgttgaaatatgtgctacatttattttgatattatcttaaacttcttgattc

SEQ ID NO: 141823 - DNA, 331 bp, Glycine max
  Clone ID: PAT_MRT3847_99078C.1
gaaattattgaccccaccatagtgagtgaatagctttgctgccatagcatgaggacaggagggcatcgttccatattcaaggcactaaacctgtcttgcgcatactcttcttgctaccagggttatgtgctaaacattcaatgtctctaaccccattccgactatgaagctgtctgacccatccaactactaagtatccgtagctgattggaaccaggttaacgatgagtacgcgttggtttacgctaatccaaaaaaaggatcggagaaagtgctcgtcaagtgcttagcgatgaacgacaaattgatagcttatgcttattctcataga

SEQ ID NO: 141824 - DNA, 2305 bp, Glycine max
  Clone ID: PAT_MRT3847_99079C.1
ccacgcgtccggtgcgaaattcctccttctgaaaattcttcgttcatcgcgctccgaatcttcctctcttgttattccgaaaccgatttggcggcgccacttttcgcacgtgtgctcaaatcgttgcacttttttttttttggatccgcaacgagaattccagatctctgaaacgcaccgtttttggcggttccttcactcatcatcatcataacccattcccctttcgccacttgaaccaaaacctctgcaccttttcttttcactctcagtctccgatccaatatgacggaggaacggaacgtgcggaagacacgtgtggtcgacgtggtcctcgactgcgtcatcccttacatcgacgaccccaaggaccgcgacgccgtttcccaggtgtgtcgacgctggtacgagctcgactcgctcacccgcaagcacgtcaccatcgcgctctgctacaccaccaccccggctcgcctccgccgccgcttcccgcacctcgagtcgctcaagctcaagggcaagccccgagccgcaatgttcaacttgatacccgaggattggggcggacacgtcactccctgggtcaaagagatttctcagtacttcgattgcctcaagagcctccacttccgccgcatgattgtcaaggattccgatcttcagaatctcgctcgtgaccgcggtcacgtgcttcacgctctcaagcttgacaagtgctccggtttcaccaccgatggtcttttccatatcggtcgcttttgcaagagtttaagagtcttgtttttggaggaaagctcaattcttgagaaggacggagaatggctacacgagcttgctttgaataatacagttcttgagactctcaatttttacttgacagatattgctgttgtgaagattcaggaccttgaacttttagctaaaaattgccccaacttagtgtctgtgaaacttactgactgtgaagtactggatcttgtgaacttctttaagcatgcctctgcgctggaagagttttgtggaggcacctacaacgaggaaccagaaaaatactctgctatatcattaccagcaaagttatgtcgattgggtttaacatatattggaaagaatgagttgcccattgtgttcatgtttgcagccgtactaaaaaaattggatctcctctatgcaatgctagacacggaggatcattgtatgttaatccaaaggtgtccaaatctggaagtccttgagacaaggaatgtaattggagatagagggttagaggttcttggtcgttgttgtaagaggctaaaaaggcttaggattgaaaggggtgatgatgatcaaggaatggaggatgaagaaggtactgtgtcccatagagggctaatagccttgtcacagggctgttcagagcttgaatacatggctgtttatgtgtctgatattacaaatgcatctctggaacatattggaactcacttgaagaacctctgtgattttcgccttgtgttgcttgaccatgaagagaagataactgatttgccacttgacaatggggtgagggctctactgaggggctgtgacaagctgaggagatttgctctatatctcaggcgtggcgggttgactgatgtaggccttggttacattggacaatacagtccaaatgtgagatggatgctgcttggttatgtgggggagtctgatgcagggcttttggagttcgctaaggggtgtcctagtcttcagaaacttgaaatgagagggtgtttatttttcagtgaacgtgcacttgctgtggctgcaacacaattgacttctcttaggtacttgtgggtgcaaggttatggtgtatctccatctggacgtgatcttttggtaatggctcgacccttttggaacattgagttgattccttctagaaaggtggctacgaataccaatccagatgagactgtagttgttgagcatcctgctcatattcttgcatattattctcttgcagggcagagatcagattttccagatactgttgtgcctttggacactgccacatgcgttgatacctagaggccagagctgtgtatatataccagttttcttttgtttttcttctcccctttcatatgctgtttctatgttcctgctctatttgtagttcattttagacaattagtcttgtaataagcctgtgttttcatttgaaattctgaaacgcttcccctaacgctattggctcccttaaaaactgaacattctcaattttgtgaataaaaagcaattcttccccccttttggatctaaaaaaaaaaaaaaa

SEQ ID NO: 141825 - DNA, 691 bp, Glycine max
  unsure (1)..(691): unsure at all n locations
  Clone ID: PAT_MRT3847_9907C.1
ccacgcgtccgcagaatatatttttcagttggcgctttttcaatgtgcaaaacaaaaaccaaaccctagacaaacgcccacttacagtctcaaattcattgacagcaatactggtccaaggcctgctccttcatccttcacttcactgatcaggcatcgaatcgaagtgaacatcactgtactcaagctgcacaatcagctcagcattttgtcaaacagaaagcaggcgaagataactgatgggtgggatattgaagcaacccggcgcgtttgcaatcacaccgcacaaagtatcactctgcatacttcttaagatctacgctccacccgctcagatatcggtccccttccctttcgcttccgttgctcagcacaatcgccttggcttgttcttattagccctcaccaagtcctgcgatgatatcatggagccaaaattggatgaactcatccatcaattgagaatgatgagccaaaactgggaggctagctgggttattgatcatttgatgagcagcctatcatctctgtcatcacctgatgatttgtttaattnttttagcgatatacgaggaatacttgggggtcctgattcaggtgctgtggaagatgaccaggttattttggacatgaacagtaancctgggatatttctttcgcgttgngttcttgcttttacttgctatcgttt

SEQ ID NO: 141826 - DNA, 368 bp, Glycine max
  unsure (1)..(368): unsure at all n locations
  Clone ID: PAT_MRT3847_99080C.1
aagntntgtgcganangacnanngnganngttngagntncgganacattgnagaanncggganggtgagcaggtnagtgagagcannngtaagganatgngacanngcgtgnagtnatcgtaagngtaggagngtnangngngagataaacnnnnanagtnattacnagntgtgaggangnggaggaagangtgagnatatgttgntggnangganntanccagggnngctngttgcnnatgntcntgcagganganagnntaagnnntgtgncgacnnttnanttaagcgtgangngnggnnctggatctgnngtgcggtangtcngcgnaacanggacngtgngtnagagtgggcngnnacacanc

SEQ ID NO: 141827 - DNA, 190 bp, Glycine max
  Clone ID: PAT_MRT3847_99081C.1
gacacttcataatcctctagtaacccttcttttctctctctctctctcgtgttctgagctgctagaaccactggagaggaattgaagtcatgcgtctttcaccatgtttgcaatgcttgttggactgctctctcacagccttgtctttcgtgtcacaggcattactgttcccgattttatcacctgcctc

SEQ ID NO: 141828 - DNA, 390 bp, Glycine max
  unsure (1)..(390): unsure at all n locations
  Clone ID: PAT_MRT3847_99082C.1
ctatccaaattcattggcgtgtggccattttcaaattgaatggagttatggaattggggttgagattcgattagacagacacaccatggacccagagtcaccatatgctaggggtatgtacaaaatcttgtccaaattaaattctctcaaaaagattgaaaaaggtgctaggggtgtcattgactctagacaaagtacatttttggaaggaagatatttattacaagtgcacttgtggctaataagggggtgaaggaggcaaaaaagaaagaagaaaaaatgcctcatttttaaagttataaaaagacatgactcaatgagttggaagtttcttctatatatgctttanagactggaattttaagagaagtgaattgggtgttgtttggt

SEQ ID NO: 141829 - DNA, 322 bp, Glycine max
  Clone ID: PAT_MRT3847_99083C.1
ccacgcgtccgtggcccggcccgtttaggcccgctgcgggccgggcttggacagaaacttaagcccgctggctcagcaggcccggcccggttttggccgggcttcaccgggcccgggccgggccgggccggcccggcccgtttggccatctctactctatatatatgtatagcccgtgcccgtgtccgcatttgtaccaatacaagccaagcctagtcaagtggatgtgtattattgttgcgctatcaaaaaaaaaaaaaaaaaaaacaataaaaaaaaaaaaaaaataaaataaaaaaaaaggggcggccgctctagagga

SEQ ID NO: 141830 - DNA, 327 bp, Glycine max
  Clone ID: PAT_MRT3847_99084C.1
gcgacgtttctcgaattcggctcgaggcgaataaatgcggtggagactgctcctccatgttatgtgtatcctaacccgtattcctcctccacggaccttctcctcgacgttggagccggcttgatacgacaccgtcctctcggtccttacactccctttcactcttaactcttcactcaatcctgtatcgccttttcaaatcttcaattagggtttctcctttctccccgtttcaggttcaatgcagtccaattgcataagaccaaggcgcacgctacttccttatagaagagcatttagcactcgcttttctccttcccatgtcac

SEQ ID NO: 141831 - DNA, 900 bp, Glycine max
  Clone ID: PAT_MRT3847_99085C.1
gcaaactccaatacccacgttccaagttctgaattttcgtttctgggtctcactcactcccttcgaatgttacccttagagcatcattttcgctatcaccctcccttaaccctcaccaaattgaaacccttttcccgcgcaaattctagggtttcccttccccatatcgacaactccttccatcgtttcaaccccaatccgtgtcgcttccgatgccctatttcatccaacgattcgcttaggtttggtttgagggtcggccaccgagcatcatgggtgtgtcgttccaccggagaacccgattccgcggcggattccggtgagaagaaaaccggaagcagcagcagcgatgaagacgccgattcgaaccggaggaagggcgggtggtggtcacggtggcgccggtggcgttggcagcccctgattcaggctcaggaaattggggtcctgcttatgcaaattgggattgcgttcttcgttatgcggttgctccggcccggaattccgctacccgggtcggatcctcggtcttcgacggtgtttgtaagtgttccttatagtgagtttttgagtaggatcaatagtgaccaggtgcacaaggtggaggttgatggggttcacattatgttcaagttgaaggctggtgttggaacaagcaacgatgatggtggtgatgttgttgcaagtagtactagcagtactactaggttgcaggaatcagagtctttggcgaaaagtgttgcaccaactaggaggatagtttacaccaccacaaggcctagtgatatcagaacaccctatgagaagatgctggacaataaggtggagtttggttccccagataagcggtctggcggattttttaactctgctctgatagccttgtttatgctgctgtgc

SEQ ID NO: 141832 - DNA, 661 bp, Glycine max
  Clone ID: PAT_MRT3847_99086C.1
catcattacatatttttattaatataatatgtgtcattacaatattcaagacaagttgcaacagagtactaaaaacagatatttatagaggcaacaaggtgactgattagaggcatttggcctcaatctcctctagtgtaagccccttggtttctggtataacaaggtatatgaatacaagagatgtcaccgctattacaccaaatgtgtaaaacaaaattcctgctcccaataatgcctgagaagaaaacaaaaacaaagtgtcaggcaggaaattttaatgaaatcaatgggtccaccgaataggaagttcaagatgatgtttctgaaacagccaagcacagtaacgaaaacaaaattcttttcactgcacagcctaatctaccaaatagaatgtgaggaaaagaaagagaaaaagatcctcaatacattcaattgaacaccaatttaaatcgacaaacaaggtcgatgcaatttatatcacatgcttatgaatgatgatgagaccagattttggtgaaatatggcaatcatatgattgatgatggtgaagatgacacattcaaaatatatgacgattttatgatctcctgttcaagatcttcatcaccttcagtggggaaaaagcaaatgtcaccagggcatttgcaccaaaattgac

SEQ ID NO: 141833 - DNA, 350 bp, Glycine max
  Clone ID: PAT_MRT3847_99087C.1
tcgcgccctttctttttttttttgatgacgaactgtattaacattaatgggacaatagagttcaacagagaccaaacttattttgaaagggcattacagacccatcacacataacattccttattaaaatgtgagggaaaatccaacataggacatcacacagaaatcggttccaatttataaccccgcaccactacgcagcaccacatgctcagctgactgcttatggacgttagaagctacgagggttcttccatactatagctcgatgtcaacaaaaataaccctttgctgggccggggggagatcatccttaacctgaaacatgggatccacacagagactggtga

SEQ ID NO: 141834 - DNA, 381 bp, Glycine max
  Clone ID: PAT_MRT3847_99088C.1
gataaaggttagcgtgaaacatttttacctaaatggattgaattgacaaataataacaaacaactaatagcagaaggacttaccacagcaaccctgctcaagatggtctgttagtgtgtttgatattctaatgtccctaagttgtgcacaagctgaaatagcacccaccattgccacctcagtgattatgatctttgcttctctcattttctcatacatgtaaatagcttcctttgctgatgtgaaccttcggctcttgatacaggttctatcctatcctatcctatcctattttttttcttcgtaatttgtctaggtttgtgtttttgtccttgttctgttatttgcgttcttgttcttgctcttgctcttgtcacgttc

SEQ ID NO: 141835 - DNA, 2895 bp, Glycine max
  Clone ID: PAT_MRT3847_99089C.1
ccacgcgtccgcagtccgcaacaaaccaaagcaagcatccaaaaacgcacactctcacatcacaatgctctcttcccattcccctcctcctcctcctccttccttctccaccactacttcaacaacaacaaccaccttcacttcttctccatgcccaagaagaatctacctgaataatcccacacagattccaaaaccatacccatacacacacctttttacacatcactcttcattgcttaataattattttactaacatgaatccctcttgtcgcttctcttcaactaaacacacccctttccttcacaactccaaacccacttcccctttcttccttagacactctcactctcattcccaccaagtgaaaccttttcccttatcccctccaataacaacaacaacagcaaagccttatcctttaaacattctaaggctcagaaacatcaaactctctcaccctttggccacgctatcatctttcgcggagggagaagaagagaatcagaaggagggagcagagtcaccaccgaacaacgatgaattgggaggaattgcgaaggccttcaacatatcgtctcggacggcctctgccatatcgatatgcatggcattggcggttctcacttttccgctgttcatgacttctttggggcaaggcatggctctgaagacgaaggtgctctcttatgcgacgctgctgttcgggttctacatggcgtggaacattggggcgaatgacgtggcaaatgccatggggacctccgtggggtccggcgccctcacgctccggcaggccgtgctgaccgccgcggtgctcgaattctccggggcgctgatgatggggacgcacgtgaccagcacgatgcagaaggggattctcgtcgccaacgtgttcaatggaaaggattctttgctcttcgccgggttgctctcgtctcttgccgctgctggtacttggttacagtttgcatcatattatggttggccagtatctactacacattgtatagtgggagcaatggtggggtttggtctagcttattaataatccattatcgaacccacaaacgcctccctttttcctttgctatccactccatgattttagtctcctctccgaaacttctagaaacaactacaacctaccgctcatttttttccggttccgaccctctttctgccctctcagtaaccttatcagatccgatcaaggtaaccaaataatatcacaagttattcttcttcacttatttatatttattttccttttggatttgataatattaagaggaaccaggatagataggtaggttctagcctttctgttatcattttcgaaacaaaccaaattgaaactgtttgagttttgtttagaaggctgttatgaatgaaactttgaagcttagaaaagcggttaggtagctaggtttcagtttcagatctggtagagagcttcatcatgaagccattaccggcggagcaaaccggtgaatcagcgccgacggagttgcagagatccattccgacgccttttctgaccaagacgtaccagctcgtcgatgatccctccgcggatgacctaatttcctggaacgaagatggcaccagcttcatcgtatggcgacccgcggaatttgcaagggatttgcttcctaagtacttcaaacacaacaacttttccagtttcgtccgtcaacttaacacctatgggttccggaaggttgtccctgaccgttgggaattcgccaacgactgtttccggcgaggcgagagagctcttcttcgcgacatacagcgccggaaattactgccggttccgcctgcagccgcggcaccggcagcagtcacagccaatacggtgacggtggctgtggcagcaccggcggtgagaactgtgtctccaacgacttccggcgacgaacagccgccagcagttagaatcctccacaagcgctgtgaggaccgtgccggtgccggacgggaaggcgccgctggagcttttgcccgcgaaacatgtttcatcggctgatgacgccctgcatgtcggtggcgccgccggtgccgcggcgtgcgcgacggggaacgcggcggaagcagaggttccgaagctgtttggggtttcgattggactgaaacgatgtaggacagagtgcgaggccgaaccagaaggagaagatcagaatcagatgcaaacgcgagcacaaacacaatcacaatcgtcgcaagaaccagatcacggttcagatgtgaaatctgaaccgcttgatggtgatgattcggattatcaggatcatgaccctcattggttggagctatagggaaatgaaatgatgctccttcttcttcttgatctctctactaatttggtgaaatgacagtgcgcacttgctgcctgtactattagtgctgtgacgctgccattgggccggcacgtgacttggccatgtatttaactcgcggttggggtgaaaagtgcgaaacattgtactataaggaattatgtattcttctgattgctgggggttaaagaaagattatcatcgcgtcaaaatggagtaactgaagcaagggaaggacagacccctaaaagactcacgtctcggttttttatttcaaggaacatttgttggatacagcaaaatgtgtagatatttgtgtctgacatcattaaattttcgaatttgattcgtgtattgtaatgtttccatcctttgaaccaagtttgttcctaagcttcataattgtagcatgtatgttcttttaatgaaatgaaattctaatattatctaaaaaaaaaaaaaaaaaaaaaaaaaaaaaaaaattaaaaaaaaaaaaaccctaaaaactccaactttagaaacccttaaaagagggaaaatagcccactag

SEQ ID NO: 141836 - DNA, 261 bp, Glycine max
  Clone ID: PAT_MRT3847_9908C.1
tcggcggccgcccttaatattttggggggttttatttaaactatgcggccctaacccccccctttgttcgggctacgaaagcctcggagtggaacaaaaaagcccttgcccaccaaaacaagactcaaaaccccaaccccaacaacaaaaaagaaaaagacacaaaaaaaccaaaaaagaggtcccaaacgggccagggatacgcgggaaagaaacaaggccgaaggacggaaaaaaaaaccgaaaagggccgggcaacaa

SEQ ID NO: 141837 - DNA, 401 bp, Glycine max
  unsure (1)..(401): unsure at all n locations
  Clone ID: PAT_MRT3847_99090C.1
gtttattataatgaaaagaggtgttgatgtaccactattctttccaacccacaatcatctgtttggtgatggaggagcaacagattgagaaatttgaccaaggaataaggatagccaagtgaagttgcttgtctttgtccctgtcttcaacttgcattccaaagtttttttttttaccttattctgtctcataaatggacgnagcgtcgaagttttttnggaggattgcatgagatgtcctttgtgtgtaaggtactgttgcgtcaattaccctgcaggttaccgcctaaagttcttattgttgtcatgactcataagaaattagatattaaatcatgcatctactttgtatcaggcaggctaaaaggtgtgggtttttttttttttagtttttaaataaa

SEQ ID NO: 141838 - DNA, 870 bp, Glycine max
  unsure (1)..(870): unsure at all n locations
  Clone ID: PAT_MRT3847_99091C.1
ggctcgagccacggacgcccccctttttcctttcctatcctctcctctccgaaacttctagaaacaactacaacctaccgctcatttttccggttccgaccctctttctgccctctcagtaaccttatcagatcgatcaagggaaactttgaagcttagaaaagcggttaggtagctaggttgagttccagatctggtagagaagttcatcatggcgccgttaccggcggagcaaaccggtgaatcagcgccgacggagttgcagagatccattccgacgccgtttctgaccaagacgtaccagctcgtcgatgatccctccgcggatgacctaatttcctggaacgaagacggcaccagcttcattgtatggcgacccgcggaatttgcaagggatttgcttcctaagtacttcaaacacaacaacttttccagtttcgtccgtcaacttaacacctatgggttccggaaggttgtccctgaccgttgggaattcgccaacgactgtttccggcgaggcgagagagctcttcttcgcgacatacagcgccggaaattactgccggttccgcggcgtgcgcgacggggaacgcggcggaagcagaggttccgaagctgtttggggtttcgattggactgaaacgatgtaggacagagtgcgaggccgaaccagaaggagaagatcagaatcagatgcaaacgcgagcacaaacacaatcacaatcgtcgcaagaaccagatcacggttcagatgtgaaatctgaaccgcttgatggtgatgatttcgattatcaggatcatgaccctcattgttggagctatagggaaatgaaatatgcntcttctttctcttgatctctctactaattg

SEQ ID NO: 141839 - DNA, 664 bp, Glycine max
  Clone ID: PAT_MRT3847_99092C.1
ttagtctcctctcggaaacttctagaaacaacaacaacctacagctcattttttttccgattccgatcctctttctgcttctccgttcgctgggtgcatgccctctcagtaaccctatcagatagatcaaggggttccggaaggttgtccctgaccgttgggaattcgccaacgactgtttccggcgaggcgagagagctcttcttcgcgacatacagcgccggaaattactgccggttccgcctgcagccgcggcaccggcagcagtcacagccaatacggtgacggtggctgtggcagcaccggcggtgagaactgtgtctccaacgacttccggcgacgaacaggtactatcttcgaactcatctccgattgctgggaataataataataatacagtacaccgcaccacaagttgcaccactgcgcccgagctgttagaagagaatgaaaggcttaggaaagagaacatacaactgagtaacgagttgagtcaattgaagggtttgtgtaataacatactctctttgatgaccaattatgcttctggttttagccgccagcagttagaatcctccacaagcgctgtgaggaccgtgccggggccggacgggaaggcgcccgtggagcttttgcccgcgaaacatgtttcatcggctgatga

SEQ ID NO: 141840 - DNA, 764 bp, Glycine max
  unsure (1)..(764): unsure at all n locations
  Clone ID: PAT_MRT3847_99093C.1
cagagccccaagatctgtgcttgaaccttcacttgtgtttccttccttctgcagacgagcttcaccttgcgccggttgcaaatgtggttccaccaaaggagactccaaacagtgttcccatctcttatcattcctcacactcacaccctcctcttaatgagaggattatttcatccatgaccagaagatctgttgctgcacacccgtggcacgaccttgagatagggcctggtgctccaacgatcttcaattgtgtgattgagattgggaaagggagcaaggtgaaatatgaactggacaaaaaatcgggtcttatcaagatcgaccgtgttctttactcatcagttgtgtatcctcacaattatgggtttatcccacgtactatttgtgaggacagtgatcccctggatgtcttgattattatgcaggagccggttcttccaggttgctttcttcgggccaaagcaattggtctcatgcccatgattgatcagggggagaaagatgataagataattggctgtctgtgctgatgatcccngagtatcgacattacaatgatatcaaggagcttcctccacatcgtttagctgatattcgtcgtttttttggagactaccagaagaatgaaacaaagaaagtcgttgatgaatgatgcacgtcatggattttttactgacggaccaatggnaagatgttttgcttgaaaaaaggctgcattatcataattatggtaggaataaaaaaaacattttactttaact

SEQ ID NO: 141841 - DNA, 1987 bp, Glycine max
  Clone ID: PAT_MRT3847_99094C.1
gcgatctagcactccatgattttagtctcctctcggaaacttctagaaacaacaacaacctacagctcattttttttccgattccgatcctctttctgcttctccgttcgctgggtgcatgccctctcagtaaccctatcagatagatcaaggtaaccaaaataatcataaattatcattcttcacttattaatattatttatcttctttttggattggataatattaagaagaaccagcgttagctaaggatagataggttctagcctttctgttatcattttcgaaagaatctgtagcagtgtaagtaccaaattgaaatggttagattttgtttagaaagcagttatgaacgaaactttgaagcttagaaaagcggttaggtagctaggttgagttccagatctggtagagaagttcatcatggcgccgttaccggcggagcaaaccggtgaatcagcgccgacggagttgcagagatccattccgacgccgtttctgaccaagacgtaccagctcgtcgatgatccctccgcggatgacctaatttcctggaacgaagacggcaccagcttcattgtatggcgacccgcggaattcgctagggatttgcttcctaagtacttcaaacacaacaacttttccagtttcgtccgtcaccttaacacctatgggttccggaaggttgtccctgaccgttgggaattcgccaacgactgtttccggcgaggcgagagagctcttcttcgcgacatacagcgccggaaattactgccggttccgcctgcagccgcggcaccggcagcagtcacagccaatacggtgacggtggctgtggcagcaccggcggtgagaactgtgtctccaacgacttccggcgacgaacaggtactatcttcgaactcatctccgattgctgggaataataataataatacagtacaccgcaccacaagttgcaccactgcgcccgagctgttagaagagaatgaaaggcttaggaaagagaacatacaactgagtaacgagttgagtcaattgaagggtttgtgtaataacatactctctttgatgaccaattatgcttctggttttagccgccagcagttagaatcctccacaagcgctgtgaggaccgtgccggtgccggacgggaaggcgccgctggagcttttgcctgcgaaacagccatgtttcatcggctgatgaggccgggcatgtaggtggtgccgcgccgtgcgcgacggcgaacgcgggggaagcagaggttccgaagctgtttggggtttcgattggactgaaacgatgtaggacagagtgcgagggcgaagcggagggagaagatcagaatcaaatgcaaacgcgagcacaagcacaaacgcaaacacaatcgtcgcaagaaccagatcacggttcagatgtgaaatctgaaccgcttgatggcgatgactcggatgatcaggatcatgatcctcgttggttggagctaggtaaatgaaatgatgctcctccttcttctaatttggtgaaaatgacagaaggcacgtgacttgggtggggacacgctgtactattagcgctgcgacgctgccattgattgggccatgtatgtaatgtaacattacgctagatggaaagggcggatgaccatccttgtatgtaactcgcggatgggatgaaaagtgtcaaagtcaaagctttgcttgagcgccaaaatttgtaatataaggatttatgtattcttgataagctggggttaaagaacatgtcaaaatggagtaactgaagcaacccctaaaagattcacttctcgttttcctttttaaggaacatttgtgggttacagcaaaatatgtagataaacgtgtctgacatcattacatttttcgaatttgattcgtgtattctaatgtttccatcctttgaaccgagttgttcctaagattcataatcgtaccatgtttctttttaatgaaaaaaaaaaaac

SEQ ID NO: 141842 - DNA, 350 bp, Glycine max
  Clone ID: PAT_MRT3847_99095C.1
ggaaggtaagaattttcttactacttgagtttcctttttcttattgctttgcacttttatttgtgctcgtcttcttctcctttccttaccacagaagaatagtagcaatcagagactgaagacgagcttccccttgcgccgaagggccaccgatggttgaaaccgagatggatgcagaaactgttgcaaatgtggttccaccaaaggagactccaaatagtgtttccatttctcatcattcctcacaccctccccttaatgagaggattatttcatccatgaccaggagatctgttgctgcacacccatggcatgaccttgagataggacctggtgctccaattatcttc

SEQ ID NO: 141843 - DNA, 632 bp, Glycine max
  Clone ID: PAT_MRT3847_99096C.1
gcgacgcaagctcagcggctcgagtttcctatcctctcctctccgaaacttctagaaacaactacaacctaccgctcatttttccggttccgaccctctttctgccctctcagtaaccttatcagatccgatcaaggtaaccaaataatatcacaagttattcttcttcacttatttatattattttccttttggatttgataatattaagaggaaccaggatagataggtaggttctagcctttctgttatcattttcgaaacaaaccaaattgaaactgtttgagttttgtttagaaggctgttatgaatgaaactttgaagcttagaaaagcggttaggtagctaggtttcagtttcagatctggtagagagcttcatcatgaagccattaccggcggagcaaaccggtgaatcagcgccgacggagttgcagagatccattccgacgccttttctgaccaagacgtaccagctcgtcgatgatccctccgcggatgacctaatttcctggaacgaagatggcaccagcttcatcgtttggcgacccgcggaattcgctagggatttgcttcctaagtacttcaaacacaacaactattccagtttcgtccgtcagcttaacacctatg

SEQ ID NO: 141844 - DNA, 621 bp, Glycine max
  Clone ID: PAT_MRT3847_99097C.1
ggctcgagtgactgttgtgatcaatttggtaatatgggacaagcattcaacatgggtgggtacagtgggtcttctgatttgtatgctaggtgggatcatgtatcagcaatcaactagcaagccgaaggctgcaaaacaggtgagtgcacaggaaaatgaggaggaagaacagaaattacttgagatgcaagtcaattctgagaccaacatcaataataatgaagttaataaaccaagggaggaaagctgaaactattttctataggacacttccatatttcctttcaagtgtatgtttttttattgtatcattttttataactgtcaattcacaattcttaacaatgctatctccttgaatggcaagctcattggcattctggtatgtagggttttatttactttagtggctgtaatgtaaaatctattatttaagtacttgatagataaaatgtcattcaatttggttctttaacttttcagcttttaaactgaaccaattttatgtttcaaatcttagtttgttcttttctttctcttgatgcttcaaattctgactgtgatggaattgaaatgttgttgtctctccaaaaaaaaaaaaaaaaaaaaaaaaaaaaaaaa

SEQ ID NO: 141845 - DNA, 489 bp, Glycine max
  unsure (1)..(489): unsure at all n locations
  Clone ID: PAT_MRT3847_99098C.1
gactctagaaaanccttaaaatgggataatctaaagtcttttctttttatctcaaatgtcccattaaaaataaaaaacaaaaacaactttggcatggggtgcttttttatttctctgtatttgacgcagaattatccctttcaaaacccatataacaccttattgagaagtgtaaggttatggaaggggtcgcaagcgcgataagttatgaaggtggaagtagtgtgcaacatgatctattctcatgtgctggcgtgatgatgatgatgaggcttgtggtgtatgcagtgactagtggtggttgtgggcgatgacacacgcactagtgtgggttggtcacgggggctatgcgtgataatggaggagctttgagggaatgtcatgtgcgaaggagagaggggtagggggtgtcactcaaccatggtgaaggattccaaaaaaagggatcgaattttttatcaaattggtttttcaaataaaaaattatta

SEQ ID NO: 141846 - DNA, 218 bp, Glycine max
  Clone ID: PAT_MRT3847_99099C.1
gatctggcagcggatgatacaagtagttgagacctaagaaggacatgcacatggcttactcaacgatcgctctctcagctgttaccactgtcaaccgggccgtagccacgcatggttgattcattcactggcctcaagttcatggctggctacctcaccaggaagaccaccaatgacattacctacattgctagcaacggtggaagagtgcaatgcat

SEQ ID NO: 141847 - DNA, 224 bp, Glycine max
  Clone ID: PAT_MRT3847_9909C.1
ctccaggttggcaccatttcagtagtccttcatggaatatggcatgaattccattgccaggaacttcctctcattacaatcagcacataccacacgacccgtttgcgcatcccgtctacaggtatcctggttatggtcacccacgagacttgtatgaaatgtactatcataatgcttatggtggtcagctgtttcggatctgctggtttccagcatattgccaa

SEQ ID NO: 141848 - DNA, 495 bp, Glycine max
  Clone ID: PAT_MRT3847_990C.1
acggctgcgagaagacgacagaaggggaagttcttcttggtttccttgcttgctttgctcataacagcttatggagttgcaggaagcataatgtgtgacaacattggcatgctcgaagaacttaaaagcctagaggccctggacatagaagaagaagaaaatgaggtagaactttctgacatcccttcatggagaagcgagcgcggtggaaaagttcttgtgaatattgatagctttggtgctgctggagatggagaatctgatgatactgaggctttacaaaaagcatggggagttgcatgctctacaccaaaatctgttttgttaattcctcaaggacgccgttaccttgttaatgcaacaagattcaaagggccttgtgcagacaagctcatcatccagattgacggtacattggtggcaccagatgagcctaagaactgggatccaaaactgccacgggtttggcttgatttttccaaattgaataaaact

SEQ ID NO: 141849 - DNA, 2508 bp, Glycine max
  unsure (1)..(2508): unsure at all n locations
  Clone ID: PAT_MRT3847_99100C.1
ggaccctgattaaaattattttttttactgcaatataattaataatcccagaatatttttatcgtaataattcaaggagagtcaatgaattggccttcctagttcaacaattttgtatttgacgtttgtggaccatcctacatttttacatcttcagtatttttctactatctttagtgtatattatgtatatatttttatacattatctttagtatattaattaattaatctattaagtacgttttgtccacgcgtccgcccacgcgtccgcccacgcgtccgtacggctgcgagaagacgacagaagggggaaggtaagaattttcttactacttgagtttcctttttcttattgctttgcacttttatttagctcgtcttcttctcctttccttaccacagaagaatagtagcaatcagagacccaaggttctcaccttcatctcttctcttctcctctattttgctgtcacacacacactcacaagcatttcatttcactcactcactcttcgtttcgtttctctttctcactctagatctgtgtttctctctccaaccttcgtttcaccacacttccatcacttgtcgagtgtagaaatggctccaccaattgagaccccaaccaaggtttccagctatcagctcccctcacacctcatcgtttctctctctagatctctgtttcttctttttctccaaccttcgtttcaccaccacacttacattactttgtcgaaatggctccaccaattgagaccccaaacaaggtttccagctatcaacagtccccaaaccctcgtcttaacgagaggattctttcatccatttccaggagacacgttgctgcacacccgtggcacgatcttgagataggacccgaagctccaaagatcttcaactgtgtggtcgacatagggaacgtaagcaaggtggatcttctaagttgttccttacggcagaagaatagtagcaatcagagactgaagacgagcttccccttgcgccgaagggccaccgatggttgaaaccgagatggatgcagaaactgttgcaaatgtggttccaccaaaggagactccaaatagtgtttccatttctcatcattcctcacaccctccccttaatgagaggattatttcatccatgaccaggagatctgttgctgcacacccatggcatgaccttgagataggacctggtgctccaattatcttcaattgtgtgattgagattgggaaagggagcaaggtgaaatatgaactggacaaaaagtcggggcttatcaagatcgaccgcgtgctttactcatcagttgtttatcctcacaactatgggtttatccctcgtactatttgtgaggacagtgatcccctggatgtcttgattattatgcaggagccggttcttccaggttgctttcttcgggccaaagcaattggtctcatgcccatgattgatcagggggagaaagatgataaaattattgctgtctgtgctgatgatcctgagtatagacattacaatgatatcaaagagcttcctccacatcgtttagctgaaattcgtcgtttttttgaagactacaagaagaatgaaaacaaggaagttgcagtaaacgactttttgcctgcctcagctgcttttgaagcggttaagcgatccatgagcttgtatgcggattacatagtggagagcttgaggcggtagccgatgaatgatgcacgtcaaggatttttaactgacggaccaatggaagatatttgcatgaaaaaaggctgcattatcaatattatgtagggataaaaaaaaaacattttactttagctgcctcttagcacatgcgtgttctacagactacacgtgcttaatttcaaatatttcatctctgcactttagccacatgttttatccctgtataattttatattcattagaaagggtagaaagggtgtaatatttttttatgttttttacaagtaggttaaaattattttctcttaaaaaaaaaaaaaaaaaaaaaaaaaaaaaagcggccgctatagaggacctgatgaatgatgcccgtcaaggatttttaactgacggaaacttgcctgcttgttagatccatcgtagaccatagtagctgtagtcgttaatgcgtcaaggattttttgccaatggaagatgtttgcttgaaaaaaggctgcattatcaatattatgtaggaataaaaaaaaacattttactttagctgcctcttagctcatgcatgttttacaaactgtgcttaatttcaaatatgtcatccctgcaatatcaaatttacctgcctcttatagcacatgcccaatccaatatcaaatgttttaatcttgtataattttatattctcaccctttctattagaaagagtgtaatggttttttatattaaattatgttgcttttttccacaaagcaagagccnntctctctctctctctctctctctctctctctctatatatatatatatatatata

SEQ ID NO: 141850 - DNA, 2065 bp, Glycine max
  unsure (1)..(2065): unsure at all n locations
  Clone ID: PAT_MRT3847_99101C.1
ccacgcgtccgagcaatcagagactgaagacgagcttccccttgcgccggtgagtttctattttcgctgctctcacttcacactcgcacgtcgtcgtttcacttgcgttatcgtaactgtctatgtcggatttgttctggtttcgctcttgagcccgatcactcgcttttagtgtttgcaacattatcaaaaaactatttgcaggcacactcgttctaatgtttctgtacatgattcttaatgtggttttacaaattatcttttcaatctgaaacatggaacactgctcagctgatatctttgcaagcgcgtttgttctcgccacttgaggtggcgtgtgttgctttagcaaaactccgttctgttaagcgtaggtcatggattcgaattgattagatctgcgctcattttcgaagtttttctttccacggtttctcagtgtttccggttcaccttttgtaagttctggaaacggaaaaaggaaaaacatgtccaggattgattaaaaaaaaaaaacattttagagtgcttgattgattcatctattcattttttatatataaataagataagaagagtggttgatgctctttggagctgaatagcagattattttctntctttactgtttcacggccgctggcgggccgttttttcctttatttgtgctcgttcttcttctttcctttacacagaacaatagtagcaagcagagccccaagacgagcttcaccttgcgccgaagggccacagatggttgaaaccgatatggatgccgaaactgttgcaaatgtggttccaccaaaggagactccaaacagtgttcccatctcttatcattcctcacactcacaccctcctcttaatgagaggattatttcatccatgaccagaagatctgttgctgcacacccgtggcacgaccttgagatagggcctggtgctccaacgatcttcaattgtgtgattgagattgggaaagggagcaaggtgaaatatgaactggacaaaaaatcgggtcttatcaagatcgaccgtgttctttactcatcagttgtgtatcctcacaattatgggtttatcccacgtactatttgtgaggacagtgatcccctggatgtcttgattattatgcaggagccggttcttccaggttgctttcttcgggccaaagcaattggtctcatgcccatgattgatcagggggagaaagatgataagataattgctgtctgtgctgatgatcccgagtatcgacattacaatgatatcaaggagcttcctccacatcgtttagctgaaattcgtcgtttttttgaagactacaagaagaatgaaaacaaggaagtcgcagtaaacgactttttgcctgcctcagctgctttcgaagcggttaatttcgtcgttttcttgtatgcggactacatagtggagagattgaggtcgcagtagttgacttttggcctgcctcagctgctttcgaagcggttaatagatccattccatgagcttgtatgcggactacatagtgcagagcttgagacggtagtcgttgatgaatgatgcacgtcaaggatttttaactgacggaccaatggaagatgtttgcttgaaaaaaggctgcattatcaatattatgtaggaataaaaaaaaacattttactttagctgcctcttagctcatgcatgttctacaaactgtgcttaatttcaaatatgtcatccctgcaatatcaaatttacctgcctcttatagcacatgcacaatccaatatcaaatgttttaatcttgtataattttatattctcaccctttctattagaaagaagtgtaatggttttttatattattttcatagtggagagcttgagacggtagtcgttgatgaataatgcacgtcaaggatttttaactgacggaccaatggaagatgtttgcttgaaaaaaggctgcattatcaatattatgtaggaataaaaaaaaacattttactttagctgcctcttagctcatgcatgttctacaaactgtgcttaatttcaaatatgtcatccctgcaatatc

SEQ ID NO: 141851 - DNA, 296 bp, Glycine max
  Clone ID: PAT_MRT3847_99102C.1
gtggaaaggaaccactctaaatacaatgctgacttgcatcaatcgcaccacagagagaaccgcgaatcagagacagaaagagaggcgtggctgctgcacgctcagaaaacgtccctgcttttatcgccgctcagcttagccacctgcgttcccacttcgggtttacagtcaagggggaacaaacgtggtctagtgacatatgacaacttcacccccctcgatcgcttgacctttcttataccctactggttagactgtttcaaatggggtgttagatacgacgcggtatcttcgga

SEQ ID NO: 141852 - DNA, 239 bp, Glycine max
  unsure (1)..(239): unsure at all n locations
  Clone ID: PAT_MRT3847_99103C.1
attcccgctgnctcngnagnnananntggcctcattttagttggnggatggctggntacacnctgggtntnctggttanacggctatcgcagttaganaagctgtgaaaanagnattggtanatgntgagcctatgggaaagcctgntccattttcttctcttgaagtgtggacttggagntgntgttcncctnatatcatttgtatctgcatatnntaccctacagcactgggtacaa

SEQ ID NO: 141853 - DNA, 190 bp, Glycine max
  Clone ID: PAT_MRT3847_99104C.1
gccttacggccagggcctgggagagaaaaaccatgaccgggtcagcgacgcggtcgggtcagccctagtggccttcgatggcatcctctataactggacgctccaggtgcacaaccaatcagagggtgctggcgagaaagctaggtcgtgtacaaaccgtgcataatatcacgctgggtgcacaagaacc

SEQ ID NO: 141854 - DNA, 481 bp, Glycine max
  Clone ID: PAT_MRT3847_99105C.1
ccggaccggaattcccgggtcggcccacgcgtccagaaagacgtaacaatgggtggatgtaagggacctatcaccacatttattgtggaacccttcgggccgcacaaaaaaaatgctatctcaatattgtctcaaaaagacttgggtgcagtattaacttcttcgagtgtggaggaatggaaatcgaagagaattgggataaggttaaaaccatatttatccccacacgagtgtccctcacttcagaaacatgcgccgagctggtggcaacccttcctttggagatcaaaggagaaatcgccgcgtttatcaaggcagtttataccctattccaagatctggactttactttcttggaaatgaatccttttgcgcttgttgatgggaaaccctatcctttggatatgacgggtgaactagatgatactgctgctgtcaagaacttcaagaagtggggaagtattgaatttccaatgccatt

SEQ ID NO: 141855 - DNA, 591 bp, Glycine max
  Clone ID: PAT_MRT3847_99106C.1
ggctcgaggtttatctatctattattctatctatctattgtttcgttccatctcacaaaaagaaaagaaaaatgaaaatgaaaatgaaaatgaaaatttcaagttcctgaaagagagagagagaaagttgaggacttaaatagtttcagttcctgaattccattagatctcttgcattttgtaaacagttttcatcggaaagttcgttacttgatcgtagtttgttccctcggatcgttgctcgaatgttgtttttttagtgacaaaagaatctggtgtatttatgcttctggttattggatgagctgtatgttttaactatggtgttgaagaagagggtagattatggatttaatggctttcgagttcctgttatacctaaagctcctagatctgccagaaggagggttgctttcaacaaagcagttgaggatggtcaagtttgcgctattgaactactggcatctttagctggccaattgttgcaggagagtgaaagttctgctttcagcaatgcgtctgaaggaaatcatcaacctgccttcagccaaggtgtaattgagcaagatatacaagatgaagttaaaccat

SEQ ID NO: 141856 - DNA, 541 bp, Glycine max
  Clone ID: PAT_MRT3847_99107C.1
aaaaaaacaaaaaattcatcttggttttattaaaaatatagatcccggagaaattacctccttttttaaatttcaaatttctcccacaatatcccgtttttggggggagaggcaaagccatgaactttggactcaaatctactcaaaaaatgcccctggcaaacgaaatgcttctttaaaaataccaacccttgccttcaaaaaaataatggaaagcttccatattgaaataatgtgtttggcagtcacaacagaacttcagagggggaaccaaattttggtaatccagccccctactgccatgactgcgtggggaaccaacccctacccggaaacaaacttccttatgcccactaaaacttttagtttaagcaaatgccccagcacctgcgggggcgggagccgcttccagctgtttctttgcagaactgtatttttttggtataaacctaaagaagtccctccatagcaactcaaacatcaaccaatttgttccatttctggacgagccgttaccaccctctttccgggtggacaaaac

SEQ ID NO: 141857 - DNA, 318 bp, Glycine max
  Clone ID: PAT_MRT3847_99108C.1
tctcttttttttttttttttttttttttttttttttttttttttttttttttgggaaaacaaacggggggtcacttaaccgtaaaccctgtttaacaaggtaagaaaatcatctgatctttgaggacaaaaaaattttgtgacttgggaaagtagctagcaagcttattcttttagggcttatttttaaacctccaacaaatagtttcacctaacactggtctcaaaagagctttatttgctcattctgggagggaatttctcacaaaaagaagggacattttaattgcgaggagttgaggcttcaaatggactgctt

SEQ ID NO: 141858 - DNA, 317 bp, Glycine max
  Clone ID: PAT_MRT3847_99109C.1
aacaagtttcatattgtggttcaaaaaaaaaaaaaaaaaaaaaaaaaaaaaaaaaaaaaaaaaaaaaaaaaaaaaaaaaaaaaaaaaaaaaaaaaaaaaaaaaaaaaacctcggggggggccccggccccaaatcccccttatagggagtggattacccccccctcactgcccgtgttttaacaacgtgggaatgggaaaaacccgggcgtacccaacttaaatcgctttgcaaaaaatccccttttcgccagttgggtaaaaaggaaaaaggcccgccccgatcgcctttccaaaaattggcccaccctaaaggga

SEQ ID NO: 141859 - DNA, 301 bp, Glycine max
  unsure (1)..(301): unsure at all n locations
  Clone ID: PAT_MRT3847_9910C.1
aattgcnntgacncgtacgtaagctcgnaangnanntcaagattntcgcancgctctnaactcgngctaagncgtggntgggtnncnntgnntntgcgtcgncttggnntanacnggngtgccgcacnctctncaaanagnanngctancgccncatcnaagntcaagctcggccnggcncncgccctntntntctccganctcntagcnctcttnnccgagatangntntgacnncnacaagaaantcgaagggtggnataatcgtaattagtcgcngcancgtcgangcnaagtnagnt

SEQ ID NO: 141860 - DNA, 420 bp, Glycine max
  unsure (1)..(420): unsure at all n locations
  Clone ID: PAT_MRT3847_99110C.1
ctctagagcggccgcgcacccantnttttttttttttttttttttaaatttacacataaaacaacactattaacataacctgttgttttaaacaaagaaatttatatcccctattttacattaaaaaattgtgaaatttactgtctttttattccatcaaaattacctaaatcactttttaccctttttcccaattaaacttctatattcaatatcaaatttaatgtggcttataaaacatttatttttctcctttcccctcacaaaatttttatatttcccactattacatcacccacctaattttcttttatggtccacaataccctctcaatttaatataaaacccccccttacttctacacaaactaaacctagccttctcccttgcttttttaaactcttctactttttaaatat

SEQ ID NO: 141861 - DNA, 270 bp, Glycine max
  unsure (1)..(270): unsure at all n locations
  Clone ID: PAT_MRT3847_99111C.1
aaaccnnnntcttatcncnccacaatanacattntttatcattctacttttttcaatcaacatggactcactacatcttttttttnctctcttcttcctctcaacaaccacattaantnaccttctcctntttcanatcaanacataacttatatntttnattaatccataaccttcttcctatccaatattttcttcacaaacttttacatcaananccctccttataaccttctcatatacctcaccttttaccattaattttctctc

SEQ ID NO: 141862 - DNA, 487 bp, Glycine max
  Clone ID: PAT_MRT3847_99112C.1
ttgttttttttttttcttttttttttgttttttatctttttcgaaggaaggggtccatcggcttattatttgataagaaacaacaccaggctaaaagtctatttgccctataaaatcatgctttttggggcattggaaaattctcttttttgagcccagtttgacagggaacacctgcaaccactgcaacacggggatgaaaactgcgcattatgggggcccaaaagcgggccaatccttggcccccactacttcaaaaacccgtaccattttttccttttattaaaaaattaacgccccccatttttaaaaaaggggttagctttgaggattcaaaaaaaaaggcctggatatctaactccctttttaaagtccacccctcaaataacttttataacaactttttaaagctccatcaagcactacattcccaccttttttcctccttgcaaagtttgaagaaaaaaatatttttatttttcctact

SEQ ID NO: 141863 - DNA, 268 bp, Glycine max
  unsure (1)..(268): unsure at all n locations
  Clone ID: PAT_MRT3847_99113C.1
ctcacaactcagtgaaagagaatccgaggcgaagagaagagaannaattaagatggaggggnaggagcaggatgtgtcgctgggagcggaacaagttcccggagagacanccgattggggacggccggcgcagagccaagacgacgggcanggnctaccaagaaccggcgccggcgcccactggttgacccnganggttttacgttctagtccttttnccgagccngggttagccgagtttgtnggccattttctgtttcncaaacaa

SEQ ID NO: 141864 - DNA, 256 bp, Glycine max
  Clone ID: PAT_MRT3847_99114C.1
ttgaatatggggtatctgaaccaccctattatggctttgcggattattgcatttgagaccatggcttgatctgaattatgaggattcttcttttctttagttgattgttgaaaatgtatcctcctatgggataggatataatatgaatggttcgaaaacggatggattgtgggtgctggttcttaatgtggcatgggccattactgtaatttgtcaccctcctttcctatattattataataataatattgaccta

SEQ ID NO: 141865 - DNA, 353 bp, Glycine max
  Clone ID: PAT_MRT3847_99115C.1
cgcgtcaggggttctactgtatgtgattgttgtgactcgtcctccttcgccgtaacctcctcctttggtggttgggtggttggtttttcccccaacctgaaatgtccttccgccgggggaactggtggttccggaacccctggaagttccggaaccggtgccgaaggtggaagatgttcccaaacctgaactacaacgaattaaccaacaacgaaaacttgggcaagggaattggaccaatttaagcgcaattctagaatgctgaaatgggtgttcccgctgagaaaaatagctgcaaatgtgtagctaactgtacctgtgaaccctgcacatgcacatgaggtgtttgagag

SEQ ID NO: 141866 - DNA, 546 bp, Glycine max
  Clone ID: PAT_MRT3847_99116C.1
tatttttttatcttctcttttttttttttttggtctctctttttctcgaaaagtttcgagagctgctgaattataaatatactttttttgtacaccgaagtggggggattaaaaaatgacatgccaaaaccaaaggttgcatttatggcactgggtatatcaaacctcccttcgaaaactacactttcaaacttgccacttttacatcctcccctcttcaccttgctgtgaaaaaacgctccacccctattttcccttcggcctacatgtgaacataaattcagccggggttaaagctctgttcaaccagtgggaaatctttccttgttcaatcgcctatggggacacagttgcttccctatctttctacaactggcaggaatttctgcgtggcttcataaagggagctggctctttttttgagaggatattcttctttcccactcttgtaaccccaagccaaaaaagccgctgcccatttgctgattcttattctttggcccttgaggccccaaaaaactttgtggcttcgcctgggtggggaat

SEQ ID NO: 141867 - DNA, 480 bp, Glycine max
  Clone ID: PAT_MRT3847_99117C.1
ctcttttagtgcgtctacaagagacctgctgctgagatgattcgtgctgtaaataaatttaaggatgattttggtggacaagttgttgctttggagcgggtgcaaccttcgtcagatcatgttcctcatagtggatgaaatagaggagggatttggctgttatttgtaacagaaagatattgctcatgattaagggaaaaaaccaacaagacaatattaactcaatttagccggaatgagaatgttgcattggatgaatggacatactagaccacaagatatgattgggaatgaatgcattagagaataagttggagctgcatctattgtagaaaagattgtagaagctcatcttatgtgctttggtaggcatatgtggagaagatctacacaagcccaatagaacagatggagagtagcaatccctagtggtaaaggtagactgggaacaactactatcaaaatcattaagaaagattt

SEQ ID NO: 141868 - DNA, 333 bp, Glycine max
  Clone ID: PAT_MRT3847_99118C.1
caaccccaaaggggggttgtaaaaaaaaaattctccttttaaaaaaaaatcctcctgggaccccatgaaataaataaaaaatttaatgttttcccaaccctttagccttcccccccataatgaattttcttttttagggcccaaattataaattatattccccctcctaaccctgtatttcccccccccccccttaattttataaaaacttttagctattaggctatcccccccaatcctgctccaaacccttagctttttttttaacagttttaattccccaagtttgttcctccaagggttttttccccctatattaataggccccctccc

SEQ ID NO: 141869 - DNA, 516 bp, Glycine max
  Clone ID: PAT_MRT3847_99119C.1
caaattgctaagaagcttcagatcactaatacgacgacgcattacggaactaagggttgtgttgtgtcgtttcgttttcactctcacgttctcaaattttgtttgtgtatcgcaggaattaggatccgttatggggttctctgtaaccacgctaattttcgcagtgattggaattgtggcgtccctttgtaccagaatttgtttcaacagaggaccttccgctaatctgtatgctatgcttgcttcttcatttctttctgggacttatgaagtaatttaataattgctgttgctaatcttacacagattacaaataagaaattcataatctcacataactcatagatctggaaaaatgtgttattgccaaacatctttgtggatgtgctgctctatttaattgatagttgattctgctatgaatgccttgatgagttttacaatgtgatgtgatgtatttatattttagtttgtgtcaaagtttatttgtattcttgaataatgacttccttgaat

SEQ ID NO: 141870 - DNA, 379 bp, Glycine max
  unsure (1)..(379): unsure at all n locations
  Clone ID: PAT_MRT3847_9911C.1
cccctccgtccgcccacgcgaccgaccagccnagggcgaaaacttaaagccgaaaccccacgcgcaccccgcgagaaacgcacnggcgaaggaacccaccacgacgngggaagccaaacaaaacaaaacaaaaangacggnggaaacacggggaacgccccgaacagcacnaaagaaaagcaacacaacacgcagacacggnacccncacgaagggaaacagcaacgggggaagggaaccacgacagacaccggagggagagccgaaccccggaacacacaacagcgccgggacccgaggagagaagcgaaacacaggaacccgcaagccccgagacagacnacacaaacaccaaaaggggggggcaggccggagggga

SEQ ID NO: 141871 - DNA, 319 bp, Glycine max
  Clone ID: PAT_MRT3847_99120C.1
acttgtccccttcattatttgggttgtactgcttctcaatgagctgctgtgaccccaaaacatggcaaccgccatgctccagcttacggaaaggacctatgacgaatgctggggtcacttcggtaactcggcagcactcacacatatctcacgctccagggccggtgccaacttcatatacagacattggtggagtctttttgcggcgcaactctgtgaacaaacgcgattggtagccacgagagaggttagagcctatacagcgtctattataactcccagaacgctgaggctcagcccaccagagagctctcttcac

SEQ ID NO: 141872 - DNA, 126 bp, Glycine max
  unsure (1)..(126): unsure at all n locations
  Clone ID: PAT_MRT3847_99121C.1
ggcaaaggctaactcgggagtgcaacacaaaccaaaatctcatcgttncaattcattatcggcacttgnttggagatggataactcntgcncngcgnttnccgnannntcnaaggacnanttgcna

SEQ ID NO: 141873 - DNA, 595 bp, Glycine max
  Clone ID: PAT_MRT3847_99122C.1
ctcgagccgcagctaatgattttgctaggatatttcataggtctactctaagcagaggagttcaggttcagtcttacaaacatgatagtgcatttcatgaattttcctggaagaagtccaaggataaaggtgtaaggagttgtttagttgagtgcattggtgggatcttacacgagtatttatctactgaggtatggaatgttccaattgatggcagaattgctgacttgcagcttaatgctgcagttgaagaagatattagcctatactttttccaagatgctgcaatgctacgtgaggttattattgatggagtaggaatctttaatctgtgccttggaagagattttgtttcaagtggttttcttcattcttcactttatttattgctggagaaccttagttcttcaaattaccgagttagaaatgcagcagattctgtcttgcatatacttaccaccacatctagctatacaacagttggacagttagttttggaaaatgcagactatgtgattgattcaatatgtcaacaattacgccattttggatctaaatcatcatgtgccaaatgtgctggcattcatgctctcct

SEQ ID NO: 141874 - DNA, 129 bp, Glycine max
  Clone ID: PAT_MRT3847_99123C.1
ccgcgctcgagtggttttgggcgtagactcgttggattcctccgctatttatcatcttagaatagggttagggcgagagcgagggaattttcgagtgcccctcggtgaataaagaggttggggaatgga

SEQ ID NO: 141875 - DNA, 1150 bp, Glycine max
  unsure (1)..(1150): unsure at all n locations
  Clone ID: PAT_MRT3847_99124C.1
cccacgcgttcgcccacgcgtccgctcgcatgcccccttggtttagttatgttggtagtattaaattataccagcctcttgcagggattctccgatttgtgggtttatctttagtggcagataatataagtgaagggcttctgtcgcatgtgattgatattctactcgggcacttccgtagattggtttctgagcttcgtttaaaagaatacaataaagaaagctggcagtcttggtatgacaggaatggttctggacagttattgcggcaagctagcacagctgcatgcatgctgaatgagatgatatttggtctatctcgagcagcaactaatgattttgctaggatatttcataggtctactctaagcagaggagttcaggttcagtcttacaaacatgatagtgcatttcatgaattttcctggaagaagtccaaggataaaggtgtaaggagttgtttagttgagtgcattggtgggatcttacacgagtatttatctactgaggtatggaatgttccaattgatggcagaattgctgacttgcagcttaatgctgcagttgaagaagatattagcctatactttttccaagatgctgcaatgctacgtgaggttattattgatggagtaggaatctttaatctgtgccttggaagagattttgtttcaagtggttttcttcattcttcactttatttattgctggagaaccttagttcttcaaattaccgagttagaaatgcagcagattctgtcttgcatatacttaccaccacatctagctatacaacagttagtttgttagtcatgatctttgtttattttccaatttttcttccatgactattgactgctatcttatatggcatttatgtaggttggacagttagttttggaaaatgcagactatgtgattgattcaatatgtcaacaattacgccctttggatctaaatcatcatgtgccaaatgtgctggcatccatgctctcctacattggagtggctcacaagatattgcctcttcttgaggaaccgatgcgctctgtgtcaacagaaacttgaatactgggtagacaccaacatnctgatctaactgttccattcctaaagncagtagtagaaaattgtgaaggcatcaaaacgt

SEQ ID NO: 141876 - DNA, 1714 bp, Glycine max
  Clone ID: PAT_MRT3847_99125C.1
gttctaagaaaaaatagcttcaggtctggtattcctgctgaattgagttcatactatcagcttgagcgattggatatttcatcaaattcatttgtggggccttttcagccaggattgttgtcacttccttctattacttatctgaatatttctgggaacaaattaaccgggatgcttttcgagaatctttcttgcaattctgagcttgatgtagtggatttatcctcaaatcttttgactgggagcttacctagatgtttagtgtcaaattccagcgatagcactgtcctgtatgctagaaattgtctagacaccacgaatcaaaatcagcagccgcagcccttttgccacactgaagctttagctgtgggaatattacctgagacaaagaagcacaaacaagtatctaaggtagttctttcccttggcatagtaggggggactcttggaggagtagcacttgttttgctagttttctttattgttagaagaggaaatgacagaagcaaaacgaagaatcctccaactagattaatatcagaaaatgctgcgtctggttacacatctaagttgttttctgatgcaaggtatatatctcaaacaaagaagttgggagcagttggcctgccgacttatcgaagtttctcattggaagagattgaatcagctacaaactattttgacacagcttctttaatgggtgaagattcttatgggaagaaatgaaaaagagacacagcactcaaaactttgtgcaacacatagagctgatatccaaacttaggcatcgccatctagtcagcgctattggacactgctttgaatgttctttagatgattcaagcgtcagcaaagtatttcttgtcttcgaatatgtaccaaatggcacgctcaggaattggatctctgatgagcatgctagaaaatcctttagttggactcaacgcataggagctgcaattggagtggcaaagggaatccagtttttgcatacagggattgtccctggtgtatattccaatgatctgaagatagaagatgttttattggatcagaatcttgttgcaaaaatcagcagttatcacctgcctttgttgtcaaacatggggaaggttcggcgtggaaattcttccagtggattaaaaaattcaagcaatagtaaaagtgtaaagcaggaagataagtctgatatatacaactttggagtgatactactcgaacttattctaggaaggcaaataaagacagtaaatgatgcagatgcttttagggatctgttgcaagcaagcttaggaggtgatgaagagggtaggaggggcgttgttgatccagcatttcgcaaggcatgcttggatcaatcattgaagacaatgatggagatttgtgtgaggtgcctggttaaagagcccgcagataggccttctatagaggatgttttgtggaacttgcagtttgcatctcaagtacaagatgcatggagaggggattctcaaagtagtgaagggtcaccaggctcagaatctcgagggctacccttccattagtgtcaaaccacaggttttcactttttttattttgtatatttcactgtaagcctaaaaggttaatgcttgcagttgcagatacagcagcatcagaatagtataagttctttatgttggaacacctttgctaaaaaatctgctgagcttccaatgaaaaactatgttgtccg

SEQ ID NO: 141877 - DNA, 2824 bp, Glycine max
  unsure (1)..(2824): unsure at all n locations
  Clone ID: PAT_MRT3847_99126C.1
gtttgagcagagaaaaaagctgaccccttggaaaatggtttccaggcttcactaggatttggagactcaattctgaaatggcttatgcttttactccccaagtttcaattttgagagaatatcaatgcttttgagaatttaaccaaagttctctcattcactgcatgacttggtgctaatggcaaataggcaccacccctcagtgtttctggtgttggttactgttttactttctatccattgctctgagcaattgcaatcctctcactctcagactcttctcagaattcagcagctattgaactttcctgctgctttaagcaactggaacagcaacacagacttttgcaacacagactcaaactcttccctcactgtagtgtgctatgaagacaccataacacagcttcacataataggtgaaagaagagatacacctctccctcgaaatttctcaatagattcctttgtcacaacactagtaaggcttcccagtttgaaagtcctcacattggtttctcttggtatatggggtcctttgcctagtaagatagctcgtttgtcatccctggaaatagttaacatgagttccaattttctctatggttcaattcctcaggaactttcatcactgtcaagtctccaaacactcatttttgacaacaacatgttggctgacacgtttcctcattggcttgattcacttcaagccttaactgtgttaagtttgaagaataacaagttcaatggatctctaccaaaatcgcttggtaatgtggagaatttgagaaccctttcactttctcataatcacttttatggggcggtgcctgatttgagccgtttgacgaatcttcaagtgcttgaattggatgataatgcttttggaccgcagtttcctcagctcggtaacaagttggttatactagttctaagaaaaaatagcttcaggtctggtattcctgctgaattgagttcatactatcagcttgagcgattggatatttcatcaaattcatttgtggggccttttcagccaggattgttgtcacttccttctattacttatctgaatatttctgggaacaaattaaccgggatgcttttcgagaatctttcttgcaattctgagcttgatgtagtggatttatcctcaaatcttttgactgggagcttacctagatgtttagtgtcaaattccagcgatagcactgtcctgtatgctagaaattgtctagacaccacgaatcaaaatcagcagccgcagcccttttgccacactgaagctttagctgtgggaatattacctgagacaaagaagcacaaacaagtatctaaggtagttctttcccttggcatagtaggggggactcttggaggagtagcacttgttttgctagttttctttattgttagaagaggaaatgacagaagcaaaacgaagaatcctccaactagattaatatcagaaaatgctgcgtctggttacacatctaagttgttttctgatgcaaggtatatatctcaaacaaagaagttgggagcagttggcctgccgacttatcgaagtttctcattggaagagattgaatcagctacaaactattttgacacagcttctttaatgggtgaagattcttatgggaagatgtacagaggtcagctgaagaatggctcacttgttgctattcggtgtgtagaaatgaaaaagagacacagcactcaaaactttgtgcaacacatagagctgatatccaaacttaggcatcgccatctagtcagcgctattggacactgctttgaatgttctttagatgattcaagtgtcagcaaagtatttcttgtcttcgaatatgtaccaaatggcacgctcaggaattggatctctgatgagcatgctagaaaatccttgagttggactcaacacataggagctgcaattggagtggcaaagggaatccagtttttgcatacagggattgtccctggtgtatattccaatgatctgaagatagaagatgttttattggatcagaatcttgttgcaaaaatcagcagttaccacctgcctttgttgtcaaacatgggaaaggttcggcgtggaaattcttccagtggattaagaaattcaagcaatagtaaaagtgtaaagcaggaagataagtctgatatatacaactttggagtgatactactcgaacttattctaggaaggcaaataaagacagtaaatgatgcagatgcttttagggatctgttgcaagcaagcttaggaggtgatgaagagggtaggaggggcgttgttgatccagcatttcgcaaggcatgcttggatcaatcattgaagacaatgatggagatttgtgtgaggtgcctggttaaagagcccgcagataggccttctatagaggatgttttgtggaacttgcagtttgcatctcaagtacaagatgcatggagaggggattctcaaagtagtgaagggtcaccaggctcagaatctcgagggctacccttccattagtgtcaaaccacaggttttcactttttttattttgtatatttcactgtaagcctaaaagattaatgcttgcagttgcagatacagcagcctcagaatagtataagttctttatgttggaacacctttgctaaaaaaatctgtggagcttccaatgaaaaactatgttgtccgagcttgcactatgcagatttttttttgtttttaagtacatgcacccgtgcacatactatgtgagattacgtatatgaatcataagatgtcattaattaaaggtcnnnnnnnnnnnnnnnnnnnnnnnnn

SEQ ID NO: 141878 - DNA, 1488 bp, Glycine max
  Clone ID: PAT_MRT3847_99127C.1
cgtctgcgcgggacacggcgcgaggctttctctgctacaaagaagaggtaaaagcagaggcaagaagaagaatagagcaagagaaattggaatggaaggcagaggtggaggagaagtgagaaggcttcacatcatttacttccttagtcagataggtggtcgtgcagatcatcctcatctgattcgtgttcttcatcttgctcgaaatggggtttatctaagagatgtaaagagatggcttggggaattgagaggaaaagacttgccagatgctttttcttggtcctacaagaggaggtacaagagtggatatgtgtggcaagacttgttggatgacgacctcataacccccatctctgacaatgaatacgtcctcaaaggatcacaaatccaccctaccccatttgcaacaactccttcacttgatgaaaagaaaactactgtttgtgatatccatgctgagaagaaatgtagtcaagtacaaactatagaggacaaaaaccagcagccgcctctagcagaagaagaacctcgaattcaacgagacttggatttgaaaacggatactccgacaaaagggtcatcagaaatcagccaggactcatcattggtcttcagctcagacaggtcatctgtgacagatgatgactcttcaaaggtcgaagaagagaagcatttagaggcaacaggcaaagacggcttcaacgaaatcaaccaagacaagttagaggattgctcattgccttccttgtatcacaatctgttgagtacgaaggctagccacaaagatgacctgaataaaaccagctcacctgagtcatcctcctccactatatcatcatcttcatctcaatcctcctttactaagatcaggagcaattctgccagagtttctaatgtgttccgcaattggatcacttgtggcactgtggaaacaaatgatgcagccctggtccaaatgaacccggctcaaaagaatttatctaaggaacctatcaacatacctgaaagaagggctgagatttgtaagggagacaaattgggaggatcagccaggtgttttagaacttcttggggccctcatcaccagaaacaacaatatggggcaagaaaaagctttgaaggaaatgaaactaaccggagcaggaaaaagttaggggagttgctaaatcaaacttcttccaaaccatttggtggaccaacctgctcgcaatgcgggaagtcgtttaagcctgagaaaatgcacaaacacatgaagtcttgtaaaggaatgaaagccttgggaaagtcctccacaactgttgaggaggcacagcttcagggatcatcagcttcttatacagattactttttgaccaactaaataaatgtgaatacattgggttaattaatgccttggctttcatatcagaagaaggcatttagcatttaaattttgatgtagcttctcacttggtctagtgtccttataaaaaagtctttctttcg

SEQ ID NO: 141879 - DNA, 257 bp, Glycine max
  unsure (1)..(257): unsure at all n locations
  Clone ID: PAT_MRT3847_99128C.1
ggtcaatgcttcttcttctagttctattcatcnccatgaaatagaaatgggtcacctagatcatgatccgccacaaaatatcaatgagcccaactcaacccttgtgagttcaggttcgaatcaacacgagattgatattgaacacaagaaagaattttcttttgagaaaagatgactataagttttataagaagaaaatagtatatacacagatgatttaaagttttttttatactatcattcaattagaaatcatt

SEQ ID NO: 141880 - DNA, 707 bp, Glycine max
  Clone ID: PAT_MRT3847_99129C.1
aacagatttttctagtattgaaccgaataaaaacaacttacagtttcacagttccagaaattaagccacgtcgtaccttccataattatgttttttcctcaatcctttttacatgcaaactgtggtggagcttattgtgttggtgcccaatcacaaatctcttgaaggatttgtaataaagggccagaccaggcaccatcaccaaagtttgattaaaatgggttgcttcccatgctgtaagtcagaggctgaatcatcctcttcaaatgcatccgccggaaaaatttccaaaggaaggagaacattcaaatcattggcttcagttatgtcacataaaacaggtagtagcaggcaaagacggatagatgcagagataagaaaatatggatcagcaaaaaacgatgtcaaagtattcacatatgcacaacttgctgaagctacaaacaactacaattctgattgcctggttggcgaaggtggattcgggaatgtctacaaaggattcttaaaaagtgttgatcaaactgtagctgtgaaggtactaacagggaaggagcgcaaggaacacgagaattttttgcagagattttgatgttgagcatggtgcaacacccaaatcttgtgaagctcgtgggtttattgtgcagaagaccacataggatttttggtttatgaattcatgtccaatggggagtttggaaaatcac

SEQ ID NO: 141881 - DNA, 333 bp, Glycine max
  Clone ID: PAT_MRT3847_9912C.1
atactacgtacaacatggatacggtgttgtgtattccaactagtccttgtgtgatgcaggggttatcaaggtcgttgcaccgacactgtacgagactcttaataactactacaagctagtgtctcttggcttcaagattacattcttgtcaggtagtacactgtgcttactggccgtgacactagcttactttcagaatgctggctaccacacatatgaaaacttaattctcaaggatccacaagatccttgcactccaaatgcaagctcatactgaacatcatcgatagagacactgatgaggctgggatacaacattgttgacatcattgt

SEQ ID NO: 141882 - DNA, 399 bp, Glycine max
  Clone ID: PAT_MRT3847_99130C.1
caaacaattcaatgactttctaatattatagtggggtcatacaagtactgatttaaaggcatagttggtcataaaaaggaaacctgtctgctgcaaataaggaacaaaatcaataaaaaaaacttaattactgttttcgtcctcaaattcgagacactgcttttctcaatcattgacatttaaattttcttttattattctctgaattctcacaaaatattattttagtcattctcatgataaattgacaatttgtggcggttttaagccatcataaactaatttttatttttaccggtagaatttacattttaaaaccttaactaaatttcaatttattatctgcgaattaaaaaaagtgattttacaaaatctaggataaaaaaggaaaatttaaat

SEQ ID NO: 141883 - DNA, 514 bp, Glycine max
  Clone ID: PAT_MRT3847_99131C.1
tgtggcgaaggggaccgttcgagtcggggcggtggcgagcatcgcgagttcgatcctaccgcccgcgatcgagcgtaccttgaccaatggcctgggcttcattttgaagtctttgaaggcgtctgggacttgttggcagcgagtttgtcgaagcacgagatcgatcttgccttgggcgccgaagcgccggacacggacgaaatcgttgcaattcgtgattgctgctgggaggacacgagccacgtgatcgttgcgtccgggcaccctctcaggcgccgtcgaaagttgacgctcgccgatacgctccacgagaaatggacgatcccgccgcccggcaccggaccgcatcagcacgtcgagcgtgtgttcgccgagcaaggcctaggcatgcccgatgtgatcgtcagaacacgctcgatcacggtgctcaagagtcttgccgtcgattccgggtttctcagctggatggcagagccgatgttcgagccggagcggcgcgccggtctcattgctc

SEQ ID NO: 141884 - DNA, 457 bp, Glycine max
  Clone ID: PAT_MRT3847_99132C.1
cattatccatgttgacatggactgcttttttgtctcagtggttatcaggaaccaccctgaattgttgggccagcctgtagctgtatgtcattcaaataattcaaatggaactgctgagatttcctctgcgaactacccagctcgtagtcatggtattagggctggtatgtttgttcgagatgccaaggcgctttgtccccatcttgttatctttccatacaactttgaagcttatgaggaagtagccgatcaattttatagtatattgcatcagcgttgcaagaaagtgcaagctgtaagctgtgatgaagcatttttagatgccacagattcagaggttgaagatcctgaactcttagcttcatctattagagaagagatctataagaccactggatgtacagctagtgctggtatagctggaaatatgcttatggctcgtattgctactagaact

SEQ ID NO: 141885 - DNA, 851 bp, Glycine max
  Clone ID: PAT_MRT3847_99133C.1
ttcgagccgaaatttgagatttgacaaagtattaattcgaatcttaattatttctgagcacaccctccttctcattttcattatctagctagcgttaccactttcaatttcaaattcactctcagaaattagaatggctagccaatcaaacactaaatcagttcacgatttcacagttaaagatgccaggggaaataatgttaatctcgccgattacaaaggaaaggtccttctcattgtcaatgttgcctcacaatgcggcttgactaattcaaactacacagagcttaaccaattgtatgagaaatacaaagggaaaggacttgaaattctggcattcccatgcaatcagtttggggctcaggagccaggaactaatgaagagattgtggagtttgcttgtactcgcttcaaagctgagtttcccattttcgacaaggtggatgtgaatggtgacaatgctgctccactgtacaagtttctgaaatcaagcaaaggtggactctttggggatagtatcaaatggaacttctccaaattccttgttgataaggatgggaatgtcgttgaccgttatgcacccacaacttctcctctcagcattgagaaagacataaagaagctgctagatgcatgaatgactggagtggccactaaatgaataacatcatgaataacatcatgaataatgtactgcagatcagatattaattagtggaatttcctccgtatttgtactgaaacagttgctctgctcatgtacctctgaattactatttgcttgttcatctatataaaaatgtgtatcaatttatatataaacgaaattcattgcttgtttcttattatat

SEQ ID NO: 141886 - DNA, 1503 bp, Glycine max
  Clone ID: PAT_MRT3847_99134C.1
acacgcgtccggccacgcgtccgcccacgcgtccgaaaagaagcatgagacggggtggtgaaaggtgaagagaagaagaagagtgaaacgcaacgctcgcagagcagtgtcgaacgaacgacggtgccgttcaaccttgcaggatttgcctttcatctatagattgttgattaattaaaccccaagacttctacacatcaatgaccacgtcagctccaaaatcctctggatgaaaaatggacgatggtctccaacacgaaaacagcaggcataagatggaattctacagaggagcacgtcccctatgggatgctgatccacagcatcgcagaaaaagagccaaatgcactagttatgaataagaagattaggtccattatggctgaaaggcaggctgccattctagaaattgaactagagactgctatatctgaaaagaatgaagccttagctgctcgagatgcagccattcagcagagggatgaagcacttgctcagagggataatgcccttttggaacgagataatgcccttgctgcccttcagagtcggaacaattctgtcaacttcccattcggtggtggaattcaatgtggatcaaaacggatgcaccattcttcaaaccatctatctaacatgactgaagctgcatacagcacaaaggatatgataataagagatgcctccccggtgactgttataccttctgaagctgtcaattctcatcaagcaaagagaacaaagcagaacaaggtaattaattcaaaggcatcaaagccaccctgcaaagtaaagaaaatgggggaggatttaaataggcaggcttcttctgaagggacaaagatcagatctgaatgggataggcaggatgttggcgtgaatttggttgcatttgatgaaactatcatgccggtcccagtttgcacatgtacgggcataccacgacagtgctacaaatgggggaatgggggatggcagtcatcttgttgtaccacaacattgtctatgtatccactaccacaacttccaaacaagcgccatgcccgcattggaggacgaaagatgagcggaagtgtcttcacaagacttctcagtaggttggtgtcagaaggccatgatttatctataccattggatcttaaggaatactgggcaagacatggaacaaatcgctacatcactatcaagtaacctgctgacattcacatatgtatcaagtcatgttcagttttggacctcttgcaatgactggcctctaaccttgataagcatggtatggttgaattttgcgaacactgatacggctggaccctacttttatccttataaatgggatagctgtgaagtatcatgtatgtacatgtgactttctaggtgactagaagtagatcccattgggtccctgcatctttttcagctttgtctgtccattatgaatacgttgcgtaggaaactttctccatcttttcttgttctgtgatcctttaatcaatcagcctttat

SEQ ID NO: 141887 - DNA, 237 bp, Glycine max
  Clone ID: PAT_MRT3847_99135C.1
attttatataaaaaaaaaaaattaaaatataaaaaaaaacatataaaaaaaagagaaaggatatattaaacgataaaaaataaaatcaactaaaacaatttatccttcttctattttacaaatccctagttacatataccgactacttcatcccaaaagctcttgattccttcaatattgtttaaatcatttaagcaaatggtctcccatgaaccatcattaagatcactttccttc

SEQ ID NO: 141888 - DNA, 657 bp, Glycine max
  unsure (1)..(657): unsure at all n locations
  Clone ID: PAT_MRT3847_99136C.1
tggtannngcnnctaagaaagtttgaagtanacaatcaagattataacaaaaatcaggagcacagcaatggtgctcaaaatccatttgcttttgtccatccttcttgacatgttagacaaaattttcttgctcttgtctgtgttatcatccactccatgaagctgcatgatggaatataaccatcagtggataaaatgcaatctacaggtgcaaatatatgtgcagaaaatattaataaacctatatgcagaaaatttttaaaatatatgaaaagcaatctacaaatgatataaaactttagataaaactgaaccgatttctcgcattactcagtccaaaggtacaactccagaaacgctgcatgctaaagaagctagtaagttatcactataggaaagtaaaatcctgaaaagcatcttattaataactaacaggaaagagaaagagttaccgtgtcatgtgtatgcagtagngattgtctctgtgaatgcaaatcttgaagaatcgaaatgccaagntcttctgtttccaacattnntcctctactgtcgttaattctgtcactggacttgttcaacctttnnnnngatatcattaatctttctctttctctatgnnnnnctgatgcctttgtaatcatgtcagcaatacgtgtc

SEQ ID NO: 141889 - DNA, 1568 bp, Glycine max
  unsure (1)..(1568): unsure at all n locations
  Clone ID: PAT_MRT3847_99137C.1
tacggctgcgagaagacgacagaagggcagatggtgtagtaatacccaaaaaggtattaaaagccattgatattaaaccttttcctgtgctatggcatgaggacaatattggtcaaagacagcaagcaagagaaaggctacaagtacccggagcaatagctggatctcaactgggagaagcagctcatcgacttgtcaaaaataccctcaacattaaatcaaataatacctcccatggattgctggagcaacctcctgtccatcatacaatgaacaggcatcgatcagctggatatggaaaatattacggtgagaatataagtggttattatggacaatataatcaccatggcatcactagacctaaatatggtggacagaatgacagacagaatttgaagatacaagataggttacataatcaagaacagtttcacaatacgaaaagtgagtttgttgcgttaacaatggaggaaggagagaggcctaggtcatcgaggcttccaaattccagaccagttaccaatttacaaccccggtttatgcagaacatggatccttcaataccacctccaaagtggatgactagaacaccacctatgaatggcatgcatactaggcatcaagaagctgcattggggccagcaactcatgataagcaaaccaagaaggtttaccaagttaaaacacgacagccagatacaccagaatatgggaagcaatagtggttgttatggaatttatctgccttgtgtttgaggtgcctattcttttctctgcccgctcctcaaattgcagctatgctctctttgtggtcatccttgtcaagtaattgattgtagaggtgcatgaatttgattgcaattcgatactctaatgccattggcagatcaatgctgtttaaagttttctttgattctaatgtgaagtaaagatctcgctttgcagtgtcttgaatagacatgataccacattgatagttggccagactttggaaaggtggtagaactagccacatatttgcggttttaaacaaatactcatggaactggttgcgagttaaacaaaatttacgggctaggaatcagcacaagtgttgttttattccattccatggatatttatctgggattgtcatgcccagcatctgtgactgtatgttgcacgggatatagaaactattacatggatcaagctgccctagtgactgacaattccgctcagctatatttgatgaagggtccaaggggagggggatgaacttttatttaaagcatattttcgacgtacccaacggagtatgcttgcggccaaagcatttaaattctaacattcaggaacggtgatgctcttgttttggtgccttctttgatcttgggccaggctacattgtgtcaatctgtcagggttcactatcttaaaagttaagcagcatagtacggttcagttctattttgggcaacattatgtttcattagttttttaatttctattaattagcttacagtatttatagttaacataagttataatgatacccagataaaatgctaacagcacatgggnnt

SEQ ID NO: 141890 - DNA, 468 bp, Glycine max
  Clone ID: PAT_MRT3847_99138C.1
gtggttttttttttttttgggatccatgtaatagtttctatatcccgtgcaacatacagtcacagatgctgggcatgacaatcccagataaatatcctacattgcccatcaaacaaattaaattctattcacatcaggtgtgtacatacaggttaattgttatgcagagctagtaagccatacaggattttacataccccaaacaataacatagttccataccatggaatggaataaaacaacacttgtgctgattcctagcccgaaaattttgtttaactcgcaaccaggtccatgagtatttgtttaaaaccgcaaatatgtggctagttctaccacctttccaaagtctggcccactatcaatggggcatcatgtctattcaagacactgcgaagcgagatctttacttcacattagactcaaagaaaactttaaacagcattgatctgcccatggcattagagt

SEQ ID NO: 141891 - DNA, 570 bp, Glycine max
  Clone ID: PAT_MRT3847_99139C.1
gattaaatccttcccactgtgcccatcaacagaactatggcactctagcctgatacttattgttttaaatacaaaataaaatatttcatttactttatatttgtgctttttatgtctcctaggatgttgtagtcctttaatgaagaaaaaatagtagaagaatgatgatagaatctaggtttctggtgatttatttgtttttgttgattcagagaacactgtttttgtgaaagaggagcattacagttttgacaagtgagatgagtggaagtggcaaaaagcgctcttcaaagtgggatttgagagacaatcctgatttttctcctgatgatggtaagcaattgcggtctgggtggtcctctgcaggtgataaattaaagcatttttctggaggcagaggatcaaataaggataatattatgaataaagattatagagttttggattcaacaatggaatgggatgaggatgaaagttatgaccataaaatgtctcctgggttggatgcatggaaacataagagacataatagtcaatcccccaaaaatggttggagcaggtcggtcagca

SEQ ID NO: 141892 - DNA, 653 bp, Glycine max
  Clone ID: PAT_MRT3847_9913C.1
gatctataacttttatattgctcccaaaatgtttatttgtcatgtttaaaatacaaaaccaaattcagatataggaacacacaaaaacattcacatgtatccactgtttaggcctataaaacccatctatacatctcacccatgaacactacatgagtaaaaagcaacatagctttaaaacaagttggttaccagtaacactgtcagatacaagttcatagtaccacttgaaaggataaaacagacattttgtagaaatgggaaaattagtttgtaagatttcatgaaaacgttctataggattaacaagcttgtcggtcagctaacaaggaagttacagaaccctctgtaaggataactacatctaagaattggactcaaggatcaaagcaaagcaagaagcagagagctaaatcctgctctctggagtgaaagcgggttgcttgggaactccagttgctaactagtcactaacagattctgatgagcactaggctattccaccaatatgcagagtatagttctttaggaaaagcagagtttacgctgccagatacagaacatacatcactgaacacacagtggtcctgctgatcatgggactgaacggccacagcatctttattgtacgatgtcacctatcttactgacag

SEQ ID NO: 141893 - DNA, 497 bp, Glycine max
  unsure (1)..(497): unsure at all n locations
  Clone ID: PAT_MRT3847_99140C.1
ccacgcgtccgattctttcagtctctgtgagatcgttagggctttttgaaaccctaattatccctgtgacgactcactctttttacactaaacaacgtagccagactactacangtgtactatccgttcgggactaatgcttgatgaccatggtcacgattactgcctcctgtctgtctgttgatagtggaccgcggaaatcaaacgccgctacttgagagaacttcttcaatggttgtggccaagtttgcgcgttgttctgctactaaccgactcgattctacaattacaaacttctttgactccgtcgcactctgctaaggaggatgagattagaaggatgaactatgccactactgcctaacgcagcgcgcagagcccgccctgcagacgtatcagcaacaacgctaaccacactgacagcttcgatagcagcatcagctgcatcatacactcctggtggaactagaggctattgcgacgaggactccacagct

SEQ ID NO: 141894 - DNA, 254 bp, Glycine max
  Clone ID: PAT_MRT3847_99141C.1
ctcatgttttcccttcagaaacgtgaagttagtgatgccttcaatcattctgatcctcatgggttggtacctggtctccctgatccagttccttctagtgtgtttcctggtgcttagtttaacaaacaacgtggatatgctccttattatgaacttgctcagaggttcaaggactccgaagggatcattgctaactctgggtccgagttggagcagtatgctacatgcatgcttatgtgatggtcaaattcaaa

SEQ ID NO: 141895 - DNA, 120 bp, Glycine max
  unsure (1)..(120): unsure at all n locations
  Clone ID: PAT_MRT3847_99142C.1
gacnangangccatttatgacatctgcaggcgttcactggcgcattgagaggccaacctacaccanccntatcgtnnagttnctcnagtgatanccagcagtaacngcnnccctgaggtt

SEQ ID NO: 141896 - DNA, 431 bp, Glycine max
  Clone ID: PAT_MRT3847_99143C.1
gatcctcaaaaattaagtttagcttaccaatatcaacacatatatctcagctttcttccatagcattttctccttagctttcagcacattcagtttattccttactgtttggaataatattcgagttttgatcatccaatttgaagaaccaaaggtttgttcgtttatttatagcttatatcggtcatttttaatttgtttaagattgtaagaaattacactcagaaaaaaaaacgaagtgcatttccggatccaatttcaactttatgactttatatacaaatattagaaagttaaagaaaacaataaatatatatcatagtttaagccaccatttgtaagctccttaacacttcttttactgaattcattgtccaatatatagaataagtacttgtgcatacttcattatacaagtagcttttcttatc

SEQ ID NO: 141897 - DNA, 440 bp, Glycine max
  Clone ID: PAT_MRT3847_99144C.1
ccacgcgtccgcacatactgagctcaagcaaccctcatacttagctcctggttgctcaagcaaccctctcaagcaaccctcaaacttagctcctggttgcattccctaaagttcatgcatacatatatagccttccactcatcatatgctggtatccgatctatatatagacacatatgatatgttgcatatcgccaggttctcagatcaagtcccttgtgtagtatgagtggaaacctatctaaataatgtgtgtggcttctgaaatatgtggtgttattgtactgagctatgctcaatagtaaacaacaaattattgaaatatgtcgcgtgtgcgataataaagtgacttcgacagaccctaatgtaacacgtttcaagaaagctataaaggtggaatcagaggaaaataaaaaaaaaagggcggccgttctagagga

SEQ ID NO: 141898 - DNA, 261 bp, Glycine max
  unsure (1)..(261): unsure at all n locations
  Clone ID: PAT_MRT3847_99145C.1
accagagaaacatgactggaacgctaatttatgtaggagcaaaatgatatagttaattctgcatgaattagaaactcaaattgtaagccaacaaaataatttgaagtgtattcagagtgggtatggtagtttctttttttcacacattgtttgagaaggttatacatagatttctacttgaatgaaacttgttttaaatgaaaaaaaaaaaaaaaaaaaaaaaaaaaaaaaaaaaaaaaaaaaaaaaaaaaaaaaaaaaan

SEQ ID NO: 141899 - DNA, 149 bp, Glycine max
  Clone ID: PAT_MRT3847_99146C.1
cacggcggtgaactgcaaaacgattgggaaaaccatgttaatacccttgttaatcatcttgctttacatacctgtttggcagctgcattttttttgagggccgttccgatcggccttgcaaacagatgggcaaacggaatgggcactgg

SEQ ID NO: 141900 - DNA, 318 bp, Glycine max
  Clone ID: PAT_MRT3847_99147C.1
gtcaattgcttcttcatctctctatgtgtgtcaaaccccaattatattcatgggaggggaatctggggacttatgacttatggcttgatacatatatcaagcatgcaatccgaacttaaagaccttgattctaaatcgacgaacggctacggtaacaacgctcgcgatgaccgttctctgatgaagccgttgactcctgcatccgacgacagcatcgtcgatatggagaaaaaattcgccgattaggtcctgaccgacacgttcgcaaacatcctactcaactagtaggctcccaaggagaaacttatggtcggctta

SEQ ID NO: 141901 - DNA, 372 bp, Glycine max
  Clone ID: PAT_MRT3847_99148C.1
tgggactccatcaatgcagagcatgacagggccgccggacttgatcacggtacaatagtttggcggatagccgaggactatcctcatggcgagaaccttaatccgggcgtcccgggatattgcccaaggcctgctccccgtgatgatcatcgacgggccctctggcagtgaggagggagcacaaaaccgcaaaagaggttaagaaggaactttgagaacccgaagaggtgaagctagttatgctcaactttggtgcgcagccatcagaagtgaagccaaaggaggaatccttaccaccgggctggtagagcctgacaagtgagcctcagagactgcagaccttccgaaaaacgtgcaaaacggctaaagaag

SEQ ID NO: 141902 - DNA, 401 bp, Glycine max
  Clone ID: PAT_MRT3847_99149C.1
ttttcatactcataacaacaacttcttctgttacaaactcatcttcaataccttttctgatctacgcatggataacgatagttttatctatctacttagacatgagcgacatcaatgatccttcgatctttctatgccccatgtcgctagatatcattgacgagatccgagtgacaggtctaatcgggcatcaccatacaaccagggaaagcatccaaacctgattgttctcgaagaaaaacacgacatgccccattaccaaactggccttgatagattacacccatctcacaccataccacaccctttatagactcatccatgcgtggtgttgcatgaacgctgctcacgagatcgaaaggatccccacccctaaacccccctttaaacagaaccaaatt

SEQ ID NO: 141903 - DNA, 364 bp, Glycine max
  unsure (1)..(364): unsure at all n locations
  Clone ID: PAT_MRT3847_9914C.1
cggtccggaattccccgtggacccacgcgtccgctttgtttttggtgagtcttggatatgtcatatgattggacaaccaatccaatcaggaacgaaaaaacagcacccttgtaactcataggtatgtaacttgagacagttttctgaagnctgcgaacatgtaagagaacacttggtccaattgaaatctctaattaagatgatgttttttcaaaaagacggtaatgtagaaatggtattgtctgaaatagtacttggtagtcgataacaagtacataagtatgatctgtgaccttcctcacgagtagngtgatccccttttttgacacgagntggctctctacatgaggaatatcttggattt

SEQ ID NO: 141904 - DNA, 254 bp, Glycine max
  Clone ID: PAT_MRT3847_99150C.1
ctcacgcgcacgacatggaggttgcagagcgttgattgtgtaagacatgaaagctctaaggtgtaatcctcacgcgctgcatcatggctgtaaccttttcatcataagctgcatcctgcatagtcactcaaccccaaactgaggaatttttgaagctcaaccaaaccaagccacagaatgatggtatgatacggtagttacacgtgaagcataaaaacataggtgcggtattatctgctacaccagagagttca

SEQ ID NO: 141905 - DNA, 344 bp, Glycine max
  Clone ID: PAT_MRT3847_99151C.1
cctcgagccgattcggctcaggtgtttctgcttacttcaacaagccacacactgagaggaaccacaagacttcgtattcgactactgttcaaggtgttgttgaccatagaggggttttcactgatgtgtgcattgggtggccaggttcaatgggtgatgatcaggttttggaaaaatcatcgctttttcatagggctaacaatggagggattaatctaagtggggtttgggttgttgggggttgtgggtacccgttgttggattgggttttggtgccttatacacagcagaatctcacttggactcagcattctttcaatgagaagattggagaggttcggagg

SEQ ID NO: 141906 - DNA, 334 bp, Glycine max
  Clone ID: PAT_MRT3847_99152C.1
aaccctctaatttggaactaaaaattggggggttttggccccccataaaaataaagcgggttttgcataatgggcaaatcgccataaccctttttttttttcctccacatggggggtgaggccttttctatatagagaccaaaattgggattatcataaaccatttttttggggcaaatgcttcttttgtgatcgtttagaatatttactaggtcgcatgggaaacattgatggaaggggggcttttgggaagtttcctgaaaggcaaaaactaaaagcttttttcccggtaatatttggcccctttgtttgggcattccacggttttgttttt

SEQ ID NO: 141907 - DNA, 3025 bp, Glycine max
  Clone ID: PAT_MRT3847_99153C.1
agttattaaagtacatataatccatataacgttaataactctacactgaaggtccgcccgggtcgacccacgcgtccggcgacacagccagcacaataagtacattcgacatagtttggttaataaagtgcatgtagcccgtagaacgtgattaactccatactgaaattaaatagttcatacccttggagctttggccaatcgtccgggaagccgaaccaacgaaccaaccccaaacccctctttttccagaactttcatgtccatcttgccctcacaaacccaagccgcatcttcgtcttcttcctctgcgccatctcctaaccctaattcccaacatggaatcggaatccctattcctcaacccttcccttctctttccccctcaccaatcaacctcactttcggatctctccagatctccgataccccaggttcatcggcttcagctgctcaagattctggtggatcttccgaaaaggtgacagaagtagggtctccaagtggagtaatggtttcacctcagcaaaactctagaacaggttctaggagtcatgggggaagacggactggaatgggaacaggaacagcttcttatcatagaaatcaacaaactcctgggtccgtccattctcacggaagtgccccttcggcggggagaaaagctcagacggtgaacgggaattacttgctgaattttcaatatgacccgatatcccgttctcaaccacggggtcctcctccttcccctaccactacaagaaggcatcggaagaggaagccgtacaacaaagagtttgtttctgcaggcaaattacaagttcatggtgctaggtttgggaaattattcacctgagtcgatggatccagataaaatgttgcagtgggaagatattatatgtgtgacatatttgaccccattttcagttcagtgtccaatttgtttggagtatcccatgtgtccgcagataaccacatgtggacatattttctgtttccgatgtattctacagtacttattgatgggtgaagaggatcacaaaggtgatagctggaaaaggtgtcctttgtgctttgtgatgatatctgccaaggatttatataccttgcacatcacaaatgtaaaacagtatcaagtaggagataatgttgagttcacctttttaacacggaaaaaggattcctttactctgtcacttaaaaataaacgagagacaaataccacatcaggtgtcgatggagatatctgtgatcccttttctaagttcactcttatatcagatgtagatctctcagtgaagcatgcaatatccgatctagatggttggctagccagagctgattcaggtcttgttgatgacctggagaagcttccttatgtttgtgctgcaatgcaacaattagaacagaggaagaggtattggagtgagcacaggtctcatgacagtgaaaaatcttctatgattattgattgtggacaccagataccatcaacagttgcaaattctatggatactgatgatgaaaactgttctaatggatcaataacttcttcttctgatttccttgatcaaaataaggttatgatgttggataagtcaactgctggagcctgttcggatcaaaacttggatgtggagaaagaattaatagagcaggaaatgaatttatcttcttcatatgaggagaaaaatgataatcaaaggcattcagaaggtgttattggagatgtgaaggaaaatagttcatacagtttctaccaggctgctgatggtcagcatctaattcttcatcctctgaacatgaagtgtttgcttcaccattatgggagctatgatatgcttcctcacagaataagtggaaggattctacagttggaaacagttactcagactgaagccatcaggaggcggtatcgatttcttagtcattttccattaaccacaacctttcagctttgtgaagttgatttgagtgagatgttgcctcctgaagcattggccccatttatagatgaaatcaagaagcgtgcaaatcagaggaagcaacttgcaaaaaaggaaaagaaggaaaaaataaaggctgaagctactgctgcttattctcttcccatatcattaagtcatcagtttacttctcgcgatgatcctccaacattctccatggatgactttgaagctctaggaaattcaactatatcatcaagtcctcccctagctggggagagaaaatcattctcaaatgttactaggcttgggtttgctgctgctcatgattctccatccttacaaattcaagaaactagtggtctacataataacaacaggacctctgattcttctgtctcaacaggcttgagaaatggggagacacaatcatactccaatgttatatcaagagcagaatctaatataagctcgaatgcaccaaagacaaatgagttggggaagaagggaaagaaaccaaatcgagttcttctgtcgacagccggtggtaggcgttattgattacttggttgccgacccttacccttaccctagattatgtgggtgtcaaatgatacccaaccttctcccggctagtcccaagccaaactcttttggcagattatttcagtgtagagttattaacgttctatggattatatgtactttatgcgctcttaagtacttatagataagtagatatgtgtggagtgaataaatgtttttagcaataaacaagccaaaacagttagaaggtcagtatattgtttctgtggatctgtagaactgtgctggcgttgggtatgttaattaaatccagactatgagcattgactatacacaagacatttaaatttggaagcgggttttgttaactacagattgattttttaaacaaacaatgtgtgtaattgcttagtcgaggtgatgcgtgagatatcagtatgcccttatgcgtgaatggtggagaacagtgacctgtattcttactaaaaatcttaagaataatcaaaatgaactttaaaaacatactaaaactc

SEQ ID NO: 141908 - DNA, 339 bp, Glycine max
  Clone ID: PAT_MRT3847_99154C.1
aggtgtgcgaacaggtgtgagaggacgacggatgggtacggttgcgatactactactgaaggggagacatagtgtcacgcgagtgtacgcgctgagtttaggagtgaacaacaataaacatctccgattcttacaatatgaatgatacaagcttatgtacgactgcatacgacgtcttattttacgtatatcgtgacctaaggtatatgcaatggcctactgaatacaacctcttaactgtaaaaacggttattgttcccgacgtaactgcctttgaaatcatgcaaatttatgcagttgctgtagtaacgaaaatgaccgcatcgatagctgttatca

SEQ ID NO: 141909 - DNA, 172 bp, Glycine max
  Clone ID: PAT_MRT3847_99155C.1
gcggcgcgtgcgtttcattgttcgtaggtaagcaagaatagcgtcattgctagtgaacagtaacgttactcggtacggacttgcaactaaccgcggatcattgtagacgctagttgtgtaggagcttgcattgtatataccgacagggttgaaggcttggcattgtatgcca

SEQ ID NO: 141910 - DNA, 419 bp, Glycine max
  Clone ID: PAT_MRT3847_99156C.1
cccacgcgtccggcaacctgagacgcgaaacttacagaatgcccagacagaacgaacagacacgcagaggcacatgccatagacatgactgcgaaaagcggagagaaggagcgagagaacgagatgagcagagcgcgggggatagaggaagcgcggcacctacgaggacagatacgacagcgccacgaggcccaccgcaaccgacgacgagaacgacccggacccacgcgacggccgactcaaacaagacaacaacgagcccgagcacagaaccacaaaacacaggcacaaccccgacggcaacaacaagcgcgagacctacgaggacacgctcggacacgcgccgaccaacggaaacaacctggaccacaaccacaaagagaccgggcaagacgagcgaggcctaaacaccggccaaa

SEQ ID NO: 141911 - DNA, 262 bp, Glycine max
  Clone ID: PAT_MRT3847_99157C.1
ggtactcctgcaagcccagccggcggggcacgcgctgtcttgctgatcgagataactagcaacagtgagacgagaatgaagggccttgggtgcttacgagctacatatatggtatgcatggcaactgactgttcgtgcgatatcgctcgctctcctaatgacaactggctatggtgcaccgactagggaggatgagactcgcaagttggatgcttgctgtggaagtgcatagcactttttgctttgataccattcatgaaga

SEQ ID NO: 141912 - DNA, 279 bp, Glycine max
  Clone ID: PAT_MRT3847_99158C.1
cggggacaggatggatttttttacattagacatagctgttgatgcggaaggccatcatcatctgcttggggatccctaataggtgtcaattctacagtcacagtaaacacagggattacaacataactccacagcactaataatccgtgccaatccatcagactcgttatatccttaacccataacaaaagctggccgtccatgaagtgttccaacttcaacccctgcaggctcctgcccaacacgaacaagcccgccaggacccacccgcagaaccgg

SEQ ID NO: 141913 - DNA, 2112 bp, Glycine max
  Clone ID: PAT_MRT3847_99159C.1
cctggttccagtgaagcagatgagatctacaaaatatctcgagccgattcggctcgagcggctcagggggagtgtttggagagccattaataagcaaagtggtgaagttgttgcaatcaagaaaatgaaaaagaaatattactcttgggaggagtgtgtaaacctgagagaagtcaagtcattacggaaaatgaatcatgcaaatattgtgaagctgaaggaagttatacgagaatgtgacactctgtgccttgtttttgagtacatggaatacaacctgtaccaacttatgaaaaacagggaaaagctgttttctgaaaatgaagttagaaattggtgttttcaagttttccaaggtttagcttacatgcaccagcgtggatactttcatcgtgatcttaagcctgaaaacttgctggtcaccaagggtgtcatcaagattgctgattttggcctagccagagagatcagttcactaccaccctatactgagtatgtctccacacggtggtatcgtgctcctgaagtcctgcttcagtcccatctatatagctctaaagttgatatgtgggcaatgggtgctataatggctgagttgttcactctgcgtcctctattccccggttccagtgaagcagatgagatttacaaaatatgcagtgtgctaggtagtccaaccactgaatcttgggcagatggactcaaacttgccagggatatcaactatcagtttccacagcttgctagtgtacatctctctacactgatcccatccagaagcgatgatgcaatcagccttgtgacgtcactttgttcatgggatccctgcaagagaccaactgcagcagaggttcttcaacatcctttttttccgggttcagagttgcttttacatccctccatcccttcgcaccagagctgtaaccagaactccaccatctgctgggaccaggggatcactggatcggctgggcctcaagagatactctggtgctttgcctaatacaaaaatcaccaacaattttacttccccaaaagtacaagcttctatagcttcaggtgtgcaaaggaagctggatatggcaaatgaggatggaattaagagcaagaaatcattgaagactactcaacaatcaaaatatcgattaccaggaaaaggcagcccaacttctataaacaaggggaggactgctcgtggggtttcagaaacagctgagaagttggctaatatgtcgattggtactcgaagacaatccttaggacaaacccgtccgcctcccatgaaggctggagtcaattggatttctgaatctggaaatttcatgctcaggtccggacaacaaattccatctgaaagaagtttgacaagaaaagttgccgggtgagatgatgagaagtatttgctgactttggagattctttgatgatcaatatttttaagtcttctaatgatgatattgggtttgcacctctgcccctgatgcgtttggtgatgatttttgtttctattacgggtttgatatgttttttttggggagatactgtcagttttacatttggctaaagttgtgcggatgcgtctgtctcataagaaggttttcatttatgtggagtgctcaacaggttgtaatgacacaataaaggggaaatgtcatgtttttaattcgaactttgccacccttgcagagtaattactttagtactccttactattgtttaatgtattatactaattgtgaaatatttaattaatgtaaatagttttatattttggaaacaagaaaagttgccgggtgagatgatgatgagaagaagtatttgctgactttggactttggggaattcttatatgatctatattttcagtgtgctaatacgaagcttctaatgatgaatgatatatgggtttgcacctgccctgatgagtttggtgatggtttttgtttctatcacgggtttgatatatttttgtggaacatacgtcagttttacatttggctacacagttgtgcggatgcgtttgtctcgtatatagtagtttcattaatgtggagtgctcagcaggttgtaatgacataaagggaaaaatgacatgtttttaattcaaacccc

SEQ ID NO: 141914 - DNA, 228 bp, Glycine max
  Clone ID: PAT_MRT3847_99160C.1
cacgttaatatgtaagcaaccacaatatataaattgaaggcagtaataatacaacatgacaatatatacacgatatgtattatctctttatgaaaaaaataacgtgaacaaacgataaataaagtagaaaacagttaaacaaaaacctaaattgactagataacgttggcaaaaggcaatgaggggagtaatacggtgcaatgtttaacagtgcggactggagctttg

SEQ ID NO: 141915 - DNA, 1476 bp, Glycine max
  Clone ID: PAT_MRT3847_99161C.1
ggctcgagcggctcgaggttgtaagtatgttttgggtcgaatgatacgtgaagttgcattttgtattttctctaatttgtcctaatattacaggttgcaatcaagaaaatgaaaaagaaatattactcttgggaggagtgtgtaaacctgagagaagtcaagtcattacggaaaatgaatcatgcaaatattgtgaagctgaaggaagttatacgagaatgtgacactctgtgccttgtttttgagtacatggaatacaacctgtaccaacttatgaaaaacagggaaaagctgttttctgaaaatgaagttagaaattggtgttttcaagttttccaaggtttagcttacatgcaccagcgtggatactttcatcgtgatcttaagcctgaaaacttgctggtcaccaaagatgtcatcaagattgctgattttggcctagccagagagatcagttcactaccaccctatactgagtatgtctccacacggtggtatcgtgctcctgaagtcctgcttcagtcccatctatatagctctaaagttgatatgtgggcaatgggtgctataatggctgagttgttcactctgcgtcctctattccctggttccagtgaagcagatgagatctacaaaatatgcagtaagatagatagtccaaccactgaatcttgggcagatggactcaaacttgccagggatatcaactatcagtttccacagcttgctagtgtacatctctctacactgatcccatccagaagcgatgatgcaatcagccttgtgacgtcactttgttcatgggatccctgcaagagaccaactgcagcagaggttcttcaacatcctttttttcagagttgcttttacatccctccatcccttcgcaccagagctgtaaccagaactccaccatctgctgggaccaggggatcactggatcggctgggcctcaagagatactctggtgctttgcctaatacaaaaatcaccaacaattttacttccccaaaagtacaagcttctatagcttcaggtgtgcaaaggaagctggatatggcaaatgaggatggaattaagagcaagaaatcattgaagactactcaacaatcaaaatatcgattaccaggaaaaggcagcccaacttctataaacaaggggaggactgcacgtggggtttcagaaacagctgagaagttggtcaatatgtcaatcggtactcgaagactgtccttgggacaaacccgtccgcctcccatgaaggctggagtcaattggatttctgaatctggaaacttgctcaggtccggacaacaaattccaactgaaagaactttgacaagaaaagttgccgggtgagatgatgatgagaagaagtatttgctgactttggactttggggaattcttatatgatctatattttcagtgtgctaatacgaagcttctaatgatgaatgatatatgggtttgcacc

SEQ ID NO: 141916 - DNA, 427 bp, Glycine max
  Clone ID: PAT_MRT3847_99162C.1
gatgatatgaccaaaatttgttttcattgggcatttatagataacagaaataagttttcattgaagtttgtcagtcatgcaagtaagatcatctacttgcctacatatgaggctacaaagaggtatgttctggagtcacgatgtctcctttcttactgcacaatatggcatagcaaataaagccatattggcaagatacacaatgaaaaccaatttttgctatgttgtcaagttattttcattaaaaacacatattttgtaaaaggggcttaataaccatttggaggtgtgaagagtaatatatatgaatgacaaacaaaaaaaattataaggataaaaatgaaaaaaaatataataaagggctaaagccgaaagatcgatcctactttaagggataaaaagttatataactttttttttttacatg

SEQ ID NO: 141917 - DNA, 245 bp, Glycine max
  Clone ID: PAT_MRT3847_99163C.1
ctcccttagtcaaagggactcattgttcttctcccaggttatttagaaaagcaaaatggtgaagatttgctgcattggtgctggatatgtggggggtccttatgcagaattgacttaaggcccatccattgaaagttgctgctggttgattattctctaaatcccgcattgcagcctggaacagtgaccagctgtctttataacctggcttatggtgttgtgaagaatgcgtggcagaacctttc

SEQ ID NO: 141918 - DNA, 774 bp, Glycine max
  Clone ID: PAT_MRT3847_99164C.1
tcactgctcaaatacctctgaatgattcgatggataaagcaacgcacgcaactgacaaacataaccgataaaccaaagtcccatcgccacttgcaattcctttcaccgaactcactcgttcatacccctcattactactattatttattcccctaccttctcctcacttcttactcatctattttctaaaacactactcttctctccataaagccaccactttctgatacccttttgatcgaattgaagaataacgtagaatgcttgtgtgattctgtatcattgctatggataagtacgagaccgttaaggatttgggagctggcaattttggggtagctaggcttatgaggaacaaggtcaccaaggagcttgtagccatgaaatacatcgagcgtggtcccaagattgatgagaacgtggcaagagagattatgaaccacaggtcccttcggcatcccaatataattcgttacaaggaggtggttttgactcccacacatttagcaatagtgatggagtatgcagcagggggagagctctttgagagatatgcagtgctggcaagttcaatgaagatgaagctagatatttctttcagcagctgatctccggtgtccatttctgtcataccatgcaaatatgccacagagatttgaagctagaaaatacccttctagatggaagtcctgctcctcggttgaaaatttgtgacttcggttattccaagtcatctttgctgcattcgcgaccgaaatcaactgttggaacacc

SEQ ID NO: 141919 - DNA, 1641 bp, Glycine max
  Clone ID: PAT_MRT3847_99165C.1
ccgaaacgcagttctcaaagatccaatagcaaccaacacacactcactgctcaaatacctgtgaatgattcgattattaatggataaagtaacactcgaaactgacaaacataaccgataaaccaagtggcagcgccacttacacaatttctttcaccgaactcactcttttgattttgataccccttattattatttatttccataccctctcttcacttcttcctcaccaattttctgaacactgacactcttctctccttaaagccaccacattctgatacccttttgatcaatcaaagtgaagatcagcatagaatgcttgtttgattctatttcattgctatggataagtacgaggctgttaaggatttgggagctggcaattttggggtggctaggctcatgaggaacaaggtcaccaaggagcttgtagccatgaaatacatcgagcgtggccccaagattgatgagaacgtggcaagggagattatgaaccacaggtcccttcggcatcccaatataattcgttacaaggaggtggttttgactcccacacatttagcaatagtgatggagtatgcagcagggggagagctctttgagaggatatgcagtgctggcaggttcagtgaagatgaggctagatatttctttcagcagctgatttccggtgtccatttctgtcataccatgcaaatatgccacagagatttgaagctagaaaatacccttctagatggaagtcctgcacctcggttgaaaatttgtgacttcggttattccaagtcatctttgctgcactcacgacccaaatcaacagttggaacaccagcttacatagcaccggaagttctttctaggcgagagtatgacggaaagttggctgatgtatggtcatgtgcggtgactctttatgtcatgctggttggagcatatccctttgaggaccaggatgaccctaggaattttaggaaaacaattcagcgtataatggctgttcaatacaaaatccctgattatgttcacatatctcaagattgtaggcacctcctctctcgtatatttgttgcaaatccattgaggagaattactattaaggaaattaagaatcacccatggtttttgaggaatcttccaagggagctaactgaatctgctcaagctatctattaccagagagacagcccaaactttcaccttcaaagtgtggatgagataatgaaaattgtaggagaggcaagaaatccacctccagtatctaggcctgtcaaaggttttggctgggaaggtgaagaagatttggatgaagaagtggaggaagaagaggatgaagatgagtatgataagagggtcaaagaggttcatgcaagtggcgaatttcaaattagttaaagccctcaaattcttgtgtactttgttgaaatattgtactttttagaagtcacccttttttgtgtacacgaagtcacctatttatgtgcattataattatggctctgttgttgtaatatagtaccgggtatcatcaaaatggttgctatgtatgagaatagtagttgtctaattacgttctaaatcgacatgagaaccatagttgtctgattacatgctaaaatctaaattaccttttcctgtttt

SEQ ID NO: 141920 - DNA, 735 bp, Glycine max
  unsure (1)..(735): unsure at all n locations
  Clone ID: PAT_MRT3847_99166C.1
cggaattcccgcgtcgacccacgcgtccgatggaagatgatagtgagttgctctcatttcatatttgttttgttttattgaattttgagttttaaaacctccatataacagatttaaaaacattagtcattaatctatattttgagagtttaatattatcataaattatgtttctaaaattgttagtcttaatattttcattagaaagttgaaaaacacactttaaacttgagaaattaaaacatcacttttaaatttgaaaaattgaaagaaacttaggctgaaattgagggactaaaaatattttttagtcaaaaaatttaaaaaatgaatttccacatcaatttttaattacatgtcattgctaacataggtggcattagccacatgaataatcaacaacaacaaaccaaaaacatcattgttccaaattcatagactaaaaaagcaatttttagtttagagaaccaaaaataaaaatgatcaaaatttaattgagaaaaatatatttaagaaaaacaaaaatatttaattcaaagactaatatttagtttagaaaaccctaaagaaaaattatctaaatttaattgagaaaaacatatttaataaaaaaaaattgcanacagcaatgcggttttcttagatttgatgaagtgaattgagactaacgttttgttttggtaaaataactcataagctagatatcttataagttactccctctattacttttta

SEQ ID NO: 141921 - DNA, 461 bp, Glycine max
  Clone ID: PAT_MRT3847_99167C.1
gggccggggggggtttaattaatccttttttccaggcttccccccggggccccagttataacatttttccattggttccaaaaggggctttgggccttccaaaaggggtcccatttacgcctaaaattttccctacctttaaaattggtaaaaatccgtggtgggggaaaaaaaaccttttaaataaaaagggcattcccaccaaaaaaggttattattgtaaatccactcttagccaaaaattccatatttcaattaaaaaaaaaaccttttcctttttcccaattaaaattaaaaggtgggtggaaaatattaaaaggttacctttaaggacccccttaatttaaccccaaacctttagggccttttttttggtggtggaattaatcggggtggaaggggtgcaaccgaccaaacccattttaacctcccttggaaaacttttttcattacggtttaaa

SEQ ID NO: 141922 - DNA, 497 bp, Glycine max
  unsure (1)..(497): unsure at all n locations
  Clone ID: PAT_MRT3847_99168C.1
gacgaggggaagccaacaattccttccacctcttcgttcaaaattgcggcataaggggggtctttaaatgggccctgcgtgatatcacacttcaaaggggggtgtaggggccttctcattgggttaagattagcttggggcaggggatttcctaaaattattattgaggttgactctcaaggggccatgtgattantttatacatagactcttctaaaaatgaggcgagacatgatgcaccaactgttttaatcaatataataaagaggacaacaaggagaaataaatacaaagtttatacatagactattctacgaatgaggcaggacatgatgcatcagttttaatcaaactagcgaatagcgattgaattgattttgacagaatgcaattcttcaattggttgagcgaggatagacgacgagcttacgcctattgcccacctccaaattttgcagtgtttttgccaattttctactgggacaagaaacattcac

SEQ ID NO: 141923 - DNA, 244 bp, Glycine max
  Clone ID: PAT_MRT3847_99169C.1
cattcccactctcactttctggttctctcccttcctcttctttttcattcttctatctccgcataccaccaattgtaaaattgaaattcaccctttcaaaattgtacccagattctccgcgtaaagtgcccccttatttgttggtccgatgttaagggaaacatctgagaggctacagattcactgcgtcgattccattctctttccctcttctcatatctttttaaaggtttcagttttcatc

SEQ ID NO: 141924 - DNA, 148 bp, Glycine max
  Clone ID: PAT_MRT3847_9916C.1
tgcggctgactggagacgtcataagggggaatacgcatcatactcatcaccgatgattgaagaagatgccgagcggccgctttagaagatccaagcttacataggctgcttacgacgacatatcgtatgtatagtgggatctaaatat

SEQ ID NO: 141925 - DNA, 247 bp, Glycine max
  Clone ID: PAT_MRT3847_99170C.1
ggaagttcttcactgagatcagcttctaatgttctgtcagttaggcctgaggggatactatgaggtggcggaggaaggtcactaatggtggattctggttctcggggtggagtggaaggtggaagtttttcttgttctgaagggaaaacaggagaaagaggttttggtttggaattagactctgatgcaatgtatattttgaggccaatctcacccttaacaggtgagagaaaccacttcttttcaa

SEQ ID NO: 141926 - DNA, 430 bp, Glycine max
  unsure (1)..(430): unsure at all n locations
  Clone ID: PAT_MRT3847_99171C.1
ttgttccaattcaccacgttctcatgatttgtgcttatgctgtgtgctggaacacttttatgaaacccaacatgaattttcaatttccattttccttattgtccttgctttaatcgcatggcctatacttggggtttggttgggattgcttttctttttaattctttaaaacaaattacgtattaatagtttcaggcacctgaaccttttgttctcatggatttgatttttcttanttggcttagcccgttgtgataatgttctggtatgctttttttaatatttatttttgtttgttttagctgtaacagttttagctgtaacatttttgcttgtgtatgtgtgtatatattagtttgactttgataggtataggctctttntatttgttttatcggtaaatgtgggtttgttagttntgttagaaatg

SEQ ID NO: 141927 - DNA, 512 bp, Glycine max
  Clone ID: PAT_MRT3847_99172C.1
cctcgtgccgaattcggcacgaggataacttgtgtccacaaggaccacgtcaccgtcaaccagtcggagcttgcagcggccttcagtatgtcactagagccccaccgaattgtcctcaacgtcaaacgcggctcgtgcaacacgctctccacaatccgcagtgacaggaccatgcagcatgccttcttctccaacaacaacttcttccttgcactacaatggcgatggagacgtcaacgacaaggaagacaacgatgacaccgattgcaaagactcgaggtcggattctcgaacggagacctcagcgaagcgaacgacagtgaagcgactgcaactagtgtggaccctgcagcttcacaagacgttcgtggacctggtggcccacctccccatcaaaggcgctgtgccgaagacgattatgcaattgatgaacgtggaagggttgtccctataattgttaacttgtttgttcttattgcaatttatttgaacaaaatgctatttatgaatgt

SEQ ID NO: 141928 - DNA, 581 bp, Glycine max
  Clone ID: PAT_MRT3847_99173C.1
cggattccccgtcgacccacgcgtccgattgattgtaatctcatcacttagcaccaactgatggtgctgctcttgctagccacatggaccgttgcacaagtcttgaatatggactggtttcactgatactgcgaaagacaaccttgtactgtcagctaaaagcaaccttaagcctgctactattggaacttgctgggacatcccactatcttgtgggggaagatgctgatgtaccatcatgctgtagagctagcccattttgctttattctttaatcagggacaatcgttgatgagctgggcctcacaacattcgtacatgaaagagtatacaacgagtttgttgagaaagcaaatgctcgtgctttgaagacgggcgccggtgatccatacgaggggggaatagagcaccgatctcacattgactgagatcaatgtgtgaaaacactagaggaacatcatatctggtgggtgcaagtgaacgcatcaccgttgaaaccgagacgacgacacagcttggcaacaaggcctgatacattgaacctaccatacttctcaaatgataaagatggactgctgatt

SEQ ID NO: 141929 - DNA, 237 bp, Glycine max
  Clone ID: PAT_MRT3847_99174C.1
tttttaaaaacctgttacgcacaggggacacccggctgtttaattcatacaaatcctcgcacaggtccttgcccaagaagacccaacgcaatttttgcccagggctctaccggtcgaagtgctaaaatctatcccaccgcccacgaacgggaggagtcactttctctttatcaaggaagacaaatgcctcaacttctaatatgcgacgcacatgaatgtgttctcgatattgccact

SEQ ID NO: 141930 - DNA, 306 bp, Glycine max
  Clone ID: PAT_MRT3847_99175C.1
attaccgtttcgacccactcgtccataaacacccttaaaaaccacaataaaattaaattcacaaaaaaacatcaaatctcaatgggacatgttaattttaaaagtaagtcactaccataacatattcatacactttaataattacttccttcccttttcacttattcttaaactactaatacctttcctatgcataaactcaactccctaactattccaacttcattcacatataccactcctatttacatctcacaaactcttctctcatcatacaaaacccttctaactactacatctttcttt

SEQ ID NO: 141931 - DNA, 392 bp, Glycine max
  Clone ID: PAT_MRT3847_99176C.1
gtacatctggcgcgctcgccctttttttttttttttttaacaccagcaacatactggatcaagtcattacaagcgtcggagcccattccatccatagatgatgattagtaccgcttttataaatccgacaaggtgaatacttcctcccgatgaggaaaatgacacctgactaacggtgctccacacatataaggaacactcaggggatgcgtacatggaaattgctccatggaaattgcccaagaacacacaccgagggggtgcaggattcacccttggacacaagcctgcttatatacaatttgatgcttgcccccatggctttggccttttttttcaaacacccccatcttctgtaactggtgcaaggaaaagaggaaaaagtctttttt

SEQ ID NO: 141932 - DNA, 154 bp, Glycine max
  Clone ID: PAT_MRT3847_99177C.1
tttgccgggtgttaagttcttttttgaaaccagagacgaaaagagcagcgccctcttaaagtgtaacttgggtaacactaactgaacatgtaatcttaggaatttacgatgaaaacaggctaaagattggtggataaaacacgaaaaggcaacc

SEQ ID NO: 141933 - DNA, 381 bp, Glycine max
  unsure (1)..(381): unsure at all n locations
  Clone ID: PAT_MRT3847_99179C.1
gtgacatgaggttatctttaaagttttcaatggcaaaaaatacctcaacaacataaggccactttgatgaatttgtttcttttattggggacaaatataactttatcaattattagctttgtacttcccgatgtgctaatagatggtttcactatttactgctggtatgctaagaagaaatgagatattgtttcgttaagcaatttaatggatgcttgtctggtcactattatcttgttggttttgtgtggattactttatgcttgtttggaaatgttgtctccttgtccttctgcttccaccttgcattanggctatgtaaggcagttagacaatcacctatagccccaaactcttaagacccctaataacatgacattc

SEQ ID NO: 141934 - DNA, 532 bp, Glycine max
  Clone ID: PAT_MRT3847_9917C.1
ggcagcagcttcttccatggctctctcatccccatccttggctggcaaggccgcgaatctgcgtccatcatccccaaaactgagaagggtgagcatgaagaacaccgtcaccaaccacggctcctcacgaaacccatggtacggcccaaaccgagtcaagtacttgcgcccattctctggcgagaccacgtcctacctaaccggcgagctcccaggcgactactggtggaacactgctgggctgtccgcagacccataaaacttcaccgagaaccgcgaactcgaactgatccactccaggtgggccatgctcggagccttgggcagcgtcttcccggagttgctgtcccgcaacggggtgaacatcagagaagccgtgtggatcacggtcgggtcccagatcttcaccgagggtgtgctcgactacttgagcaactcaagactgagacacgcccagagcatcctcgccatctgtgccacacgagttatcctaatgggggtcgttgaaaagaaccctatagctggaggcccc

SEQ ID NO: 141935 - DNA, 316 bp, Glycine max
  unsure (1)..(316): unsure at all n locations
  Clone ID: PAT_MRT3847_99181C.1
ccaccattgcggcttgaaggtcatagatctaactccctntgcgatttccaaggaacaattataggataanccaaaagacacccacctggatagtgtcaacaacaattgtgatactacaagagcaatccccttaatgaagtaagttcaatatatatcggcctgtatccaaacaaattacttcgtgacctttaaactctatttataaatactacatttgtccctattaataaaatcgcgtgacctcattcaagtgagaaaatattcatagtaatttttcaaggattagccgccatcgcgcctattgtccaagaagatc

SEQ ID NO: 141936 - DNA, 777 bp, Glycine max
  unsure (1)..(777): unsure at all n locations
  Clone ID: PAT_MRT3847_99182C.1
ngactcctctttgtttctagacctggcccatgatatcgaatcttaaggcttaaaccctcactgctcctccgaaatccccgcgtgatccacaacgatgagcgtaccgaaggcagtggcagcgacgatccggctcacggtgccggccggaggagctcggccggcgccaccggttggaccggcgctgggtcagtaccggctgaacctgatggcgttctgcaaggacttcaacgcccgcacccagaagtacaaggcggagacacccatggccgttacgataacggcgtacaaggacaacaccttcgagttcaccgttaagtcgccgccggtgtcgtggtacctgaagaaagccgccggcgtggaatccggtagcagccggcccggtcacgtgaccgcgtcctcgttgtccgtgcggcacgtgcacgagatcgcgaaggcgaaacagtccgatccgtacctccagaacatgcctctcgagtccatttctaagtccatcattggaaccgccaacagcatggggattaagatcgtcaaggacctcgattgaatcaatctttaatatatcaattgctttgttgtgttgtgctattaggattagggttagggtttctcttttaaacctcttttgaatttgctttgaagaggagccaaagcttgcacatatggtttggttattttgctaatgatgttttgatttgacaaatcttatcatatgaataaagttgttagcaattgggtgacgcttgttaacaagatcggttatgtgccttaatcctttgt

SEQ ID NO: 141937 - DNA, 698 bp, Glycine max
  Clone ID: PAT_MRT3847_99183C.1
ccacgcgtccgagagaaagcctagttagctctgatcttggtatgactccaaataatgatggagaattgatacgactgagcatcccacagttgacatctgataggaggaaggtattctccagttccattgatgctgcagtgtctaagtttattttttctctgtcaattacattcttgttctcattgactgaaagtaatattcttaattggttttcatttcttatttaactattaacaaaatcgcatagaatcacctcttctacagtcatgacccatgagaaaactgatctctacagtgacttaatatgttgtttgccatgattccaatagttttagttatcaatttattttgtttatgagattgtaccgttttattaaaggtcctatatgcataaattttaatgaatatttgaaggtctaaatgaatatgttgatttcttgatgtcatctgaataacttagggtctggtttgtgttttttttcccaaaggaaaagttttttttttagtaaatagtaataatatatgttcataaagttttagaaaagaaactaaaaaaaattgttaagtgctatctttagaagccaaaatattagcttatgaaaaaagtaaagctttacaatagattactttttttttttggttaattcttaaacaaactagctcttaagctataattttaattaatattggctttcctt

SEQ ID NO: 141938 - DNA, 166 bp, Glycine max
  Clone ID: PAT_MRT3847_99184C.1
ggtgcgtgtctattctgctggtatgacgaccatcttgtagctgctcatgcttggataaatcgtcaccactatccccaccatcggatttaatgttgacactgtggagtacacgaacatcaccttccctgggtgggatgttggtggacgagacaagatccgtccactg

SEQ ID NO: 141939 - DNA, 697 bp, Glycine max
  Clone ID: PAT_MRT3847_99185C.1
cggacgcgtgggtcttctcgtttttactttgacggtttctagagagagaaagtttgttatagagagagaaagcgcgctgctgcttcttctgctgctgcttcgacagtgagaagagagagagaagcgctcttctccgtaccgtttctagagagagaaactgatggccggagttaatccgaacggcgtcgccgattttccggcgactccaacgcacggcggacagttcattcagtacaatatattcggaaacctcttcgaggttacggcgaagtaccgtcctccgatcatgcctgtcggacgcggcgcgtatggaatcgtttggtaattggtttgagagatgtaattcctccacccttgcgtagagagtttaatgatgtctacatagccactgaactcatggatactgatcttcaccatatcattcgctccaatcaaaatctgtcagaggagcactctcaatacttcttgtaccagattcttcgtgggcttaagtatatacattctgcaaacgtaatccatagagatttaaaaccaagcaacctgctgctaaactcaaattgtgacttgaagattattgattttggtcttgcgagaccaactttggaaagtgacttcatgacagaatatgtagtcacaagatggtacagagctcccgaattgttgttgaattcctctgattacacctctgctatagatg

SEQ ID NO: 141940 - DNA, 702 bp, Glycine max
  Clone ID: PAT_MRT3847_99186C.1
atttaattcatgttcttggcattgatacataaagtaatttatcgcggacaaaaaaaaacaaaataatttaggctaaaatatacaaatagttaattaacttaattttggttctaacttgatccataactaatcattttgaaaaactgtttgttatgaatttttaggcacaattttgaatatttttttattgattcaagatgtgaaatttatcttattagattcatttatgaaagtcaattaatattcgaacaaaaagaaacataaacaaattaaaaaatacttgaaaaatgagtcttaagatcaatcacagatctaaaaatttaatgtcgccttctttttttattattcataaagactaattttttcccatgatttttattatatttatgatttttttttcaaacattactttattcatataattgttatatagatgaatctaatattgaaataaatttcacttcttgaatctacaaaaataaattaaaatcatattcaaaaataaaaaataattaattttttgaaagacttatttttttcataaattaaataagaaaatccttttagaaattttaaaaatgtggcaactaatttagaaccaaaataataaaataagagactttcttatattttagccaacaatttatccgtcacagagaggtattattagcttagagttttaattttttatttgaacgaaat

SEQ ID NO: 141941 - DNA, 837 bp, Glycine max
  Clone ID: PAT_MRT3847_99187C.1
atctttcttcttctcgtttttactttgacggtttctagagagagaaagtttgttatagagagagaaagcgcgctgctgcttcttctgctgctgcttcgacagtgagaagagagagagaagcgctcttctccgtaccgtttctagagagagaaactgatggccggagttaatccgaacggcgtcgccgattttccggcgactccaacgcacggcggacagttcattcagtacaacatattcggaaacctcttcgaggttacggcgaagtaccgtcctccgatcatgcctgtcggacgcggcgcgtatggaatcgtttgctcgctgttgaataccgagacgaatgagctggtggcggttaagaagatagcgaacgctttcgacaatcacatggacgctaagcgtacgcttcgtgagattaagcttcttaggcatttggatcatgaaaatgtaattggtttgagagatgtaattcctccacccttgcgtagagagtttaatgatgtctacatagccactgaactcatggatactgatcttcaccatatcattcgctccaatcaaaatctgtcagaggagcactctcaatacttcttgtaccagattcttcgtgggcttaagtatatacattctgcaaacgtaatccatagagatttaaaaccaagcaacctgctgctaaactcaaattgtgacttgaagattattgattttggtcttgcgagaccaactgtggaaagtgacttcatgacagaatatgtagtcacaagatggtacagagctcacgacttgttgatgaattcctctgattacacctctgctatagatgtgtggtctagtggt

SEQ ID NO: 141942 - DNA, 1969 bp, Glycine max
  Clone ID: PAT_MRT3847_99188C.1
cttcatctttcttcttctcgtttttactttgacggtttctagagagagaaagtttgttatagagagagaaagcgcgctgctgcttcttctgcttcttctgctgctgcttcgacagtgagaagagagagagaagcgctcttctccgtaccgtttctagagagagaaagtgatggccggagttaatccaaacggcgtcgccgattttccggcggttccaacgcatggcggacagttcattcagtacaacatatttggaaacctcttcgaggttacgacgaagtaccgtcctccgatcatgcctgtcggacgcggcgcgtatggaatcgtttggtactgctcgttcgttttcttcgatttattttgttttttgaaaacgcggtttatttattttattgagaaatgttagttgttagttagttgtccacaatctcacggagctgggagctgtatgcttagcgtccatgtgattttcgaagacgtgattgatataattaagaaattgtgcgtttctctgattctcgattttcgttctcgatgaatcggatttgattttgagtgaactgttaatctgttagctagtgctgagtgtttattgtttagcgttgacttttttttttatttgtaaaattgagaaatctgaatatgttgatgtaatttttgaagctcgctgttgaataccgagacgaatgagctggtggcggttaagaagatagcgaacgctttcgacaatcacatggacgctaagcgtacgcttcgtgagattaagcttcttaggcatttggatcatgaaaatgtaattggtttgagagatgtaattcctccacccttgcgtagagagtttaatgatgtctacatagccactgaactcatggatactgatcttcaccatatcattcgctccaatcaaaatctgtcagaggagcactctcaatacttcttgtaccagattcttcgtgggcttaagtatatacattctgcaaacgtaatccatagagatttaaaaccaagcaacctgctgctaaactcaaattgtgacttgaagattattgattttggtcttgcgagaccaactttggaaagtgacttcatgacagaatatgtagtcacaagatggtacagagctcccgaattgttgttgaattcctctgattacacctctgctatagatgtgtggtctgttggttgcatctttatggagcttatgaataaaaagcctctgtttccgggcaaagaccatgtgcatcagatgcgcttattgacagagcttcttggcaccccaactgaggctgaccttgggttagtgaaaaatgaagatgcaagaagatatatcagacaacttcctcaatatcctcgccaacctttagctcaagtcttcccccatgttcatccggcagccattgatcttgttgataaaatgttgacagttgatcccaccaaaagaattacagttgaagaagcactagcccatccataccttgaaaaactgcatgatgtagctgatgaaccaatctgcatggagccattttcatttgattttgagcaacaacaattggatgaagagcaaataaaagagatgatctacagggaagcattagcactcaatcctgagtatgcttaaagcagaaaaactcaaggacttgaagcaggcttagaaggaaaacgaattattatttttccttctaagcctgcttcaagtccttgagttcagttcttacaatcacgaaaggatcaagttgaatgaaaattcaaccttgttgccgatcaaactccctaggtaatttattcaatctgtgtgactaggtaggtgcaattacggcttgatgagtgtccttctgctgtaaagtgccaagtaacgatattaatctccaattttttttaaccctgacgggttattattatttttattttcttttgtgactgttttctcgggttcatcatgtattttacttaagttatttgcatcgtaaaa

SEQ ID NO: 141943 - DNA, 355 bp, Glycine max
  Clone ID: PAT_MRT3847_99189C.1
tcaaaagaagatcgtattccgcaccacctcgtgccgcctggcctccgccggccgcgttctggctgcaccgccgaacgagaccacggcgtttgattacacccacaggaagattattgtgagcaatgtgaatgctgcgattgatgctcataagctgcttgaatacttctagcagcttggggaggatgaggatggtcctcttggtgtgtataataacactggtaaacctaagggtggtgctctgcttgtgtacaacaatgtggagagtgccgagaaggctgtggaagagcatcataataactatgatgggcatactatgtattgtcagaaggctgctgatgatgctaatgagagcaag

SEQ ID NO: 141944 - DNA, 352 bp, Glycine max
  Clone ID: PAT_MRT3847_9918C.1
ggctcacatcatccaatgccaatccgacggtcacgatgcctttcacgagctcctcgagcacgagatgaaccaggaggacacgtggcgcggtggcgccgcctacgttaacgtactccacgccgtcatgtatagcatctaccacgaccgctttcccgtgttgctgcggctccacaccgatttatgcgaccgcgcctcctccagagcgctggtaaacgagctcctacgcttaatcacctgctgcgacgacgcgagcccagagaaacttccatggcccatcgaggatctgatttctgggggcaagaccaacaagctcgtttggtcgcatggactggacgtgctcacgtacacgctc

SEQ ID NO: 141945 - DNA, 595 bp, Glycine max
  Clone ID: PAT_MRT3847_99190C.1
aagctgtaacataaatttttcgcaatactctcgggttcatgtgttatagagaatctgaataaaatattatgaatgagaatggttgaaataattttgtttcttccttattatcttatcccttaactaatttattgaatatcttatttgatttaacgtaaaatgtgtaaataaaattaatatctaaaatcaaattataggcaaatgatgtatttgttatttattatctccttactcatataagtactttttttacttaaccgattttataaatacttggttttacttaatatggaaaatgtagataaattgtttgttttacggaagaatgttaataaaatatagctaatgagattaatggaaatgtttttttggtttattacttgcttactttcttttgccttaactaattcctggaatattttatgggatttaaaataccaagcgtggggaaaatttatatggaaaattataaggtgggacctttctttactcttcttctcctagggaattatgcaaaagaatatgaaaatgatattttttagacaaataacaaaatctaaacttaatttgtggagaagaacatttttcttaaaga

SEQ ID NO: 141946 - DNA, 995 bp, Glycine max
  Clone ID: PAT_MRT3847_99191C.1
agccaatgaaagtgtgtctatagcaaagaccaccttaaattgggtatattgaggtggctaactcttcaaatgatcaagcttacaataggacaaatgaatatgttcaacgcaagaaattttttacatacaattaatatgctcaagcctcaagcagctaatacaaaggggcagggactatacaacatcctgtcttatccttcactgtctcaatccgtgtcctgcaggcaggggatgcttttcaaaatattaccacaaaggaccaaacaacgtaatacattatacatctgaaacgaagctttcgtcctacttgcagcataaggaaaatgtgaacacctggcttcattgaacaaatccaagttgataaatgctggattacttgtattcttagatgttcagataaataacataattatgatacatcataacttgactatccagtcttcttccttttgaaggccggatgtatcattgaatcattgtatgaatcaaacttctcgattctggcaatgcagtctttcatccttttcaaaacaattggcatagcagagcaattgcttgagatcttttcattcagcaattttagttttttggcagtctctggatcttctggagcagatgaactttcttctctagaaatattttgctctgatgtacccggtgaaagaaagggtctttgggcatcgagaatcgaacggagcgtggcgttgagctgatccggaagcgttgttcggtaatcgagaatcttgtgcgccatttgcttcaaatcagactccaacctctccaactccaagtcttcttcagcttcgtcgtgaggttccatcgatttgggagccattgttcgtagaaattcgaacacttgtgtgtgcaagttgaacaagaagaagataaagcagagaagagaagtagtgagaagaagaaagacgaggtttttctctttctgggtttacaatttttcttgtccactttcaaattctgaatctgccaatgtgtctgtc

SEQ ID NO: 141947 - DNA, 981 bp, Glycine max
  Clone ID: PAT_MRT3847_99192C.1
ccctatagcaatgaccaccctaattggctaactcttcaaatgatcaagcttgcaataggacaaatgaatatgttcaacgcaataaatacaattaatatgctcaagcctcaagcagctaatacaaagggacagggactatacaatatcctgtcttgcaggcaggggatgctttccaaaatattaccacaaaggaccaaacaatgaaatacattatacatctgaaacgaagctttcttcctacttgcaggattaggaaaatgagaacacgtggcttccttgaacaaatcgaagttggtaaatgctggattacttgtattcttagatgttcagataaataactttaatatataatacatctgagagcgacgagtcagttttcctccttttgcaggccggatgtatcattgcatcattgaatgagtcaagcaatctcacatttgcaatgcaaaaatagggttaagtctttccccatggcatacttaaattaagaagctagcttaaactccagatccaatcagcattgctcatctcgaggagcataaaataattcaggcggagctaatatatttcgtttaaaccaggaagcatcttaacaatttcaatcgatttcccaattttagaggcggaaaagaaaaaccctaaaaagagaggcacacggtgaaagaaagggtctctgggcatggagaatcgagcggagcgtggagttgagctgatctggaagcgctgttcggtaatctagaatcttgtgcgccatttgcttcaaatcagactccatcctctccaactccaagtcttcttcaggttggtcgtgaggttccatcagatttgggagccattgttagtagaaattagaacagttgtgtgtgcaagttgaacaagaagaagataaagcagagaagagaagtagtgagaagaagaaagtcgaggtttttctctttctgggttaacaattagtcatgtccactttcaacggacgcgtgg

SEQ ID NO: 141948 - DNA, 1340 bp, Glycine max
  Clone ID: PAT_MRT3847_99193C.1
gtcgcggctgcgagaagacgacaaaaggggcagcagcatttgaactctactatcgttctctctttccgttcttctcaaagacgcactcaactttctaaaaccaaatcggtttgagtcctcattacccgcctctctctggaaaccagcaaaaccacctttctctactatctatcggttccttttgtactctgagtgggtagaagtcatggtgaggctcactgctgacttgatctggaaaagccctcatttcttcaacgcgattaaagagcgtgagttagatcttcgaggcaacaagatagctgtaattgagaacttgggtgctactgaggaccaatttgacacaatagacttatctgacaatgagattgtcaaacttgaaaatgtaccatatcttaaccggttgggtacaatgctcattaacaacaacaggattactagaattaatcccaacattggagagttcttgccaaatttacacactctagttctcacaaacaacagaattgtaaacttggtagaaattgatcctttagcatcccttccaaagctgcacttccttagtctgctggacaacaatattacaaagaaaccaaattacaggctttatgttattaacaagctgaaatccctacgggtgttagatttcaagaaagtgaaaaataaggaacggttggaagccaaaaatttgttttcttcaaaagaagttatagaagaaattcaaaggacacccacaaaaagtgaaactcctaatgtttctgaagtgattgaggaacaacagatgcccaaagtcgttgctcctacacctgagcaaattattgctattaaggctgccattgtgaattctcagactcttgaagaggttgctagacttgaaaaggcattgaagtcaggccagcttcctgcagatttattgttggataatgttgatgaaaaacatgaggacatgattcatgacgatagaggtcaagctgatggagaatctaatgatacacaagagcagagaaatactgattctgcttcaatggaacaggattagagcgaaggttttcaaatagtcctagcactgtggacttctttaatgtcaggttctagagtcaaactcttagtaattttctatgaagtgtacttgatgaatcttccattcttgagaactggatgtttcaattacattcgtggtgaatcattgctttagttatatatgtattaaattggattgtctaactagaatgattacggcgttttcgttgaaggttagggagaagattcaaaattgctcttctcagaaacatctacggtttctgatttcaatctaatttgggaaatgaatgagcgtccccgcc

SEQ ID NO: 141949 - DNA, 470 bp, Glycine max
  Clone ID: PAT_MRT3847_99194C.1
ccgacctaaaattttttaaagaatttaaaaacttaggcgggggtaacaaacaaagcggggggaaaaaaatcgggggcttccttttttaaaaaaagggaattttagggccaaaaagggggttatgtcccccagaaacccctacatgaacatgaaccgttctaaaaggggggaaaccggttccggcctttaattattattttccggccaaagatcttaaacattatcttcatcacgggaggacaatcaaaacccactcgaaggttttttacaatcttgatggcagctccgggacgtggcctgaaaaccccaaacgctaaggcaagcttctcactataaacttccaacgatggcttttttttttgtccccctagggcaggaacccccgcatcggttttgggggaaaaagggggttccttgacccagccattcattttctccagaatgaaaaaaaaacccttgctcccgggggg

SEQ ID NO: 141950 - DNA, 1302 bp, Glycine max
  unsure (1)..(1302): unsure at all n locations
  Clone ID: PAT_MRT3847_99195C.1
acgtcgctgcagcgtagtaactcgattcgctcgcgcaacgttcagaaaccaaatcgtgttatccttttccatgacttaacaacaggtttgagtcctcattacccgcctctctctggaaaccagcaaaaccacctttctctactatctatcggttccttttgtactctgagtgggtagaagacatggtgaggctcactgctgacttgatctggaaaagccctcatttcttcaacgcgattaaagagcgtgagttagatcttcgaggcaacaagatagctgtaattgagaacttgggtgctactgaggaccaattcgacacaatagacttatctgacaatgagattgtcaaacttgaaaatgtaccatatcttaaccggttgggtacaatgctcattaacaacaacaggattactagaattaatcccaacattggagagttcttgccaaatttacacactctagttctcacaaacaacagaattgtaaacttggtagaaattgatcctttagcatcccttccaaagctgcacttccttagtctgctggacaacaatattacaaagaaaccaaattacaggctttatgttattaacaagctgaaatccctacgggtgttagcgtgggagaaagtgaaaaataaggaacggttggaagccaaaaacttgtttgcttcaaaagaagttatagaagagattcaaaggacaccagcaaaaacattttcaactggtgaaactccaaatgtttctgaggcgattgaggaacaacagacgcccaaagtggttgctcctacacctgagcaaattattgctattaaggctgccattgtgaattctcagactcttgaagaggttgctaggcttgaaaaggcattgaagtctggtcagcttcctgcagatttaataagcttgagtgataatataatgttggataatgttgatgaaaaacatgaggacatgattcatgatgatagaagtcaagctgatggcaaatcgaatgatacacaagagcagagaaatactgattctgcttcaatggaacaggattagagtgaaaaggttttcaaatagtcctagcactgtggacttctttaatgtcaggttctagagttagactcttggtaattttccatgaggtgtactttatgaatcttccattacttgagaactggatgtttcaatttcactcgtggtgaatcattgctttggcctttatatatgtgttaaattgtattatttttacactagaacgattatggaatttgcctagagttttttcataaaaaaaaaaaaaaagggcggnnnn

SEQ ID NO: 141951 - DNA, 539 bp, Glycine max
  unsure (1)..(539): unsure at all n locations
  Clone ID: PAT_MRT3847_99196C.1
gtttttagtaaatacattagcacaatggttggagaaactcaacctttatagtatgcatgttgaagtttcggtctatattacaaattgttcttgtatgatcaagggagctttaacaacttaattgaactcttattaaatgagagcttatcatcaaagagtcgtaatcccttgataagatgttttaattttatgagaatggcttataactctcctgttagcttattttgtttagctttcccatttagcttattgaaataagctaaagtgaacttatcattagccacttatattataagcctttaaaagctctgtgaaagttcttccaagggtcccaaaatggggttaattgaattgagaacagcagtatacttaggctagttaatctcaggcagcatatcttaatgtttctttgacatattttcaaaatccttaggcctgagtactgagagtagaatctaaatactgaggttatcttagatgatatattattccagccgtgtcattgtaaaggatgcatcttatttgaacctaantttact

SEQ ID NO: 141952 - DNA, 408 bp, Glycine max
  Clone ID: PAT_MRT3847_99197C.1
gacttatctatggctgagaactcgagtgtgacttgggtttccttcgagcccagagcttctctctgcacgtacatatggtgggtcttaatttccactttcctttacttccttttattctctctagctttgccctgaacaaccggaatgcatgcgtttcaacatttacgggattaattaaactactcacataaaatttataaacaaatatttttagcaacgacttaccgagataaagaaaacaatagagaattaaacattagcatggccaccacacaagtaacgtggtgacatgctatccagaaatggacgcttctgttatgagcaaaagaaaatgacacacaacccgtgagagtaaacatgccagtgcttaaccggatataaagtaagtaaatgatgggaaacaatgga

SEQ ID NO: 141953 - DNA, 1091 bp, Glycine max
  Clone ID: PAT_MRT3847_99198C.1
cccacgcgtccgcccacgcgtccgtacggctgcgagaagacgacagaaggatacggctgcgagaagacgacagaaggatacggctgcgagaagacgacagaaggatacgggcgtccgcggacgcgtgggctgcgagaagacgacagaaggggcccagtttcccgcacacacttcttgtctcttctctctctctctatattttgggtttcattgttgggtgctgaagcaaatttgcggtgtagcagaggcaatggaggttcaaagtctcagctttgagaataacattttgtgggttggctcttttgtggaggctttggtgcttgacactttccttgccactgccaaatctcttgcttgctttgtcatcttgactggatctctccttacggatgtcaataatttagtgtcaccgatggtggatggaaggtttcctttagaccaactgtgcaagggaaaacatacttttgaagaaaacaaggatgctagtgatacagaggatgatgatgatgatgacaatgtgaatgatggagaggacgacgatgatgatgaagatgatgaggatttctctggtgatgatggcggggaagaagctgattctgatgatgatcccgaggccaatggtggaggtgggagcgatgacgacgatgaggatgatgatgacgacgacgatgataatgatgaagatgatggagatgaagatgatgaagatgaaggggatgatgatgaagatgaggagtctccacaaccaccttctaagaagaggaaatgagaattatactagtatgaaaaaattgtcatcttcctgccttttgtaatgctttctagtttttagtcaaatttagttcttaggacaaggatttaccagcttggacctgtcaccccatgtttttattgtctaatatcataatttataaacattagtatattctcatgttacgatgttactaaaaaaagagaaaattgtagtttgtgccaaaaatggtccgggtcatggaattcattccctttttcgttgggctggtaagtctgccatttctagaattacaccgacctccctcagtttatactttattacatgccacttcttattt

SEQ ID NO: 141954 - DNA, 245 bp, Glycine max
  Clone ID: PAT_MRT3847_99199C.1
aacaaaacaaaaaaatttaaaacaaaaatatttacttaaaaagaagtaaacaaaaaaataacaaaacaaatactaaaacctcccattttaatcatccaaccttcttacccttcatacaacatataccctccttacttaacctaaattcaatccactactcacacaaacatcactcacttgaaaaccttacataacccaacttaatcaccttcatcacatccctttttccccacttaccctttaac

SEQ ID NO: 141955 - DNA, 277 bp, Glycine max
  Clone ID: PAT_MRT3847_9919C.1
ccgcgagacatattgaagaccaagggagcaaagaaggtggtgcttacgttcccaggagacgtcatggagtacctttgcttggtattgagagcaccgaccctggtgatacacaaagatgcctgtgaggactcgagggatctttgatgtgcgaaaccatgggatacacactgagatgacagacacacgtgtgaggatgacattagacactactgctagtgcatggcgcaagagtttaaagacctggctgcacgcatacgttacgagtgtgctcaatctg

SEQ ID NO: 141956 - DNA, 137 bp, Glycine max
  unsure (1)..(137): unsure at all n locations
  Clone ID: PAT_MRT3847_991C.1
canaananatccatccccaatggcncanaacaacttcnggnanatcttttgtganactaggaacatcttcgaagcanacnctcgtcantnactaactctctcacgantcttccnctttcccctttcatnctccctct

SEQ ID NO: 141957 - DNA, 159 bp, Glycine max
  Clone ID: PAT_MRT3847_99200C.1
gctcttttttttttttttctacctccagagatcagtggctagcgccatagacccacccatataacaacagagcttcctgcacttgatgaggagtagttagtgatggctcgtacattatctgttcggtcaagtctgagaagaactatctatcctacctac

SEQ ID NO: 141958 - DNA, 573 bp, Glycine max
  Clone ID: PAT_MRT3847_99201C.1
cgtaagctaggatcctctagagcggccgcgtgtttttttttttttttttttttttttttaaaaaatttatgactaattaatttaaaattaatgggggaaacaaaaattgaagctatgacttttaaattattaacacaacccgctaatgaatcaattacattataaaataatataaataacgttgttatacataacactaaaatttctaatgtatatttaatgggcatgtaaatttaaataataaattttatgacaattaattttgacataaatcataccaattatttaatttgtatattttttataaataaaacatatttactattaaaaaatttaatatatattaaatttaataatagtaattttttttaatgtacaaatgataatttaacatattaataattaaaaataaaataaaactttaagaaattataaaaaaacagaaaaccaatatgaacgaagttcatccatatgatttatatgaatgaagttcatccatataaaacatacagattaaattcatccctataaataacataaatttaatgcgattaattaaattaattattttta

SEQ ID NO: 141959 - DNA, 418 bp, Glycine max
  unsure (1)..(418): unsure at all n locations
  Clone ID: PAT_MRT3847_99202C.1
cgctctttggcaacggaagacagaccggaaacggctcaggcattaataccacaggccgaacacggagcccggcacacgggagaagcaagcaaccctcaacaaacagcacaggcggaccgcgaagggacacccccaaggagaacacccacgaaaacgangagaacccggacccccctccagcgagaacacccacccaaacgncagggaggacaggaaaacaaccgacccccagcaacaggacgaggaaaagcccagacacanaancagggnaaaaagccacccactaggaagaagttgaagttaggaggagaggtatatcggaaggtactttatgacaattttccgaccctaccatcatatcttggaggcagctgttcttgcatgagatgttctaaaattggccactcgggatattctg

SEQ ID NO: 141960 - DNA, 287 bp, Glycine max
  Clone ID: PAT_MRT3847_99203C.1
tttttaaaaaaatacagtgcagaaagaaatttaagacgcactgtaatgtaactactacatatctcaggtctcaaattaataggaaagattacaaacatagaactggtgggtgaagttctagcataacctagtagtcatggttatcttgactagctaaagtaccattaaaagaactctctctagtacaaaaattatttggttctgttagctgaattaccagttaaaaaggtcaccatttagcttgaagaatgtttcgagatataaactcgagacttcaccacaatatt

SEQ ID NO: 141961 - DNA, 216 bp, Glycine max
  Clone ID: PAT_MRT3847_99204C.1
cacactctttacgtcattgcttattgggaggcatgagtatatgtttctagactcgggcccagacatgtagggcatggctactgcccacaggagcctgtttatgataatgcacgacaagtgttactgtggcaggaatcacacaatgctttgccatatggatgctgagaacagtggagtcatatgcatatgatccagtatctgtgagacctaccatgc

SEQ ID NO: 141962 - DNA, 451 bp, Glycine max
  Clone ID: PAT_MRT3847_99205C.1
gcgcgagaagaaatctaaaagcaagaaaaagaaagaactcttacaacagactgatccaccatcaattgctgttattaaccttttcccatctggagatgttcctgaaagtgaaattcagcaggacaaagacgataacctatggagaactacttcgagagagaatagaaaactggagcgccttgcgaaaccattatataattcagttcatcaagcggcagaaattcatcgtcaggttcgcaaatatattaaaagcattttaaagcccagaatgttgatgactaacatatataaaacattggagaacactattcgtaatctaatatcatacgataaccttcaagcatacattacattccccacaagatactctttaaattaaattactactcactataccccaaattcataagataatactatacttcagtattattatattatgaaatttgat

SEQ ID NO: 141963 - DNA, 397 bp, Glycine max
  Clone ID: PAT_MRT3847_99206C.1
ttatcaattataaggcttggttcaagtaaagcgtaggctttgtatatcgaaggaatcgattaccatttatcgtaattgattacaaagcatctaaaacacttagattgcttgttggacattgaaataattgattaccacatattgtaatcgattaccacgattctaaaaatgcagaataatggtatttaattaatcgattacagttacttgtaattgattaaatctgtttttttttctactaaatctataaatacctcacttgttctatctcttatatgactttctgcgaaactatcacttcataatatttctaatagtcatctaaagaggttttgatgcattttccctcaagagattgactcagcataaatcttggaatcttcatcatgggttgatc

SEQ ID NO: 141964 - DNA, 258 bp, Glycine max
  Clone ID: PAT_MRT3847_99207C.1
gcacgccggtgtacagatcggcaacgcctgttgggagctttactgcctggaacatggcatccagcctgatggtcagatgccctcagacaagaccattggaggtggtgacgacagcttcaacacatttgtcagtgagactggcgccgggacacacgtccccagggccgtctttgttgacttagagcctcctgtagttgatgaggtccgcactggtacataccgccagcttttccaccctgaacagctgatcactggtaa

SEQ ID NO: 141965 - DNA, 273 bp, Glycine max
  Clone ID: PAT_MRT3847_99208C.1
ctaaagacaaacctcattgaccataatcacatctcctaatgcagaaaccgacatacgaaaggagcgttctcacatgagatgacagacgaccgggtgcatgctatcccaaagctaggtatgtatgcggccaccgatcactggacctttgacgccatccacaggggacccctccgtagagtcgacctcgactccggaacgaactgctgggccttcgatatcggcgacctatgaatcctgagctcccacagatgttgcaccaaacgccagaaatga

SEQ ID NO: 141966 - DNA, 662 bp, Glycine max
  Clone ID: PAT_MRT3847_99209C.1
aagttaaatgaatccggaatatattggttattcccagatactaaagcaaatacagaattcaggtttgccattcaatttcccggccaggagtcctctctaataaccagttaaatggttgtggattggtggttataataaccacttgttatatagggttaatttttataaccatttataaatataccggttatataataatcggttaataatggttatggttaaaaaatttatataacaggttattttgaacactcctagccaggacgatccaatccaacagcagcccgctgtcctggccagagtagacatttacaatgaattttgttatgtcctgaagacccgaaccctgggggagcgaaggatacaatgtgaacactcagtataccagcccaaccgttcttaatatgatgggtaatagtgctcccaagggtaaatcatttcattcctctctaggagaaagcacatcaccatccaggttgagagtttcagcacagagacaactaaacctcgtctttctcggaacgattttacgctttaagaggacaataactcgaccaaaaaatggtaatcaatgaaacaccagcaaggaaatatcaaacttacctgcagaaataatctgcactaatttgaatcatcatccatttcaagttgcttcccaaact

SEQ ID NO: 141967 - DNA, 418 bp, Glycine max
  Clone ID: PAT_MRT3847_9920C.1
accacacgtacgacttgatcggtggagtgcaactctcactaatgaggtgaacctttcggatcatacaaatacgaaattcatactaacttgctgtgcaacggatgattgatgatgctaattaacaaaatatgccaacatagaagcacaccttcgagaactcataactgtgcctaattaccctacgagcagcatgcttgtgataggagaacttaaatacttgatcgttatgatcgactcagtgtacatgaacaacacacatgagcttgtgctagactgaatgaaaaagattcacgtgtctgagcgccttacccgtaaaattctgaatgcaacaaaaaattcgattccacttgtgggagagtttgctatcttctcagatacacagcctagaaatcatccaaccataattaaggtaatatgg

SEQ ID NO: 141968 - DNA, 1227 bp, Glycine max
  Clone ID: PAT_MRT3847_99210C.1
ggctcgagtaatggttggcacaattcggctcgagcagtcagagtatattcctcgggaaccaagagagccttctggttctggagccgatcaagaaactacaaataaagatgttaataagatgctaagacgcctagctcagaatcgagaggctgcccggaaaagtaggctgcggaaaaaggcttatgttaaacaattagaatcaagccgtttgaagctcatgcaattggagctggaaattgggaaagcaagaaagcagggtctgtatatgggcactgcattagatgccggctatataggatcaacatcagaaacaataaatccagggattgttgcttttgaaattgaatatggacaatgggttgaagagcaagaaaggcggaatgaagaacttagacatgcatttcaaacacaagcacctggtgtacagctcaacgtagtggttcagagtgtcttaaatcattactcaaatcttttcagaatgaaagcagaggctgtaaaggctgatgtcctctatttactctctggtgcgtggaaaccatcagtggagcgaattttcctttggattggaggctcccgtccatcgcagcttctaaacatcatcgtgcctcaacttgagcctttgactgatcaacaaattgttagtattaacaacctccgcctatcgtctcagcaagctgaagatgctctttcacaaggattggaaaaacttcagcagagtttggtccacgacatggcagttgatccattgggtgtaggaaacttgggacttcagatggctcgtactatggaaaaatttgaggcactagaaggttttgtaaaccaggcagatcaccttaggcaacaaactctgctgcacatgtcacgcatcctgtcaattcaccaagctgctcgcggcttgctggctctcggggaatactttcatcgtcttcgtaccctttgctctctctggtctgctcgttcatgtgaacttgcctaggctccttagaggaagagacctagctgctctgcttcaactgaatcatctcttctgtgcttttcaaaacagttactcgattttggatatgaatgagttaatgccgtgtaccagcatgaagcaaaattatgtgatttgctgctcttgtgagtgtgcttgtacataaacagtgtatcatctttagtactatattatatatattatgtaaaactttctagtatctttcggaataaaatgtccattatgttactttt

SEQ ID NO: 141969 - DNA, 334 bp, Glycine max
  unsure (1)..(334): unsure at all n locations
  Clone ID: PAT_MRT3847_99211C.1
caaagacaaatttatntttatacaactccctacgtcctccgggcgcagtgtttctttccaaatccgaccacactaacaacaaacttcctatcttcctctactttcacggcggctccttttgcgtcgaatcctgtcttcttctttttcgtccaccgttctctcaacatcttggtctcataagccaatataatagtcatctccgtcgaacttagactccttctacaccatcctatcccttgttgcttacgaagacagttggaccactctcaaatggattgcttatccacgccaacaacaccaacaccaccaaccttgagccatggctacttatcca

SEQ ID NO: 141970 - DNA, 839 bp, Glycine max
  Clone ID: PAT_MRT3847_99212C.1
cattactcaaatcttttcagaatgaaagcagatgctgcaaaggctgatgtcctctatttactctctggtgtgtggaaagcatcagtggagcgcattttcctttggattggaggctcccgtccatcacagcttctaaacatcatcgtgccacaacttgagcctttgactgatcaacaaattgttagtattagcaacctccgtctatcgtctcaacaagctgaagatgctctttcactaggattggaaaaacttcagcagagtttggtccacgacatggcagttgattcactgggtgtaggaaacttcggacttcagatggttcttgcgatggaaaaatttgaggcactagaaggttttgtaatccaggcagatcaccttaggcaacaaactctgcttcacatgtcacgcatcctttcaactcaccaagctgctcgcggcttactggctctcggggaatactttcatcgtcttcgcactctttgctctctttggtatgctcgtccatatgaccttgcctagcctctctaacttaggctcctcaggactccacaaatcacctaagattgctccttagaggaagaaacctacctgcttctgcttgaacttcttcaactgaatgatctgttccgtgctttacaaaacagttactcgattttggatatgaatatgagttaatgccgtgtactagcatcagcatgaagcaaaattatgtgatttgctgctcttgagagtgtgcttgtacataatcagtgtatcatctttagtaattagtactatattatatattatgaaaaactttctagaatctttcggggaaaaaaaaaaaaaaaacacccccc

SEQ ID NO: 141971 - DNA, 431 bp, Glycine max
  unsure (1)..(431): unsure at all n locations
  Clone ID: PAT_MRT3847_99213C.1
ctctgttagccaatcttaaaataataaaagaaaaataaaattctgtaactcgaatcgttgctactggatgactgcctaattacatagattttcgttttgcacgaaattcattttcttcgtttatgttgaatttcaacagggttttttgttttaggactcgagaaaattcttgtacatatatacccttccttttcttttcttatttttgttaattttttttcctggtgctgaaatgttagggttggaatatcaatataggttgaagttaatagtgggttttccctctttattgtccaaattcttcgtagaatgcgtctggctttttcttttgttgttgttttgtagtgatgacgttttcggganatttcngntttggntcatactttggngcttggggctggggctcttgttcnntcgtttttgcttggggg

SEQ ID NO: 141972 - DNA, 1300 bp, Glycine max
  unsure (1)..(1300): unsure at all n locations
  Clone ID: PAT_MRT3847_99214C.1
ntgccatggggctcctgtcccgggtcccgggtcgaccatgctcggcggccgccctttttttttttttttgaatgaggccaaacccgttattcaatagaatagcaaaacacgttatacaagttgcaaattcctatgaacatagatatgaaggtaattaggtaaagtaaaccaagaaagccacctaaatcataacaagttactaattaaccccaataagaaaggagtataaatattctgctattaattgtttctcgtcacttgctttggagctaatatacacatttctcacaaagaattagtatggacattcttgtaattgtagctcaacactctcataacagaactagctagctcagttcttggaaccagaagtaggaggttggtgcagctgctgatacattgcagcaagtctactgtaggcatccatggtcatgggctgcgattggcatccaaaaattgtggacaaagggtcaggcatcacggaagccggagtcccttgaaggcggtcgcctccaccagcagcggcagcaacagcggcatcccacgaggctgccatgggcatgaaggcagaagggtggaggactggagggatgccagggatgtgagcacggttcatggagttcatatccatccccattcccatacccatccccatacccatccctaatcccatgcccattggagacatcatcgacatttgaagctgttgctgcatggtcaatggcagcatcatcgatgacatgttgattctatttatcatctgcaactgtgcttgcaactgcttcaaatattctatcacctcatccaacattgaagctttatcactcttgctggaatttgggaccaacttttgcaatgtcttcattctttggtttatcttatccctccttttcctttcagattggttgtgtatagccgcagctctgctccttttagtggacaccgatgattttccgtttgctctctttttcttcccttcatcctggtcttctcccactggtttactgtgggaaacagaatcgtggtcgtctacggtggtggtcttggtgcagtgcttagcggagctggtgttttcgagcgagttgatggaggtggaagtggaacccacgccaaactccctgtcgcacgtgtctagggtcacgtgcttgctatccctcccaaacgtggcactcccactcacgctctgatccctcccagtcgcctcatgccccttcgcccccttcccccgcagcatgaccccacacgcgtggagcaccccacatgcacgtgccgncggggaccgactncatgccctgcttgc

SEQ ID NO: 141973 - DNA, 451 bp, Glycine max
  Clone ID: PAT_MRT3847_99215C.1
aattcggctcgagggggcattaattaagatcactcatcaaaagtttgattctgtttccagtttccaactttcctggtatggcattagaggcagttaatgacagaaaagctgaagttcaagcatttgatgattctaaaacgggtgtaaaaggtgtcctagattctggggtaacaaagatccctaccatgttccatgtcaagttagactcaactcacacctcaccaactcactccaacttcaccatcccaatcatagatcttcagaacataaacagcaattcaactctgcatgctgaagtggttgaccagcttaggagtgcatctcagaagtggggatttttccaagtgatcaatcatggcgttcctgtggaggttttggatgagatgatcagtggaatccgcaggtttcatgagcaagatgctgaggcaaggaagcccttttactggggaga

SEQ ID NO: 141974 - DNA, 187 bp, Glycine max
  Clone ID: PAT_MRT3847_99216C.1
ggctgactagccaatccttcgcgaaggtgcatagagccgaataagtaccaatggtgaagtcctcaagggaccttgactttccacctaggtcttacaaggctaaaggggcttacctaaggttcaatttaaggaccccagggaaaacggcttttccaatgaggaactggcccttggtcaaggttaaaag

SEQ ID NO: 141975 - DNA, 653 bp, Glycine max
  Clone ID: PAT_MRT3847_99217C.1
tgaaaatgatttttaagatcaccgccggtaatacggtggttaaatgtcacgactcaggagtatttaaatcatttctaaaaaggcagggggtttacctttaatagtgaaagggaggtgtgaatagtaatttccttgcggcatccattgcaccagattaggcctaggtgggcccgttacaatggacgcatgcctatggccagttcttctttcgtccacagactcctaatttccaatttttcttacactgaactataaaaaatgtttcttaaattctctcttcgtttaacaggctaaaaaattgttgaggcaattccctttacgttttgcaaaaaataaaacgcaagggcaacaccgtttcagtaacttgatcctccaatcttcaacaatttgcttcgtggttcatttcatgccaccagcacaattcctctaacaagagttggacttgaatttggttggaaactgaggcagcaacgcgacttccaacagtgttttctgttagtacagaataaactcattcaagaaatattccaagatcaacatgactcgactacttcggatcaaccgaatcgtctaattgcagaaacaaattgaaaccaactagtagtgcaagagaaaaaaaatattgatagaactgatgccgctgcttctggtgc

SEQ ID NO: 141976 - DNA, 508 bp, Glycine max
  unsure (1)..(508): unsure at all n locations
  Clone ID: PAT_MRT3847_99218C.1
gaaaagaaacagttgtggggggtttttttttgaccacacccccaagagcacaccagngnctgtttcggacttttgactcggagaactatcttgccaccacaatttcccggcaattcctttatttgacttcactatccattccgattccctacctcattttttttaatattttatttcctttgcttttcacttttcactcattcctcttctcgctatattcatcaataatcactacaagagagatgcatcgccggtaacctaaacaacctccacggcgaccgaagcaatgatcacgcaaccaccagacgctgcccccgccgtcgcacccaactccggcgaaggaggagagaagaaaagcataaacgctgagctctggcaagcttgtgcggggccgcttcttaacctgccttcgcctggaactcacgtcgtttactttcctcaaggccacagcgaacaggtcgcagcgtctttgaagaaagacgtggatgctcaggtcccgaactatacc

SEQ ID NO: 141977 - DNA, 437 bp, Glycine max
  Clone ID: PAT_MRT3847_99219C.1
ggacagggtcacgctggggaaacctgtttgaaattgatgcccctttacgaaacccaaaatgacatagcgctagttgggttattgccttagggtagcgtcaagttcggtttgcttgaccatatttggcgatcttcgcaactttatagagcctgcgttgggctaaagcgtttggggcttgaagcccgtccaggggggcgatgacgtgtaactcatgcctaccaatgcctaaatagcttgagcggatgtaatcgttattccaaacgaaatgcaaatgtttgttggcataaccataccacaagttctgaggttggcgcaaattgatgtgacgtggtgacgtgcgtgacctttaaagcatgtctttacttgcttgagcttcattgggcactcgttagttgattaggctcgaacgacgtcatcatggcttttggcagtctttt

SEQ ID NO: 141978 - DNA, 625 bp, Glycine max
  Clone ID: PAT_MRT3847_9921C.1
cttttcttttttttatctctttttttctttttttttttaaaacaatcaaaaatcggcttgttttccaagcattttttgcatgaacatggacatcaccaattatggttttatatctattcaaggtccccattatactaaacattgcccattgtaaaccaagtttctcgcccctccaaaaagaaagggttttatgctgaacaacattaacccccgagaggtgcgccgaaatcattacctcaggaagccccttttttttacaataaaccgaataaaaaactttccttaactatcccagtggttcgtaaaaacaggacaccagttccgcttaaaaccacaattattgggcaaaggctagtttttttttaactaaatttttgcccagggaattaataacccgtatgaaacccaccttaaggaaatggttaaatgtctcctaataccaataaaaagttgttattgaatttttttgaaccgatgacccccctcagtttctgaattcaatcccccctggttggccttggttttggcagcccagaatcccttgttttgcaagctttaaaagggttgcttcttaaatctaaaaatcttccctaaaaaagggccaacggattcttacaacttaaaa

SEQ ID NO: 141979 - DNA, 303 bp, Glycine max
  Clone ID: PAT_MRT3847_99220C.1
aaaattcacaaagactccaccaccaacaaaggtggcggtctatataaactttacgcgaacccacactttcttttataacattttataaccacaaaaatcctaccttacatactacacttataaccatcttcacccttttttttaacaataccccctacataattatagaacctcacctcttctcttttacaaacattgtttatctatacacaaacctacatttccctctaaaacaatttccaccccttaaaatgcacatcatcctctccattataaccttttcttcttctatcatttcaacac

SEQ ID NO: 141980 - DNA, 760 bp, Glycine max
  unsure (1)..(760): unsure at all n locations
  Clone ID: PAT_MRT3847_99221C.1
ccacgcgtccgaaagggttaataaataactagtactgaatagagagagaaacaaaagggaattctcacttcattcatcctttaacattgttacttgttttctctttcttattattatcacttggccttttccgttttggtggtgaaatgcgaatctagggaccagttttggttttactctcgtgtgtcttggtgtgtttgtgatatgttctggaaataatggcgcaaacccacaaaattgaaaggtagcgaaaatacaaacgaccctcctttgtttgatgcatgcacgtctggtcccttgatcatgactactgagactctctttgcatgtcgtttttcagaccccttttgattctattctctctaacagggcgacaaagccggggaataagtgaccattcccatattcagttttttctctctttttttctttcttctccaatttcctcactggtttatgaatggaggttacagaggtgaaacttgttcccaatttatggtctctgattctgcacataaaaatgaatttatttgactgcagttttgcacatgtcttgtagactgtagtagtacaccactagtagtacaagcctccaacactgcagagaagcatagaattggttttgaattttgatgttgtctactcgaagttatggcactgtcccttcagaataaaaatgaaccacggtgataaagagatccatgcanagcatcccctagtgattgacaagctctgaatctgatggcattntctagttcct

SEQ ID NO: 141981 - DNA, 322 bp, Glycine max
  Clone ID: PAT_MRT3847_99222C.1
cgctcgagctagttcctaatgcttactttttatttttcagcaaagacagaaaattggcgccatttccttgccaatctgaatgcaaatggagagaaacttttggtatgtgggaaacactaccgtacagtcttcattgcgtgtttatgccggacattagactccgaagcgcggaccaatgttgcatgttttttttcaaatctggcgcacttcgacatggatttggagtgtacccgtgctgtgcggaaaagatttgtattgctgatgctgaacttcgttacgggacacatggtgcgtttgattttactcctggaaaacagggggg

SEQ ID NO: 141982 - DNA, 1012 bp, Glycine max
  unsure (1)..(1012): unsure at all n locations
  Clone ID: PAT_MRT3847_99223C.1
ttcagaggactacactcgagtgatttcccacgggcctaaccctagaactactcacatataatgataactgcatcgttgagagtggttgttttgatgttggatgctcttcttctcccttggaaaatgtgtttcttcctcctcacatcagctatccctccgagagcttcatgagcttctgtttttactgcaacaaaaatcttgggcaggatatggacatctacatgtacaggggtgagagggcattttgcagccgtgaatgccgtaaccagggaatgctgttggaggaggggatgatcaaattggaaggtggagatatgtatatgggtcatagttgagtttatttcccggtgctactaatctggcttgctttgcttcaaagagcttataataactctcttacttttattagttgccttgcctagattcatttttgggagataaagtggtcctttccttgaagatccaggatcactgtacctggttttgttctttctgtgtagtcctgtagaaggtggaaaagattgaaaatgaaagcccgaaatactatagagaagattcttgtggaaacaatgaattaggagcatgctatttgtttttgcattgctcttgaagcagttcgtatatagtaataatactatgattgcccacgtaggaccaatcgcatcatgtcaactagattttttgaggatctgcgattagagtgggaacagttttctgactgcacttgaggaatgatgccgtgccaatttcgaaagggagaaatggaagaggccaatttgtggtttatcttgacaaaattaagaagacactaaccattaacgtcgaacttttatttggttgattggtagtttttgtagtgaagcacatctttgtccttggctgctaccgataaacttcacaaccattgtttttttttttcatgtggtaaactttagtttttttttatatcttcttcttttccgncttattgacataaataaagaaactgctcactagtgctaaaggaactttg

SEQ ID NO: 141983 - DNA, 211 bp, Glycine max
  Clone ID: PAT_MRT3847_99224C.1
tgaataccttataaaaaccctgatacaattaacattttcttgtttcttgttttaacatgtccatagtgtcatacaaaggcaaaagatcaaattgagttacaatgtgttatggcttggcgtttcctctgtctggttgcatgtttgtggattgctttgtaataaaacattgtaacgggttttggtctgtataaattttactaagtgagatatt

SEQ ID NO: 141984 - DNA, 367 bp, Glycine max
  unsure (1)..(367): unsure at all n locations
  Clone ID: PAT_MRT3847_99225C.1
ttccacgcgtttcgcccacgcgtccgaacaatctgttgcaaatctacaatccatctcttgcttgggcattgcattccaaccaattgacaagcactcaacatctaccatcctccaaggatcgacattcagctcccaagatcagcatcacgccaaaagctgcacgtgctatctttcatcatcatcaccatcaatccaacttttccaacttgttcataagtctggggaaagcccactagtcggatcaatatccacatcaaccatcaccacttacaccaacactacaaccaccatcatggntgtcacaattcagcaacaaccctcagaacaaccccaccggactggcttnctcgatctccccgtcgagatc

SEQ ID NO: 141985 - DNA, 543 bp, Glycine max
  unsure (1)..(543): unsure at all n locations
  Clone ID: PAT_MRT3847_99226C.1
ggctcgagttcagaagctagtattttgaagctcaagaattacctgaagaaaggtatggggctgacttgtgaaattccagctaaaggacctgaagtgaaacctagggataatagtggggcacagggtcatggtttcaagcagaatattaggggtcccaaaataggtaaatcaagtttcaagcgacagtctcaacgcattttagcttcacagacacctgtatcagaacacaaagagcatgctatacatattggaacagaatcccaattatcaaaagacacagcagattgtgagaaccaaagttgtactgatgagaaaaacaatcagctgctgccatcaattgtagtggagttcaatttcccttcaggtttcaagtactaacacccaaactacagatgaatgttcttaagctggacaaaggatagagattctcacccatcagtcagggacaactnagctgtctaaggagctgtttgtcttcagtgtgcaatgcaagatttcagagacacttgtgttttgaacaagtgtcangtatatgcacttcat

SEQ ID NO: 141986 - DNA, 2237 bp, Glycine max
  Clone ID: PAT_MRT3847_99227C.1
ccacgcgtccgtttggccttttccgttttggtggtgaaatgcgaatttagggaccagttttggttttactctcgtgtgtcttggtgagtttgtgatatgtttgggaaataatggcgcacacgcaaagaaattgaaaggtagccaaaatacaaacgaccctcctttgtttgatgcatgcacgtctggtcccttgatcatgactactgagactctctttgcatgtcgtttttcagaccccttttgattctattctctctaacagggcgacaaagccggggaaaaagtgaccattcccatattcagtttttctctcttttcttttttttttcctttcttctccaaatttctcactggtttatgaatggaggtcacggaggtataaccaacaacaatagagagaggggtttcatggaaacttgttcccagtttatggtctctgactctgcacataaaagttaatttattgactgcagttttgcacatgtctcgtacactgtagtagtagtacaacaccgcagataagcatagaattggtttaatttgaattttgatgttgtctactcgaagctatggcactgtcccttcagtgcccgttcgctgccccacacttgcgctcgaacagggacctcgaacgctccacatcagctatccggcccgccgtttcatgatcttcgctcttttcgtccacaataaaaatgaaccatggtgataaagagatccatgcaaagcatcttctagtgactgacaagctctgaatctgatggcattttctagttccgtcaccattaccataaaaagactttaaactcgtatcatctttcttcagttctccaaagctattcgccaatttcacatcgaaagtgttgtgtgaaactgaggctatgatgagtccaacctccattcttgacaccaagcccttctcttggcttgaagaacccttttcggtcagaaacaaacagccccagaactccagttggtgaatacaagcgttattgggatgagttggattcaaaagggctagttgatgctcttggtgaaataacatcaaagttacaaagcagaatgattctgtttggatcccagctcaagattcagaaccatcctcccctggcccattcaacactttctccatctctatctcctaaatctgcgtttgggtgtgccaattcagctcttgaaacctccaaatctccgagagttttctctgctagtgaaatggagctttcagaggactacactcgagtgatttcccacgggcctaaccctagaactactcacatatttgataactgcatcattgagagtcgctgttttgatgttggatgctcttcttctcccttggaaaatgtgtttcttcctcctcacatcagctacccctccgagaccttcatgagcttctgtttttactgcaacaaaaatcttgggcaggatatggacatctacttgtacaggggagagagggcattttgcagccgtgaatgccgtgaccagggaatgatgttggaggaaggtggagatatgcatatgggacatagttgagttcctttcccgatgctttgcttcaaagagcttatatatagtaactgtttcacttttattagttgccttgccttgattcatttttgggacataaaagtggtccttcccttgaagatcctggatcactgtacctggttttgttctttctctttctcggtggtagtcctgtagaaggtgaaaaagattgaaaatggagagaagatttttgtagaaacgatgaattaggagcatgctatttggttttgcattgctcttaaagcaattcacagtgataatactatgattacccacgtaggaccaatcgcatcatgtcaactagattttttgaggatctgtgattagtgtgggaacagttttctgactgcatttgaggaatgattctgtgcaaatttcgaaatggagaaatggaagaggccaatttgtggtttatcttgacaaaagaagaagatagtgacaattaacgtcgtacctttatttggttgattggtagttattgtagtgaagcacatctttgtccttatggctgctaccaataaatttcacaacccttgttcttcatgtggtaaactttagtttttttttatatcttcttcttttccgtcttattgacataaataaagaaactgctcactagtgctaaaggaactttgtatcaaaattaccaagttaaatcatgggtcatccatgatttttgtcaa

SEQ ID NO: 141987 - DNA, 374 bp, Glycine max
  Clone ID: PAT_MRT3847_99228C.1
gcagccttcctcattaaaggggttcttcaagccttagaaagcgttggaccaaaaacacacattaaagggcgtcccagcctattataaaaataaaaggaggagccctttttattttattatcgaccccttgttgccagggtaaaatctctttcaaaaagaaaaaggtccatggccaacactttaatataaatactctttccccgctttacttaacctctggggttaaaaaaaaaaaaagaatttgtactctagcgcacttcttggctgaagaccgctttcttaaaaaagaaaagattgtttatgagaccatctaaatgaactgccctgaccgttgattaaaaagcacatgattgggaaaacccggcaggctccaa

SEQ ID NO: 141988 - DNA, 181 bp, Glycine max
  Clone ID: PAT_MRT3847_99229C.1
ctaatattaagggggggcatttatagaatgcaacgggttaagcagagactcagaatacagcaaagccggactatatacaggaggcgaccaattgccaaacagtaaaaaaaaaaaaaaagaagcacccatgagctaaacacactccataaagaagtcccaaaaccacttcgaactttgcttg

SEQ ID NO: 141989 - DNA, 600 bp, Glycine max
  Clone ID: PAT_MRT3847_9922C.1
gtgccgcctgcttggggggggggggggggggggaaattttaaaaagaaaggctgtagaggttcggagtgacctaaacctaatagcagtataccgaagccgagaaattaattgctaagaggcggattagcaatgacgtaccagtaagtggtacaagacgttgagagacgggaaaatattgctagataggcttccgggacccgggaaggggttagatgtagaatactcgataggcacgttagtgattactcgagggcacaggacaatattggccataacaccctacaccaattgacaaaaggttttagttgctggttagtggtggacctgctggtcatagtggctagcgggcttgcccataacacccgacaccagtttacaaaaggttttagtttctggttagtagtgcacctgacggtcatagtgcctagcgtagatgttcgagatgtggtgcaaagagttttcaatcagcccagttaaggcggggtgttaagtagctgtgtgagtaaggtacaagaagcaaggtggggagaggtagtgaagctaagtgtctaggttctgaggcgggggttatcaaaatgccaattaagactgggtaaact

SEQ ID NO: 141990 - DNA, 552 bp, Glycine max
  Clone ID: PAT_MRT3847_99230C.1
cccacgcgtccgtgcgagaagacgacagaaggggaggcaaggaagaaggtaaaagtagatggcgttgaatttgactgggtatatggtactgcaagtgtctctattatggctatggcagtgacagtgacaccctaccctttcttttggtttggctcaaaaggaaaaatccaacactctcctaggcacaacaccattgactacactgcaaccctctttcacacttgtgcgttgaccactttaaacttggacgtttcgcgtcacgtgccataccaatgctatgaaatgaacccattacccatccttgccgctgccatatatatacgtgcgtttcctagctaccgacctaccatgaatctgtggatctcttttctttggattttatcattattgtcattattactgatatacgatcacataaatcttattacctagcgtacgtgtacagaaaaaagaaatgttgaatccaaattgtattatgggtgtgcttgattttattttttcttaaaattattttaagctaaaaagttaaatatataatttagttcctgcgct

SEQ ID NO: 141991 - DNA, 756 bp, Glycine max
  unsure (1)..(756): unsure at all n locations
  Clone ID: PAT_MRT3847_99231C.1
cggacgcgtgggcgactttggcggtttcaggtacctgttattcttataacaaaattatctccatttgaaatttaggctaaaaagtatttttcaaatctagtccctcgtacttttgttttaagatactaatgcaaaactaataaaaaacaaagacatacgattgggaaaaacttactattattccattaatatgttggttattttcattgatgtgacaatcacatacgagtgtatgatgtatgtgtacctaattagctatcactcaaacgtttaacatgtcacttgtgtaacagtgttagatgatactaactaataataacaagattaaattaattgatgattttcaaattcaagcacaattttgtcatctttttaaattccaaagactagtttggttgataaatgataactacaatttcaaattgattgataatttataattttagagattattttactattttattaattttggcgaccaatatgatcaatcattataatttcatacactaacttggtgattcactcctatgattattattctttagatgatttgtgactaaattttatttgcaattttatcgagtgatattatcattaaagaaagtacgaaaataaatattctttaatgtgttatttcaaaaaaggaaaagatgttaaaagaaatctataaaataaatattatgcatataaaaaataaaaaatttgagttcttaaaaactcattncaaaagtaattggngggaaatattttttt

SEQ ID NO: 141992 - DNA, 676 bp, Glycine max
  Clone ID: PAT_MRT3847_99232C.1
agtaattctcccaagggaacggaagaagcatgagtatcatgaagccataaaaaaacgctataagcacctccctgaagttaaccgtatcgcaagacatagacacttgccaagaccaatattcaaagcttctgctttaatgcgcgttatggcggatgctaagagaaggaaggaagagaagaggaaagctcacagtgctccagggagtattacaacacagccattacgaagacgaagaattatcaaagaagtcgagtgaggtttttctgagccggtacctaaaaaaaatcaagcaaatatttatcagctattacggagacgaagaattatcaaatatactgatgtcagcatgcttctcttgggacgttccatctctggaggtgcttccaggttgatttcttaggcaaatggatgtaccgtgcctacaattttatgcctagttggctcagttgcatgtttagattggtaaaacaaggttatatttttgtgattcttcttctgggttcagttcactcccaattcaagaatttttttttcttgaatgtagtttctccttttccttaaaagcccttagagagctaattgttatatttttaattcaattcagtgcagtgattatgacaaaatcagtgacagatttcagttttagtatttataaaaaaaaaatcattgtttagta

SEQ ID NO: 141993 - DNA, 380 bp, Glycine max
  Clone ID: PAT_MRT3847_99233C.1
ctgaaacacatgctctttgcataatatgactagctgtccattggaccttctcttatcagcttctttcttgtgaacagatctgtccatagcgctctggtttctgctctgtcctttactacttggggagggcccaatagtcgacattcttgtgttactataacatagttacatacgcatggcgttgtggcaaatgcgttgcttgcaaatctcagtgtgacaaaccgtctgtgttccattatttatgggtacatcggaatgtgttctatccctttggcaatgtctcagcatcattgactgaagctggtatatcaccgtctatctgcttcttataacccactattcttttcctttttgactaacacactcacttgcacgaactt

SEQ ID NO: 141994 - DNA, 542 bp, Glycine max
  unsure (1)..(542): unsure at all n locations
  Clone ID: PAT_MRT3847_99234C.1
ggtccgnattcccgggtcgacccacgcgtccgctatctttgactttgtgtctgtctgctgtagaggactttgttagaccaaactggctctatcatacgggagtctgaagtttgaggtgagcatctgaatctgcgcaagatcatttgaacggcgatagtgaacaccctgtagttttctattctaaataataactgtggctgaactcctctggactctggctcgcgcgccgcccgattcttcacgatagagagcctagtaagttttggtccgaccaacttgcattacaacccttgagggtgactgaaactgaaccacacggttcgtgccgttggaagacaaagaggaaaaaacttgatgaccatgacgctggcagcaactggagtttgctactccctatgttgagtaaaaaccccggcgccgcgtgaggaaaacgcatcttatgttggatgggaattgccatgaggctacagagttaaccaaaagcaattcatctacctgacaatacactggcggtactccttgtacaattacaaggatttatg

SEQ ID NO: 141995 - DNA, 706 bp, Glycine max
  unsure (1)..(706): unsure at all n locations
  Clone ID: PAT_MRT3847_99235C.1
ccacgcgtccggtgatgcttacatgttgatgtaccatcttaagcatagcaaaaatgttggtgaaaaggggggaatcgtttatggtgctaaccttgaagtagagggcaatgcagttactgcacaagacagtgcttgtcttccttctcatttttgcaaagagattcaaaatttcaatgcttcatatcttgattcttgcgagcagtacaaacataggaaagagttagaattgagccatatcaatgagaggagacaggaagttcgatccattttagctgaagctcctactcaaccactggagcaaccgtatttttggatttgtagtgactggcttcgccagtgggctgacaacattattccaattgctcttgacaatacatctatccaatgttcacatgggaaagtcccagtgtcaaaggttacctcaatgaagcgattatcttctaaagcatgggataaattattgtctaagtatggtgggggaccaactctttctcatgaagactgttgttgggattgtctgattgatggggctcagaatgtggtgtcagctgacacttatcgggatcaaagagaatcattgaagcgacttgcacgggatattctcgatggaaattgtgaagacggaatgtactatgtgtctagaccatggttgcagcaatggtggaaaagaanagttgntgatgctccatctgaagctgatgctgga

SEQ ID NO: 141996 - DNA, 767 bp, Glycine max
  Clone ID: PAT_MRT3847_99236C.1
cgatcaatgagggtgggtcaacgagtgacttggaagcaagtaagcaacaaaaacagcggtagttacaacttacaattctcgaactcacacgcagagagagtagttcagtgtggagagatgagtgcatatttgataacagccattcatctgttacttgtgttcctgtcatcatccacttccctttcgaccgtgttcggctccgaggaggaacaattctatgccaaagaaattctcggagcagcacagaaggagaaggaatggttagtttcagtaaggagaaagattcacgaacacccagaacttgctttccaagaatacgaaaccagttctcttatacgcagtgaactcgacaagcttggcatatcttacacatacccagttgccaaaaccggcatagtggctcatcttggctctggttctcgccccatcattgctattcgtgctgacattgatgcactccccatgcaggagcttgttgagtgggaacacaagagcaaaattgagggcagaatgcatgcatgtggacatgatgctcacaccaccatgctacttggggctgcaaagttgctcaaccagcgccaagataatcttcagggaactgtaagacttctattccaacctggtgaggaagggagctgaagtgccttacagatgataaatgaagagttgctccagatgtagaagcattttttgcattacatatcgatactaccacacctactggagccatagcattttattcacgtgcatggacagcaactgggatc

SEQ ID NO: 141997 - DNA, 578 bp, Glycine max
  Clone ID: PAT_MRT3847_99237C.1
acggctgcgagaagacgacagaaggggacattcaatccctttggtttaatctctctagggttattttctctctcttggattccattcctgcgtcttcatcagagcagccaatggaagcggcggcgacggcaacggcaacagttctcgcaccaccgtcggctttcctcggaagaccctccgtactcgccttccgttccaatcttcgcttctccactaagttaagcacttctgtagctatctccaagcatggtcatgggagacactgtgttggaactagaaggggttttgtagttagagctgcatcatttacaccagagtcatccgaaccgagttccaagattgctccacttaagctggagtctccaattgggcagtttctgtctcagattttgataagtcacccgcatcttgtgccagctgcagtagagcagcagcttgagcaattccaaactgatcttgatggtgataaacaaaagaaagagccttctgcttcaggcaccgacttagttttgtacaggagaattgctgaggttaaggctaaagagaggaaaacagctctagaagagatattgtatgca

SEQ ID NO: 141998 - DNA, 376 bp, Glycine max
  Clone ID: PAT_MRT3847_99238C.1
ctatattactttaaaaatacagaacaaaatagtgttttgggtgactgcacctttatggttaaaaataagattaaaatatgtttttaatttttatggatataaataaattttatttcagtttttttaaaaaaaaaaaaaaaaaaaaaaaaaaaaaaaaaaaaaaaaaaaaaaaaaaaaaaaaaaaaaaaaaaaaaaaaaaaaaaaaaaaacaaaaaaaaaaaaaaaaaaaaaaaaaaaaaaaaagggcccccccaaagatttaaatttaaatttccgtttcagggaaattcaaaccctttcaaattggtccccaaaatcaaattaaagggcccgcgttttaaaattttcgcccgggaaaaaccagggcttttccaaa

SEQ ID NO: 141999 - DNA, 236 bp, Glycine max
  Clone ID: PAT_MRT3847_99239C.1
aaatggttgaaagagatatttggcggggcgattgaggttgtgacagcacagtgatggggcactctttaactgtgctgtgacatcgtgaattgttgtcggcgatggttccttctgatatttgcgtgcaggtttgtattcgttctgtgtttgtcgaatgctgtatcgcgattgttggattactattgctccttggtgagggctagttctagttgtgattgtgatatgcgacaaactgg

SEQ ID NO: 142000 - DNA, 160 bp, Glycine max
  Clone ID: PAT_MRT3847_9923C.1
cgacgagcttactactaggaggcctttctttcttttcgttttttttttttgaagaacaaactgatactcttctctggctaatctaaagtaaaacgctctacaaaaagatgtcctgggccacttactgcagaactctactctactgaaagattctaactac

SEQ ID NO: 142001 - DNA, 1338 bp, Glycine max
  Clone ID: PAT_MRT3847_99240C.1
atttatccatgccttaaatttttagaactctatctaacataatactagagccagtcttttataatattagagcatctagctcaaatagcatggcttccaatctgattagagtgagcacaagcttggttctagtagttttagtagctctcacagttcaaattttctacatttcacccatagatccagttttgctggatataaaacctgctccttcaaccaaagacaatcaattacagaatatcattaagcttggagaaggacttttgaaggaaccagaagatgttgttgtagataaagaagggactctctatacagctactcgagatggttggattaaaagattgcgcaggaataatggaaaatgggagaattggaagcatatagatagtcatactttgctaggaatcgcaacagcaaaagaaggtggtctcattgtttgtgatacttccaagggtttgctcaaggttacagaagaagatggttttagtgttcttgtttcacacgtaaatggttctcagttaaggtttgcagacgatgtgatagaaggctcaaacgggaatgtatattttagtgttgttagtacaaaatttgatcttcaagattggtatttggatgtgttagaggcaagacctcgtggacaagttctcaagtacaatcccacatcaaatgagactgttattgttcttgataatgttgcatttgccaacggcgttgcactctctaaggacgaagattatcttgtggtttgtgaaacttggaaatacaggtgtttgaggcattggttagaaggagcaaacaaaggcacaacagatattttcattgaaaaccttcctggtgcacctgataatatcaatcttgctcccgatggatccttctggatcgctttgattcagttgacttctgaaggatttgagtttgtccacaactacaagataactaagcacttggttgcatcgtttccaaggctaattaaccttgtcaatggctgcaagaagaaagcaacggtggtgaatgtggcaactaatggcaggataataagaaagcttgatgatagtgatgggaaggtgattaattttgtgacttcagctgtggagtttgaggaccacctttaccttggtagtcttaattccaactttgttggaaaattaccattgtatagtgcatagaatagtcaagtttagccctccttgaataaaggtgtgcctcagcttggatcaagcgaaagaagcatcccatgatggatatgtatgatttagaccaagcacatgtaggagaatattgttccataatgcatattctctgttcacattttgttagtactaatagaaaagtaataaa

SEQ ID NO: 142002 - DNA, 180 bp, Glycine max
  Clone ID: PAT_MRT3847_99241C.1
ctcgagccgtccaagcaagagcctcttctgagtttaccttgatatttatgcgaacaggaagcatttgatgctgccttcatcacaggacggatgggtataatctgaggtcaattatcgggcagtaatgtcactgagtgtaccaatgctcttaggcattacggctgaaatgaaggtgcgcca

SEQ ID NO: 142003 - DNA, 460 bp, Glycine max
  Clone ID: PAT_MRT3847_99242C.1
attaaaacatacttctatccttgtaacaggagaaaaaaattcttttatttatgccacactcatccatatgatattatgctgcaccgtagggctcacacataagaaccccctttgagagggttacctcttgggaacccccgtgatctattaacccataatatatgcccagcaaacccaacctgccaaagcataaaattttctactgacctcacctattacttgggaacaaaaacgcattcactgccttttgggccaagggactttcacatgacccctttcaatgacccactaaacgccctggatgcccgagtttcccctttcggcattttctctggtaccaaatagaaacctcttgctgtttgtgaagaggacccatccctactgcgccttgaatatgctccttgaacacagaggctgacataccacaaggggtatcaaccatccaagggtatctactatt

SEQ ID NO: 142004 - DNA, 739 bp, Glycine max
  Clone ID: PAT_MRT3847_99243C.1
gaacactcctaatacatttttgttttcacgggggtagtctcgttgacgcccgcttttgcgcctgttgtctctcagtctgctggcagttcagcacctgttgacaaggataaattcatccgtccagaaactctaaataactttgtaatatttcgcaccagtgattttacaactgtttctaaagaagttcatgtgagaacacgtagagtacaattagttgggctagagggagctggtaagactactcttttaaaggctgtcttgcataaatgcaaaccaaatactgctgccaatgaggatgcagcttcagaggttgtgcgagaagttattgctgatggtttgtgctattgtgattccaacggaataaatatgcaggagctgaatgttgaaacctcccgcttcagggatgaactatggcttggaatccgagatctaagtcggaagacagatttgattgtttttgttcataacttagcccatagcatacctcgatgtagtaattcaaatgatactcaacaaaggccagtcttgtcacttttcttggatgaagctaaatctcttggaattccttgggttcttgctatcacaaacaaatttgcagttagtgcacaccatcaaaagacagcaattgatgccgctttgaaagcataccaagcatctcctagctctgctgaagttataaattcttgtccatatgttatgcctggatttgttggggcttctctttccttggatgcaacca

SEQ ID NO: 142005 - DNA, 228 bp, Glycine max
  Clone ID: PAT_MRT3847_99244C.1
ggaaggagagtgaagagagaagaagatggcgtcgagcggagcggtgccgtgttggaggacagcggggaggacatacaggagaggcgcaaacatatgcgcgaatctggtcaggagttgcctcagggaacccgacgaggctgaagccgtctctcgtgagaaggtcgattttgcgctctccaaatgggtcgacgccaagcctgagggacctggtattcgttcagagacccc

SEQ ID NO: 142006 - DNA, 243 bp, Glycine max
  Clone ID: PAT_MRT3847_99245C.1
taatttggatctgcacgaagcttatttggtgcatctcgcatattgagtgacgagaattgtcttggcacagtccaaaggaagcttgtcaattgagaaggaaagcattctctttgatctaacggctgcaaaaagttgatgtgcctaccatagcacagattgaagagtcccattcaatgcagacgatgatgaatgctgctgattcacaatgattgtgtcgatctatttgtgagcattgatttgttg

SEQ ID NO: 142007 - DNA, 119 bp, Glycine max
  unsure (1)..(119): unsure at all n locations
  Clone ID: PAT_MRT3847_99246C.1
gtaactttcttggtttttcaacttcaagtttgggagtattggtagcctnccctctagtcattgttaatgttaggctggaatccggtccactcttgttggcccgaattttgcttaaccaa

SEQ ID NO: 142008 - DNA, 351 bp, Glycine max
  Clone ID: PAT_MRT3847_99247C.1
attgtacactttaaatgagggtgatccttaatttggttcaaccggcataacagagacaataaagacatgaaacattcctgttcgacaacttaaaccctaattttggacaaaaaccacatatacaaaatctgtatctgaatatgatcctaccaaacaaaaaaattctgatttccttcaccaacaaaccgtgcaaatcaaacaatttttcctgcttgcctttctttctacactgtaggacctgcagaaaaacccttatttcctgtggatcaaagccattgtataaatacctggcctatttaacactacagtacacattattacctatgaaggggggcatgctatcttatacat

SEQ ID NO: 142009 - DNA, 1541 bp, Glycine max
  Clone ID: PAT_MRT3847_99248C.1
ccacgcgtccgcaaacacagaaacagaaacccagatgatgaatgatgatgatgattccaacaacactcctgagtgtgcccattacggcacaggctgtgagatttgcttgacatgttctctgaagaagaaagcgacaagtttgagataagtccaagcaccccatcatgtgggaatcagagagtgagtctggtgcaggaagggaatatgggagtggacttctcacttcaaccaagcacagtctcaagactgagggatttcagcaaagaggcaactgttggtatgtttcaactgatattccaagtgatcttcttgttcaaattggagatgcaaacttccatttgcacaagtatccattgctatctagaagtggaaagctgaacagaattatatacgattcgcgcgaccctgacttgagcaagatagttatggatgatctccctggagggcctgaggcttttgaacttgcatccaagttttgctatggaattgcaattgatttaacatcaggcaacatctctggccttagatgcgctgccgagtaccttgaaatgacagaggacctagaagagggcaatctcatattcaagacagaagcctttcttagctatgtggttttgtcctcatggagagactccatagtggtgttgaagagctgcgagaagctgtcgccatgggcggagaatcttcaaattgtgagaagatgcagtgagtccatagcatggaaagcatgtgccaatccaaagggaataaggtggtcatacactggaagggcaccaaaagttgcaagtccaaaatggaatgacatgaaggactcaagcccaagtaggaaccagcaggttcctcctgattggtggtttgaggatgtttcaatccttaggattgatcactttgttagagtcatcactgctatcaaggtaaagggtatgaggtttgagatgattggtgctggaataatgcattatgcaattaagtggctacctggtttgatgaataaggacacatcaatcccaggagaagaaggaagcaatagtagtactagtaacagtatttctagtagtggtggtagttggaaaggtggacttcatatgattgtggctggacctagagatgacacttcaactcttcaagctaaagatcaaaggatgatcattgagagcctcgtcagcataatccccccacagaaggacagtgtctcatgcagcttccttctcaggcttctcagaatggcaaacaacatgttgaaggttgcacctgcattgattactgaattggaaaaaagggtgggaatgcagtttgagcaagctacactggctgatcttctaatcccatgttataacaaaaatgagactacttatgatgtggatcttgttcagaggctgctagagcattttcttgttcaagagcaaactgaaagttcaagcccaagcagaccacccttttctgacaagcatgtgagcagtaacattaatgcaaagacaagagtggcaagacttgtggacagttatcttactgaggtttccagagatagatacctttccctt

SEQ ID NO: 142010 - DNA, 271 bp, Glycine max
  unsure (1)..(271): unsure at all n locations
  Clone ID: PAT_MRT3847_99249C.1
anaagaaaagaaaggaataaattgtctcaagaaaggataaaataaaataatgtaatttccacaatccatatatagntaccctgtccagatttttagtcaattcagcagccaaccctgcaaagggcttcaactagaattcaagtttaaaggcacctgaggtagaagtggacatgaacagtggaagtcttggcccataaaacgattttgaaacttgttcactcgatgaagctacactgaaaaccccaagcaaattcatttattctgtttacgt

SEQ ID NO: 142011 - DNA, 439 bp, Glycine max
  Clone ID: PAT_MRT3847_9924C.1
acgcgtgggcggacgcgtgggcggacgcgtgggtactcccaagggttcgggaatgcttgaggcaagggattgatgaacttggtgatggagtgatgaagctaggctgaaggatactcaatgatgatgtaaatgaaccttggtttgaaagaagacatcttatcaaagatttgggggatagagtgaggctgcagcaatgcctaagggagaattgatattcaaagagccctcaacttgacctgacttttggacatatgcgctcagtcagatcctgagggcgtgaccaatccttttcctggtgcacctgcgtgtgagcttcaatgaagaaaaagccattaatgccttacagttaagcctgctccacttgccttaatgatcgacaacgaggaccaaatacaggtgatgagcggtgacttatacaagagtggagaacacatgggga

SEQ ID NO: 142012 - DNA, 471 bp, Glycine max
  Clone ID: PAT_MRT3847_99250C.1
ctgaaataaacgagctaccatatttccttataagctacatgtacatagcattctgttacctatcggaggaccataagcctgggctaacaagattttttgacactactctagactgatgaagccaatgaccactctcctaatgttacgttaatcttacacatctacctttgcgctcgtaaataacctaattcagagataaatcttgactcccatcttgacttaggatgattggcagactgcttcaaataactgaggccatagaccatcgtatttgtataacctgagtgtggttacctgataacttcataggggagagctttgtcccaccccaaactctgacaagccttaggacgaatgacatgtgacagatgaacgcacactactatatggctaccctgcaatgactggctgagaggcttaaccacataatatttgttgacgacccttgtttttattgacaagcgtagaagg

SEQ ID NO: 142013 - DNA, 499 bp, Glycine max
  unsure (1)..(499): unsure at all n locations
  Clone ID: PAT_MRT3847_99251C.1
cccacgcgtccgtctctctctcttttcttgtctttctcaaaccaaaaccacttaaaaaaaaaacaaaagaatgagagaatattggacctcgttggcttcagttttgggtgtgtttgccttctgccaaaccatcctccaagcagtgttcccaccggagctgcgcttcgcttccgtgaagctcttccaccgggtcttccactgcttctccacctactgctacttcgacataacggagatcgacggtgtgaacaccaacgagctctacaacgccgtccagctgtacctgagctcctccgtctccatcaccggcaaccggctgagcctcacacgcgccgtgaactcgtccgggttcaccttcggcctcgcgaacaatgacagcatcgtggacaccttcaacggcgtgaacgtgctgtgggagcacgtgggtgacccagcgcaggcccagaccctctcgtggcggccactccccgacgagaagcgtgttttcacgctccgcant

SEQ ID NO: 142014 - DNA, 679 bp, Glycine max
  unsure (1)..(679): unsure at all n locations
  Clone ID: PAT_MRT3847_99252C.1
cgtacaatttgcgggtctcttaccaacaagaacacccaaccaagcatgggtattctactatagaacaacaactgagacttgatcaaactcgtcagaagtggtgtttcatacctatcccaatccaattattcaccctcttcctatttcactccctcattctctcctcacacaatccacactcataacaaaaccctcccaaaaatcaaaattgaaattattaactttttttttctgttattctttctctccaccaccatggctactaccataacagagcaagacacctcatcacgtgccccacacgtgctcgattacgccaccactacatctgacgaggagacggaacaggacgaggaggaggagctggtgccggaggaaaacggcttcgggaacggcgtacggtggtttccggcggcgagcggttgcggagggcgacggagcgggggaggtgcgttgggtagggttcttgacccgagggcgaagtgggtccaggaatggaacagggttttcctgctagtgtgcgccgcggggctgttcgtggaccctctcttcttctacgtgctatccgtcagcgactcgtgcatgtgcgtcttcgtggatgggtggctcgctgtcaccgtcacngtgctgcgctgcatgacggatgcgcttcacgtgtggaacatggttataaggagca

SEQ ID NO: 142015 - DNA, 539 bp, Glycine max
  Clone ID: PAT_MRT3847_99253C.1
gatcgcgagcgcccacgcgtccgcaaatgcaacgagatgccgaaggatgctccgacacttacagcagcaggtgcaaatcctgctgaagacgaagcttccctgaaagacctctctgtgcagacagagaacaaggcttcttctgcctccccagctcctgatgatccgaaggccagcgacgagaagacgctggcagaagagaaccagaagctgaaagagcttctgcaaaagcttctggcgtccggcaacgatcagatgggggtcatcacggacctaagtgagaaggtcaaggtgctggagcggaggctggcacgcaagaagagaccaaaggtgagggtgcacaagccatccaggcatgcttcctgtgtccactgaaaggataagtctgtaaggttttgaggttttatgttgtatggatccccatgttgcttcctgtgtccagctattgtgcactgtgtaggtatagccatgctgtggcactgtgcttcgtcttggacaaccaaggtgtggcatgttctgtattttatgtctgtataatgcat

SEQ ID NO: 142016 - DNA, 373 bp, Glycine max
  Clone ID: PAT_MRT3847_99254C.1
gtccctacacacttcactatctataccagttcatgatctcatcttgcctctaaaaggagagctgccattatcatcggtatagtctcctactgatccacatactactaaaaaaatgcagcacattttgatatctaattctgtatatatggcaccatccaatcaatccatgaatgatacactggtcatggagcctccacagcaggagacgcaattaccttctgctggtatgctttcttcccaaccacatatcccatacatcaattgagattcaaaaccaagcaggcgtgcactgtgcctcaaatgtggaacacgactcatgatctcgtcaagttgtacatacagcctcaaatatggaccgtgattcactttttac

SEQ ID NO: 142017 - DNA, 829 bp, Glycine max
  unsure (1)..(829): unsure at all n locations
  Clone ID: PAT_MRT3847_99255C.1
gatctctcattagctcccatccctatcattatcaattaccatcgatagttccgtctttctcttcaaaatgactaaatttctggattttaccgacaatgtttccttcaccaaggtcccaacggagcccggtgtcgccaccactgagtttctccaagcttctgatactctcgtcaagctcttcgatatcctcggtccaactgccttcggtgccgtcatctcggacatgaatggaaacatcaagaaagtcagagaccgtcaaaccgccttccccgatcagtccgcaactcttcaggctctcgttcttgcggaacaacccgagaagaagaagactgccacggaaggtcttttgtggttgctcagaggtctcgacttcaccgccaaggctctccgtcacaatgtcgagaacccaaacgaagagctcgccacttctttccagcattcctatgacggaactctcaagaagcaccacaactttgttgttaagggaatcttcagcgttgctttgaaggccaccccataccgcaaggacttctacgagaagatcggaactgaaaacagcagcggcaaggacgagcgtctcctcgcttggttaaagaacctagaaaatgtcgttataatcttgcaaggtttctatgaagaaaacaagaacttcggtttctagaagaagcgttgagagtcaggtattcccagcaatctcgccgtagagtttgatggcaatgcttacccttaacccatctgatggaaagatgcccccttgatttcttacctgctngttatgaaaaaagaaacccgagcagtgaaagggaaaacgctgtacatgaatccaaaa

SEQ ID NO: 142018 - DNA, 140 bp, Glycine max
  Clone ID: PAT_MRT3847_99256C.1
gccagatgggagagtaagatatggagtcctatggtaaaggatagaatactatatggaacaaccctaacacgactctaatgcattgtaactactattggttttgaccgatgaggagctctgtcatgcgtttacacttttta

SEQ ID NO: 142019 - DNA, 293 bp, Glycine max
  Clone ID: PAT_MRT3847_99257C.1
gtggggtctatggcttggtggagaagtggccacgagggggaatggagagcgccactctgggatcaacaccaactctcttgagcgcatcgggggagaacacagcataggggcagggggtgctcacttatacagggacattgcagctctgagaagacacaggagcccacgcatttcgcgcagtcttttcacagagacgcagtatatgcgtcaaaattctaagtgtgcaaaacttgccgcatggaccatttttctcgttttcatgttcaggataactgtggtcgtattcagcaacg

SEQ ID NO: 142020 - DNA, 899 bp, Glycine max
  Clone ID: PAT_MRT3847_99258C.1
attcaatcataagattattgtttgtttgcggttgcagagatgagtggatgaattaattgatgaatgaaattcaaatactaattgttgctatcacaattcacaagagattggattttggaatggaaagggtgttgtcagtagatgagatatcggagcaatactgggtggctgcatcatcttcttcatcatcatcatcatcatcgttcaagtcaaagatgaaccggagcgaatccgaatgggcctttcagcagttcctacagcaggaagctgcttcttcttcatctaattctgatcatgatgatgatcatcatcatgctaaactcaaaaaggaatccaacaccaacatccctgttactctacatgttgattcccaagactaccatgctattcttaagaccaagcttaatctcgcatgcgctgctgttgctatgactcgggtatgttcatttttcggaacaaccccatgttttttttttttttagttagctcttggaattgtttcattttatatttgaaacaatttttatttatttattttttctaaaagaaagccaacaagtctctgagtctcacccatcataaatcacacagatattacccatttatgattttttctccttcccttaaactcagttgcaaaatgaaagtttgttctttcgaccaataggtagaagagaagcagaataatgcttccgcgtagaaggtctacagtggctctcaaggaaaattccacatacactctggaaaatataggatggtgatattagaaattaaagggcacgtttggatggatgactttgaagggggaaatgggactacaatctttttttcccatgtaaatgtatcatccccgctccccaagattgtttgttaaaatgagaggcataaaattaaagatt

SEQ ID NO: 142021 - DNA, 244 bp, Glycine max
  Clone ID: PAT_MRT3847_99259C.1
cgttaaactccaacttcaatatcttcaattcacaactctaaatttatcacatgcctttgaaaattctcagtagatgaaggctttgaactgatgagaagcttcaacactttgtcaagcatttcgaattcattagtgtcggacacttaagaatcacaagatattctctttggctgcaccagcttggagattaccgaccacctgctctgctttaagtgacttttggggccagtaatgaaacacaaca

SEQ ID NO: 142022 - DNA, 1122 bp, Glycine max
  Clone ID: PAT_MRT3847_9925C.1
tgattcggcccacgcgtccgctttctttctttcttcttttttctgcgggggccgaggaaaagaaagaaatagaaaaagaagaaaaaaacacagcgtcctagatttcctcttctctgcttcggaagaaagagaaaacaaacaaaacaatggcgttcgcttctttcctcggcagagtcctcttcgcttccgtcttcatactctctgcttaccaagaatttaatgaatttggagttgatgggggacctgcagcaaaagcactcagacctaagtttgatgcctttacacatcgggtgcattctcaagttggctttcaacttcctgagattgatctgaaatttttaattgctggggctattgctctgaagggtcttggaggggttcttttcatatttggcagctcttttggagctttgcttctgctcctgcaccagctgattgctaccccaatccattatgatttttacaattatgatagtgaggacaaagaatttactcaactgttcatcaaatttacacagaacatggctcttttcggggctctattgtttttcattggcatgaaaaactccatccctagaagggtacccaagaaggctccaaagacaaaaacctattagtttttgcagcattgaggacccctttcaagaagtgggggctgtgggagctgttgtttcctggtttttcatcatatcctctccaatctggcaggatttgcaccgagtactctctggttcagaaccaatcttcctccctttgagttttgtagttttggcttcacttggattatattattggctactattattatttttgtatgatctgttatcacggcgttaggaactatctttcaattgccaaacttgtctttcaaaaaggaaaacaaaaggatgagaagcctttgcgcataatcttcagagtgtcactttcattctgttttatctatcttgatgtaaagtctttgaaagtctggcacgtgatgttattatataactcaacttgagttctccactacctcccgatttgtgtttccttcctctcattttttttattttcttcttgtacctgtattttaccatcatgttatatgatgatttctccactttcaaaaacaaccccaaaaaa

SEQ ID NO: 142023 - DNA, 345 bp, Glycine max
  Clone ID: PAT_MRT3847_99260C.1
ttcactcacacctgacaatgaccagctccggtcgtatgctaaggtcgccgaagcacactgcacgtccctcaactacttgcggaggctgcacgatgtaccctggcttgtgctacacccagtcacccacaacgttgacccttatcatgggagtggcaccagttaaggctcaattcccgagatgcttgaactgggtgtacccgctaagaacgatggttgcacatgtgaagcttactgctcccacaacccctgcacttgcaagtgaggtgcaggagagctcacgcttctagcggtgatggcccctagaaacaatgaataaaacctattttaggctcaaaacttcaaaat

SEQ ID NO: 142024 - DNA, 923 bp, Glycine max
  Clone ID: PAT_MRT3847_99261C.1
tctacgactgatgcccaccaagaagatcaagcgtaccaccacgacgacgactaccaagtcgaccaaggccgtcaaggtttcgggtgcctcgaagaagaaccccctcttcgtgtctacgcccaagaacttccgcaagggtggtgacattcagcctaagcgtgatctgtcgcgcttcgtgcgctggccgcgctacatacgcctccagcgtcagcgcaagatcctgtaccaacgcctgaaggttcctccttcgatcaaccagttctcgaataccctggagaagaacattgcgacggacctgttcaaactgttgcttaagtaccagccggagaccaaggctgctaagactctgcgtctgcgcaacatcgctgctggcaaggaggaagcctcggcccctcctgccgtcgtgaaatttggtctgaaccacgtgacttctctgattgagaacaagaaggccaaggtcgtggtcattgcccacgacgtggaccccattgagctggtggtgtttctgcctgctctgtgccgtcagttcaacatcccgtactgcattgtcaagggcaaggctcggctaggccagcttgtgcaccagaagaacgctgctgtcgtggcgctcacgcacgtgaacaaggaagacaaggccaagtttgactccctgacggaagcgttccgctccaagttcaacgaggacacggttaaccgtcgcaagtggggtggtggcatcatgggcttgaagacccagaagaatctggagttgcgtgaaaaggcgatcgctgctgaggcggctaagaaagctcagtactaagtaatgtacataccgggttaagtctgagcgtggcgtgggtgcgtcacgtcgtgttctttttattcgaaggtgctctacaggcttagtgtaatggctgaataacatttcaacatctgaacgtttt

SEQ ID NO: 142025 - DNA, 333 bp, Glycine max
  Clone ID: PAT_MRT3847_99262C.1
aggccgtgtacgagataaacaaacatttggcgcgcctaacactacggctctgctaactccaagcggtgtcgattcaccacttccttcattgctctatatctctgagtctgctagatgaagttaacgacacctgcgcttctcagccttgtcattctctgccatctgcttctctgtcttccctcattcactatctctctcatagccaatgacgctgaccccgatacggagcttctactttccggagactacgcgaccggactacttaatgcctcgcttgcgagatccgacgatggtagcttgaccaacatgattgatcgggctctcgaaagagag

SEQ ID NO: 142026 - DNA, 481 bp, Glycine max
  Clone ID: PAT_MRT3847_99263C.1
tacggctgcgagaaacgacagaagggacattgagatttcctgttgtcattattgtttaagtaatctggctctaagcatgattagggattaatctttcttgtctcttaccaaggacttcctacctcatagagggttgaataaatatttgacaatcctagcctaatacctttatggtaaacatgaatgttaaaaataatcttgtagcttaaattttttattataaatataaattacttatcataaagtttaattacaataaactttaatactaaaaatgatttaatttattatacattttaattttgtaaagaattatcctatactttaaaagaactagtattagaaatagagatatattcagaaaaagggaaaggtggcaggatacaagttaaaaactagtagtactagaaaaaagaaaataaagaaataatgaagaaaaaataagaagggacaggtggcaggaggatagagcaccttgacg

SEQ ID NO: 142027 - DNA, 712 bp, Glycine max
  Clone ID: PAT_MRT3847_99264C.1
ggctcgagggcaaggtcagtggtggggtccttacccctttttttctcgcccatacaataacaatgtactattcacacccctccacttgtccttctccgcccgccacgtcacctcctccgccgtaaccatgccctccttcgaagtcctcggcggcgcacgtgaccgttttctccctgttctcccccacttgtctcgcccctatcatgcttttcctcttctcgccgccaaccgccacatcgaaaccatcttcgcctccttcttccgctcagtccccgacgtcaggctccgccgcgagtgcctcaggacccaggacggcggcgccgtcgccctcgactgggtctccggcgacgaccgtcgcttgccccccgattctccactcctcatcttgttgccaggtttaaccggaggtagtggggatgcttacgtgagacacatgttagttagagctcgaagcaaaggttgtcgtgttgtcgtgtttaatagccgcggctgtggagatagccctgttactactcctcagttctattcggcttcatttttgggagatatgcgtgaggttgtttcccatgtcactggtagataccccaatgctaatgtatatgccatagggtggtcacttggggccaacattcttgttccttacttgggtcaggaatcgcacaattgtccactttctagtgctgtatcattatataatcctttcaatttgtta

SEQ ID NO: 142028 - DNA, 128 bp, Glycine max
  unsure (1)..(128): unsure at all n locations
  Clone ID: PAT_MRT3847_99265C.1
caacatcatccgatgttgtggaatctgaccatctgctaaattcttgggactncgaccttttccaattttaaattgntcttgtcctgacacaagtatacagaaatttaaatgacagtgatactaatttg

SEQ ID NO: 142029 - DNA, 292 bp, Glycine max
  Clone ID: PAT_MRT3847_99266C.1
gaagtaagaaagtaagaaagtaggaaagatgacaggtgggatgtttggaaggaaggggcaaaagataaaggggacagtggtgttgatgcctaagaatgtgttggacttcaacgccataaccttcgtcagataaggcagtgttaacgacaccgtctccgatttcttgggcatatgcttgtactcattatgtcatgcatttgatgctgttactgctttaactggtcaaagcatctgcttgcaacttatcatggctactcagactgatagtagcggataaggaaaaggtggaaac

SEQ ID NO: 142030 - DNA, 465 bp, Glycine max
  Clone ID: PAT_MRT3847_99267C.1
ttcgcccttttttttttttttttttattattttttttttttttacgcgggggcccacccgaaaatttgaaacggggcctggggggcgcaccattttcccatatagagaggaacataaaacgggggcgaaatcagggccataactgttccctgggaaaaagtgttatccgcacacattcccacaccaaatacgagccgaaaatataaagtgcaaacccgggggcgcctaatgagggagctaacaaacataaattgcgtgccgctcactgcccgttttaaagttgaaaaacctgatgcgccagcggctaaagagaattcgcaaacccacgaagagaggcggtctgcataattggaccccaggggggtttttctttacaccagggagaccgaaaaaatgtgatggcccttcaccccctgcccctaagagattggaaaaaagggggccacttttttttgcccccacagg

SEQ ID NO: 142031 - DNA, 387 bp, Glycine max
  unsure (1)..(387): unsure at all n locations
  Clone ID: PAT_MRT3847_99268C.1
taccttccaacactggggtcctggttttggtccttcaatggcggaaccctaaccgggcttggctcttaaactttccatgggcctggcccgcccttgcctaaagcctcaattctttcaatcctcaatcttctctcttcttgaccctaaacttcgcctattcctcttttcaaccaaacccttacgcgccgtcatcgacatggcccgcaccgggaagttctttgctggtggcaactggaaatgtaacggaacaaaagactcaatcagcaaacttgatgctgacttgaacaatgcanaatttgaacctgaaggttgatgttgtcgttgcacctccctttctttaacattgatcaagtgaaaaacttaattaattgaccgaatggaatattt

SEQ ID NO: 142032 - DNA, 307 bp, Glycine max
  Clone ID: PAT_MRT3847_99269C.1
tccgaattcccggtcgacccacgcgtccgttccaacttccctctgcctcttctaatggtatcttatctttcgatcgaagggtttgcaagggtttaagctcaaccaaaccctaaaccctaaatttccctatttcttttctcgatcttccactctatctctttccatctcataaatttcgaatccatattctctcacctcatgcactcagatcaaatccgcactcttttatcactgaagtgagtgacgttgttgaggtgtggttcttggtggggtatgatgaatgatagtgatttggggaatgtgtgct

SEQ ID NO: 142033 - DNA, 441 bp, Glycine max
  Clone ID: PAT_MRT3847_9926C.1
gggcaaaatatgcaaaaacatgttatttggttcataaatgatggaagccaagtaccccctttacccaaccattttccctacattttttatatacaaacaaagtcccaccccggcacgaaattaatgcaccccattagtctttttgctcgccttgctccgcctttcggggacagcagcagcaagatcctccaacacagtaacggggctatcccaatcgatacacccgtaagggatggacaccccctttgggagcccggctggacccttagcagggaccttttgattaccctcgttgatattcgattcaatcatgacggcgacaatggcggtttccccctcgcggatctggtcggggatgacctttgcgaccttgggttggttgcggggaactttgttcgagttgccatgcgaacagtcaaccatcaggacttcaggaagctt

SEQ ID NO: 142034 - DNA, 234 bp, Glycine max
  Clone ID: PAT_MRT3847_99270C.1
gcaagcttggcacttgccgagaatggatacccacctgtacactcttgagtacatgaactgatggtcatccctacaagctgtgtgatcagatatctgatgcagtgcttgatgcctgactggagcaaagaccctgaaagcaaggttgcctgtgagacatgcaccaagaccaacttggtcatggtatttggagagatcaccacaaaaggcaatatagactatgagaagattgagcgc

SEQ ID NO: 142035 - DNA, 163 bp, Glycine max
  Clone ID: PAT_MRT3847_99271C.1
ttttgactcataaaatgagactctttaaacgcaacgcagggggaaatggaccacgcatataaagggagaaattgaaaaggcaaaccaacaacggaaacggaaaatcctaaaactacttagagctaaacaaaaacgtaaaacaggggttgtcacaaccacacca

SEQ ID NO: 142036 - DNA, 365 bp, Glycine max
  Clone ID: PAT_MRT3847_99272C.1
gtcaaacttgcagagcaacttccagttacgctctgcggaatactggcagaaatcttccatgatgctgccgaaagacgcatcggtggaaggatgctctccaagcaacacaattagatggctctaggtacagtacggcactggccactgttatggatgtcgatgacaatcatggcggggaccacaacgacatatacctggtccatgtaccacatactcgccagaagacagtattctaattcacgcaagaccttgaagaagctcaggtccatgttccatcataagaagccagagcgcgttgtaattagttcacagacacaccttgctctgcccgggctggcgttgttacatcaactattatgaacttc

SEQ ID NO: 142037 - DNA, 145 bp, Glycine max
  Clone ID: PAT_MRT3847_99273C.1
agcctataggagtataaaatataaatacaaattcattaccttcaatacgctatatggcacattaaatgtgctcttgtttttatgaacagctcggggcgtaaagaaaagactcacgcaccctacacccctcatctaccaccatatt

SEQ ID NO: 142038 - DNA, 572 bp, Glycine max
  Clone ID: PAT_MRT3847_99274C.1
ctatattttgagagccacacccagctttgaatcctgcaacaaaatctccgttccgggtttttgcaatcgggagagtgcgagagagacaatacactacacggttgctgcattattgctttcagaggaactcattgcaggttctccaatttgaacaagtctttcaaatattctcttagatctttgctcacttcatgctcaaaggaggaattttataaagcattttcaagtttctctaacattgaaaaggaattgctccatcgcctatttcttcaggtcattacttcgttgcatgaaaacttagaggatgggtttgagactgtctgtcttcaaacacaggcaggagctactcttgatgctgtggagaaaattgtagaagaacaagatctggatgtcttgttttcagataggagtaacataatggatgttgctgagaatctgtctatggcaaaggagaatgaaatccaacacttaaagcatatggttcaattgggagaggaacataatcaattgttgcgcaccctactacaacttcttaaggaaggcattcaagtattgtctggtgcctacaagct

SEQ ID NO: 142039 - DNA, 1155 bp, Glycine max
  Clone ID: PAT_MRT3847_99275C.1
gagtcagtcacatcgataaaaaaaaagggcgggaaagaaagggtgtgtcaaaattttgagagccactcccagttttgcaccctcccacaaaatcaaaatcttcgttccgtgttttagcaatcggtagagagcgagacacggtttctgcattattgctttcagagggactcattgcagtcattgattgtaagcaatggagaaaacgcccaaacaaggttccaatgcatcactttttccttctactggaattggatcgaggttctccaatttgaacaagtctttcaaatattctctcagatctttgctcacttcatgctcaaaggaggaattttataaagcattttcaagtttctctaacactgaaaaggaattgctccatcgcctatttcttcaggtcattacttcgttgcatgaaaacttagaggatgggtttgagacggtctgtcttcaaacacaggcaggagctactcttgatgctgtggagaaaattgtagaagaacaagatctggatgtcttgttttcagataggagtaacataatggatgttgctgagaatctgtctatggcaaagaagaatgaaatccaacacttaaagcatatggttcaattgggagaggaacataatcaaatgttgcgcacccgactacaactccttagagaaggcaatcaagtattgtctggtgcctcacaagctgttgagaagttcaaaagcatgaatttaaattatggggcaaacagcggcgatgagatccatgatgtataacatgtcttgctcatgctctcctgcaaattgacgaaggttcattctctggtgaataattcccattgttttatgttgtagcaatgtttcttaagattcttacttcacgagtaagtctaccttagtccttgagattatagggtcatgtattttagaagctaagattttaaaaatcgtgcattagttcctgactttataaaacatactaatttgctttagtcttttttatattttatttttcattatcgtttttacactagtaagaactgaagtgaatgttaacattgtatattatcattattaatttaagttctgtgaaaaaacaaagtagcttttgttatcatcaaaaaaaaaaaaaaaaagggcgccccccgaaaagagagcttgtcgacccg

SEQ ID NO: 142040 - DNA, 448 bp, Glycine max
  Clone ID: PAT_MRT3847_99276C.1
aaaatccgccataaaagtatggcggatgacgtagcggaaaatggcggacaaaaaaaataataaaaatatacgtatacatataaataaaaaattaaagggaaacaatggattgcattcaaataacagaaaaaaaaaacaaaaaacgggtgtcaaaaataaaaaagggtgtcaaatagaaaaaggaaaaaaaaaagctaccctcatcaaaaacgggtgtcaaacagaaaaaagaaaaagccctcagcctaggaaaaaagaaaatagacaattctcaaatgcctagactttcttccttctttgtttaagaggtcagtttgccgtcgcgcaccagagcactgccgtcgccgtcaacgtgcgtcatgcggcggtcgcatgcgtcatgtgttggtcgtcggtctctcgcatgcgtcgtctgcttttctgctgccgtcgcgctcgagaacgtcgt

SEQ ID NO: 142041 - DNA, 374 bp, Glycine max
  Clone ID: PAT_MRT3847_99277C.1
ggagactcaaatattataagcagagatggataatggagatttgccgaactttatacggaagcgaccaattaccaaacattaaaaacaaaaaaaggaggcatcccttagcttaacacccccctcacaggtccaaaacccttgaacttgctgaaaggcaagacatgaccactttattttaaggatgtttgtttaacacaaaacagccgggcgcgctaaaaccatctcaggcctgatacataagtttttagctgcccattaattggtcatcattattcctaactaagggctatttttgatggaagcttgctttaccaacaccttatttttaagtgcacgggtcgcaggagcaatttggtccacattagcagccatcg

SEQ ID NO: 142042 - DNA, 356 bp, Glycine max
  Clone ID: PAT_MRT3847_99278C.1
catgcgttcgtccatgcgttcgaaactttttaagaaatttttcctttctttttaaaaaaaaaaaaataacattcccacgtgggaatcacgttggacaaagtcaaaagaatagcctaggaaaagcccaatcttattttgtttcaaaaacccattttttgccatcccaacttttttaacagggggaataaaccgagctactttgatttacaattttacaaaatataccgaccctttgaaagtgaacatactttaacttaaaccccatgggcagaaacaaatttaaaattttatttggtgctgccctggacctctttttgatgatgatcttgaaggaggaacattaacttgaataaact

SEQ ID NO: 142043 - DNA, 3176 bp, Glycine max
  Clone ID: PAT_MRT3847_99279C.1
ggctcgaggcgactaagatgtggtcgagtttccctctcgtcttgcctttgggtgccgccctagtggcagggcaggatattactacctgtcccgggtactcagctagcaatgttcagcaaaatggtaatggtcttactgccgacctcactcttgttggcgaggcctgcaatgcatacggcaccgatctacccaacttgactctgactgtcgaatatcagtcagccaaccgcctccatgtgattattcaggaccagaaccaaaccgtgtaccaggtgccaaacgagatcttcccgagacctgaatcccctgaaaatagctcatctgaagactctgaccttcaattttcctacacagaatcgccgttcagttttgcagtggcaagatcagatggtgagacgctattcaacacctccggttcgcccttgatcttcgagtcccaatatctgaatctgaggacctcgctaccagatagtcctgctctctatggtttaggagagcacagcgatccatttcgcttgaacagcacgaattacacacgaaccatctggaacagagactcttacggtattccggctggcacaaatctctatggtgctcatccaatatacgtcgatcatagaggtgaaaatggcactcatggtgtcatcttgctcaattccaatgggatccaggtcttcatcgacgacactgacggtcagtatcttgagtataacattcttggtggtgtcttcgatttctactttgtggctggtcctactccgatcgagacttctcagcaaattgcagaggtagtgggtcttcccgcgaatatcccctatgggggcctcggatttcatcaatgtcgatatggctacagcgatatctatgaggttgccggtgttgtatacaactacagccaagccgaaattcctttagaaacgatgtggaccgacattgattatatgtacaggcgctggatcatgactcttgatcaggaacgtttccctctggaaaaggtgcgagaattggtcacttaccttcacgagagagatcaaaagtatactgtgatggtggatcctgctattgcatatttccccgatgctaactacagtactttggatgagggtatcgcccgtgatgtcctgttgaagcgagagatgggtaagtcggaaatcttgaaattcttatcagagtctgacgatctctcagatcgctgtatctaggcgtagtttggcctggacctactgtctttccagattggttccatcctggtactcaatcattttggagtgatcagtttgattccttcttcaacgctgataccggtgtcgatattgactacttgtggatcgacatgaatgaggcagccaacttctgcgtatatggtcagtgttccaacttgacagcggccacacagttcgctgaagagaacaattttccccccgaacctcctcccgtgcgtgactcgtcaccaatcgcgctgcctgggttccccgacgattttcagccgggttcgaattcgaccaatatgaagcgccaggaagctccgagtggctcaagaatgggattgccaggacgcaatcttatcgacccaccatatatgatccagaacgctgccgggagcttgtccaacaaaactatcgacacagacctcgtgcactacaatggtttggtagaatacgacactcataacctgtacggaacaatgatgtcgaacacctcagtcaatgccatgagatctcgccggccagacgaaagagctctggttatcacgagaagtacctttctcggtgcaggcaagtatgttgctcattggcttggtgacaatctcagcaactggaatctgtatcgaacttcaattgcgcagatgctcgctttcaacagtatattccagatacctatggtgggtagtgacatttgtgggttcggatccaacactacagagacactttgtgctcgatggatgatgcttggtgcattctacccattcatgagaaaccataacgagttgggagcaatcagtcaggaggcgtatcgttgggaatcggtcgcggcagcctcgagatacgccatcaacatccgatatcgtatgctggactacttctacactgcattctacgagcaaacagtagatggcaccccgagtctgaatcctctcttctacatctacccggaggacgcgaacacgtttggtatcgatacgcagttcttctggggaggttcagtcttgatcagtcccgtactagaagagaacagcacatcggttgacatatatctaccagatgacgtcttctacgactggaacgatggcctttcacctgtgcgaggtaacggagagacagtcacactggacgacgttgacttccaaacaattcccatccacatccgcggaggaagcatcttacctctgcgcacggagggtgccaacacaaccactctgcttcgtaccaaaccgttcgaagtcattgttgcgccaagtctcaatggcacagccaatggtagtctatacctcgacgatgggatatcactggagcaaacgtcgaccacatacattcagttctcatggaacggtagcctgctaagcgtgagaggaagttatgactacgatactggctcgactattgatggaatcagcatgctcggaatcaccagcccaccgcggagagtgacatacatgggtaccccactgactactacgtacaacgaaacaacccaggtcttgagtatcacctgtggtatcccattgaacgcagatgcggatgtctactttgatcagatacaatcattcacaggagggtcggagcgaacggggctaacaagtatgtggctgctgtcaggtctgtctgcggcagtggcaggtctggttctgctctagagatcgaccaaattctttacttcaggtggactaagcgaatttacggtcttgtcacacacggcaacctagtgaagcgaaatttcaacacaagagggtaccgtccgtaatgcatgatcgtggacgaagtcggtgacatcatgttctgagggactttgaagaaattagaggtcaactggtgccatctagatacgtcggctgactcaagagccgctcgttttgagcactgtgtgatatagccgacctgatacataatgcttgcaagtacaggtgagatcactttcacgacggttgtacttgatcacaatttatgccctcaactacg

SEQ ID NO: 142044 - DNA, 658 bp, Glycine max
  Clone ID: PAT_MRT3847_9927C.1
agtttaaacgttaaagcttggcatttcttctgatagctatgtatatttatacttgtgccactcaaaaaagtagcctcctaaatgtaggtaacccgtcaggtacaagtaggctatatattagtagttggtcttccccccatgttatttgaataatacaatcttgttctgtttatggttagaacttcattttactattaaaagaagcataacccttttcggcacttgagacagtactggatggtggtaggcaagttactagttactgctcataatttatgccgatcttgatgtaccaaacaatagtcctagattagataccttttgaaggcttactgagttgagaaacatgaacggttgcctgtgggaactgtaattcaggtgctcttctttgagcaaaccaaactccactgccacatagattggagtggctccttcaatagcttgaggagcccgaatggaggcctcgaccccccaggacgatgcctttcaaagcgtgaaatgaatgctcagcaaatggagataaggaagctgaaggaagatgtttacaggctgcaaagccagttcaattccatgcaagtgcagaagaagaaggctcaatgttaattttatttgagagttaaatttagtggacaaggtttttcttcatatcaagctgctc

SEQ ID NO: 142045 - DNA, 397 bp, Glycine max
  Clone ID: PAT_MRT3847_99280C.1
aattgacggaccgacccactcgttcgttcagctttaaaccacaaaactaatgattattcttcacaaccacaaaacggggtatggcccttatgtttccatcgtactccctaccctcactcttataacccaccaacctttatgttcttctcattgcccctactagtgcgtgtgcctcacacccaacaacaaacccattttcatctctcatgcttttcttataccaacaactttgtcttcatatctctttattccccacgtcgttttttcattccgatatatttaaaataagaggtcaccttcaatgacatatactgcctcttcttttccctcgaccataatctctttttcgagaatatatccttcaacatctacagctcgcagcttacggtatctcttt

SEQ ID NO: 142046 - DNA, 507 bp, Glycine max
  Clone ID: PAT_MRT3847_99281C.1
gcacgaggacaaacaaggaggaagttcaccgtgcgaaagttttttataacccttagatctattaacttttattaaaacgattgagatttttttttttctttgtctttcccaatttgttcccttctctctcacccctgttcccttctatcttcaccgcgaacccagtaaatcccaccatgaaccgtaaagtagactgcaaaccacctcaaatcgcatcacagaaatggcgaaacttccgccgactgtcccgtgcctccgcagccaccgaagccaaaagtgaaggaggtgcgcaagattgaccgtcggaacgggggagtctactcagatttgtttcaatcgacgacgaatattgggaaaagagatctgtgataggacttctttagatctggaagatgattgccccgcactttttggaattttttggccattccgaaagccaaaatctataatcacttcagaatgttattttacattattgattaatcattccggaagctaaaaaaagaa

SEQ ID NO: 142047 - DNA, 537 bp, Glycine max
  Clone ID: PAT_MRT3847_99282C.1
tccatatgtccaaacaagagtattatatatagagattaacgaaggttcaaaatacagcacgtgagattgggggagggttgtcatcgtacacgcaggatgctcattttatacacggatgattatttattatacatatttgatactactatcattggacattggatggttaaagttcttcgatagcatctttaatcacagtactctcggcccttgatgtcttaacgagattactttcgtttgaatttataaaatatcggtcctgtataacgagcaatgaactggtaatgccgttacccgaagagacaaagagatctccaatgggtcccagctcttcattcccgtgacgaaaatctatgtttgtcaacatggttgtctcaagttgttgcttccccacaattactaggtcgtgatccttagctttcccaattgataacacctcctctgttatgttggttgcgttcttttcaatgtactccacagtctcctgccctttaaccttgaacccgtgtactggttccctatacaactccttttttt

SEQ ID NO: 142048 - DNA, 482 bp, Glycine max
  unsure (1)..(482): unsure at all n locations
  Clone ID: PAT_MRT3847_99283C.1
tttttttttttttttttttttttttttttttttttttttttttttttttttttttnccggggggaaccattttggttaccctataaattgggccataacccgggttaatttttaaaattccatttttaaaaggaaaattttcccggcccgaaaaaaggggcccaaccccccaaaaggttttgggcccttaggttttcttttggggggtcccccctcaacaggatttttagttgggaaaaggttaaaaaacctaaaaaccctaaattttgttataaaaaacataccatttcctaaatttttgcataagtggccccgttttttttttttttcaaaatcaccgggagggccccccccctttttttttttgaccccaaatggggattttcaggttgctacctccaggggcaaagctttttccagggtggtttgcccaattttttataaggaattacccaaatcctcctttgggccttttttacccc

SEQ ID NO: 142049 - DNA, 736 bp, Glycine max
  unsure (1)..(736): unsure at all n locations
  Clone ID: PAT_MRT3847_99284C.1
cgtccctgatggctgattgttcagcagattgctagttaaacaacgcctttgttcttcgtctcttcatgttctcggacattgcttgaagctcaagtcgaacttggagaccttgatcgaactccaaggccgtgtttggattttcggggagatgattaactgtttgggcctttatcctcttatttctgccccttcaaccattgcctgcaccactcacattgtgagaagtaagcagtatcttgcgacacaaaagccagtaaatctggctctcggctatcggaatccacatggatatgggttcagttttggatcgagaagatcaatacacgagagggtgagctctcatttcaagggcatagctgttatgacagatgacaaatcaacaatgtcatccaccgaggaagacttagaaaacattggcatctttcatattgatccatccctaaagccatataaagatcacttcaaatatagactgaagagatatgtagatcagaaaaagcttattgaagaatatgaaggaggtcttgaagaattttctcaaggttatttgaaatttggatttaacagagaagaaggtggtattgtttactgtgagtgggcacctgctgcacaggaagcacaaattattggagactttaatggatgggatggttccaaccaccagatggaaaaaaatcagtttggtgtttggagtattangatccctgatactgatggaaattctgccataccacac

SEQ ID NO: 142050 - DNA, 325 bp, Glycine max
  Clone ID: PAT_MRT3847_99285C.1
aaaaaaaattataaaatggtgccgaggcaactcttataatggtcatcagaagatctcttcttgtcttttggttttgaggggaagggaaaaaaacctaaacatgagtattagtatcctagtcagttacagttcacattcagagaattgaagtgctgctcctctcattgctatttgaagacaactggttttcacacaagaaaatgattcaccaaagaaaacgataaaagatcccacttaaatcagttaccaccaatctctgttggggtggtacaaggtgccagcgtgttatgaggccagttaatacccccccctctaacaaaaatgc

SEQ ID NO: 142051 - DNA, 380 bp, Glycine max
  Clone ID: PAT_MRT3847_99286C.1
tcccctatacgttcgcccctttcttccgtgcgccgctcctcggaccctgggggcagctaatagggagaggaaatgggccttagaggaaataggtagaagaactggatctccacgtggagatccaagaaaatgctccaataatggatcttatcaagatcagatcttgaggctaggagaatacccttattggagatgttcttatgacctattttgactcatcaaatgtattgcatattcaatgacattgtcttaacaattaaaagagaatatattttataaatgataggaggcatagggatctatcttaagaatagtgattgaggtgcaaattatcggcaaatgttggaccctgatgacttgctaattcttcgggtgtgtcc

SEQ ID NO: 142052 - DNA, 1141 bp, Glycine max
  Clone ID: PAT_MRT3847_99287C.1
gtccggacatcccgggtcgaccacgcgtccgattccttagaaaacattctccacttttttgttctcctccatggaagccaattgcaacatgataaacatggacgacacatgcgaacttgttgccaacaataatgttggttttccaactgatgcagctaataacggtatccataaaccttctttgttgggtgccaataagaccacccttggccaccacgttgcacggcgtctagttgaaatcggtatcaaagacgtattcaccgtccctggagatttcaaccttatccttcttgattacttagtagcggaacctgagcttaacctcataggttgctgcaatgagttgaatgctggttatgctgctgatgggtatgctagatataaaggtgttggtgcttgtgttgttacctacaatgttggtggccttagcattctcaacgccattgcgggtgcttactgtgaggatcttcctatcatttgcattgttgggggacccaattcaaatgattatggcagcaacaagattctccaccactccattggcttgcccgattatacccaagaacttcgttgctttcagcctgtaacttgtcatcaggttgtggttaacaacttagatgatgcacacgaacggattgacacggccattgcaactgctttgagagaaagcaagcctgtctatatcagcatagcctgtaacttgtctgccatccctcaccattccttcattgatcagcctctcccattttatttgactcccaagttaactagtgaaaggtgtttggaaattgcggtggaaataacatcagagtttttaaataaggcagtgaaaccagtgatggtgggtgggccaaggttgcgaatggcaaaggctagtgatgctttcatggagatggtagatgcttcaggttatgcctttgcaatgttacctacagcaaaagggatggtggaagaaagccaccccaacttccttggcacttactggggaccagcaagcactcccttttgtgcagaaattgtggagtctgctgatgcctacctctttgctggtccaatatttaacgatattgtctctttcgggttcacactacccattaaaaaagacaaggcaattatggtgctgcctaatcgagttatgatt

SEQ ID NO: 142053 - DNA, 426 bp, Glycine max
  Clone ID: PAT_MRT3847_99288C.1
gtatatatggttcattgcttgccgttggagagcttttgaggaataccggtgagttcatgatgtcaagataccgcgaagttgccgaaattgttctcagataccttgagcaccgggatcggcttgttcgcctgagcataacttcattgctgcctcgaattgcccattttctacgtgatcgttttgtcactaactacttaactatatgcatggatcatattctttctgtcttaaaagtaccacaagatcgtgatagtgggttcatcgctctcggagagatggctggggcactggatggggaactcatccattacttgccgacaataactactcacttacgtgaggcgattgcaccacgaaggatcaaaccttgacttgcatgaacaagagaagagaatccaagctgagattctggatctagaatctagg

SEQ ID NO: 142054 - DNA, 353 bp, Glycine max
  Clone ID: PAT_MRT3847_99289C.1
cttctgtgctggaattgcgactgacttttgattcaaataagctaaagaacaagtcattattatgtcactatataatgtcggaattttggcctattggacctagtggatcatgtagctaggacagtaatagagcctttcactatagccactattgaaacttgcgaaagaaatgttgggtgctggcaggaagaagatccttattcatctatgcgccgcctgtatattgaagtttacacccaagaataaatcttcgacgcgttccttgagggaaccaaatataccataataaaaaaattagagctgcccaacaaatagataagccttgccgaccgaagaatttaattcccagaccc

SEQ ID NO: 142055 - DNA, 785 bp, Glycine max
  unsure (1)..(785): unsure at all n locations
  Clone ID: PAT_MRT3847_9928C.1
agggtaggattccacttcacagacaacaggaaaaaaattaacataccagaacccaggatgggcctagaacattatgcaatcgatgagcgatgttgaaaagggttctcaatgcctggttacatgatcagtgttgatgaaatgagtagttgcaatgacacaatcaaatatagaaatccacagaaaaaaatgaacaggtgaacaacaaaattacagtcaagtggggaaaaaatacgcattgcatgcacagaaccagaaggaccacctgaacattcttgggagtaagcacaatgctatccctctggtcaactgatagttctgaccgttttgatacaggagatggcaaagcactgctaaaatatcatatttaagccaaaatctcagtactgtaagcttgaattcttgaaaaccatcttaataaatgaaaaaacaaaaagtactaactagagatttaaaacgtcatacctccttttttctgtttcaacaggaaaattgatagtaaatttacaaagggatgcaagaaaggaatttaaaggttctacggctcggagaatcccacaagcctatgaaattgcaaatccatatatcattttaagttcaaacttaatttcaaatgtaacacataaaaacaaaaggagttaaaggccaagctgagttacctgagtaaatgcctggtatccctttaatatttccaacacaatggcctctccttgtgaccttcaaattaaccacaagtcaaatgttaagggaatatattgaaataataacanacaacatanggttaatta

SEQ ID NO: 142056 - DNA, 246 bp, Glycine max
  Clone ID: PAT_MRT3847_99290C.1
cccctctctctctctttctctctaaaaaacactattgggtttgattgtatttttttgttaaattattagtggctttgattgtgaaatttcatttttccattgttttgtttattgttaaagatggtatttgaaattgattccgattcatgaatcggatgtagctctgcttcagtctaggaatttagtaattaattttgaccgaggaaggatttccccaagcgtgaccacatcatttgtagttggaaa

SEQ ID NO: 142057 - DNA, 432 bp, Glycine max
  unsure (1)..(432): unsure at all n locations
  Clone ID: PAT_MRT3847_99291C.1
cccacgcgtccgcccacgcgtccgcccacgcgtccgcccacgcgtccgcactgctgttctggtctccatcacaatctgcctcctctatatgcattcaatcactttcttgtaattgttcctgtcgcggttcttgtttttactgtttagatgcgaagtctttgattatgtttatggtgttgtagccaatgatgaaagtcttcaatttggctgaaatgcaaaataatttattgcatttctctgttgaatatcttgatctaggacggtctgaggctacattttgtttttcatactgaatttgttagtgttgtatttatatgtctgcacagtgctgtgggtgatgagaataattactttacagttatccctggctgatgtagcagctgctgaaaatttgtaatctgacatgcactgntaagctgaatacaacccttt

SEQ ID NO: 142058 - DNA, 459 bp, Glycine max
  unsure (1)..(459): unsure at all n locations
  Clone ID: PAT_MRT3847_99292C.1
gagtgccctgttttattggaggtagactctgatataaaaattcatcaagatgctaggaaattagaaggagaaacagattgctctgttttaatggagatagactctgatgttaatgaagatgcaaagaaattggtaggagaaacagagtgctctgttttaaaggagaatgactctgatatgcatgaagatggtaggaaaagagaaggtgaaacagatgagtctgttttcctgaagagtgttgcatatgttcatgaagatgttaagaaaattggtgaaaatgaaacagagagctctgttttcttggagggtgattccaatttttctcaagataatagggagaaagttgaagaagaagaaacagaagagtctatcttcatagatacttactttgttgaagctagtagtttggtagaagaaccaaggatcttgaccttcactttccaacanaattatatagct

SEQ ID NO: 142059 - DNA, 2062 bp, Glycine max
  Clone ID: PAT_MRT3847_99293C.1
cggacgcgtgggtctctggacatgttcctttccttcttgttggcatcaaatatttgtgtttttcctagtttcactgttctcttataggaaagcgtgcaccttgaaggttttgatatttgagttctgtgctttctgacatttatatttggcgagatgggaagacaaagtcctggaaaatggatcagaaacttacttctggggaagaaatcatcatcgaagtccaagtcttctagagagaaagatattaataaaccttcaagttacaaggatgttctggtggcgtcttccgaggcatcaatgtctgctccaacatccggagctaatgctactaaaggagtgctatcagaaaaggaagtagtaagcatatcatcaaatgatggtgtaaatctttcaattagagacaaacaggacaatgcacaatcacttgctaatattggttctggggaccatcatgagaaaatcaggcaaatagaagcagctataatagttcaggctgctattagaggctatcaggcgcgtgggacatttaaaactctcaaaggtatcatacctctgcaatcttatattcgtggccagttggttcgacgacaagctatttctgctttatattgtgtgaagtcaatagttaaatttcagcattggctcgtgggtacaaggttaggcactctgatgttgggcttgcagtccagaaaatttttaaggatactaaacttccgaatttgagtgggggagatgcaaccacacaggcagcgaagctctcggatagtatctttgttaacaagcttctggcttcatcaccctctgctgtttctccaaatctcaaatataatgctggtgaacctaacttggcttgggagtggctcgaacgttggacaaaatcacacttttgggtacctcttcgagaagtgctgaaacctgattcaatatctgataagaaaaatggaagttgtcaaacagttgaaactagcaagcgacaagttaaaagaaatgccaggaaagcacctgctgtgagggctggtgatgattcagtttcagattctaacaaacataaacggtatcccaaaaaggattcaaacctcccattgcattcagctaaggaacacccacaaaaggaaattgagaaaaagagtcctagaaaaactcaaattcagaatgtttttgataaatctgaggttgctcatgagaaaagaactaacatcacaagaatagtttctgatcatgcaacagtgaatgatgttcaagaggaagatgctgatgctccttcaaagaagttggaagactcggcagtgtcagagtcaaaacagtttgatgttgagaaaagtctaggacagcaagctgaagagaatgaaaataatgagtcatgtaatgatactaatgctcccttgcaatctagcttgatgaatggtaaagatggagaattcattgaggacttgaatgatataaattctaagaatttccagagaagagcttccctgcctgctaattttacagatcatgaaaatctgttgcatagtaacactccaagacggcctagttatatggctccaactgaatctacaaaagctaagctaagaggacatggacaaggctctccaaggtctgttagcgatttggcagatgtaagtagtgtcacccggcggctttcactttcgtcttcgcttaatggcaagtatggttcattctctccgcggtcagatagattgtctgccttgagcaacaagataaggactgacagatctctatcatcttcaagggatggcacagataagttgatgcaacctaagtggagaaggtgacgatgcataatctttcagttcaaagatggtgcaaggaggtacaactaatagagtgaaatatttgctgaattcgcctttctttactcatcgttcttatttatggtcataaatatggatggatatatcgtgtaatcagaatcattatgtatgaaatatattttacgtaatgtgttggtagggtacatatgaaaggatctcagctcttgcatttggtttctctgctttgtgttattgtactccccaaataataatttcaagggaatgcg

SEQ ID NO: 142060 - DNA, 215 bp, Glycine max
  unsure (1)..(215): unsure at all n locations
  Clone ID: PAT_MRT3847_99294C.1
gtgtntttgtcgagtgttcggntggtcttcgtngctgttgcgtccgttggccgcttcactcctttggtntgcctttggtgtgtgttgcgcctttcgttgttttgngtngctgagcttcatggctgcggttttggtttgctgnttttccgttttctgnnagntnttggttctctnngntgccttctngtgtcncgcgtttggnncctnngntgnnc

SEQ ID NO: 142061 - DNA, 750 bp, Glycine max
  unsure (1)..(750): unsure at all n locations
  Clone ID: PAT_MRT3847_99295C.1
gaccattttcctcaatactcacaagctcctatagctgcccttcttcccncataccttccatcaatgaccgcttcagtatgtgaaaacccagcccttcaaccctacaggctccaacaagcaatcgcaacaggcaacttacctntatcacccctgttctttcaacaatcgccagccctatctntggtgcagtcatttgtacaaaccatcanggcacaacagctgcagcaactcgtgctaccagcgatcaaccaagtagctctggcaaacctttctccctactctcagcaacaacaatttcttccattcaaccaactgtctacactgaaccctgctgcttatttgcagcaacaactattaccattcagccagctagctactgcctactctcagcaacaacaacttcttccatttaaccaattggccgcactgaaccccgctgcttatttgcagcagcaaatactactaccatttagccagctagctgcagcaaaccgtgcttccttcttgacacagcaacagttgctgcctttctaccagcagtttgcggctaaccccgcaaccctcttacaactacaacaattgttgccctttgtccaacttgctttgacagaccgagcggcctcctaccaacaacacatcattggtggtgccctcttttagattgcttattagttgtaattcaataataaagttttttggatgatgtatgtggccaaccagaaataagaagttacatttccagattttcct

SEQ ID NO: 142062 - DNA, 349 bp, Glycine max
  Clone ID: PAT_MRT3847_99296C.1
cttcacgcgttcgcggacgcgtgggttcaattgttccgagatcaaccttggatcaggtttagggaatggctgaaatcttagctagtaaatcactccttgctcttcctgcgcgccaatcgtctgtcagcggtcatgggctgcacagatcccaatactatgtctcttggttaagagcacactccttatttaccaaaagagaggatgaggaacgggagctactcgcacaggacatttccatggataggagccctgtctttgaacgcatcattaacactctcctttctaactgaaatggtgcgaggactaacgctgactctgaaagtacttctttgaaaccaatgttacaatc

SEQ ID NO: 142063 - DNA, 316 bp, Glycine max
  Clone ID: PAT_MRT3847_99297C.1
gtgttttattttcacaacagggatgttccttacgtgaatcgtactgattaccagttcattgatattgctaaggagggagttgacaccatgcttactgaagatggtcacactaaggaggagctgaaggtatagactgatgagagagtgctcactaaaataaaagatgaagaatttgttagccatggtcaagtcatgtgcgtcactgcaacatactgtggaggaacatagttgcgcatatcaaggatactagggccgaagaactagcatttggtgcaagacgctcggaatttctatattgtagttaagcagacaacca

SEQ ID NO: 142064 - DNA, 353 bp, Glycine max
  Clone ID: PAT_MRT3847_99298C.1
ttttaatttagatgactctgttgctattattgattaacgcaacacaaatgacacagtctggggggatcatcatacatgagtcggggctgggccaacttaaaagcccaggatgacattggcccatgacgcgacacatgcacgcacctaatgatcgtacttgtacatctttacatacaagatgctatgactttaggttttagaccgactaaaagagatagacagatcatcttaatgaaatgaaaccaacacccacgaacatcggctggacttttgttgaagttgccgtccccaacttgattaaggatgaaccgcttgacagaatcacatgcacttgcagggaatggccctgatta

SEQ ID NO: 142065 - DNA, 295 bp, Glycine max
  unsure (1)..(295): unsure at all n locations
  Clone ID: PAT_MRT3847_99299C.1
ccatgactccctacatttttggngtcgtcgtccctctcttagtcactctcatcatccgcaacaactccaaaccccaaacgacgtcgcggcgtcccggtcgaagtcgggggcgaacccggtctagcaatccggaaccgccggttcgaggccccggtccagagcgcgtgggagggggtcgccacgctggcggagtcttcgaagaagcctgcaagacgcacgcggagaggctcctgctcggcacgcgcggggtgctgcagagggaagtggagaccggccaagacggcaggtcgtttga

SEQ ID NO: 142066 - DNA, 439 bp, Glycine max
  Clone ID: PAT_MRT3847_9929C.1
ggtgtggggggtgtttttttttttttttttttttttttgttttttttttgggcccccccgttcccgaaccccttttttaagggccctccttggccctcaatttccctaaaaattaatgggggggggaaaaattcctaatttcaaaccacaatgtttttggtcagaacggggccctggttaagggggggccccctaaggggtcctcggggggggggggcgggtcttccctcccgggttttttttttttgatgccctcggggcccccttcccaattttatccccccccttttgtctttgctttttcttccctcccccctccgtcaaggcctgttccccggcccggggattttctgggtttgggggactggcttcccctccctctttttattttttgggtggggggggggaactcgggggggggaaaaaccctgttcttttc

SEQ ID NO: 142067 - DNA, 471 bp, Glycine max
  Clone ID: PAT_MRT3847_992C.1
gaatcctaacatattgcggaggcaatgaactattaggtgtcaacttcaaagttcatgtctaatgagctctaacggtcccttgaactgtctgtgaggggaccaaactctataccgaaaatgagaacccgcctcatccccaaccatgaaacaaaatggggccctgaatattgcctgctccctactgaaacctaaagcagaaagactggatcgtgaatatccaacatgctattgttaccagcggataatctctcaggctcagcgcataaccaaatttaccactgaccaagtggcctcatatatcaccaagaaaagcattgtgagcgtgctccttggtgtgccactcaccccttaatattgagtcctatctatatacgcacgacaagagaccatttttctggcactatattatttaccagaatacatggtaacaccgaccagctaacagtcttaggcttaccttcatcaacagct

SEQ ID NO: 142068 - DNA, 311 bp, Glycine max
  Clone ID: PAT_MRT3847_99300C.1
cccacgcgtccgaccacacctaccttaccttctcatctctctaaattctcggtccattcgtagctatactctgatagggtgactctttacactgactactatacacattctctgagcacaaattactccctcttaaccctatcaaccacgcatcatccaattctaccaccgaaaacaaatcattttctcaatgaacaaccacacaggtacttccccaactcgatacaaatctatctaaaaacatgttcaaaatgtcactcacatacagcaccaattcaccatcctgactactcaagatatggtaaaagcac

SEQ ID NO: 142069 - DNA, 197 bp, Glycine max
  unsure (1)..(197): unsure at all n locations
  Clone ID: PAT_MRT3847_99301C.1
gagcaaccctcgtaaatggactgggagttggagggagctaaagggcatgagtgctgtgaaaaaaatgctgtaaaagcaatggggggacaatggcgacaaacatggaaccacaggcgtacatnaggtcgtcaatcggatcacaggggatgcgatgcactggaattgaactgagcactgcaaaatctggaattcaaaca

SEQ ID NO: 142070 - DNA, 546 bp, Glycine max
  Clone ID: PAT_MRT3847_99302C.1
ctgctgcggctgcaaaagcagttgcggaggcagagactgcaattgcacaggctgaggcagcagctagggaggcagaggctgcagaagctgaggctgaggctgctcaagtgtttgcaaaagcagcaatgaaggcgctaaaatgcaaaatgcttcatatttggtagtttcctcaccaagaaatctaatttgattcctgtggatgaaaatatgagatggtcataactttatctaaattttattttcctgtttagaatgcttatcacatcataattattccgatagtatgctggttctctgcactcttcagtagtcactcctttagaatcttctcatccttatttattttgccttttgttcttggttactggattagaggctgatctgtctgtggttagacttttctccaagtggataatttgctcagaacatcttatagcacagttttttaccaaactgatcatgaatttctaacagtctctactatggaattcaatttccacaaatgaaatctaacactacaatagtagtgaacattataaagaaaac

SEQ ID NO: 142071 - DNA, 221 bp, Glycine max
  Clone ID: PAT_MRT3847_99303C.1
actaaaaaaaacaaataattaaaactgaaattcaccaaataagagaaaagagcttagattgttcctattaaacaaaaagtaaaaaaatacaagtatcgaaacatactagaatatcatgagcctagcgcaacaactaatctatgagccaaaatataactaaaaaaaccttaggtacataaacctaggaagaaatcaaacatgaggaggtaagaaaataattt

SEQ ID NO: 142072 - DNA, 226 bp, Glycine max
  Clone ID: PAT_MRT3847_99304C.1
accgcaaaaccaggactaccattgaattttggtcttgacacgcggggcttttgacaagttgctatcggcctcctcgctcgaggaattctagtggacaaaactgtagactggactacacttatacaaaattctcctattcgtaacttggcgacagacgcagattggaagacaggctgtttaacgatggatattgagatgactctgactgcaaaagtacaaaggagtg

SEQ ID NO: 142073 - DNA, 225 bp, Glycine max
  Clone ID: PAT_MRT3847_99305C.1
gcttccgaagagaacttaagaaactttataggtctttaatgttgcttaggaagctgttgctgcgctcacgcactgaactttgtagctaagtattgatgaattgatgcgatctcccctacacaaacgtgaggaaagcttgtttctgttgagcagctctgattgtgcccaaacttcgtggaagaaactgacatgcactttgaccgtatgaatagcttgtatgtaggt

SEQ ID NO: 142074 - DNA, 636 bp, Glycine max
  Clone ID: PAT_MRT3847_99306C.1
ttcagaatggcggcgatgcagccgatacacatagacccggagtcggtgaagcagccgaagcggaggaacgtgaagatttcgaaggatccacagagcgtggcggcgcggcaccgcagagagaggatcagcgagaggataaggatactgcagagactggtcccgggagggactaagatggacactgcttccatgttggacgaggccattcactacgtcaagtttctcaaaacgcaggttcagtcactccaacgcgcttcctccgctaacaacaatattaggccacttggtactagtactgttaacgcaacaggaatagggttccctgttgctatgtctaccacttccaattccaccccttattttcctctgcctaaaccttaccaagctcgccacatggagaatatgcacgatagatatgattaaggttgtttagtgtgtacaactagctagttaatcaattcattatattttaagctttagcctctgagattatatatatatatattggtaacaattatatgtatgctgtacatcatggcatggcatagctggttggctcgtctcaattcaggcttctactttgaaattaaatccagttgtgttagttaacttgcttgcaagaaattccaatttttc

SEQ ID NO: 142075 - DNA, 246 bp, Glycine max
  Clone ID: PAT_MRT3847_99307C.1
gggccggggggttgccgttaggaacatgaatgttcaaggggaggcttaaatttttggcgtaaaaggggttaaattggctgtgggggaaataatgatttcctttgtcttttgcgaaaaattttctttcgggtgttttttaatttgagcctaggggggttttacatggggttttaacgcactcaaattcattgggttgctctaccctttttaaatgcgggaaatttgggggcccatttttgttaaaaa

SEQ ID NO: 142076 - DNA, 1687 bp, Glycine max
  Clone ID: PAT_MRT3847_99308C.1
ttttttgcaatttcaacccaaagtcggtggggactttaattttaacccaaagttgttgggatattgaggttcaaattaaaaatattaataaaaggaagtaaacttaaaaatgagcatgtgcaatatgtattcataccattgcctagcttaaaaatatagctcatgcgtttattcagtaccatattctacaatttaagcattaccataattctgaggacgaaattcaaagacaaaaacaatttcattaaactagttcatctagcaaggatttgctgtctaaattatcaaccttggacttgattgacaagatgttcttggccaaatcagaagacttcagctcaagctcgcttaaatgctctctgatctcttcaattcttgttttgatatcagttacctcttgttctttctgagccaaactttccagatttgattccagctctttgttcaatgtttccatttcacgatcagagttagcctttgccatctccgccatgcagtgctcatcaatgagttcaatgttttcagcaatttcatcaactatgttccgcaaccaggccacgcgaagctgagcagattctacatccttaagaatagccatcaattccatgattttagactttgccaattgcattattggggtagattgtagctcttggaccacaaagcacacacactcgacataatatgaccgcataacaactgattccaagtggcagcttgctcctatgtccccagatggatctcaggatgggagcaaagctttctttcacatggtattttccaaccgggactcgcgactcagaaaccacagactcagtctcctctccatcactgtcctcattatcatggagaccagagaaacaacagacaaacaaaaattcatggatccaccatctggtttagtaagacatcccgtgtcatcaacaaaggtgattggaacaacttttggtgaagcatttttgtccccattgtgctttgattggaccttgtgattggtaggcatgacatcttggacatgtatttctccagaaactggtatgatctcattgctttttgactcctcctttgtcttttcagaataatttgataaaggcgatgaagcatcagagagataaatagccccaatttttgagggtggaacactgtcaagaacggggagttctggctttgaaccaaccttcttcctcctgtcaaagtttaaagacatggtacctgaatcagccttctggcaatactcatcacagacatggtaaggattagacgctttagggcaacctgagggcctgcgtttttcttctttcatcgttttgcccagttcaccatctgtaacacttctgcgataatctttgaaagcctttttagttttagatggcttgccaggcttggcttccttgattctatgcacgcaagcctccgtgcattcatggtagggattgggagcatatacacagtttgccataactcctccgagctcagccatctctttctgagtctcccctgcctcacctttggtaccaacccacccaactgtgactagaaagacagagacagctgtgttggaaggtagaaggagtaggtgtgcaacccgaattcctaatcaaacagtgtggggtatgttgattggagtattattctctcttttttttttttgagcaagaaagataggaaaagcaatgttgagggagcg

SEQ ID NO: 142077 - DNA, 611 bp, Glycine max
  unsure (1)..(611): unsure at all n locations
  Clone ID: PAT_MRT3847_99309C.1
acggctgcgagaagacgacagaagggcctttgtcaattattttttctggttgctgagattttttttttggattctctatgtcactttagttgttcttcgaggacagtacccgcaacatacaagctggaaaacgtgtggggcttcacactgtgctggttagtcattggaatctttgttatttagtagaaacttacttgcttctagaaactattattggttgcattttaatttgtccaaatccaccaatgtactattttttttttgtacaatgatcgtactcaggtttggtttgaatctaggatcgcatgtatatttctccaaactccctcatgcatgttattgttggttgtattttaatttgtctaaattcactaatgcatttttttattttttatacaatgatcgcattgaggtttgaatttaggatttcatgtatatttgtccaaagtccctgaggcatgttattattggttgcattttaatttgtccaaacccaccaatgtaccaatttgaggctntattactcattgattgttaaaatccaggttgggacatcacaaagatgtaaaggtgcanattatgcctttggaaagcattcacaaccttaggga

SEQ ID NO: 142078 - DNA, 182 bp, Glycine max
  Clone ID: PAT_MRT3847_9930C.1
ccacgcgtccggccaactttcgacaaaagcgaatataagtcctcgatcgccagtgtccaatgagcatgcaaccaaagaacgtaatcctgtggtagagaccaacccttcaatctcagcaacaggcctcccgaatttttgaacctttcttccatgggaggataacttcaattcaggacgttcct

SEQ ID NO: 142079 - DNA, 474 bp, Glycine max
  Clone ID: PAT_MRT3847_99310C.1
atcatggaacactacaaagctaattaagcgctcgataggtcccttaccacacttgaacatacctgatatatgagctacagaactgcataacttactagcgagggtaactcattgatgagcacacaagttgaagcgtttaacattctttggactggggtaactctatttattccagaaacttgatcagctgagaatcaaccacaggagattactccaagagttcccatcatcaaacccttggaactttcttagattatccattgctgattttgaatcagacatgcctcgcgaggcatggggcatgcctttccggccttgattacttaaaaagggcactgtgcattccactagctgcttcacataatcgttactggaaaacaatggctcattagtacgcattaccgcttccacttgaatgtcgagactacagtagatacagtaagtgctggaccaccataactaactatccctttt

SEQ ID NO: 142080 - DNA, 345 bp, Glycine max
  Clone ID: PAT_MRT3847_99311C.1
attacatctaagcaactagatgttgacagatcactttcctagtagctggaagaatacagttttctttccatatcagattataacgctatgtatgtatatagataaatatattttaaagaagctatttttgcttgagaagtagggaaaaattgcactcttaaccaaaaaaataaggaaaaagatgatttccaccacatacctttgtatacctaaaatcttacacttagctcagtcataaaaagcttgcgcacagtttaaaacaacccatacaaagaaaagagagtaactcacatcctttgcggctctaagcacaaagcatcaacttgggaatgattctaatgatgg

SEQ ID NO: 142081 - DNA, 309 bp, Glycine max
  Clone ID: PAT_MRT3847_99312C.1
aaaagattcaataaaagcggtatgaaaatttgaacccatccttattttaggcattttgtgtctaaagattacatgttggccaactgggtcccttccaatacctttagattttggttgggtttcgtgcttttggaaaattcgttgagtttttgaagctatggaggcttataagaaatgggtgaggcaaaacaaagagtttgtgcactcactgtgatctttggccaatgtattgacatggcttcttcctgaacgtgtttctgaatcaaagattggacctgaagcaataacaaccattctgggaatcattca

SEQ ID NO: 142082 - DNA, 370 bp, Glycine max
  Clone ID: PAT_MRT3847_99313C.1
ctgtattgttttttaagaataaatacaaagcttgaaggaaataggaaaataaaagctaatgtttcaatataaacaaattttaaggtgaaacataaaaggcagaggtagcagtaatgcaagaatccccttcaaacttattaacaaaggatgtcactacatctggaacttgcttggaccaaaaccattcatatgctttcggctgcttatttgatagttttttgctaattaaactctccagaggagcagatagctgaagtaaactagatcaataaaatatttaacaattttaaggcaactagggagtagaataaaatatcaaaactaaataaagaaagaaagaaataactagtaatgaaataaccatgaaaca

SEQ ID NO: 142083 - DNA, 133 bp, Glycine max
  Clone ID: PAT_MRT3847_99314C.1
ctctttaaaggtgtttctgaacatgccacacatacatacaaacttctactgcttttgctcacgtctattctagtcgctcgctcaatctcctgtccagacggacataattaccgttttccaccactcatccact

SEQ ID NO: 142084 - DNA, 243 bp, Glycine max
  Clone ID: PAT_MRT3847_99315C.1
aacctatatctgtgaccccctaccaatttttcttacatgtaattttattcttttgggccttttcacggtccaccccagtctccttactatagttttcttacacgctattcggtctgttgggcacgataatttcactcggtatgccgtttctttgtggtctccacgattttctctttatggggctcagtgctcccccctctacttctcttactttaccgtggtcctttctctgcttgcatccct

SEQ ID NO: 142085 - DNA, 533 bp, Glycine max
  Clone ID: PAT_MRT3847_99316C.1
gttttacaccacattcccctctatttgcaatgggggtctcctcttctttctttgggagcacctttttcaccttccattttccttctactatctctccttcaaaattccatgggtgcatgtttgagtaagaagaaagggtcttcttctacagcaaccaagtcagcttcttccacagcacatgttgctgtgcctgagctgaagaacaatcctccttctgttagtggtgtcactgtttccaaacccaaagtggaaactgaaactgccccagaagtgaaactgaacaaggacaattctaagaaagtggaagagaagcatgagacagtgccagaacctgaagggcatgtgaaaaaggagatattcatcatcaagcacaggaagagccatgatgattgagagagaaactcccattccaaatccccatctttcactgaagaatcaatggctgataaaactgccccaacaccatccacaaacatgggtgttgtaagagtgaggacttcaagctgcaccaaagaagaggtggatgcaattct

SEQ ID NO: 142086 - DNA, 653 bp, Glycine max
  Clone ID: PAT_MRT3847_99317C.1
cggctcgagattaaatggcacgtttcatctactacgacacgaaaccccgatccagagaaactcctccttctcctcaacatatccttcatttatctcacctttctcttcctcaaaacctatctccacccttcttctagtcctaatattgttcatgcctccacaaaaatcttcaaccatgctagaatgctaagtgacatcagtgttgatggctgcactgatcttcacaagtactcagattatgactccaagtgcttatatgtcaaatccaatgttcactgcaggtcaaaagggtacataaactatctccaaatcttctactgcagctttggccactccccaattttgggtcattcactgcttgtaatgtggcttgtggtattgttttatcttttggctgatacagcttcaaactacttttgcaataacctagaaggtctctctgacatcttaagactatccccaaccatagctggggtaaccttgctttctcttggaaatggtgcccctgatttttttgcaagtgttgtttctttcacaagatccaatgatggggcagttggcctcaatagcattctggggggagcattttttgtctccagtgctgttttgggggtcataagtttccttgttagagcaaatgaaattgcaattga

SEQ ID NO: 142087 - DNA, 460 bp, Glycine max
  Clone ID: PAT_MRT3847_99318C.1
ggctcgagctgttacatgtggaaccctctcactttgactttgcgtgatccgttacactgtgttgccttgggacgcaatatgacgcgtgttggttttctgcgggtcgctctactatagctaattgttgtgtgcgctgcaacggcctggggtcgtaacttataagcatctgtcagtggctcactgtcggctgcggtggcaggcatcctctgcgttatgttgtcggcttcttctcccttgacaggtctccacgaattactgagggcgagacctggccagcatgagcggccttgaggctgctacctttgaccttgggtatacgctcctcaaggccatgggtgtcatgctagcaaccgctgccataggctgtgttatggcattgtactgtgagcactacttgtggtaactagttgacactgtgtgaagttctcgttcagattgactgataactacagacaaaggt

SEQ ID NO: 142088 - DNA, 227 bp, Glycine max
  Clone ID: PAT_MRT3847_99319C.1
gcaatattgattgatgtaagtacatgatagataggctaacttgtacattaaataggaagaaaaaaaatacagagtaggatgagagccaacagaataggggtaaaggaaacagaatgcagggaagcacgggcctggaatactccttgcctttttagattacaatattttttttctggttccttttgtaatttgcattataatatagtggcttcattcttttgttggtg

SEQ ID NO: 142089 - DNA, 597 bp, Glycine max
  Clone ID: PAT_MRT3847_9931C.1
cgacggctgcgagaagacgacagaaggggatcccaagtgagatattccctctggagactcgctcagccgggcaaagtatcgcggtgtgtgtcaacttgctctgcacatttgtcattgcgcaggcctttctctcaatgctgtgtttcttcaagtttggcatcttcttgttcttctctggatgtgtcttgctcatgtccacctttgtgcttttccttctccccgagacaaagaatgtcccattgaagagatgactcagagtgtgtggaagcagcattggctgtggaagaggtttattgaagatgattgtgttaaagaagagaaagtagacactggcaattgaccaagcaaaaatgggaatgtccaagggttgtctaatgagtagtattttagattctatggagtatttggttagatttggatgttacaactaaccaagttattactcccagtatgttagtggcatgtgtctgtaacattgtgatgccacgttaattgtcctgttatgccagtcatataacatatgtgtaataagtttttttttctttctcctcccaaaaaaaaaaaaaaaaaaaacggcgccccggccgctccacagga

SEQ ID NO: 142090 - DNA, 489 bp, Glycine max
  Clone ID: PAT_MRT3847_99320C.1
agctcggaattcggctcgagctcgagccgctcgagccgattcggctcgagaacaggttgttcctcatcagcttttgtgttccaaaactaggaaattatccttttcttgaggcatattcccgtccaattcgatgcatctccagaagccgtaacacaagagtgtccactctggtgtggaaaaggtcaactgctcttcattgccatagtttatctcaatcttcagctatggacgatagatccttggaccttcagcattccagtcatgaagcacaagccaatccactgatgaagcggtttagacttggtcaagataagacatctgtatcagtgaaggctgaccccaccatagagcaacctgatgaagaatgtaattctcatgttcggactgctaaccaggttgagaatgggtttccaacaagcttggatggaaggtcagcaaactttattgaagcagaagattctccatctgattcagagagtataggggagg

SEQ ID NO: 142091 - DNA, 177 bp, Glycine max
  unsure (1)..(177): unsure at all n locations
  Clone ID: PAT_MRT3847_99321C.1
gagggagagaccnccgacgcaaagaaccaagaccagaagccggggggaggcccagaacccgaaacggggcccanaagcaangaagccgagaacccggacaaaaggataggggagccccgncagaaaagcagcgaagccgngagggagagggcacggcaacggaggagaaggcgccaa

SEQ ID NO: 142092 - DNA, 432 bp, Glycine max
  Clone ID: PAT_MRT3847_99322C.1
atattttttttttttttttttttttttttgtgtgttttttaaattttttgggggtttctaaaaacccaaaaggaaatgcttgcaagaccatcttaaatatctttaaataactgcccctgttcaaaaaaaaaaaaggtcactaaaagccaaaaaaaacagggcttccatttaaaaaattccaacgcgaaaattttcaacaaaggatatagctgatccattgatgccacattgcccaatctgctcatgatgggacctttccaatttaagtgcaagggccgccccataaattgatccaccaactgcaccgtttttccagtcttgaactccacgcgctttttttagcccatatgtgaaacctgaatccaatcctgcagccactccccactgaaaggactttttccccctgctctataccatggccttaaaagattt

SEQ ID NO: 142093 - DNA, 375 bp, Glycine max
  Clone ID: PAT_MRT3847_99323C.1
cgcccgaaattccgggtggacccagccgtccgaatttttttgtaaacgggccaaattaagaataattcaagattggcaaccgaaccagcagaagcaacttgatctttaagggggacgcgcttcttgaaggccaataccggggcggggggggggcaggcccggttggggtttgtcaggaaaaaagcctccgcccggaggaaggacccaagggggccgggcactacctataataggcacccttagaagccggggaaaacaaaaaggccagggtaacttgattccccgttcttgaagcttggttcttccgttttgggtcaattttttagagttaagagggtaaataaaaattggaggtttggtggggtccaattttaa

SEQ ID NO: 142094 - DNA, 496 bp, Glycine max
  Clone ID: PAT_MRT3847_99324C.1
ccggggtcgacccacgcgtccgcacatatagccaacactgcatagaagcgtcttaataaacgctcttgcctgaaaaacctgatttcttctcttcttctgttctctatagatgcgatcttcgatctctgcaaaatgagagcgtgcatttcaatccacatcggtcatgccggtattcatgtgcggaagcgcctgctgggagctctactgcactggaacacggcattcatcctgatgggcagatgccaagggataagactgttcgtggaggtgatgatgctttcaacaccttcttcagagaaactggagctggaaagcacgtgcctcgagcgatctttggacatctagatcctactgtgactgatgaagttaggactgggacataccgccaactatttcatcctgagcagcttattagcgcaaaggaggatgctgcagacaactttacccgtggccagtataccattggaaaaggagattgccgaactttgcttgggat

SEQ ID NO: 142095 - DNA, 268 bp, Glycine max
  Clone ID: PAT_MRT3847_99325C.1
cgttacttcactcaaacaagatagtccatcgaaacattcaaccagagaacatcctgttgaggaaattgaaggatggatctatgcaagtgtctctcgcagattttgggaattcatcaaaagatgcgcctgatctaattcctattgcgaagaatcctcagtacactgcacccgaagttttcctgagagcaaatccgaaagaaccgtacgatggctacaaagccgatgtgtggagcatgggatgcatcctcacacaaatgctcactgggat

SEQ ID NO: 142096 - DNA, 358 bp, Glycine max
  Clone ID: PAT_MRT3847_99326C.1
gatgggtctctggtccgggtagggcatctggcgcgggatgcaaacaagcttgggacctgtagataccaatccgatcccagtcaatgcattgtcctacaattccaactaagccgaaagtgatggtgatgtacacgcgatgggtgctacgaagcagaaatggactgcagaagaggaacaagcgcttaaagctggagatgtcaagcacggggttggtcaatggctcaccatactgactgatacaaagtccagaggtgtgttatacctgcggtctaatgcggctctcagggatgaatggacaaagctgaacgtgatgtcgactggatggagctctacggatacatgtacgttatgagtctga

SEQ ID NO: 142097 - DNA, 267 bp, Glycine max
  unsure (1)..(267): unsure at all n locations
  Clone ID: PAT_MRT3847_99327C.1
tttgcttcttccgatcccatcacgaagtgcnantagcaattccgctactcacaaaaaancttntcctattccctttctctttccngaacccaacacaacaaacacnacacaggataaataanttacattaaaaactagctaaattcctctctntctctcnntctcttcgngggttngggtnaactntncctccctngganaaaaagaagagncaccgntgcgangncgnncgngcatttttgnggtgccgctnnnatatttgggcgg

SEQ ID NO: 142098 - DNA, 930 bp, Glycine max
  Clone ID: PAT_MRT3847_99328C.1
agctagaaagattatggtcttagaatgcacttgtctccctttgtgtgattaattaattcctagctacgcacgacacagacactggtccacacagccaagaatggtagatccagctactgaattggtgccaccaccatcttcacccaccaattcatccatttcctcctctgatcttgacaccgagtctacgggatcctttttccatgacagaagcaccacactgggcactcttatgggtgtcagcttcccagctattaccttcagagcctccgacccccatccaaattccgccaccgccaccgccaccgctgctgccggaggccctcgtagggctgcgggctccaagaagaagagggcgatcgcggtggcggagaggcggaggaggtggtggtggctgtgcagggacggtgacgcgaggccggcttcgctcggtgagtttctcgaggtggaacggcgctgcggggacggcgccttttacggcacggcggcggaactcgaaggaatggtgatggacccgcagagtagccatggccgggctttgttttccgacgggagggttcttccgccggctggcgttgatgacgatgcgtcgacggcggggagtctttgtcgtagattcccggttttgctcaccgggatctgtagcggcggtgctggataagatattcagttttaattttattcttctttctttttctaaaaagaaaaatgcttaattatttttgtaggattgtttggatgtttgtttatttgattggtatatgattaagattcttatgcctgtaatttacatggtttggctttctcggccttttccttttcatttttattttgaagagttccttgaaaaaaaatgaattctcccaaagagagtatgataatatgaaaaaaaatagttaatcaaagaatatatatagcattttttatgtc

SEQ ID NO: 142099 - DNA, 466 bp, Glycine max
  Clone ID: PAT_MRT3847_99329C.1
tactagtcatgtcggccgccctttcttctttcttttaaagccctaactgcttggacatcacattgatatacaccgcaactctggactattatcctttctttcggactaatcagcacatcaaccgggataaaaagctatcctccattattactctaggcggacaacatgtgcttgctcccatgggaccgacgctgacagaaccactacttgaaaacacttcatctgggtcattatgttctccgagagcacacttgggtgaaatggagcaaatctcatctcccaccttactctaattttggacctgaaagtgaggggaaatcttgctacctttctatccacaaccaccccagccggtctttggtagaaagggatcaagatcttaccttacctctatgaccactcttaaggaaagctagtagcaaaattctggtccatttgatccaagagaagcacgaggagacaatac

SEQ ID NO: 142100 - DNA, 295 bp, Glycine max
  Clone ID: PAT_MRT3847_9932C.1
gcatctagtctcagcgactgtcccaactgctgcgggccagtaaaatcaacggacatggcagactaattcttcattgacaaatctcaacagaataacactatctgtggtaggaactatgcatacgaaaacgctatgaaggacaatgtactgaatttgatgcttattcaagcacccacacactatctaccacaagcgcaccatctccaatacatttgccataggaaaggctccaattgaaaatcatttttgtaccattgagatgggtgccaaacttgacaaccatagcctgatatga

SEQ ID NO: 142101 - DNA, 139 bp, Glycine max
  Clone ID: PAT_MRT3847_99330C.1
ggggcgggccttttttttttttttttttttaagccagccacgcaagggcaagaccctgggatccgaacacaaagacgccctcgaccctcagcaaaagataaaaccaagggcgacaatatcgaggataggaaaacaaccc

SEQ ID NO: 142102 - DNA, 354 bp, Glycine max
  Clone ID: PAT_MRT3847_99331C.1
ctagctatctcgatcgacactgtccaagcgtcctgctcacctagcttggccgcagtcgatcacctggctgcgggggcctaaaccgtacgcccaacccaatataagcctccacggtgtgagtcctctgtataattgtttgtgtggtatgtgttggtgtggtttatagggtttacccatttgctatgtgtgttggtcttacaattcaagtttgtgtgtgtgttcgtgtttttggttttaaaatttttgttgtttgtcgcactattcatattctatgtctccaattccaaatgcaccattgcaacaacgatcgtacggtcgccatgtttacagccaggtcttctcgtacataagtag

SEQ ID NO: 142103 - DNA, 1122 bp, Glycine max
  Clone ID: PAT_MRT3847_99332C.1
gatgcaaacatctctacctagcattcagcacaatcaacagtccaataatcaacaacaatcaacacagtccgtgcttcagcaacactcccaagttatcaggcaacagcaaccacaacagacttcgatcattcatcaacaacaaacaccgatgactcaacagtcaatattacctcaacaacaacaaaacaacaacaattagttaagagagttgagtaagatcagaatggcagacttgatgaaaagaatcctccaaatgattgaggctgaacaagcaagcaaagggtccaaccatggttcttcaaactcacataacagctatggcagcggaagccagaatggatcaaccatcaacagtggcaatcatcttaacaacggcaacaggtatgacgactcataccactacggtgaacgccctatttataacagtggcactttcaatggtaatggcaacgggtcacatatcaagggtggctttgactcctcaacaaggaactactatggtcgtcgttatgattattaattatctgtatttgatacagtatatgctagctagctgggcaaaatatataatatgctatgctacgttgtactagcaataaataatgttgagctaaagctctaatgggtttatgataaatgtaagtgtgttggggtgttatgtaaaccccaatatagtttccgtccgcccccaatataaaaaaaaaataaaaaaaaaaaaaaaaaaaaaaaaaaaaaaaaaaaaaaaaaaaaaaaaaaaaaaaaaaaaaaaaaaaaaaaaaaaaaaaccaaataaaaaaaaaataaaaaaaaaaaacaacaaaaaaaaggggggggccttttaaaaaaaccaaatttaccaaccgggtgatccaaaagttaagcttttttaatggggaccccaaattaaatttgaagggcggcattaaaaaaaggtgggaatggaaaaacccgggggttaaccaaataaaatggccaggaaaaaaacccccttttcccaaggtgtattaaaaaaaaaaagccccaacctatccccctttccaaaaaattccccaccttaatggctaaatggacccccccttttaagggctttaaaaccccgggagggggggtatctcccccaag

SEQ ID NO: 142104 - DNA, 392 bp, Glycine max
  Clone ID: PAT_MRT3847_99333C.1
ggaaacaaaaaccaaccccccaagggccaaaaaaaaaatccccaagaaccccaattaactggaaacatagtaaacaaaacaaaggggggggttaaagcttaaaaggcggctcataacaaatataagggaaaggggccgacaaaccggacaaaatctaggagggggggccataaaaaaactagcttcaggggcaattaaaaaggaacccccccttgaaaaagcccccttttttttggtgggggccaatggggtccaaaccttttttttaaaaggcttttctttttaaaacaaaataacctaaagggggcagggaaaaaacatgaaagggttgatttttccaggacccctgaaggaacaaccccttggcttcggggctggataaaccgggccag

SEQ ID NO: 142105 - DNA, 669 bp, Glycine max
  unsure (1)..(669): unsure at all n locations
  Clone ID: PAT_MRT3847_99334C.1
gaccgacgcgaccgaagcgttcgaaaatgttaggcgctgagggagacgtgtgagcacctgtatgtggcatctcagaaggaggagcatgtcagagatcactctgttggctgagatggtgggaaatgacttaattttggagaaaaaagatggagcaataatctattttgtgatgatgttatgctaaatgattcagatacatatggctagtgtaactacctcatacctgggacatctttctattcttccattgaatcctcctcttggcttgtaagtatttttctggaataggctttggtagtgcaccaagatgggaaaagttttagttgctagttacatgatattattaagttcaatgtccaaggttccttttaaaaaaaagcatatttatatgttaaatttttttcttaactgcatattgactcaattaaccgctggattggttgatgtatttgatttcgacaattctccccttttttttggttgggtgggggctaaatgaattcacaaaatggattgatgtgctgaacaggctgtgattgactggaatgtgaacgaatatttttgtttatatcttggtaacttcttttattgctagatattcattctatgaaaatacatgcatatatatctcatgtggactnttactagtgnatatgcttgttctcttga

SEQ ID NO: 142106 - DNA, 778 bp, Glycine max
  Clone ID: PAT_MRT3847_99335C.1
ggtatcgaaacaatagtttattcaaattcttgctcttagaagttaaaattacaaaaaatttgcaaacaaagaaaaccgggaaaagaattggtaataaaaaagaaaagaaataataaaaaataaaaataaaaaatagcggaaaaaataaaaagaaaatgagtgaccgaacattgccgcgatacaagatcatcatttggaccaaaagaaaaataccagataaacgttgagaagaagttaaaataacaaaaaaattagaaagcaaagagagagaaagagagacgggaagaaaattggtaataaaaagaaaaaagaaaacccatgaatctttctttgctggcagattccaaaggggtaccctaaacatatatcagttctcaatcggttctttatcatcccctccttgaccgcaagcagcactttctattcccttttctagttttgagccgtcctgctcctccgctggtgatgaattctgcaccttattttttgatgatgatctcctcttcgttcttctgcccctactaccacccattgaatctgcggttgcttgtttcttgggcttggaatccaaggtggattcggaggtgtcgggaaggtaacggtcgaggcggaggggtgaaacgacggcgtagtggtggagcattgtgcggacgaaggaggcttccatggtgttgaggtagtgaagatgcttctcatctgtccaaagcgacgccgtttgggtgtcgggggtggactccattgagggtgagagagaagagaaagaaaagggtgttatgat

SEQ ID NO: 142107 - DNA, 381 bp, Glycine max
  unsure (1)..(381): unsure at all n locations
  Clone ID: PAT_MRT3847_99336C.1
cacgagccgtanttgntttaggagacaaagaggacgnanccaggcgacattttgcagatgagaccaactctttcagagaggcgacaatggagaatactgtagcaatcaaagccagcttaaggacatttgaaatggtgtcaggctttaaaatcaactttgcaaaaagcagctttggtgcaattggcatgccggaatcgtggaagcaaaacgagcaaattatttgaattgcagtttgctggccattcctttcgtatattcggggattcccattgtggcaaatccaaggagaagtcagttgtgggatccaatcatccataaatgccgagaggaaactaggaacatgggaaacagagacatatatcatttgggggggaaaattac

SEQ ID NO: 142108 - DNA, 321 bp, Glycine max
  unsure (1)..(321): unsure at all n locations
  Clone ID: PAT_MRT3847_99337C.1
cgagnangaaagananncnnatncgnagcngcnncaccngcggnannanctcacgganaacantanngnnncacaacgngagacanancgcngncgnacacangacncacangacancnnngnngcangnncgcannnggagnngnncagcacaganacagatnanancannngnncannacggcnaagganaaaganangnncagcagtnganagcnaaancannagnnanacnacgngnagnngcaannacngacacacaagganagannnagancacaganannncnaagnnacgagancacantnanagancanggc

SEQ ID NO: 142109 - DNA, 216 bp, Glycine max
  Clone ID: PAT_MRT3847_99338C.1
cgaggaaaggattatcaggaaatcttctataattgaccaagccttattattacctgggggaaaggggggtgggggggttattgaccacaaccttaatttgcttggatttggaaagaccgcattaaataccacccacaaatataacctggaaaaaccaaaaggtaaacaagcccttgatgcaacaaccgcaattaaacctctacctcaaaggctaaa

SEQ ID NO: 142110 - DNA, 849 bp, Glycine max
  unsure (1)..(849): unsure at all n locations
  Clone ID: PAT_MRT3847_99339C.1
gaattcgagctcggtacccggggatcctctagagtcgacctgcaggtttttcttctacacccaaaaacataatggaattgttgatttttcccttcaattaaaattgaaaaagcagcagcctaaacccttcattttcctcctctgttgcttctgttttttgcgattttgcttctcctttcttgcaccacgagttctgttattcacccctccgttgatcttgttagttgttggttgctactccttctttcatcgtcgttgtcgttgtcgctatcgctgtgagtaactgcctcctcctttttcgcctttgttcattgttgtcatatgaattcgtatgtattatacagattctcaatccgtattttgatattttttattttttatttaatattaaatgatttatttaatttttttattatataattaatttttttattctttaataaatttataaaaaaactattgttgtgtattttaaaactgtatttatttgtttaactaaattttttatttaatttgatttttaataattttttgttttaataaataattaattacacaattttttttatttaaaaatgaatcaataaattttatttttatttatgtatttttaaaataacaattttaattaatttttatatttaaaatagtaatttatagcattgttaaataacaaaatttccaaattttttataatgtatatantggtagaatgtatttaaaaaggtaatattgtatatgaaaaatgtttttaattaatatattcatataaatattattacactaaatggtattaaaatttttatataaataatgtttgggaagtataaaaaacaataatttattcat

SEQ ID NO: 142111 - DNA, 522 bp, Glycine max
  Clone ID: PAT_MRT3847_9933C.1
aagacattgaagtctctgaacagaatacattgaagtctctgaacagaatacattgaagtctctgaaatgtaaaaaacaaaagacatttatttctctgaagtctttcactaaaatgcgaacacgcttggtaaagaaatcaaacccccaaaccgattagaataacacacattttttttcaaaaaatattgaaacgaatgaggaatgaaagcaaaaagatagaatttctcataaccaagaatgagattaaggcgttttgcatttcgtttctaaaaaagcattagaagaaacattggattcaatcaaatagaggaaaaccgctcaaagatgtataaaacttcacccaggcaagtgtttcatctcaattccaaatcacaaatatgtcataaattgattttgcaagtcatttcccatcaaatcaaggataatgtgcataatcatcatggatcaatagatctttttaaggttggatttgtaggaaattttggctttggttgctttggttttttttttttttttttttga

SEQ ID NO: 142112 - DNA, 277 bp, Glycine max
  Clone ID: PAT_MRT3847_99340C.1
gttctagatcgcgagcggccgccctttttttttttttttttacactaaatcattaccttatgatgatttgatgaggacaaatgtacatcagggtcctggcatccgatgccaaattgaatcacaagtgaaccaaggcgtgctagcggacgcgcgttgcttatatataatcatatacgactgatggaccgagccgaattcgttgtcctggattacgaaccagcgccggtggataatggatgaggcgtgtaccgaggatagctctacagttgctggtgct

SEQ ID NO: 142113 - DNA, 291 bp, Glycine max
  unsure (1)..(291): unsure at all n locations
  Clone ID: PAT_MRT3847_99341C.1
aagatggagggcgcagaagcagcaaagttcattccacaagagaatcggaagggtccaaaacgacgcgcagcgattcggtctccatggagtcaaaggncgcatcgttgaggctcaccctcttaaatctagactccaatcaacagggagaatggatgaagcgatagagaggcaatgcaaagttaacctgtacggaagtgcttttcccaggaaggaggagcttgacaggcaaatcctgtccaggttagagcggccaaactggaccaattccttctgcaatgctgggttttggaa

SEQ ID NO: 142114 - DNA, 634 bp, Glycine max
  unsure (1)..(634): unsure at all n locations
  Clone ID: PAT_MRT3847_99343C.1
ccacgcgtccgccaaactagataagaatttagatttttatctctaggaggctttgatgagaacacacttcagagctacaatctttggagttttgttgagaagagactagctaaaggagctgatgatactgctcgaaggagaaaccatttggcgttgtcgcaaattcatcaaggggtagattttcaattttcagaaaaattgtaaatgccaaaacaacaaaagaagcataggatatcttgaagctgtcttacaaaggagtagaaaaggcccaaaagtcgaagttgcaatctctgcgaaaagaatatgaaaggctatggtcctattacttttgaagaagccttaagttacaagaattggagaaaggcgatggatgatgagattncatgctataggagagttgaagtaccacatcgagtagaggtgaaaaagttaagtacaatataagtgagggagaagacccttaaacttaagttttaaagttttaaattaaagtgtggtgtcaaattttggtnatgtggttgcttagttcattgatgtaaatctccctagtgtttaattaatcattntattttagcagattgaatggngnttnttttttatgttatattttaagttccctataagagaattttta

SEQ ID NO: 142115 - DNA, 413 bp, Glycine max
  Clone ID: PAT_MRT3847_99344C.1
aaccgctccacaccgcaccggatcatattctaatcctatcactcttacgctttaggtctggcgaccttgcaaattctctctttcttctaacctaaccctacatatcatgcccaattaacacaaatcgaatttaccccaaattgctaaccctaccgtagatcgatcatttatttcttcctgaattctggcatagggtggctgccatgcatcgcactcagtatggaccctacgtgcagattagggctgattatgtcgtgtctgcttgtagggctccaacgccgggagttgtgaatggaacctcagcgtcgacaataagtgtcacctgggtaagatgatcacacgcggctacttagcggagatctattgaggcactaatattcccacgaatgaagacgtcgcaaataaccttgaca

SEQ ID NO: 142116 - DNA, 457 bp, Glycine max
  Clone ID: PAT_MRT3847_99345C.1
gagagaactagtctcgagttttttttttttttttttgataattgagtgtgataaatttatattaataaaaacaacttaagggaacatatcatactttgaagcaagcacaaaatggatgttgtgatgaatatactagatagattatacaagacatccttttgagattggatctgaggtcctttcctatcacttatgagatcttcctcgtggaaactgcaaataatctcattccataattgtgcaaatttggtagcttcatttcttttgcttgcagtaatctcagcaaatttctttgagaagagaatcttcctttttgcttcttatcaaaaggaaccaaacatgtgttgaatgcaccaggcaatgattgaaaccgtgaccttagcatgctcagagtgcctatctcctgatttggacccagttttatatatgttggtgaatcagtggccaccagggcagg

SEQ ID NO: 142117 - DNA, 182 bp, Glycine max
  unsure (1)..(182): unsure at all n locations
  Clone ID: PAT_MRT3847_99346C.1
ctaggcagactaagggagggcgcctgttggaagcccataaatgataagctagcttcccactacctatttctgagtaactaagccccatgataagcctcatggaagcaaggggaagcaaaatcctcccggggggggttancaggccggccccctgacaggcttaaaggcacaaggtttgactg

SEQ ID NO: 142118 - DNA, 159 bp, Glycine max
  Clone ID: PAT_MRT3847_99347C.1
ggctcgagctcaaagacaagccaaaacggaacctgcaatacacaacacagaccaccccacaagacaggacggggcaaaatccagaagcaccgcacagcagacacagccacgaccccgacaacacagctcaacaacagctaggaaggcacagcaggcccg

SEQ ID NO: 142119 - DNA, 502 bp, Glycine max
  unsure (1)..(502): unsure at all n locations
  Clone ID: PAT_MRT3847_99348C.1
ggatacatggttttttttattgaaattaaaggattcgtattgggtttcaaccgcttctcgcattcagtaaaatccccaggaccacccaaaaggggggcagggagggccaaatttatgggcaaaatataacctccctcacataaatagatggccctaaaacaaatcctttgaagggaaaacgacttttttgttttatacaaaaaagttcaaattagcccctcagcttgcaaatggcaacaaacttctgaactgcattatggtatggggtcccctcccaaaaaagggggggacagtccatgccctgccaaaactttaaatttttgttaaaaaaccaattgggaattctttgaaagccctttgcagcttaaatagccttttcagttggcaggggcttctgaataaaggttccattgcattttgggccccttgacattagcggaccctcattaattnttatctgaaaagcttcaataacctcgagaagctgttcattttttaaaaa

SEQ ID NO: 142120 - DNA, 524 bp, Glycine max
  unsure (1)..(524): unsure at all n locations
  Clone ID: PAT_MRT3847_99349C.1
gagagaaaaattcaacatcccattccaagaatcagtttcactttctacagaatcctcggaataaaagatcaaatctaattaatggacataaaattacagaatttaattttgacaaatcttaaaacaaattcagaaagcaataaaattcttaaaacaataataagaaaagaagccaaggatgtaatatatgttgctagctccaacatgtatttacacttggtaaatcctcatcacaattcccccacgaaccacttcttcaaatgcatataattcacccacgcgagatctggggaaataacatcatcaacaaccccactttcttctctcaaaaatctcccatttccgttgttggaaaagcttccacaagcagtgatggttggtgaaagagtactgaactgtttttgattgtgatcctcagaaacatcaagccaagaagacaaattgttgtgaggcttanaagcagcagacaaaagtgaagcctcaccaaaattcaaaccctccatgggacacataagctcagagag

SEQ ID NO: 142121 - DNA, 591 bp, Glycine max
  unsure (1)..(591): unsure at all n locations
  Clone ID: PAT_MRT3847_9934C.1
ccacgcgtccgattcattaaattagtgacgtcatgtcatcaccacacatacacacactcctgaagaaatgcgaagcacttaatcttgttcttcttcaccatggctctgaagctcccgcacactttccccatcttcgccccttccctcgaccccaacccaaacccgccgcgccaatcctcggagctccgattctctcgctggaacaacccagaaactcgctcccccaatgcccgccgaacaccccggcccaccgggcctgccaaaaggtccaaaagcccagcaaggcccaaggtcgaccggcaatcgcacccagcgttcaggttctccaacatccccaaatcgaagccgcaacgggtatccggcgcccccgaaaacgtgaaaatcagcgacgacggactctcctacgttatcgacggtgccccgttcgagttcaagtacagctacacggagaccccgaaggtgaagccaattaaaatgcgcgaagcgcctttcgtgccgttcggaccggacacgatgcctcggccgtggacggngcgggcgccgctgccggcgagtaagaagaagctgaaggagttcgactcgttcgtgctt

SEQ ID NO: 142122 - DNA, 593 bp, Glycine max
  Clone ID: PAT_MRT3847_99350C.1
aagcctcatcatcacaacaatttgtcttcttggcttgatgtttctaaggatcacaatcaaaaacagttcaatactcttaattcgccaaccatcactgcttgtggaagtttttccaataatggaaatgggggatttttgagagcagaaaatggggttgttgttgatgatgtcattgccccagatctcgcatgggtgaatgaattgctgatgtagattatatgcaacatctgaagaagaagatgatgatgatgacaaaaagagtggttcgtggtgggatttgtgatgaggatttaccccaagtgtaaatacatgttggagctagcaacatatattacatccttgtcttctattgttattgttattgttagttattgtttcttaagaacttcattgctttctgaatttgtttttaagatttgtcaaaattaaattctgtaatttttaaatatgtccattaaagtagatataatctgttgttccggggattctgtagaaagttaaactgattcatgggatgggatgttgaatttttcttttctgttttggatttttcgttgtttttaattaattatcttcttgatattgtgagaatt

SEQ ID NO: 142123 - DNA, 1502 bp, Glycine max
  Clone ID: PAT_MRT3847_99351C.1
gaaacggctcactctctaatttactacagaaaaaaaaaaaagatgagtagtgttttttcagaacacaaattccaacttcaaccctctcaccaacttctctccctcaagaaatccctgagggacatagacatcccagtcccaccaaggaagctcctcacccgccgctccgccgccgtccacgacgtctccggcgacatgttttccgatgacaccctccggcacaagtaccttccccacaatggctccaccgactcctccgacgatgactccggcgacccctacgcctccgatcaattccgcatgtttgagttcaaggtccggcgctgtactcgcagccggagccatgactggacagactgtccatttgtacatcccggcgagaaggcccgccgtcgggaccctcgccggtttcattactctgcaacagtctgtccagagtttcgccgcggtcagtgtgaccgtggcgatgcatgtgagttttctcatggggtgtttgagtgctggttacacccttctaggtatagaaccgaggcttgcaaggatggtaggaattgcaagcgaaaagtttgcttctttgctcacacccctcgccaactcagggttttgcattccaatgaaaataacgagaagaaaaagtgcaccgatatgagccctcataataacaacaacaacaccaacaattgttgtttggtttgccattgctctaattctactcgttcaccaacttcaaccttgttcggcatgtctcatttttctcctccattgtcaccaccttctccttcttccccttctaggtttgagaccaaccatcatcatggtgttgtgaaatataataaggatgttttctctgagcttgtgtgttccatggagggtttgaattttgatgaggcttcttcactgttgtctgctgcttctaagcctcatcatcacaacaatttgtcttcttggcttgatgtttctaaggatcacaatcaaaaacagttcaatactcttaatcaccaaccatcactgcttgtggaagcttttccaataatggaaatgggggatttttgagagaagaaagtggggttgttgatgatgttatttccccagatctcgcatgggtgaatgaattactgatgtagattatatgcatttgaagatgatgatgacaaaaagtggttcgtggtgggaattgtgatgaggatttaccaagtgtaaatacatgttggagctagcaacatatattacatccttggcttcttttcttattattgttttaagaattttattgctttctgaatttgttttaagatttgtcaaattaaattctgtaatttttatgtccattaattagatttgatcttttattccgaggattctgtagaaagtgaaactgattcttggaatgggatgttgaatttttctctctgttttggatttttcgttggctttaattaattatcttcttgctccgttaagctcattatctgtgtcgtggaataaaggtttagatattttgt

SEQ ID NO: 142124 - DNA, 1112 bp, Glycine max
  Clone ID: PAT_MRT3847_99352C.1
ctcgagccgattcggctcagatttttgcttacccaaatgcctgtccaaccaaaaccaaccacccctttttctctttcctataaacaaccttgcttggacgcgtgggcggctgcgagaagacgcaaacaaagcgtgtgcacacagaaaaggtctcgtttttatgcagggtttgccttgttgagtgcatttttccaaagggttgttttgtttgttgaagaatggttcagtggcagggcgatgctgatgagggtatcgactacatgttcaagattgtgatggttggggactctggggtgggaaagtctcagcttttgaatcggtttgtgaaaaacgaattccacatgaaatcgaaacccacaattggggtggagtttctgactaggacggtcgtcatggatcacaagcttgtcaaggcacagatttgggacactgctggtcaagaaaggtaccaggctattacaactgcatattacaggggtgcaaccggcgcattactagcatacgacataaccaagcagcaaacctttgatcatgttgaaaagtggttggatgagctacggatacacacggataaaaacatacttgtcatgcttgtggcaacaaatctgacctgagttctcttcgagcagtgcctactgaggtagccagagactttgcgcagcaggagggtctcttctttcttgagacatctgcgcttgactccagcaatgtggaatcagctttcattggcctcctctctcaagtatatagaaccgtcagtaggaagctcatccttgtggacggacatgaatcaaattgggataaagtaaaccttgaacttgaaggaacaaaaattaaggtcccatcacaagaacctgaatgccagaatgccaaaaagagattcaattgttgcagtattctttaaaattttgtattgaccccctagacgcaccttaattcttgtgtaaggactattttcctccccccctctccatgctgttgtggattttgtatacattgccatctatttttcttttttactgtactttacctttcaggagataggttttaggcatagttttgcaaactcaagaatgaaatgatgaatttgagtagtctattcaatgtatccc

SEQ ID NO: 142125 - DNA, 440 bp, Glycine max
  Clone ID: PAT_MRT3847_99353C.1
ctcgagccgattcggctcgagtttttgcttacccaaatgcctctccaaccaaaaccaaccacccctttttctctttcctataaacaaccttccttggagcacacaaagcgtgtgcacacaaaaaaggtcccatttttatgcagggtttgccttgttgagttcagttttcaaaagggttgttttgtttgttgaagaatggctcagtggcagggtaatgcggatgagggaattgactatatgttcaagattgtgatgactggggactctggggtgggaaagtctcagcttttgaatcggtttgtgaaaaacgaattccacatgaaatcgaaaccaacaattggggtggagtttctgactaggacgggcgtcatggatcacaaacttgtcaaagcacagatttgggacactgctggtcaagaaaggtaccaggctattaccac

SEQ ID NO: 142126 - DNA, 318 bp, Glycine max
  Clone ID: PAT_MRT3847_99354C.1
cggctgcgagaagacgacagaagggctcttaccatcatatttactcgagctttatgccttttttttcaactttaattaatacttttgttttttgtgctggagaaaaacagttctgtggggagggaatctaatttggtttttcatacattatactctaagattttttaaaaaagaagataaaaacttaattttgaacataagtaactgtactttatataaattaactcggtaaacattaaacttatttatgaaatgtctatgtaacaatatttattctgttttctatggcactcatcctttatcaccctattctacacc

SEQ ID NO: 142127 - DNA, 490 bp, Glycine max
  Clone ID: PAT_MRT3847_99355C.1
atcgaaactgttgtgttttcccaacaacgtacatttggttgcaatcgtcagtcaaaaaccacacaagtccggcagaagacgacaatcttaacacgaaacacacgaaaactggaagactctgagcggcattggctggtgcactgtcctgacccccatggcccgactcggaaccaccctcataaggcacatggagaggagcagcaaggtcctcaggagcctgggggaactcacccgtgtacatacaggaaaccacagaccagtgatggatggcgcttcaccatacgggaggccaaacttatgagcaatccagcagaacagtatagacacactaggggggttcgaaggtatacacacagccctctgcgccttggctaggtcacctccaggaacaacagtaggaggctggtggatcataccacacttgagggctgtggggcacccagacacaaactggatggctcactaggtcttgaaggagggcacagtagca

SEQ ID NO: 142128 - DNA, 293 bp, Glycine max
  Clone ID: PAT_MRT3847_99356C.1
ccacgcgtccggtgtctgataatagatataaaagatgaatcttttggtggcatgcctatgatctacttaactcacaccactcaccaactttcttatcgctctgttgtattacaaaggtgtggacttattcttcattgctggtgtgtaaagtgctcatgctttctagctcttaatgaaccttcaacgctggtttggcctctgttgagcgttcttagttgctcaaaagaagatcggctaatcgcgcatgactgtatctcttgcagatgaaatccatcgaagtgttaacacaaact

SEQ ID NO: 142129 - DNA, 191 bp, Glycine max
  Clone ID: PAT_MRT3847_99357C.1
atgtgtttctgatttcatgtaaatgtttgatgttggtgtaccagctatggtgagaaaggtgtttcatgaagcaaggcattgttcacctagtatagtatttattgatgagattgatgcaatttgtctagcaaggctgtttagtttttctggttcaaatgattaacgtgtatgtactttaattcaattgtttt

SEQ ID NO: 142130 - DNA, 477 bp, Glycine max
  Clone ID: PAT_MRT3847_99358C.1
cccttgccttgcataacgggtttttttagtaacaatcccgatgatttcacaacacacccgccgttagtatcaaatttatgcccttaaacagctatgagaaatctgtagagtgacagatgatgagaatgattgtggttataatgacgagccgcgtttcttgctagcactgttgactgcctgttaaggatcatcgataccatggtgatcccttcggcgaagaagaagacaaccccttttccgaaccagctgttaggggaaaagcatatagccaagcaagttatagcggcggtgcataatacactacaaatgctggaagagttgccactgccacaaattcaagggtatgtcctcttaatcctgaacccgatgattataactatggctatggtgcgacagatgatatacctattgatccatgaacggatttgaaaaaaaaggaaaaggaactccaagccaaggaggctgaattgagaaaaa

SEQ ID NO: 142131 - DNA, 175 bp, Glycine max
  unsure (1)..(175): unsure at all n locations
  Clone ID: PAT_MRT3847_99359C.1
gtaacaagtctagatcgaaaaagaaagcaattatgattccaaaatctctaaaatccaccagttcagggggagcctgcaccaaaaggcactagatctacaatgcatttgaccttgctgagctatggcatatgcatgcactacagaatcaagagatcganatcaaagggtcttcttg

SEQ ID NO: 142132 - DNA, 352 bp, Glycine max
  Clone ID: PAT_MRT3847_9935C.1
aaaaacccccctacctttttcatcattaaacccggggtttttaaaataaatgggcctttttcctaagggggccggttaattttttccctaccccccaaaaaaaaaaaaaaaaaaaaggaccggcttttcccatgggaaatcccaaatatgggacctccaaaagggagccccccttccttataaatcgcgggttgggccaaccaaaatgttttcccaccccccttgtgccaaaacaaaactgggaatccaagttttttttatgtggaaaacccctcttaaggatttgaaaatgttggggggggccaaaaaaaccccccaccataaagcattgggaaaacgggcttaattttaa

SEQ ID NO: 142133 - DNA, 439 bp, Glycine max
  Clone ID: PAT_MRT3847_99360C.1
gagaatgcttattattattattatgggcctccaacacccatgacaaaatacaaatgagttttgaggtctcaccaccctccacttcctaatcccccattccctctaattcccctctaatagactatttataatttcttaactaatagttaggtatcctagctatcctaactaactgacaactaacatacacctttccccatctatcactatgtctgcactgtaaaattctaatgcttcatagttcatatcatgagtagttcattcgcaaatattacattctttgcttagggaaatatctttttattattattgggtgcatccttaaataaaattttctcttctttttatgtgatcattgcattgttgctaatctttcacatacctattattatctcttttattccggatgattttataggacgctaaaggtaatgaaaaa

SEQ ID NO: 142134 - DNA, 368 bp, Glycine max
  Clone ID: PAT_MRT3847_99361C.1
taatatttttttttttttttttttttttttttttgttttttttaaaattttttcctttttaacccacactttcattttaaaattttttgccccccaaaccctaatctcaaaaaacatcaaacaacccctaaaattacaaacataatatcccaccttttttccaaatataaaaaattttatttttcctcccttaccttaaatcttatcaaatcaaacttcaccgcaaacttttacaataaacctccccaaaaaagttgaccacagtttctattcttccataaaagtcgcgtactaaggaaccttacaaaaccccttgacaacattttcccttcccctttctctaaactccaaccctcccaagcttcccc

SEQ ID NO: 142135 - DNA, 323 bp, Glycine max
  Clone ID: PAT_MRT3847_99362C.1
cctagcatcccaaattttagaatcaaacaaacctcagtaccaagaatcctatgccttcacaaaccctaacatcgattcagatcgtttgttcgcacttcaatctccaagtgatagctcaatttgttggagaatataaagttgtggatgtaattgacttgtggatatcaacattgaaagttgtgtatcttcctgtgttggttggtgcatttcttagtcaatatgtccaatctattgtcaaatttggcatgcagttccgctgaacagcctttaaagtgtaatcctacgcatctccgttcaacagtttctcttctcaattttcgtga

SEQ ID NO: 142136 - DNA, 235 bp, Glycine max
  Clone ID: PAT_MRT3847_99363C.1
acacagggagagacaccaacgaaacgacgaggcaggggacaggcacacgcgagcggcacgaacccgggcgaacacacaacacaagaggaggaagaaggggaacacgaagaacgaacaagacgacgaaaggcaagacacgaagcgcggaaaacgaccaccggcaccgacggacaaaagaacgacaagcacgagaggaggacaggacgcggcaaccaaaacaagcaaagaggaagaa

SEQ ID NO: 142137 - DNA, 242 bp, Glycine max
  Clone ID: PAT_MRT3847_99364C.1
cggataagctttgctaaacatagtaatatcgacctttcgtcgtaaaaagccattttcagttgatgatgaacttaattttccataacagtctcagtgacagtccttcaaaccatacaaggctttattaactttgagaacatgatgagggtatatacaactctcaaacgcagggatttgtccgacatagacctcttccttgattagtcgattgaggaaagccttttttacctccagttgagaca

SEQ ID NO: 142138 - DNA, 378 bp, Glycine max
  Clone ID: PAT_MRT3847_99365C.1
aaagcatgcaaagagtcctgaacttgtttgagaatttcttctagatgctgctagcgttatatttaaagaacaggttgaaaaggctttcagagaaggaacagcacgccaaaatgcgcacagcatatttgtttgtcttgcactgaaactactggaagaacgagttcatgtagcatgcaaagaaatcattacattagaaaagcaggtctttattatgcttttattgggaacagacttttggaataaaatgaacaaaaactgaactctccacttttattttgagattttacttccaaaatcctaaacatatatttttacagatgaaacttcttgaagaagaagaaaaggaaaaacgtgaagaagaagaacggaaggagagga

SEQ ID NO: 142139 - DNA, 331 bp, Glycine max
  Clone ID: PAT_MRT3847_99366C.1
aaaagaagtttaactttgtttttagagaaactaaaaatgcggggtcgttgtttaacaaataaacaagaaattgggtccccccccctttaaaaaaaagaagaagggaactttaccttgggcaattacttggttggaattggggggttccacaacagtaaaaacaaaagcgggcttaactttaaggtttaagcccacaaataaaattccttttggttgaacatattagggggggctcccgctggggaaccttaaaaaacaaaccttgggtttttctttgggggttttcaaacccttcaatttttatttcaaggaacccggttttcttcaaaaa

SEQ ID NO: 142140 - DNA, 1694 bp, Glycine max
  Clone ID: PAT_MRT3847_99367C.1
acggctgcgagaagacgacagaagggggagtgctcgaggccgagctagctacctagcacccgcgcccaagtcacttcctccaaccctttctttttctcagtatctgtgccccaaccccacttgcttttctgcatttttttttatccttctttgtcctctgtattctaatcccatgcttcttaatcactttctcaattccattgctccctctctaccctgagttttggaccttgccatagattctctcagattttcgctcttcctggtatcttcagaatgctttctgtgagggatttttggaggcggcataggaggaaggttttcgtcactgttggtgttttaggaagtgggtatcttttgtataagctctacggtgctcagagacatggggttcaggaacttgaaagagaactcgcagttcagagggaaactgaggaccttatgaaggctcagatgcaagctcactttgagaatattcagaagatgtctgatgtaacattgccgcatgctatgcacgagttaagttgtcggatcacagaagagttggatctttctcaccttcttgaaaggctaattcaaggaaagggtcagccaaacaccttgactcaatcagagaaactagatctatggagtagactcaaaattctgagttttacaagaatgacattgtcagtatgggctacaacaatgcttagcttatatacaaaagttcaagtcaatattctaggaaggcatttatacattgatacagcacgtagtctcggaatctctgattcagtggaaagtggagatgtggttgatagggaagaccaaaagaaatttctagataatattgattttctctctcagcatggtatgcctgccttgatttctgatatggaggcagcaacaaaagaagttctcaaaggaaagcagttgagtactttcttcaacagcacaacacttcatgaaactatcatgcagatactcaactccttcatgagcatggggactccaaattcctggataaagtatatgatacctgaagatgttagaccatattccacaacctatggtagtgatgacccagtgccatttgacatgactgaatttgaacaacttatgatggaagcatgggcagtattatcaagtgctgaatttggaagcattgtagagatatctctgaaagcagtggtggatacactggtggagctcatggggactaaatttagtggaggaagtgtagccgggggcctgcctctggccagagtgttgcctcaagttgcacagatgtgtcctttgctccttgaagaacccagaaaaaatcagttcatccaaatcattaaaaatatacaggaggttgaactttttttcacactcctctatgcaaatatgccacatgcatagtgattaatatttatgttttaaaccaaagagattacatttattgcatgaaaggcatcgggcagtgtacaaaaaattagacgaggttcaaaagagatataggtgctaaattgttagctttcatcttttcaatatgacatttcccatttgttgtaattagtgattagtgatgcatagtgctccccctttggctcaaacgtggcatttggaggaaccgggttttttttaggactatagtttgctttatgatcagtgctgtacacggaaatgactttttcatctcatctatttactttattcgtgcaaaaaaa

SEQ ID NO: 142141 - DNA, 495 bp, Glycine max
  unsure (1)..(495): unsure at all n locations
  Clone ID: PAT_MRT3847_99368C.1
ccacgcgtccgcagattactagatcgtcgtaaaaggtgggagggggcgtggatgcagcttttggtgtgggatatttgcactcaaaaaacattgtgcattttgatttgaaatgtgacaatttacttgtgaatctaagggggccacaacgacccatttgcgaggggggggatttcgggttatcaagagtgaagggcgatacccttgtgtctgggggggtgcgaggaacccttccatgggtggggccagagctgtggaatgggaatagcantcngggttctgaaaagggggaggttttctcatttggcatctcaatgggggagctattaacaggagaggagccttatgcggagatgcattgtggcgccattattgggggggttgtgaagaacactcttanacctcatgtgcctgaacggggtgattctgagtgggggaagcttatggaagagtgttgggcacctgaccctgaaaggcgggcatcattcacggggataa

SEQ ID NO: 142142 - DNA, 177 bp, Glycine max
  Clone ID: PAT_MRT3847_99369C.1
tgccaaaaaaccaccaaaaggggaagctacgttcagcatccccataattgagaaagatgagcatgaagaaaacagtcaccaaacgaagtcccctcaagacacactatgatctgacaaaaccgatctccagtacttgcagccaagtctctgacgacccttttgtcctactctaatgcg

SEQ ID NO: 142143 - DNA, 188 bp, Glycine max
  Clone ID: PAT_MRT3847_9936C.1
tttttaacactcaatcttccatttcatactttaaagaagggtataattaatgtaagcgctgcccttgctacaacatgtgttgcaaagggcaaatgaccttttgagaatgagactaataagacaactttgggtcagcacgtggatcttatgaagggggatagggatgagataagaagttaagcatcttc

SEQ ID NO: 142144 - DNA, 311 bp, Glycine max
  Clone ID: PAT_MRT3847_99370C.1
gcctctcttgcgaacacgcatcccctattgtgcctggggcagcttgctcaattatcattggtggcctcccaagttccgactgcatcatatcaaccgcattgcttttgggtaatacttatacgtaccaattccccatggagcactttggccgctcctagcttagccttacacagcaactatgccgatttgcccaggtacacctccgtgtaccattctgcggaatgaaccaagcaggaacgcaacgcttgctcgtttgtgtagcactactattggtcattgtgcccaaggtcaacatagcacgccgattaaag

SEQ ID NO: 142145 - DNA, 402 bp, Glycine max
  Clone ID: PAT_MRT3847_99371C.1
accaaccatccttttggtttggaaggtggttttggccttatggataaaagttctgccaaatcaagaggggttttcagaccatagggggggggggggggtaaaccaagggctaagttcttggctgttttgatctgggccctcatggccatttccatccttaaaccaggggttttggttgttattgagcaagggggccacttgtttgccaccaggaccaattttggaagggggggtgtcaagagatcccaatgcccataccaaggctcggggggatgtagccggccccaatcccacaggccctcgttgtttttttgtcaaaagggctgcaggaaatgcctgtttgtccccccggggttttttggtattaaagctgggggcccttgttccaccacctggaagccc

SEQ ID NO: 142146 - DNA, 617 bp, Glycine max
  Clone ID: PAT_MRT3847_99372C.1
caatatgtaaatcacatctcattttactatgcatttcaactctctttccctcaaacgaacaggccctaaaggctaaagctaattttgacgcttcagtgaaggaaggaaaagatgttggtatgggcgtaatttttagagacagtgcgggggaagtgtgaagtgttggctggtgcaacgagacatgcctcaagaataccaaccaaaagttgcagcatgactggccctgaggactgaggtggagtattcaacaagtagccaaagacttgcttcttcatgaggctaactttgaatctgattgccaggaactatgtatggcttgggagaaaaaggtggtagaacaatgttcttacttatcaatgaaaagaacaagtaaacactctgatatttcttggttttccttgaaatgtattggttcgttctcatcatttgtgccataagtaattgacataagttacacacttacacccttgatactttaatttaggataattttattttttaacagggtatatagcaccgcaattagggcaagtatgcaacttatggaggtatataaagtcaacaaatcaagtcaacagtggaacataattgagccctcaacaaatcaatatcaaatc

SEQ ID NO: 142147 - DNA, 269 bp, Glycine max
  Clone ID: PAT_MRT3847_99373C.1
cttaagccgagagcgtacgaggttcacactacagatctattgtatccagaactgatgattaaacttagcagcatgatgctagccctctccggaagctaatcagcatgagacactgtatacacttctctgacacagacttagcaggtgaaactgagagctctcatctatatgcagatagaagcattgccatctccattcaagatctacgcaacgtcacctgtagctcagctgcacacattgagctacgtcatggagtgtggggaactgat

SEQ ID NO: 142148 - DNA, 293 bp, Glycine max
  Clone ID: PAT_MRT3847_99374C.1
taattcctgcgctcgacacagctaactaggacggcggcctgcccgtacttgtttactttttttttttttttattgaaaagacaccacctttatatgaaggaggaaccaaaattacgggccatgcgtgacgctcctgacacccacaaagtggtgaatcaaagggtggtataccacccatagacacaccactaggtgggagagaggagcgacacccatggcctcaaaaagaaggctctctacaatgagatgaaggtgcattatttttatttatctaaaagggcaaccaagatcgg

SEQ ID NO: 142149 - DNA, 296 bp, Glycine max
  Clone ID: PAT_MRT3847_99375C.1
ataaggggctaataattatatatgatggaatagattaaataaaacaaactttgagcaaaagacatccaatataacctgaccaaaaagttgcatctaccgaacggatcactgccttaacccgagcttggaacgttgcaacataggtcatactatcccttactatattgctagatagtggatcctgcaagcattccaagcgaatactttagggaactaagttaataaactttgttacaatcaccaagaagcattgccatggcacctctagctcatgcttccatatgctcctgctctat

SEQ ID NO: 142150 - DNA, 261 bp, Glycine max
  unsure (1)..(261): unsure at all n locations
  Clone ID: PAT_MRT3847_99376C.1
ggtcgacccacgcgtncgcacacgcgtgcgaacacgccagcatgcgcttatattgacgggtgcgagaagacaacatgggggggggtgattgtgtgaggatgcagccctaaaacttgagtttctctgcttgggttggagcttgtgctgtctaaagagggaccatgtctgaatgtggcgctaacttcgtctgtgaaactagggctaatacttgatataccgagctctatatgtcaggatgaacgattgcttttgatccgtgtt

SEQ ID NO: 142151 - DNA, 1206 bp, Glycine max
  Clone ID: PAT_MRT3847_99377C.1
tgtctttttttttttttttttttgcaaccataaaaacataagaaaaccattggattaacaaagataatggccgtgatggtttggttgtttctaccaagtaacaaagttcgtcacaactcacaaacaaagcaaaaagaaagtttaaaaaaatccacttaaatatacctacatccaaggagggaaaaaaaaaggagaggctctgcaaccaaaatcctttacggactggtggtaaatatcctgcttatacaactgaaaaagcttcatgaagcaactttcctagggtcaaaagtcaaaatatagtccctaaatgttcatcattgagaatccagcatatgcaccataataagcctcaatatcctccacttgcaaagtaaatagggcaaaaatggagacaaaggggctgggatcagttgaaaagccctgggtttacccaatccttgcttatgtcatcgagatggtcatcaaaatctacaatgtcattccacttctcagatgcaatatagtccaacaagactagatttgctgatggctctttgagagagaatcgattgttcccatctgactgaaccaacttccagttcttagatgtatccctaacataaagctgcattatggcactacggtccttgctctttttcaaagcatcaagcttcttgttatctaacaatagaacggcggcttcgggaaagtagcggcatatgtggtcaccaatattcttcgccacacccccaagctcatcttcatatagaacggcggccttggggaaagtagcggcaaatgtggtcaccaatattattcgccacactaccaagctcactgtcatcagatctctcattcgcgtgaaaatagcccactatgttcaaccctttagcagaaaaatattcctctatcatgatgagagatatctccaattggggaagaagggggatgtgagagtggaagagagggacggcatcggcgatctcgacgacgtcgttggaagcggagatgcgaccgatcaagacgccgttgacggcggaggttgggtgtttgagggagtgaaggacgagttttatgtaagcgttttgttcgatctcgtacctcaaaccgttgctgcccatggctaagattctcaacacaaaggtttgaggttcctgttctgtttcgatgtcgaacacaagcagatgcagatggaatcatgctaccaccaactgtcgtgcacttcgc

SEQ ID NO: 142152 - DNA, 380 bp, Glycine max
  Clone ID: PAT_MRT3847_99378C.1
gtcggtaacgcgggcggtatcatcagctcgttcctgtgccggtcgacccaggcgccgcgatactaccaaggccacggtgtcaacgttgcgtactgcttcatgacggtctgcctcgctggcttcatgacgttttacctcgagcaccagaacaagaagaaggccgagctgcgcgagtcgcgcacgtggacggccgaggagcggagcgagatctctgaacgccaagccgacagctcgccgttctttgtctacacgctttaaaatggcggggtgtgggctggcagggctggcgatggggcgtgtgaagggctcattggtttagatggcagtgaaaatgacaacacatactttgtatattgttttgatgcaaatgtgaagtgatg

SEQ ID NO: 142153 - DNA, 352 bp, Glycine max
  Clone ID: PAT_MRT3847_99379C.1
gttgaagagtgtccttttgcatttgtgaactagtatgtagtattttattcacttaaataaagcgcattactatgtgcaatgagtgtgtttaaatataaaaaaaaaaaaaaacaaaaaaaaaaaaaaaactaaaagaaaatatattaaaaaaaaaaaaaaaaaaaaaatataagagaaaaataaataaaaaaaaataaaaaataggggcgccccccctcttaagaagcttcctcaaccggaaaatatatccacaaaccgctccctggaggcgtccaatttttccttataggagaccataataaacctggggatatcaaagcaaaagctttttccctgggaaaaattttttccc

SEQ ID NO: 142154 - DNA, 191 bp, Glycine max
  Clone ID: PAT_MRT3847_9937C.1
atctccatttccatttcctctctctcagtttccaagaatcttaagctatgggaaagtcttcccaaccgtgagcgctgattaccagaaggccgtgagaggcgagagaactcaaggctcatcgtgagaagagatggctctctaatgtcgttgcaggatctctgactagcgtactcaacgtgcctcgacaaaga

SEQ ID NO: 142155 - DNA, 550 bp, Glycine max
  Clone ID: PAT_MRT3847_99380C.1
aattcaaaccataatttaaaccaatgcttatatgagaatctcaatctctactcaaactccaataccaaagtggcactgtgtacaaatgattaacttctatttcctactaatgaacatgtcaatggaaaccaataaagcataccattttttctctaatatacatcgatctcttgcatgtagaaattacaagcattcctagagagaactttcagaaactgaactgggtctctccctagatgaagaagaatgtaagaactcaatacaatcttcaacagctttggcacgatgtgaatcaggggggtctgacacagaacgtgttctgaccaaagaggatgaagaaaccttcctagaggatctccttctcatggaaacaactcttatagcacttgccacttttgctccaagttgctgcaagaatctcacaggtgaaaatttagggtcttttggaaatctgaaagtccaagttcctgtgaccctcttcttgtttccaccaccaccaacacttgtttgcttgagaaacatgattggtttctcattaaaatcaggagtc

SEQ ID NO: 142156 - DNA, 470 bp, Glycine max
  unsure (1)..(470): unsure at all n locations
  Clone ID: PAT_MRT3847_99381C.1
gttaagcgatatctcnaactacaattcaactgcaaactcataaatctgaaacaaaaattctacacatggggcatgatccttgttggactagccatttgtctatgcagagagtgaaaaaagtggccacatttgggaagtgtcctcacaaattcctcatactcaaaatcctggaagcaaattgagcagcatgagtcgttgtataatttgaacattttactggaattaaattgttgaacaggaagcttttgaatgatattccaagccatccctttgactgtgattcccctgacaatatcgtcattgtaaatatctgattcttctccgtaagatgttgcatgtgcaatgacattgataggcttgtgcaacagctggacatatccattccacaaatatctttccatttaataaacttctcaacagggcaaccttagaaagtggctcatcacaagcagcaatgtttggcctggtgc

SEQ ID NO: 142157 - DNA, 577 bp, Glycine max
  Clone ID: PAT_MRT3847_99382C.1
tcacgatatactcttcaaatattatgttcacaagagtataatgcttccattactttttagatccatcaaaaagtaaactcctggattggaggaagcgctatagtataatagaaggaatagctcgaggattgttgtatatgcacagagactccagactaagaatcatacacagatttgaagacaagtaatatcttgttagatgaagagctaaatccaaaaatatcagactttggtatggttagaatctttggagggagtgaagatcaggccaatactaacatggttgttggaacatagtaagtatgctttttttgtccaatattatagtacaatacttgcagaatcaatatatttttgtttaatattatagtacaaaatttgcaaattcttcgatagatgaaaagtgatactataggtttgtttccttaaaagagaaataggataaataaaaatagaagaaagataatttgaaaaatgagaaataaaataatatattgtgttatttgatttaacatagacgagaaatatatttctcatagaatattattctttttctgaaaaatcattttttatctaa

SEQ ID NO: 142158 - DNA, 327 bp, Glycine max
  Clone ID: PAT_MRT3847_99383C.1
ctggaaaggccttattgcaaaatttgatacaacgattgacatagagtaggggttacattgctaaatttgacatctatatagaatctaattgttctcgtcggaatccattctgagctatgcctcaagagctgtagtcatggattgatcacaggagacccacacgactcatgtacagagtcatgcgagccgaacattgctttccatgactgcactcacttacctaccatgttgacgctgggcctatatatctattattccaccaaggacgggtccctggccctctaacatggaagcatgaccctctttacattttttttcaagtcaggc

SEQ ID NO: 142159 - DNA, 291 bp, Glycine max
  Clone ID: PAT_MRT3847_99384C.1
gttaagagccccctcgaaaagaaagggaaaaaatccgagctttcaaaaaaaaaaaaacacttttggatcaaccccctcaggaaaagggatttatctaaaagacctgcttttcttgcccgccaaaacacacacagagggccccagagattttgtgtctcagatacatgcatctatggtggggccctgaggctctcattggagactttttccaacacacaattcttagaaattctaatttgtcacaccaccttttgcaacccattttgctcctggaaggcccttatagagacc

SEQ ID NO: 142160 - DNA, 416 bp, Glycine max
  unsure (1)..(416): unsure at all n locations
  Clone ID: PAT_MRT3847_99385C.1
ctttctttttttttttttttttantttncncttttagagaaatanaaaaaaatctggggattaagataatgggaattactcctttaaccatccttttcctttggccaccgtaactactacttctgtatgtgacaaatctccttgggtaaaaagcagtcccggggagagtcactgctaatggctaattcaatttaaagatcagcttcacctgagctcacagagaagatatctataggagttttaatgcagtcataaactcctttacctcttgatctaccattttgggattcttttgaaggaccgagatatagaacgaccactgttatctcatcatgaaaatggcgccttaaacctttatctggtttccttagatccccatacctcatttctcttttctttggaacctcttttattgc

SEQ ID NO: 142161 - DNA, 435 bp, Glycine max
  Clone ID: PAT_MRT3847_99386C.1
ggctcgagagaccgtaaatattttaacgatctaagagcataagcatcgcactaatcactctctttgggcagacatctagagagaatgacgcacacagagatgagaataaacgcggaatatacaatcatgcgtggtgccagttacatgtaacacatgaacacaccaattaacgcacatcatttttgaatgttatcaaggggccagatggaccaaaatgtaagttaactatataagaacattccagaacccaaaaatgagaaaactaatgggatatccctgtgaagatagaccaccggatgttgctgtatgaatacatcccaagcgccatcacatataaacatctcttatacaaagaggtctcaacaatggctcgttcacaaagactcaaaaaagcccaacatgctgacagggggtttcaaaaaaacatatggtgca

SEQ ID NO: 142162 - DNA, 346 bp, Glycine max
  Clone ID: PAT_MRT3847_99387C.1
cgaggtttgatattatattttttattttttcgggtaggggaaatttaaaaaccttaatgcttattggaagtgacttaagattgggaacaaggacctactatatttattgttgaactggacatgccattccgcgcggggcccctactatgaactagaaagttaccttttcatcactaagcctgtgaaccagactaattgtataccgggagctaaccttgatcactgagaccgcatcgttattgattgcgcccacacgattattttgggcacctactacctaacaacaattgtcgaagaagatcatgcgttcggagagagttatttcagctttgaagaatagaaaaac

SEQ ID NO: 142163 - DNA, 293 bp, Glycine max
  Clone ID: PAT_MRT3847_99388C.1
gcttttcgggttctttagtgacctcataacctgcaataatagatttagctaattatacaggagaaaacaactgagttcttgaacaggtctctttggacattacttgtgtgtgaaatgatgctggacaagatggaaaacactaagtggatcttacattatgactcttgaggaaactactggcgaatgagagtcgcaattctacgggcagaaaaaagaggggatataatcctacgggttataattgaacaagctatactcatgtaataatgctctgatgggtattacatgcaccc

SEQ ID NO: 142164 - DNA, 448 bp, Glycine max
  Clone ID: PAT_MRT3847_99389C.1
ccacgcgtccggtctcgcacaggctggcgcatttacccacccagcatgtcactatccaccatcaccccaccacctccctactacccttccactaaccgccaccactccaacccgcgccaccaaatatcaacctaacccaccaaaacctttccttacactcacagccaacccaaccccaacctcacacacccactcgaataatattaacaacaacaacaacaacaaccctttgttccttacacaccacacactctctctcatctatcaaatggcgacccccccaaacgacgccgcatcgacgaagaagccacaacccatcccttggacccaccaggagaccgtgcacctcatccgcgcctaccaggagaagtggtacgccctcaagcggggcccactgcgccacaaccagtgggaggaggtcgccgtcgtcgacgccgaacgctgcggg

SEQ ID NO: 142165 - DNA, 609 bp, Glycine max
  unsure (1)..(609): unsure at all n locations
  Clone ID: PAT_MRT3847_9938C.1
cgacccacgcgtccggcacaacgcatttcgcatttcacagctacaccttgtttgttccgctcgaaacgcaatctttgtccccgttttaggtcggttggggtttttggttttcgaatccaatctcaactcgttaacgttaagaataattcagcttttatgcgtgtctggagctgaagctgtgctttataggtcagcatgggatttgacaatgagtgcatagtgaacattcagtcacttgctggagagtacttctgtccagtttgtcggctgctcgtatttccaaatgaagctttgcagtcacaatgtactcatttatattngcaagccgtgtttgacctacgttgtgagcactacaagggcttgcccatatgatggctacttggtcactgaggcagattccaagcctctgacagagtcaaataaggcacttgctgaaactattggaaaattcgcagttcattgcctttatcataggagcggatgcacatggcaaggaactttgtctgagtgcacatctcattgntctggtatgtgcttttggcaattctcctgttgtttgaacaggtgtggggatcaaatagtgcatggccaatacaagacatgcacaaa

SEQ ID NO: 142166 - DNA, 520 bp, Glycine max
  Clone ID: PAT_MRT3847_99390C.1
tcgatctatcgctagcgaatgtaccagagtaccgtgcacctgcagtttgtgagtggcggtggtacgtgttgttgaggagttcttattcgacttcttcttcaatccagtcatcagcaacatcattggtgcagttcgtaacgccgcttccagctccaccattattattgctgtaatctccactattatggtgttcttggtaacataaacggtcctaacattgatcttatctaccaccactatcattattctggttcgagtggtaacaataatggctgttctcttaacgtatattacaaaggccagtttgttcttcgttatcctcgtattaccggtgttcagtgtatgttcgtccacgggtcttcttacggttgtccttgcaacttctgttcgtggtttgtgcatctgtacaactgtatcagttgattcattaatcattgcttgattcagggtcaggcctctcaatagccccttcggatgccacgaaaaaagtaccggtcgcttcagtcgcggccgttgggat

SEQ ID NO: 142167 - DNA, 161 bp, Glycine max
  Clone ID: PAT_MRT3847_99391C.1
agaaccctcaactacatgaaaaatgatatcacactctcaagtctacacaataacgcacacactctgtactgggattaattataccaacacatcattaacaaggcttccactaacggcctggtccaaaatttcagagctctctagacataaatgagagatct

SEQ ID NO: 142168 - DNA, 701 bp, Glycine max
  Clone ID: PAT_MRT3847_99392C.1
ccgagcttcatgctgatctcgccatgtgacctctgaaaccaaaactaaagaatctctcttctctcaaactttctttcaattatttttttttcatattattagtttaatcatcgttcaataattaggcaagaatcggatttcggaattcaaaaccccataaccttaaccaacgctgcaacgattttattttattttcctttcaacgaattgattaaatcccacttgtttatttttggtgcaaaaacgaaatgccaacaaacctctaccttcctcctcttctcttctccaagttctcatatcatatcactgtttgtgtcttcatttcttcatttctacttcttcacaaaccagaatcggaaagacctctctcaaccactccttcaaagtcagggtaggttggttggtttctctctgtaatcttttttcaattttaagagaaaatgtcagagcagaagaaacccccccaaagcagagttttctatgttagaatgaagctcctgcacaaacaagggaacaagcctcaacaagacaaaaacaacaactgctttcacacatattacaaatgacgttctctggttttctttctccctctatttcttcacttcctatctcatcactagcaaccccaacaacacaccaacctctgcagacacatcccatgtctcaaactccgaatccaacgttgtctctcctacccttgt

SEQ ID NO: 142169 - DNA, 600 bp, Glycine max
  Clone ID: PAT_MRT3847_99393C.1
ttttttttttttttttttttttttttttttttttttttttttttttttttttttttttttttttttttttttttcaaaaatttcaaaaaatttttttttgaaaaaaaaaattaaaaagatgggggatgttgaaatagttacccaaaaaccggggggacaccggggaatccggaagcgtaccgtgaagggccacaagaacccaataagggaggtatttaaaaaaaagggggaaaacctgggagaaattttttcttgtgggaaaccgggagggccagggaattccacaaaacatacaacccggaaggaaaaggggaaaacccggggggcgccaaggggggggataactcaaataaagtgagggggggtaactggccgctttccagggggaaaacctgagagaccagcagaaaaaaaaaaacacaaaacacccgggaaaagggggatccgggtttgacccccaaggaggctttttttttaaaagaggagaggggggaaaaggggaggccctttaccgggaggtccggaaaaaggtgaaaaaaaaggggccacacctggttgtgcatatggaggggaaaaaaaatagtggaaaagaaggggggg

SEQ ID NO: 142170 - DNA, 320 bp, Glycine max
  Clone ID: PAT_MRT3847_99394C.1
ccctgctgtcgctccgcctgctggggagtccgaggctctcctcctacttatgagcggtttccttgccccccaagactgatgagcaacagcttgctctgctctctgtctcttgtctcgcgtgagcagcttccatggactcttctggcgtcgatgacttggttgtggagactgtccgtcgccctctggagaagggtgtcggtttttatgtttgttgggggattcctggattaggtggtaggccctgttccccctagcaagggggggggtcccctctaattgctgtggcatcctgcgcgttgatgctcggcagttggggttgg

SEQ ID NO: 142171 - DNA, 571 bp, Glycine max
  unsure (1)..(571): unsure at all n locations
  Clone ID: PAT_MRT3847_99395C.1
aattcggctcgaggctcgagttcccttgataaaaaaacaaaaacataatacaaagagtaaccatggcaaacaagttccatgttcgctcaaatagttttcccactggatctcatcctagcaccattacagtagaggaagagctgagcaagctcaaaacttgggaagccacatctacatccacatcaaagtccattttcgttggcttatccttgcttcaagatttgcatattcgcttggaagatcttctaaacatgggatcaacccaaaagctgatttccaaccatcaaggtgagaaatgcatggaagagcttcttgatggatcagtgagaattttggatatctgtggcatcacaagggacaccatgttgcaaattaaggaaaatgtccaagcccttcattctgctcttagaaggaagaaagggggattcaaacattgaaaaaattgtagccgaatataattgtttctcaaagaagatgaagatgaatgtcaagaagttgatgacatctttgaagcagatggtggagagtaaattnggagtatccccactcttgaatcaagaccaacaactcg

SEQ ID NO: 142172 - DNA, 456 bp, Glycine max
  Clone ID: PAT_MRT3847_99396C.1
gggaaaaaaacttggaaaaccctcccctttcccacttttttttttttaggacccccacgagaagggggtatttttttcccatcaggccccccccctttaaggggggggggggtttttgtccccccgaagggaaaaaagggccctctttcgatttcagtaaggggcttaccgggggaaaaagcaccccaaaaaacggtatttttttcccaattacccggggaaaagctgaaaaaagaccgggggcccccttgggttatccagacccaggctgggcacccttaacttgggggggggaagagcaatgggaacccccccccccaggggccatttgggcaaaatcatatccgactaattgggtggccggccccaaatccccaaaaaaaaggagtcccttcccacccttagggggggccaaactttttggccacccaccaccccacagtggcctttttaaac

SEQ ID NO: 142173 - DNA, 405 bp, Glycine max
  Clone ID: PAT_MRT3847_99397C.1
cggatccatcaactatgccttataatgctccacctttctaataccctatcagttaacaggacctcacactcccatgctctggtcaacatgaacatctggtgcgggcgattccatacattaaatctctggacctctaatctgattcccacttgatgttaaacaaccaaaaccgaccaaactatcaatgtttatattgcattacacactaaataattaaactgaacatccaattgtgctcgaattctcccaaattaacctctctatcactcgcaacagaatatttctattgcccaaccactttatactaaccttactctttagcatccaaatcttacacgaatgctttcaatcaatatttgatttatcatttgtatgaaccttgtaacatacatgcctcaatctttt

SEQ ID NO: 142174 - DNA, 484 bp, Glycine max
  Clone ID: PAT_MRT3847_99398C.1
ctgcttggggggggggggggggccactcaagctgctgcatacggtaggtgaagggataagaaccgcggaagtgagataacttaatacacgcaataccagaagaggccgccagggactaagatgtagagggatacgggatctcggagaaagatcaccgaaatacaaaaggtaaagacgaggtatactaatgcttatgcaacagtgagatagcagctagttagatgacatgacaagcgtgatgtgcttgggaccaaaggcgaagaggtaacggcccgtagtgtgttattactgctacaagtaaatgcatagtcagacaactgcttagttagcttgacgaggataatgcgaggtggggcagccttaaagctaataatagaggctaaattggtggctaactcaaaggcacttatacattatgtgcactgaaaagatggcccgactatattgggaaaaaaccaaacacatcatagtctccgcccctgac

SEQ ID NO: 142175 - DNA, 438 bp, Glycine max
  Clone ID: PAT_MRT3847_99399C.1
gaaacaaaatcggagcggcctgtgcaccaaaatgaacgaggcttctgaagagtgggggttggacctgacactgaacacatgatgttgatcaggatgagaggacgtgaggattttcatatgcctataaacactcatcacggataatttggtgtagattggtcaacaggggttgtggaagagcacctgctccgcggacatcttctactaaccctaaactcttgaaacgaactctgcatgctaacttgatgaatgggatcctaagccatcttggcttattcggacgagtaagcctacccgcggacccatggggtgctgcacagcgatttgcttgcccctgggcttaggaagctgaagcactcttgggggcatagctttctaaccatccttccccatgctatgtgccctgctcacgggacagtggctctctgaggttcctgc

SEQ ID NO: 142176 - DNA, 748 bp, Glycine max
  Clone ID: PAT_MRT3847_9939C.1
ttcacgtccctgtgaatgatgagtggactgcaatcatctaatattttactagacaaagactttgagccccatctcgctgatttcggcattgcaaaaagtctatgcccatctaagacccacacttcaacttacataatgggcacaattggctacatagaccctgagtatgctagaacttcccgcctcactgagaagtccgatgtgtatagctatggtatcgtattgcttgagcttctaactgggaggaaagctgttgacaacgaatcaaacctccatcatctgattttgtccaagacagctaatgatggcgtaatggaaaccgttgatccagatattactaccacatgcagggacatgggagcagtaaaaaaggtttttcagcttgctcttttatgcacaaagaagcaaccagtcgataggcctacaatgaattcggctactggcgtgctgggaagccttgtgccatccataaccctaccaaaacaaactgactcaacacaagtgctgctacctgattctcagtcatctgctaaaatgcaatgctacaaagatgaatatgcaaatctcaaaactcctcacttggttaactgtccttccatgagcacctctgatgcacaactcttcctcaaatttggggaagtaatatcacaaaatagtcactgaggattttgataatcaaattgagaattaatgaatcattgtatgttttaagccacaaaggaaaaaaaaaaatgtcatgttttaaaaa

SEQ ID NO: 142177 - DNA, 349 bp, Glycine max
  unsure (1)..(349): unsure at all n locations
  Clone ID: PAT_MRT3847_993C.1
cggcaggaccggcccggaaccaacctcccgggccgacgacgcaataaaacggcggccgcccaacacaccacggggaaagcaaaagagggggcgggggggaaccccacaagcnggnccacagcgaagacaaacaacacangccagagaaaacaagacnccaaacagggcaagcacaccaaacaccggaagacacaaccgcgaaacgcaaaggaaccaggaagcaacccaagaccgacaaccaccaggccccgaaggcaacgcagcacgagagccagacaagccccacaaaaagccccccaccagaagcggcacaagcgccccggaaacaccagagacgcngaccaagaga

SEQ ID NO: 142178 - DNA, 577 bp, Glycine max
  Clone ID: PAT_MRT3847_99400C.1
aaagaattaaaaaatcattttatttttaacacagtcaattaaagactgacatcttcataacgagcacgtggggtgttaaccccttcatcgtgcgtaaacaactttcgaatcctttttctcaacccatagaccattccttatctttttttatttttataatatttttcttaaataaatgttgatgacaactcccgagtttttttttttgggaaattatcttttttttatcgacatcccgttgtgactcacgttacaacataacatgtgtatgaaattatgacaaggggttaaatgcctgagccccacgtgcaactttaatgaagacatcttccaatgtggtatcagctaaaccccacgctgaaacggtgaagcttctctttgcggtttctacagcttggaatacatttgctattttaacctcatcctttggtagctcgaatttttgggtgccagagatatggtagatcttgctagcatttgggaagagctgacgcaccaaattctctacatcattttcatgatcaatagatgttgtcattgcgaagacatatgttcctccatacctggctttcaactc

SEQ ID NO: 142179 - DNA, 423 bp, Glycine max
  Clone ID: PAT_MRT3847_99401C.1
ccactcctcctcataataaaataaatactagtttattgaaaccctggggtgtgtctccacatacataaatcatcaatgaagaggttcaatttgtaaagtagcataggacatcaatgaggaaatacccaggaacctagaggaatgaaggactatacaaaaacccaccagcaagaaccatatcataaactaacatattaaggacttctatgtccaaacccctttctctctctctacaccaaaatgaaaggataaaggaaaaaaaagatatcaagttaatgatatttttagtccctgaaaaaacgagtcatattgggttttagtcctttacttttaaaaccataagttttcatccctatattttttaaatacacaaactttagtcttaaagctaatagtgaaggggaccaaaacttatggttttaa

SEQ ID NO: 142180 - DNA, 1242 bp, Glycine max
  Clone ID: PAT_MRT3847_99402C.1
tcttgaaaagattggagaaaatgcctcattcatcttggcggacgcctagtatccaaaggcaaaaatctaaggtttttgttcagatagagaaacctgatgtcactcaagagagggagaagtccggtggagcaactgctacttgaaccgactattaatcaagcaattgtatgcgacaacatgagaaaagtctatccggggagggatggcaacccggagaaacttgcagtgagagggttgtcccttgctttgcctcaaggggaatgctttggtatgcttggtcccaatggtgctgggaagacttcttttatcaatatgatgattggtctcaccaagccaacctctggtaccgcatatgttcaaggtcttgacttaagaactcatatggatggaatatatactagcatgggtgtatgcccacagcatgacattagcagtggaagaatcgttgaaaagtgtaaacctttttcacggatgagttgctgataagcaagctggaaaatacagtggaggaatgaagaggaggcttagtgtggcaatttcgctgattggagatcctaaagtggtttatatggacgagccaagtactggacttgaccctgcatcaagaaaaaacttatggaatgttgttaagcgtgcaaaacaggatcgtgcaatcattcttaccacacattccatggaagaagcagaagtcctatgtgatcgattaggaatatttgtagacgggggcttgcagtgcataggcaatccaaaggagttgaaagccaggtatggaggaacatatgtcttcacaatgacaacatctatggatcatgaaaaggatgtagagaatttggtgaggcaactctcaccaaatgctaacaagatctaccatatctctggcacccaaaagttcgagctaccaaaggatgaggttaaaatagcaaatgtattccaagctgttgaaactgcaaagagaagcttcaccgtttcagcgtggggtttagctgataccacactggaagatgtcttcattaaagttgcacgtggggctcaggcatttgacaccttgtcataatttcatactcatacaaaattatttatacttgtactctgtatatataggataaattttattacatgttgtatcgtgagtcacaacgggatgacgataaaaaaaagataatttcccaaaaaaaaaaactcgggagttgtcatcaacatttatttaagaaaaatattataaaaataaaaaaagataaggaa

SEQ ID NO: 142181 - DNA, 505 bp, Glycine max
  unsure (1)..(505): unsure at all n locations
  Clone ID: PAT_MRT3847_99403C.1
gcgtccgaccaagccaacctctggtaccgcatttgttcaaggtcttgacataagaactcatatggatggaatatatactagcatgggtgtatgcccacagcatgacttgctgtgggaatccctaacaggaagagagcacctactcttttacggcagacttaaaaatcttaaaggttcagccttaacacaagcagtggaagaatcgttgaaaagtgtaaacctttttaatggaggagttgctgataaacaagctggaaaatacagtggaggaatgaagaggaggcttagtgtcgcaatttcattgattggagatcctaaagttgtttatatggatgaaccaagtactggattagaccctgcatcaagaaacaacttatggaatgttgttaagcgtgcaaaacaggatcgtgcaatcattcttaccacacattccatggaagaagcagaagtcctatgtgatcgattaggaatatttgtagacaggggctngcagtgcataggcaat

SEQ ID NO: 142182 - DNA, 488 bp, Glycine max
  Clone ID: PAT_MRT3847_99404C.1
gagggaccgagaacccaaagttgtaagaacaacggcgaaaccagggggaagccgcgttattcccgggggggggaggcaacaatgtttaattccaaaagggggaaaaaaaggacagataaccttacgaaaaaagggtttgggccaaatgaccccccctttttttggcctgggagggggcaacttaaaaaaaatgaaagaatgcccccctttcatgtggaaaaaaaaaggggtttttgactaatttcaacacgcccccgggaaaaagactacttgcagaggggaggacctgaaaacggggtgtctgattttgctccccggggcccctaagccaggggagaccccttggtaaagagggggcctcggttgtgtgaaaacaattgctggaaaaccggggcccgtttaaaccctccggggcagagggggacttttgccaaaggtgcttccttgcctgagagggggcgactctcttggaagactaagttgtcggg

SEQ ID NO: 142183 - DNA, 353 bp, Glycine max
  Clone ID: PAT_MRT3847_99405C.1
gaaaaataacatgttcgtttgttacgatcattttctcgtatttctttctgtacaaattcatcatcttcatcctcaaattctacctcaagaaacttaaattttgttagtgagcaagacaatcagacccacgaggtcactccaaaacataatctctttgatgaagaagttcgatttgaggagataaaccaaaatatggatgattggagtattccagaaatccctcaagacacactgtatgttcttatttcctccggggcaagcaaatcagtgatttcttcattatacaattccaaaaaggtgaccttcacactgtactcagcattctggctctcaaatgtgtcaaaaatctgctt

SEQ ID NO: 142184 - DNA, 497 bp, Glycine max
  unsure (1)..(497): unsure at all n locations
  Clone ID: PAT_MRT3847_99406C.1
cacccatacgcgggctcggaattcagcatcaactcttaaccctatcgatgccctctcaacgcttaaaaacacaaaatccactccttctggtccggtgttctaaaccctcccacccangttcccatctattggtctaaaaccggtaattcaaccaaacgactttaaagcttcataattaaattgtcctcaaatttaaatcacaaaacactctacagtcctaatcagttcctatctctggctgatgccacaatccattgcaagactactcagaaacctaaacctcagaaaaattacaacatgcctgctgttcttataacaccagctaatgtgactgattacgatgcttaagatatgactaaatgttctcatgagcaatttatgaatggtctatataattctgtagaacatataatcctactgctaaaaaaatctacacatggtgccatagcttcaaaaagtgctgccacttcaaacactagaaaattagacctactgaa

SEQ ID NO: 142185 - DNA, 1629 bp, Glycine max
  Clone ID: PAT_MRT3847_99407C.1
ctcattctgtccgtgtctgcatccgaaaccaaaacagatgtggcgcaccactttagacagcagcaccatgagagccctgcgccttcgttccttcctcttctcttcatcttcttcctcttcctcttcttgttgttcactcatcaacattttctgcccatcctcctcctcctcttcgtttacgactttgactacaatcatctctcactcttttcttccttttcccccaacgacgcgcgtcttgttcaccgactcgcgccgcttcggctcccccgttccgcgccgcttcggctcccccgttccgcgctgcgtttcgtccctccccaccctcgactggaacgacgccgtttcctgctctgaggtcgaggttgacgccaatgccgccgacggcggcgatgacggagccgtcgaccaagacacaaagccttctattgccgtcagagccttcttcttctctactagtgttgatttaaaaagcttggtggaacagaacaaagcaaactttgtcccgccatcatcacgcatgactaattatgtagttctcaagtttggagatatttgtgtttccaagggtccaggtactttcttgagtggacgcaatggctgttacatggtggtttttcagtatggttccattgtattgtttaatgtccctgagcatgaggttgatgcttatttgaaaattgttaagaagcatgcatctggtctgcttcctgaaatgagaaaggatgagtatgaagttagagaaaaaccagctttaagcacatggatgcaaggtggactagattacataatgttacaatacttgaacatcgacggcattcgaactattggtagtgttctaggtcaaagtattgctcttgattactatggtcggcaggttgatggaatggttgcagaatttacagacataaaccgagagatggaagcaactggaaaattcaaaatgcaaaggaagaaacttttccagttggtgggcaaggcaaattcaaatcttgctgatgtgattctaaagcttggactatttgagagatcagatattgcttggaaagatgccaaatatgctcagatatgggaatatctcagggatgaatttgaattaactcagagatttgctagtcttgatttcaagttgaaatttgtggagcataacatccgttttctacaagaaattcttcaaaataggaaatctgatttcctagagtggctcattattgcattgattggtgctgaaattcttctgtctctctatgacattgttcatcggtctgccatgaaattttagcagcattttttctggtggcatgtaaggttagcatgccattgaagagctgtagcatactagtagttggctttactcatttagtttttagatattggtttctcatgcaataattcattgtgtctcttgtaaataacaattttaaagccttaaactcagttctttactagtcaattgtataactttacatgtgtaggatagtatcactcactgaaaacctgcacctgtatgctttgttgtattataattttgtctattgcatcgatttattattctgttgaattttgtgaatgcaggaagttgccaattttcatgaccagggttattcaataaaatgatatctttattgc

SEQ ID NO: 142186 - DNA, 862 bp, Glycine max
  unsure (1)..(862): unsure at all n locations
  Clone ID: PAT_MRT3847_99408C.1
cggacgcgtgggtccgaggctaaaacagatgtggcgcaccactttagacagcagcaccatgagagccctgcgccttcgttccttcctcttctcttcatcttcttcctcttcctcttcttgttgttcactcatcaacattttctgcccatcctcctcctcctcttcgtttacgactttgactacaatcatctctcactcttttcttccttttcccccaacgacgcgcgtcttgttcaccgactcgcgccgcttcggctcccctgttccgcgctgcgtttcgtccctccccaccctcgactggaacgacgccgtttcctgctctgaggtcgaggttgacgccaatgccgccgacggcggcgatgacggagccgtcgaccaagacacaaagccttctattgccgtcagagccttcttcttctctactagtgttgatttaaaaagcttggtggaacagaacaaagcaaactttgtcccgccatcatcacgcatgactaattatgtagttctcaagtttggagatatttgtgtttccaagggtccaggtactttcttgagtggacgcaatggctgttacatggtggtttttcagtatggttccattgtattgtttaatgtccctgagcatgaggttgatgcttatttgaaaattgttaagaagcatgcatctggtctgcttcctgaaatgagaaaggatgagtatgaagttagtgcaaaaactgcgaaaagaatactcaatgcatttccgaccttattacacattctgacaatacttgagtatcgacggcattcgaactattggtagtgttctaggtcaaagattgctcttgatactatggncggcaggttgatggaatggttgcag

SEQ ID NO: 142187 - DNA, 493 bp, Glycine max
  Clone ID: PAT_MRT3847_99409C.1
gaattattgagaactccattaaatggtgctgctagacagcctttataagatcaacctgaaaaagaccatcaagaaaaacgcataaagatggacaccagattgaaacagagaacacatcctcaatacaatgaggttcatgcccagatggaagcaaattggtcgaaagaagggtctggatgatggtgaaactcctaatggctgcatgtgcgatcttaaaatggagtcaatcgaaaattgcacttaccagaaacacaaacggaggaaccctgctccgtacagatctattcacgtaagtggacacaaagggcaccacaagagcaagagttgatctgcccagcactcatgggatgaactgactgaggaaaatggaggccacagttggtatggccgagaatacatgcatatcattggcctgtgctaagaatcgatctctaagggggcacagccagttgagatatttacaccatctgcccatgagactgagaaatgatgg

SEQ ID NO: 142188 - DNA, 676 bp, Glycine max
  Clone ID: PAT_MRT3847_9940C.1
attcatttttttttggttttaatccctacattaaaaagacggcattttactccctatatgaaaagttgttagattagtccctactgttaattaaaatcataatacttataattttttttatagaaggacaaaagtaaaaaaaacaatacatgaagtgtagggaccaaaatctagaattctgtttacataggaataaattgtaaaataatttcatgcagggactaaaatgaaaaaattttcaagtatactagtatatatatggaccaaatttaatactattttataactttggtgggatcaattcaaaaactttttttttttcaattaggactaaaatgtaaagttttttcatttagggactaaagaaaaatgatatcaggtgtatgaaccaattttttaattaaaccctaactgtaattctgtatatgatcacaaatatcaaaagggaacagcaaaccctagaactttttatgtaagcacaaatctaaatctatcataccaggtgctgaaatttaattttattaagaggctataatgccatgttaaagtcaaacaccagtcattcttaaagcttgaactattagggtaaaatcctatccaataatgggtcttatttacagaaagtgggtaagggggaacttccgcaaaaaaatatagctggtgtaatgggggttga

SEQ ID NO: 142189 - DNA, 278 bp, Glycine max
  Clone ID: PAT_MRT3847_99410C.1
cattgaccccatgcattggccatttttttctgtctgacgtgtgcaatgatgctgcctgcaaacattcctctacggatgcggctctaacaaaaaacaagcattggtcatgtctcttcgtataacccgagagactagaatctagacgctgtgcaattgctgttcaatgaacgattctcgagccaaggacaaatactagagtttgtccttcggaagaaagagaaggacctgtcagaggaacacaactgggagaggagaatgttaatcaaccggtgttggat

SEQ ID NO: 142190 - DNA, 416 bp, Glycine max
  Clone ID: PAT_MRT3847_99411C.1
cgtacgcgttggcaccaacagaatctttccatttcaggaaactcttctctcagccttccttcccggcctttcttttccaaaactcatggaaggttctatccttgaacgtcttgattctgggaagatgggatacgggtgcaagcattatagaagaagatgcaggattagagcaccatgttgcaatgagctctacttttgccgccattgtcataacgaggcaacgagcatgctgagcaacccttttgatcggcacgaacttattcgccaggacgttcaacatgttgcttgtacagtttgtgacacagagcagccagttgctcaagtttgcacaaactgtggtgtcagaatgggagaatattttctgccgcatttgcaacttctttgctgatgataccgggaaacatcagttttattgt

SEQ ID NO: 142191 - DNA, 997 bp, Glycine max
  Clone ID: PAT_MRT3847_99412C.1
ggtagggtctgcagctataaatataagacgaatacagagaagaccattcacgtaacgataaaaaattgaagaaccacagggaattgtgaaagagagaaaggaagaaaaaagtaagggaggaagattcggagattgctttattggaaaaatggaagcatcatggaagttggagtcccttgcgtgcatagactctaccgctctctctcactcagagctcctcgctctttttctctcctatctatgctccacccatgatctcctcactcgcaatatcgaacccgctctctacaaccagagccccggctccctccgccagacctactccctcccccactcctcccctatcgcccgccgccgcctccgcctcgctggcctcctcccttcccccaagctccctcccctccccgcccacgaccccgaaaacgccgagaaccgcctcatcatcgtctacctcaaacagttcatcagagacgtccccattttcgagcgagtcgaactcgcgcccccttctctcccccaaccgagaatccagaggaagcgtggcagaaatcccaaagtcaaagtccacttggatgactgctaccgcggcatcgacattgttaaccaaaacggcgtctctgtcgatctccaactgttggccaactcccaagaccccttggccgaggaactcaagagactcatcgagggtttgcacaacgagaacgagctgattgggtttctgagtgacttgccgggccagtgggggagccggaagaagaagcgcaagatcgtcgactctgcggatttcggcgacgtcttgccgcttagctggaagattctcctcggtttgaagagaaaggatggtcgcgcatggatctattgccgcagatacattagccccagtggacagcattttgtgtcttgcaaagaggtttcttcctatctgcagactcttttgggtaatggtgatgcacagttgcaaattagtcggaggactgaacatgtactgcaagaacac

SEQ ID NO: 142192 - DNA, 604 bp, Glycine max
  Clone ID: PAT_MRT3847_99413C.1
tttattttttttttattattttttttgtgggtcttatagggcgagagtcagaagtcaaatcacccgatctttattcagaagcgaccagttacgcagtctgttaaaaaaaaaaaaaaaaaagcgtcctggagcttaacacaccgaggaagaggcaaaacctttgaacttgctgaaggggaaggacggaccacttgatcctaaggttgttcgtttaacacaaaacccccaagggcaccaagaccatggcagaggtactccgataaggtttaagctgcacgttaatggaatggcagttcccctagagaacggctgttgtctgtgtgaaccttgctgtcccagcaccccatttgctagcgcagggggtgcaggaacagcatggtccacatttgcagcgctcgttcccagggggcacgacccattttagaagcctcaaatagaaccttagcaggtgccactgccatgaccaaggtgccggggggggttgactcaaagcactcaagtctgggtacattttgcaggcttcgcacccgatgccgcacttgcgggagcttccggaaccgcggttaccaccgcacaaggacatttttaggtgagagaaaaaaca

SEQ ID NO: 142193 - DNA, 651 bp, Glycine max
  Clone ID: PAT_MRT3847_99414C.1
tacggctgcgagaagacgacagaagggtacggctgcgagaagacgacagcccacgcgtccgcccacgcgtccgcaggatctagaaaagccattccatcttcaccaccaaaaagaaaataatggcaatggccagtgcaacaactccagccacaatcactgttgtggccatctccagtgttgccagcacaaaaagaagggagaggaatgtgcacttcatcagaggtttgaattcctttggagggttgaaggctcagaacagtgtgacatcactaggtcttcctgtgtgcactgaacagtgttttgcaaaggtggtgagctcattgaaatatcaatcatcatctaagggcagaggtggaggtgctgcctcttcaacatgcaatgctgctggtgagattttccagattgcagccatcatgaatggtcttgtgcttgttggggtagcaattggatttgtccttcttcgagttgaagcgtttgtggaagagtctgagtgagaattgcataaacttttaatcagttttcatatatatgtatttttataaagaaaaaaaagggggaaaagttgtatctttctttaattcttgatatgatgtagaactacattatttttggggtatctgaatagtaccatgtgaattttaatttggagag

SEQ ID NO: 142194 - DNA, 888 bp, Glycine max
  Clone ID: PAT_MRT3847_99415C.1
cacttctgcaccatggccttttcgatgatgcggtgtaattatctagacaaggaactttataaatgaaagaaattgaattttgtacaatttaatacattacaagttacatgaatttatagaatccattcaaaagccaaaattaaaagtatccaacagcacatagctacccaaaaaggtttagatagtatctaagatttaaccttctaaaagccgttagctgatcactggattatatggttataataaataataaatgttacagtacttcattggccctgatgtaaaataacagtgaacagtaatcttactatacacatgcatacaaactggtctaagattttgcataagaataatccttccatctagtgactccagatctaaatgttctccgcaacacatcaatccgttcagtcaagatagaatcttttagattttccatttcagcgtgttccttttccatcaacagctccagattgtcaaaatgtttaaccttgcgtagcattttctcaatctgtgcttcaattatagttgctactaaatgttcaatctctctgtcttcctgatctgccaacaattttgctcgtgcagcagcagctccaagagcagttgcagtggcagctcttacacgcagtgtcaaaggtatttctgatagagaggacctctccatctctaaaccttcttcaccctcaagagctcttgctgaataatcctcttcaacatcaaatatctcccttggacacaaatcctcatcacaaagagctgaaacagctgcatcagctgcagcagctgtgatatgagggtcaaccacattagagatcagtcccacctgattcattagcaaactgctggaatctgaaagggcagcaacacgctgtctttttgaaggac

SEQ ID NO: 142195 - DNA, 975 bp, Glycine max
  Clone ID: PAT_MRT3847_99416C.1
cacattttcactcctcacgcacaactcacaacgcacaatactccattccttatggtctctattgcgccattctgattttttgtttgttggcactcaaagggccacaccctcatcttgtggttctccttcctccactcccttcagtctctatcactgtgatacatatatgattcaccttcactcactataattcttcgttcctgttccccctttgtctttcttccacaaaattgagatattgcaagtgaaatgaaggccaggcacatctcattcttctcttgatatttctgatggcactcgctgcaaacaaagtttctagcagtcctattgtgactaaaagaacagctctttgcagatcacatgaaaaacactatttttcctcgtcaacaaggatcaatagaatacagttgtcaagacatagactggaacatggacatctgaactatagatgtctccacacacagagatcaaccttattcaatgactggttttggttctttaacggaaaacctgttggtttgatctccaagaaatcttctatctcatgtaaatcaactggagcaaataatactgaagagaaagaaagtattacaacttatgatgatagggcacataccaaagatgagaaaaatgatcacactcttgttgttcatggcttggctgatgcttgtagattcgtttgtaatgatgcaaagtttctctcacgtggcataatgaggttggatgctcgtgcacgtcaagatgttgcttttcttgggactgaatttctcaaacttgatgctcgggcaagagaggatactgagaaaattgaccgtgatgtcaaggaaaaagctagccgacttagtcatattgctactatattgaaggataaagctcagtccagagtaaaaaatgctgctgatgagcattgcagtgatggggccttagaggctgatttacgtcttgctgacttacgtgctaggcaacgtgcgatgg

SEQ ID NO: 142196 - DNA, 234 bp, Glycine max
  Clone ID: PAT_MRT3847_99417C.1
gtttatgttttggtttgtggaaaaagaatggacatagccgcatatgggggcacacttattcagaattctcccataaatgacttgaaaagagatacgagttgtaagaatggctattgagtggagaagacagtgatgcctgggaccgcagttgtcgaagggaacaataggctcctattggacttgtgatatgagcaaacaccttgagtgcaaatcaatgtgctacaggtgaagaaa

SEQ ID NO: 142197 - DNA, 251 bp, Glycine max
  Clone ID: PAT_MRT3847_99418C.1
aggttgacttagcatttgcttatttataaatgtcattgtgtttggaataatggtaataattaaaacatgtggttgattacttacaatttcccaggtatatataaaatagaacaaaattaaaggatgggaatagtactacaagaatcagaacttttccctagtggtaaaagcttctctacacctgcactctattattaatttctcatgcatgctaaaatctagtgcgataaagaacaggccatgtgtgaggt

SEQ ID NO: 142198 - DNA, 390 bp, Glycine max
  unsure (1)..(390): unsure at all n locations
  Clone ID: PAT_MRT3847_99419C.1
ggncgtcctttttttttttttttgatttttttcttagaatgtacaattatttgttgcagcacctttgacaaatgggaaaaaatctgggataattttttggcagaagtgtaagtcctttatgccttgcttaaaggcggggcttgaaaacaagatttaagatggaaaccctcaagccggaggccttatgccccggctgggatgttccggagggctccatggtcgccagcagtggggagtttgttgagaacacaacaacccccgatgactggttttgatgccccaaaaaaaagctagttggggcagcaccccacaagttgaatatttttcgacacatattggggcgggagccgggaggcataagggggagggttcgcaaaatttgccgcaacc

SEQ ID NO: 142199 - DNA, 458 bp, Glycine max
  Clone ID: PAT_MRT3847_9941C.1
ggtgtttgctgtagattcacaatcatctggttatggactatgaagcagacactctcactcatacgtttattattgtatacataagctccaagatttataatttataatatcttagtatatgtcatatgtgccaattaaggttttagactgcattgtttcgtcatgatccttgacattgcagcctaaattgttgttgaagaccaattttaaaaccttgttgccaatacttgtttgttactaagcccctctggaacaacgcagagcatcatttctattgacattttcctaacagtgtgtttggatagaggaatttaaaattctgagaaattttaaattctaagaatttcaaatacttcaattgaaattcttttatttttaaaaatctgtgtttggataaaaaaagttaaaattatgagggtgaaaaaaaaatgaaagaaaaagaacgaaaagatatgatt

SEQ ID NO: 142200 - DNA, 366 bp, Glycine max
  unsure (1)..(366): unsure at all n locations
  Clone ID: PAT_MRT3847_99420C.1
atgcctcaacgaggaactactgattaatttatgtatgatcaacttcatgtattaaagatggggttctgcgctacgtatactaattaataataaaattagagctgcagctctaacagtgtgtgatatgaataattacttgagaggggggatacgacacaccttcttgagttcataaatttcaattccgatctttttggttgtggtgtattattaataacaatttgttattattaattattaagtgacttctataataacaatttgttaactttactacttcctctactttgttataaatgtatctttctgtgttaagttgaggtcttctttntatatattaataaaattgtattaaattttatgcac

SEQ ID NO: 142201 - DNA, 691 bp, Glycine max
  Clone ID: PAT_MRT3847_99421C.1
caagtttcttgctaataaagttcttggtgaagaaaatattgctactatgactaagaaagagatttatgcaaaactttgcctacccaatcgttttgatggtggtaccaaagaagtttggttggacaaatgtagtgggcaagtttgtttgttcatgtcatccaaatccttgaagattacaggaatagatgatagaagatactggaattatattccaactgaagaatccaggttccagagtgttgcgtatcttcaacaaatgtggtgggttgaagtggtcggggagctagagttcgaattccctgtgggtagttacagcttagttttcagactccaattgggcaaggcctccaagagattgggccggcgcgtgtgcaacgttgatcaagtgcatggctgggacatcaagcccgtccgattccaactctccacatccgacggccagagttcactctcagagtgttacttgcgtgggcctggggagtgggtctactacaatgttggagatttcgtggtggaaaagcccaaggagccaataaatatcaagttttcattggcccaaatagattgcactcacaccaaaggtggcctctgcgtagatagtgccatcatttgcccaacggagtttaaagaaagaactcaacaaagtagctaattgtatagttacacagtttattatacagttgtggaaagg

SEQ ID NO: 142202 - DNA, 222 bp, Glycine max
  Clone ID: PAT_MRT3847_99422C.1
tctcgagccgggtgaggtcgatcgggctcgagcgagagaggagggttgattggttctggctcagcggcggcgcggattccgacaatcttaacacaaagaaagggcgagtccaacctttggtagccagagagttggtgggaggccgaagcttgtgttgctttctttgacagggggtgtgacgcgatgaaagggttgatgggaataatgcgggggagcctaaag

SEQ ID NO: 142203 - DNA, 849 bp, Glycine max
  Clone ID: PAT_MRT3847_99423C.1
cccacgcgtccgtgcagctcgagacatcagagagtcagataagggaagcagagttgaagggagcagagtttcaaactcagttagctcttgcaaaaaaatcaaatcaagaagcatgtgaagaactgaaagcaacaaaagcaaagaaggagatagttgagtctacactcaaacatactgaaactgaggttgaagaactgatttcaaaaattcgttctttggaggaagagattcataaggagcgagctttgtccactgagaattcaatcaaatgcggaaatttggaggttgagctttcaaaaatgaagcacaaagttcaagttcagcaagacactgagataaaacatacggaaggtgttaatctcgatttgaagttaaaacaggatctagcactggctgctagtagatttgctgagtgccagaagaccattgcatctcttggacaacagttaaagtcccttgcaactttggaagactttctacttgattcagacaaccctatggagtcaacttgtgaagtcacaaaaggtcaccaaaatggtggtgaacatttgaaaccacatcatagtgatttgagcttgcccaaaaaagattctgagtcacccgtttcgttaaactcatcaattaccaatgagaaaagccgtaatggctttggtaagttcatccctagaagcaaaagaggaactcactgaagggaattgtggagaagctagaaaggataaggttgaggttgagttgtaaatttgggttattcattttttatctcatggattcaacgtatatgaatccaatgtcacgtatttacgaaaaaagtaatgcttgaaaatgttcaaagcaaaaatagcaatacat

SEQ ID NO: 142204 - DNA, 515 bp, Glycine max
  Clone ID: PAT_MRT3847_99424C.1
acaccacacccttcttcttcaacttcaactacattacatgttctctctgtctttccgattctctttctgagatccaaaagccttactttttctccctctcaattctccttctaatctctagaatccgcttcttcaattcccagttttctccacaccaaaaaacgaatcttattcggctctaaaatcctcaccatctcatttttttttctctgtctctgttttttattttttattcgttccctttagccctgttagtgatcatcgccacaagattagtttttccgctgattctcagcttaattgattagaataactcgttttccagcgtgatctgtaactggggcatttacagctacatttttggtacttccgccaaattgtctatggggttcttgtttcctcttccgagttctccgtctcttatacaatacagtgctatgtagtgtagtttacgttcctttgttacaatcgcgggtgttattgtagccgccaaaatttactgggtctgtcttctt

SEQ ID NO: 142205 - DNA, 771 bp, Glycine max
  Clone ID: PAT_MRT3847_99425C.1
cgtcttctctttttctgtatcgtttttactttcaaccacttccaattttctttttcgtcagatcttaataccatcatggaggatgctgctgcttctgctgctactgctaatgtattggaagccaaagatggtactatttctgttgcttcagcatttcctggtcatcaagaagctgtacaggatagagaccacaagttcttaacaaaagcagttgaagaagcatacaagggggttgaatgtggtgatggaggcccatttggagcagttgttgttctaaatgatgaagtagttgtaagctgtcataacatggttttacgaaacactgatcccactgcccatgctgaggttactgctataagagaggcttgtcaaaagctgaatcaaattgaacttgctgactgtgaaatctatgcttcttgcgagccttgtccaatgtgctttggtgcaattcatctttcaagaattaagagactggtttacggagctaaagcagaagctgcaatagcaattggatttgatgatttcattgccgatgcactgaggggcactggtttttatcagaaggctcagttagagatcaaaaaggctgatggtagcggtgctgttattgcagaacaagtatttgagaagacaaaatccaagtttactctgtactgatttgcttcaattgcctaattaaaagcgaacccaagatacaattgttcaggaaattttcaatttcttactacaactacattcataaattcaagaaatataaagtttacatgctct

SEQ ID NO: 142206 - DNA, 434 bp, Glycine max
  unsure (1)..(434): unsure at all n locations
  Clone ID: PAT_MRT3847_99426C.1
tcncttgtttgtctcttcaattaaataatgtggggggatttattataaaaaaacctgcaacatagatactgctgcaaaatttgagttggagaggatggataatggtataattgttggtcgtgatggtattcctattgaagtttggatatgtgtaggagtacaatgtatcttttggctcactaaagtatttaatgagatttaagaagacgccacatacgtagggagaatcactttggttcttatacaaaaaagcatgaaagatatttaaaattgtgtaaattatagatgaataacacttataagatgtactatgaaactattggaaaagggatagcatacattaagagatgagactaggatttgcagagaattgattggatttgtcaaaaaattctacaaacagaagttgtttatcttttccaaggttgaaagtg

SEQ ID NO: 142207 - DNA, 131 bp, Glycine max
  Clone ID: PAT_MRT3847_99427C.1
gcaaaactcaagcgtgggtttctggaaagcgggtagcttgtggagcagtggtttaaactttgatccgaggaactggcgatatctctagtctcttgcaatatgggtttgtgcagatgaagtacaatgtggct

SEQ ID NO: 142208 - DNA, 470 bp, Glycine max
  Clone ID: PAT_MRT3847_99428C.1
cgtgatcactatcgatgcagtttctaatctcaattattatcgagatgttagaagtttctcagcagctgtaatcagatcaatatctctgagctgctacctgcctataacatggatgccttgtaataacgaaggtgccaaccttggtatatcagtcagatatataatactggaagagaccatattctgtatattacctgaccaaaaataacatggggtatatgattatatatgacagaaacagacagtgaggtctgaattcttaacgcctatagtattatcaatgtgcgctatttatgaaagtagatgaaaacttataggatgctaatgtgaatgatggactatctggcgcacatgtaggtgactctagttgcgatgttgacattgtgcatatactcgtgaatgagactgattcatgtgagcaacatggtcatactattactgaccttaaggatgactcaccagatgagctc

SEQ ID NO: 142209 - DNA, 524 bp, Glycine max
  Clone ID: PAT_MRT3847_99429C.1
gtgtggtgtgtgtttttttttttttttttttttttttttttttttttttttttttttttttttttattgtgttttcctttttctgtttttttatggggtggagaagcccaaaaaagctgtgttttttttgtcactttcccccccccctaatgtgcctggggggggggctctagacaataccttaaaggaaaagcccactctcccgcgggggaggcgcccccccccccatatggggggaaaaacccgaggtctggagcgccttttttttgaagggagggatattttttcccccccgtggtctgtgagcagaaaaggggatgctcgcagaagcgggggggtttaaaaaagaaaaaactttccccgctggggggggccccggggtcacacccccctttcccccgggaagaaggggtccccgtctttagcgtgggatcctgggaggcggttcccccttccccggggggagggagagttttttctattccccctcacttcagaggggggggcgggggacttgctctccc

SEQ ID NO: 142210 - DNA, 359 bp, Glycine max
  Clone ID: PAT_MRT3847_9942C.1
cccacgcgtccgaacgactctctcttttttcgctccttcgactaccatttcttggggggcatagacgcttccaccaatgtctaccatctcaactttaagtgccaagacaaaaaacttgatcttgccaaaaccatcgatttcatcattgactatgttaccctcacaccaccaatctccgccgccattcatgttcttagcatcttggcaccaccaaacaacaccatcgtatgaaatttttcttaacttttccattgtcaatccctcaccacccttaaccttttttacatatccactgacatcacattcttttctttggcttctttttaaaaattagacccttattattttgttttcaaagg

SEQ ID NO: 142211 - DNA, 290 bp, Glycine max
  Clone ID: PAT_MRT3847_99430C.1
ctattcacacgtttaataataactttagggaactcaaacctttttattgaacaattaatggaaactagatctagccggaacagaaccataacctgaaaggagatttttttccgggaacagggattttgcggaatgtgatacatttaaaagtgactggataacattaccaggttcaaaatcacatataaagttggccatactcctcctaggaatattacttataatactaatgctaatgagaaggggaatcctgttactgtagatactgtgacacaagatctgacatgttg

SEQ ID NO: 142212 - DNA, 545 bp, Glycine max
  Clone ID: PAT_MRT3847_99431C.1
cccacgcgtccgaaaaaaaaaaaaaaaaaaaaaaaaaaaaaaaaaaaaaaaaaaaaaaaaaaaaaaaaaaaaaaaaaaaaaaaaaaaaaaaaaaaaaaaaaaaagaacgtttttaaatgaaaaaaatttaaaaaaaaattattaaaaaaataaaaaaatattttataaagaaaaaataaattaagtggcctgcttttttgttttaaaaaatttttgactgggaaaatcttgtggtatactttttttaatgggctgcaaaaaaattattttttttgccatttttttttaatagttaaatagggaaaaccgttgtgttttccaaaaatatgcgcatcctaaaaatccattttttaccagctttgtataaaaaaataaaaccccacgaatttggtttttttaaaatttgttaactttatttttttaagtgtcctaccccttttttcgtttatattattaatccgtgtggttttttggtataaacccaacgttttttttcctttttaattttttttaaaaatcatttaaaccctccaccttttattttt

SEQ ID NO: 142213 - DNA, 559 bp, Glycine max
  Clone ID: PAT_MRT3847_99432C.1
aacatgcccatcctcgacaagatcaaagaggcattctcctcttcatcctccaaggaggacccgctccgccgactcggccaagagcacctccggaggcctaggcaacgagggtctgcctaatcttaccgccaaagacgacaagacggccgttacgcccagccacactgccgctacagaggacaagctgccagagctgcctgaaaaggctgtctttgaccacgacaaggtcactgtcatcttcgtgctgggtggaccgggagctggcaagggcacacaatgtgagaggatggtcaaagattatggattcgtccatctttctgctggagacctgctacgagccgagcagcaacgaccgggatctacatacggagagatgatccagacgtatatcaaagagggacaaatcgtccccatggaggtgactgtcaagctcctcgagaacgctatgcgagatgccctcaaccagccaccctctttcgaaccctcatctcctctcagcagtggatggcagaatggtcgaggtcgattcctcatcgacggtttcccacggaagatggat

SEQ ID NO: 142214 - DNA, 238 bp, Glycine max
  Clone ID: PAT_MRT3847_99433C.1
gtctcggtgcggggggaaccgcggttacagaagcccctgcatgcgcgggatcggatacggacgctgacagaagttccccgacttgagctacccccgaaaaaccgccactcggaccgttgtcatggaagggtcaccagttaagggcttatacgggagtgccgaattgggactacccgttaaaaacgaaagctgcaaatttctagcaaactgcacctgcaacctcctgcgttgcaaatgt

SEQ ID NO: 142215 - DNA, 584 bp, Glycine max
  Clone ID: PAT_MRT3847_99434C.1
ctcgcgccgacgaagagccccacgggcgagacggctgcgaggaagacgacagaggggggcctcaaggcgtgttcataaaaacgaaccacatgagcatttgtttttcactcttctctgttctattcggacactacctcacaccaccatgagggccgggaaggggaaactgactggcaatatcacgcctatttgtcactaatgcataaccatacatcttaatgatcggctcgcaagatggcatcgctggaaattacatcttaaagctaggatgctcttacccatgggatgagaccgtttggccgttcatctgtttaccagaaatgctatggatactacatgccgttgctcctttagcatttattattgaaaggaaaagtaggcctaacatgacactcccagggtttctacagataatattgcttggatagccttgagccagacactaaccaaagctgcaatgtactgagtgatcgaagtatacttaggcttgattcacatctactatagagaatgctgtgccctctattacctgtgcgcttgcagacttcgcccggatggagcatctaatacttaaggaggttcgg

SEQ ID NO: 142216 - DNA, 719 bp, Glycine max
  unsure (1)..(719): unsure at all n locations
  Clone ID: PAT_MRT3847_99435C.1
ccacgccgtccggnttgttcgaaaaataaattcaccttagactcaacttcctaatcatggcaatgttggggatatggtggtatcattggttcattgtcattttacagtattttcttgaaattaaacagtttcctagttttctcttctcttctgcttcatattgtcataattgtagttgctgtctttattttgacctcttcctttttatctgctgtggctttgtacttattaagctttagtccattataaaacttgtgttctgcagtgacaatgtagtacaagtgtatcttctacttttggctgacttaattttgttttggacattctgaatactgtgtttccgacattattaggactgatcaagataaaagaacacgcaacatggaaagattgtggctctctttttaatttttgcatatattttattggatagctaatattacttctcatttagaaaaatggtgacaattgcaaaaggagaaaaactatataatagtttgatatatattttctttttcattctcaatttggtggtagacacaaatggtcacaactgcactgttattgaatctaaaaaatgatagaaagacagttgggaaggtagcccttagttgacattttaatttgaccaggtgtctcgaatcaggttctgggcctcctaatacaggggatgccttatatcaagggccttcccagctaatggtaaaatcagcattgcg

SEQ ID NO: 142217 - DNA, 210 bp, Glycine max
  Clone ID: PAT_MRT3847_99436C.1
ctggatgaggcgtcaatgtgtcattctgatccttccgtccagcattctctaattgccttatatactaatccaccatcctccaaatagatcagcgcttttgcaaccattgattcgagtgattcatagtccactctgctcatctgctctctcttcttacagcctacgactcaggaccgccgccgactagtcgagctcgtccacccgctaatt

SEQ ID NO: 142218 - DNA, 366 bp, Glycine max
  Clone ID: PAT_MRT3847_99437C.1
ctcttgaacgtggatgcaaaacaaagtcaaccattgaaagcaaatttaaacaaaaaaaaaccgtgcttaaaaaaaaaaccctaagggtcccgttggaaagggcaaattcactcttcttcaggggcaattgggccggtctttttgttgtgcttggtagggaacctgtgattcctgagaagctggggatccatccttttgttggaagtggggggaggcctcttggttttcttgaggccgtttttgcggcccttggaggactgattgcgccctgtgggatccttaaactttgccatttcgaggggaaggtgaaggaactttccggccccctagggattgttgggaggtagtgttaaccctccaggtcct

SEQ ID NO: 142219 - DNA, 275 bp, Glycine max
  Clone ID: PAT_MRT3847_99438C.1
agaaaaagttaaataaatttttttttaaaaaaaaaaaaaataaccccccccccgtccttattaaaatattttacaaattaaatcaggattttttctttcgaagaaggggggggaagggttgaaaaaactaaacttcatggggtgggtggggggtaagtaaaaagactccttcctttcccgtgtggtgggagggatgaagtttatattaaggagaagatttattccacccaaagcaatttaagggagggttgcaaggaaaaaaaagggtgcttttt

SEQ ID NO: 142220 - DNA, 783 bp, Glycine max
  Clone ID: PAT_MRT3847_99439C.1
catgtaacatatttggtggaacaccttttaggaaaagcattgaatcgccttcagcatggaaatctccttggttcatgaacacttttttgtccagccccaggattgatactgaaattacaattgaggattttgggtatttcatgagccctggtgacagaagctatgatgcaatcgggttgatgaaacagatcagtgaacaaactgcggctcaatatgccagcgctcaagagattctgggaaatgagactcctaaggcattaccaaaagatgcttccagaaacgacagggatgaagatcaggaacatatcgatgctcataatcagcatgggaaccattgtcagttggcttcaagtgctctggtggagcgacgtgtacttgacttcagcgaatgtggaactccggtccgaggtgatagcagcaaatcctcagctatgagcttttcaagcccttctttgtatttgttgaagggctgtagatagttgatcgtgcactgaaatgctataaagccttcggttgatgtacttttcgtctccaagtatattttatatatagtttactatttttttttatttctttatctagcttatagtgataagacttgaatttgtaatggtaacaaagaattctatttaagcttgtgtcgattctggattcttaatttgtcacctctatagtaagcaaatacacatgagaggatttataacattcttcttagttttatattctctcaaaaaaaaaaaaaaaaaaaaaaaaaaaaaaaaaaaaaaaaaaaaaaaacaaaaa

SEQ ID NO: 142221 - DNA, 1153 bp, Glycine max
  Clone ID: PAT_MRT3847_9943C.1
ggatttccgggcacctttgagctggagtccagtggagggcgtgaggacgcctggcctcttaatccgggtcgtctgaaaaggccaacgccatactcttcctccccagattttcctcaggcccctgctttcaattgtataccggccccccttgctcaaataagtactaatgctgaatctctgtccggttagggtaccgcatttaaatttgatggtaagagaatgtgatgaaaaaagattggtatattgtaaatgtaggcaagtgtctcatcaggaactttatcaacatatatgcctcatttcacaatagagcccccttcaaaccaaaacaacaattgcagcagtgtgcctgtgaagtcaatggagaagatggttggtatgaaaaggcaaacaccataccctttctccccggattttcctcatgtccctgctttcaattgtatatcgtccccctttgctgaagtaggaactaatgcaaaaactccgtgcggtaatggaagcggatttaactttggcaattcaacttccagagaagtatcatcatcctgtttagcttccaactctgagccaaagtcaaagaaaagaagagaagagaatgagaatttcaatggagattttctcacgttggctcctccctctcttactttatatccaccttcaaaggtcaaagttattttaactttccaggcatttcacaaccaaggaaatgtagaagatcaaatccctgcccccccaccagtgttcaggctgttcaatcaacaaaagcaaccattttatggctttttccttccagaaccaaaggaggaacaaattggagaaacagcagccaggattcagaatggtcatgaagtgggagaaagtgttgattttaacttgaaactatgaatataacttttaggctagttgtttctccctatgaaacttgcatagtcatctttttttttttatttttaattttactagtgggagatattcctaaatgtgcacatgtagtgttggttgagtatgaaaaggactaaaaatcttggccatgtgagaggtaggagtggaaaatgaaaggagagatgttgatttgtttgttttgagtagcaatgcctatgtgctttaatgaaaagccaaactctagtggctttgcctttgggatttgcatgtttga

SEQ ID NO: 142222 - DNA, 1454 bp, Glycine max
  Clone ID: PAT_MRT3847_99440C.1
aactacaaagccttcctggtgcaaacacctattctttgtccttgttaccttccacgaataagcaaaactatcagtgaaagtttttctcaaattcaattttggcctttatgatgcagatttcaatgttgataaatttggttttgtggctgatcgtttgtgtagaaagtctgctaaggtgtgtgactacatgattcatcattttatctttgcattcccaagtgtctgtttatttcattattggcatggaattttaaaagttggcatggaggaagaaggataaacgagtgtatatgagatgatggtgttttttttttcttcaaaagagacttatgagatggggaatgtgttttttccagaagttatatgagaaggagaaagagatggagggggagtgtgtttaatgggtaggttgaaaaaaaaattggggaggaaagtgtattagtgataagtggactgtaaatagtaactacctaaaaaaacagaaacccatttttcaataaacaaaaaatacaagcccatatttccgataaacgaaaagtgcttggatccggtcagatttgggcccaaatagtgccttcagtttgagaataaggaaaaaccctaatcacgcgtctatacggctgcgacaagacgtctgaagggggcttcgcctcattttctggctaaccaaccctgacactccttcttctccgcttcctcttcgatcatcgcttcagaatgccgccgaagttcgacccctcccagatcgtcgacgtcttcgtacgcgtcaccggcggtgaggtcggcgcggcgagttccctcgccccgaagatcggtcccctcggtctctcccccaagaagatcggagaagatatcgccaaggaaaccgccaaggactggaagggcctccgcgtcaccgtcaagctcaccgtgcagaaccgtcaggccaaggtcacggtggtcccatccgccgccgcgctcgtcatcaaggccctcaaggagcccgagcgtgaccgcaagaaaacgaagaacatcaagcacaacggcaacatctcgctagacgacgtcatcgagatcgctagggttatgaggccgaggtcaatggcgaaggacctcagcggcagcattaaggagattctcgggacgtgcgtctccgtcggatgcaccgttgatggaaaggatcccaaggacttgcagcaggagattaccgatggtgatgttgaggtccctctcgattaaggaggaaggctttgttactctctttctctctttttcttttgtctttcttcagatcgtttcgtgttctttttaatataaatttgggggaactatcgaacgttttgtttaaggttattttaccgctttggataatttagatgatggtttcgagagatattattattatgggctgattagtttctttctctgctcacattatgatattttttcgatatacatatggtaaacaattttac

SEQ ID NO: 142223 - DNA, 530 bp, Glycine max
  Clone ID: PAT_MRT3847_99441C.1
aaccccaaatcaagggaattaaaaatttataaaaaaacaatttaaattacagcctcgtcctcacgagaaagcaagaacttttagttacagcacctgcactacaattttattataaaattaagtttcaaattaaaggcaatcaaaacctaatctaatctaaatctaacctaataatcttaaagtaaactccaattaagcatgcgacggaaccactcatcatgcgtttgataacaaagccttttcatcatcatcatcaggatggcttgcatgaagctcctttatccattcaaccgttcgacgacgtgacggaaccttttttccctgcttttgctgcttgggcttatgatgcttcttcaactcgaccactttttctttcgcggcgtgcgctgtactttctgtcatgttcggtcttttagcgttaccgttaccaccttttatcatgaccatgttgttgggttgcactgtttcattggaacaatctcaaccacttaatagaccaccggctttgccaactaactggttcaaaactt

SEQ ID NO: 142224 - DNA, 142 bp, Glycine max
  unsure (1)..(142): unsure at all n locations
  Clone ID: PAT_MRT3847_99442C.1
ctagcatgcagaccagttaaatttcctcattggtaaaanatacanatacataaaccagttgtaagttgctatagtagttaattacaactggtttatgtatttgtattttttacccanataaatctaaaatattagtattatc

SEQ ID NO: 142225 - DNA, 588 bp, Glycine max
  Clone ID: PAT_MRT3847_99443C.1
gtcggtgatattggaaagggagaagtctttgttcctgagagtgttgtgcagtttggtgcccgagaggcggggcgagatggtgtccaaactttgaaagctgaggatcacaggataaaatatgatggggtacaccatgggtctagctatctggaacaccttaacttcttgtctgcaatcagagcaaaaggagaaaaggctcctagtgtagatctccaagatggattaatatctgttgctatgggagttgcagcacagctctctatagaatatggtcgatttgtttctattcaggaagttatgaatgagtgcaaaatttgagtgttgcaacttggaagtgagagtaatggttgtctctgctgttatgtgttctttgacaaagggatgctgtattgttgctatcactgcctcaagaaaaagtgcaaaatgatttgtgaaatttacatttcttccacctaaactttagtcaattgggaactttagctcctatgttttctgcaacttattttctgtaaactgaaccagtggaatgttaggaatcaaagctgaaaattttagccaaaaaaaaaaaaaaaaaaaaatctccccccc

SEQ ID NO: 142226 - DNA, 359 bp, Glycine max
  Clone ID: PAT_MRT3847_99444C.1
gaacactaaaatctcttttatataaacccccggggggcattggccaaccctccaaaaaggaaaaaggtggggtgaaactttaatcattcccaaatatggagcaggctgtagagggcattctgtgttctaagataatccctattaaaggggtttcatttgggggtttcaaacaggggctggttctggaggtgaaggggggacccggttttcaactggtatttcagcaaacccagaccattgaccgcggaattcatttccggtcagggcctccttctccagaaggacttcgacaatcttggcaatcgcctaacggttggtccttaaatggacaaatgcaattgaatatgcttcatctgaaa

SEQ ID NO: 142227 - DNA, 956 bp, Glycine max
  Clone ID: PAT_MRT3847_99445C.1
gcgaatctagacatgcaaatagatccagagacaaaagaatacaaagcgttcactgaacttttgccacttatcctggttctagtaaggctataattagtctatcacattaactttgtcattgagttttgtttctaaaattgcatagttaattcatttttgctctgcaggttctgattgccattttattatgcccattaaacatcgtttatcggtcaagccgtatgttcttccttacatgtctgattcactgcatctgtgctcccctgtacaaggttacactgccagatttcttcatggccgatcagtttactagccaggttcaagccttgagaagttttgagttctatatatgctactatggttggggagacttcaaacaaagagaaacatcttgcaagtcaaacaggatattcatagctttttcgttcattgttgctgtgattccatactggtcacgctttcttcaggtacaaaacttcattccattttcgtctgatgttgagattttccagtagttatatatgaagttggttaaagattgcgtgtatgtttggattaaagttgagagagctgaaaagtacttttattctgtaagtaataattttttccttttacatatgatgcatagaaaatcgttcctgtgaattggaattcacaaaactactttgcaaagtttaatgacatagcttgcttatgttcagaaaaagctagttgttatcataggctattgatgcttactttttagcttagttgttattgctttttgctttgtcctgtgtgggacttcatagcttttctacataagctcatgctgtaacacttcatttgagcacataattgaaatatgaaacagtttttgctcccttctgtatgtcggtaaatgtgagtctgattttggtttctgattacttttttattttattttatgcatcgtcctacactcttactggcttcct

SEQ ID NO: 142228 - DNA, 343 bp, Glycine max
  Clone ID: PAT_MRT3847_99446C.1
gctgacgcaccgggcggagccgttaccgcctttgcgggtcgctccacgcactgggttttcactgtggagccggtgcgagagtgcaccatgattgaacaagcaccgttgatgctggtggctgaccatggggagttcgtgagacagcaactggcagagtcatgggccttcggcgccatggattctctgtggaggagatcatgacgaacgatgaactgataggcccctacgatcgctgtgggaacaactgaaccgcgatgtcagcctgacagggacgaaagacgaaccggcgctacgtgtggcagatcttaaagaggagctggatgacactaggcctaagcttggg

SEQ ID NO: 142229 - DNA, 471 bp, Glycine max
  Clone ID: PAT_MRT3847_99447C.1
aaagcccaacaaaccctcccaaaaaaaaaattattcgggttgggtaaaaaaaaaacttttttttttttttttcccggtaaaccccagcgggggaaaggggattttaagtttggaacaaccccccccggcccctttaagccagaaacttggggataaaaaaaaggatttttggcaaggggtgggggggaaaaaaaaaaaccctttttttaactttatatccaaaattcccccccggataggggcccgggttttccccccccccttaagggggccgaagaaaaaaaccttggggggggggccctggggcccccccgggaaaatttggggttgggaagacgggttaatggaaaaaaggggggccccttttttccaaaaaacaaggcccattttttctgggggaatatcaaaaacgggaagaatttcttcctggggacccctcccatcagcattcggggtttcgggaatgggggg

SEQ ID NO: 142230 - DNA, 229 bp, Glycine max
  unsure (1)..(229): unsure at all n locations
  Clone ID: PAT_MRT3847_99448C.1
gnagacgtgtattttgacaagtaatgtactaattgntantccttcctgntcttattataagantcattcttattataagattgncattaaaagtataatttaatcctttttataataagattcaatttacaatttcctatatatnaattatcttntcacaaaaatacctttaattaacatgagtncttcgtagaggaacatnttnnccctcatgtntgggcattttgtc

SEQ ID NO: 142231 - DNA, 371 bp, Glycine max
  Clone ID: PAT_MRT3847_99449C.1
ggttctagtgtgtgattgtttgttgttgtaactcgatcttcttcttttgttgttctgtgtttgtgtttgttttttctctcatctgaaaatgtcatgctgcagtggaaactgtagttgccgaagctcctgcaagtacagcaaccgctgctgacgctgcaagatgtacccagacttgagctacactgagtcaaccagcaccgataccttggtcatgggaatggcacctgttaaggctcaatttgaaggtgctgaaaagggtgtgctcgctgagaacgatagatgcaaatgtcgaccaaactgctcctgcaacccttgcacctgcaattgaggtgttgggacagcaagcttcaagcatagatatcccttaatta

SEQ ID NO: 142232 - DNA, 414 bp, Glycine max
  Clone ID: PAT_MRT3847_9944C.1
gtttttgatcaagtctccatctttgccgtcacggccgcaacagttttgccagaccaggtctcctgtgatatcaagaaataggggtggaggaacaccacacaagtttttgatcaagtctccaacttcagccaccaaagttcaagtccagatcaaaaatagtccaccaactgtgtctatttcaccaacaaaacctgcaaggttgagcagaagttcctccaggagatcccacttctactgcatctaaattccgtcgatctttctctccttcaagaatagcatccagattagtatcactttcaccattaagaaccaggaaaactgtacagagaaatgatgggtttgtgagtggactcaaacagtgcccagcatcatcatcagtgcaataccctgctaagaggaatttgagaacacatc

SEQ ID NO: 142233 - DNA, 634 bp, Glycine max
  unsure (1)..(634): unsure at all n locations
  Clone ID: PAT_MRT3847_99450C.1
cttcaactgcagcaggaaattcagttcggccatctaaccaggaaaagctttcttctgttgggacaaaataaatgttgagtacatatggaaaaaaagttcatgtcttcaaacttactgatctcgctcgccatcattttgacaatgtgagtatgcattctcattttattggggactttcttttagttgaggtcaaaataggatatttcttatagtacctcagttgaatattattagactagtttattcaatgactggtatttttagacaaagtaaatacagaggaaattgcgtaaaaagataagaattaggaaatgctaaagaagcagaagaaacatatggagttcaacttgagaatatttagcaagttcgtgtagatgaaaactttaaatatttcaacttgagaaagaatgacagtccatttcccatgattgaaatgatgattttgtttgtactttgaccttatttttttaactggtttttgctttttctgatattgggatttgggaatttgtcaccggtcctttttttctcattttgcccaacatgtatttgatcaagtatgtgggagaactgaattgaatagcaacaaattactttttttatgtataaaaaaaaaaacctaacanaaaaaaga

SEQ ID NO: 142234 - DNA, 172 bp, Glycine max
  Clone ID: PAT_MRT3847_99451C.1
ggatagtgagaattctaggtgattgatcatgtatgcaccaaaatattgcggcacgtaagtactttaaggagactggatcacctttctgttactccttaattctgaaagttatttcctacaaagacgctaatatgtactgctcgtaatgcgaggagatatctttctatactcc

SEQ ID NO: 142235 - DNA, 367 bp, Glycine max
  Clone ID: PAT_MRT3847_99452C.1
gtatcacttcaatggcaagtaccatgatgagcttatggccaaagctgccgacattggtactacagaaaaaggtattcctgctgctaatgaatcaacatggacaattggccaaagactggctcgcctccacgtatataacagtgtatccgacacgggataacttacggagctgcacctctgtgctccccgtgatcaacaacaacacagaggtggcatcctctttgaggaaatcctctacccaagcacatctgaatgcaatgcctttgtgaataggacgaagaaagctggcgcgcttccgtgtcatcacggtgaaaagggctccgaagaactggtatgaacgaatcgaaaaacctcgacccaggatcta

SEQ ID NO: 142236 - DNA, 953 bp, Glycine max
  Clone ID: PAT_MRT3847_99453C.1
ccacgcgtccgtacggctgcgagaagacgacagaaggggattctgagtaatcacaaacacaactaagaagccaatccaaacgaatctgcggtgatccaaagaacctccactccccaccatcacatgtcacgtcgcccccacgcagcgccgccgccgccgccgcggtcactccacaagcaacagtcgtggtcgccggacatgctccgcgacgaggcgtggcagcggcggaaggacaacaaccaccccgtgaaccgccgccagcaccggctgagcaagagcctctcggaggacgacttggacgaactgaaggcgtgcttcgagctcgggttcgggttcgattcgcccgaaatcgacccgaaactgtcgaacacaatccccgctttggagttgtaccatgccgttaacaaacagtacaaccaccacagcttgtctaggtcatcttcttcgtcttcccttgtctccgacagcgacactactagccccaccactattttcaatccaggggatgatttggctgcgaagaagactcgtttgaagcaatgggcacaggtggttgcttgttcggtgtgggaatcttcttcatcttcgtgttcaaacccttccgaccaagttaattaacagtttttgaatacctcggacatgtacctgaagcccgcaggaacaagaccagtgtgaattaaattggactctaatttgttcatagatgatagtctttggtggtttcttctgagttttttttttcttaagatttattatttatatatttcgaaatgtgttgtttaccaatgcaatatatatgtagctgtgtacatttccggactcaaacatcggttgtgttaattcgaaaaaaaaaaaaaaaaaaaaaaaaaaaaaagggggctctctttaggatcgatggagggtgggtaagtctttactacccgataaccgttaaggtttttaatggttcaggt

SEQ ID NO: 142237 - DNA, 375 bp, Glycine max
  unsure (1)..(375): unsure at all n locations
  Clone ID: PAT_MRT3847_99454C.1
aggagaacaagaagccgccagcccgcccagcagccgcacaagcgcagggagcaaggcccggccacggcgcaagccaccaaaagcgcccgcgccgaaagaaaacaggccacaangtttgctgtataaaaagggnaaagnacaagngaaagagagaggagaggaaaaacacaaccacccgagccgggaaaacgagaccacaacagagcgnggaaccaacaaaggaccacaccaaaggcgaacaacggagagcagaccccaaaacagcgaaccaacaagcccgcgcgcacgccagagaacgcgaaggccaccacaacgacacacgcagacccggcacagacaacaccgcaccccccaacaccccacacgacgaaaaac

SEQ ID NO: 142238 - DNA, 334 bp, Glycine max
  Clone ID: PAT_MRT3847_99455C.1
ggaattcggcacgagggcacaatccaggaaagcatgtactgtactagtcacaaaatatgacataagaaatagttaaaaaagaatttggtgaagaatttttcgttcttctaattcaacttataaatattgcagttaaactagcattttttttttccaaaagctattccatctgaattatatgtaccaaatgaaatttattgcttcttaaaatgtaggatgtcattatcttttaaatttaaatatatgaaaaatgtccttaaactagctgttttatttctgctaacttaatctcaagatgctaagatattcatgggaacaaatcaacaaaatacat

SEQ ID NO: 142239 - DNA, 352 bp, Glycine max
  Clone ID: PAT_MRT3847_99456C.1
ccgactggctgcacaccgtgttgctcaacactacaacatgcaaacaatagttcaaaataatagcttagataaccaaagaagtaaaattctaattaaaaaattacctaaaagcaagtaccctatatttcaattatccaaaatacctactaagcagttagaaaataataaatctgagcagaaaaaaattattattagaactagacctaataaaaacaatttaaataatactaacgaagttaaaataaaaaaaaaccctttaataagtataaaataaagaaaagagaaatataaccaaacacaaacacttatctttagtaaccctataagctctgaatcagataatacctcatcc

SEQ ID NO: 142240 - DNA, 962 bp, Glycine max
  unsure (1)..(962): unsure at all n locations
  Clone ID: PAT_MRT3847_99457C.1
atttaatagtgtataaccattattattacaatataaagtaaattggatggtgaaagaaaaaagaaacaggggaaaggtagcaacaagtgtttcttgacaatccttattcattttcttctctcgacaagaagttgaaggaatgtttgggccatttgggaagagattatttcctagcagaaaagagtgggctagcccaatccataagtgggcttggcaacccaattttgcattcccagtttcgcaatgaaagaaaggggaaagggtaaagcaataaataggtgaatggtgagcgtcaccaaccaaagttctctctcccaatgtcttggtcgtcgacgcaggaggcagtagtagcagattgtgaagaagaacgaaactggctggaccttccgcgagacgtggtgtgcacgattttccagaagctgggcgcaatcgaaatcctgacgcgcgcccagcgcgtgtgctccgtgtggcgcggcatctcgaaggagcctctcctgtggcgcaccatcgacatgcgcaattcgggcgacattgaaaccaacttcgtgttcttggccatgtgccaccgcgcaattgactacagctccggccacttgctccatatcaacatcgagtatttcgccaccgatgatctcctccaccacatcacccattctacaagtaatctacgaagcctacgtcttgcatgttgctatcaaatttcagatgaaggactgtgtgaaattgcagaaaagcttcctcagctggaggagcttgatatatcaatcagcaacttaaccagggaccctctagaagctattggccagtgttgcccacacttaaaaacactgaaattcaatatggaaagttacagacgtccgcacattgagtgtgatgaggaggcttttgctattgcagaaaccatgccccattacaccatctncagcttttttggaaacaaacttactaatgaaggcctgctt

SEQ ID NO: 142241 - DNA, 349 bp, Glycine max
  Clone ID: PAT_MRT3847_99458C.1
gttgtttatttattctttcagaatcgatctcctacggccgctctttagactacactatcgttaataaaatccaccgtctctaccacgactcgaatcgaatcgaaccaacctttcatacccaccaacactcctacttcaaccgctaatatgctcggacgtaccgttttcgccgcgactttctttgcgctcgctcaattcgccatggccagcccccctggctgcctcctcggcgctgtcaaccaatatgaagacccatctgacatcaaagccgtctgcaaggccaaagacctgagcgagaaggtagcggaaatctgcggtgacgatgctaaggacgctatggctgcgatcg

SEQ ID NO: 142242 - DNA, 237 bp, Glycine max
  Clone ID: PAT_MRT3847_99459C.1
ctgttgatgggttcatgatttggagaagtgtcacatattctttagatgagtctagagaatcttgtgttatttttttagtgaagtcaagttcatcattcataattatttgtcctgttatgctagccccttctatttgtgcttgttctccctggtttacattgattggtggccaaacttgagcttcttgattataatatctttcttcattcgttaggaggacatatgacatcaagcaga

SEQ ID NO: 142243 - DNA, 406 bp, Glycine max
  Clone ID: PAT_MRT3847_9945C.1
aaaagctcatggtggtttctctgtgtttgctggtgttggagaacgaacccgatagggtaatgacttgtacagagaaatgattgagagtggtgtcattaagcttgatgataagcagagtgaaagcaagtgtgctcttgtgtatggtcaaatgaatgagccccctggtgcccgtgcccgtgttggtcttactgggcttactgtggctgaacacttccgtgatgctgaagggcaacatgtgcttcttttagtaaacaacgttctccgttttaccccaggtgactcaaaggtggagtcagtgccttgctcaaaaccaacgacggatgatacccaacaggacgtgactaccacgcgtggacctaggacggacgaacgacgcccgaagaccggcgaaggtacctgcgtacaa

SEQ ID NO: 142244 - DNA, 291 bp, Glycine max
  unsure (1)..(291): unsure at all n locations
  Clone ID: PAT_MRT3847_99460C.1
agttaangaacgnaataancacggaatacnantcganannaannnanaaagananacgntgatatnnangangtgaaattnacnaatcaaaantannaacgnnagggatnttcaaatagnnatnccagganttatnanagatcagngnacgnnatgnaaaataaanaaganaaananannatgaatanggtnnagnaantgagnaaanagnnganaaaaanacaaagnaaagnnngngtgntatagaannagnaaaaatnnnaagaangaaggaaagagaaagannagatg

SEQ ID NO: 142245 - DNA, 1044 bp, Glycine max
  unsure (1)..(1044): unsure at all n locations
  Clone ID: PAT_MRT3847_99461C.1
tnccccacgcgtccgcccacgcgtccgttatcatttcatttgttgtctgttacgttaacgtccctgcctccgattctttccacttcttactttctttctagtttctcttttccctctcacacaacacaagagaacacgaataaaacgcactgcacgtgaatcgcaattattagggtttacacaccctcgcagatggtttgagattgcgaattcgacgacgatgatggaaggagcgagcaatggagggatgctgtaccacgaggtgcaggagtcgaagctctgcgcggtgcattgcgtgaacacggtgctgcagggcccgttcttctcggagttcgatttggccgcgcttgcctccgatctcgaccgcaaggagcgtcaggtcatgctcccagcgctcgcgtcggcggatttcgagtcgcacaatgtctcgctcgacggggatttcagcatccaggttttacaaaaggctctggaagtttgggacctacaagttatccctcttgactctccagttgctgagcctgcccagattgaccctgagctggaaaatgccttcatttgtcatttacaagaccattggttttgtatccgcaaagtgaatagggagtggtataattttgacagtctctatgcagccccacagcacctttccaattttacctctctgcctatcttgactctttgaagggtggagcatattccagaagcccatctcctcatctgaagctctaatggatttgggccagatgctgagaggataactaaatcttgcaactcagcaggctcacaagggtcacccatagagacctaaaggagcatttctccaaagaaggaaaagtttctttatgtttttttgtggtggagccccgtacaccgatttctcgcggttttgctttttttacaatggaatcttcttaagattcccagcgctttaataaagatctcaatcaatcagttttagagggtcgttacatcactgttgagcgggtaatggatttttctatggtagtagatgttaaaacaaatgcactcgtcatttttttc

SEQ ID NO: 142246 - DNA, 407 bp, Glycine max
  Clone ID: PAT_MRT3847_99462C.1
aaaaaacccatttggggaccccaaaaagggaaatataaccggaaaagtcacaaaggggaaaactttgggcaaacagaaaccaattcctttaggggcaaacaggtttcaccggggacctataggaaagttggggactttaaaggggaaaacaggtccaagggggcactttgggccactgggggacttgggaaaaccccaatggggactttcctgggaacaaaagggggggcagggccaaacgattcaggcttcccaaaaaggggggtaaaaaggcatgggtcggctaaaaaagcccccaaaatttggcaacttggggtaaaaccccctttttccacaaaaaaacccccccaaactttttttcgaaagtcaaaaaaccttgggtttttacccccccctaggggggaaaa

SEQ ID NO: 142247 - DNA, 790 bp, Glycine max
  unsure (1)..(790): unsure at all n locations
  Clone ID: PAT_MRT3847_99463C.1
ggaattcaatgaggtggatcatctgttcaggcatcggattaatagcagtgtattacatgctactaactatatcaagcaatttccttcgcctatcatatctatcattgcaaaattcatctcatttgtatcgggtggctttgctgcaattctgatcatcattgcttttctagaggagtctctgctggagggtcatatatttggtcgcaaaaaatcaatccagatattttgtcggaacttgttctggtatgctgctgtttttggaactataactgctattagacgggctgcaattacagatgagcttctagtcatagaccccgaaggagcaatgtcaatggtggtcgaacatacacattatatgccaaagagatggcggggcaaagaaagtactgaaatggtccgtattgagtttgaaaccttattccagtatactggaatgatgttacttgaggagatggcctcaattttcctcactccatacttacttttgtgtattgtcccaaagcgggttgatgatatcttgcagttcattgctgaattcactgtaaatgttgaaggtgttggccatgtttgcagttttagtgcctttgattttcaagagcatggaaacagtcattatggttccccttgcaatgcacctcgtagccggaggagttcccaagggaagatggagaaatcattgctgagctttcagagtagttacccatcatgggaaccaagtgctctggggaagcggnttttgctaaatcttagaagatttagagaggaaacgttacctgtacatggaaac

SEQ ID NO: 142248 - DNA, 1237 bp, Glycine max
  unsure (1)..(1237): unsure at all n locations
  Clone ID: PAT_MRT3847_99464C.1
gcgtccgaaagttttctgtacagggtctcgacaactttgtgtggtaaaagcgctttctgcccacgaccttctcctgcggttgactgcggaaggagatcctcttaatcggaatgctcaacaagggtgtgctagcttttccctctttcacagtggtttccaggtgctggtccttctgggaaatctagttctaatggaacacagaatcgtgtaatactaaccaagacccttgagtggactttgaattggtgcatcctgcagagcatgtttgatcgaaacttttgtgtcagaagggattttgtgtcaaatccaaagacattacgaaaaaggcttatggtagttgggcttgcaatgcttttactctctccatttcttgtcatatttatgctggtatatctctttctgaggcatgctgagcaattttataatcatcctagcacggcatcatcgaagatggtcaaatttcaagtggatctttgaattcgcacggagaggtggatcatcttttcaagcaccggattaatagcagtgtattacatgcttctaactatatcaagcaatttccttcgcctatcatatctatcattgcaaaattcatctcatttgtatcgggtggctttgctgcaattctgatcatcattgcttttctagaggagtctctgctggagggtcatgtaatggtttttccattcttatgctgaaagaagttgtaaatatatgtcatgacagtcagtagtaatagttttttttttttgaaaaacaaaaaatcaatccagatatttggtcggaacttgttctggtatgctgctgtttttggaactataactgctattagacgggcttcaattacagatgagcttctagtcatagaccccgaaggagcaatgtcaatggtagttgagcatacacattatatgcccaagagatggcggggaaaagaaagtactgaaatggtccggattgagtttgaaaccttattccaggtactctttcaggtgttggtttaacacatttgcattaaagtagacccacccttatgtgtccttcattgtttttgttgtagcataggtttgaattcttctatttatgctaatatttttttttggtggtgcagtatagtgggatgatgttacttgaggagatggcctcgattttccttactccatacttacttctgttggttgtcccaaaggtcattgctgtacttgacagaannangtttcccctacttttactgcga

SEQ ID NO: 142249 - DNA, 296 bp, Glycine max
  Clone ID: PAT_MRT3847_99465C.1
ggggggatagttttattttgtcagacaacccattccaactcgcgcgggctacagtaacttgggcactattgtgaacaaacaccattcgtaggcagagatgagaaggctcacacatgatgatcggaatttggttgaattctatgtttgggatgagcgcgagcgacaagatgatgatgcacaaggttgtcaggaacaaaggacaggcggtagaacacgcaccacgggcccacggattatgtttcgagctcacaatcgatctgatgctcaaattttgtccaacgactcccatattgatc

SEQ ID NO: 142250 - DNA, 1131 bp, Glycine max
  Clone ID: PAT_MRT3847_99466C.1
cccacgcgtaagtcaacgcgtccgcttcaagatcaagttgtggattgatatggtcgtcggctcatcttataaaaagcaaggtcaatattcgactgattaaagtggtcctacccccaaatctcgtcgtactacaattggcaaatcccaagacaacgttaagaagaacataggcaaaaaaaagaatgacgtggaaacaagaattcaaggggtatatgggagcttaccatttttgtttggtaaaaaggcaagttagtatcagtcaaatgaatggaaaatataggttcataaagctaccaaagaggatcttgggaccatcaaataggatgttggaatgcaattcaacgataatgttaattaccccatatgttttgtcaatgcaccttcttttggattgatgtacacgcatttcgatttctgtgaattgtgaagcacttaatttagagactctaatatttgtaaataacctttgcacttatatcatcacttgaagttgtatccagatgatgaaaagagttccatgtccacaaagaagcctgttgttgtggagttttatgatgagatagttttccctgatccttctgaggcttttttagctcgtgtgcaaaatcatccagctgtgaacttgccaagattacctgctggactcaccttgcctccttccatacctgttgaggatgcaagtaaaaggaggaaaggtgataccaaagatcattccttaagtcaatggttcatgaatttctcggaagcggatgagctcttacagcttgcagcagctcgtcagcaggttcaagctcatattgctaaactcagacgacagataagcttgatagatggacagcatcagcagtttaaatcttcttctgacctgtagatgtacaattaggatctttgaggtttattttctaattactgagagcagaagaatgggttgattatatgcttctaatcagctagttgtttcttcagctgtattgtaacttatttcattttttgtctgcggtgttgtaatgttagtgtaccttttgccaataataagcggcccaatgtgtatgatttaatcataaaagtgaaagatgttgtcctttttatttctgataatatatattcaatacagctatcaaatttagatta

SEQ ID NO: 142251 - DNA, 552 bp, Glycine max
  unsure (1)..(552): unsure at all n locations
  Clone ID: PAT_MRT3847_99467C.1
tataaaatatatgtcaagtgacaaactccatagctcttgtaagttgaatacaacccttccaatagttacgcaattgctatgggacaatgtggatgaattgaaaagatgctaccaccatagaggagccacattctaaccaaagcttcatcaatcctctattgaagattgtctcaattgcaatcatggttgcattgatctccacatgcaaagagaaggagatacctaaatgctgatctccacatctaatctctgaagataccacgtaccacacgcagcaactccaggttaacccttggcagccccgttaacgttaacgttgcatttgattcatccacaaaaggattttgataaacagtaaaagagcagagccaccaaaatggccgttgagggaatagccgttgatgcttcttcagccaacaatggcttcaacggcaagataacactctcagttgtcctcacatgcatcgtggctgcatccagtggtctaannnnnggatatgacctcggaattacaggaggtgtcactacgatgaaaccatttcttgaaaattc

SEQ ID NO: 142252 - DNA, 956 bp, Glycine max
  Clone ID: PAT_MRT3847_99468C.1
aaaaaaaacacaaaatttatctttaatattattttcatctttccttccaaacattcttggagccatcggaattaggatgggcaaatcataaatgatcatctatgaacccacagacttgaatatgttgacaaacaagtgttaatctgagatgtgtgatagttaggctgtcctcaaagacttttccttccatgtaacgagctgtaatgcttcatgtagaagcacttgtatgcaatgctactaaagaagcatagtcacctcccttgttgagtaatgcttcatgcttgcccttctctgctatgaccccatttttaactactgcaattaaatctgcaccctttatagtagatagcctatgagccactactattgtggttcggtccaccataacacggtctagtgcatcctgaaccactttttcagactccgcatccagtgcacttgtggcttcatctagtagtaatattttcggactcttcactatagctcgtgcaattgccacacgctgcttctgtcccccagataattgaactcctcgctcccctactaacgtgtcataacccttctgcaaactactaatgaaggtatgagcatttgccaattctgctgcagttataatttctgcctcggttgcgtctgcttttccatatgcaatattggctcggatggtgtcattaaacagcacaggctcttgactcaccaggcccatctgttgtctcagccatttaacttgcatcctttggatttctgttccatccagtgtaatgtgacctgagtctgggtcataaaatctttgtaataatgaaatcactgttgattttccacttccactttctccaaccagtgctactgtctgtttattgtatcagtatactcaatccattagtttaggaagaacaaattagagtagtgaagaaggcaagatgtgcaaattagaaagttaccttgccactcgagcc

SEQ ID NO: 142253 - DNA, 1530 bp, Glycine max
  Clone ID: PAT_MRT3847_99469C.1
tattttttgatgagcgcacattatcgatctcctattaactactcaaatatacagcttgaaagtgcttcagaccgtgttttttatatatatgagacattacatgaatgtgaaagctttttgaatcagcatgatcagacaattaggaaggattccatcccaccggataccttggatattattgataagttccatgatgtttttttgacctcaatgtcggatgatcttcacactcctgttgtattggctggaatgtccgatccattaaaatcaatcaatgatttgctgcatacccgtaaggggaaaaaacaacaatttcgaattgaatcactttcagctttggagaagagcatcagggatgtccttactgttttaggacttatgcctgcaagttactttgaggttttgcagcagcttaaggaaaaagctttaaagcgtgcaaacttgacggaagacgacgtcttgcagaaaattgaagaacgggctactgctagaatgcaaaaggagtatgctaaatcggatgcaatcaggaaggatttggctgtacttggtattactcttatggacagtccaaatggcacaacttggaggcctgccattcctcttccacttcaagagctgctctaagtcaagagttgttcaacatctccaaagcaaaaccaagaaatgtaagttactaggttctggtatatggaaatcaattataagggatgccacgggtgtatctcgctatcaacttctcagaatgataaaggcgaccccttcttaactcttgatgccgtaaaaacatggattacaatttacgttttgatagagatgtgcttagtgtagttgtcttggtgaccaatattgaattttttttttttcttcatataccgggcttttaacccctagagtattcatagtttcaacgaatttgagtttcagattaatattaaaataaatagtcgcactatcactagagtagtgttatgtttctactttctagagtagcttcggtttaatattgagaaagacattttttttgtggtgataatgaattttctgttgtttttttttatggacagtccaaatggcacaacttggaggcctgccattcctcttccacttcaagagctgctctaagtcaagagttgttcaacatctccaaagcaaaaccaagaaatgtaagttactagttctggtatatggaaattaattataagggatgtcacgggtgtatctcgctatcaacttctcagaatgataaaggcgaccccttcttgattcttgatgccttaaacacatggattacaatttacgttttaatagagatgtgtttagtgtattgtgttggtgaacaatattgaattttttttttttttcatataccgggctatttaacccctagaatattgagagttgcaacaaatttgagtgagtttcagattaatattaaaataaataatcgcagtatcactagagtagtcttatgtttctactttctggagtagcttcggcttaatatttagaaagccatttttttgtggtgat

SEQ ID NO: 142254 - DNA, 386 bp, Glycine max
  Clone ID: PAT_MRT3847_9946C.1
gcgaccttgcttgagcttatttgcatgaaagaagtggagtgatttttaaccacagagatatccatgtcatcgtcatcttattccagacaggtgacatctatctaaacaatgatacaaggtatgaaacgagagctgtacaccatacccatatgatcacgtgattggactgaggctgacaccttgagtgctcctgtggacttaggccacccatgcacaacgatgcccaatattatatggggttttattcacattcacgcagcccctgctcttatgcactggcggtgattcacgctactggaaaaagggcttcattatctaaaggaacctacacactttggggatgaaaacgcatgctcgctccgttatgcatcgggaaagaagggata

SEQ ID NO: 142255 - DNA, 158 bp, Glycine max
  Clone ID: PAT_MRT3847_99470C.1
attcccccccccccgcctccgacggtgccagataagacagaacgggccatgcccttaactttacgtgaccacatcttcgagcggacatttattaaaaactacaagatttgaatctcccattaatgcttctgacccccttttccacgatctccaattcc

SEQ ID NO: 142256 - DNA, 292 bp, Glycine max
  Clone ID: PAT_MRT3847_99471C.1
gatgaaattgtttttactaattgagactggctaatacaacagactctgttctcttaattgtgaaccaaattcttaccctctggataaaacgggtggtttgccaaactattctaaagacaaaatctgtgccaacaaaatccataattcctgcttgtttgcaccacttaaaatatgtacagcagcatcttttgcctatcacagagaggttttgacaaaatgaatgacgggctagaactggttaagctctccacatagggcatgcattttcaaatagggttggttacttgggggg

SEQ ID NO: 142257 - DNA, 288 bp, Glycine max
  Clone ID: PAT_MRT3847_99472C.1
cttgccggcagatttgccgtgctgcactgtgtgcacgtgcctccttgctttgggggggggggggggggggggggggggggggggggaatgaataatagtaaatagggagagagggagcccaagtagcataacccactagaaaaaggagtataccagtataggaggctaacttgttggaggccaaataagcgggggcacaaaggtgggggaattgaagggggaattaaaatctgggaagggaaaatagccctaggtgccaaaggttaaaaaaggaaggaaatttgtttg

SEQ ID NO: 142258 - DNA, 552 bp, Glycine max
  unsure (1)..(552): unsure at all n locations
  Clone ID: PAT_MRT3847_99473C.1
ccattgcattttgattctagcaagcagagctttggtcaatttgctattgaccttctcggtggaggaattttagtggacaaaactggagattggatcacacttatacaaaattctgcaattagtaacttggtgagagatgctgcttggaagaaaggctgtttaatggttaaaattgggatgtctgggaatgcaaccctcaaaaggagtgattgggccttattgggaccaggggttttaacaaacaagcaccgttccgaacattttgttgcatggtaggggacaaaattggaaacaccattcttgggattggatcttcccaataaggattgtggccttaatattggtttggaaaagtggagttctgagtgggcaaatcaaacttcatggcattggagttttcttattgacaatcccaaacagtctacagtttttgatattctctggggaatttctcaagattttgaaattgctggtaatactcttatgccagctttttctgttccacaggctactgccagatcttttgaaaatgcngaatcctctgcatgatct

SEQ ID NO: 142259 - DNA, 475 bp, Glycine max
  Clone ID: PAT_MRT3847_99474C.1
aaatatataagttggaacatcaacacaatggataatcagttgttcacatagtctcatacaagcatgactgaaccaaagacgcttctttggaaaacctgacttagaatcctcaatttactggaaattcttttaaaacatgaatacatgctaagatggctctctgaaaaatcgtcatggaaggtctactcttctaagatgatctttaactaaaatccatgttagaaagatattcctctaaaacggttcttagcatagaatcgtcgcagaaaaggaccttttttctaagacagtcgcttatgaaactatcatataaagtacagactttctacgacgttgcctacgatgatggcggttgataaccggcatcaactggggctttgtaccgacataagcttgcgggtggtgcattagtgtcttaaggagtgttaacagtgagtcctgaagaatgaccgaacactggatctagtcctacaga

SEQ ID NO: 142260 - DNA, 530 bp, Glycine max
  Clone ID: PAT_MRT3847_99475C.1
ccacgcgtccgactacattgcctctaaacccgtttgtggtgatgatagcgaataaatggcgactaacaggagcgtgggatcgttctaggagggtgattggaaagggaagagggtgtgagtgctggtcgtactgagcgtgcctttgaatgacaacctttacatctgcgataatactagaggctgggctggtgctatcaccataaagtacttaactggtaatggatccaatgtgatcctttatagacattatagacatcctaaaggtgttacacctaagatacagtttgaagcctgttgtgccaaggttgtttgaaattatagaaatttatgttcagatggtaaatgactgtattgatgaagaagttgacatattttttgcacaacttccacaaagtggtgtcttgcttttagagaatgatatgatctataatgtggatgatatgaatgaccctcattttgcatgagaagattgcttgtattgctgatctctacatgactgatgctttcagtgctgtccacagagctcatgc

SEQ ID NO: 142261 - DNA, 193 bp, Glycine max
  unsure (1)..(193): unsure at all n locations
  Clone ID: PAT_MRT3847_99476C.1
gattcgctcgagccagcatctcttatgatatctcaatgcagccatgtacattaacctttgctagaacaatcaacanaccgctatgaccatttcacacagcgtgggacggctcatattacttccaccccttactctacatatctccattcagatatcatacgagatactgccctcaatcctatttccatgcttt

SEQ ID NO: 142262 - DNA, 452 bp, Glycine max
  Clone ID: PAT_MRT3847_99477C.1
ccccccccccccccccccccccccccccacactatccacaaactgagacagcttggactttctataattacaaacctgaacgtacatcgaccccttattgatatgtcacaactactttggtcaaatagcaccgatatttctgaactgcctgatggtctaattacgtgcataccagatgcgactaagcccttgcctgtgaattttgccaagacaaaacctttcatgaagaagctgattgacttgcattttgcgggcaaaactttgatagagcatatttccttatgtgcttgtactaaacaccaaattcgaacttttaacattgttttctacatttttttgaaatactggaggagatgatatgcgcccttgcttgacccagattcaactcgctaggggccgacccttgcacctccacacctttacatgatgcccaaagcatcccctgcatattt

SEQ ID NO: 142263 - DNA, 222 bp, Glycine max
  Clone ID: PAT_MRT3847_99478C.1
ttggtcgcgtgggggagcatacaattctattctggaatatgatgatagttccgatccggcggttatcgctggcggcggggtatgtgtatacttcatacctgtaggttctcccagagaatctgttcttgttattcatgacttatggtctacaaattgaatccgatgatttttgtagttagaccacacctcaatgtttcaaataactacttatcatcagttatc

SEQ ID NO: 142264 - DNA, 259 bp, Glycine max
  Clone ID: PAT_MRT3847_99479C.1
tgaaaggggagcgcaggatgaaaacaacattttattcattcatcagaggaaagaacagattactctgcatatgacgccccaactatttcattttcaccggtcgatcaaattccctactgacgtaaataaacattatggcacactcagacatgctttgccatggttttactaaacagaatgctcttgcgggggctggatgctataccggactcctgggaattgctggccttcattgaccttgagaatcgctgctgccccc

SEQ ID NO: 142265 - DNA, 257 bp, Glycine max
  Clone ID: PAT_MRT3847_9947C.1
cggtgaaacactaaatagcgccttgggagctatcgttgattcggagttagggaccatacgcaggcatggccactgctaccaatgccgccgacgccccatcacgccagctctgcgagagggtagctgccgtccagatgatgctggtcgccgacgtacacctccgtaccatgatctgctactaacaaatggaacgttacattttcaagcgccgaaactacagtattgacacttttaaccttgtgaacacgcgcgagaag

SEQ ID NO: 142266 - DNA, 180 bp, Glycine max
  Clone ID: PAT_MRT3847_99480C.1
aaaataacacacacttcggacagggttacgacaattaaaagaggggctgaaattttcaaataggccaagcattcttaacaggacgggcatgcctaattccctttattgaattaaacaaacgaacatgcgaaagaaaacacaaacatcggtttacaccaacgtttcccttttttcattaga

SEQ ID NO: 142267 - DNA, 328 bp, Glycine max
  Clone ID: PAT_MRT3847_99481C.1
ggtttttgttggcaaagctagatcatcacaaccggggagctttttaaatattatgggggattacaaaacctgtgtctcgggctctgccttaccactttccttttatctgagggtgacctatcggatgttgcggttatcatggtgccctatgtacggtcacactttggggaggaaccaaaataacctgaacgttcctacctacatctgggtgtggaatggcacccttgggggtacattttcacattgcattaggctcatttttaacgctcccagcttaaacacaagattagatacgacatgggactactgatggttttaatatttcgac

SEQ ID NO: 142268 - DNA, 378 bp, Glycine max
  unsure (1)..(378): unsure at all n locations
  Clone ID: PAT_MRT3847_99482C.1
ctcaaaggccatgactgggaagatgttgcaaaacatgtgttagcaagagcaaactccagcaagtcaccaaagactcagacacagtgcaagaacaagattgagtccatgaagaaaaggtacagatcagagtctgccaccactgctgatgcctcatcttggcctttgtattctcgcctcgacgttctgctccgcgggacgggactgatatcttcttcgctgccaccaccaatagcagcaacagcgatagcagcaccatctcaatcaccacatgctactataaataataaccaggctttggtgttgttggagccaccttcactggctgtgttacaagcacctncttctgttgctcctccaccaattgcaattgcacaaaac

SEQ ID NO: 142269 - DNA, 208 bp, Glycine max
  Clone ID: PAT_MRT3847_99483C.1
agagaaaaaccggtatcttttatggtaatcggactataacagtgaagattctttatgcttgaccagaactaggccaagcgaacacatgaaaattcctgcagcctacttgcatacctgggtcgatatttactcctgagttaggaagaactcctagctgacatcccacttagaaagaggcataccacaaggctgtctcaccttcaccaca

SEQ ID NO: 142270 - DNA, 1319 bp, Glycine max
  Clone ID: PAT_MRT3847_99484C.1
accttcgggcatccctatgtggtgccgggctatgacgacgccggccgcgcgatctcgctctattgcgacctgatcgcgcgtgcggcgatcgacggcatcaaaagaaaataaaaaaatgatccatagaaataatataaaaaattatgtgatcaataattttatttaccattttttccctttctctttgtgcatgttatccctcactggatccacaacagaaggttgtgttaaaggttatgactatgactgatgacaaaacaaagcaaaaggctatagaagcagctgcagatatctatggggttgattcaattgttgctgatgtgaaggagcagaagttgacagtgattggtcaaatggacacagtgaaaatagtgaagaagctgaagaaagtaggaaaagtggatataatatcagttggacctgccaaggaagagaagaaagaagaaaagaaagaggagaaaaaggaagaaaaaaaagaagagaaaaaggaggagaagaaaggggagaagaaggaagaaaaaaaggaagagaagaaggaggagaaaaaataatagagacaatacttgactatcatctggttttgtctaatttttcccttttttttctcttctttttatttattttgttttgcatattttcccatattcagaagcaattgtaagctgcaaaaattgtctatagagtctttttctttttttgctaatgtggatttttttctcaaatctgttgttcatcacaatcctttttgaagcatggatcaatcttcaattgctaagaaggaaatgagttttaataaaagagtatcctaagaattggccagtggacaagatacaaaggcaacatcaatttttaattcttccctttctctctgttttatattttctagtatagagaaccagggaaggtatggtaaattggttggcttcaaaattgttatttgttatgataataaaatcgtagtgcaaaactgcaaatgatttgattaaaaaaaaaaaaaaaaaaaaaaaaaaaaaaaaaaaaaaaaaaaaaaaaaaaaaaaaaaaaaaaaaaaaaaaaaaaacaaaaaacaaaaaaaaaaaaaaaaaaaaaaaaacatataaaaaaaaaaaaaaaaaaaaaaaaaaacaaaaaaaaaaggggggcccgtttttgggggacccctgtttttaccccggttatgggaatttttttttttttttttggggcccctaatatttattccggggggggctttttccaagcgggggtggggaaaaacccgggggttgcccccttattggggcgggaaaagaaaccccttttttccggggggggtaatt

SEQ ID NO: 142271 - DNA, 243 bp, Glycine max
  Clone ID: PAT_MRT3847_99485C.1
cccgcgcgaagacaccacagagggggggggcgagtggaaaagaatccccggtcaccccccgcaaaaggacaccacaggggggcgcccgaggccgacgaggcggggcgcacaaaagggacgcccaacagcgcagcgaggaccgcggacacggccccgggggcagacagggtggagacgcggaggggcacgaacgcacacacccacagacccccaacccgcacggcgaaagacacacgcacggga

SEQ ID NO: 142272 - DNA, 282 bp, Glycine max
  Clone ID: PAT_MRT3847_99486C.1
atttttgaaacagagaaacaaaaaaaaaaaaaaaacctcttccaaagtagaggcagagaatctgaaagctagggtttgggatcccgaagaacaagggaaagggaggaaagacccggaagcccggtaaaaacggggcggacgccgaaaaccggaaccgggtatccagggaggccggacaggattacccgaaggtcccccgaatccccgaaaacggtcgctgcaaacgatgtgcatcgagggcacaaagcgccttggcaatacccggggaaagttccacaaaaa

SEQ ID NO: 142273 - DNA, 547 bp, Glycine max
  unsure (1)..(547): unsure at all n locations
  Clone ID: PAT_MRT3847_99487C.1
ttttaataaaataaaaaattacattacttagaaatgtatattcatttccaaaattggcaaattagtttctatgcttgattatctaaccactaaattgtgcaacacttggaatcaggggttgaaaatccggttcccacatttgcacttccaactcataggcttgtagttggagctaccttctcccattgtaaaaacaatagtagacacagttgaagagttgatcttcccgttctgcgcttgaggatttgttggtccctgaatggcctcacactgtccacaagacctgcaccttctctcacatcttgggggccttgaccctatttgtgccctcaccattgccttatcatcatgtactgcctgataaaaaccattctgtgtgggagtctttctaccttcagtaacaagtcccttctgggtccaacttgaaatgatcagaaagcaaagagaaatgctaagaaaactgagtctttctctctctctctctctctctctatctctgtatctctgtctatctgtcnnnaactccnnnnnnaannnnnnnngcccg

SEQ ID NO: 142274 - DNA, 1723 bp, Glycine max
  Clone ID: PAT_MRT3847_99488C.1
accgcaacattaaaaaaagagcaagcacgcctaacttcggaacccaccaagagacagctgcactgaacaaaacaaatttaaattacgatattcgtttcaagcagaggagaagggacacacagttcacacaataataacatcttcattcgtttacccacttttctttacgaccttattccttcgattctgtcttagaatgacgaattcactatctccctgaaaccatgactgtgagggacagtcatcatcattgagccttacccagaactaaaaaagcaatctttatcacatatcacaattcacaaagcttctgtggttgatgggtagaaggggaatccaactgtttgatgagaaaagagatgtttttttctctgtctgcaatttggggtttgaatccaaggatggctaccatcaattcggaggtttgtttgccagtgttggtcaaatgggaatgggggttggcgtgcaacctaacgacccttctgactcgcgtaacaatggtggcatgaaatttcccttaaacgaattgttcctcaagcatgttcaatctcaggggaaggaagaggctgttgaggaaggagttaaggggaagaagaataaaaagggtggtggtgtttcactcaagcttaagatcaggaacccttcactgaggaggttgtttagtggggcagttgccgggaccgtgtctcggaccgccgtggcgcctttggagactataaggactctcttgatggtggggagtagtggccattccaccactgaggtgttcgacaatattatgaaaactgatggctggaagggattgtttaggggtaattttgttaatgtcattcgggttgcgcctagcaaggccattgagctatttgcttttgttatagtacacaagaacctatccccaaagcctggagagcagtccaaaatcccaattcctgcatctttgattgcaggtgcctgtgctggaatcagttcaactatatgtacatatccacttgaattagtcaagactcgattaactgtccagagcgatgtttatcatggtctgcttcatgcattcgtgaaaataattcgagaagagggtcctgctcaactttatagaggcctcgcagctagtcttattggagttgtcccatatgctgctaccaattactatgcctacgacactttaaggaaagcataccagaaattttctaaacaaaagaaggtcggcaacattgaaacccttttgattggttcagcagctggtgctttttcaagtagtgcaacttttccacttgaggtggctcgcaagcagatgcaacttggagctctcagtggaaggcaggtttacaaggatgtgtttcatgcccttgcatgcatatttgaacaagaagggatccatggtttatatagagggctggcacctagttgcatgaagttggtaccagctgctggaatctctttcatgtgctacgaagcatgcaagaggatattgctagaaaacgatgaggaggattaggacgagtcaaagaagaaaatactttgtttcggtttagtcaagaaacagaactgcatactatgtttatgcataatcgaataacttattttggatttctcttatattacctcaaatcacatttataagcaattgagaatggaatattggttttgtcctttttatgttaagcattttggttttgtctcatggctaaaaaaaaaaaaaaaaaaaggacggccgccgccgagt

SEQ ID NO: 142275 - DNA, 558 bp, Glycine max
  Clone ID: PAT_MRT3847_99489C.1
cacagttcacacaataataacatcttcattcgttcacccacttttctttacaaccttattccttcgattctgtctgagaatgacaaattcacaatctccctgaaaccatgactgtgagggacggcaatcattgtgcaaaaaagtaatctttatcgcatatcacaattcacaaagcttctgtagttgatgggtagaaggggaatccaactgtttgatgagaaaatagatgtttttttctctgtcagcaatttggggtttgaatccaaagatggctaccatcaattcggaggtttgtttgccagtgttggtcaaatgggaatgggggttggcgtgcaacctaacgacccttctgattctcgtgacaatggtggcatgaaacttcccttaaacgaattgttcctcaagcatgttcaacctcaggggaaggaagaggttgttgaggaaggagctaaggggaagaagaatagaaagggtgggtggtgtttcactcaagcttaagatcaggaacccttcactgaggaggttgtttagtggggcagttgccggtgccgtgtctcg

SEQ ID NO: 142276 - DNA, 621 bp, Glycine max
  Clone ID: PAT_MRT3847_9948C.1
aataagaatatatcaactacgtttcaatcagagggcaccatgttaacaataatgaaaacatgcagaaaaataaaatccctaaacactacgaaatccagccacgaagacagacacagagtgccccaaaacaatccaaaatcccgaaaaagatattcaggtcaagggatgaaaaaaacacaacattaacagagtatcacaacaaaacacaaacaagaacaccctgcaaatcactactattgtttaaacctcatctttcatcttcatactcatagtgcatcttggtattgctggtactcggacacaaggtcattcatgttgctctcagcttcagtaaactccatttcatccataccttctccagtgtaccaatgcaagaaggcctttctgcggaacatagctgtgaattgctcactcaccctcctgaacatttcttgaatagaggtagagttgccaatgaaggttgatgccattttcaaaccagttggagggatatcacagacagtggatttcacattgttggggatccattccacaaagtatgatgagttcttgttctgaacattgatcatctgttcgtcaacctcctttgtgctcatcttaccacggaacatcgcagaagct

SEQ ID NO: 142277 - DNA, 388 bp, Glycine max
  Clone ID: PAT_MRT3847_99490C.1
gaaagcaccagtaattaataacaagctagctaataattccaatttgtagtaagttaagtgccaatatggtgaaaataactcctgggaacttggatgaatcttttaaccccgcctcccttaaagcttaattcccaaagttccacgcaactctgattttcgtgttcgctggtgtttgattcaccatcgctttacacgagcttacaaaagatgcagccttggatccaacggggctggtggcagtagctgtggcacatgcatttgcactgtttgtatgtgtctccgtcgccgccaacatctcaagtggccatttgaacccagctgtcacttttggattggccattggaggcaacatcactctcatcactggtttcttatactggattgccca

SEQ ID NO: 142278 - DNA, 378 bp, Glycine max
  Clone ID: PAT_MRT3847_99491C.1
tcgtctctacccacttggatcgaatctctctttccacttgccgacccattaacaccgcttccatgaattccaacctctcagtggctgaatcctccacagtcagtgacgagtctgaccttaatggctttgatggggatgacatgtatcgcctctcagggccctgtcctctgagtgggaatgatctctgttgtcaggtgcatgatgcttacagacccgaagactctaacccgtggggattgctgcctctactgaactactctgaggctccccttgctttgattgtcgacggtgagacattcaatggtgacatgccgagagaatgacctgcctgagatgactgtactgacgaaagcagtgcttgatggtgaccggctatgc

SEQ ID NO: 142279 - DNA, 291 bp, Glycine max
  Clone ID: PAT_MRT3847_99492C.1
atcgaaagttgcaaaggaagagcctaattcgctgcatcttaatggctgggatgcctaagtttgccacaaagacatcgaaatcatagggagaaaagcaattgacgatcaattgcaagggcaactgatttggatggcgctctgtttttgcgaaatttccaattacgaacttttgtcgtcccggaattttctacttcagaaatgaaagtgtgcaaataggaaagttttgtcacgattggattcgccacttaagatgagccattggacaggtcaattggtcaaattttgaacagt

SEQ ID NO: 142280 - DNA, 258 bp, Glycine max
  Clone ID: PAT_MRT3847_99493C.1
caagcgaactataggaggattgtgattagacacgtttagccaactacactggcaccatagtacaggggaaatctggtcctcaccttattgcttcttgcgatggatgcctaatgcaataacaagaaagacacttatgacagcgttttttatcagatggccaaactttcaaaaataacagggtctatcaaaggaagttaccattaagttttagatggtggaagaaataatgtcgatggcaaagcccacttaaaaaccaac

SEQ ID NO: 142281 - DNA, 315 bp, Glycine max
  Clone ID: PAT_MRT3847_99494C.1
ctagggaatcactggtgccaaattttcttggtaaaactagccttcataaggtaaaagtaatctttttctcaaattctggtgagcgtgctgctccatttatacgacaagcagctaaagactattgggcttctgcttcatttgctttcattctctggcgagaagaggaatcttcctattggtggggagcatttggggtggaatctgcacctgctattgtatttcttaaagacccaggtgtcaaacctgttgttcaccatggttcagtcaacaattcattttttttgaatttgatggaaaataataaacagcaagagc

SEQ ID NO: 142282 - DNA, 298 bp, Glycine max
  Clone ID: PAT_MRT3847_99495C.1
acggctgcgagaagacgacagaaggggccgtgaatgcgacaagctttgagtaagggttctctacttccattccttgtgcggcttgtcttatgacaccattttttttatatatagttgagtgatcattatttattctaaagtgtccacttgataactaatactgcctcaaattttattttacctttttatcggtttcgaattcaaactccataggcatctgaaaaatcgacaaaattatggctgttgtcgcaaaacatgcttcattaaacacttatcttggggggttgggggcttgcat

SEQ ID NO: 142283 - DNA, 499 bp, Glycine max
  Clone ID: PAT_MRT3847_99496C.1
cacaaatctcagcattttattatatttaataataccttggatggctcacaatcacataacataatgaagagcaaaaccaagtttgaatagaacaagttcgccgaaatgccatgctaggttagtttctactagcttgttgccgacttgccgccaacattaatttgcttcatgccttcgtctcttgcccattttattgctttagctgtgtcatatccaataatttaatggcaaattagcatcagcaaaccacttattatctccttctgtgacagttgacccatgggatgtcacaaatttgtttgtatagagtatagtagtagaagcaaaaatctgtatgtgctagacttgggtccaggctcatcaatgagactggtgtttcttagctctgccttgagaagctgttgattcgtctctcttggaaccctcaggtttacgtgcccatggtggtgcttgatctggaccataacggtaatcatagaagagctcctcactagcatcg

SEQ ID NO: 142284 - DNA, 465 bp, Glycine max
  Clone ID: PAT_MRT3847_99497C.1
cccacgcgtccggtttgagtgttgtaataattggcttgctgcattatgtatgccgtctagtgttccatattggggcatccttagtatttgttgtagattttctttgctgagcatttgatataatagctcaagtaggaaaatgaattgggtactatgaggaatgcatatcattggcttgttaaagaacaaatgaatggacaaaaagtggtggtggtgcggaaaaaaaaaaaaacaatataaaaggaaaaaaaattaaaaaaaaaaaaaaaacaaatacaaaagcctacaaataaatgggggggggccgttttaaagaacccaagtttacttccccgtgcaggcaaggaaataccttttttttggggccccctaaatcaatttccttggccgtgtttttacaacgtggggacgggaaaaacccgggggtacccaaatttaatgcctttgaagaacatcccctttttg

SEQ ID NO: 142285 - DNA, 358 bp, Glycine max
  Clone ID: PAT_MRT3847_99498C.1
accttttctcttcctcaactatctcgaggcattagggtaatcgtatcttggtcctacacaatacacatgaaacaactcagcatgaacatgccaccctcattaacattgctgataaccctatcaaagtgcaccttactattctatacaactactaaaaataccccgcatttcatatcatcatcaccgataacgatttctcaacactatatgcttcactcattcattatgcacgcatgtaaaccatctactgaacacctaccatttaccatcattttggcatctataatgaaaatttcctcactaacaatgcttctaatgatgacataccctagccattttacaccttccccagacaatc

SEQ ID NO: 142286 - DNA, 1840 bp, Glycine max
  Clone ID: PAT_MRT3847_9949C.1
tcgattcgagcgaatcggttcacggctcgagacggctgcgagaagacgacagaaggggacggacgagggtttcgtttcgggtttgacgttgttcacaatcactttctgcgcttcactcactcccttcgtgcggttttctttctttgtcgaactcgtgcgaaaatgcgtgagattcttcacatacagggagggcaatgcggaaaccagatcggagcgaagttctgggaggtggtgtgcgcggagcacgggatcgattccacggggaggtaccagggggacaacgagttgcaactcgagcgagtcaacgtctattacaatgaagcgagttgcggaaggttcgtgccgagggcggtgctcatggatctagagccagggaccatggacagcgtcagatctggtccctacggtcagattttccgacctgataacttcgtcttcggccagtccggcgccggaaacaactgggccaagggtcactacaccgaaggcgctgagttgattgactctgttctcgatgttgtcaggaaggaggcagaaaactgtgactgccttcaagggtttcaggtttgccactctcttggtggtggaactggttctggaatgggaacactgttgatctcgaagatcagggaagaataccctgaccgaatgatgcttacattctctgtgttcccatcccctaaggtttctgacacagttgttgagccttacaacgcaacattatcagtgcaccagctcgttgaaaatgcagatgaatgcatggttttggataacgaagctctctatgacatatgcttccgcacccttaagctcaccaccccaagctttggagatctgaaccatctaatttcagccaccatgagtggtgtgacatgttgtcttcgattccctggtcaactcaactcagatcttcgcaaactcgccgtgaatctcattcccttccctcgtctgcacttcttcatggtgggatttgccccactcacttcccgcggttcccaacagtacagggctctcactgtccctgaattgacccaacaaatgtgggatgctaagaacataatatatgcagctaatcctcaccacaatcattacttaacaacttctgcgatgttccgtaaaaaaataagcacaaagaaaggtgatgaacagatgatcaatattcagaacaagaactcatcatacttcgtaaaataaatccccaacaatataaaatccactatctataacatccctccaactaaattaaaaataacatcaaccttcattaacaattctacctctattcaagaaatgttcaggagggtgagcgagcaattcacggctatgttccgcagaaaggccttcttgcattggtatactggagaaggtatggatgaaatggagttcactgaagctgagagcaatatgaatgaccttgtgtctgagtaccagcaataccaagatgcaactgctgatgacgagggctatgagtatgaagatgaggaagaacctcaggaagatgaggcttaaaacagtgtagtagtgttttgcagggtgttcttgtttgtgtgttttgttgtgatactctgtttaacgttgtgttttttttcatcatcccttgacctgaatatctttttcgggattttggattgctttgggggcactctctggcttcgtggcttatctcttctagtttagggattttatttttctgcatgttttcattattgttaacatggtggtcgccctttgattgaaacgtagttgatatattcttataatttggatgtcgctcttcctgttaaggggtttgaaagttaaacatttcaggtttaattttacgatttagataaaaaaaaaa

SEQ ID NO: 142287 - DNA, 795 bp, Glycine max
  Clone ID: PAT_MRT3847_994C.1
acacaacagaaatcaaactcgtgtgcttctcaattcaaacccaataacaaaacatcaaacctcaaatactatatagcacaaatttatccaaatcaaactcggtctgaacttgaactaacaacaactgtacatataaaaatctatgcattcctgaaattgtttttaaaaattgttttcccgatcccaagaagagatgatatgactcatttgatttagaaaacggtgtcgtgtccctccctctctctgtgttccaaaacccaaaatcccattccggctacgattgccatgctggtgttaatttaaaaatcggcgtcgtagcaccagcaacatagggttagggttagggttagggttttgacgcatcgattgtggtcaaaatggaggcagagatggatcactacgcggtgctagggttaccgtccggcgaagaaggcgcgaaactaacggagaaagaaatcaacaaggcctaccgatggaaagctctcgaattgcaccccgacaagaggcccgacgaccccaacgccgccgccaacttccaacagctccgcacctcgtacgacatcctcagggacgacaaggcccgcaagttgttcgacgacctcttgcgcgtcaagcgagagcgcgagctccgcaatttgcagcgcgacggaaagcgccgcaagatggtctccgatctcgagcgccgggagcgcgacgccaacgcccccgaccccgccgcgaaggagcgcgaagaggaggccaggattgcgaggcaactcaaggaggagatcgcgaggattcgtgctatgcacggga

SEQ ID NO: 142288 - DNA, 190 bp, Glycine max
  Clone ID: PAT_MRT3847_99500C.1
ttttcaactaatccccaactggggtgtgaccaagtaaaccttactttttagcttttcaatttatttaaaccaatcatctgctcgaagtggtaaaaaaataaatatacaacttctatagtccccttttaattcactgttaagaaggaacgatgattaattgctataacaaaactgataccaatattcttct

SEQ ID NO: 142289 - DNA, 298 bp, Glycine max
  Clone ID: PAT_MRT3847_99502C.1
aaccaagattttttgcttaataattcatgattaattacattgcttttttttgaagagggttagaataagaaacaaactgttgttgcttatttttcaaaggaagacaaaaaatacactttggtttttatttggtcaaaatgtgaattcttactgctaaatagtaaataattttttgtaacacacttttttgctcttttccttatcggtcttttttcccgggtaatcataagattgaagatagtagtttactccaaattaagttgaattcatctatcacattgatttgagtctgggtacc

SEQ ID NO: 142290 - DNA, 155 bp, Glycine max
  Clone ID: PAT_MRT3847_99503C.1
ttcggctcgaggtttagttggtttggtattttcgttgtcattggcaatacttctctaccccagacagactgttacaagcaaggaagctcaggcatcagtagacaatttgttaggactatcattcacgttatgactttggcgatgccgttgtgttg

SEQ ID NO: 142291 - DNA, 624 bp, Glycine max
  Clone ID: PAT_MRT3847_99504C.1
atttaaccttgccttcacccaatcatatgaaaatgactgaagaggtaaaacatgatcaacagtccattacaaaagaaagggaagaatacacgagtatggacaactttcgagggatagtagtggaaggaaatagggatgatgttctagctataagtgcagctgaaggtgaagattttcacgggtcagtagtgcaaggaaattgggatgatgttattcatatgtgtgagaataagggtatgctttgcaagataatgatcaacgcaagcagaggcactgcactccacgtggcagtgagtgaaggcaacgaagttgttgttaatcgtcttgtggaatcaatgataaaccacaacatggtggaggctttggaattgaaagatgagaaaggtgacactcctttgcaccttgcagcatcaaggggactcaagcatatatgtgagtgcatcatagggccaaattatgaaaggaagtatttgattaccattcataacgaggagggtgagactccattgtttcaggctgcactctcatggcaaaaacaagcttttatgtaccttagttccctcatgcccgatgatgaaaactattcagttcttaattcgaggaatggggatagcatccttcatg

SEQ ID NO: 142292 - DNA, 218 bp, Glycine max
  Clone ID: PAT_MRT3847_99505C.1
accagtaggtcggtggtctttgtcgtcgacgaagtcgctctcgccgttccgggcctcgacgacgtcgtcttctgtggcgtcatcgccccggcccgttagcgatgccgaatgggccgggtttgggcttttctgaacgagtagagcagttacttactgggtcatgggtgggcgtgtctgcggaatcggaattgcaaagatttttctttttcttctacttt

SEQ ID NO: 142293 - DNA, 670 bp, Glycine max
  Clone ID: PAT_MRT3847_99506C.1
tttttgttttcttttccctttctttccaatttgttccgttgcacacagttatatatatagttcctctgagagccaccgaagcttatcacaaacttgcaccattggaaaaagaaagaaaatgagcaaaccatggatctgattacttggctttttgttgaagcattaatgatgacgacgatgatgttgtcttgtttggggtttttttcttcttatatattctctattttttgttttctcctcctactcacgatgatcctgcatgttggcagggtctggccaataagaagagtacttcaaccattcagcttgtgggtttgcaatagatgactccgctttgatatcagttgaagtgcaacccatgatgagttcctccaaaccagacgcagaccttcctccaagtttataatgttgttgctgctgttgctggaaattttcattttggagcattattctggagacatggtacgagttgtcgtctaggatgatggatgcatggtgaaggggtggaggagagatgatggtggagattggaagcgaaggactactgatatggaaggctgtggttgcaatttgttgctgcgcatgctgattttgctgttgttgttgatgatgatgtactgcatgccgttcatgtacttcattgcatgaccctgatgcttgcacttctctt

SEQ ID NO: 142294 - DNA, 428 bp, Glycine max
  unsure (1)..(428): unsure at all n locations
  Clone ID: PAT_MRT3847_99507C.1
aagaagcgcaccaccagaaaacnggccggaaanagaaggacaagcaggcaagcngnccggacccgcggcacaagagggacagagaagaaacgngaccgaacaagcaagcacnagancnnaaggggggggggacaaangnnacaaaanaaaannncaaccccnaaaacacccgnngnnaanancncaacggncgcnaaccaagngagacacagnggacagngaaancaaaaacacgcggggaagaacgcnaaagcacaacccaaacaanngnnnnaaccagggcagaaccgacaaagcannnaggccggnagccgcnngaagaagcncagcnggaggngcngccggancaagggcccaacaccnnncaggcaaaggggcggccccccccngcagcacccaagaaggcaccnnggngcgaaaagcacaac

SEQ ID NO: 142295 - DNA, 166 bp, Glycine max
  Clone ID: PAT_MRT3847_99508C.1
tactcccaaagctgcatcatgtgagttaacaagccaagaaagagatgctgcattattacggtacaagcggaacaagaaaactaggagatttgacacacacataaggtatgaatcacgaaaagttcgggcagaaagcatggtaagagtcaatggtcgattagccaag

SEQ ID NO: 142296 - DNA, 1348 bp, Glycine max
  Clone ID: PAT_MRT3847_99509C.1
tacggctgcgagaagacgacagaaggggtgtgtgggatgagaagatgatgaggaaacattggtagaagaaattggagagagagagagagagagagggttggattggttttcttcttccttttcctaaagagaatctaatctcaatcctcattacacacatatctacagatttcttcattcctctctcaatcttttctgttttcttttcccccctttgacatcctcgttttcgccgaaacaaaaacaactaagattttgttgtttgttttgtttttcttcttgttgttatttgactcggttgtctgaataggttgttgcagcagggtcgggagccacagctatgcagagccaagttgtgtgcaatggttgtaggagccttctgctttacccaagaggagcaaccaatgtctgttgtgcattgtgcaacacaattacctctgttcctccacctgggatggaaatgtctcaactttattgtggaggttgtaggacattgctaatgtacacacgtggagctacaagtgtgagatgttcctgctgtcacactgtaaaccttgttccaccagcatctaatcaagtggctcatgtccattgtgggaactgccggacaacactcatgtatccttatggagctccctcagtcaaatgtgctctttgtcactttattactaatacaaacaatggaaggcttccaatccctgtccatagacccaatgggacaaccaatgctggaacattaccttctacatcaacatcaatgccccaatctcaaagtcaaacggtagtggtagaaaatccaatgtctgttgattcaagtgggaaattggtgagcaatgttgttgttggcgttacaacggataagaaataacatcatcacatataaaaggtacagttcacgtcatgacgcatcaccacagttgctgtcacaggaagatattgtttgtgtatatgaatatatatatgatattgcagcctgcaatggtttaattgaaatcaatatttttccaatataagagttggacgaatatcatgtatgtatgaatgtatatgaggcggacaagtcgtgaaaaggccataaaacctgttttgtgtgattgccagagcctactttgttttttgcttggtacccatacccaagtcaattggttcattcggataaaatatgttgacttccaagtcctagactagtaaatgctactatttctttcatggcttgtgaagcttgtgcttttcttggtgatctgttagttacatctgttgtaatatttgatcttgtgcaagcattgcttcataaaatgactgatatgataaatttttaccagtcaaaaaaaaaaaaaaaaaaaaaaaa

SEQ ID NO: 142297 - DNA, 422 bp, Glycine max
  unsure (1)..(422): unsure at all n locations
  Clone ID: PAT_MRT3847_9950C.1
gcctgcatgtcgactctagaggcaaggcggaggggcgnggcatcctgccgagttattcccttactaacgtagaagtgttattcctagggcccacacatagggggtgacaagttcaaggcgccggactgtgtcatgtacaatgggactacttgccccaagaaccatctaaagatgtattgcccgaagatgggggcatacggaaaagattagaaactgctgattcatttattgcaagaaagtcgtactgggtagctagtacctgtttcactaacttgaaaccttgtcgaggccattgttggaaagacctaatggttgccttcgtcgggcactttcagttcaattctgatatggctcctgttaggatgcatctatagaacatgtgccaaatgggggacatatctttcaaagaattcgcccaaagg

SEQ ID NO: 142298 - DNA, 421 bp, Glycine max
  unsure (1)..(421): unsure at all n locations
  Clone ID: PAT_MRT3847_99510C.1
aaaaaaccagcgcgtagtcaactccgcccttttttttttttttttttttggtcacaatcatgtttcatctatcacataatcgcgctagtatataattaaattcatcccacccantcatatcatgagtacaatgacaaattagttagaactagaacacgagttacatattattattattgccttaattaattttcccatttcacccttttttttttgtttgagatcctaactatagctggtaactacagttaaaaactcaagattttaagccagtaaccaaaacttcttctgccaccttttgctgatgaggtaaccattgttgccttggcttctcttccttactcctactgtcaagcattctgcattgttgatgcagtgctcaacaaactcctccgaactgctgatactgtttcttccacac

SEQ ID NO: 142299 - DNA, 284 bp, Glycine max
  unsure (1)..(284): unsure at all n locations
  Clone ID: PAT_MRT3847_99511C.1
cgaccccgcgtccgttccgattccatttcgctcttctcttctctctcactttctctctttcactttttccaaaccctttcatcatttcttcttcttcctcataacgctgctgcttcacttctcccactttaggtttcgaacgaattgatactactctctctgtctccctttttccattgcgtttgtttccgttggcggggtggcccattgcgtgtgctttgtcgntttgggtcgcgcggtgcttcgcttgcggcccctgtgcgggcgggctcccctgctggggg

SEQ ID NO: 142300 - DNA, 469 bp, Glycine max
  Clone ID: PAT_MRT3847_99512C.1
gctttgttggcggacacatggcatgaatgtgcctatagcttctttatttgtgggctctgatcacaccattataagagaaaactatacattctaatccatgtagattgaaggaaccataccctctgtggatgaatcttctgaggcctcactagcaatatcgacatcaacagatttctagataacaaagacacaagggtttctgatatctccttttttcacagcgagcacactaatgttccccattttaatcattgaagcctcaatggcgtcaaaggaaactttgtgggcactgctgaacctgttgacaatggggatgggatccgcaccaggaggggagaacaggtcttgatcactgtgaatcgagcctttgttaacctgaagattggagaagtagaccctgtcaattatatcacgagtgacacggccaaaagttacaaggttggtaggtccaccattggggcatatttgg

SEQ ID NO: 142301 - DNA, 313 bp, Glycine max
  Clone ID: PAT_MRT3847_99513C.1
ttcgaatttagagagatcctgctaccagcttcagatttccactgttgcaaaccactgtttttctgaaacagaatgatcacaaaagaatcaacaacatcaagtcaaacgttcacgccaaacaaagtgttatattttgagtgtgtttttgctgtgatgtttcctctctgtaccatttctgtttttctgcagctgctcctacaaaaccatgtgtacatgtttgcattttgcaactgggttggtttattgctatgcgtctaaatttgacttccaccctattgttttccatgggaacaaagttaaatactgttgtagg

SEQ ID NO: 142302 - DNA, 216 bp, Glycine max
  Clone ID: PAT_MRT3847_99514C.1
gagacaatgggggagagcgagacaggagagcgatggaacggtgcgatgacagatctgacggtgatggacgccaatttctactttctgcagaggctactcttcacgaaagccgtttttgtggacgacgacactttatggacaggcttcgtagtcgactaccaagaccgtgtcatgaagctccttgaccaacgagtccaaaccctggagagagatggt

SEQ ID NO: 142303 - DNA, 450 bp, Glycine max
  Clone ID: PAT_MRT3847_99515C.1
acgaggaatttgaatgaattatattgatttctaaacgctgtactaattgttcttaattctatgaagatgcatgatattttctatcatttggcatctttggaatgagactgattgaatcttttataagtagaagttattagtttcttttggctcatgcatgcttttcctgtgggtactgcatcaagtagtagcgtgttgcagttgcagtgggttttaattttatatatgatgctataaacaagggtcctgtaacctcctttgcaccagttacgagtttaactagaacacacagtttaggttttaaaattgagactaggatatacctttctctgagaaacttgaatttgaatctgatgaaaatcagctaaaattaacttacttgaaaccaaattattagaggaagctgtatagataattaaagccaaagatgctcatcaccagaatagagct

SEQ ID NO: 142304 - DNA, 374 bp, Glycine max
  unsure (1)..(374): unsure at all n locations
  Clone ID: PAT_MRT3847_99516C.1
aaagtannaaaaatannaaaaaaccnnnctgtaaaggtgagagaactananntagagganntatttaaagggtcttaaagggattannaaaatgnntagtagtacctaatgaaattctacccaatctcgaggaattggatgtgaaagatttaaattccattnntaattctcttgcacaacttaatctcgttgggaaaagaaaattcagaatattnggaaattgtaaaatcaaaaccttagttatatttgaaaaagtaagtagtactagtacaaaatattactactatngttaaatggcatgtatcaattttcagttttcagntaacaaactgaggctttgaagcttgtttttgaaatacgtgccctggcctgga

SEQ ID NO: 142305 - DNA, 691 bp, Glycine max
  Clone ID: PAT_MRT3847_99517C.1
ctttatttatgctagcagcagcaaccgcgaagcgcaagccaccaccatgttccatgtttccaccgttgcgctgaatcctcaacctcacaatttcctctttccactccccgtttctacttcccgcaacctcccactttcacaaaccctccatttccccagaaactggaatctccgctctctctctccatcgctgcacctaacatacgacgattccgacgaccacgtcatcggcgactgcgtcgtgttcgaggacggcgttttcgacgaacccgttttccacaaccaccacctcaattccgacaatctcgccgtcgataagcccaagcccaagcccgggcgcagttggaggaaaaaagtggaggagacattgggcgagaatttggtcccggacaagtggcgagaggtacaggcggagataaacattacgaagagggagatgcggaagattgcgcgggaagtggagttcaacagcaaggttgaaaagaagagaagaggtttgattcctccttacaaggaggccaaattggctcagatgaagcttctcgattacgcctcttggtctccgggggggccaaatgtccctgaggctgaacctgaattcaatcgcggtggtggaaaggggctgaggctgaacctgaatttgaccgcggtgaacgtgtgagccctagaaccctagatggccgctctagtg

SEQ ID NO: 142306 - DNA, 517 bp, Glycine max
  Clone ID: PAT_MRT3847_99518C.1
atcaaatattattatgagcaataaaagagacagacttgaggtcaccgagtgttaggagcagcagccaccatgttccatgtttccaccgttgcgctgaatcctcaacctcacactttcctctttccactccccttttttacttcccgcaacctccaactttcacaaactctacaattccccagaaactggaacctccgctctatctcgccatcgctgcacccaacgccgcaatacgacgattccgaagaccacgtcatcggcgactgcgtcgtgttcgaggacggcgttttcgacgaaccgcttttccataaccaccaccacaatcccgacaatcttaccgtcgataagcccaagcccaagcccaggcccagttggaggaaaaaagtggaggagacattgggcgagaatttggtcccggacaagtggcgagaggttcaggcggagataaacattacgaagagggagatgcggaagattgcgcgggaagtggagttcacagcaaggttgaaaagaagag

SEQ ID NO: 142307 - DNA, 172 bp, Glycine max
  Clone ID: PAT_MRT3847_99519C.1
aaagaaaaaaaattatttccttacccgccttattatccgggatatgaagaatattacctttttttttacccttcggaataccataacccctatggtatggccggttctaaaccaaataaccttttaagaagggaatatgggatttttctcaagtggaaagggccaaaattaa

SEQ ID NO: 142308 - DNA, 1954 bp, Glycine max
  Clone ID: PAT_MRT3847_9951C.1
acggctgcgagaagacgacagaaggggacagacaagggtttcttccgggttcacgtttcacaatcactttttgcgcttctctcactcactcactcttcttcttcctcttcgtgtggttttctttctcgaactcgaacgaagatgcgtgagattcttcacatccagggagggcaatgcgggaaccagatcggagccaagttctgggaggtggtgtgcgcggagcacgggatcgattcaacggggaggtaccaaggggacaacgagttgcaactcgagcgagtcaacgtctactacaatgaagcgagttgcggaaggttcgtgcctagggcggtgctcatggatctggagccagggaccatggacagcgtcagatctggtccctacggtcagattttccggccagataacttcgtctttggacagtccggcgccggaaacaactgggccaaaggtcactacaccgaaggcgctgagttgattgactccgttctcgacgttgtcaggaaggaggcagaaaactgtgactgccttcaagggtttcaggtttgccactctctcggtggtggaactggttctggaatgggaacactgttgatctcaaagatcagggaagaataccctgaccgaatgatgctcacattctctgtgttcccatcccctaaggtttctgacactgttgttgagccttacaatgcaaccctatcagtgcaccagctcgttgagaatgcagatgaatgcatggttttggataacgaagctctctatgacatctgcttccgcacgcttaagctcaccactccaagctttggggatctgaaccatctaatttcagccaccatgagtggtgtgacatgttgtcttcgtttccctgggcaactcaactcagatcttcgcaaacttgctgtgaatctcattcccttccctcgtctgcactttttcatggtgggttttgccccactcacatctcgtggttcccaacagtacagagctcttactgtacccgaattgacccaacaaatgtgggatgctaagaacatgatgtgtgcagctgatcctcgccatggtcgatacttgacagcttctgcgatgttccgtggtaagatgagcacaaaggaggttgacgaacagatgatcaatgttcagaacaagaactcatcatactttgtggaatggatccccaacaatgtgaaatccactgtctgtgatatccctccaactggtttgaaaatggcatcaaccttcattggcaactctacctctattcaagaaatgttcaggagggtgagtgagcaattcacagctatgttccgcagaaaggccttcttgcattggtacactggagaaggtatggatgaaatggagtttactgaagctgagagcaacatgaatgaccttgtgtccgagtaccagcaataccaagatgcaactgctgatgatgagggctatgagtatgaagatgaggaagaacctcaggaagatgaggtttaaaacaatagtagtgatttgcagggtgttcttgtttgtgttttgttgtgatactctgttaatgttgtgtttttttcatcccttgacctgaatatctttttcgggattttggattgttttggggcactctgtgtctgtcttcgtggctggatttcgtagtgtttagggattttatttttctgcatgttttcattattgttaacatggtgccctctgattgaaacgtagttgatatattcttattaactatttggatatcattcttcatgtcaaggggtttgatccttgcaccacaacttgtttggattcccagttttagatggtttttcaatcgttttttaagggtggtgcgtgaattggcaatgccaaacatggatgtttgttatgtatttggataacataattatgttgctttacttgaaaaattaatccttaaaataatagtgaagtttaacacaactgtttggat

SEQ ID NO: 142309 - DNA, 377 bp, Glycine max
  Clone ID: PAT_MRT3847_99520C.1
attcaaaaaccaggaggaaatagtaacagtttaacccaaaaccccataaaaattcagggaaccgggccccgaaataattaaaaaggcaaaaaccgatgaattcaaataaataacccgaagaaggcccgggcttttttttaaccaaagaaggggaaagaaatgaataaacaaaaaaatggggtttccatggcaaccaggggggggggggggatagcccctgggatctggccccgttaaaggggggagccccgaaaactttgacccctttccaccgtgtttttggacaagaccctgtttttccgggggccggaaaatccccatttgggggggggaaaaaaaccgggggttccaagcctagggaggggaaaaccaccggg

SEQ ID NO: 142310 - DNA, 280 bp, Glycine max
  Clone ID: PAT_MRT3847_99521C.1
aaagggaaatctccacaagccattatggggttgtcacaaatacacaaaataaagatatgggtatgcttctttcattcattagcctctgaatagcatattttgttgagcaacataggcacccaagaaaaaactgcgcatgcttatgacataacagccattgagtacagaggaattcatgctgtaacaaactttgatttgagcacttacataaaaaggttaaagccttcaggaggagggaccccaaaagcaaatcttgaatcacatgcggggctagagcatg

SEQ ID NO: 142311 - DNA, 567 bp, Glycine max
  Clone ID: PAT_MRT3847_99522C.1
ctgtacacttgatgatcgacaactactggtccgggggccacaacgggtagccatgtgcatgtaactgtacgggaagtgttaaaatttagggtaccaatgcgcggcgagggtttacccggcatgttaaccaggctagtgggtagtttggcacgcgcagtggggcgatggaagggagaggagtgactagggtagggagggggtccgatatgcacaggaggccggatgaaatgcgccctaaccggctggcgacaacacacacgagggcgatggtgggaaaaggcgattaagccaatattaggggccgtaacctatgctacaattgctagtgcaagttgggcagaacctgacccggggaaagcgcaacttaggaacaatgtggcggttgcgcggtttggtattagtgaagttgctggtagtggtaatgttataaccgccgcttttggggcgcgcgcgggtgttggtgcctttgggtttggtacccggctatttggtgagttgggtggtagtgtattacaagtttaaactgtgtgcaatacaagctctaaattttcatacgtaatctcgcct

SEQ ID NO: 142312 - DNA, 358 bp, Glycine max
  Clone ID: PAT_MRT3847_99523C.1
cattcacccagcggttccggacagatgaagtgaaagcaatatggagagaagcaaatctggcaaaattgaatgggcttgcagagaagagcacttgatttgtcattcttgaggtgcagtcctattcttgggctgttgggcactcaattaagcctttagtgtagaatatttagcgtgtttttgggtgagttcctgcaaaattattttttttgttagaattgtttttgatgtgaagaatttatgtttggaagtttgtgttttataagttggtagtaaaaattcagtatgaaatttttgatccaacacaaaagctgcctaaagttgtttcaatttataatcaattcttcaacattagactatt

SEQ ID NO: 142313 - DNA, 487 bp, Glycine max
  Clone ID: PAT_MRT3847_99524C.1
aatttactaatcataattagtgaaattttggcaattcaaattcaaattaaagtgaaatttgaatagaaattcaaattttcctccaattttgtgtaacacttaggctataaatagaagccatgtgtatgtatttttttaactttgatcatttgagaaattacacttcaaagttcagacctctatttgaggcataaatttcgtgccctttctctccctctccctccactcatcttctcttacctttaagctcttatccatggattcctatgatggttagcttattctgtttagagtagattaaaaaaaaaaataataaactgattaaatcatgtttttgtatgcttgtttttgcatttttatggttcaaatttttatagatttactcttgaatcatgtttttgtgttgaatttaagttctatcatttttcagtcataatcttcttgtgctgaacctttagatctcaattttcttgcaaaatattgatta

SEQ ID NO: 142314 - DNA, 230 bp, Glycine max
  Clone ID: PAT_MRT3847_99525C.1
ttaatacgggatatgaaaagtaattttattggtgtggctaaaaggaaagtaaatctatcaccttcaaaaacaatccccatcaacaaacaatgccaaattagttaagcagcgatgataaacaactcatgacatcatggctcaggtaggtgacgggcctaggccgctggctgtggtaaggaggctggatgaccctccgataacgtactcatctcctagctgcgccaaggagg

SEQ ID NO: 142315 - DNA, 405 bp, Glycine max
  Clone ID: PAT_MRT3847_99526C.1
gacgtccttttttttttttttttttttttttttttttttttttttttttttttttttttagagcatgtataagaatttaccattttaccatcaagcagcagacgattatgagtaaggcaaacaatgcaactggcgactcattctcatcatcagtagcagcagggacaccctacgcgtatgacgggtcattaacagctgcagccaattagtcacgggcgtgaaacactgacagcagcagctcgccatagtcgccggtcacctcctcggcaatgcgctcgcgcaaatccttgccatacttcttcttggacacgggcttgatgtcgcgcagcacgatgtggtagcgcactacagccgagctcaaagcgttctcattcgggccaaaacccttcatgggctttttgaaca

SEQ ID NO: 142316 - DNA, 575 bp, Glycine max
  Clone ID: PAT_MRT3847_99527C.1
aaaaacaattttaaatcttaagaactaaaaaaatacataccacaaattgaatgagaaataataattaagcctagaatttataatacaacccataaaaaatatctcaggcttcggagaaccttaagatccaaccaatggatcaccatctatgctaccaaacttgtataatgaatgaatggtccagaggggggtcaccaataaagaagacctctgcttttgcacattacaactaatgatacattcccagacatcaatcaatacaagccaaaaaacctcacatggggtgccagcaaagtgatgtcttccttttccctctcaaaattcctgacccatcaaaacgacgcttttctctgcttttggcatcaagtaaggctggaaccacatgctccttccttctcaggatgatgacactttagacatatctttgcttgatctgttatatttcatgtggctcttcactagctgccctgcagctatagcagacatcagtgacagctcccctgctagaacagatccagcaacaatggtggccaaaagtctcgagttcgatcccggtgaatccttgctcgcaccct

SEQ ID NO: 142317 - DNA, 1885 bp, Glycine max
  Clone ID: PAT_MRT3847_99528C.1
caattccatggtctcgtttgggaagtatagggggaagagttttgtatcctagctgcaatatcaggtttgaattgttccaattctacaaagacaatgacaaatctgggacgccatcatcaccagaaagaagaaaaggcaagtcgcgaataattatcttgattgttgtgttggcaagtatttctgtgacgttattctttgcagcttactattttctacataaaaaagcaagaaagaggcgcgctgctattctgaattcggctcgaggtcgtggaattgctactttagagtcgttgcaatttgatttggctaccattatagcagcaactaataaattctcagaccagaataaaataggcaaaggtggatttggagaagtttataagggtattcttcttgatggttcacaaatagccgtaaagagattatcaaaaagttcaaagcaaggatcaaatgagttcaagaatgaagttttattaatagccaaacttcaacaccgaaatctagtgactctaattggtttttgctttcaggaagaagaaaaaatacttatttatgaatatgtgccaaacaagagccttgattactttctatttgattctcaaccgcaaaagttaagctggtctgaacgctataatattataggaggaattgctcaaggaattctttatttacatgaacattctcgactaaaagttatacatcgtgatctcaaacccagtaatgttctattagatgaatgtatgattccaaaaatttcagattttggtctcgccagaattgttgaaataaatcaagacaaaggaaatacaagtgtaattgttggaacatatggttatatgtctccagaatatgcaatgttcggacaattttctgagaagtcagatgttttcagttttggtgtcatggttttagagattataagtggaaaaaagaatttcagttcttatgaatcacaccgtattactaatggcctcttaagctatgtttggaaacaatggagtgatcacacacctttgaacacattggacccagatattactgaaaattattctgaaattgaggtcatcaagtgcattcagattggtttattatgtgttcaacaagaccctgatgctagacctacaatggtgacagttgcttcatatctgactagtcaccctattgaattgccaacaccacaagagcctgcatttttcttgcatggtagaatgcatgaaaatccagttgcgaatgaatcaagttccaatcaatcaatcaacacttctacaccattctcgaacaatcaaatgtctataagccaatttcttcctcggtaatttcttaacattcgtagggaaaaaagattctttgcatgtgtcttgactaaaggagttacagctgatgttatatccagatggatagttcagactttttaattggattaatcaggttatatggaagactgtatatctgtagcatactgtaaatgcttacctaggatgctgctttctcgaagaaacaggtgatgcatgctgaatgcattctcagtccacaatcctggatttttagttcctgcttattttggtagctaggtgctaattgcttgtttcaattttgaggacttggaagggtcatgtgtgaatgagtttgttaccaataaataataattaagggacatatcgagcatagtatactaaaaaaaaggtgtctgtttaattaaagagcctaatggaaggggttttccattttgaggccgggggctttcttgtgtctgctgctttgtttatgttctatcttatatttgtttttggtggtccaaaaaggggcatactgaccttgtgctgtagattatatcaggaaaaactgaagtatatctcgtgctgactagagataattattgaataat

SEQ ID NO: 142318 - DNA, 466 bp, Glycine max
  Clone ID: PAT_MRT3847_99529C.1
cggtcttttgggcggacgcgtgggtctgcacacaacttttgtgtcagacaaccctctgcagcaaagaaaactagcgtacttaaattctcagtcttctttacattgtctatgacagagtcgcacgtgactccgcagtgaaacctccactccatgggttgctcattgccctttgaagcttgaacttccataaagagcgagactttggctgcttctggaaatgagttctggtgttcagcttctgggtatttgcttggggctgcacttgacatgctccaccttcatttccggcaacataatgagtgttagaggagatgcaactttgcaagggactgttgccattgatgacaaggttgtgattcggaccatagatgatgattgcgtttgagcaactatggatcggcggccttctgaggaatgcgactatggaagatgcagctggggacttgcttttctttcaatctgagct

SEQ ID NO: 142319 - DNA, 592 bp, Glycine max
  unsure (1)..(592): unsure at all n locations
  Clone ID: PAT_MRT3847_9952C.1
tatcgtacggctgcgagaagacgacagaaggggattctggatttctttgtttctatttatcaatatgtgtcagccaatccaaattgaatgatgcaggggctgatttcttgtgctctgataagctttgacctaatttggctacaagaattcatccattgtaaaagattgttaaatttaaggagtatctgagaagtagtgctacttttatttattttttttctgtttgtgaccctatagattttatgaaagaaacactgttcaattttggtaggttttttgtaggtaccatcctgcttgcgtgggcatgactattgaagaagcaaagaaattggaacattttgtttgttcagaatgttcatctgatgatgacatgaagaaaccccatgctacattttctgtatcaccaggatctgatgtcaaggttgagccaaagcggcggaagagatgaccatcacgaagaataactcatcttgcgaatgcaactcttgctgaatttcgcgggctatgtggtagctgttgtgtgtgtattgtacagcttctaccagaggctataaacacatcattttatgtatttgactcangctatgtatgt

SEQ ID NO: 142320 - DNA, 239 bp, Glycine max
  Clone ID: PAT_MRT3847_99530C.1
atatataatattataataaattaatagcaaaaacaaaaggtaaggcaatagcgaacggcagaacagagccaaagtatgaacacatacaaagagcacttgaacagtggaagccaaacgttcggcaaatgcacgtaccactaaaaaaacctaaaccaagccaaagacggactagctcacatttagcatggagccaatcaccaagaggccatacaaagtgaagagtactcactacttgaaag

SEQ ID NO: 142321 - DNA, 435 bp, Glycine max
  Clone ID: PAT_MRT3847_99531C.1
ttcgtccgctttcaccacctgcaaagagaatttgtcctctttgctgtccaaacataattgcaccattgccctgctatgctcaatttcatcatgaagcctaactaccagtctactcattgtgtcaaagtctctattcaatatataagttccctttgctgctataccaagctgatcataaactttactctgagaccctttttctgaaaattcataggctctaagcttcctcttaaaatgcttaaatggaaaactaagaattgctggtcccataataactgctgttagagtatgtgctgttataaccatggctgtgattgccactatgccacaagctgttgtgacacaaacctcaaatgtattcttcaaatactttataagcttaattttccttccactttttttcttattgactttagatggtgcaatattgatgag

SEQ ID NO: 142322 - DNA, 695 bp, Glycine max
  Clone ID: PAT_MRT3847_99532C.1
tgaagctgctatagatgaagttgaacatatgtcctcaggccctttgtttcttcctttgaaagattttctgctactaccctccatgttaacaaaatagacaatctattagtctggtatatattattctctacctccttatatgtgtcttaccaagcaagtgtaacacgatttttattccaaaattttcacttaactttccacctaccatagagtaacaaagacagggtgacattttgcgtgaaatttgaatacatatcagattcaatttttatgcacagataaaattttgacagaccttcaaagcaagcttcttcatctggttcattgctctaaaccatttcatcctaattaaaacagcactgtctggatgcttgtctgatgcttcaccaccttccttcaaccaagggtgttcgaaaaatatggaatggggtgatgacagcatcaatcagtagttaaactatcagaatgcaaatgggtgaaaatagttaccaagggcatcagcagttgtaatgcattccttagggtcacaagtcagcatttttctaaccaaatcttttgcagattctgaaatagagggccatggctcgttgtccatatctaacattccttccaaaatagcatcaaacatgcctttttcggtttctgaagttgaccaattcattgatatataaggtcattaatcaacaaaaataaag

SEQ ID NO: 142323 - DNA, 373 bp, Glycine max
  Clone ID: PAT_MRT3847_99533C.1
cggaagctaaaacttttattgaaacccttttagggggacatatactttatatagctccccctttacattttacaagatgggtgaaccaacaaatccctttacaaaatttgcttgcagttgccaaaaatccaccacagccccaacttttaaaatatgtcaaaaatttgggattaaaacacttgaagctttttgcaaactaacagcatattggcgagcccattgggcatagggaaaaattttttcggggggcggggaggccactaaatcctttggagggccccgacaaggtagttccccaaccttgaatatatccagaaaactaatttttttttaaacaaacatttttacaggtttttcatttggtggactaaaa

SEQ ID NO: 142324 - DNA, 270 bp, Glycine max
  Clone ID: PAT_MRT3847_99534C.1
gggataaaattttaattctattggacaatatggccaatgcccattaaaagtacacttttttagcagattctagggaactgtttattacaatttactagtcatcataacggaaggcatataattgtttgcttactcatgttcaatgtcactagctatttgctatcttatgctctggtgaactccgtctggatttgtggatggtgtttgtcgtctgtgctaggtgactctttgatgctgggagctggtgcctgtgcgtggttgtggtatgtg

SEQ ID NO: 142325 - DNA, 385 bp, Glycine max
  Clone ID: PAT_MRT3847_99535C.1
acggctgcgagaagacaccaaaagggatgccatgtaaatctcgacattccttcactaaactacaaggtgcgggtctctatgtgagagcgctagacaataataactctccaagtgccacaattgcctgtgcatgttcgtttttatcacactcacctatatcttccatatgaaaactcattactctcctattcttaaccacccttttagcgtctattcaagttaatgccataaacagccaattctttattaaagtcatccttctcaacaacaacatcttaaagactgtcgttcccaaaaatgaatagccaacttaacaagcgaaatcaaccaccttttttcacccctgatacagaaaacagctatagtttatatggtcatgacactg

SEQ ID NO: 142326 - DNA, 578 bp, Glycine max
  Clone ID: PAT_MRT3847_99536C.1
ctatccttattcctgttacacattctttccatcacagattttgcaacataccttatttcccatggggcatcattaaacacaaaaccaatttacctaaaaaaaaaagaaaacttgttaacacacgcaacacggtcgaaaaattaggccatcaggacctctttacctcccattaaatggaacagtttacatattccctccttaaaaaaatgggtttaaccaaaaatctcgttctcaggttccactaggagaatataaaaaaataccgttgtctgccccttcgtacacggaatgatcctcctaacgcgttcccttggaaaacccatttccaaaatactgaacaactttaacttggggggcccggtacaaacagggggaaaacacaggagggagaagagcctgtcatctccgaatgaagggggggccataaccaccccggcgatctattgacattcgtgggtgaggcttccgccaaccccggggcaaggcttgtatgactcgggaacgctgggggtggcgtgaaaactgacaactttgccctattggaaggggatcttggggtgacgcgcgtcgtgggggat

SEQ ID NO: 142327 - DNA, 547 bp, Glycine max
  Clone ID: PAT_MRT3847_99537C.1
ccactctttttttttttttttttttttttttttttttttattttttttttttttttttttttggtttttttttttttttttttttttttttttggggacgggggggaaacccaggaaatacgggacgggaaccggcgggcgacccaattttccttaaaaggggaacaaaaaaaaatgggacaaaccaggggaaaaagggtctcgggggaaaaaaggatatccggccaaaatcccaaaaaaaaaaaaacccggaaaaaaaaagggaaaagccgggggggccaaaagaggggccaaacccacattaatggggaggggcccaccgccccttttaaaggggaaaaacctggggggccaccataaaaaaaaaaccgcccaacccccgggaaaagggggattgctaaatgggccccaggggggtttttcttttaacaagggagacgggcaaccggggatggcccttaaccgggtgtcccaaaaaaagagacaaaagggccccaccctggggggccccaagaggcaaaaaaccggtcagaggggggcaaaaggg

SEQ ID NO: 142328 - DNA, 191 bp, Glycine max
  Clone ID: PAT_MRT3847_99538C.1
tgtaaagggttggcattgacccctttgcacaacggcaaagacggtgttgctgtgataccagactattgaacttgcgtccgtctccagtagttcgcagggttttcgttttcccatttccacattttttgggtttgggagggaagcagactcactagaattaagcacttggttgctccgtacgacaccgatgt

SEQ ID NO: 142329 - DNA, 430 bp, Glycine max
  Clone ID: PAT_MRT3847_99539C.1
caatctcacactcatgtctcaagttatcaccctcagaaagcccgtcttcgtcaaggtctctgatttaaagcctggccaaaatggtttcaatgtttaccttaaggtcgttgaagtcaaccacgaaaaggccactaagatcgacggaactaccctcgaaattgctgaagccctctgtggtgatagcactggtgttgttaaagtcagagctattggagaaaatgccgctaaaatccaacaaggaaaagtcatctctatcagaaacggtagaagtgaagtcttcaaggagagaatgagactcgaagtcgacagatggggcaagatccaagaagaaaccggagttgatgtccaagatgttaaaaaagataacaacctttccgatgttgcttacgaagttaagagagttgtcgtcaacaccagagatggtgaaccc

SEQ ID NO: 142330 - DNA, 737 bp, Glycine max
  Clone ID: PAT_MRT3847_9953C.1
cttcaacttaaagttaaaagaagtaacatttgtcataatgccacagctagagattctacctcattgggttcaaggatgtgctaacacattactatccttggatctatcatactgcctcaatcttgaggtgcttcctgattggctgccaatgctaactaatctaagagaactgaatattgatttttgtctaaagctgcggtctcttccagatggcatgcatcgcctcactgcccttgaacatttgcgaatcaaagattgtgatgaattatgcataaaatacaagccgcaagttggagagtgttgggaccaaatatcacacatcaagcagattacgattgatgaacaaaaaatctggaagaagaggtagtggaaaagaggaagaagaattcgaggaagttgaaagctttaataaatgtcgaaggccttttcttttttatggtttctgtaatgcagattgttgttcttgagcattttcttaatctgttttgatttatgtcctccacattattgtactagtccactatagattgcactacggatgtttctttgatgtagaccagtatgatgatatctcttttatcttcctctttttttcttttttttcttttatggatacttcaaaaatattttggtttgacggaggggaagttcaaatgttgttgcaaattatatattgataattcagcttccacttatattgattgatatcctgatgatgatcaaattataattttatc

SEQ ID NO: 142331 - DNA, 614 bp, Glycine max
  Clone ID: PAT_MRT3847_99540C.1
aaaaacaactaaacccacatactctctctttctctctcctctctctctctctctaacatggaccaacagcagcgccacgtcagcagcggaactactaatcctgtggccgtgctccgcttctccacggggcgcgccttccccttcgcacgcctcatcgccgcctcccgccgccgcctattcctctccgactgcgccgaccaccgatcggacgacgacggagacagcgacgccgacgccggcgagtgcgcgtactcgcgcgcggtgctggtgctcgacatggtgtggaacctcgccttcgtcgacgccgccgccggcgtcctcccctccacgctccgagagcggacagcgacgccgctgaggctctggctctgcggctacgccttcgagtgcgtccttcacgtggcgtgcgtgtacatcgaatcccgaaccagaattgatgattccttctctcacactacctatagcattgagaagaagctggaggctatggacactctggcatcatctgtttggtgaaggcctgtattcaaaggaaggatactaaggtaactaatccgaaggcaccagttaaccccaagttagctgttatgcctacagccatatatcccgccaag

SEQ ID NO: 142332 - DNA, 519 bp, Glycine max
  Clone ID: PAT_MRT3847_99541C.1
ttaaatttgtgtcctcttcatcttcaattaatttagattgccatgtcctaaaatatttttaaaatcatatatgaaacaataataattatgttgtcgactaccatattttttaaaatgtatatttgcccccatgcatgcatagtaagggtatctatgaacaacgacgtatccatcattgccgacgtctgttgtcttccgtgttcaaattggatttgagctgcaaacttctggttaagttcagacccccaccccgcgttttctagtgaatgtgtgctgtcagaattgattttagctacaagctgaataataaaaacgccaaattcaaaatttaatattggtactaatacattactgtagtcttcaattataggattgaacaacttatactaaattaagaatgacgtttataggtgagatggatggttatggatttttatggattctggaaatgattatgatttggcatctaattagtgagaaaaattgcattaaaaattaaaacatattccctctcagtat

SEQ ID NO: 142333 - DNA, 476 bp, Glycine max
  Clone ID: PAT_MRT3847_99542C.1
ttttttttttttttttttttttttttttttttttttttttttttttttttttttttttttttttttttttttttttttgggcccccaacggccacttttaaaaaaaaaaacgggcccaacagggggccaaaagccccaaaatttatagaattaaaaaaaaaatccccatttgaacaacaggccaacaattttttggccataaaaaaaaggccaacaataaggaacaacaaaatccggagttaagccccctaaaaccccccaactttgaggggaatttaagggaaagggggggaactccttcggttcaaagctaacaaaaattttgggctctagtaaaaccccttctttaaacccgggagaagggggggggcgggcccccctgccaaaatttgggaaataaagaaaagttcccccaaccaggggcttcatttggggtatgtcccttacccccaaaaaactggggtttaagggccctt

SEQ ID NO: 142334 - DNA, 496 bp, Glycine max
  Clone ID: PAT_MRT3847_99543C.1
ctaaaattcggtttaattgaaggaaaaagccgagccaactctgtactggtgatagtaatacactaactggtaagctaccgtggtgctaccccccatccattacgcaaggaaccgttccaacaacaccagttggctgctcactacctgggaagagagagtgagttatcttagattatgggtaagcgaatctcatatctgtaaggaatggtggggcaaaatagcgcgttcctgacctgagctgagctagtgagttccccagtaggagaaccaagagttgatctggtaaccttcatcgcatcaatgtctatgattaaggcccaagccccctgctgatagagacacaatagtctacaaactgagcagtaacatcataaaccgcgagacacttcttaacttgcattgtgttctcccagagactaggtgcataatttgccttcagcctaacatagtctagtggccgtttttataatgcactatgacttgggcaagctccttc

SEQ ID NO: 142335 - DNA, 593 bp, Glycine max
  Clone ID: PAT_MRT3847_99544C.1
tcgcgaaatgctaaggacttatggctctctctgcaggatccatctggtgagagctgtcgaaggatatgaatccgtgatgttgaaacataccttgcgggcgatgctaatcgtccatacccaaaaacgacggctgatgattactcatccttgtacctgccgagaacaatagtcatgctaaatggcgtgcccgattcctggcgacataccccagcttttctccactaggtacacatgcgatgcagccgcgcatgttctctatgtataacagacgagatggattgtagggctgaatgcgcacttgactgatccggctcttgctcattcgttctgaggagactctttctatgtgccatatacgcagccccggtgactttggacatccattatgaccacgacattgtggtgggaggagaggcttgacctgataatcactctggtgcttctagagatccataaacattcacgctattatgcatgcattctgctatcctatagaagtatctccactcacgattgcgcaccgaaatatgctatatgttctacaaccaaagttctcgctcatgtgcagaatgatgtacgaccgctatgccaca

SEQ ID NO: 142336 - DNA, 245 bp, Glycine max
  Clone ID: PAT_MRT3847_99545C.1
cacaagtagacacctgctaacctaacttgttttaagaacacatgaaacaccggcgtctccgacgctttctgccgacaccaccggcgcgagagaaaggcggacatcaaatgcaattcacctactcctctcatccgcgagccacctaaatctctcattttcttacatagaatggtggcctgtcaagcaacgcacgggtttagacgctggcgggcttgctattgccgaaattgcagatagagaaagag

SEQ ID NO: 142337 - DNA, 190 bp, Glycine max
  Clone ID: PAT_MRT3847_99546C.1
tttgcgagaagacgacagaaggggaagcagttaacaaacatgagatatgataatgttagggtgtaaaggaattcattatgaagatggttcacatccaaaccaagcttaaatcccacaaattgaccttaatgagaaattcattgttgaacatgcctaaaattgcctacccaccgattttacacaaattaaa

SEQ ID NO: 142338 - DNA, 1473 bp, Glycine max
  Clone ID: PAT_MRT3847_99547C.1
tacggctgcgagaagaccgcccccacgcgtccgcccacgcgtccggagggagagggcatgggaatccgatcggtattcgatggcggcgagctgagaagggaagtggagaaaagtggaattgacccaaaattcattccaaagatatggaagcatatcctcatctctgccaaagatgaagattgggattgggagaaacaagttccctccttgccctcttcggcctactctctccttcgttccaacttcaaaacccctctctcttcctctattcactccgttttccactctgccgacaacctcaccaccaagctcctcatccagctccaccacaatcatggacctttcgtcgaggctgtcattatgaggtacgatactcgtttgggcaaatatgccggccaacctcgccccggtggtctcagagctactttgtgtatttcttctcaggttggatgcaaaatgggttgcaatttctgtgccactggatccatgggattcaaaaacaacctatcatccggtgaaattgtggaacagctcgttcatgcctctaccttctcacaaatccgtaatgttgtcttcatgggcatgggagagcctctcaacaactattctgctgtggtagaagccgttcgcatcatgactgggttgccatttcaattgtcatccaaaaggattaccatctcaacggttggcatcattcatgctatcaacaagcttcatgatgacctgcctggtttgaacttggctgtctcactgcatgcgccggcccaagacatccgttgccagataatgcctgctgctcgtgcttttcctttgggaaaactcatggattcactgcaagtctatcaaaggaaaagtctgcagaaaatatttattgaatacataatgcttgatggggtgaacgacgaagagcaccatgcccacctattgggaaaactgttggagacatttcaagtggttgtgaacttaatacctttcaactctattggtaccttgagtcaattcaaacctaccagtgagcagaaagtctcaaattttcagaaaattcttaggggtacctataatattcgaacaacagttcggaagcagatgggtcaggacataagtggtgcttgtggacaattgctggtgaacatatctgacaagtcccttggcactgcagttcccctaacggacatagaagatattgttatctgatatcaatagcttcaatttaattcttgccctcaattttaatttcgtttcctagtttttctattgtttttatgtttggttctacagaaattagaagtagaactgtagaagacaaggtgcactggctgaaatgcaaccaaaatgctttatatgaatgtgtgatgatcttttagattttgataaaattgaatttcaaagaattgaagaaaaaaaaatcatttgtgagaatattttaaaagtttagaagaattgattttgtataaagcttagatttcacctgat

SEQ ID NO: 142339 - DNA, 373 bp, Glycine max
  Clone ID: PAT_MRT3847_99548C.1
aaagaaagaaaggaaaagaaaagctctcttctttgaatatggagtttggttcagaaagatctggccatgaagtcaaggatgagaagagaagtgaatctagtgttggagatgaagaagatcgtcgtgaacaagagattgttacgcaggagccacccctgtctactaccgaaagatccacactggaggctgggccaaatgcttcttccctaaccaaaaaggaagaggctgttgatgaacttaagttgccaaagccgaaatgggtgaagtgatggaagaaaaccaacgactaaccacgtgtttgaaccgaatactgaacgattaccgcgcactccaaatgcgattttccaacatagttgaacaagagacaaaatat

SEQ ID NO: 142340 - DNA, 245 bp, Glycine max
  Clone ID: PAT_MRT3847_99549C.1
ctcgatagtcgcaagtggaagacgtgcacagtgccacgaaagtccaatgttgccgggcgtatgaagcgctcctgagctcacgcatacagacatgagcgcaatatgcttccggcattatctctggctcaatcgcgtgcctatgtatcgtaacatgctcttcagattacttctaactatcatctttctacgactggacgtgcaaggacaagcatgctgaaatgcgctcagtgcatgcccatcaacat

SEQ ID NO: 142341 - DNA, 243 bp, Glycine max
  unsure (1)..(243): unsure at all n locations
  Clone ID: PAT_MRT3847_9954C.1
taggaaatgttgataaaaatttatgtgctgagcatctcggagatggactttcctagggcttaaatatcatgaatgggtgcattactatnggttcctgtttttgggcctgatcttattgcatgcaggcatgtccagctattatactaatactgttgctaactttaatcgtaggttattatcgagttatttctttttgggttttgaacacattgaactttgttcatagtaatttttttattttga

SEQ ID NO: 142342 - DNA, 515 bp, Glycine max
  Clone ID: PAT_MRT3847_99550C.1
ttgggtgggtggggggggggggggggggggggggggggggggggggggggggggggggggggggggggggggggggggggggtaaaaaagcttgggaaataccttttaggggggggaaaaaaaaataaacccccttaaacgttttaataatggaattttttttaaaaaaaaacgtttaaattagcgccaatgggggtgatgaggagggcattttagttataaaagctcagtgggaaggaattgggaaaaccctaataataaagggcaggtcaataaaatttaaatggaggggagtataatccccgtgggaaaggggggcgtttaccccctgggggggggggggtttaaatagatagcggaagagtaaattctattaatattggggagcgtccccctaagagaataacctggcataatcaatttggggaccgtttaattaggggggctaaattgccttatagaccgtttaattggccctggaagcaccaaatttgggggcgaggttatttgccgcc

SEQ ID NO: 142343 - DNA, 170 bp, Glycine max
  Clone ID: PAT_MRT3847_99551C.1
cacggtcgcgagcggccgacggatggtgggctactcccgcctgatgtactttactgactcagtcacagcacgcattccagacttccgtcttatgcatcgtacaagctctggcagtaatcaccgtcatatggtaatgctgcgtgtaatagcgatatcctaacaatgtcaca

SEQ ID NO: 142344 - DNA, 360 bp, Glycine max
  Clone ID: PAT_MRT3847_99552C.1
atgcgtttatttattgttgaagaggcttacaacaagctgatagtcgaacttgcgaaaagcgttcctacattggtcggcattgaatgacccaaggatgagaaacttactctctgagaactattgacaaacgctaaaacgcgctgctttactatcttgcctatggcgtttaatctcgtggtccgtccgaagcttataaattttgcgaggcacattatgaagaaatgggacacgcttagttgtcaagatgcaatcaacccatactccatagaatggactggattggccaatagattactgagtaagggcgactatattctgcgacgcgattatgctagttatgatggtttgattaccaagcaa

SEQ ID NO: 142345 - DNA, 159 bp, Glycine max
  Clone ID: PAT_MRT3847_99553C.1
cttcctctctttaaatcctgcaccagccaacaccctttttctcccctacctctttcacagatgcaaaacccaaaatagagaatagagtgtgagattgagaatcatggatttagaacataaccagagatgggaaggctatatgaacaggaggaacaagcc

SEQ ID NO: 142346 - DNA, 193 bp, Glycine max
  Clone ID: PAT_MRT3847_99554C.1
gcacaaaaaaacacccccttgtggggttttctcagcacgcgcacccttgtggcgttttctcacacgcgcaccctcgtggggcgtcctgggaatcccaccctggtgccggcttgtggaacacgtacccttatggggagttctatcagacgtacccttatgcatggcttatagcagccgcccccttgaaatcggc

SEQ ID NO: 142347 - DNA, 1998 bp, Glycine max
  Clone ID: PAT_MRT3847_99555C.1
gttataaaaaatggtagataaaagctgtcagccaggggaagttggaatatagattattcttcctggaaaaaatcaaaacaccttaacaaggaagcttccgaactgcgggaggggatagttaattctcatgattggtgtggaagatttcataaagggcattattccgaacggtgggcggggaagtgtttaattagtcaataacttaacaactcaaccagcaagagccaccaactcttatactgttataaataaagtaaccctctaattccctccactacctgctccattgtttacatcacgagaaacaacgccacgctgaaatcccttttttgtgtccatgggcagcagcatgctgaggctagtgttgggcttgtctgttttgagttgtgtgcttgtgacatcctcagctcaaacgtgcagaaaccaaacattctcaaacagggtgtttgccacatgtcgtgatcttccacagttgacggcttacctgcactggacatacgaccaggcgagtgggaggttggagatagcattcaaacacgctggaatcacctcgaccaacaggtgggttgcatgggccatcaatcccagaaacaccctcgacccagccatgattggggcccacgccctggtggctattcctcaatcaaatggaagcccaagggcctatacctcgtccatagccagcaccagcacaacgttggaagagggagctatcagttatcccgtgtccgggttgagtgccacgtttgagagcaaccaggtcaccattttcgccactctcacacttccaaacgggacctcctccttggtccacgtctggcaagatggtcctctctctggcactacccctcaagagcatagccacgagacttcccaccaaaactccaaagaaatcttggaccttctctctggttcctccactcaggcaaccggaaattcacgccagaaaagaagaaacacccatggagtgctaaatgcggtgagctggggcatattgatgccaacgggtgccataatcgcaaggtacttgaaggtgttcaaatctgcagaccctgcttggttttatcttcacatcacctgccaagcctctgcctacatagttggtgtttctggattcggcaccggtctcaaactcggcagtgactccgagggtgttgagtatgacactcacagagcacttggtattgtcctcgtctgccttggaactcttcaggtgtttgcgctgttcttgaggcccaacaaggaccacagatacagagtgtactggaatgtgtaccaccacttggtcggatacgccaccataatcatcagtgtcgtcaacgttttcaaagggttcgacaccatagaaatttacgtaggggatcgctacaatagctggaagcatgcgtacattggcattattggagcattgggtggcattgctgtctttttggaagctttcacatggatcattgtcttcaagaggaggaagtcagagaacaaaattccacacggagcaaatggtgttaatggctacggttctaggccacaacaggtgtaggatatgaatatatgacgtgtagccagatagatatattggtttcttttgtaattttatgcatttttactcctatacgtgtgcattttattgttgctctcctttgtataatgttgagggtatttaatttaaggatactccagctgctcagagtctcagttttgaggcaattctttcttagggaagtgactcagagtctggtttaatccatactgttacttcaggttcaggttatacattgtattggtttctgtttgaagaatatttgtatttattattaattatttttttacttatgtctcttttttgaggtaattctttcatagggttttaggttctgcttttatccatactgttactacagggtatagcattgtattggtttctgtttgaagaatttttgtattaattattttttacttatgtcttactttttctacaaaactccagactagttctcc

SEQ ID NO: 142348 - DNA, 672 bp, Glycine max
  unsure (1)..(672): unsure at all n locations
  Clone ID: PAT_MRT3847_99556C.1
ggcagctaaagaaacaattaggagtatctggttctagtgagtgagaataatggataaaagcatatgttgaacgcgattgaaatgtgccactaattacaggtagagttttattttctatgatatacttttatcaatctaaaattctatttattctcaaaatctttcttccttatatcacgattgtcacctgtaacccaaaaattttggattttttttattggctaatattattcattaattttttgttaataagaggattgaatctgtgattttttttttcttctttcttagtcatctaaccatccttgtatttcctaaattttggatttgataggttttagattgagtttctattcgattaatgtttgaagagcgaggtaaatgtaacttaagtaactttgtaaatgctaaaatatattttatttttttgttgtgttggattgaggcaatctctccgcttgaagtttcttttacaaaggtcaaagttgtcaatcctgcagccttatcttaattgctcaatatacatatgctatatgtttggcctgcaagaaaactaattttcaaaaaatggataaatctgtaacaacgagaaagtattattatattcccaaaactgcaactccaggctctctttccccanatatcaatactggggaaagcacacttacactt

SEQ ID NO: 142349 - DNA, 984 bp, Glycine max
  Clone ID: PAT_MRT3847_99557C.1
gagagaatttgaacccacgacctagccctccttctcagctctcttcatcattagtccaaccttatatcttctttcttcatgtttgtgcttaatgcagaccattgcatatatcggatatgattatattatcattgttgataatcattctttaatcttactatctcgtgttctttttatatatactttctcaattctaaaacctttgtttatgatttagattaggttctgatttgaattgagaactggttcatggatcagaaaggggggtggagcatgaaacggtgatcagattgatgcttaaatcaaacatactttaaagaagaaatttgttcaattgcagaagattattgatcagtacagcataccagtacaatgagataaaagagaaacaagagccaagggtctatgataccctaaccaggaaccgtggggctaattagggagctcaatatcaacaacagaagaatgtatgacctatatgcagatctttcgagttcctttaccaagtctatggaagttacttcagagggagattcaagtggtggtgctgtgaaatcatcagatgggaaagccggccacaagagacacaggcctgtgtagaggagagtttggttagtttccttgtgattcttttgcttggtggagaagttcaatttgtgttgaaaagtttaacacaatgattagaagattgtgtagtagttgaagaagctctatttgtatttgtagcacatcacttactccttatatttcaaataaaacaatatgatatattgattttcctccacagttcctctcattgtaaccctgtaatttggggtttaataaaaagatagcatggttgcgcacccaattcaatcatgctgctgttgttcaaagtaaaaataaaaaagtcttttgttttttttagttaatgtttttttttctttttgattctgtcatggaatgtaatctacagatgtgcaagattgtatgaggcgtggcttt

SEQ ID NO: 142350 - DNA, 517 bp, Glycine max
  Clone ID: PAT_MRT3847_99558C.1
tccgggaagaacctattctcttgctagctgtcttgtatattgacaatcaaatggcaatacatacaactagctagctactaactttgtgttccacgcgagaattatatgagccaaacagctgaaaattgatggtcacaatatgaggttcatttataagcatattcaagtctgtcttggtaacaaatctttatatatggttctcactttctcacctttcgttcctttgtcacattttaatttcttctccaagatggccatggtagacatctacaacccaccatctacaaaacgaacctagctacctacaaggaagggtatcgatcaatcaactgccaagcaaactagtggatattagtcattaattggtaattagttattattacttgcccatatatcagactagattaatcatagtcaagtatatgatatctttgtatatatgcaccatcatgctactcattaaggtaccttgtatatatcttctccacctcaaattctatgaatatgaattaattac

SEQ ID NO: 142351 - DNA, 263 bp, Glycine max
  unsure (1)..(263): unsure at all n locations
  Clone ID: PAT_MRT3847_99559C.1
cttcagtaaagaacagttcttgtcantnggcaagcnaagganaatctgcttcacttncnatgccatctannaccaatgctcagagccgtgatgaattgactttgantgnnantaggaatatatgaggcagacagancatgacaatataantcaaaccagttgcccaggagccagaagaaacnnattgcagacaggggcagggtaatgcagcagttngcttgtccaagccngaatgnnnttgtgcnnggtngnntnancggtga

SEQ ID NO: 142352 - DNA, 2274 bp, Glycine max
  unsure (1)..(2274): unsure at all n locations
  Clone ID: PAT_MRT3847_9955C.1
gctgtgtattgcaagtgcgagatgccttataacccatatgacctcatggtgcagtgtgaggggtgcaaggattggtaaaaccagtatattctgcttttttttgtttactgttattacatttgtgagtggtttttggttgtctggttctctaattttagcattagatgcgttgtttgcttggatgaaggaattttgtgctcctgcagagccatctaaaaggctgctgaccctaaacaaaaggaagaatgataaagattgcaaaatgacttcaaggagccttaggaaaatgttttcccaagtccaacagttataatgcactcatgactttcattgttattcaaactctgtcttggtctatgcacatgttttgcatgtcgctctttacaaggctttcagcttgttccgtcaaaggaaaaacaattgacaacaatgcaggaaatggagaacatataaaacatttttcttttattacatgtagctcctttgtaaacgaaatagcaggatggattttatggagtttaaacttttgatgtgtctacatcaacagtattttgtcagcctataatatcgggattctggatttctttgtttctatttatcaatatgtgtcagccaatccaaattgaatgatgcaggggctgatttcttgtgctctgataagctttgacctaatttggctacaagaattcatccattgtaaaagattgttaaatttaaggagtatctgagaagtagtgctacttttatttattttttttctgtttgtgaccctatagattttatgaaagaaacactgttcaattttggtaggttttttgtaggccttctctggtgcccctcttctaattcttctctcaaaaggactgaacgaaaaaaccttagggttcctctgttcttcttcgccccccaaaaaattttctggctcagagaaattcaaccgttctcgccattgccgaagctccaactcctcgcatttccaactcttcacccaaaaccctttttgttggaacagagtttcagagagagacccttcacaacatggcaaaaacgaggccaggcagaaaagacttggattcctacaccatcagaggcaccaacaagatcgtaagagctggggactgtgtgctgatgcgcccctctgatacgagcaagccaccgtacgtggcgcgcgtggagaagatcgaacaggatagtaggaacaacgtgaaggtgcgtgtgaggtggtattataggcctgaagagtctattggaggacgcaggcagttccatggagcaaaggaactgtttttgtctgaccattatgatgttcagagtgctcacacaattgaagggaagtgtattgtgcactctttcaagaattataccaagcttgagaatgtaggtgctgaggattactattgtaggtttgagtacaaagctgccactggggctttcacgcctgaccgtgttgctgtgtattgcaagtgcgagatgccttataacccagatgacctcatggtgcagtgtgaggggtgcaaggattggtaccatcctgcttgcgtgggcatgactattgaagaagcaaagaaattggaacattttgtttgttcagaatgttcatctgatgatgacatgaagaaaccccatgctacattttctgtatcaccaggatctgatgtcaaggttgagccaaagcggcggaagagatgaccatcacgaagaattaactcatcttgcgaatgcaactcttgctgaatttcgcgggctatgtggtagctgttgtgtgtgtattgtacagcttctaccagaggctataaaaacatcattttatgtatttgactcaggctatgtatgtattggtcttagatttatgacagacattgatctgtttcccttgtgtccagaaagagtaactcctgtcagtgttaatgtttgagaaaacatcaggccttgaatactggagtaaaaagaaatgatcaattttctgcaattggcaaaggttattttccattttctgaaatttggattcctgacaatcacctcctcggcagttgtccatgatgcgaccatcgatctctttcttaattcttcggagggccgcggttgccggggtgtgtgcggtgcactgctgctcccagaggctgtttggccaccggtgtgtctctcggactctggcgatgtatgtattggtcttagatttatgacagacattgatctgtttcccttgtgtccagaaagacgtaactcctgtcagtgttaatgtttgagaaaacatcaggccttgatcnngagtaa

SEQ ID NO: 142353 - DNA, 352 bp, Glycine max
  Clone ID: PAT_MRT3847_99560C.1
tggaaattcggctggaggaattgaaggtttttaaccctcctctctctctcttgcatcttttgttagaacttcgaagttgctccattgtacctgctggtactccttgtgctgtattgtgcttgtgatctaggctatgtactcacctagggtgttttatttgggtggaggttttggaatgaaaattacgttatacttgcttgttttgacataagcatgagaaggtggaaattaatatgtgtttcatttttgctcttggttaacaatcattttcctccaactgaactgctcgtggctttagtaaaactagaagtgttagttggaagatgcattttgtaaatggtacaatttttta

SEQ ID NO: 142354 - DNA, 148 bp, Glycine max
  Clone ID: PAT_MRT3847_99561C.1
attaatttcgatcgagcgtattttcatccaccaatcgcttccaccgtgggcgctctcaaatacatgaatatagtccccatcagcgacaccgaaaccgacaaactaattcgtcaccaaacaagaagaaacctccaccttgagcgcgcga

SEQ ID NO: 142355 - DNA, 695 bp, Glycine max
  unsure (1)..(695): unsure at all n locations
  Clone ID: PAT_MRT3847_99562C.1
cacaggtgcggagggtacggaaaaaaaaaaattttgacttcatcccaccatcatcaccatcgccatatctctccaattgcttcagtctctactagattgagcagttcctcctttcgaatcgaactcgatcctcctacgaattcctacatcccactaccccgccaaacaccgcagctatgggtgtccaggacgttctcagccgcaagaccggtgtcatcgttggtgatgatgtcctccgtctcttcgagtacgctcgtgagaagcagtttgccattcccgccattaacgtcacctcctcctccaccgtcatcgcctctctcgaggctgcccgcgatgccaaggctcccatcatcctccagatgtcccagggcggtgccgcttacttcgccggcaagggcgtgagcaacactaaccaggctgcctccatcgctggcgccgtcgccggtgctcacttcatccgccagatcgcccctacctacggcatccctgtcgtcctccacaccgaccactgcgccaagaagctcctcccatggctcgatggcatgctcgatgccgacgaggctcacttcaaggccaccggcgagcccctcttctcctcccacatgatcgatctctccgaggaggaggtcgactggaacgtcaagaccaccgccgnctacctcaagcgcgctgctcccatgaagcagtggctcgag

SEQ ID NO: 142356 - DNA, 322 bp, Glycine max
  Clone ID: PAT_MRT3847_99563C.1
ttcacgcttttggttacacatcgcaagcgacctcaagcaatagacataaaattgatcaaccctaacacccacccgagccctaatgcggttaaattcacaatgcctgaggaggatcattagccacatcattaattagacgagattgatgattagttccacgacgcgttcgaatacgaacaaaagacatgatcctgagtatcctgtgcataagacgatgacgatgaatccccctatggatggttagcctaccgctgataatgtctctatggagacagaagctgacatgatgttgaatactaagatgaatgctcagagaggttgc

SEQ ID NO: 142357 - DNA, 183 bp, Glycine max
  Clone ID: PAT_MRT3847_99564C.1
gaaagacgtagcacgcgaccaacgcttcacggcacacacactaaccaaaaggagaggatcgacaaaccgataaccacgcattgcaacgcgcgctgatcggactacggagtgcaaacgctaatgatatctggatagtctggtaaccttacacctcccgacacgcaaccgacgaccctaaaaacc

SEQ ID NO: 142358 - DNA, 1500 bp, Glycine max
  Clone ID: PAT_MRT3847_99565C.1
ggggcggagggttgagttttccctcgttgattccacaacaatgggcatcaagaaaacccaggcaacaagcacaaccaaacagggagggatgtcgtcgcagggcacaggttcagtagtggatttcgacctccctgacgagattctatcggtgataccgacggacccataccagcagcttgatctcgctcgcaagataacctccatggccatcgcctctcgtgtctcttctctcgagtccgacgcctctcgcctccgccagaagcttctcgaaaaggaccgaatcatcctcgacctcgaagaccgcctctcctccctcacccgcgcctcccaccaaaccgactccaccctcaacaccgccctcaacgaaaacattaagctttccaaggagagggatcaattggccgccaccgtcaagaagttaagtcgagactttgccaagttggagacatttaagaaacaactgatgcagtcgctaactgatgacaatgcatcgcatgctgaaaccatagatattggaacctgtgatcaatcagttccaaaggcatatcctgataaggatgatgatggaagtggctatatggtacatcattcatacaatggccctgcagatgtgggtaaaacaaatgatgaagcttccaggtattcagggcaaaggttttctttgaccccatatatcacaccacgtcttacaccgacaggaactccaaaggtgatttcaacagccgggtctcctagagaatattctgcagctggatcacccaagaaaacttctggtgccacctctcctacaaaacttccatatgatgggcgaacatctctctcatcatggtattcatctagtcagcagtcatcagcagcaaactccccaccatggggacgatcacttccagttcgaactccaaagattgatggaaaggagttttttcgtcaggccaggagtctcctttcatatgagcagttcagtgcatttcttgccaacataaaggaattaaatgctcagaagcaaacacgggaggaaactttaagaaaagcagatgagatatttgggtcacataacaaatatctgtacttatcttttaagagatttccttatctttatgcacacttggcttaaaagcaatgcaccctagtactgaaagcagcgttgccgagtattgtatgagttggtatgacaattgttgactatcttctccgttcctgttactctacctcaaaggaagttcgtctttgattgtttgaatatggggtaattatcaccctcaaataacaaaagtattgggggcttcaatatattcccaaaactactgaatagctcctttggtgtgaatatccgcattaacggattcgtatgccacatatgaaagctctttatgaagtatgaactaacaatcatttttagtctccatgaatttattttaaaaacagggttttttttgcaatattttcttaatggcatgcacttctagttaaaatggtgaatgaattttgcaagctttggtt

SEQ ID NO: 142359 - DNA, 254 bp, Glycine max
  Clone ID: PAT_MRT3847_99566C.1
ccatctcctagtatgcggccccccggaaaaagggggtgttcttttactctgtgatcggcggttagggagcggaagtggcaggacggagctgtgcttgagcaactaggaccgactaacacctgttccggtggaatttcttctagaacatctacgtaataacttattccctctccacggctggaaatcggctgcgaggtccatatgggactacctcacagtaatatggaatgggaagggagacatagcacaactct

SEQ ID NO: 142360 - DNA, 1060 bp, Glycine max
  unsure (1)..(1060): unsure at all n locations
  Clone ID: PAT_MRT3847_99567C.1
ggctcgaggacgccgtcgaaaccctaaacgaatccaccgagaattccaatcccaataccaattcccccgacctcgccgtcgttctcttccacccgcaccatgcggagattcaccttatcgcacagggagtcgccacgcgctgcaccaagatcgaaccctcttcaaactccagaaactccgtgtatttccgacaggtgttcgcggcgttcgtgaagcgcgtggattttaaggttgtgaagcgcgtggtgataacgagcgaggagtttcgtaggtttgtgatgtcggaagcgaggaagtcgaggatgcggtcgatcgaggagaaccagtcgcgaataatggtcgttgcgggcggtgatagtttggagaaagtgatgggtgaccgggcggtgatggagttggtgaaggacaagaaggtggcggcgtttagagagttgtgggagatggtgtgcgacgattcggaccgcgcgtgttatggacctgcggaggtggagcgtgcgcgtgaggctcgagccattgagacacttctgataaccgatgatctttataggaacgaagatgttgagacgagaaaaaagtacgcgagtttggtgaagtcggtgaaagagggtggaggaaaggctttggtgtattcgtcgatgcatgtttctgcaccgcaactcgctcaactcacgggtgttgcggcaattctcaggtttcccttgcctgaactcgaagatgtaaatgggtgctgatttattgtacatattggttttagttatttgtttgtcatgtttaattaatgtctttttaatttcgccaattgttgattatataatctccggatgaagccagggagaatgtgaattgtcgttgctacagcatgtaattatctgggtttgtgtatatatgtgttctaaatattattgtttgcattgtgtgagaaattgagaatgcgagttggagaaaactcanaaaataaataaaaccattgtccttctcaaaaaaaaaaaanaaaaaatataatatataaattcttctttattactttttttctttttttctttactttctctcctttaat

SEQ ID NO: 142361 - DNA, 1426 bp, Glycine max
  Clone ID: PAT_MRT3847_99568C.1
cacggtcgttgtgttgttgatattgtgttgatttcttcattaaagcacaaacgggattcgattgcagttgcaggtctctctagagatcaaaatcgggatttgattgcagttgcagttctctatctttagtgcttattactaactattattaaggtttctttcttttgttgaaatggtctatagtaattatagttctgccaatgaatctcattgtttaatcctgattatacctttcccgaaatgcaattagcgtcaaatggtgacaaggaagaatgttcagaaagcgaacccatcttgaatcatcaccatcttcatttgcaaccaaccggagaatcctccttttcctgtgaaattatgcctattcctcctgctgcagctacttttaacgatgatgatttacaaaacgtccgggttgatgagacttggcatctcgtaaatgcagatctccaacaatttgcaaaatgccgcgatattacgtgagaagatttaatttccccatgccattgcccagctacacaaaggttcgcgtactgtcactgtacagagtgcagagctgtcttcatattacgtgccaatgtttctcactgtacagtgggcggtgctgtcttcatattacgtgcaaatgtcccaccaagatacggtggtggttgagattaaaatttcagttccttgttgctagagatcatgcattcattttcataattgttcagctggttgttgctttcttgggagtgcttgtgtacaaattttatggatattaactgatggatatttttggttatgttgatcattcacatggattttatacaatagctgttctaggtattgttagggttggtttgctctattaccacttccttgcgataatatgttggcaaagaatcaatgagcttgactaccatgttcttgccaaacaagaattgactatggaatatgtggtagaagatcgagaacatgtaaagaatgtgcctgaacttgatcccagccatgtgacagagctaaggatgttgggcctttactaattggatacatcctcttctgagtcacattgaatttgttgtacttgcggcttgtctccattgtcactttcacatttgtagatcagattggtttgttcagagtgatgccccatttatatggcacagccacgtgggtgttgtttagtagcatggagatatttgtatttgtaacttagtccctggtgtaacccacagttaacctttatacaaaatattgtgatcgaatgtggattttgtcttttcaagtttttaagtctagaggaaattacaatggcatcttctgagttttttttttttttaattacacaacacatcttatatgttataccaacatcctctaatacttgaaaacattatgttgatgttttttatatattatatgaacaccttctacattgaaaaaaaaa

SEQ ID NO: 142362 - DNA, 358 bp, Glycine max
  unsure (1)..(358): unsure at all n locations
  Clone ID: PAT_MRT3847_99569C.1
acgagccagaatcaaatcaaaaggtaaaaaacaaattaaaagaaaaagggaaaagtatactacgcaaaagaggtggttcaaagttcaatggctgagaagaaagaaatgattccacaacaatttaacatcaatgccaaatggaacacctacattgatctcaccatccatcacttcatctactccacaaccaccaatgcatttaacaatctcctatttttcaagattcctataactcaataaacatctattgcttttaatactaagttaaaattaaatctacatatacanaatattctcatctattctataaacctccaacaaatttacccttacctaaagtctccaaaactactactca

SEQ ID NO: 142363 - DNA, 415 bp, Glycine max
  Clone ID: PAT_MRT3847_9956C.1
attgatgaagagggataatgatgtctcttggaaatgggtcatttgctttttacaaatttttttcacggggagtatatgggttatctgtaaagggattttcctattgctgcacattgtacaccactacgaagtttcattcatgctgtatctgtgcaacacgctacttactttaacccataacgtgcatgtcaagaagatggtgtcgtctaatacttcatgctgagcaatatcatgctcattagctctgataccctagatgataagattgggtcgttttactttgatacttaccactctcaatactctgttgttggtagaacctatatgctgatttcatgtgtagccttcaccctccactttcaattcttttactgcaaacaactcacttttattttttttatgggctggtaatttt

SEQ ID NO: 142364 - DNA, 859 bp, Glycine max
  Clone ID: PAT_MRT3847_99570C.1
ggaccacctggccaggaagcagttgcaaatgcagaaataagtgcagctatgttgacagcaagagctggtgctcgggatccatcagcaattccatcaatatgtcgcgtttcagctgcacttcactatcctgcgggcttggagggttcagatgctggtctagcatctgtgctggagtccctggagttctgtttgaaacttcgtggttctgaagctagtgtgttggaagatttattaagggctattaatcttgtctatattagacgggatcttgttcaaagtggtgaagccttgttgaatcatgccaacctcgttcaacaagaatatgaaaagacaacaaaattttgtttgagtaaggctgacgaacaggagaaaactatcatggaagaatggttgcccgaacttaagaatgctgttttgagtgctcagcagagcttggaagattgcaaatatgtcaggggtttgcttgatgagtggtgggagcagccagcatcgacagttgttgactgggtaacagtggatgggcaaaatgtaactgcctggcataatcatgtgaaacagcttcttgcattttgtgacaaggagctattgtgattagaattgtaaagcacacggagtgagcaaaattttgtgaagtctcttgttcatcttgtcattttagattttaggtagtgcggtggtttgttcatgttaattggcagtgattaatggcattgaatcttatgattgtagagctttgtaatgtaatttgatttattatctggcagtgattacttaaaagtttattttataatttgatttattatctggctgtgattaattgaagtttatttactgatggcttcaaaaaaaaaaaaaaaaa

SEQ ID NO: 142365 - DNA, 1195 bp, Glycine max
  unsure (1)..(1195): unsure at all n locations
  Clone ID: PAT_MRT3847_99571C.1
ccacgcgtccggtttggatgagttagacatacccattctgttttagggtttttgtgatgatgtttgtggtgtttatatgctgaaattgcctatggaaaactgttagagatgaaatgtagagttaacctagggttggaaagtgagaatgtggtgttatgagtggaaaaagagtgaggctttgagagttggaaggttaagtctgaattctgtggtaaatggaggttaaaatgagttaatcctagcttgaaatgtcatttaggacatgtgagaaaggttaggctgtgctagagggagaaacaaatgaccaaagtgaacaaagagccatttctagggcaaaattgggtgttgaagagtcaaattttgattcggtggaattttaggtgtaaattcagtttgagcaagtttagattgatgttatggacttgtgccgggtgagagtttgcttcaaatttacctcattctaaatttcacttttcaaacctagaaaacccattgaattgaggggttttggacacctagattctgtgttgctgtgttttgaagcttgactttgggttagacatgattgatacatgatttgggacttgtaggaattgatttgggcaagattggatgagaggaagtgtgattttcgaaatctgcacttatgcagaattttgctgtcaaaataggtgcagcaggattttggctttgtgcagaaaaatgcttgtgtgtggttggctgtggaaagtctagtgcagaatgagttctggatgtttgctagtagatcccaacggtcacaatgtaggcttatgtactatagacttccagtaaaattttggagtccatccaacggttaacaaattggatcgaaggaattgttactggggtctttaagtgagaaaagctgtgatttggttggtgttttggcagagttttctgcctttgctttgttttgcttggctgtgatagcttgtgctgtttgaatgttgttttgcttggatgttgtggaagcttgggaggattgatggggancccggtgttgagagaaacgaggatatgggctacgtgggagtacgtgagctcagttggaggtgggcacaggggatggtgggtttatgcgcgctntctggatgtggaaaacttgntgtgcactatcgcccgaccaccacctagtaccacatgtgnatgggtaccccataatcctacaagcttg

SEQ ID NO: 142366 - DNA, 399 bp, Glycine max
  Clone ID: PAT_MRT3847_99572C.1
gggaaaaaaaacccctttttttttttttgggggaaaaaaaaccggggggcccaggggttaaaaaaaaccctgggggaaaaaaggggtttttttaaggggccttttttcctttttcatttaaaccaacataaaaaccattaaaaaaaaagcaaggctttttatcagggaattaaaaaacaaacggggggttttggcaattataagacataaaggggtccaaaagtttccgggccccaaactataaaaaactaaggggttaaccccgaaaaggaacccgaattctcattaaaaaggggggggggccacaaaagggggggttcaaacagggggcatgggggggcccctataatcccggggacatccccacaaacatgggtcccccacaattcgggggaaaag

SEQ ID NO: 142367 - DNA, 893 bp, Glycine max
  Clone ID: PAT_MRT3847_99573C.1
ccggctcgagctcgagccgaatcggctcgagcaggacttcgaccatctcggcgtgattttccatcctccactcacactagtcgacctagggatagattccgtgaaagagaaaatggaagatctggtaatgaagggagcactagagctggcagtggaagcttacagcctgaaattccttccaccagttcatcaatggcaccctcaccaactatagttctttctggatctcgaacgttctcaggacagccgcctactatcttacagtcacgtgaccgacaggatgacactggcagcatgtatgaagaaaatgtcgatggaagcaagggttcaggggataccagcagcatcggagatccagaactagtatcagcatttgatggccagtctggtggatatggctctcaaaggcatagttcaagaggaagcaagtcaaggcaacttggagaacgtagagacagagacagcagacgtgaagggaagtgggaaaggaaacattcatagctaatgagcatggagttgtgcattgattaggtatttatgtgtgtatataatatatatacatgcacaaagtgtagtacctaaattgccccaacaaaaccaaacttttggaaagttggaatggacatttgtagaactttaatttggagaattctatgcagaacttggggaacatgtccctttgtgtctgctccatggtaaaacagtgttgtacattattatgtatggctgaactagatgctgatccatattttgggtaactgtatcactttctgtacaatagtgtggatggtttcctaatagattatttacatagctatattaagtatgtatattttctttgaattattagatattttttcctttaaaaaaaaaaaaaaaaaaaataggagttt

SEQ ID NO: 142368 - DNA, 309 bp, Glycine max
  Clone ID: PAT_MRT3847_99574C.1
ggccgcccttttttttttcttttttttttttttttaacccaaaagagacatctttgcctgttctgatcagtgaaataatcaaatgtgattgaagcaaaagcttcagctttcactcgcagatttccacgggctgcttatctagggaaacatctaaacggagacccactactactgacgaagatgcaccttgccggaatataactttcgctacactctttatcctgatggcaaacctcctacatatcatcctgtacaccctactccttgatgcgttctccagttatcgtatacgcatctgcacaggcgcca

SEQ ID NO: 142369 - DNA, 1140 bp, Glycine max
  Clone ID: PAT_MRT3847_99575C.1
tacggctgcgagaagacgacagaagggggtgttctattatcttcaaaatgacaaaatccttaaaaaaaagaaaactcagcattgacttaagctaccgcaccattagttcttcttggtctgaaccattaaactagactcacacgcgcacccatcaccgtctgatctcgatcgcacggacaatggcgtaccgcagcgccatcgtgcgcagagcccaagaggccagccaccgcgacacatggcgagccgctctctccgaattcatctccacactcatcttcgtcttcgccggctccggctcctccgtggccgtcaacaagctcaccgtcgacaagccctccgccctcgtcgtcgccgccgtcgcacacgccttcgccctattcgtcgccgtctctgtaagcactaacatctcaggcggccacgtcaaccctgctgttacgttcggcgccttcgtcggcggcaacctcaccttgctccgctgcgtgctcttctggatcgcgcagattcttggctccgtcatcgcttgcttgctcctcaaattcatcaccggcggacaggatgtaccggttttcaaactttcgagtggcgtgggagtggggaacgccgtggtgttggagatggtgatgacattcgggttggtgtacacggtggacgcgaccaccgtggacccgaggagcaggaggggtagtttgggagtgatggcgccaattgtgattggtttcatcgttggagcgaatgttttggtgggtgggccttttgatggggcatccatgaacccggctgcatcatttgggcctgcagtggtgggctggagttggaaaaatcattgggtttattgggttgggcctctcgttggcggtgggcttgctgggtttatgtatgagctcatctttgttagccatagccgtcagaggtttcgcagaagttattattaaaaaagaaatggaaaggaaagatggaagctctttggtccagagatgatacattgatatctttgttgtgtatgcatggtttgtgtttcttgtgataaatcagtggtgatcatgaacattcttacattgcatgtaatgtttgttaatattgatgtgatgtattcaacaattcaggaacatttgtcgcctttatcacatttttgtttatgca

SEQ ID NO: 142370 - DNA, 815 bp, Glycine max
  Clone ID: PAT_MRT3847_99576C.1
tctggcaaaagaggattgctgccaagagtagctcaatcactgcacagtcgccatcacagctatccaagaaacaacttccaacaaaactttcaccaaactctcgtaaagggtcaaaatttagtgattcagagccaggagcatcctcgccccttcaaagattccccgtcagaactgcatctgttggatctaatgattctttgaaagcctcaaaaaccagcagattgatttccggaagccacttggatagtaacaaattaagtcgatcagtgtcttcgttgcctgaatctaagatagagaaggatgatagcacaactgatactaaggcatcaatggcaaggattagaagattgtcagaacctaaaatgagtaacactcgtcagacttcctcagttaaaccacatggcactggaacaatatcaaagactaaagcagctgatggacccgagagcaaaaagatttctgctattgtgaaccatgataaaagcaagacagcagccctcccagaactgaaaatcagaacatccaaagcaactgacgttcctcagaacagaacagcggtcaaagagaaggcacataagttgaatgataacaagtcttctatgaattcacaaggtaccatgctgaagaaaaatgaaattggtacttcattcaatgatgatggagacaataatcctgtagttgagaagactggtgtgatgcttgagcgtgagaaaccttatgtcccccctattcatagttctgaagaaaattttgatatcccaaagaaacaatatgataatgatgaagtgatggaaaaaacagagacagcatctaat

SEQ ID NO: 142371 - DNA, 262 bp, Glycine max
  unsure (1)..(262): unsure at all n locations
  Clone ID: PAT_MRT3847_99577C.1
gttgaagnatgtgctttctcatggtgcaccaattgcagcactgtcaacagtcaatcctnnctttatatggtccntcacaagcaatggccacnagncctgcaagttcacatttatccataccgttcaagannaagagtgaagtgaaacntccaatttctgtctttaaaaatattgctcctgtgcattctactgcagctgcaggcccttccgcnttggcccagccancattgtctccttatgcttctaattgttgtaaacaaga

SEQ ID NO: 142372 - DNA, 370 bp, Glycine max
  Clone ID: PAT_MRT3847_99578C.1
gctttgcgttcggaactttgcggtgcacagaatgatgcggtggtgcaaatgattgagggaaaaaaacatgggaaggctcataggaggcccattgaggcgtacattgtggctaatgagttgattaatgaggtcaatggtgatgctaacgggagtactaacaggagaggttatgatgatgctatagaggagactgttgggatgtatggtgctatgcaaagagctgcgcccaggaagcattctattagagagcctattatggtgcccgctattattgaccctaatacagatttaggtacagtggtgagctatacggaggactgtacatatgatggactaggtagaggcagatatgcaaagagatctggagggg

SEQ ID NO: 142373 - DNA, 337 bp, Glycine max
  Clone ID: PAT_MRT3847_99579C.1
aggagactactgtgagtgacaaaactctccttttgaatatttaaggcaattgcatactcaaatgcaagttgatctacgcaactacgcactcagtggtatttccactagtgtttagttcagatttatttattctactttgcagttttctagtagattttgtgtgtgtgtctatgtacagttttttatagccaccatgttgctgtcataatctgaagacccttggtcatattttctgggcagatctttggcttgatgacatgagctgccatctgccgtttaataacactggttctggccctgtgttgaaacttgaaaattaactgattttggtttaatt

SEQ ID NO: 142374 - DNA, 434 bp, Glycine max
  Clone ID: PAT_MRT3847_9957C.1
gggctcgagctccattccgtagtatccctctgttcgacccttttacttagcattccctggttccggtagtggctccctttttattttctgcattctgtctggtgttacttagatcactgtcccgcaccaaatctggtgcacggtgagaaggtagcgatcattaattttgtatgaatcttccatgtgagcgggacgcgtggggataccagagtcttttccggaagcaagagagggtattatccgtttccaataaatctatcactggattcttttgagggggaaaccggggccattgccttcgaggtttataaagaccccaccgttacaaccctatgaacagaaccctaaccctatgtggctgttcgtgattttctaattcaattcatatcgccagcgacgctagagatgcctgacctggctggttgagtggatgc

SEQ ID NO: 142375 - DNA, 364 bp, Glycine max
  unsure (1)..(364): unsure at all n locations
  Clone ID: PAT_MRT3847_99580C.1
ancnntgngagacagngtngganatgtggtgaacganncncacanngngatgnngagngattaggnggtngcncgngcgncagnnngaanaantnacacnnagtcntncgcatgtgncnnagtntnnnnagantgtgnatgantnnagncactgcatttannnacaatgggnnntcaatacttacaangtnggnncantcctcnganganngagtntncgnnggtcttgcagnncagggcgnctagtnnancatggcngtaagacnggggagttggcnagnatttgngannngtgggtanaaccnnnntaanggcngtngangancnnggcnnacnttngnnaataccnganatgctacnngct

SEQ ID NO: 142376 - DNA, 597 bp, Glycine max
  Clone ID: PAT_MRT3847_99581C.1
ataacctcactctgctcctccctcttgtcttctcttctccaataaattattccacacaaagaacaagtaaaacccaaaccacaacaattttctaattttcatattttattctaattgttaatcttcatcatcatcatcatctctctactaaagtccaaaccctagcacctggttcccagataacgctacattttatttatttcccctctccccctataatattattaattttttatttatttattttatttaatatcacacactccacttattttttatatatcattattgtgattactatatatgttcgccggcaccagcgccgcccgattctccgccgcatactccccgcgcctccagttccgcgccctggagctctccgtcggcgtgtccctcgaccggctcccttcgtcgaagtccacctccgccggcgaggaggagccgccggtgtcgaactctctcatggcggcgataaaacgctctcaggcgaaccagcggcggcacccggagagcttccacatgttccagcaaagccaacagggaacagcatcgacgtcgtttttgaaagtcgaactaaagcacttcgttttgcgatcc

SEQ ID NO: 142377 - DNA, 1275 bp, Glycine max
  Clone ID: PAT_MRT3847_99582C.1
ggcaagatatgtcaagtaccctttcttgcctcctctcattaggataactggctttgccaaatttgcaattttttttttgggttcagttacatggggtgctctttttaccttctctaatttgttttccttgtaaaaagccttgaaatttgatggagtatattattgattgctattactctatgcaattcatcaaaatagttttggattgtgagatgatttctatgcatatgatccacctcataggagaatagttaaatttttgtgccattttttcacttaatttgcctcatcatttaatgcaggtattaaggaaatactctttcgttgaagctctgaatattaacagagcatcatcggcagatggggtctgaaggtcctccagcagctgtgacagttcatgtaacaggtttcaagaaattccatggagtttctgagaatccaacggagacaattgtcaataatttgacggaatatttgaagaagaagggtttgtcaaaaggtttagttattgggagctgcagcattcttgagactgctggtcaaggagcactcattcccctctacaagacattgcagtctgccattacttccaaggaatcggaatcttcaagctccaataaaattatatggctgcattttggggttaacagtggtgcaacaaggtttgctatcgagcgtcaagctgtcaacgaggctaccttccgctgccctgatgaaatgggatggaagccccagactacccttcttcctgtggaggagatcaccaaggccttggcaaataagggctatgatgttatgacatctgatgatgcaggaaggtttgtgtgcaactacgtttactatcattcgcttcgctttgcggagcagaatgggactaaatccctttttgtgcacgtgccactcttctctacaatcaatgaagagacacagatgcaatttgctgcttccttgctagaggtacttgcttcgacatgccagtaacatccggctcatgcaaatgttcaggtgttgccatgcttatgaaagtggatgagtgtactttgaatgagatgctataaattatgattacaagatgttgtttggaaatggaaaacggtatattgcaaatggcatgtgtagcagaggcgtttgctttcatcagtcaatgtttctgattaaaaggcttcggcaaattgtcaagacatgttgacatcttcagtgttaccttgtgaataaatgttagttttccttatccttaagactgttcttatttttcgttgtaagtgggttatgaat

SEQ ID NO: 142378 - DNA, 220 bp, Glycine max
  Clone ID: PAT_MRT3847_99583C.1
cgcacgcgaccgcttcaacagcagcggtgaccacccaaccaactagctgcatagaagtcggcttcaagaaagcaacggcaaccacaaccaggcggccagctacctgtagcctacccccagcaatatctaccatacaaccaactggcagcattgaacgctcctgcataaatacagcggcaagcaactactaccattcagccagctagctggcgcgagccct

SEQ ID NO: 142379 - DNA, 1206 bp, Glycine max
  unsure (1)..(1206): unsure at all n locations
  Clone ID: PAT_MRT3847_99584C.1
gcaagattatgtcaagaccctttcttgcctcctctcattaggataactggctttgccaaatttgcaattttttttttgggttcagttacatggggtgctctttttaccttctctaatttgttttccttgtaaaaagccttgaaatttgatggagtatattattgattgctattactctatgcaattcatcaaaatagttttggattgtgagatgatttctatgcatatgatccacctcataggagaatagttaaatttttgtgccattttttcacttaatttgcctcatcatttaatgcaggtattaaggaaatactctttcgttgaagctctgaatattaacagagcatcatcggcagatggggtctgaaggtcctccagcagctgtgacagttcatgtaacaggtttcaagaaattccatggagtttctgagaatccaacggagacaattgccaataatttgacagaatatatgaataagaagggtttgccaaagagattatttattgggagctccagcattcttgagactgctggtcaaggagcacttgtgccactgtaccagagattacaatccgcggttaatgccaaggactctgaatcttcaaattccaataaaattatttgggtgagttgcccctgtacttgatatatggcttcactgtttgtgctcaatactcatagctttgtgtattcattcttcaatgctggtcatttatgtaattaaatcctaatttgttcctgtcaattaatttcccactgaacctggatatgttatgttattcaagctgaattatcttttgcaaaaaagaaataaaaaatcaagaaggagaataacattatcatccaacatggtagatagcacaatccaagactgtcagtcacattccttgtgtatttctgtacacaccaattaaagtctgcaggaactgcagaggaaacactgctccaataacttaaataagcatgttgactgtaacatggattgagtctttgtgactactatagtaattactctattaaaatctgctcattaaatactgtgaagactgaagatcatattgttaactatttctttgtgattaaatctcaatggactttaaactaaagtttcttaaatanatagcccaaagctggaaggaaacttatattggactttagagttacacattaattcaaagggctgactaaaaagcttgagcatc

SEQ ID NO: 142380 - DNA, 1280 bp, Glycine max
  Clone ID: PAT_MRT3847_99585C.1
accgctgcgagagttatgctttgtttgttgttttgaaagtgactcccacgtagcctactcttctattcattctattctatattctttctctctctctctctcttttttctcttaataaatctaatcggaatcttcaccatttaatcagagctttgagtagataagactcgtggatgtgtcatctcctttattcaacgttgaatattgttattattcttgcccggtattgagaaaatactttttcgctgaagctctgaataacagaccatcatcgacagatggggtctgaaggtcctccagcagctgtggcaacagttcatgtaacaggtttcaggaaattccatggagtttctgagaatccaacggagacaattgtcaataatttgaatgaatatttgaacaagaagaagggtttgccaaaaggcttagttattgggagttgcagcattcttgagactgcaggtcaaggagcactcattcccctctaccagacattgaagtctgccattacttccaaggaatcagaatcttcaagttccaataaaattatttggctgcattttggggttaacagtgccgcaacgaggtttgctatcgagcgtcaagctgtcaacgaggctaccttccgctgccctgatgaaatgggatggaagccccagaaagtccctattgttccttcagatggtgcaattacacgaatacgggagactacccttcttcctgtggaggagatcaccaaggccttggcaaataagggctatgatgttatgacatctgatgatgcaggaaggtttgtgtgcaactacgtttactatcattcgcttcgctttgcggagcagaatgggaccaaatccctttttttgcacgtgccactcttctctacaatcaatgaagagacccaaatgcaatttgctgcttccttgctagaggtacttgcttcaacatgccagtaacatccgactcatgcaaatgttctggtgttgccatgcttatgaaagtggatgagtgagtgtactttgaatgagatgctttaaattatgattacaagatgctgttttgaaatggaaaaaggtttattgcaaatggcatgtgtagcagaagcgtttgctttcatcagtaaatgtttctgattaaaggcttcaacaaattgtcaagacatgttgacatcttcagtcttaccttgtgaataaatgttcattttccttgtccttaagaaactgttcttttttttggttgtaacttggttatgaatgaattgtatacgaaacgcgtgtccgagt

SEQ ID NO: 142381 - DNA, 144 bp, Glycine max
  Clone ID: PAT_MRT3847_99586C.1
ttactgacgctaatggaactacagctaatattggtgaacatgatactagcactaccaatggccatgatgatgatgatgccatgttattcacttgctgtcgacattaatcaacaactgaggcaagtgccaccaaagcataacgtg

SEQ ID NO: 142382 - DNA, 548 bp, Glycine max
  unsure (1)..(548): unsure at all n locations
  Clone ID: PAT_MRT3847_99587C.1
accaaggtcctgtcactctccattaacggcgccgctggttgtgtgtgttcccgacgccaaacgaaatctctagtagcccggcttggcgccagtctcagtgtatgctaggcttggtgcctgatgccgtcggctagcagcccactctacaatgggcgagcgcaagcctagttaccatggcgtggttatcttctgtagtcacctgaactgcagcatcacccccggtattaatttagtctgaatacccaaacttagtcgtatgggcaaaagcacagatagccatgcgtggcatctctatacgtgcctccctaagattacatagggcctgcttaccgcaagctgccccgagagagaactagtagatcctagcgctatgtacttgcgtctgtcaggagactgtagagagcctgcccgtgacgctagtgctgccgcacatatgctgcgcagatgtaggctagtcgcatagggcttataggaaactagtcattgatgctgccaagattggctagtagcggtgntagcctgcatactaggactcttttagccagcct

SEQ ID NO: 142383 - DNA, 587 bp, Glycine max
  Clone ID: PAT_MRT3847_99588C.1
tgtatgttctcagctcaagaagttccactttttttttttttttaatttcatgactctgtgtcattttcttctttaattgcagtagatagtgtggaatcatttctcccccctaaagtatattcctttcagcttgtgattttaattttctaattcgtagtctggttctgcatcacaggaatggtagatttgaggtgaagaggttccacattggtaaggtaatcctcagatctagctcattaacaccaatttcatgccctgattcatggaccaagcagtgttttgtgcctgctagttcttgcttgtagcagatattgtggattgaaggattctagggtttgaaaacagaaacactttgtaacctaagaaggataccttcataggagtaaggttagaaactaaatgtctatggctgtggttactgtagatttggtttccttcttgattattgcagatttagtttccttttcgacactaattttgcctataaatctgtgggtcagtcagtgggtgatgggtaaccaacattgtagatagaaatcatagaatcatatatttacgtttatagctacctgaaaaaaaaaaaaata

SEQ ID NO: 142384 - DNA, 383 bp, Glycine max
  unsure (1)..(383): unsure at all n locations
  Clone ID: PAT_MRT3847_99589C.1
tattttaataatttagtgtagttggtnttgtttttttaattatattatagtttaattaatatatatattaattttaagtggagttggtataatttgtgttagatgggaggtggggagatgggaattggtttaagggttttaatttatgattaattatggtattggatatatgggaaaaagagaatgtcaaatataatatgtgtttttagagtggcaataaggagagagacttgtaaaggaaccaagcatgatatggttgttgtaactttcttaaggtggagaaagaagaatgtgaagaaggtgaaatttcatgatcacgacgacgaggacaatatgtggggagggaacttaaataatctggtgagaaggaggaagaagaagat

SEQ ID NO: 142385 - DNA, 598 bp, Glycine max
  Clone ID: PAT_MRT3847_9958C.1
aaaaaagtatgatttactttaccctttcaaggaatgacaagctaaatataaaatcacaaattcccaataatttgtcaaaggacaaaggcatcaaaacaagattttcttctctctttcacaataagtagcgtccttttaggtaaacgagattaacatccttccttcaagatccaactccattgaccaattataagctcccaaagtatctgatagaacaatactctgcaaagattgaaaatgtcattagaaccttatctctatgaactaagcattccatttaacatacaagatactcatatatactgagaaaataaacatttcagccagttgtactgcatactagataagtacctaataaatacccagccatatgaacacaaacacccaacaaagtcataaatggacagcttcacagaacgtgcctatatcaagcctaggttactcaaatattcatccaaaaactcaaccaaccagcaaaacaattttgatgcaacaagtaataatttaaaactgttaccaatattttttatagtcacctccaacagatacttatctcctctttttcacttaatcctacatggacctatgaatctatatc

SEQ ID NO: 142386 - DNA, 447 bp, Glycine max
  Clone ID: PAT_MRT3847_99590C.1
aatggaacatcatctttgtattcatctctttatttttcttacaaaatcaaaaggggggcaaataataatctcaacattggtttggtttatttagttaatggaaaattcattatcaatagcactattggttggtgcacttctttgaagactcaccctagagtagtaaactccacttggtcctttagacaacaaacacaaatgggtccctttttttaccaccctccctttgttcaacacaacaattcgattacaattctttatagtgctcaacctatgagccaccaccacactcgtccttcctaccatcactcgttccaaagcatcttgaaccaccttttctgattgactatcaagtgcactagtagcctcatccaaaagcaacacttttgggttttttagcacagccctagctattgcaatcctctgcttttgccccccagataattg

SEQ ID NO: 142387 - DNA, 497 bp, Glycine max
  Clone ID: PAT_MRT3847_99591C.1
tccaataagagagaatttgaaaattattctcttgctcttgttgctcgctggttctcgtctctcacttagtcgtgctctctcttatttatgcatttcttctgtaatttaggtttgttgatttagatttggtcatgatttgtgcttttgattttatttctcgggtaaccatcggtaagatcgattttgataatgtttttttgttttttattttgattttgtttcttaggtaagctcccttttgattcattgattttttgtttctgatgtgttttggtatggtttttgtttttgtttgttgttggttcttattaatatttttgctttgcatgacttagcattatgtagagaactagcagagtacctgggttttgttaattttcacgcaatgttctaaaatgactttgagttgtactaaatttaacaatgtaatacacactcacaatttcgtatattcaaatccttattctgaagtttagtcataatttaagctagttttt

SEQ ID NO: 142388 - DNA, 625 bp, Glycine max
  unsure (1)..(625): unsure at all n locations
  Clone ID: PAT_MRT3847_99592C.1
cggtctgtgggattctgaaaaaaaagctctttatatcactctancatngnnnantggtggtggattgactgcttggttggtgcacatatcgaagacttctcatcaaaaaagatttagaccatttcggctttcacgccacaagtttagtcttcctcgtgaacatttttaccgacctccttccctctgggaagactttaaatcttatgctggtttgctcctggatggttttctgctccctcagattctgcttaacataatatttaactcccacgcgtccgctctagcatcttccttttatgttgggacaaccattgttcgtatactgccccatgcatatgatctttatagagcgcacagttctgcatggtaccttgatttatcatatatatatgcaaatcatagaatggatttttattccacagcctgggacatcataatccctagtggtggtattttgtttgctctccttgtatactttcagcagagatttggcagtcggtgcattcttccaaagaggttcagagaaagtactgcttatgagaaagtaccggttattggcaatgacgatttatgatgcattgactgcactttgtaaaatgatttttatccccggacattttttatt

SEQ ID NO: 142389 - DNA, 1227 bp, Glycine max
  Clone ID: PAT_MRT3847_99593C.1
ttttcaagattcagatttccataaaaagattgttatggtgaaacaaaaaatcattcatgaaggtggttggaacaacaaatggtgctggaatcttggaatgtcaacttgttgggtgagcctttagcattaaattttgttgcatctatggctgacagcttagccatggagttaaggcaaaaggaatgtaatgagccagtcaagctgattaaagttatatggagtcgacccttgtccctccccccactgaagctactagacctcagtttgcatgcaggggtagtgggttgttcctaattgagctacaaggggtgcagttgtcttccagcaatcagacaaaactttaggaagtttcagtgtgaaattccagttttcagattccaaccttgaggacaagattgatttttaggaggggtgtattgttaggatatatggagaaggaagagttagttaatatagttagactactagtgagttagttagttagttagagggactttttagatataaatagaggaagaaggataggagagagggggatcttatcatttgtagattgagcattagctctttgtgaaaggaaaaatcctttgtgaaggggaaacccttggaggagagttttctctcctattttctgttcttttcttactagtcaataaaatcttttattttcttcctcatttcaattcttggttcctaacatcccacttgtaggagacagtcattaacagtgaagattcccctgaacctgtggatagtggatcatcaagtgacaaagaggtatataactatatacattatatgtgttactacttatttttacaggtaagtggtcaacacaagaaaattactatccctggaaagaaaatgcagaccgtggcagaacgatttgaagaagctttagggacatcctctgttatgactgaagaccatggcagaacgatttgaagaagctttagggacatcctctgttatcactgaagggacacatgttggagcacttaattcattgagacctggaatatttggaaaactacagcagatgatgctgaaagaaaaagaaacagacatggacttctggaaaaagttacaagccgaagctaggccagatatggtatgtgactttttacatataatgtaaaaatcatttcaagataccgcgatggaaagctgactgtttgccattgctcctttagcaagtccacaaagaattttctgttacaagataac

SEQ ID NO: 142390 - DNA, 354 bp, Glycine max
  Clone ID: PAT_MRT3847_99594C.1
ccacgcgtccgctttacgcatggcaaggcaggcatgggtactgttatcaattggctacgatgatattatattagattctctggacatacaaacgcgggactctgtatgctgctgagcattgctttgtataataaactctactgtgtttgatggccatctatctttcggcggaactctactattgtttgtttatagtcaaagatgtatccatcacgttcatatggtactgatgctagacagtgcttattctagatagtgatcctcaaatagatgatactagggatattatgtgcaagcctgcaggagctgtaaaaaagcgtcgacttgttcatgctcaattaatacaaacggcgg

SEQ ID NO: 142391 - DNA, 366 bp, Glycine max
  unsure (1)..(366): unsure at all n locations
  Clone ID: PAT_MRT3847_99595C.1
acaaaaaataaaaccctttatacctatcattaagaaacacacgtaaacagaccaccactccccacttatctctaaatcccactcaacacatcacatccttttattatcaccccatatttctacctcaatgcccctccttttgaaagccaggnattcaatttcctgatgaccatcgccccaagaaaaaaacatcatgtctatcaacatgctttgaacctaaccttatatgaatatactcaactcctgatcctcctaaaaccccttctacccaccctacattatcgacttctgaccctttcattgactaccctaggccacattatcctccaccacctccacttcctgtacaccataaaactcccccat

SEQ ID NO: 142392 - DNA, 430 bp, Glycine max
  Clone ID: PAT_MRT3847_99596C.1
aatgggcgttctcacattcgaggatgaaatcaacttccgtgtggctcctgctactctccggacggccctaattacagacgccgacatcgtgataccaaacgctcttgataccttcaagagtgttgaaaacgttaagggaaatggtagtccaataaccatcaagaagatcactctacttgaggatggagaaaccaagtttgtgctgcacaaaatagattgcattgatgaggcgaacttgcgatacagctacagcgtggtaggcagtgctgcattgccagacacagcggacaagatcacattcaactacaaatcagatgctggtcctaaagaatggtctgctgggaagctcactgtcaaatactaaacacaaggagatgctgatcccaaccaagacgaactcaaaactggaaaagccaaggctgatgctctc

SEQ ID NO: 142393 - DNA, 590 bp, Glycine max
  Clone ID: PAT_MRT3847_99597C.1
atatatttttttagtgtttttgcaccgctcgataagtcatgcaaagcagaagcttttataggagacatttttcatgctttggttacattttgtaattcaataaagattcctcaaaaggactcatccaatcccaattcatcatgaaggattcaagaaattctacaaatttaaggtacctattttcctataaaatctttgaagtgatgcaaacgaatattgttacagttattatgaagaaaaaagaagtaattagctcagagagttataaatacacacatgcgggctcattcatgtattttcactgtgtgaacaggacatgcaaaggatgggatcttatattatacatctttcatcatgttggtcgtattctgtcttgtcctgttatagggggcaccttaccctcctccacaaagttgtacttttgctcttttctcccaattaaccacaagcccagtatgtcacacacacaaaccttttgaagagaaaggaaagagagaaggggaggaggaggagtattagcactttgctaaatgaaggtctaaccccacgtggattggagaggaagtgggataaaatgaatggagcgaaca

SEQ ID NO: 142394 - DNA, 365 bp, Glycine max
  Clone ID: PAT_MRT3847_99598C.1
aacgtgaatctcacatacacaaatacaaatgcttttttcaccacctcacgttgaaaattctatgctaactgggtcctgctcaaacacagaattatcttttcagagccaaaacaatgattccattataaaaaaacaaaggctcttccaccacctccactggctttgagcaaaagccggtgcaaagaaccccttcggaccattttgctattatcctcaagtgggctagtagcaggcactacctagttacagccactaccacacctcctgctagaccccggaaacttttccttggaagcgccctcgggccggcccatacgggcatgcttttgaaggctgaatgggggtggggcctccttgcggtcttg

SEQ ID NO: 142395 - DNA, 256 bp, Glycine max
  unsure (1)..(256): unsure at all n locations
  Clone ID: PAT_MRT3847_99599C.1
tctccgaacttgttgnnggnggcaaacccagncacccagccttggcgtagaggaaccnnaccaacacccaccacaaaganggaannnnganngaccggaaccggccacggccaaagccagaggnggaccccccccccccgcggcgcaacgaagccccccacccaagcggngcnccccnccncaaccacccacgncaccaanncagccgcacnnnaacaagagcaacaagnccaccaccacacccnaaccnaaaaac

SEQ ID NO: 142396 - DNA, 158 bp, Glycine max
  Clone ID: PAT_MRT3847_9959C.1
tctggttctgacttccaagttcagtccgtgtatgacatcagtctctgggggagtgtttggttactgtttcttgttgtagctgtgtatgtgatctgaatctattccagtccttttgtgcgtctctatctctctctcgtctggattactggcaactagat

SEQ ID NO: 142397 - DNA, 116 bp, Glycine max
  unsure (1)..(116): unsure at all n locations
  Clone ID: PAT_MRT3847_995C.1
tcgagcngctntaanctaatcaaatnctctcctctcaaacnaattccnacttttcntctngntngcctcccctcagaaaccaatgtccataatcactcnatgcngtcatcntcaaa

SEQ ID NO: 142398 - DNA, 1660 bp, Glycine max
  Clone ID: PAT_MRT3847_99600C.1
aaaaaacattcttttgctctgaagtgtatatatatgtaacgctgtgttgtttgggctatgctattaacccatgatggccatggccatggccaagtctacacctttcgctttcactcctcttcatctccgttctcgattacaacaacaacaacatcatcacaacgccaatttcccacaattcaaatatctcgctccctcaccccacaatccctttttcctcctcaacgtttccccctcctctcagttccgtcccttctttgccttccctcgacaacgccccaatttcgctataaaagctctcgattccgacgcagcaaatcaggaatcagttcacgttgggaaaaatgaaagttaccagcaatgggattcgcttaccgccaaattctccgctgccgccaattttccctttctgttactgcaaatgcctcaaatcatactcaatgctcgaaatctgttatcgggaaataaactcgctctctccgctgtcccctggctgggaatgctaactagtttgcttggaaacttgtctctgctttcatactttgccaagaagagagaaaaggaagccatggtagtgcagacgttgggtgtggtttcaacatacgtggtccttgttcagctggcattggctgaaaccatgccgttgccttactttttggctacttcagttgttgtcatctctggccttgttctgaatttcttgaattactttggtatactgaatgctggaatctggcgcttttgggaagatttcattacaattgggggtttatcagtgcttccccaaataatgtggtctacatttgtcccctatgtacctaacagcatcttacctggggccacttcctttgtgatagctgtcttggccgttaccttggcaagaaccggaaaactttctgagaaaggtgtcaaatttgttggaggaatatctggatggacagctacgttactctttatgtggatgccagtttctcaaatgtggacaaattatctcaatcctgagaacatgaaaggcttgtcagctttttctatgctccttgccatgcttggaaatgggcttatgcttccacgtgctctcttgattcgcgatttcatgtggttcactggttcagtgtgggctactctttttgtcactcgtagaacgcctgattacttcttataatgtagctgttgaatgtcatactgttatatcatggttacctctactgcactaattttaggtagtagcgcatcctcatcacgagattgccgtaaacatttaaatccatggatatacgtgttccgtgcttttggggttgtccaaagactgctttgatgcataataggcaggtaacattccactgatctgttacactctgaggaattgctggaccccttgtctggagaagtcgccaagatgatgtcagaatacatattgttccagcaaaatgtggatattttttgtttgtttttcatcttttttgtctcttatgttcagtaaaacccttttatggctttacaagctatatgactggatttttttttttgtctcgtggatgtttttgtcatgttctatcattttcagttaaagttgcatgataatagtgattcatttttgttcttacgtattatgttcatcttatcattaacgcgtatctaaagttagcctccctttatcctt

SEQ ID NO: 142399 - DNA, 599 bp, Glycine max
  unsure (1)..(599): unsure at all n locations
  Clone ID: PAT_MRT3847_99601C.1
cgaattcgacctcgttacccggggatcctctagagtcgacctgcagataaattcacccaaaatgaagtccaattataagaatgtttgatacaaagaaaaaaagataagaatgtttttccctttttgctaaattgtggcaaaatagataatttacctgcatatagggttttggcaatgaaatggaacttatgactgatgattgaatctaaccgggccgttagatttcaactgacctaattcaaccttaaaccattttcttagcccttctccgttcagacatgcaaattaattttggtttcatcaaaaccatgtcgaatccgaaagagctagccacaaaaccacaatctaatttcaccaaaacctctcttttctctttcttacttggcaaatgtgatttgtttgcaaccttgcatgagcattcaacatttgtcatttccgaagagaaaaccaatagcagaggagaaatggttccttgtgcagtacgatgtcgaagaagcaaaacaacttcatatgagatttgttggttaatctcgtaagatcttgtgggatagacctggtccaaattggaccctgacaaattanggtcccttcaattatgt

SEQ ID NO: 142400 - DNA, 409 bp, Glycine max
  Clone ID: PAT_MRT3847_99602C.1
ggctcgagttttagaaatgcatgcaaacttcacacttgctgtatttccatcatttcgtgacaacaacaacataaccctctcgcccccaacacacacctcttgtttttaaggggtgatcttataccaggatttttggcactaatttctctatgggagaagcaccagcattgcttgttgatgacgtgcaggatggtgctctgaatggcctcggattgaaaaatggaacttgcaaaacagctgctactgttggcgataagatggtgagtatatgcaatatgctacgaatatcacgattatctgtatgtatgttggtactcataattagattagtgcctagtcaaatcttctgcctaaagcgaaaactggggcttcaattttttgacagtatgtcattggtggagctgatgat

SEQ ID NO: 142401 - DNA, 297 bp, Glycine max
  Clone ID: PAT_MRT3847_99603C.1
gaagactaaagaagaagaagaaatgattgttgttgcaatgaaggaaaaagttgcctccgtccaagctgaagcttatgctcaagctctagactataccattgtacgtggggtcattaatgttcttactaacactagcatcatggatgaaacaccaaagacatccaatgcagccatagctgatgaagttgtccctcaagacaaggaacttgcattctagaaaagtacaaccttaaatgaagctaccttaagagaaaagggtgaacctgatgttattggtggtggttactctacaagctc

SEQ ID NO: 142402 - DNA, 315 bp, Glycine max
  unsure (1)..(315): unsure at all n locations
  Clone ID: PAT_MRT3847_99604C.1
acttgaaatagaactcaaacttattcttttttttgacacaaaggctgatagacacangagattagaacatgaacaaaattgtaacaagagcaagaataggaacgagacaaatgcacaagcaagaacgcagcatgacgcaaacaagaaaacaaatagcagaacaatgacaaaacacgaacctgtacaaattacaaatgagaatactgggataggatagaatagaacctgtatcaagagccgaagctctgataccagatgatgggaaacctgactaggtagcggatcgcttgatacaggctacgggagtttggatga

SEQ ID NO: 142403 - DNA, 198 bp, Glycine max
  Clone ID: PAT_MRT3847_99605C.1
cctaaagtgtggcagaagcaatgtctggcatctatccaaataaagtcatcaaatcttcatcggagaattcttgacaaaacataataaagttggttaaagatggttttattatcaagaagccaactaagattcactctcgctctagtgctcgtcgaatgaatgatgacactaagaatgaacgtctctatggctatgctt

SEQ ID NO: 142404 - DNA, 405 bp, Glycine max
  Clone ID: PAT_MRT3847_99606C.1
gatatcgtccgccggataaagctactgcagctactctcgggcgccttttttttaccctgagttattgctttaaatggggtaggacacccaacactttttagcattcaatggcatacggaaaaaaatataacaggacacatcatatgacatttccagggtacatgcaaacggagaaactgtccatgaaaagggaaaacactactagcccatattcagaatgccttcaagcaaaaaagttaatcatccttgtaaactttgcaaggactaatttcaaaaccaccaccttaccttgacttcaacgtgttacgcatgtaggtacctaaaattctgtcccaaattactgaaaaagggtacgaaaaaacttccttgatgccataaagccagaggtgcacattgaggtatgct

SEQ ID NO: 142405 - DNA, 359 bp, Glycine max
  Clone ID: PAT_MRT3847_99607C.1
tgattagccgagggatccggagatgtaaaatctccattgaagaacgaggttggaggagatttgtcgaaacccgcctggacgatacagaggttgattatgctgatcgtggtttttcacagaacagtttcattatgggaaaagctatggtaggggtttgattcttatatgaggaggggttgatggattttttgaggtaacatatgcagggtatctaaggtggaaaaccgagagagtggactccgacgagttggggaagcttgcttcatgatatagcctgactagctatacacccatccatacacagatactcttagcgtgaggccgactagctctctgtatgtggataaaatctatgaggt

SEQ ID NO: 142406 - DNA, 607 bp, Glycine max
  Clone ID: PAT_MRT3847_99608C.1
tcgcgatctagaccaagttaaaccggaagaaattgttggcatagctggcaaactttcggatgctgagtccatgattgcactaaaagatttcataaataggatggggtcaaatgatgtatggggtgaaggcattggtgtaaatactaatgctgatttcagatccggatatattatgaatactagcattgctggtcttgaaaaagcggatgccttcctgttggttggtacccaggtatatctcattatctctctaatgtattttaataatgtctgttttttaatgttacagatggtcaaatgattcctgtgttagactaaataatttttcttaagtacttcatcccataattatttagcaattcacttatgtaaaattaagtattctacaaggttaatgactttttgttgatttttcatatttttttggcttgttaacaaattagggatcctaggtttttattctattctggtatcactacccttggataccttcagttctctctttatactctgatgacaacagctataagaggtcagtctgaagtcttacaatgacatgcagctgtagaaaatggtattttcctatcaataaattgtttagcaatat

SEQ ID NO: 142407 - DNA, 182 bp, Glycine max
  unsure (1)..(182): unsure at all n locations
  Clone ID: PAT_MRT3847_99609C.1
aaaccacccnncaannaaangaaacaaaaaaaaaggcaagtaatgaaattcaacaagcattgccaatttaacccataatttcaaggaccaaaaatctaaaacacccccataattgtaatttcagagaacaatttcagaagtacttactccttattatcatcgctaccttaccatgcaatttg

SEQ ID NO: 142408 - DNA, 194 bp, Glycine max
  Clone ID: PAT_MRT3847_9960C.1
aacaatcagttcaagcagagaagtcttatttatgtggtcagctaaaaaacttctacagcgttcttcggcacgaatgcaacatgaaattatcatagcaacatcgattctatcatggacctctccatcaattcttgctcattagcagtgtcaatcccccaagtgaaagaacttgtcgggcattttctaagttcttg

SEQ ID NO: 142409 - DNA, 316 bp, Glycine max
  unsure (1)..(316): unsure at all n locations
  Clone ID: PAT_MRT3847_99610C.1
cggcgacggtgcanaatacacagaagggaaattttttcttctatcctaacccctaccatgggcgggggcttttggattgattccataaacaaatttatttactattataatatttgtagcatttaataaatattatcttcgacctaaatatttaataaagttatcacttttttttttgaaagaataaagtcttcattaattggcttatttaatattacattattctacttaatttttatattatctgtattaagataattaaactgatatttatattaaaactaatatttttccatgaaagaaaaatgttatttaa

SEQ ID NO: 142410 - DNA, 375 bp, Glycine max
  Clone ID: PAT_MRT3847_99611C.1
cccacgcgtccgcccacgcgtccgcccacgcgtacgcggacgcgtggggttctatgggcgcgtacctatgtgtccttgagttctaaggagacaggaacctacgtctggtggatgaatcatgaccgtgtgatcagagcgtgattaacgtgccgggtgagtttctctttggagtagtctcatctttggctgtagaggatcgttcttaggacacttgcatgtgcctgggaatggtcatacggatgtctgacacgaccaaaaaagatataaagacatagaggtattcgatgtgatgaaggttgaatccgagtttaagtcgatgtcattcgatgataaatgccatgatgttaaagggaagggctaccgaagtgcaatatc

SEQ ID NO: 142411 - DNA, 2214 bp, Glycine max
  Clone ID: PAT_MRT3847_99612C.1
agagcgtccggcgaggtggcacagaaactgcttcttgaatctgagtccaagagagggaagaactctctaattcgtgctggatacggtggatggctaatgtataccgctgcctcggccggggacttaggttttgttcaagttcttcttgagaggaactctttgctggtttttggtgagggggagttgcagtgttactgacatactctatgctgctgcaaggagcaagaattgtgaggtttttaggctgctatttgattttgctgtttcaccaaggtttttgagtggcaaaggtgggataatggaggagaatgttggggacattccttctgtttacaggtgggaattgaccaatagggctgttcatgctgctgctagaggaggaaatctgaagattttggaggagcttcttgccaattgctctgatgttttggcttatagagatgctgatggatctactgttttacatgcagctgctggcagagggcaagttgaggtaattaaatatcttacatcatcctttgacatgatcaactccacagaccatcagggtaacactgctttgcatgtggcttcttccaggggccaattaccaacagctgaagctctagtctcagcatttccctcacttatgtctctgagaaacaactctggagaaacttttctccacagggctgtgtccggttttaaatctcatgcattcagaagattggacaagcaggttgaacttttgagaaacatgctgagtgggaagaactttcatgtggcagacattatcaatgtcaagaacaatgatggaagaactgctcttcacatggccatcataggcaacattcacactgatcttgtgcagctcctgatgactgccccatctataaatgtgaatatatgtgatgttgatggcatgaccccactagattaccttaggcaacaccccaaatctgcatcatcagatatactaatcaaaaagttgatctcagctgggggaatgtttggctgccaaggccatagttcaagaaaagcaatagcatcacacttgagaatgcaaagcattggaagcagtccagggacatcattcagagtctcagacactgagatgtttttgtacactggcattgagaatgtgtcagatgctagtggtgatcatggaagtggaggaatgagttcatcttcatctgaacacattccatacgatctgaatgccactgagaatcgcgtaccaatcgcagccaaaaggcctagtactgtgaaccatgcagcagcaagtttgaagagagttcttctgtggcctagggtgaaggacaagaaatctgaagggttcaaaaagtcttctacaacagatgagggttcagtggactcatgccggaagcggaataacagctttgatgaaactccaaccccacttagacaaagattttctaggccatcttcacttcccaacaacaaaagaactctttctgtcaggagtcagcaatcaagtccaaatgccaagaagaggtttgcttcaggaccagtgcatggagtcatacaatccatgccacatgcaaatgtttctggcagatcaaggtctagttccttttcaaagtcgtcaatttcttcacctagatcaatagacaagcaaaagggcattttcattgacaatgacattgccggaccatcttgctcaagtcaaccatcaccaccacctgatgatgatgaatcaccaaagttggtaaagagaacttctgttggaaggaagttgagggaccattatttctgttttggtgcacctggcattaatgtcaaaaactcagttcacaggcagcaagaaagccagagttacaaggctcatgttgttgcagtggcttaatgggatgagcttatataggtaattctcctgaccaggctaattcaacaaataagggatgaagctgattcatcaactttaaactttactgttaagggtcccttgggggttccttagttgcaagcttttatagattatattttgttacttaaggattagctcatcctcaacttcacttgttaatggtaaaatgctgttaaaatatgattatcatattagcatcaaattaactcaatttggtgcttagtaatgtaagaattagtgttgccaatgtactgattaaaccttttggattaagcagtcatctgcatttttgttaaatgattgactactaattccatttataagattaattccattttgaatttggt

SEQ ID NO: 142412 - DNA, 438 bp, Glycine max
  Clone ID: PAT_MRT3847_99613C.1
ctagctatctcgatcgaactgtccaaggtcctgtcacaataacggcagtttattagctaggtaccttagagaactggctcctatgcaaccgccaccaaatagctcgagtggtaggagagcgggctaagaacagaggtaagtccagtagcattagtctgcatcagcgaaaggatgagcataggacaaacaaacgcgcccacagtgcgcggagcatggtgtgcgcacccaccagggtggaaataacaacatacgcacacacgtgggaccgcgcccccatggccatggtcgggtacgtacgactatacgcgagacccttgagcagcgtaacatgccgagcacaaagtgccaacggcgcgaggtttatatgttggcaccaaccaagtaacagctgcgcgaggtgccacaacaacagtgtagacgtaatgcctgtcccaaggt

SEQ ID NO: 142413 - DNA, 761 bp, Glycine max
  unsure (1)..(761): unsure at all n locations
  Clone ID: PAT_MRT3847_99614C.1
ccccgagcgaacacgcgcaggccacgcgttcgcccactcgtgcgcccacgcgtccgtacgactgctagaagacgacagaaggggactaatgaaatgtacaatggttgttctgatgattctgcttatgggagtgatgagaacagcactgacactgattcttatcctgctccaaaggctcacagcaacaggaacaacctcagtgtccagaaggggaagaagaagaagaaattgaagtcaaagaaaagcaaggcacatgagtgtccaatttgcaacaagattttcaggtcaggccaagccttggggggtcacaaaaggtcccattttgttgggggttctgaggaaaacacacttgtgataaggccaagtgctcctcctgctgctgttccttgcctcattgatctcaatctaccagcaccggttgatgaatagggagaaagaaatgttggtgccaaaatcctggttttttttttttttgcatcattttgaagcatcttctgttgaggtagctgaatgtctctggagttctgaaaatgtcttgtctttatccccatatgatgaaagcaatgacaatgtacagacaagtgggtaattggtttttgttcctaaggccttagatccattatttggtaggggtagtctttctttttcatgtttatgggatataagaacttactagtttctccactgaatattttctttacttcctttatcaagtacaactatatattcctggaantatgttcttttcatgcagatgtaac

SEQ ID NO: 142414 - DNA, 818 bp, Glycine max
  unsure (1)..(818): unsure at all n locations
  Clone ID: PAT_MRT3847_99615C.1
gtaggttgtcaacaatttgaggctggaattcagcttatggatgaaatggttgaattagggttttctccaaccgaggctgctgtgtcggggttagtagatggattgagaaagcagggaaagattgacgatgcttatgagttggtagttaaggtggggagatttggttttgtgccgaatttgtttgtctataatgcattgatcatctttttgtgcaaaggtggagatttggataaggcggagctgctttatagtaatatgagtttgatgaacttgcgtcctaatggcattacttattctattctgattgattccttctgcagaagcggaaggttggatgttgcaatatcttattttgatagaatgatacaagatggtataggagaaactgtatacgcctataactctttgataaatggtcaatgcaagtttggggatttgagtgcagctgagtctctgtttattgagatgaccaataaaggggtggagccaactgctacaaccttcacatcattgattagtgggtattgcaaagacctacaagtgcaaaaagcatttaagctatataacaagatgattgataatggaattactccaaatgtttatacttttactgctcttatttctgggctttgcagcacaaataagatggctgaagcatccgaactttttgatgaanttggntgaaaggaaaatcaagccaacagaggtgacatataatgtattgattgaagggtattgtagggatggcaaaatgataaagcctttggattgcttngagacatgcatcaaaagggccttgggtctgacacatataccta

SEQ ID NO: 142415 - DNA, 2503 bp, Glycine max
  Clone ID: PAT_MRT3847_99616C.1
aaaggaggatgaagttctatatgaggccacatttgacttaccagaagctttcgggaatgtgggtgctgttttagtacagaatgaggatcacaatgaggtttttctaaagagcatagtgcgtgatttcataattaatggttctcttcacttcacccgaaattcatggattcagcaaaagagtggtagttctgaaaatagagttttcttgtcttaaatgtcacacttgtcaacacaaacaccaagtcgattgataaagtagaggccagaggaaattaaactatacacatgaaatgaagaaccataggaaccaagaaaaactaggaaaatcaaataagaaaaaaattatgagttatgtaaatctggaatatgccttaaaagaaaagggagtggtcatgccagataccaaccattttttcatacaataggttatcaaaaggaaacaaaaatcccaacactatagtctaccagaaacagttatctccagagaagccatcgacctacatatgctaggttattgcacaattgaagaggccattaaagagaagaagttgtacatgttagactatcattatctattgttactatatgtaagcaaagtgagagagattgaaggaaccacactatatggatcacgaacactattctttctcactaaacaaggaacattcaagccactagctattaagctcactaggccacctattgatggcaagccacaatggaagcaagtcttcactcctgcttcttattcaatttctcatttaaccaatctttggctttggaggcttgccaaagctcatgttattgcccatgatgctggtgttcatgaacttataaatcatttggttaagaactcattgctgtcatggaaccctttgtcgttgcaacaaatcaggcaactaattgtcatgcatacaatctacaaactactgaatccacaggtcaccaaataattggctattgcacagctgaataggccattaaggagaagaagttgtttatgtttggctacaatgatttatccttaccatatgtaagaaaagtgagagaaatcaagggaaccacattatatggatcacgaactctattctttctaactgaacaaagcacattaaaaccattagctattgagctcacaagaccagatatggaaggtaagccacaatggaagcaagtcttcacacctgctactcattcaacttctcatgcaaccaaacactgtctttggaggagtgtctaagctcatgttctcgctcatcattctggtattcatgaactagtaagcctttggttaaggactcattgtgcagtagaacccttcatcattgcaacaaatagacaactaagcaccatgcaccctatctatagattactgcatccacatatgagatataccatggagttcaattcactagcccgcgaggtgcttgtcaactcaaatgggttcactgaaagttccttttctcctaataaatattaaatggaaataagctcagtagcatcagaacatctttgtaaatatgatttgcaagcactccccaatgatcttattcatagaggaatggctgtggtggatccaaatgcaccacatggcctaaagctaacaattgaagattacccttttgccaatgatggtctccttatatgggatgccatcaaagaatggatatctgagtatgttaaccattactatccaagctcaagcataatagagtttgaccaagagctccaagcatggtggacagaaattagaacagtgggtcatggagacaaatctgaagaaccatggtggccaaatcttaaaacaccaaaagaccttattgaaatcattacaactatagcatgggtatcatctgctcatcatgcagctgttaactttgcccaatatacttatggaggctatttccctaataggccaacaattgttagaaataacattcctacagaggacccctcgaaggaagagttggaaaaactcataaacaacccggagaaaacatttttggagtctttaccatcacaaattcaagcaactttggtgatggtagttttgaatttattatcgaatcattcgccagatgaagagtacattgggcaatatgtggaacaatcgtgggttgagaatcaaactataaaggcagcctttgaaaggtttagtacgaaattgaaggagattgaaggtattatagactcaaggaatgcaaattgtgatttgaaaaataggaatggagctggggtggtgccttatgaactaatgaagccattctcagggcctggagtcactggaaagggtgttccatatagcatatctatttaaagattgttattttatatacaatatttataattaatttcttactaatgcaatgtatgtgttttgtggaatctttaataaaatattcacatagaattttattccacaactaaaaaaaaaaaaaaaaaaaagaacctcgaaatgtctatgcgctttattccaaagctgagaagcatgcattcatgatgt

SEQ ID NO: 142416 - DNA, 570 bp, Glycine max
  Clone ID: PAT_MRT3847_99617C.1
tccaggaaggtttcccgtcatcactgtatgacgtcctccttctttggggggggggggggggaccgggtatagccagacatgaccgaccggacacatgcgaacggcgtataggcggaaccgcacagcccaagacattacggcaacaaggaacgggcaagggacagagacaaacatgcgataacaactataggtatgcgaaaaacccgttggatctaaaatcgaagagcgagcaaaagacgtggggggacagcaaccagttaaagcgggagccagaaaggatgcgcgtagggtaacataagttggttatgcccagggagcgggttaaaaaaaggttggataaaaaaaacggatgcgcgtaattatatggggaaataagcgaaagaaatgacataccagcgggagtgagaatcatgaacaaatgaggagtagggtgggagcgcgaaataaaaagcgattcgaaaattaataattataaaaaaaggccaaggggttgacgggtatggccgaggggtttgtagaggggtttcggagaagggtgctattttaagtttactaggatatacagggagg

SEQ ID NO: 142417 - DNA, 488 bp, Glycine max
  Clone ID: PAT_MRT3847_99618C.1
cgatcctttagggataaactgggcagggtggaggctggcctgcccaggtatggactaagataggcgcatgtgagtaacaacacaacgactgttaaaggactatggaacctggttttgcctacgaatagcacatgaatattgttgaaagtgccgacacattgagggatacacaaggatccaatgatgctttgttgaacaattaacaataggccttggacccttatatgaagaatatgactaacattgaccaaaaggcctctcaataagctatcttacactgctgactttttattaattagctacaaagttttttaaatgctggaatcagcgctcccacactataaggaagggggaataaactggcgctttaccaaaggaaaaaatgatagcttgttatgctcaacacaaagactcttaaaaggtgaacacaaagatgttctacttaactactacactagaagtgttggaataacaggactgactgtata

SEQ ID NO: 142418 - DNA, 281 bp, Glycine max
  Clone ID: PAT_MRT3847_99619C.1
cacccatggagcgacacaagtgccgatgtcatgcctgtattactcacacacacacaactgttgatctgctatctccacacgcgagcaacagtagctctctaccctctatccacctctgccatggaggaaccaatggctgtcgactacaatcaccgaatacagtctcgactttgagtccacttatccctgctggaagaacctaggcatgacacgctaaacgaacgacatgcagtgctactagtcattctacttctacagtgcctagtacgccataaacgaca

SEQ ID NO: 142419 - DNA, 652 bp, Glycine max
  unsure (1)..(652): unsure at all n locations
  Clone ID: PAT_MRT3847_9961C.1
agatttcccaagagaagtttagattagacctatctgctantaacttggtttaaggagagtatggcacatactagtggcaatgctttggtgcagtggctagtagcatcattgctcattgccatgttgggtggtgccaaagcttatgttttatgtgacatagagtcaaataagctaagcttatgctatgcagcagttactgggagccaccctaaaaaacccaatgaaaaatgctgtgaaattgttcaacatgccaatttgccttgcctttgcagatacaagtctatcctacctgcacttggaatcaaccccaccaatgcttttgccttgcccagtaaatgtggtctgaaaacatcacctaaatgtaaagtgatttgaagaaattcttgagaatcccatccttttaagcacccttttagtctttatttgtctttcatgtgctgtattaatattgaagaagcttttttctacattggcattttgtgcctctcaaataaattagtagtttattttccatgtctttctcacatgtttgcaaggtgtatgatgtatcagttccctatcaagtagattctacaaaggtgtttgatgtactactattcaaagattttcaatctgtaatctgtctaataaaatgcttgtttcttgttttctg

SEQ ID NO: 142420 - DNA, 1226 bp, Glycine max
  Clone ID: PAT_MRT3847_99620C.1
cgtacgtaatgctcggaattcggctcgagctggcctttgttacggatatcaatgtccaggttcaagaggctataaactactactcaattgagtcatcagttgcacttttagtaacattggtgatcaatctgtttgtgataaccgttttcgctagggtgttctacggtacagaacaggcgaaaggcataggattggtaaatgcagggcagtatcttcaggagaggtatggaggagggttgtttccaattctctatatatggggtattggtttgttagcagctggacaaagtagtaccatcacaggcacatatgcagggcagtttataactgagggctttcttaagctcaatataaagaagtggttgagggcattgatcactagaagttgtgcaattgttccaactatgatttgtgcaattgtttttaatacatcagaaggttctttggataccatgaatgaatggcttaatgtggtccaagcaatacagattccttttgcacttatcccccttcttactttggtgtccaaagaggaggtcatggggaccttcagaatagggcctatagtagagagagtggcttggagtgtggctgtgctggtaatattggtttatggatatatgttattagatttcttcctggatgaagtggatggagtgttgtttggttttctagtcttccttggtgctgcagcatggatttcatttattatatatctggttcaacatagtggtgccatttcttcaatcctagtgaggtcctcttattccaaaggctttttctctcttgctggcaactaagctatcaaattcatacaatttttgggacctaaagattaaaagaatgaattatgttgccaattttgcaagagggtcgttgatactgttttccaaaaggaagcattggttcaaaagggctgtctctgaacttggaaaaggaatgcaagtccatgtagttgaaagaaattatactttggcaaccgagaactaactcttcatgcacaagatgaaggtatcattatggtgatataagaaacttttactaattaaggtctgcaagattcttttgtatagaaattagaatagactacctgattataagttgaaacagcttaggatgtaacatatagtcaaataggtttatttttgcggtatcattgggtcattacttttaagttgtactagtgatataacctaagaaatacagttgtcatactctgaaaaaaa

SEQ ID NO: 142421 - DNA, 206 bp, Glycine max
  Clone ID: PAT_MRT3847_99621C.1
aagatatcccagggtggttccagtggaaagatagctttcagtttaaaacacaagtcatagctggtgacaaccctgttaagttgagtgctgatgatgatgaagaagaaacagaagctgggtatgtttcaaacgatgcaccactagaacggcaagagttaggccatgaggaaggcattggccaatcatcaagacatcttgatgttgca

SEQ ID NO: 142422 - DNA, 528 bp, Glycine max
  Clone ID: PAT_MRT3847_99622C.1
gtttatgtccctttatatgatggacagctggcagtagcaagggcttttggtgacaggagcctgaagatgcatcttacttcagaacctgatgtgattgtacaggaagtagatcaacatacagagttttttattctggctagtgatggaatatggaaggttaacttcttttgaaaaaaattctttgtttataaataagtttttatgggaaatcgatcataatcggatttcattggaaatcatggaatgtgctgaattagtgtcttaaaaacccttgttagcattttccctgaaaaagggtctttgttttaaaatatttttttcttaaagtattatttggcctaataacttcttcttttacagagaagagaagagaagctcaatgttaacttaatcgaacactaccttaataaatctaggagacactacttaatattacactagtagggagggtggggaatatagcaatttatcaaatcttcatgatggatatttgattttctactttattaagtaatcccaataactaaa

SEQ ID NO: 142423 - DNA, 298 bp, Glycine max
  unsure (1)..(298): unsure at all n locations
  Clone ID: PAT_MRT3847_99623C.1
gtcgcangcacgcgtacgtaagctcggaattcggctcgagnnnctnnanannttgaganatcnnncnnnnntnnnnncngtngncanncganaccntnagctctcggnnncttgntantttcggnncgcnnncgatactntnaccgtnattnnnnnnnntnnncngggaanntggtnnncgnggangnangnngnggcgctcaagntcctntgtgacncggcngntcananggnacggtaccgtnatnncgtncntgtgtntccccnaantngannaangggtctagnattgcgcatg

SEQ ID NO: 142424 - DNA, 817 bp, Glycine max
  Clone ID: PAT_MRT3847_99624C.1
acggctgcgagaagacgacagaaggggattttcgtcgtgagtggtgacgtgccctagccccatatctagtctccctctctcaatctcacatctctcgtcgccaccgccgcgccgcacggaggcacccacggaaccaatctagccatcagttgaaacagtgagcttacaaaaaatggcaactgcacctgcacaaattcctacaagctttggccatgagttgagggcttgtcttcgttgccgccttgtcaaaacctatgatcagttcagagagtcaggctgtgagaactgctcattctttaagatggaagaagatcacgagcgtgttgttgattgcactactcccaattttaatgggatcatttcagttatggatccaaatcggagttgggctgcccgttggttgcgcattggaaagtttgttcctggtgtttatactcttgctgtctcagaggctcttcctgaagagatgcaggctatatgtgaagacgagcgtgtgcagtatatccctcccaaacgtttgtgaatgacgtaaatattggttttcatactctagtgtgatgggaattgtctggatgaaggtagattttaatgcatttgctaagtgacttcttagaattgcccgagctttatgatgtgtttttcttctgatgaagaaataaattgatgacgagttattatgtactatggagagatcatgaatcaaacattatttactgcgtttttgggcctatatgctcttgactctaacagaaaaaaaaacaagccactttggatacactaatcaattaaatttctcgcatgtcaatttatgtactgt

SEQ ID NO: 142425 - DNA, 967 bp, Glycine max
  Clone ID: PAT_MRT3847_99625C.1
gtgacgtgccctagccccatatctagtctccctctctcaatctcacatctctcgtcgccaccgccgcgccgcacggaggcacccacggaaccaatctagccatcagttgaaacagtgagcttacaaaaaatggcaactgcacctgcacaaattcctacaagctttggccatgagttgagggcttgtcttcgttgccgccttgtcaaaacctatgatcaggtcttagtaccctactaccctttatttttcatcattgttttttgtttacaatttctgtttttgtttcacagttcagagagtcaggctgtgagaactgctcattctttaagatggaagaagatcacgagcgtgttgttgattgcactactcccaattttaatgggatcatttcagttatggatccaaatcggagttgggctgcccgttggttgcgcattggaaagtttgttcctggtgtttatactcttgctgtctcagaggctcttcctgaagagatgcaggctatatgtgaagacgagcgtgtgcagtatatccctcccaaacgtttgtgaatgacgtaaatattggttttcatactctagtgtgatgggaattgtctggatgaaggtagattttaatgcatttgctaagtgacttcttagaattgcccgagctttatgatgtgtttttcttctgatgaagaaataaattgatgacgagttattatgtactatggagagatcatgaatcaaacattatttactgcgttaaaaaaaaaaaaaaaaaaaaaaaaaaaaaaaaaaaaaaaaaaaaaaaaaaaaaaaaaaaaaaaaaaaaaaaaaaaaaaaaataaaaaaaacaaaaaaaaaaaaacaaaaaaaaaaaacataaaaaaaaataaaaaaaaaataaaaaaacttaaatggggggggcgcttttaatagaacataattatatccccatctcttgccaaaaataactttttttt

SEQ ID NO: 142426 - DNA, 372 bp, Glycine max
  Clone ID: PAT_MRT3847_99626C.1
ggaaaacccaaaaaaaccaaaaaaaggcaaaaaaaggcaaaccgaaaatctatcaaaatctacccccctaaatctaaaaaaataaggggggaaagaaaaagagggttttttattaaataaaatggagccccaaaaaatgggcggaaagctaaacaaaaaggactatttgggaaaaaacgggccaaggagggcccccccggggttcccctaaaaaagccgcggctaagggggcaaaaaggaaagctggaaaaccgctgggaaataacccacggaacatgcccggtttgggaacccccaaggggcccaaaaaaacaggaacaacccctcctaattcctccgctaaaatattcccgaaaaggcgaaaactaaaaa

SEQ ID NO: 142427 - DNA, 774 bp, Glycine max
  Clone ID: PAT_MRT3847_99627C.1
cgtccgcccacgcgtccgaaattttccatctcatggtcttttaatattccccaagggcaagggagcaggtgacaccttgggggtcaagttctacaacgatctcattaatgagattatagcaaatggtaaacatgaattgatatttgagttacccatgcattcatttattttcaaccttttcgttgataactttgttttggattttatttggggcaggcttaaagccatttgtcacgctgtttcattgggacctcccacaagctcttgaagatgaatatgggggatttctcaaacctgaaatagtggaggacttccgtaactatgctgacttttgcttcaagacatttggtgatcgggtgaagcactgggtaaccctaaatgaaccatatggctacagcgtgaatggctacagtggtggaaattttgcaccaggtagatgttctaactacgttggaaaatgccctgctggtgattcttcaccgagccctacattaccaccacttaatacttgctcatcagcagtaattgctagaacaaataccgctcatcagaaaggacaaattggagtcaccatagtgactttcttctttgaaccaaaatctaatagtgatgctgatcgcaaggcagcaaggctctggactttatgtttggcttgctaatcccattacatttggtactatcctgagagtatgagatctaataaatactcaattatatatgattcactatagtatttttaaataatgaaaaagaaaatatagtaaatgtttatgg

SEQ ID NO: 142428 - DNA, 1014 bp, Glycine max
  Clone ID: PAT_MRT3847_99628C.1
tggtaataatggagtgagatgaatggggtcgtcggttggacaggtcaatgtaatgcaaccagcttgcagcaatgcagcgtctgcagattccattttgagtactaaaactgaaccaattctttgttttactggaaggcaaactcaatcaaacctttctttttctggtgttactggagagagtagtgctggagactatcaagactgtggggcttcttcaatgcttctcatgggagaacctccttggtttgctccttgtccggagaattccctacaatccgccaaccgtagtaatgctgtcatgcggtacaaggaaaagaagaagacacggatgtttgacaaaaaagtgaggtatgcctctcgcaaggcaagggctgatgtcagaaggcgcgtgaaaggccggtttgtcaaagctggtgacgtctacgattatgatcctttgagcacaaccagaagcttctgaatgaggggccttgattgatgttcttcgaggaggaaaagggctgtgtttaacagtgtaagctcgggatccggagccgactctttgtccttcactgtgaaggatgtccaacttgtgatgatgattttatcacaaagtgcccccttcaggaaaatggtgtttggattgcctttctgttaaagcttggcaatttctgctgcataattcttttccaagaatttaaaaagccttctaagttctttgaccttaaccatacttccatgtctgtgatgtggtcatgtaaactccccctctgctatatagtcacatgtacaaatgcctgagatggcatgataagtggcttacttttaacagttccagataaactacaaaggttgtaaattgtaatatttggctttgacatgtatagcacacagtctacatatataattttacccaactcttttatgtaatcagacaaaaattgtaaattcaatctctcatgtatagaataggatactatgcatgttgatggtagtctatatatatattggacatggaccgaatttctttttcta

SEQ ID NO: 142429 - DNA, 266 bp, Glycine max
  Clone ID: PAT_MRT3847_99629C.1
cgcgaagctggctattttaggccactggtacagtatttgaaagaagggtctgacatgaacaagatcctaatggcaaaagcactttctaggttggagctcactgatcacagcaaactttcccttggagaagctggggcaattgagccccttgccaatatgtttagtactgggtaactcgagtccaagttatcctctctaaatgcgctacaaaatctgtctagcatgacagaaaatttgcaacacttgatcagatctggaattgcagg

SEQ ID NO: 142430 - DNA, 321 bp, Glycine max
  Clone ID: PAT_MRT3847_9962C.1
gccgcagcagcctctggcaacaccgtggggctccagaaacggcagcgtttgggacgacgaaaacaggctactttgtaccagctaaacctccaaaacaactggttttgtatagcatctaaattcctagctcacaagtcacaaacatgcaatctccttcttccctttacctcaacaagaacttcttcaccacacaccatcaccaccttggctttcaccacaccctctctttcacccacaattcccttacctctcttggcttctcgcccaagccatcatgttccacgaggcttataacagctcaagcttacaggcccaacaatc

SEQ ID NO: 142431 - DNA, 300 bp, Glycine max
  Clone ID: PAT_MRT3847_99630C.1
attgtcattatcttaccactttcaattgcatattcactgtgagaaatgataagggctagcccatcaaacactaaaccagttgacgaattcagagtttatgatgcccggggaaatgctgttaatctcgccgcttacagaggaaaggtccttctgcttgaagcggtgactgacaatgcggattggctaattcaaactagacagagcttaatcaattgattgataaatacagagggaaaggacttagaactctggcatatacagtcaatcagggtggggctgaagagccaggatctaatgaac

SEQ ID NO: 142432 - DNA, 226 bp, Glycine max
  Clone ID: PAT_MRT3847_99631C.1
gtcccgctactgcttacacaggccgggttcccacgcagaggggaggctgctccacccctagtctcctcccttgctcccagcagcggaagcgcctctgacccttggattgagtcccacgtgggggaggaggaggcaggcagcaccagcaggggtccaccaagagcccagaccagcccctctgccctcctaaccgggcctcgaagggtgtggcacaggctacgtgttg

SEQ ID NO: 142433 - DNA, 945 bp, Glycine max
  unsure (1)..(945): unsure at all n locations
  Clone ID: PAT_MRT3847_99632C.1
tgatctcattccctacgctgttctcctccaaaaagaagtacgtcttctatcctcttttcttgaacttcactcgtctacgtcatctcacagccttgcttagtcttgggtgctctttttctctgtcatttaatttgatgcaacaattgaagatgaagaagcatctctttgctctttccatctctgttgcaactcacaggccaaaaatagccacatcaaatctctaattaattggagcaacccaccattattcctatcctggaattttccatatcaacaattcatatttattttagcttattttgaaactataatcacttcttttttggttctgtttttcaaatactntatacccaacatgcaattatttactgaagttcccgatcttggattccaatagttcccacccagtagtaccctccaccaagtcctattcggcatatctatgagctttggtattaacttggggacatacatcctacagaggttatctcaggaacccagaaacaaaaacagagtggaataagatgaatttctgatatcatattagattatatttttattttcaaatataagtaaaatttaattactttttcttatttaataattacttttgttgacaggacttagataaaaactagagtagttgactgcacattttttccaattctcgctgtgtccttctcagatggtcccttacaagtactattatatttggtggttccttctttacagcttcgcttcacttcccattagatccattacggctttgaacgtgtcaattataatcaaattaacatattccctgtattttctctccactattcattgtctggtttttcctttctcagtctttcctccttttcctatacgtgtcaattcgctttgacttttagtcacgtttcctgatatttttcctttatagcccttatatatcaagtaattttc

SEQ ID NO: 142434 - DNA, 195 bp, Glycine max
  Clone ID: PAT_MRT3847_99633C.1
ccacgcgtccgctgacacacgcgtcggatgcaacaatgctatctgaacatgaccttcacctgttcaacctggcgccctccgaccaaaactaaccatcgaatcattaacgtcgcgtgcgatcacaaacctaccatttgacctagcaagcacacgaccgaacaggcagacaacaaacaaacacagcgtgtttcgtcc

SEQ ID NO: 142435 - DNA, 122 bp, Glycine max
  Clone ID: PAT_MRT3847_99634C.1
gatcaagatggatttctaatgcattaaagactttcaagattaccattaaaaatggatgtccctgagaagagtgtgtgtcaagcccatgttcaacctggtccacttgctgattttctgcatga

SEQ ID NO: 142436 - DNA, 466 bp, Glycine max
  unsure (1)..(466): unsure at all n locations
  Clone ID: PAT_MRT3847_99635C.1
ggttattcttgctacttttatgaatttgggttcaacaatatacttaaaaacaccttttaaatagagacgtctctgtttaagttgctgcttttatgaattctgtttaagttgcacatcccataatgtgttggggtctacaattaaactcaagtgctcaaaacgtcgtaactgtggcttactgtaaagatttcaaacgcaatagaagcaccttgtgagaaaaaaaaaaaaaaaaaaaaaaaaaaaaaaaaaaaaaaaaaaaaaaaaaaaaaaaaaaaaaaaggaaaaaaaagaaggcaaaaaaaaaaaaaaaacaaaaaagccaacnggggggggggcccagggcgccaaattacaacgccgcgaatgggaaagccccggggctacccatgttaatcacctgacagaaaatccccctcccggccgcccgtttaacagctaggaggcccggaaagattgcccttcccac

SEQ ID NO: 142437 - DNA, 1004 bp, Glycine max
  unsure (1)..(1004): unsure at all n locations
  Clone ID: PAT_MRT3847_99636C.1
aaaaattgttagtgttattttagcaaaagaagaattggcacctgatgttatttcgaagcaatagcaaatatgactgatggatattctgggagtgacctaaagaatctatgtgtcacagcagctcactgtccaataagagagatcttggagaaggaaaagaaggagagaagcttagcattgactgagaaccaaccattacctcagttgtgtagcagtaccgacattcgtcccttaaagatggaagattttatatatgcacatgagcaggtttgtgttagtgtatcatcggagtcaacaaacatgaatgaactactccaatggaacgacctttacggagaaggtggatcaagaaaaatgagatctttgagctatttcatgtaaagcttcctgtatagcatttattggttaggcaattcttctatcacctaaatggtgtgtgtaacaaggtcagaagtgaccaattgatgtgaaaatcccatcattggcaatgcctttattgtgtcgtaggttttccctttttcccctccctccaaccctcacgatctgcctccaatttttttcaaagtataatttgtttgacaaattcactgaggtcaagcttaacgttaggtccccttctgatccaactctgctctcggcttgtaaatacccagttaatttttaaaaacaagtataatttttgctaattccactaacaaatcgtatgacattgtatttgtgctttgcagtgtaaaacccccatccctggataaaaaagtgtatatctgaaaattatatgcacacttttctgcacatccatcatggaaagtgaatatgctgtctttggtcaatttgattttaaattaccttgatcattgcttttctactgtcttctggaaatggaaagtttaggtgtactagagaaccttgattgagttcatggtcagatctcctactcttattagaaatgatcactttcccgcagnggggtctgttctgtctgtccatgaaattatcattgatga

SEQ ID NO: 142438 - DNA, 804 bp, Glycine max
  Clone ID: PAT_MRT3847_99637C.1
ccacgcgtccgcttcctggagctggtgtagctgcttgtagaaaagataattcttcatctcaaactcctcacggggagaaatctgaaaatgttcatcctgttaaaggtgcaagacctacattagaagatagtgtcacaggttctcaactaggaagatctgatactgttgaagacggatctcttgtggcagaaaaaggcaccagttccgatctccagatgcatcctctcttgttccaggtcactgaagatggcaatgcgccttattgtccgttgaaatttagttctggtacttctagttcattcagcttcttctcaggaagccaaccccaactaaatctgagtctcttccatagctcacagcaacaaagccacattgattgtgctaacaagtccttaaagtcaaaggattccactttaagatctggaggcattgattttcatccacttctgcagaaatctgatgatacacagtcaccaacaagttttgatgccattcagcctgagtcactggttaatagtggtgtgcaggctatagccaatagatcttctggcctcaatgacaaatccaatgaacttgacttggagattcacctaagttctgtatctggaagggagaaatctgtgaaaagtagacagctaaaggcacatgatccagtagggtccaagaagactgtagcaattagtggaacatcgatgaaacctcaagaggatactgctccttattgtcagcatggtgttgaaaatctttcagctgggagatgtgagctagcttgaagtgcccctttgggtgggtgtaggggtgaca

SEQ ID NO: 142439 - DNA, 364 bp, Glycine max
  Clone ID: PAT_MRT3847_99638C.1
cgttagtgcagagtttagggagctctctgtcgaggtccctttatgtgccaaaacatcactgtgaacgcggtgtcgtactgtaccactagcaaactcaacgtcactctcactggctcttcatttccacgttaaccatgtactcttgattattgtccatcgagaaaactcgctggctcacactgtcacccctaccatgccagagcaacctacgtgccggagagcatcgccggcgacactctgcgtcaatactatggaacgttggagccctggttgggctctggagcctcttcaacagatacttgaacatctacaacaaacaggtcttaaaggtgtaccatctgcctttaaccgtaagcacccttca

SEQ ID NO: 142440 - DNA, 445 bp, Glycine max
  Clone ID: PAT_MRT3847_99639C.1
agcatgcgttagaattagaacagcaagtgttgctacttcacgatgttctatgcttttgcctttggtaacgtgcattgatggaggattataagaagaaccatccttatcagcaacagcaacagcatcagcatcagcaagaagaagagaaagaagtagtgtgtgagaagatggagaggtatcctagggatttgcttcaaggattttccatcagtggtgttgctactattagggatgataataacaaaattaacaataataacatgatgcagcaacaacatcatgttcttcatcatcaccatgagcagcagcaacagcaagagcagcatgaggaggacgatgaagaggttgagttgaaccttggtctttctctcggtggaagatttggggtggacaagaacgccaaaaaaaagaggcttttacgctcttcttctgtggtggggacaat

SEQ ID NO: 142441 - DNA, 399 bp, Glycine max
  Clone ID: PAT_MRT3847_9963C.1
gggtctgcgtaatagtcacaccaaaaacgagacacgacatgggtccaaaatcgttcggaaaagcattcgtcgtgcactacgtaaccaccttcaacaccaccggagaaatcccgctaatctctaggatgtaggttacacgctcactttccaaggtcaaaaccatccacggctctcacagcaacgtcgccaaactcacctcccttcacttccaacagtgacagcatcccatgatcagcgtggatacgcaggactcaagcgtcaactgcgacatgctcagcttcggcagcggcaatgctccagctctgcggtaataaataccccctcaagttcatacgtatgtgcgatctgacaccagcaccacagggaagctattatgtgtcgaatgacatattccggttg

SEQ ID NO: 142442 - DNA, 884 bp, Glycine max
  Clone ID: PAT_MRT3847_99640C.1
aaaaaattgtgtagttcgaaactagcttctataaaaactagatcctggttatataaaataaatatttattttatgaaatactagttttataaataaaaaaattggtattcgtaaaaaattaaaactattttatattgaacttgagaagacgacagaaggggggcttagagaaaatctgttccaatcctcgcttcgttttcgtgtcgagaacaatcttctccccatcaaaccctaaccctaactcacagatttgagttttgatcacaccaaatcaatcaatcaatccgagaaaatgcttcaatctccagggcactcgccgctccacatctcgtcgccgtccccttcaatttcccaggtatcggcgcaaaaccctaacgatccaccatcatcatcgtgtgcgaagcacccagcggtgttggacgaggacacgtacgttgaggcgttggagaagatcatcgagcgcgactacttccccgacatctccaagctccgcgaccgcctcgactggctcgaagccatcaaaaccggcgaccccgtggtcattcgcgaggcccaattgaagatccttgaacgccgcgccggcacaaccaaggtaaccaatcccaacgatgcttctagaacaacctcccacacacccggttccacattcgttagaaatttcacacctttcgatgaatttgacggaaaaccctctcaaaccccccgtgccccggttcccgaggccaaagagggggagaataacgatggtggggttgatacttcgcttggcctcgatcaatttatgagaaggtatacgagtgaggacaatcatagcttttcgaagaatctaaaaaaagtgaataagaagaggacagagaggtttgggtttttgaatgaggatgttc

SEQ ID NO: 142443 - DNA, 729 bp, Glycine max
  Clone ID: PAT_MRT3847_99641C.1
aactcggcgtccggttccaatctcgcttcgttttcgtgttgaacctgaaagagaatcttctccccatcaaactctaaccctaactcacagatttgagttttgatcacaagaattcaatcaatcaattaatcaatctttctcttcaccctgagaaaatgcttcaatctccagggcactcgccgctccacatctcgtcgccgtccccttcaatttcccaggaatcggcgcaaaagcctaacgatccaccatcatcatcgtgtgcgaagcaccctgcggtgctggacgaggacacgtacgttgaggcgttggagaagatcatcgagcgcgactacttccccgacatctccaagctccgcgaccgcctcgattggctcgaagccatcaaaaccggcgaccccgtcgtcattcgcgaggcccaattgaagatcctcgaacgccgcgccggcacagcaaaggtaaccaatcacaatgacacttctagaacaacctcccacacacccggttccacattcgttagaaatttcacacctctcgatgagttcgacggaaaaccctctcaaaccccccgtgcaccggctcccgaggctaaagagggggagaataacgatggtggggttgatacttcgcttggcctcgatcaatttatgaggaggtacacgagtgaggacaatcatagtttttcgaagattctagagaaagtgaataagaagaggaaggaagggtttgggt

SEQ ID NO: 142444 - DNA, 419 bp, Glycine max
  Clone ID: PAT_MRT3847_99642C.1
tttttgacgcgcgggtttgggtttacgtgcatggcttgctaacaccggattcaatcgatgatacagagcaaaagctccattacatattcgagtggtttcacatcagtctcaagcgcatggtggcttggggttcctggggtgaccgacgcgttatttctggatagacaatctgtgcttgctcaagagaaaaataaactggttgataccgccatgctgtacaactgaggtctttggggaaaggattatatatagctctaaggctcatgctgagcaccttaaattacctggtcattatgatcacgcctgtgaaagaactagtgacccaaatgagaaagctataatataacctcttgcacaacgagttgtgactaggactgctttttgagagaggtctgtaacttttataatgaagaaagtga

SEQ ID NO: 142445 - DNA, 299 bp, Glycine max
  Clone ID: PAT_MRT3847_99643C.1
ctacaacagatccggaaatgagtccttctgaaaatggcgtcactcaacctagtctaacatgacttgtgatcacaatacctgtgcctgggactcaataccacatgatcactgcgccaacgccagatcctgtgacacctaaccttgttaccgggcttgatgatctacctcagccgtggactcgataactacgataatccacactggaacgtgttgtggctgaccggcattacagatcttcagattctgcccagcctgatagctcaatccgagacttctctcagtacgcaaccacagatcct

SEQ ID NO: 142446 - DNA, 370 bp, Glycine max
  unsure (1)..(370): unsure at all n locations
  Clone ID: PAT_MRT3847_99644C.1
tttttgtttatttgtacggaaatgcgtttcgtttctgttacaagatttaggtctgtttgcattaacttcccaacgcttgtgagagaagaaaataagaaagcagaatgaattaaaactttctcattatttaaaattagctttaaaatcagcttttacacaagttaaatgtgagaacttctgtaaaagttgaagtgtataggttgattttagctaatggtagaagcttaatttattttaactttttgttttattttcttataaatactcgttgagaagttaatttagataaactgttaggcaagtggtgctactggccacttggaatgagctaatagcanggttttgggtagtttctctttgattaaaaaga

SEQ ID NO: 142447 - DNA, 526 bp, Glycine max
  Clone ID: PAT_MRT3847_99645C.1
attaattcagtgttaatccatttgaaattcttcgatcactctctaaattgttatctcttgatattggcggcaatctttttcacggagttgtcaaggaagatgatcttgcaaatcttacaagcttgatggggtttgtcgcatcggggaacagtttcactttaaaagtgggtcccaattggattcctaattttcaacttacctatttggaagtgacatcatggcaattaggtcccagctttccattgtggattcagtcacaaaacaaacttcaatatgttggactatctaacacggggattttcgattctattcccacacagatgtgggaagcactttctcaggtttcgtatttaaacctctctcgtaatcatatccatggtgagattgggactacattaaagaatccaatatctatcccaactattgatctaagctcaaatcacttgtgtggtaaattaccctatctttcaagtggtgtgttcaagtagatctttcaagcattcattttctgaattcatgaatgact

SEQ ID NO: 142448 - DNA, 568 bp, Glycine max
  Clone ID: PAT_MRT3847_99646C.1
gaggttcaaggaatttatggcaagcaaaggtctagatgctgtccaaactgaggtcaaggacatggattgggagagcaccttccacttgcgtcacctccctgaatcaaacatctcagagatccctgatctcattgatgagtacaggttacaataaaacaaaacatttataacattacacaatattgcatgtgatgtggatgacatgctgtatttttcaaatacaagttaattagcacaaagtcccaaataactgacacagaatttgccccttgattttgacttgacaaaatggataagagcagaagtccttaagattgaacattgctatatatatatatatatattattacttctgcttcattatttcttttagagtatctacaagtacttcaccaaataatgagttcaaaaccaaaaaataaaatacaagatacgactgtgcatttcagaattgaaactgcagctgtgtgtatctcttttacaagattctaacatgaggtaatggtgcaggaaggtgatgaaggattttgctttgaggttagagaaactagcagagcagctgttggac

SEQ ID NO: 142449 - DNA, 211 bp, Glycine max
  Clone ID: PAT_MRT3847_99647C.1
tagcttcttcaaaagccgattttaactcaatcttaattcattctatgttttttattttgttctatactcattattgaaacaaggcctaaactagttcaaggctttgtgctttttccctgtgccatgaatgcgtttgcatttgttgagacctgagaaggtgcttctattgaaatttcaaattggtattctcagctcaggcttcttggctcgt

SEQ ID NO: 142450 - DNA, 114 bp, Glycine max
  unsure (1)..(114): unsure at all n locations
  Clone ID: PAT_MRT3847_99648C.1
cgtttttttcaggctgaatactttcgtcatttgctcaagcctgttaaagtanatagtnnttntctgtttgtncgtgttnaggttaaagctggtggtttagttgttttccttgtt

SEQ ID NO: 142451 - DNA, 335 bp, Glycine max
  Clone ID: PAT_MRT3847_99649C.1
ttgtcttcgcgtccgcggacgcgtgggggggaaaggcagttttcccatgcacccatggaacacacacggatgttgaggatatgcaacacattatgtgctgcggacacgtggctgagaggtcattgaccaggcaattgccacctgcgcatcctgcattgtgggggcattacattcagtgacacacatgatataacagtgaaaccctgtcctcttacattaaagcaaccgccatgcatttaaacacggtttgggattaaatgacatacacattgaatttgagcgccaggattacatacttcacagtcttgagagcactcggcgaaaaggtcaaagct

SEQ ID NO: 142452 - DNA, 721 bp, Glycine max
  Clone ID: PAT_MRT3847_9964C.1
ttccgatgtttccacatcgtataagtctatatgttctttctctgtctctgactctctctctctctctctctctcttccccattccttcaacccttctccaaaataaggactcaaaaaactcaacagaacctaccctttcagtttcaccctcatgtcatggctgattccactaagtacattcccataggtggcaccctcaaatcaaacctcaagaccctcttccccattttcaaaaccagaaaaacactgacttttgcatatgctttttccttcacctttgttgctttcactgttttccttgccttttgcccctctccaaacacctcctctcccttcttcaccaacatattctcctccactgccaccaccacttcctctgctagttcatacaagtcccaactctcttccattttctctttcttcttccacaactccaccactccatcttcaaattcctcaagttctacctttaacaccaacaccactagatctagcaatagcacttctcaatcccctcaaacaagtaaaaagacattcaaaatcaccccttttgaaaaccaaactcgaactactcctccaccacttacaagaaagataccaagtgatcatgttgtgactaaggaaccatcaagtgctaacaacaatcatacccgagtttctgatgaggctaaagctgtaaagaagacaaatcagtcttctaatggtgttgttcctgctgctg

SEQ ID NO: 142453 - DNA, 271 bp, Glycine max
  Clone ID: PAT_MRT3847_99650C.1
gagaaaacaaggagcgaaaaagagtcacgagcgagacacgaaggaagagaagagagatatcgagagcgagcgtggtatggaggatcttcgatttagggttttcaatttcgtattcagcaaggcggcgagtgtgagattcttagagggagagaggtgagagcgctgagtgctcagctgagagcatccattgccccaagactccgaagaggaggagtatgtggatatgtatatatatattcatcatactgtgtatttatcctcagagtggtgg

SEQ ID NO: 142454 - DNA, 1446 bp, Glycine max
  Clone ID: PAT_MRT3847_99651C.1
tgaggaagaattatttggcacacgttagcctgcgacacatgttgagaaacgagttgggtgtgtttgaaacttgatgttaaagtgtgaagggacaaggaaacatagagtctcgttggttcaatacacttgtgcaatttggccactatgaacacagggcttgctgcaggtgcagccttgcttgcactcttggctatcaccttctccttgttgagccctcaaaccctgttttctccgcctgagattccgggctcgaaggaccaccttcacgctgctcggttactccatgtcaccggagccgtcgggccggagagtcttgtcttcgacgctgacggcggagggccctacaccggcgtcgccgatggccggattctcaagtgggaaggggaagagcgaggttggactgaatttgctgtcaccagttccaataggtcggactgtgtacgcccatttgcaccagagttggagcacatttgtgggaggccattaggactaagatttgataagaaaagtggagatctgtacattgctgatgcctacctaggcctaaaagtagtggggtctacagggggtttggccaccgaagtggtaacagaagttgaaggtcagcccttgcaattcaccaatgacatggacatcagtgaagatgcagacgtgatatacttcactgattcaaccacaatcttccagagaaggcaatttatgcttgtactccttggtggagacaagaccggccggttaatgaaataccacaagtcaacaaaagaagtgacgatcttattacgtgaccttgctttttcccaatggtgttgcttttagcaaagacggatcattcgttctggtagcagaaaccactacttgccaggatcttgcagctttggcttggtggacctaaggctggccaagtggatacatttgcggttctgcctggtttcccagacaatattagaagaaattcagaagggcatttctgggtggctctgcatgcaaagagaagccctttcgcgaagtgggtttcttccaatccttgggtgggaaaggcattgcttaagattggatttaatttcaagcagctgcacacatcatttgcagggtggaagcctcatgctgctgctgtaaagctgagtgataaaggagagatattagaagtcttggaagattgtgatgggaagaccttgaagttcatcagtgaagtggaagagaaagatgggaagctttggattgcatcagtgttgatgcctttcattggcatttatggtttataagagtgtatcatggatgactagatggtactgttttggatcaccttttccaaataagatgtagttattgcgtatgcagattatgtagaattgtgaattgctttgagtggttgatgaggctagtttttactgtgttcattattaataaaacactacgttaaacttaaaggaataaaaaaaacacaaa

SEQ ID NO: 142455 - DNA, 337 bp, Glycine max
  Clone ID: PAT_MRT3847_99652C.1
ctacgaagctcgcgtactgcggcgtgcgagtaagaactatcattcaccaacgatgtggctttcgtgtgatctttctttatgctcaaatcccacacatctgcagggtcttcttcttactttccaaggggggtgtgtgatctataattggcaggatcagatctgctctgagagaatcgcagatcagaaatggagaattcatgcactctggtggtccactttgacaagggaacgccggcgctggccaacgatatcaatgaggccctagaaagaaacgacgtacctgcgaagatcgacgcgcttaagaaggccatcatgatcctactgaacggcgagacca

SEQ ID NO: 142456 - DNA, 1153 bp, Glycine max
  Clone ID: PAT_MRT3847_99653C.1
tcggacgcgtgggcggacgcgtggggaagaaaatggaggaggatggtgcaacaatgtcactacttgccttgctcgcaagaccaatcgtctaggttcatctaagcaaatggcgaagcaaattgccttttcaggaattttgaacaacagggcaatgtttaatccagatttctacaactggaacagaatcaaggttaggtattgcgatggttcgtcatttactggtgatgtggaagcagtgaatccggtaactaagttgcacttcagaggagcaaggattttcaatgctgtcatggaagatctactagcaaaaggaatgaaaaatgctcgaaatgctattatctcaggatgctcagccggaggattaacatcagtactgcattgtgatcgatttcgagctctattacctagaggagctagagtgaaatgcctctcagatgctggttactatttgtcaattgctttttctctgtttccacaaaccatggaaagttcttttttcttggtaatgatctttgctataatttattttagggaggaggatggtgcaacaatatcgagagttgccttgaccgtaaggacactcgcttaggttcatctaagcaaatggaggatatttacttttctggaattttaagcaatgagcaacagtttaatccagatttctacaattggaatagagtcaaggttaggtactgtgatggttcatcgtttactggtgatgtggaagaagttgatccaacaaccaatttgcacttcagaggagcaaggattttttcagctgtaatagaagaattactagcaaaaggattggaaagggctgaaaatgctattctctctggctgttcagctggaggattgacaactatattacactgtgatagctttaaaacttttttgccctctagagctaatgtgaaatgtgttccagatgctggttattttgtcaatgtagaggatatctcgggagcacatttcattcaacagtactacagtgaagttgtttcaacacatggttctgcaaagaatttgcccacatcctgcacttcaaaactcagcccaacactatgcttttttccacaatatgtggcatcacatatcagtaccccaatcttcgttgttaattcagcctatgactcgtggcagattcgataca

SEQ ID NO: 142457 - DNA, 3169 bp, Glycine max
  Clone ID: PAT_MRT3847_99654C.1
gtacacctccccagcttccatttaaggcatatatagcttataagtgaacttcatatacatcttctttatattaatttttgctttgcttcttttttcccccatctgtaggctcgagctcgcaataaagattcactggtgttacgcgttaacatccactctattaagcaaatgtgctcctagtagtacaataaaaatataaaataaaataaaaataacaaatatttatataagattgtgttcttgcaagttccaagttccaagttcatgcacaaccgatcttttcctctgagaagacgtgtcggtagctgaagcattttataagcctccactttcctgaactagttttaacatacaatctttcaagtacacctccccagcttccatttaagtttgtggggctagaagtttctatttctgggcattcagaagattgcaggaaaagttatcagctttatttccatattgaacagagttgttgatctagaatggagatcactagaataggccaatggttaagtcttctgatatgtgtactactattactgcagacagaaggggttcctgtgggaatcacttttgttgaaaatgcagtggcaaaaggggctgtttgtttggatgggagtcctccagcttaccacttccacaagggatctggagcagggattaacaactggatagttcactttgagggaggaggatggtgcaacaacgttactacttgcctttcccgtagggacactcgattaggttcatctaagaaaatggatacatcactttccttttctgggtttttcagtaacagtaaaaagttcaatccagatttctatgattggaacagaatcaaggttaggtattgtgatgggtcatcatttactggtgatgttgaagctgttgatccgaaaaccaatttgcacttcagaggagcaagggtttttgctgtggtcgttgaggatttattagcaaaaggaatgaaaaatgctcaaaatgcaattatctccggatgttcagctggaggattggcttctattctaaattgcgatcgattcaaatcactactacctgcaacaactaaagtgatcaaaccacaccaccccttcttccttttcatcaggtttattccttttcttttggttcaattttgctgaatggagagtgcaagaatcagcaaatggttaaatcttctagtttgtgtactgctattgcttaaggcagaaggatctcttgttccattgactttggtgaagaatgcagaatcaaaaggagctgtttgtttggatggaagccccccagcataccactttgacaacggatttgaagaagggattaagaactggattgttcacattgagggaggaggatggtgcaaccaatgtagagagttgcctttaccgaaaggatagtctgcttaggttcatctaagcaaatggaggatctttacttttctgcaattttaagcaacgaacaagagtataatccagatttctacaattggaatagagtcaaggttaggtactgtgatgggtcatcgtttactggtgatgtggaagaagttgatcaaacaaccaatttgcacttcagaggagcaaggattttttcagctgtaatggaagaattactagcaaaagggattggaaaaggctgaaaatgctattctctctggctgttcagctggaggactgactacaatattacactgtgatcgctttgaaaaatctgttgccttctgaagctaatgtgaaatgtgttgccagatgctgggttattttgtcaatgttagatggatatctcaaggaacacgatttcattgaagagttctacagtgaagttgtttcaactcaatggctcagcaaagaatttgccctcattcctgcacttcaaaattcagcccagaactatgctttttcccacaatatgtggcatcacatatcagtactccaatcttcgttgtaaatgcagcctatgactccatggcagattcagaacatctttgtacctggctctgctgatcccagtgacagttggcatagctgcaagcttgatataagcaactgctcacctgatcaactaagtaaaaatgcaagacttcaagtcggaattcgaaaaggctgtgagtgtgcgtaggcgactcttcatctaaaggaatgttcatagactcttgctatgctcactgccaaacagaatcacaggagacatggtataagagtgactctccacagcttgccaatacgactattgccaaggcagtgggagactggttttatggtcgaagttctttccgtcacgtggattgcaattatccttgcaacccttcttgccagaaccgtgtttttgatctaaaagaccaccctggaatatagacttgtttgatcaaatatatatcattcctataaaccagacttattggttaactggttattgaatatgaaaataaggtttataagttacaaagctagcaaaataagaaaaggcaaccattacactgagcttgtgttctgggagccctcaatcaatgttgtaagtgcagtagtcattgcataagtgagatattatgtgctcttttctatgatatatggcccttatgtgagatagattgtgcctacccttgcaaccctacttgccataatcgtatttttgatcagaatgagcgtccagacgtatagattcatttaaaagagtatgcttatttatttattactacaaactatactttattagttatctagtttttattgaacgagatgtgtcacttgcactcatggctttgtggtttgagatctcaaaccatcaaagtatgggttcgattgttgcatcaacaaaaaacaagctgtgattgatgatttaaaaggttccaaagtgtaagggtaggcaacctgataaaggatgataattgtctaccatgtaaacataacatttttattatcaataaagggtatatctgtaattctaataactttttttttatctataatttttggacgaaaatagtcttgtaggccgaagataactaatgaagagtgggtggtatttatatataaataagcatactcttttaaatgaatctatacgtcagctcgctcttcctgatgattgcacgcgagctgacctccgagctcaagcacgcgttccttcgatgtgccttctcttcaactgggctgcctaagtaagattg

SEQ ID NO: 142458 - DNA, 158 bp, Glycine max
  unsure (1)..(158): unsure at all n locations
  Clone ID: PAT_MRT3847_99655C.1
accggnctcggaattcccgggtcgacccacgcatccgtacacgcgtccgaatactaccgaactattttccaaaggggcttcacaaaaacataaagccgcttttctcacatgtgagataatactcatcactcccacttattcaaaaaccccaccaacta

SEQ ID NO: 142459 - DNA, 282 bp, Glycine max
  Clone ID: PAT_MRT3847_99656C.1
gggtccacccacgcgtccgcccactcgtacgaaccgtttcgagagcactctataatggcgagcatgagtgaataacgcaggggctaattcacaacgatttaatgtcagcgactaacatatgctattcagcactgcaactcattcagtctaatgctgaggacaatcttcttcgcatgaacacgtacatggactcactccctaataccgaatccatcataaaagtatatatcactctatctcacacattctacacgaactcttttctttcctttataaaaatca

SEQ ID NO: 142460 - DNA, 462 bp, Glycine max
  Clone ID: PAT_MRT3847_99657C.1
ttccactcgttctaaaaaaaaaaaaaaaaaaattatttttaaaaaaaaaaaaaaaaaaaaatagggaagaattaaataaaaaaaaaagaaggagaaaaaaaaaaaaatataataaaaaggggcccccttttaaaaaaccaaagtttacttacccttcattgaaacttaatattttttttttattgccacaaaaataaaattaactgcccgtttttttaaaacttcttaattggaaaaacccttgttttcccaaattaattctctttggaaaaattcccctttttccctgtttctttatttataaaaaaaccccaactattcgcctttctaaacattttcccaccttaaattgaaatttgaacccccccttttactcctaattaaccccggggttttttgtttttaccccaaaattaacctataattttgcaaagtccctaacccccgtttttttattttttt

SEQ ID NO: 142461 - DNA, 167 bp, Glycine max
  Clone ID: PAT_MRT3847_99658C.1
aattgaagtaatatgcatccgagaaagtggagatggcttgttggctttgcttctaaacttttccttgtcaagaactatttattggagagtatgatagtttgcagtctttgccaaaaatgatacatggtgccaattgttttcaaaagttgattcttagaaatatccat

SEQ ID NO: 142462 - DNA, 251 bp, Glycine max
  unsure (1)..(251): unsure at all n locations
  Clone ID: PAT_MRT3847_99659C.1
naaaangncancgtacgtaagctcggaattcggctcgagnnnatacntagaggagnnagagccgncanncnncnnatntnngtnggcanaaccacgaggtctgcancntngcgntnnacggtaccagctgaggccgaatncganagaggccncgctggaaatgccccacnncactgcccaannggcacgcngccngtcgggangagtggtggtcttnnaancncccaaggnnatancnaccgntnanncna

SEQ ID NO: 142463 - DNA, 204 bp, Glycine max
  Clone ID: PAT_MRT3847_9965C.1
gaggagaggggaggattggagaattgagagaacctaaccagaagggttttttttgtgggcaaagggggccaaaaatgttgatttggatagaggtaaggggggccagccaaagggagtgagagccaacaggaagagacagggcaaaggctgggacaccgcacagcacgaatatgagcaacgacagccaacaaagctcgctaaccc

SEQ ID NO: 142464 - DNA, 592 bp, Glycine max
  unsure (1)..(592): unsure at all n locations
  Clone ID: PAT_MRT3847_99660C.1
ccgaaatcctagacgccatataatgaccttctcagcaattctctctatttcgtacacgccccaaagtagcattttttgtacccaaaaatcaaatccattatccctaaagaccttattattcccaccccaagttgggaagaaacttgtccaccaacctctaaggtacaaagggttttctcccaagggggatgttggcaaaatcaaggcatcaattaagtgggaaaagggctacaagaaagttgagatctccagtaaggagcatcttgctgtatcattggcttatgatgttgctcagctctctaacaaattcacaagagagagaggtgctttcactgtcgttttgtccggtgggtcactcatcaagtacctcaggaaattgcttgaacctccgtatattgattccatagagtggtcaaaatggcatgttttctgggtggatgagagagttgtgccaaaggataacttagacagttattacaagctcgcctatgacggatttctctctaaggtgacaatntctncggtaaatgtttatgccattgatgatgccctagcagcagatggagcagctgatgtttatgagacaactctc

SEQ ID NO: 142465 - DNA, 308 bp, Glycine max
  Clone ID: PAT_MRT3847_99661C.1
ttctcagtctacagcttttgatcttcttccgggaacttttcatgattgtgaaatgctggtcatactcttatgccgctttttgtgttccacaggctactgccagatcttctgaaaatgcggaatcctctgcacgatctggaatttgtgttttctctcgctcagtcgattggctaatccaactaaggaaattaggcatgaccctcttgatgagtatgctctgcctatttgaaaattaccacacctcttataattgtcgtaatgacgtgtgaagtgtgtgttatttcaaacactctcctatctggcatagg

SEQ ID NO: 142466 - DNA, 233 bp, Glycine max
  Clone ID: PAT_MRT3847_99662C.1
cacgcacgcactgagatactcacaatcacatagcccttttaaacccatcacatccattatggcacctggggctttcacaatcctctagcacatcttatctaattctacgatggacaatatcaatgccttaattaaagtatcataaactgttaatcataaccccaacttacataacgcatccatatacctttctcaggcttctcttaataatacaaaaaaatataatcctgaac

SEQ ID NO: 142467 - DNA, 245 bp, Glycine max
  Clone ID: PAT_MRT3847_99663C.1
atcctagtacaccgtattaaagaatttaagatatactatgatgatagcgcggttcccattgctgtcgctgggagttgtgttcctggcatctgtttctgtctcatctggcattgcgtattgaggcaagcagaaccccagtcacaacaagtgcctccgaagttgcaatagcgagaaagactcctacaggagccaagcatggcacgctcgttgcaacctccataaggtggaggaagaagaataatgcg

SEQ ID NO: 142468 - DNA, 228 bp, Glycine max
  unsure (1)..(228): unsure at all n locations
  Clone ID: PAT_MRT3847_99664C.1
ttgctcgcttgctgctcatcaggttatgcatgttcatctaatgatatcttctagccctatcgtaaaataacttttctatgtaatatatatttttttcatacaaaatatacttttaaaagagaattgatcaatngccttacacaaaacattgacagttactgtgatgcggtttaatttacaacatatataatattttaattgctcatagttagttttaaaaaaaaaaaa

SEQ ID NO: 142469 - DNA, 114 bp, Glycine max
  Clone ID: PAT_MRT3847_99665C.1
ccctgaccggtggctgatggcgtgctacctttgcgtttactgagacgattacaacctcggcgtcttcatggccaaagctgatggctgagacaaagtggaactcattgacaacgg

SEQ ID NO: 142470 - DNA, 239 bp, Glycine max
  Clone ID: PAT_MRT3847_99666C.1
cacgtgattgacacagcaccatggactggctggctgagaattgctgcgtctttgctacagagcctcatcttccttaccaccatcactgtagttgcattgggggccacgtcctcggcagcaatcgaacgacaatgggatctgccgtatcttgaacagaccgggcaaacgccactgcctcagacctcatatacatctacgcacgaaatgaaagtacgaatccaactggtatgcttttacat

SEQ ID NO: 142471 - DNA, 134 bp, Glycine max
  unsure (1)..(134): unsure at all n locations
  Clone ID: PAT_MRT3847_99667C.1
ggaacaaactcggttattggctctgctgtgagggctcaggaatcgcaaatgctcgctgctttaaagcagagggagcagncatttgggggtttgagggcttncgtgatgaangagaagggagaggaactcgcatt

SEQ ID NO: 142472 - DNA, 423 bp, Glycine max
  Clone ID: PAT_MRT3847_99668C.1
ctgactttttgggtcctatataggaaagtagtgatagagagagagagagagacttagaggacgtaagtgaactggaggaaaacagtgaccaccagaggatgctttgacggctaagcaagtgcagatgaggagattgccactactatggatgatcgaaggtgaaactaaaatggcatgcatagagatacacacctacagggctttttattttagatgaccagacattacagcgtacggggacacaatataattggccagatggatgatatccagcatggtcgtacatttggaccagaccgtatatatagtcactaaaaggcagccgatactgtcagttgcaccataaacgcgctagtgacagcacctcaagcacggagcacagtggttgaatccgaagtagggcgaataccagtgttcgcacat

SEQ ID NO: 142473 - DNA, 733 bp, Glycine max
  Clone ID: PAT_MRT3847_99669C.1
acaatacaagaacccttctaagaaccttggcttcttgtcttcttttaatcaaagggaaaagcatcctgatttccttaatccatatgcatcttcaaggtttgatgacttgtactacaaattgttgctagctcccctgatgcaacttggtacaggcagagagattatcactgctagtcttatatcactacacagaaaaggggcatacttgaagatgtggagggtaggaattactacacagaaaaggggcatacttgaagtgtacttccagtaccagaacgtacggttcatgtggttaatatgtttttctcaatcatcaggagatctgacattaaatgtgtatgaagaggattgtgaatttgcgcaccctgcaggctcatttaaagggattcagtgactcaaaaggaactgaactaattttggatcccttatggagaactcaaacatgcagcttatgaagtgggaaggatagaggaattggacactggcgattcaactgtatcttgtcctttccttggaggcccattctttctgcaactggatacacagaatactactctgatgcacaatctggaaaagtatgcaggtgataaaaactgtcaactgtcaaggcacatgcatgtggtgcactggaatgttcccaaaaaggcattgttcaagcattcctagtccgggatttcgctttaagattattttactttttgatgtttctacctttcagtgcaatcatttttgg

SEQ ID NO: 142474 - DNA, 231 bp, Glycine max
  Clone ID: PAT_MRT3847_9966C.1
tcctctaatcattaaattataattttagatttaacctctaaaacacagcgtcaccgtgttttttattacaaacacatactacattcacttttctttcttttctcttcttcttctatccataatttcaattccattatctctcttcacccaatcaagctacggccaatctgcatgactcggctctgctcccactgcaccaacaaccgccacaactcccggacatgcccatca

SEQ ID NO: 142475 - DNA, 832 bp, Glycine max
  Clone ID: PAT_MRT3847_99670C.1
aaataaaatctgcgaaacaaaggcatccaattctctgcttggagtcaactatgtgttctgcttacatacaattacatttctagtttggttccttattctaattgcagaaacaaaagaacagtaaaagctgcaggggaacaaagttacccaatttcaacatgggttggggcttatacataattacatcactaggtgaagggtaaaaagtaataatctccccctgtcaatatctagttattaaccatctaaactaactacgtgattacatattggtacaaatttccactataatcagtgagtaagaattatatctgttcctaataccatggccctagattttctgactacataatgaatacagtttgcatcatcatgtcatgttctcttgaaaaatttaccacctttctttcccatgcttacacccacatcagattcgaaaagatattttgtgtctggcctccatttcaactctttgagagtggaaaataaggttgcaagttcaggagagatatcactatcttttatgtttttacatgagtctactctaaggcactctagctccttccagtgctcaattacggactccaaaccttctgttgtaagcaatgagcatccttctacgtaaaacaattttacccgcctgcaaacaactgccaaactcagggtggcatcatccagcccccaacagtcctgaagaacaatctccctggcattcctacacaccgaaaacaacgcccccacggcgttcctatccctcacctggcacttgtgcaaatgcactctctcgagcgcctcacagcacaccaaatgctcctccaacccggctcgagcc

SEQ ID NO: 142476 - DNA, 1226 bp, Glycine max
  Clone ID: PAT_MRT3847_99671C.1
acgggctgcgagaagacgacagaagggggtggtaatgagtggtgaagatgggcaaagcaccttgttgtgagaaacatggggtcagaaggggagcttggacacccgaagaagaccaagctttggttgactacatccagaaacatggccatggaagttggcgttcactccccaaacatgcaggtctcctaagatgtggaaaaagttgtcggcttcggtggataaactatcttcgcccaggcatcaagcgtggcccatttactagtgaagaagaaagtacaatcgttcaacttcatggcatgcttggcaacaggtgggcttctatagcatctcaactacctggaagaacagacaatgagattaagaacttctggaacacccatctaaagaagcgtctccttcgatcatgtcattcccaaagagcaaaacagctatgtgtgattcctgatcaatccattgtcaagtccgaatctccttcgacgcggcacatggtacagtgggagagtgtgagagttgagacagaggcaaggttgtcattggaatccacaatgctcaattcatggccaacgagtaaaacatgccctgatcactttcttacaactttggcattcagaggttggaaaatctttcgcatgattcaagggaaaggaagaaggagtagtgagtcaaagccttatctcacaaccttcatcttcatcaaaattggagtcttgttcagatgtgtcattgcaggtgaaaaccaacactggaactagtagctgcattccaaagcttgaggatgtgagcatggttcatgaacaaacaagtagctacaaaccaaagcttgatgatgacacagctggttctgactccggcaattatgaatttcttgatacttctgattctgcactgaagcaccttctacatatgcctgatagtgatatgggattcttgggacacaatgatcatttccaaaatctccttgatggtacatgtgactaagatagtctccttcatatttcttcatagaaagacaatactttgaactgatagggaaaattttatttgccctttcttcttttttgtaaatgcgctcaccatgtagctggttttcaatagttggtgtagagggggaaaaaggtagatagaagaatagtggaaagagatcaagtttaccctccacttgatggctgtagctaaaagttaaacattaatgaattcagagttaatgatattgttcttgtcctacc

SEQ ID NO: 142477 - DNA, 2153 bp, Glycine max
  Clone ID: PAT_MRT3847_99672C.1
cccgggtcgactccagcgtccgaaagtagaggctaatactagagtatgcaaaatacggcagagattactttggttaattctcaaacgactttttttttaattccaatattagttttatattactgtaattgtttgtgtgggggaggttttatttgttctgtacttttgttttaactttttattattattactgtgttattttttcttcttctgattttcctataataagagaaatgttgggaatttatgaggctgtggagcttcaatgtgcttgtgttgtgtgtgcaactagaaagtttttgttgtgtggctctgttgtgaggttggcctagcagaaacaggagatcctcctatggtgacactgacttgacagaggaagttgtgatcgtgttcagtgtgaaaaaaaggttgaaaggttgatcttgattgatattggagtctttgtgatgaaatgagtttgagttataatggtgatggtggaggtgctagagtgtgaggcaagttggaggagggccatagtttatggatgtgttgttgtacttggcctacatgcaactctagctggatgaagatggagccttctgggtctgcttttcagaattctggcagttctagggccttgaacagttctggagtctcagataggaaccaaagggttcattgtcctcaaaggaaccccttcttgggtgaggcatcccaggattcggggttcagaaaggaaagggataggtttctgttggctcaaggtggtcagcctaagaacttgggcggtggtttttcggggttgtgtgaggacgaggtggaggttgacccctttttctgtgctgtagaatggggtgatattagcttgaggcaatggttggataaacctgaacgatcggtgggtgccttcgaatgcttgcacatatttaggcaaatagtagagattgtcagtgtagcgcattctcaaggagttgtagttcacaatgtgaggccttcctgctttgtcatgtcctctttcaaccatatctcatttattgaatcagcatcttgttcagatactggatcggattctttgggagaaggattaaacaaccaaggcggtgaggttaaaactccaacatctctctgtccccatgatatgcctcagcagagtatgggaagtgaagattttatgcctgtcaagactttaaccacccctgctcagtcagattctagttgcatgttgtcgagtgccgtgtatgcggctcgtgcatcattgatagaagaaccagaagaaaataaaatgaaagataggagaaaggatgacgaagtagaaggaaagaagcaatcatttccaatgaaacagatactactaatggagatgagttggtacactagtcctgaagagggtgctggtgaatctagttcttgtgcttcagacgtttatcgattgggggttctcctttttgagctattttgtccgctcagctcaagagaagaaaagagtagaaccatgtctagccttagacacagagttcttcctccacagttacttctaaagtggcctaaagaagcttctttttgcttatggttactgcatcctgaccctaagggtcgtccaacacttggggagttgttgcagagcgagttccttaatgaacagagagatgatacggaagaacgtgaagcagcgatagagctgagacaaaggatagaggatcaggagttgttgttagagttccttttgttacttcaacagagaaaacaggaagttgctgagaagttgcaacatactgtctcttttctgtgttcagatattgaagaagtgaccaagcagcacgttagatttaaagagattactggtgctgaactggggagtgatgagcattcagcatcaagtttcccatccatgacagttgttgatagtgagggttctgcttttctagggactagaaaacgagtcagactagggatggatgttaaaaacattgaggaatgtgtcgatgatgtaggggatgatcagaaaagtaacggaagttttctttcaaaaagttcacggctaatgaagaactttaagaaacttgagtcagcatactttttaacacgatgtagaccagcctattcctctgggaaactggcggttagacatccacctgtaacaagtgatggtagagggtctgttgtcatgactg

SEQ ID NO: 142478 - DNA, 378 bp, Glycine max
  Clone ID: PAT_MRT3847_99673C.1
ccacacccgtccggaggaatataagggttgttttccaatctctttggttttccaggggcagggtatttcccttaactggactgggtggggttaccaattcccctggtttggcaggtccaaggagattggaagcttttgggttggggttagtggtccttgtgttgtgggtgtttttctcgtagttatgttaacttcattctttttttttcttttatatatttttgtctcttttttattgaatcttatgtttttttaatttttgttgtattttggctaattatactcttttttttaatttattttttataatattgtttttgaatactatattatgtttattgtttattatattttatatactcttatttatttttattt

SEQ ID NO: 142479 - DNA, 894 bp, Glycine max
  Clone ID: PAT_MRT3847_99674C.1
gatcatgaattttttttgcctaaaattaactgaaactatattaaaccaggaaaaaaagattatgatgcaccatcagctaaacctcgaggctactttttcttttgggtacataaaacagaaaactacttcctttcaaaaacaaacagacgagttactttacattcaagtggtgtgataatcaaaatgcataggcactggcttcctgtgacagttctaataaccaattgcctctaatttatgcgttattcaagccctaaacagccaaatgtcaatctaattttttacttatgattccatgtactgtgagggtggaggtcttgtgttggtattctcaggaccttcaaccccatggatctccacttctcgcctttcttgcacaagggcacagcagcaacacatcaaatgagaaagaaaatcatcaataaatccccccctgatgttcaacatcttccgaagcttcctcctcatgcagcaagtatagcaacagcaagataaaattaatgaatatgccatcaattcattacatgtttctgcagaagatattggcctgttatttgcaacagtagcaatctttgacaatgtcccacaaggatagaagcatgtctttatacaaagacaaggttcagaacaacaggcaagtaaatcagtatgccaatcttcccaatgatatgagcctccagttgatagctgatccttttctgaaactgatgatcttgatgtggaatgagtatcattcttttcgtggattttttcattagaagaatgacctttgtcaccattggcatcagaaaaactgtagtcactgtactctactgtcttgtgacttttttcagaatgataaagagctgcaacttctgtgacatctctcgagccgaatcggctcgagctcgagcc

SEQ ID NO: 142480 - DNA, 2482 bp, Glycine max
  unsure (1)..(2482): unsure at all n locations
  Clone ID: PAT_MRT3847_99675C.1
ccacgcgtccgtccacctcttctgcatccagagctgggctcgccaagcctccgaccttgccgccgcccgcgccgccacgcgccttcctatttcccccgccactgcctccgcctccgccctctggaactgccccaaatgcagatccgaataccccaaatctcacattcccaaaacctatttctgcttctgcggcaaaatagagaaccctcctaacgatccatggattttacctcactcttgcggcgaggtttgtggaagaccgttgaagcacagttgcggccaccattgtttgctactctgccaccccgggccgtgcccctcttgccccaaactagttaaagttcgatgcttttgcgggtgccttgaagatgttcggcgatgtggcttcaaggaattttcgtgtaacaaaccctgttccaagtttttagattgtggggttcaccgttgcattgagctttgccaccctggcgcttgccctccttgccggacacgtggagtgcacgcgtgccagtgtgcgaaggttaaagaggagagggagtgctgtgatcgtgttttccagtgtgggaatccgtgtgagaagaggcttggctgtgggaagcatgtttgtgagagagggtgccattctggtaagtgtggtgagtgtccccttaaggggaagagaacgtgcccttgtgggaaaagggtttatgaaggaatgccttgtgatgctcctgtgcagctatgtggagctacctgtgataagatgttgccatgtggctaccacaggtgccctgagcggtgccaccgtggacagtgcgttgagacttgcagggttgttgtgaagaagtcatgtcgttgtggcagcctcaagaaagatgttccttgctatcaagatttggcgtgcgaaaggaagtgtcagaggatgcgtgactgcggtcggcatgcttgtaagcggcgctgctgtgatggcgattgccctccctgctctgagatatgcggcaggaagcttcgatgtaagaaccataaatgcccttctccatgccatagagggccttgtgctccttgcccaataatggtgacaatttcatgtgcatgtggagagacacgttttgaggttccttgtggtaccgaaatggacaataagccacctagatgtcctaaaccatgtcctatcactcctttatgtcggcatgcatcaaatatcaagccacataaatgccattatggagcctgccatccttgtcggctaccttgtgccaaagagtaccaatgtggtcatacatgcaaattaaggtgtcatggtgctaagcctcctcctaatccagagtttactcttaaaccaaagaaaaagaagattatacaacaaagtgaaagtgttcctggcactccatgccctccgtgcccagaacttgtgtggagatcatgtgttgggaaacacattggagctgagagaatgatggtctgctctgataaatcacagttctcctgtgaaaatttatgtggtaatcctctaccatgtggtaatcattattgtacaaaaacctgccatgccttggagaaccagttacaaggaagccaaccttgtgaagattgttatctttcttgccaaaagagagcctgcatgtccacatcactgccctcggcgatgccatcctggagactgtcctccatgcaaggtgctcattaaacggtcatgtcactgtggtgcaatggtccatgtgtttgagtgcctatattacaacggcttgtctgcaaagggtcaagagactgtccgctcatgtggtgggccatgtcacagaaagttgccaaattgtacacatttatgcccagagacatgtcattctggtcaatgcacaaatgctgagaaatgctgtaaaaaggtcactgttcgatgcaaatgccatacattgaaaaaggagtgggtttgtcaagatgttcaagcagcatatcatcttgctggttgccatcctagggatattccaaaaaatcaatttggaattggactcattccttgcaattctgattgtaacagtaaagtgcaggttgttgagtcagaactacaattgcgtaaaactagagttacagaggtacaagagccagatgtagaaaaatcagttcggaagcggcgaaaaaggcgggaacaagttctagaatccaaggaaacttcaaaactacagaaaattatttcaagaatgaagcggcttcttctatttgtctttattttggtcatacttcttgctgctacatattatgggtacaagggacttttatggctcaatgattggatgaatgaagtggatgaacgaagacaaagatattctagaatcaaatgattatttatcagtttgattgccccctttatccaccatttttttcattagtctgattacatttttttaaggactgattacattatttttcttccctttcaatgaggatatataatgcgttaaattcaaaaaaaaaaaaaaannnnncggcgantagtagctgtgaccgggaa

SEQ ID NO: 142481 - DNA, 273 bp, Glycine max
  Clone ID: PAT_MRT3847_99676C.1
gtttaccttcacttcagatgttcggcacaaaatgctcactgttctatctagcaaatattaggtagatggtgttattagttcatgtatatgcaaagataatagggtaagcttgccggcatttaggagggtactttgtatcaatcaatgattatataacatttactacaggtgactatactttgaacttatcttaatttattgatgttattatgaaaattatataagcaactagatgtagttgactagtaaaaaaaaaaaagaaaaaaaaacaaa

SEQ ID NO: 142482 - DNA, 1304 bp, Glycine max
  Clone ID: PAT_MRT3847_99677C.1
ccacgcgtccggaagaagtcatgtcgttgtggcagcctcaagaaagatatttggcgtgcgaaaggaagtgtcagaggatgcgtgactgcggtcggcatgcttgtaagcggcgctgctgtgatggcgattgccctccctgctctgagatatgcggcaggaagcttcgatgtaagaaccataaatgcccttctccatgccatagagggccttgtgctccttgcccaataatggtgacaatttcatgtgcatgtggagagacacgttttgaggttccttgtggtaccgaaatggacaataagccacctagatgtcctaaaccatgtcctatcactcctttatgtcggcatgcatcaaatatcaagccacataaatgccattatggagcctgccatccttgtcggctaccttgtgccaaagagtaccaatgtggtcatacatgcaaattaaggtgtcatggtgctaagcctcctcctaatccagagtttactcttaaaccaaagaaaaagaagattatacaacaaagtgaaagtattcctggcactccatgccctccgtgcccagaacttgtgtggagatcatgtgttgggaaacacattggagctgagagaatgatggtctgctctgataatcacagttctcctgtgaaatttatgtggtaatcctctaccatgtgggtatcgttattgaaaaagtaaacctgccatacatatctaattgtgattggatgacgctttatggtgtcagatgctaaactattaactcctaaattatattgtttttcaatgttttcattaaattgaagaggtatgcttttattagtcagctctgcagtggtagtgtctactctagtaattattgaaggtacaagagccagatgtagaaaaatcagttcggaagcggcgaaaaaggcgggaacaagttctagaatccaaggaaacttcaaaactacaggtaatgttagttttcttaataaaagagctatatctatgttccaattgcctttttcttcgctgaccacttgtgaatgtaaacgttgaacagaaaattatttcaagaatgaagcggcttcttctatttgtctttattttggtcatacttcttgctgctacatattatgggtacaagggacttttatggctcaatgattggatgaatgaagtggatgaacgaagacaaagatattctagaatcaaatgattatttatcagtttgattgccccctttatccaccatttttttcattagtctgattacatttttttaagggctgattacattatttacaaatcccaaaaatgaggata

SEQ ID NO: 142483 - DNA, 253 bp, Glycine max
  Clone ID: PAT_MRT3847_99678C.1
ctcctccctccgctcgcgcccgctcgcgcgccgccttggcttcgccgcagcggacccgctgctcgcggcgaatgtcgcagcgcgcgtcgcaccggtgagaggaggaaagggcgcgaggggggtggtgtctatggctatgaagagcgcgggggagctgacctcggcggacctgaccgggatcaaggtgttcaccaggtccgaccatgtcatcctctcgtcgacaaccagagcatcgccgacaacgccagagatc

SEQ ID NO: 142484 - DNA, 133 bp, Glycine max
  Clone ID: PAT_MRT3847_99679C.1
cggggtaacatttacttacgcaccttttccaagaacaagcttgaagctgggggcgggcgctctacaggatctaaactttcatatgcgtgcatgcgacatcataactcttctataatgtcacctctattcattt

SEQ ID NO: 142485 - DNA, 315 bp, Glycine max
  Clone ID: PAT_MRT3847_9967C.1
tttttggaagaaacgctaacagataccattgcttgactcacaagaatgtgccatgaagggggcggcgaacgtaaacaaggactttggtcgacccttatgatgggacaacaattcatatttacaccggcgtgctgcatcccatgctacgtagaagaaccgaccacagaaaaaaaagccgggcgctgctttcaatggttaaactgcagctaccgaacacagggtgtatgaacccaacatcacattattagaagaaccgagacagtacatacacacagtggctggcgctgtctgacaactagcttcaggagctacaaa

SEQ ID NO: 142486 - DNA, 393 bp, Glycine max
  Clone ID: PAT_MRT3847_99680C.1
ggggtctgcattgcttactccttctagtaccactcatactactcattcttctcgagctcaacaccatatccaaactaacattgaccaacctcatatgctacgtcatcatagtaatcatcgacatccacaacaacatcacgatcagcaccatttgggctttcaaacacttaacaaatatcttatgctgcacatgcgccaccttccggtgacatgtatgaagtgctcttgttgatggaatggctgccatatacacctccatcttaagatgacaactactcttaccttacccaatccagcatatgcatacgcatcatggtcccctatactatcgataccggctggccactctgcatcacgtggcttgtctagactatgagttttggtttctgcttc

SEQ ID NO: 142487 - DNA, 611 bp, Glycine max
  unsure (1)..(611): unsure at all n locations
  Clone ID: PAT_MRT3847_99681C.1
ggctcgagaaagtgattaccatgaaggtcttgatcgctctttgtttattagcagtcgttactcagatcagttgctggtccgaggatctagttcaaaccgaaggcggccttgtgcgaggtgtcgttcaagatgtttatcgttcatttaagggaattcctttcatggctccacccgttggtgaattgcgttgggcagctcctcaacctaaagctccttggtctcctgccgtattagatgcttctcaatactccgctggatgtcctcaaaattgcgttttacctaatatgacttgccctgtattcattagcgaagattgcatgtatttgaacgtttttacacctcgtgtttcgcaaatgacttcgaaagtacccgtgatggtatttttccctggaggtcacttcgatcaaggtgccgctggtactgatctctacaacggaggatacatggtgaacagaagcaatgtcattctcgtcacgacaaactacagattgggtgttcttggctggatcgcacaggcacaatgaagggcaactacngttttcaagatcagctcgcagcactttcatgggttcaacgcaacattgcaaactttggtgtgatccaacacaagt

SEQ ID NO: 142488 - DNA, 299 bp, Glycine max
  Clone ID: PAT_MRT3847_99682C.1
aggcacggaaggactttatctacttcattaagtcccacatagaaaagggaaaagtcagaagacatgaaaataggctctaagggcaggcccctaccctgaaagggaaatgagagatagagctactaaaaggcaaacaatagaggatccagctgatatggggattaaagctgatgctgcgttcccgggagttgatgaaggagctcctcctggagccccaatagttgcagtaccaaatgtaggaaaggggccaggaacaacaacaggcgttgcaaacagtccacaattagccggacccgggg

SEQ ID NO: 142489 - DNA, 250 bp, Glycine max
  Clone ID: PAT_MRT3847_99683C.1
ttcctaatatttctttgttaagaatcatctaatttcaaccccgtatccactattaacatatttaccaaattctacccaattacattttaatcttataaccttcttaacccactttatttccttatctgtaaatttttaattaattatacaacaaattctttaaaaataaattattttctcttctgaactactacttatttatccattaatccaacttcaattattttcttaatatttcaataatatctct

SEQ ID NO: 142490 - DNA, 492 bp, Glycine max
  Clone ID: PAT_MRT3847_99684C.1
aataattagactaacttaattgatttcaatatgtgaatcttagtgccactcataagctcttgtagctgggaaatcaatgattaagttcaactctaattagtgttcactttatgagttaccaccaaatcattgatttcaacaaatctttaacttcaaccctaatttgaagaagtagatctgaacacatatggccccaaacaagtgaaaacaagcttgagcgtgtgttggtaggctgggttggtagtggatctaccaatcacactgctgtcacaggagttcgagaacacccccatttttgggtagaaagaggttgagaaaagagagatttttgtaggtaagctaaagggatagattaatatggaatacaagtggtactcaaacttatatacatgatcagctgctgattttttaaccaattatatgaatgcaagacaaaaaaaaaagggttcaattaacactgctgaaaaagagagataatcctttcctaccttc

SEQ ID NO: 142491 - DNA, 443 bp, Glycine max
  Clone ID: PAT_MRT3847_99685C.1
ttgggggggggggggggaaactataaaaagtaaggtagggcaaagagggaacagtgctgctcgtgaaaatgacgggtaagggaacgagcgatagcaacaaaacgccattaggacaacaaataagtatacgttaagcgagagaattgatattagggtactgtgcattatgagaagggccatacagggtgcaggggagggaagaggtaataacctatggcaatattatgcagggtagacgcattaattcgccaaagtcatacaacacaatggcttaataggcgttctgatgcattacacggttttaagacttcggtaatgctcctagcaataggattgcaacgcctaagaaccctgtgaagcggtgtggcgcaagtaaacaagtttagtgtggccaacagcgcaaacggcccaactagatactgctgatccgcctgtagggcagt

SEQ ID NO: 142492 - DNA, 1759 bp, Glycine max
  Clone ID: PAT_MRT3847_99686C.1
acgaggaacggtctagcgaatatgaacctgttttggtccaggaaatgcttactcttattattcagatagtaaaagaacgacgctttagtgggctaactactgctgaatgtttgaaaagagaactaatttataagttatccattggtgatgccactcatagtcatttggttaatgggcgaggaagagacttaaccaagtttgaacaacttcaagacatcttggatacagttgctgtttattccaatccatctggatttaatcagggtatgttttctttgcgatggtcattttggaaagaattggatttgtatcatccacgttggaattcaaaggatttacaagttgctgaagaaagatacttgcgcttctgcagtgtctctgcactaaccacccaattgccccagtggaccaaaattcatcctcctctaagggggatagccagagtagccacttgcaaagttgttctacatattatccgtgctgtgctattttatgctgttttcacttttaaatcatctgaatctcgtgctcctgacagcgttcttctacctgctctacatttactgtcattatcattagatatctgttttcaacagaaagaatctagtgagaatacatgccatgatgtgtcacatcttcccataattgccctctctggagaaataattgagagttcttttggtgaacaaagcttgttgtcacttcttgttttattgatggaaatgcacaggaaggaaaatgtcgacaactttgtggaagcaggtggttgtagtctatattctctgattgaaagcttactgaagaaatttgctgagattgacaacagatgcatgaccaagttgcaaaaacttgcccctgaagtggtcagttatatttctgaatatgttccgactagagactcaagtgtctcatcgtcggcttctgatagtgagaaacgcaaagcaaaagctcgagagaggcaggctgcaataatggaaaaaatgagaacccagcagtctaaattcttggccagcattgattccactgttgatgatagttcacaacttggtcatgaaggtgacttagacactgagcaagatgcagaagaattcgattctaaacaagttgtttgctccctttgtcatgaccacaattcaaaacatcctatctcttttttgattcttcttcagaaatctaggcttgtgagttccgttcaccggggtcctccatcgtgggcccaactttgtcgatcagataaagatcacacacctatcattaacaccaaggagacggatacattgcctatgaactgtaattcagttagttcaggatcaacttcatcttcccacttaagtcaatttgttcagaatgctgcaaaagaattagcttcttgtgggaaacctggggaagttcttacttttctgcaatatgtcaagaataagttcccagctttgtcaaattttcagctcccagacacatattatcatgataaagaaaatacaccatatacttttgagactttagaacagggtatgtacttctccgtgcgtgatgaaatgcatgatcttctgctatcttcgaatttgttgaatgaggatgagaaagtttcaactgtgggagggaattcaaattttataatagacactggatctgtattgcttgggaaatatacagccgatcttgtgcaagagatgtcagaagtttcttctgtgtctgaaaatgcttctaatgagactggctctgtagaatcaacatcacagcatccagcttatgatggatt

SEQ ID NO: 142493 - DNA, 275 bp, Glycine max
  Clone ID: PAT_MRT3847_99687C.1
ataaaaaaaaaaaaaaaaaaaatggggaacggggaaaattataaaaaactaaaccacaaaacaaattactcaataaacaaatctaataaataaatagaaaccttcaacttgttcaacaaggacgagtgatgattacatcatagcgccggcccttttaaaatatcaaactttcattgccccaaaacccaactgaatgctttttttatggacaccctaaatgaaatttattctgctgggaattataccattgacttccctgaaatcctaaatttcac

SEQ ID NO: 142494 - DNA, 356 bp, Glycine max
  unsure (1)..(356): unsure at all n locations
  Clone ID: PAT_MRT3847_99688C.1
ataaatatgaatcatgtaacacataatggacagtgtaatcaatcgatatcactttcatctcaatagttggaagaaggtgtcaagatcaatgttttcacataatcatcaactgtaaatgtgttttgatcatctccatgttgataaataacctgagcagttctagccatgttaagagaagccttcataaccgactaaggcagagcggttgtggtcatagcaagaccatttagctctggccacaagttttgtattagttgccttatatgtttcctggcaacattttcatctgaaagattattctccgtcatgagacactgtatgctgcaagcattgnctcctctttcttgttcctccct

SEQ ID NO: 142495 - DNA, 404 bp, Glycine max
  Clone ID: PAT_MRT3847_99689C.1
ggacgaactagttttgaatccctaaaatattgggtcctttgtcaatggcgccaacacactacattaatatagacaagcttgagcgtggaagaatatggcgggaggggttgtggagatattcttcgtttacaacaccccgtggggatctgcatacttatcacgctgcaaatgatacagccgggaagctagaatacatcggaaggtggtttgaaatatacagcgagatccaactgacatgtatgatctgcctctctgtaatcttggccctgctaaactataggtgctggatgagaaactgattaagggcccgggatggtggagcgcggatgatccacaactctcttactgttcatgtccccaccccgaggttcttccccagaggtgcattactcaagcgctggcgc

SEQ ID NO: 142496 - DNA, 329 bp, Glycine max
  unsure (1)..(329): unsure at all n locations
  Clone ID: PAT_MRT3847_9968C.1
tcgggggaatgagttggaaacacacaanttttgtgtaaccagcacctgaaagttttgcgtcatgattgtgcggcaattgagctgcaacactgagttgcatgctgatctccgcgaacgggcttggattgccaatgctgtataagaactttccagtcttggatttgggaggttgttcgttttaatcgagttgcattacatcctttcttttttcagctttctttttttctattagttcctttcttatttttttttctatcattttctcagcttgtattgtaaatttttttttttctatattctgttcttttatttctttttttttttttttt

SEQ ID NO: 142497 - DNA, 764 bp, Glycine max
  Clone ID: PAT_MRT3847_99690C.1
cggacgcgtgggcggacgcgtgggcggacgcgtgggcaattttcagcaccttctccaccgccgttgcgcccaaatgcgccttcatcaatagcctcttcatcgccttcaccgctttgaggttcaccagctttagtttgttgattgaagacaacaacttccaacgaagctaccttcaaggatctcttcctggtggtggaagttcaaatttttcttcaaatatgcatgggatgtgagtaaaattttcttaaatgaattagtgtaatttgtttactaattcatcatcatcatcattgatgtagtcttttctcatctgattgataaaactcttctttctctatgactacagtacatgctataaagtgtaggcctgtaggattcttatatctatggtagattaccatggtgagatgggttagtttataggcttcattttggtctacatacaattggtaggattcaaatttctgttttcttccaatgtcatttaccagtttcatttgtgtctactaaagcaaacaagacatactttcttgcattatcttctatgtttaatataagggaatacagtaatttttgcatgtgagacatgtgatatgataatttatcattgctacaattgtcaaattttcattgagctcatgaagcaagtcattgggtataaggatatacatagttaacaagacttaaatcacctttgacattaaaattgttttatctggaaagcattgtcaagctcacccattaaaatagtagtgaatatctgc

SEQ ID NO: 142498 - DNA, 140 bp, Glycine max
  Clone ID: PAT_MRT3847_99691C.1
cattgaccaattactaccatttcaaatcttcttctgtccgtctcattccttctttttagtggctacttcactcttacaaatcatgcacatcaaattaactgccttatccaaatacttaataccctctaaccttataacca

SEQ ID NO: 142499 - DNA, 316 bp, Glycine max
  Clone ID: PAT_MRT3847_99692C.1
ttgaacaaaaatcctaaaccaacctttttgctcgtctcattcacaggctgtcctccggcgtgttgcacaaactacctaatccaatcgatctatctgataaaatagatttctgatgaccaagctgtgccttattgtagctcagctgcacagatgaaagactggcagtcctttgtggaaaagccaaagggtttttgacatactataatatatcagtattttatctgtatactgaagacagcatgtttgcgtttgggcatgcgactgagtttgactgagacttgtacagtggtagtccatggaattcgcagggaccgtc

SEQ ID NO: 142500 - DNA, 315 bp, Glycine max
  unsure (1)..(315): unsure at all n locations
  Clone ID: PAT_MRT3847_99693C.1
gatctagagactagtctcttgctaatgataaaaacctttgcattgataataggacgtancccatggaggatgttaattgcacatgctgggaccgtatctcctttgcatgtacttgtgcttgagaaaaccacctcacctccaactggattcctcacttgtgcacgcctcggactcaactctttgttccaacaaatcatccactatcgggtctcaccacaccaaaaacatctgctttacatcaccaatttaacactcaccattgatcataaccatacaactgatattccagaagttgtttatcttgacatttacaag

SEQ ID NO: 142501 - DNA, 812 bp, Glycine max
  Clone ID: PAT_MRT3847_99694C.1
gggtgtcatgaaagttctcggagagcccaaataactgcaatacattggtttctaattgaaatgcttctagtagtgtctgactctctgcacagtttactgctagttttgtgcatattctattcttgcatgttagagttgaaagatgaaaaaagtagagtgatcattgtgccaaaccgagaaatttgcataggtttagatagcgtttcaatagtggcttttattgcccttaagctttgaagcacaaggccactcaaacatattgcagaaattataattgaaagaatgaggttggcgagaattagatttttttttttataacttgattatatagaatctctgatactatatcaatgaaccaactttctcaaaaatttatacagtcaagtgaaggcgaaagaatggttttttatctcaaaacttttgggtacttcgaaaattagaacttttttattattgttttttttttttttgcagccaatgtgtttggaaaaccaaagacaaacacagacttcctttcatacaatgggaatggattcaaactctcaattccctcaaagtggaacccaagcaaagaggttgagtacccaggtcaggttcttagatatgaggacaattttgattcaaccagcaatgttgctgtcatggtcactgcaactgacaagaagtccatcactgactatggttcacctgaggagttcctatctcaggtggattacttgcttggaaaacaagccttctttggccaaactgatgctgagggtgggtttgattccaatgctgtggcaactgcaaatatcttggagagttcaacg

SEQ ID NO: 142502 - DNA, 1535 bp, Glycine max
  Clone ID: PAT_MRT3847_99695C.1
tacagccagaaaatgtaataaccccatcataagaatataaaacaaacgatctttctatattggctgggttcaaatggttgaaaaaaatttgcaaaaaatactaactgctcaaattcatataaggatttctaagaaaatatttatttaattgaagaaaactatattgatttctcatttacaatgcttgtaaacatcatatattcatatgtaaagtatggaaggaggaaagaatgtagtaaaccttatctagaacaagctcctttaaaattgactgaagctcacgaatgataacctttgttatcagtttggtgtcgtcaacaactgaaaggatgcaaaccagcaccatgcacccatattgatgataagctgttttgtctatgtgccccttcaatcctttgataatcttcttcctttcctaagtggcattcccatattttacacaaagaattccaattttagctccatccctcgtaccaatcattctaacaatgagtggacttgataactgttggattatatctgtgacagatgacttatcagcaatgctaaaatattccagtaagactctgtgtaaaatagagtggtcaactatccctttctctaaaattggctgaatcactgacgtcatatgtcgcagaactgaacctttctgtagacccaacttggacatcacatctgataatctgctctctttcaatgagactagatccttaaacaactgaagttctgtggagtataattccgaaagcagttcttgcttctgtgcagcatttgctaactcataagcatgctcaacaacaatcgatccaaccatatggcgaagaagaggagcaacatgaccacggagagtggagataaagcctgctagttgtttcttggaagcgttgtcgagcatcttcttcactaagtgaacagcataagcgctgaatgctagagttagaaaatgtggccgaagctcttcaaatactgcatctctttcagcttgtgaacaatgcttgacacatgtctgaagaacccgagatgagatgtgagagcccgcaatctctggaatcttccccttcatcttttgcaaagcttcagtcactagcttagctctgtcctctttagcaatctcatgacgtctcatcttttcccatagacgtgcaagctcttgctcaagagtgaaatgtcgctttctcttcttttttctagcatctgctagttccttggaatgaagacgacgttctcggccggtaagaggagccgtcttcttgttcttgttgtctttagcaacggagtctggtttgtgcttctttgaggcaacgagcttcgaagccttgggagcttcgtgagtttcagtattgagtcgctttctctttttggtgtctccggcgtcatgcttcttcgccgccattgcttaagctctgagattgagttgcttgcagctattgcctgtcactggaaagggaaccctctctgtctaactccgagaaaaacgattactagggtttatactttatactaaggcccccttctgtcgtcttctcgcagccgta

SEQ ID NO: 142503 - DNA, 251 bp, Glycine max
  Clone ID: PAT_MRT3847_99696C.1
acgcggtttctggggtggcactcattacaactatggaagctatctactactctttggttttctgccctgttaccgagggtgccaacaacgggtcacagttgtagacatcagagatcaaccatttttcggcagtggggtctatataagttggtggagggttcattcccgctataatatgctgttgcctggacaaactggactgggtagctgatgagtcatccagctctgacccatgtttctattttgaagag

SEQ ID NO: 142504 - DNA, 330 bp, Glycine max
  Clone ID: PAT_MRT3847_99697C.1
agatcggctcgagcgttgatatcgaaacgacgccggtcccgctcatgctaccatttcaatttcagatctgacgaatcgcggtggggtaaacgcggagagagggaggggagtcacaatcttgtttggttggagttggaacagtgaagaactggggagatcgttatacgacagatggttgttactggaatttgttgtaccagttattgtgatatgtgtctgttttgtagttttttgcttgagatttttatctcatatttgttatatgggtagttttgtgaatattttattttggattttgttttacgtatgattatgttaaggaatttattt

SEQ ID NO: 142505 - DNA, 267 bp, Glycine max
  Clone ID: PAT_MRT3847_99698C.1
tgcttattaagtggcgtcatacccatcaagaaatgcgcaaacagggagcagatcgtactatactaaacaccacgatattgcagggttaaactagagaccgtgttgctactagttcatcctctgtacagagtaaatgaccactcccatctaaacaatgttaccatctgaggcaacactgctctcacacactagaaggaggaggtgctccacgcacgaaagcaccaatatggtgctggcccagtatcccatagtgaaattggccctgac

SEQ ID NO: 142506 - DNA, 410 bp, Glycine max
  Clone ID: PAT_MRT3847_99699C.1
ggtaataacaaatagtaatatttagctgacagtagtttcaaactaagcaagttacaatatcattggtgtttacattttcttctgtaaaattaggggagtacaaaaatgatacaagattacattgcaccctgaggcttaaagggacgtaactagtttgtcagtggccaaaatgtcacaaaacctgttttagcttttaaggactatgacaagcaatgtaacttcacagtttatatatatatatatatatgggggccttctctgggttgcaaagctcgcattattggttcaccaaaaaaataggttagccttaccagaagtttcactgaatcagggaatgccattcatgaacgattaagggatcattcttttgacacgacacattttagtggtcacaccgtgacatgatgcat

SEQ ID NO: 142507 - DNA, 319 bp, Glycine max
  unsure (1)..(319): unsure at all n locations
  Clone ID: PAT_MRT3847_9969C.1
aaatagtgaactctgacatataatacccactccaagttcatgcntatacagaggattgattactcaattgcgctggccgtctagggaaacagaagtgtccaattaaaagaagaaaaaacctagttgttctttgggaaggaanttgaccgttgatttagcatacaggctacaccagggacaaaaacctatgatttgtgctggtttccgctttcttcattgttatgctgtggttttctgggtttcctagtgtgtggtccttcgggctaccctttggtgtcgggctgctgtcttctggcgtgttgacgcgtgggtgagaacc

SEQ ID NO: 142508 - DNA, 436 bp, Glycine max
  Clone ID: PAT_MRT3847_996C.1
atgatagagagaatggaaggcttgtcactactactcagatagatattaacagacaggggaaatcctacccaactggagcttgactctactaaccggctaccctgcgaagggcttatacacgctgggggaaaatttggttgatacattagagattgtgagattctaaacctgcactctgttgactctggacaaccctaaacaggcgggtgcaggctcggaatattgagccgtactaacccgcaccatacatgatcagcagttcacgctttactgtagccgaaggactaactcatgacataaatgcgcgaccttttggccgatggccaaaatacctaagccgaagccgacacaattgcttcgtaagcccagagaccaaaatctacgggctccccacgatatgttttaacttgaagacccccacttcctccaaagaaaa

SEQ ID NO: 142509 - DNA, 365 bp, Glycine max
  Clone ID: PAT_MRT3847_99700C.1
attttcccgaagaggaagaggacgcacagtgacacgaacatcgacggcaagacatactgcgacacaccaaggggcatacaaaacggtgttaggagaaagttcaagggatgcactatggggcccaccattgtgcctggcttagactataggacccgccactatacccctcatggttttaagaatggtgttgagaacattgtgaaggactaggaactggtcatgatgcacaacatgacgcacagcagcggagaacggccacaagatagccaccagaaagaggacagatatgggtgaaagaatcgcgcagagagccgtcgttgtgacaaacataacagccaacatacccaccccgtaagatgaacagt

SEQ ID NO: 142510 - DNA, 1848 bp, Glycine max
  Clone ID: PAT_MRT3847_99701C.1
gaattcggcccgaagtttcatgaaatggcttaataagcttttcagaggtgggcccaatagaggaaggggtggtcgccacctgcatgagccagcagaggaaagcagagtttggggtgctccatctagagcgttggatgatcgtgctagagctcagaaggagaaagaggatctaggccatgcaatggcactttcttcagccgaagatttaaagagaccaaacgctcatcaaggatataactggggagaagacactggtgatgattactcgaaggcacctcgtgatacccttaactcatctgcacaccctccatttgcccctacaccattttatccccatccccacaaatatagaagaatatgtggtggctgcaaccaagagataatgtatggaaattgtttgggctgcatggatacttattttcacccaaattgttttcgctgtcactcttgtggttaccccattacagagcgtgagttttccttgtcagggaagcatccatatcacaagtcatgttttaaagagttgaatcatccaaaatgtgaagtttgcttccaatttattcctataaatgctgctggtttgattgagtataggtgccaccccttttggtcccaaattattgtccatctcatgaatatgataatacagctcgctgctgtagttgtgaaagattggagcctttgaacataaaatactatagactagaagatggacggagtttgtgtttagagtgcatggaatctgctataatggataccggtgattgccagcccctttaccattctatcagagattactatgaaggaatgcagatgagaatagatcaacaaattcccatgcttctagttgagagagaagcacttaatgaagctattgtaggggagaaaaatggttttcatcacttttaccagaaacaagaggcttatgcctttcagaagagcagactgtcaccagtatacatagaagaccaagaattggaggccatcgactaatcgggatgcgaactcaacctcaaaaactgactagaaaatgtgaagttacagcaattcttgttctatatggtcttcctaggtaactagtggacaatggaaactttgctttttgtccccttcgaattacagctgattgattcccttttgaatataattgtgagttcagatatttttccaatacccataagacacagtaccaatgacagactataatgttactttcttctcattgatgatgttcaaacttcattataggagttctcatattttaatgggatgcaggttactcacaggtgctatacttgcccatgagttgatgcatgcatggctacgccttaatggttatcgcaaccttaatcctgaagtagaggaaggcatttgtcaggttctttcgtatatgtggcttgagtcagaagtaatgcctagctttcaaaacatgccatcaacatccacaagtgctgcctcttcctactcctcctcaaagaagggtgcaaagtctcatgttgaaaataaattgggtgaatttttcaagaatcagattgccaatgattcttccccagcttatggtggtggctttagagctgctaatgaagctgttaatagatatggtttgcgtagaacacttgaccatattcattggactggttttttcccagtggaaaaagaacgcaagttctttaagtatggatagaagtgctttgttttcattttctttggttctacaagtggatggaccaggaccaattcaaagtaaagacagaagcttggacaacttctgatatttgggtcctacgaggaagtccaagtctaatttgaccaaaaaataaataaatgcatgacaagttcgtattcaaa

SEQ ID NO: 142511 - DNA, 260 bp, Glycine max
  unsure (1)..(260): unsure at all n locations
  Clone ID: PAT_MRT3847_99702C.1
ataaaataangctccgagaagacgccagaaggggaacacgtcgcttctgccgcaatagaatcgcgatatagacaacgacgacaggtgtgcatatcagcaccacataagaggactttcactactgattacactatgtctggagaagtgagataggatagggggcgaagatgaattaattcattttagtttcgtgaaggtgagttcaatctacgtagctcaagtgacagaatgtgtgggggattctgttagacgagtttcat

SEQ ID NO: 142512 - DNA, 1122 bp, Glycine max
  Clone ID: PAT_MRT3847_99703C.1
aaagttccttcctttccccatcaagatcagattcccagagcgacccacgcgtccgggatcaaacacgatgaagctcagactcagatctttggaatctaaagaaacccttaaaatcgaagtccccgattcctgctgttctctgcagcaactcaaagacaccgtttctcgcaccatctcttcttcttcttcctcttcctcttctgtgcacctttccctaaacagaaaggacgaaatccacgccccttcgccggacgagccactccaatctctcggtgtcgccgccggcgacctcatcttctactctctcaaccccaccgccttctccctcgaaacccttccccacaagccagaaaccgctcccctcgacggtccctccatccaagactcgccggaaaccctcgccagcgacgccccctccgttcccaacgccgaaaagcctccgactttggacgccgcggaactggaacccatggaaatgattgatgggtctgacgagacggtggtggtgggtaccaattccgagcctttcttcgtgagaagggttctgaaagaagcgcttgggaacaacgttaatgatttcaagttattagtgtttatggttcatggtgttgttcttgaatctggatttgtttgaatcgacaaggattctggtatggcgtttagtggttctcaccttcttgatgattctcctccgactttttcttcgatgatatctttgagttgaagctggctcagtagcagcagcaacaacaacaatcaagtaccaattcacaacagcagcagcttcaatagcacaccctttcaaaccagcaatctcaaacttctaatcatagcatgcaccagcaagataaagtagggggagggggtggtggcagtgtgactatggatgtagcatgtcaaactcatttagaggaaatgacctagtcagtccttttatagtttttgataccacatacatgttgaagcagtagttgtttcttatcattgggtagtatgtttgttctgacttgtaaaagaatgtttgtattataattgacccatataacggctagtgaatttctgatgtacacaattattctatttttctaaatatataaaaatagccatttagtttatgctaaa

SEQ ID NO: 142513 - DNA, 623 bp, Glycine max
  unsure (1)..(623): unsure at all n locations
  Clone ID: PAT_MRT3847_99704C.1
ccacgcgtccgatttaaagacccctcaacgaattgaagaagcgtgttagagacaaaacgttcctcactttccccatcaagaatcaagatagctagagcgacataggatcaaagacgatgaagctgagactcagatctttggaatccaaagaaacccttaaaatcgaagtccctgattcctgttctctgctgcaactcaaagacaccgtttctcgcaccatctcttcttcttcctcttctctgcatctttccctcaacagaaaggacgaaattcatgccccttcgccggaagagcccctccactctctcggcgtcgccgccggcgacctcatcttctactctctcaaccccatcgccttcaccctcgaaaccctcctccacaagccagaaactgcttcacgcgacggtccctccatccaggactcgccggaaaccctcgccagcgactccccctccgttcccgacgccgaaaagcctccaactttggacgccgcggaactggaacccatggaaatgattgatgggtctgacgagatggtggtggtgggtaccaattccgagcccttcttcgtgagaaggggttctganagaagcgcttgggaccacgttaatgagttcaagtat

SEQ ID NO: 142514 - DNA, 226 bp, Glycine max
  Clone ID: PAT_MRT3847_99705C.1
aggaatggtgacccatatcatcatgacattcggactggggtacacaacgactgccgaacgagcaaagcctaggaagggatcattggaaaccattgaaccaattgcaatggcttgcacggctagggccaacatgatgccggaagatcgatgatgtggcggctcgatgaacgccacacactcctttgggcctgcagttggtagtggtgacttccatgacaactggatg

SEQ ID NO: 142515 - DNA, 203 bp, Glycine max
  Clone ID: PAT_MRT3847_99706C.1
ggcaattcacctgagaggtatcctggttgtggcttgatgacagcagaatttagacgaaataatccatggtcacgcaaatcaatctctgcaggtattttctcatatggcccacaattttgaaaaaccatctaatactcaagattcaaaacggagacttggaggatctaacgagtttgtttacattaaagaattctcacatcata

SEQ ID NO: 142516 - DNA, 1677 bp, Glycine max
  Clone ID: PAT_MRT3847_99707C.1
ttaaggttggctgcagcaagggagcaatcccagtctgctcaggaggaggctgaagagtggaagcggaagtatgacattgctgttagagaagcaaaagctgctctagagaaggcagcaattgtgcaggagtacacaaacaagcaatcacaattgagggaagatgctttaagagaggaattttctagcactttggctgaaaaggaagataaaataaaggagaaaactgccaaaattgagcatgctgagcagtgtttaacaactttgaaattggaattgaaggctgctgagtcaaaaataagaaattatgagtcagagatatcaccactgaggcttgaaattaaaaagttgattgagagattgaaaactgaaaatgctagggctcagtcatatgagaaggatgtaatggtaattcaacaggagattaaccatctaaaggagaagtacaacaccgagtgcataaaatttgaggaagttcaggaaagatgtcaaattgctgaaaaagaagctgtaagggctactgaagtagctgacaaagctagggctgaagccaacttggctcagaaggagatgagcgagatgcagaggcttgcaattgagagactggcacatattgaaagggctgagaggaaaattgaaaatttggagagggagaaagataatttggaaggtgaattgcaaagagtgagggattcagagaaagatgcacttgttagggtttcaacactagaggaaaaggtgggacagagagagaaggatatagattcactcttggagaaagatggaacacagaggcgaaatagcacacagattcttgatcaacttttggaaacagaacgtgaagcatgtgctcaggcaaatagcagggccgactctctctctctccagttacagtctgcacaagcaaaaattgattctctccatcaagaactgactaagtttcaactgaatgaaacaatattggacagtgagctaaaaactgcctctcgtggaaagcgtttgagggtagatgatataggtgtagaatctggtcaggacatggattcgagccctagaatcttaaggggaactaagagatctaagagtacatctagtccacttaagttttcacatctggaagatgttagttccattggaggtgatgaagacaactatagtcagcaaactaacgaggatgattataaaaagtttaccatccagaagctcaagcaagagctgacaaaacacaactacggtgatcagctgcttgagttgaagaatcccaacaagaaagctatccttgctctgtacgagaaatgtgttcttcagaagtcataggcaatggcatagcatgtaatcatgtccaccagtagaggcctctaacaagggtgtgggccatacaaatttcatttatgtcatggtggctcgcatctagaccataagtgttttgttaattcgatttttcagttttagcttcattaatcattatactgtatgtgtttagttggcttgctattaatgactccggttggccaaagagatgatggtctgatcttcatttgttaaattaaatgctcgagttagttgtattcagtagattttgtatagttgtattcggtgtttatttgtaagttaacgctactaacaatggatattaaattagtttcaaaccatatatttagattagccttttagttgggc

SEQ ID NO: 142517 - DNA, 538 bp, Glycine max
  unsure (1)..(538): unsure at all n locations
  Clone ID: PAT_MRT3847_99708C.1
tgtttgagtagtagtagagtataagcggtaaatgcaccaaatatgcaagatacattgcttgataagtttaggaagtataaggtgaaacacgatgcagaatggggtacaactagtgaacggaccccaaccgccagagcctttgcgggataacccaaggtgattacagccaacataaaggctacgtaacacatgtgtataactggtgccgtaacctgtacaacacggtaacaagcaacgcagcgggagacttaaaggctaatagtctaattggcgaacatggggcctcgctgctggccacccatagcaaaacagatggcgagagcacgagggcgtcaagctaacgtgtcatgggtattgcgggccgagcggtggacggactggctggtaggcatggcgcggtagcgccgancggcgtgatgggngctggtcaggcgggtggtaagaagcgcacggagaaggacatggcgtgctacacataacgtaaagcggctgctgagccgcagaaaacacggcccgcgacccgccaaaggnagagaga

SEQ ID NO: 142518 - DNA, 401 bp, Glycine max
  Clone ID: PAT_MRT3847_99709C.1
ttttatatacattatctttttttattttatgggtgaacaatacccacaccctggtggggttaagggccatgttccattactgccctttgcaaaaattcataatgaaccaatgtaaaagacatttttatatcaagctaacatttcatcgaccttaacctatattgagtgcttaacatttgaaaatcattttttcgccgtcagagaccaacaatttgctgtctccgaggacaagaaacaaaaaagaaccttgcaaaatacaactaaccttgagtcaaaattacatcaattgtttatgactaagatgtgcctcacaacgccaagaagcaccaaatagaatagatgtattttgatggggggcaattttagcatatacttactcaagccttttatttaacccgtgt

SEQ ID NO: 142519 - DNA, 198 bp, Glycine max
  Clone ID: PAT_MRT3847_9970C.1
aaaatgcatcacttttagtcattaaagtagtttaaataaaatttgacaagcattatctaaacactattagataacactttcggactagaagtctaaaagtgatgcattatattttagaattagaattagagaaactaaaaaatggaccaaaatttttaaaaggactagaattgaatctcaaaaattcggacgcgtggg

SEQ ID NO: 142520 - DNA, 145 bp, Glycine max
  Clone ID: PAT_MRT3847_99710C.1
ctcagaagaatccaggtaattgggctctcagagcgcatggacttgaagcaccttgttgcactacagggcaacccggcgatgatacctcgacagtatatgcaccacagctccgttaatgggacattatcctgggctatgccccaca

SEQ ID NO: 142521 - DNA, 440 bp, Glycine max
  unsure (1)..(440): unsure at all n locations
  Clone ID: PAT_MRT3847_99711C.1
actacagtatggggggaagactgggtctctatgcatcagaaagagggcatctatgagaaatatcagaaaagcgtcaatgccaaatattagaccctcgagaacttatactagngnnatgtagtnntgtgccagtantttctttcccttcttcacaaattaccannagtttatagnnctcgtaaagggcttctgaaacacacaannctcgtttaaaaattaatttcnnctgaacaaactgtcaaaattaattaatataatcattttagaaaaaaactgttttgagccttaaataacctctttttttcaaacaatacaatattttcaagtttgcatttgaataaagtattaagaaaattgtatattttcactagtaattcaatcccattttcttgtgattctcagaaccacttcattaatatcataaaacattatcatatcac

SEQ ID NO: 142522 - DNA, 377 bp, Glycine max
  unsure (1)..(377): unsure at all n locations
  Clone ID: PAT_MRT3847_99712C.1
aagaagcaagataaggaattggaaggccttcatgagaaatactcatccacttgcagattggtcaagtaccaagaacttgnattgggaaccccacgcgtccgcttctatgggttttaaatggatttaggatgagaggttgtttgtgtgtaccctcctcctttccttaataatgaggaaactaggccttgtaagttgttaggcgagttcccccttttcattctatacatgaattggtgtttttttttttttgttcatgatctcaattggatcgagttttgtaatatgtattggtaaaaagatgaagaagttgtatttagagcataaggatcatagttctgcattttaacaaggctaagcaaatcagtttcttttatttc

SEQ ID NO: 142523 - DNA, 394 bp, Glycine max
  unsure (1)..(394): unsure at all n locations
  Clone ID: PAT_MRT3847_99713C.1
cggctcgagcaaacattcaacactcacttgttgcgctattcggagttcagacctcaaactatctcagactcagagacttggccatcacttgaatcccaaaactgccatagaggaagccggtactgggggaacgtggtggggcactgatgggtggtgtgttgggccttggggtggatcgggncanatgctgaggggggcggaccgtgggggatgcccccacggggtgcggggtggggggggctgtcgggctggggggactgggggggggggggcgcgggggggggggggggcggtgggggggcggcggggggggccgcggcgcgcgcgggggcggggggggcggcgggggcggggcggggcggggggggcctgggggggggcgcggcgggggggg

SEQ ID NO: 142524 - DNA, 343 bp, Glycine max
  Clone ID: PAT_MRT3847_99714C.1
gttagtcattagcacttcgtcataccttactgactgtacaacaatggcttcaaagagggaactttcgaacccaatgagggaaataaaagtgcagatgctcgttctcaatatctgggtaggcgagagtttagatcgtatcaccagagcccacaaggtgttggaacaacttaatgtccaaaccccagcgttttccaaagctatgtacactattcgttcctttgtgattagaacaaatgagaagattgcattctatatcactgtcaaaggttacagggcaatgcaactatagaagagtggttcgaaagttaatgaatatgaacttctcataaagaatttcaatgat

SEQ ID NO: 142525 - DNA, 719 bp, Glycine max
  Clone ID: PAT_MRT3847_99715C.1
aacccaataacactcccaacatagccaaatgagaggagaaaaataggatgtaatgtagctgtgattcaaacagcaatctcttgaaaacagcatcaaaataacatgtatataaaattgtataaaatcaagaagtaaagaaaggtcatttccattaccaatccatatataaaaattgctagtacaaaaatttgcagcaagataatatctgctgctctagcatatgatggttgtctgggacaaaagtgtcaatgggtagtagtatatctgaaacttctcacaaaatgcctgtatacctgaaacctctcatacaatgccagagttaaacacatgtagatccagtaaggtattgtaatgtcccttctcaatttcctcttctttcactcgatgaagaacaagggtttcaataattaagtcttcccaatcaacatcatcaactaccattccttttctcttcttccttcttctttcaggataagagctatctaaagggcaaggaatctcagcatcacccagatcagcatctgacggatgcataattctttttattcgaaccttagcagcattgatcctttccctcctcatttcacatttcaattgaccattgacaaacgatggtggcatggtatccactccaacatccttctccaataaacgattaagcagaagcttcttgctcagttcagatttcccatcccaccactccctacactctagcagat

SEQ ID NO: 142526 - DNA, 457 bp, Glycine max
  unsure (1)..(457): unsure at all n locations
  Clone ID: PAT_MRT3847_99716C.1
catccactcgcgcgggcggtcgcaannnnatttttttttttttttttttnnnattaacaaaccaccattcttttgaaaataaccgggggtttttataaaagggtacacccttcactaatggggctcctccacaacataaaatatttgtttttttcaacacacctttttttcctctttggttattaattcatgaaaagcctcctacaacaaaaanaatatgttaaaagaaaagagtaaacctatatacttttattggcatttcctaacttattgaaattgaacattttatatcttttnnnttgagataactaatgtaattacatgcctatccctagtttttttattatcctttaagncccacacccttcaaacttcaactcattttatcaatgatnntnaaaactttttttcacaattttttattaaaaaattgtgcaaaaccctacccctttttctt

SEQ ID NO: 142527 - DNA, 360 bp, Glycine max
  unsure (1)..(360): unsure at all n locations
  Clone ID: PAT_MRT3847_99717C.1
caattccctccccttccgttcgatgttcattttctccactctctcctcagatctactttctctgcatcgcatccatgccttctcattctcgcatcctcaaccaccgccatcgctctctccctctccacctctctcgccgcaaacgcctctctctccctccaaccacgtccctcgtctactctccccgttcccgcttcgattgcgctagtctcgagttacatccgttgattattccgcacaatgaatgctgcgttctacgcaatgtagctcctacaaaagccttcgacgatgattcatttgacataccaatgctngatgattggaatgctgatgatagttcttctgcatataagctctctt

SEQ ID NO: 142528 - DNA, 337 bp, Glycine max
  Clone ID: PAT_MRT3847_99718C.1
cgcaagggcagcaacgcctggcgtgactctcgccgccgcgagtctatcgctaggcgtgcttccatgcctctgggcggtatgcgtgttatcaccaccggtggtgtgactgctgggctcgatgccagcctctacttggtgggttctttggcttcccacgactcggccctggaggtcgctcgtgctatgcagtattcttgggtcaagggtgttacggtcgatgcgatcgatgtttgagctacggctcccgcgcgacaagcgaaggcgtttacgatgaaagggttgaacagtgatcggatcggttatctgaaacatgtcgggaatcttaaggatttaccac

SEQ ID NO: 142529 - DNA, 457 bp, Glycine max
  unsure (1)..(457): unsure at all n locations
  Clone ID: PAT_MRT3847_99719C.1
ccggnccggaccacgcgggccgacacacgcgtgcggttgaatacctatgggaacacacggcactggctgcattgctgtgaaggggaacactctgggtggttgtgtgcatacttgatgtgcttcccatactaatacctgagcgtacactggagtgcttaaaccacgtgatcggataatgggtctggactagcctcacggacgacatgtgactcatggcttcatgacacccactgctgcgtgcgtctggcccgtcaatttatcatgcagctatggctcatcgacttgatgaatcaacaagtcttattgattatgatatgcgggagaaaactgctactgtggttcattcaacactcattgctgccggtgctagtgcttatcctcgcgacatagactacactgctctgagataaattgcagctgaagtacgtgctcttcttatgatggatatggcttatat

SEQ ID NO: 142530 - DNA, 1066 bp, Glycine max
  Clone ID: PAT_MRT3847_9971C.1
gtctcccaccacatgcgctcccacctggtccttagtttgatttcgtatctctctctatctgggatctgcttccttctcttctctttctcaattctcattgcataatgctaatatcatttcctccgatctgcgactttcttatttctccctcaacacaacacgaggcaacatgttcctctttgcctggttctaccggaattctagctataactcggtctctggcagctagaagctaaaattctcttccctggtctcgataatgccggcaaaaccaccctccttcacatgctcaaagacgagagattagttcagcaccagccgacccagcaccccacttcggaggaattgagcattgggaagatcaagtttaaggctttcgatttggggggccatcaagttgctcgcagggtctggaaagactattatgccaaggtggatgctgttgtatacctggttgacgcctttgacaaagagaggttcgcggaatctaagaaggagctcgatgccttgctttcagatgaatcattggcaaatgttccatttcttgtgctaggcaacaagattgacatcccttacgcagcttcagaagacgagctgcgatatcatctaggcctgaccaatttccaccacaggtcaaaggaaagattaacctcacagactccaaccttcgaccccttgaagtgttcatgtgcagcattgtgcgcaaatatggggtatggtgaaggcttccagtggcttagccaatacatcaagtagagtccttattcattcttagttcccctttctcttgtcaactagcactgtctgcagttacatcagaagataatttacctttgtttttgcttttgatgatttttgattggattatttgatacaactgcagtgatattacatgataaaatttgtatcttcaaagatttttttgggggaatgttctcctttgaaatactgaattctgctgtaggatggtatgacttggaaggaacaataataaatctggaagaatgttagttcgttgagccaatttcttcccggaagattttgactgggaactgaaccctcggaa

SEQ ID NO: 142531 - DNA, 384 bp, Glycine max
  unsure (1)..(384): unsure at all n locations
  Clone ID: PAT_MRT3847_99720C.1
tccactccaccgcccacgcgnccggagacagggaagggatccacaaaacaacgaggcgcacgcccaganggaaacaaannngcccaaacggccccccgacgacgccgaaacccccaaaggccccacgccgganccaaaaacaccncaacccaaaaaggcaccccccaaaaacacagcaggaggaaccaccccgcgcagcgacccaccggcaaaccccccgacagagggcaacccnagagcaagcgccgaaccgcagcgcacccancgcacnaaaggaacgaccaaaaaggcggccacagccggcacccccgagaaaacaggcacaccaanggcccgagccacgaacaggcccaccagggggcgagccagacccgacacaacacc

SEQ ID NO: 142532 - DNA, 344 bp, Glycine max
  Clone ID: PAT_MRT3847_99721C.1
aagctcttccataaattggtggtgcctctcttccatctcccgaggggatacctctctcaggaaggccacattactcccttccttcttcacaacccttaacactccttcttctccttccttttcatcttccttcccctctctcattcaagacatgcctgtttttgctgcccctacccccatcatcaccccaactgtgagagatgatatggcaaatgaataccagaaagctattgaagaacctcaaaaatcgtcgatggaaaagagtgaactcaaagcgacaacttgttgaaaaagttgagcatataacaagcttctctaaggacatcattcatctgatggcattc

SEQ ID NO: 142533 - DNA, 576 bp, Glycine max
  Clone ID: PAT_MRT3847_99722C.1
tctcaagcccttttcagttttcttctctctctctctctctctctctctgattcttcaattttgttgactcttttttccattcacttctttctttaaaatcatcttcataacaaaaattgtgagccaccttgcccctattaatttttttttcttcttctctttcggcccgcgcaaaatttgagcttagtagctctttgtccttttaaatttgcgtttttttcttctaagtggaccactcaaattgtacttttgcgcctaactggttcatgcatttttatatttttttctcatagagaaaccttcaagggagttgttgtgttgaaggattccttctttgatccttggtttcaatggagaggtgttacaatgagaaagagtacaagtccaagaaaatagaccttactctaaagctttcaccttgtggtgagaatgcagaagagaaagagagggggttgagaaggtcatcatcatcatcattagtagtagttggtgttgcaaatggggcccagtggggcacatctcttggcagatcttgctcattgccagcaaagaggcagagggaggtggctgcactct

SEQ ID NO: 142534 - DNA, 187 bp, Glycine max
  Clone ID: PAT_MRT3847_99723C.1
gaccacgcgtcaactgcgaaaagacgacaaaaagggaaaatttttggtaatccacatttttttcttctgttcctcaatcagacaatcacatcagaagcgtttaatttccttatcacaaaaatgggttgctgctacatgaagctgtgtgtgctcacaacaatgattctggtgttgagtttaaagaaaa

SEQ ID NO: 142535 - DNA, 402 bp, Glycine max
  Clone ID: PAT_MRT3847_99724C.1
tttttccccttaaataatttccttttctcagacaacaacacagagggattctttaaccaacaaggggggcaccaccccagaacggacctgcccatcaagactctaatccaaacgaacgcccccacagcacagctagctaaaacaacacaccgaagatgacactcatccacaagggcaccaaaccataaggttaacataattatccggcacccccacaagggcgcccgtgcaggccctaaagaggaaagccctggagcatattactacccaacaggctcctagagcgctcaaaggggggtagcctactgagggtccacatgaccaagcaccacaatggtgctcctggcgcttcccttagccataaagcaaagaaacttttaactccaaagacctaaggtaacc

SEQ ID NO: 142536 - DNA, 508 bp, Glycine max
  Clone ID: PAT_MRT3847_99725C.1
aggccactcactaggatcagcactggcaatgctaacctggacaaccattgccaagactggcatattaattgagacatatctctgcaaccatgcatatgtatctgatcatattgagagaatgaaggacaaataattgaaacatgggcttagataagctgggagagtatgaacatgtggactagccattgctatgaaggataagcaaaagaagagttcgtgctttgacccatctgctgctgagtgtgcctgggatccatccttatttgagaatccatctgaccatatctgctctgagtatgtaggatacttagagcacagataaaaaatggaggagattggtgcaggaaacatagaaaagctagccactcatactatcattaattgtctactgatgggtgtgttggggaaggaatctgatgatactctgcccctgatgtcttcatggtctctgacagtgaatcataccgctataaatgagattacagatactcatgggattcaccaatgg

SEQ ID NO: 142537 - DNA, 358 bp, Glycine max
  Clone ID: PAT_MRT3847_99726C.1
cctacttttacggtttttttttttcggaacaaagcaccaagtaatacttcatgcgggtggaaaataacgggagaaagaaccacatggtgctgaaaccaactgaaaatcaaatacatttatcaccgccccctacaggcaaagaaaaacaaagctctttatactgcaaggtcaacaatactataaggacgcaagtattgattaacctacaagtgaaaagaacctgtagaaaagggaacctctatgagaccatgcgcatcagaccgtacagccgaatgttggccaccaagcgaaggcctctagctatggacaaagcccactggctgactgattatattgacggcggcagcagaaacagtgg

SEQ ID NO: 142538 - DNA, 852 bp, Glycine max
  Clone ID: PAT_MRT3847_99727C.1
gattttgaggttgttttctggtgcaaccgcccaaggcccatggccgaaggggatccaaaagaaaattcaaacaactatagtgtaaggagaacaagaaattcaatttcttttagcacaactttatctagttgacttttttaaaacttctttaatttttaaattttaacttttcaaacattaaacctaacaagtaatgttttatatttgtatgaaaaaatattttgtatgtaataaaatatattatttttaataaaactgtgtctatttttttttatgaaatatatatttatcatacttttacacacaaaggatcctcatatatattgattgtttctgtgattggccggcataagatttgggtttttccccttaattttgccttcataatgtagactagtttatgtgctataggaattgaatgacaagaagaggttagctactactggagcaaactttgcaagagcatacaccgtggaattcagtagttgcaagttccctgaaaacttcactggttgccaagatcttgccaaacaaaaggtctagctctacctctgatatttcacttgctttcccaaattctaactcttgctcttgcctttttctaattcagtaattaattctcatgctgttgttcttttttccttctcgtttctgggattttatttacgcagaaagtgccattccttagtgacgatttggagcttgaatgcgaaggaaaggacaaatacaagtgcggttctaatgttttctggaaatggtgaaaggaggcaaccttttatgcccaactgcgaattattcgctttgcgatgtacctaactgcttgaatatataccatatttttctgcaaaaaaa

SEQ ID NO: 142539 - DNA, 3092 bp, Glycine max
  Clone ID: PAT_MRT3847_99728C.1
gtcccctgttcttccccggccacagtccacgcgtccgctttacacctctgccacaggcccacaagtagcaggggaaaaaaatagccacacaagtctcaaaacccgtaaattcttcgtctctcggtttcatctagttttccctctgttcttcttccgccacagttgatctgtctcgaacctttgtgaccaaggttgagaaacgctcactggtgggctatgagtttgagatatggcagtgtggtcttggttgctttagtgcttctgccacacatggcttctgctgcttcaattgtgaagaacctaccgggttacaagggtgatcttccattcaaacttgaaactgggtacataggagtgggagaagaagaagaggtgcaaatatttcacttatttgtggagtctcagagaaatccattcattgatccactgttaatttggtttgttggaggtcctggttgctctgccctatctgcgttcttttttgaaaatgggcctttagtaatgaatgagaattacaatggaaaccttccaaaacttgagttgaacccatattcatggacacacacgttgaatatgatatacatagacatgccagtaggcacaggattttcatactcagaaacgcaagaaggctattacagtagtgacatactctgggtgaagcatacttacgaatttctacagaagtggtttattgatcatccaaagtttagctcaaatcctttttacattggtggtggctcatattcaggaatgatcactggtcctcttgttcaacaagtatatgaaggatacaaagcaagacgcaagccactcatgaacatcaaaggttatgtactcgcgagcccagctgttgacgggtttcgagagcagaacatgaaagttttatatgcataccaaaggagtcttataccagaagcgctctacaagtcaatgaaagaaaattgtaacggggattatataaacattgatccagaaaacacaaagtgtgtctcagattatagtgtttatgttgagcttgttcgttacataaacgaacaacaaattatggaacctctttgtattactacgcctggcgtgaatcgagaaatcctacaagaagttcaagatcctccaacattttggtgtagaagctattatcatatccttgttgacacatgggcaaatgatgaaaatgtgcggaaggcccttcatgtaagagagggaactaaagaggaattcctgagatgcaacagaaccatggcatacaccacaactcggctaaacacagtagaattttatcggaatctcactaatgccaatctcgaagctctcgtttactgtgctgatcttgatatgaatgtaccacacctgggtacacaatattggatcaattcattcaacacgagcatacgtgacaaatggcgtgcatggtttgttgacggtcaagtggctggatacacagaagtccacaaaacgaaagaagaccactacttaacatatgtgatcgtgaagggcgctggacatgtggcccagacatttaaacccaaggaagtttatcatttgatcaatagatggttttcattttctcttatttaagatgacgcttcaacttcatggagcatctctatttatctattcacaagataatattaagttaatttttgctatagctctctcaaattgagacctggaaataacatggtgacatctcagtttaattatttaattgatttaactctatcacgacaacaattggctcgagcggctcgagacggctgcgagaagacgacagaagggggttaattaatgtagagaaccaaccatgggtcaatactcaattcatcatcagcttgtggccatagtctcattatttatccttttgcttccaaatatccatgggtggggagacgatgggcatgtcattgtttgcaagattgcacaggctcgcctcagtgaagcagctgcagaggctgtgaagaaactgctgccaatatccgcaggaaatgatttgtccacaaagtgttcttgggcagatcatgttcatcatatctatccttgggcctctgctttgcactacgcaaataccccagaggccctctgcagttacaaaaacagcagggattgtgtagattacaaaaaaggaattaaggggcgatgtgttgtggctgcgattaacaattacacaacgcagctccttgaatatggcagtgacactaaatctagatataacctcacgcaatctctattcttcctttcacattttatgggggacatccatcagcctctacattgtggctttctctcagacaatggaggcaatgcaattactgttcgctggtacaaaaggaagcaaaatctccaccatatttgggatagtaccatacttctgacagaagtcgacaaattttatgactctgacatggacgagttcatcgatgcacttcaacagaatattacgaaagtatgggccgatcaagtagaagaatgggagaattgcggtgataaggaccttccatgcccagctacatacgcatctgaaagtaccatagatgcctgtaaatgggcgtataaagatgccacggaaggatccgtactaaatgatgattacttcctgtcacgtttgccaatagtcaatatgcggttagctcaagcaggagttcgattggctgcaattcttaatcgtgtttttgagaaaaagttggcaatgtccatctagtttattggaagagaatgagtcgacaatttgtttaattaataaaaaataacaaagtgccgactaatttgtaagcttaattaatatctaggctttgtgatttgagtaaaatgtcgatgtaagcgaataaagaaaataaagtcagagagtgaagtcagtagtatgctaagcgatgaggtgttagaataatttgcaaggctaacagattagagatcatgctttcaagtttcaatgtaccaaataaaagaaaatagtgttcctgcgttgatttctcgtgcatgggcaaaattttcaaccatcgatctaaaactcgagactagctcgtgccgaattcggcaccagatcccgtttccccccccaacatttacaagtttttaacgctgcttcttttgttttt

SEQ ID NO: 142540 - DNA, 415 bp, Glycine max
  Clone ID: PAT_MRT3847_99729C.1
ggctcgagcacaagttgaacatcataagaactcgtgagcctcttcttgacaaacccgccgttgagtcaattcaaagtcctgatggtgatgtaatagactgtgcggtatattatcagccaccagcttctgaccatcccatgttgaaaggacacaaaccactggtttctccataatggcctataggttattgccaagtggacatgactgagaactctcagtcctggaccatgttaggcgagtcatgttcagaaggtcacaactacgattagacgaaccacagaacaagacatgttaacggctacctctgccagcagatttggacgaggactatgaggacccgttataggggacaccaccagcttttgacttgaccatgcaattacctgtgcgagtggagatcattgctaccgagcat

SEQ ID NO: 142541 - DNA, 335 bp, Glycine max
  Clone ID: PAT_MRT3847_9972C.1
atcattccgagcgtccttgctaaacgtcgcactcactggatgaagccaagaactgccaggcccagatgggcaatgatctggccaaactcgaggcgagcgctactgacgtatactctaatcacggtgagcaccgatgatgtcgacatcttgagcaaggtctatgttcgtgaccactatctaacttgcatacccattagtgagatcgactacactgtcaaatgcgcatgcagctacatcgcatcaggggaaatttcacacccattatcgatgaacgcccaggacacggccatagcggatgtgcctgatgcggttgcatacagcatattgctcagctt

SEQ ID NO: 142542 - DNA, 1508 bp, Glycine max
  Clone ID: PAT_MRT3847_99730C.1
gcaagggggtaatggtggggtatcctccatatggggccccaccccaacaggcgtattattccgctccaccaagtgggtatccttataatgcgcccccgcagccttataatgcgccgcctcagagtggcaacgcgcccacgctacaaccaacgagtcaacgaaatcgcgaacagaacagcaacgttaacaatgggttctcgctacgaggtggaactgaagctctcatcggcacgcgctctcaagaacgtgaactggcgccatggcccgaaccgcccatacgtcgtcgtttgggtcgacccaagcaacaagctctcgacgcgcgtggacgaaagcggcgacactgacgcgaattgggaccaaacgctcacaattccgttgccaccaaagcctctcgaggatcaaacgttgtacatcgacgtggtccacgccggctcggaggaggacaccaagccgcttatcggctcggctcggctcaagctggtggacattctcgacgacgttggaatcggcgagcgcgtgagccgcacgctctcgctgaagcgtccctcggggaggccgcacgggaaggttgaggttagcgtgacaatcagggagcccagctaccgtgcgcagggtgggtacaacgcgcctccttacggcgtgagggattattcccctgcgccgcaggggtatggtgggtatcctccatatggggccccaccacaacaggcgtattattccgctccaccaagtgggtatccttataatgcgccaccgcagccttataatgcgccgcctcagagtggctacggctataatgcgctgccgcaaacggcgtcgtatgggcaggggagcggttacgggtacgcgccacaagaggagaagaagaagagtaagtttggtgggatggggacgggattggctgtgggtgcggttgctggggctctaggtggaatcgcactcgtggagggtgctgagtatgttgaggacaagattgaagatgacgtggcggaaagagtggaggatgatcttggttacgatggtgatgacttctagagagtggtgtgatgtttcaggaggaggaggaggaaaaaaaaaacaaggaataataatattttaagttttttaattgatttttctttttttcagtttctttggcgttcgagttatatcttttagtgttttcttaatgatatcgttaatgatcttatcgatgcttatcttcgttgtctttgtgggaccgcgaaatgaaacaacacatcattatcaacaacaattaagttattgatgagaaaaaaaaaaaaaaaataaaaaaaaaaaaaaaaaaaaaataaaaaaaaaaaaaaaaaatctcattgaattggtaacttgcatagggtagcaactcttttttcttttcacctttgaaatcgatctgccgatatgtttcctcaatcaattaagcggaaaaacgtttgttctgtatatgatgacacaatccctcttctttggtgggtgcggggctcagaaaatagaaaattctgtgtttt

SEQ ID NO: 142543 - DNA, 347 bp, Glycine max
  Clone ID: PAT_MRT3847_99731C.1
aaaaaacaaaaagggaagtaaattataaaaaggacaaaaatccgggggttttttttttttttaaacaggaaaacccccaaaacatcatctttaattaaaacattaaaaacttaaacatcatcccccccggtttgaacacattatgggccaccccccccttttcataaaagcgggaagaggccgcaaaaccccagttttatagagggtggcctctggcaaaaaaaaaaatggggggtagaaaaaaaagattttgacactttttttaaaacacagggggtgaaatcccaccggttataagcccaacagcagttgcagaaatgcctaggccaaggaccccatcttggggg

SEQ ID NO: 142544 - DNA, 279 bp, Glycine max
  Clone ID: PAT_MRT3847_99732C.1
tggtggagtagggtgaggaattggtggctccacccttagaagcgcaagtatgataagagtgcttcggatgtgtagcatacaccaagagctgaatcatacgattcgtgatttatcacttacattcatttaatcatcactctatatactatacttaatatatttgcagcacatccctctttcgcctaatgaccctagatattgcatcccatatagaatacatactattaaaaattaaattatcattaataaaaactggacactaccctataccttcaccat

SEQ ID NO: 142545 - DNA, 411 bp, Glycine max
  Clone ID: PAT_MRT3847_99733C.1
aaattaactcaacccaacttgagttgaaaatatggcaattcattgggagtcaactcgaatgggccagattaccccaaaaagataattcaaccaaataagttcaatcaaaatgtgttgggagagaaaagggttgaaaaaatgaaatgggaaaaaagggtgagtaaaaaaaatatttcttaatcatatcatattgaattctaaccttgaccataggataaaattttgcccgggaaatagaatatgatacaataataggattaatttatcatatcttattatctcaccaaaccatgaattaagatgggatatgatagtatatctcatcttatttcccttctcatgctccgaaactggccttaatggaattgtgagccccaacactgagtgacaaaaaatacagaactttatcaa

SEQ ID NO: 142546 - DNA, 281 bp, Glycine max
  Clone ID: PAT_MRT3847_99734C.1
aatgtgatgtttttttttttgggtggggtgtttttttatgggcaattatctttaaaaaaaaccaagcctttacaaagggggcgaaaaaacatggcaggggctataaaaacaaagggtatccgtataaaaacctacatcggttaatggcaacaaaaaataactgccctagggtggggcaaaaaaaacacattcataacgcctttcttacctaccaaaaaaagcaacgtgcctaggtaaaaaatagcccctccaaaataataacaacttaccgtccgtgtaca

SEQ ID NO: 142547 - DNA, 491 bp, Glycine max
  Clone ID: PAT_MRT3847_99735C.1
aaaagggcccacctaaggattaaaaaattaaaggacttaatcccaaaattaaaaaaaaatttattaaaaaaaccccaaaaccgggcaaaaccctacattttatttggcccggaaaaaaaaaacaacccccctttaaataagttgggccccctggaagtaaaaacccccccaaaacggggggggcaaacatttttttctttaaacaaacaaaaagggccctaaaggggtcccattttgggccccgaaattttgggaccccccgggcccataggccgaattaaaaaccccaaggggggcccaaccaaaaagaaaaaaatttttgaaccagggggaaccccattccaaagttttgggagaacgggggcccacacaaggacccccgggcacgggggccttgggggaatttttggaaaaaaactttcaaaaaatggcccgggaaaggtacccttttttggggggaagagggtttcaagggaaaaaaaaaggggccc

SEQ ID NO: 142548 - DNA, 2165 bp, Glycine max
  Clone ID: PAT_MRT3847_99736C.1
ccacgcgtccgcacaaactcaaatacggcttcgagaagacgtcagaagggggagaaagaaaatgaaagtaactgaaaaaatagtgttcatttactgtcccctgtagcaacggagtaatacgtagacccattcgaaattcttcataacacaccataatattaactcttacaaaattcaaataaaccaacaaaaaactcacatattaattttctctaaacatttttctatggacaaactcaaccctcaaaatccaaaacggcactcactaattttcactatcaactggattcaagctggttctctcttcctcttcttcatgttcattgattgaatcccatctcaccccaattttctaatgctttttctctcccactcccacgtgcactttcctcttctccgctctaaataattctccattctctttctctctctctctctctcaatacaatattatatatgtgtgtggaaaaaagaaccgtttttcttttcagcgaaagcgaccacctttatattacccttttgatcagagtttaaaatggtgttgtgattctacgagggtcttgcatgcccctttgagtttcaagtttcaagtttgagccccctttctgtaatccataaccatagctttggttgagttgagggatttgattatggataagtatgaggctgtcaaggatttgggagctgggaattttggggtggctaggctcatgaggaacaaggagaccaaggagcttgttgccatgaaatacatcgagcgtggccaaaagattgatgagaatgtggcaagagagattatcaaccacagatcccttcggcaccccaatataattcgcttcaaggaggtggttttgacccccacccatttggccatagtgatggagtatgcggctggaggagagctctttgagaggatatgcaatgctggcaggttcagtgaagatgaggctagatatttctttcagcagctgatttctggtgtacattactgtcatgccatgcaaatatgtcacagagatttgaagctagaaaatacccttttagatggaagccctgcaccccgcctgaaaatttgtgactttggttattccaagtcatcattacttcattcacgaccaaaatcaactgttggaactccagcttatatagcaccagaggttctttccaggagggagtatgatggcaagttggctgatgtatggtcatgtggagtgactctttatgtcatgctggttggagcttatccctttgaggatcaggatgaccctaggaattttaggaaaacaattcagcgtataatggctgttcaatacaaaatccctgattatgttcacatatctcaagactgcagacacctcctttctcgtatatttgtagcaaatccattaaggaggatctctcttaaggaaattaagagccacccatggtttttaaagaatcttccaagagagctgactgaatcagctcaagctgtctattaccagagaggcaatccaagcttttcaattcaaagtgtggaggagatcatgaagattgtgggagaggcaagggaccctcctccagtatctagacctgtcaaaggttttggctgggatggcgaagaagatgaaggggaagaagacgtggaggaagaggaggacgaagaagacgagtatgacaagagggtcaaagaggttcatgcaagtggagaatttcaaatcagttaagcactataataattcttgtgtacttggttaaagtattttttttaatgctagaagtcatctatttatgtgtactataatttataataactactactataaaccatcgaggcagcctaacttatggcactgtccatgtaatgtattagtattttttacctgtatcatcatcgaagccgtgtatgagaacagtagttatctgataacttcaaaattactcatgcctgttataacctccatagttaagcttaaaatgctttttaataatatagtagatgaaagaatggtctcagtctaatatagtaccgggtatcatcaaaatggttgctatgtatgagaatagtagttgtctaattacgttctaaatcgacatgagaaccatagttgtctgattacatgctaaaatctaaattaccttttcctgttttaaaaaaaaaaaaaaaaaaaaaaaaaaaaaaaaaa

SEQ ID NO: 142549 - DNA, 436 bp, Glycine max
  Clone ID: PAT_MRT3847_99737C.1
ggtttgcgtttttgatatcatatgacaatcctggcatacttgctgggcttggctgctctgcttcatctcaagccaaaaggggccgcggccttgagctttctcgcatacaggctcaccgcggtcctgactggagtcagctacaccaatatggcgatcactatttggctcatcatcgattagccatcacatgatccagctcatggtgagcatcccctgttcaatgctgactacactgagagcgttccggtgaatggagagatctacaatcatgaagaactcatgtaacaattgcctaatgacaccttccagacaggatgtgattgagacgttattgctcacctgcatgaggagcacggagactactatatggacatgcttgatggcatattctcagctgctctgctggattctcgagacagcatgcacatagtggcac

SEQ ID NO: 142550 - DNA, 647 bp, Glycine max
  Clone ID: PAT_MRT3847_99738C.1
gatttgatgacatcacatactggcattagtagaggttttgagaattctctagtaggaggttggagagagtcaattgcatctaatagataaggtccaccataccagttttttaaacgggcatcagaaggggatgccaccaaattttgattttccatagcaccttttctgttcaaagtgtggaggagatcatgaaaattgtgggagaggcaagggaccctcctccagtatctaggcttgtcaaaggttttggctgggagggcaaagaagatgaaggggaagaagacgtggaggaagaggaggatgaagaagacgagtatgacaagagggtcaaagaggttcatgcaagtggagaatttcaaatcagttaagcagtataataattcttgtgtacttggttaaagtattattattttttatgctagaagtcatctatttatgtgtactataatttataataactactataaaccatcgaggcagtctaacttatggcactttccatgtaatgtattagtattacctgtatcaccatggaagccgtgtatgagaacagtagttatctgattacttcaaaattactcatgcctgttgtaacccgcatagttaaagcttaaaatgctttttaatagtaatatagtagatgaaag

SEQ ID NO: 142551 - DNA, 1963 bp, Glycine max
  Clone ID: PAT_MRT3847_99739C.1
gggggccaaagagaatggaggattggaaaagaagggggtccttttcttgtcccttacagcttcggggtggtaggaaatcccattccaaatttccaatcggacgcgtgggcggacgcgtgggcggacgcgtgggaaaaaaccaaaagggcagttactaattttcacaactggattcaagctgttttctcttcctcttcttcatgttcatttattgaatcccaccccaaatttctaattctttctctttcactctcccacgtgcaccttcctcttccccgctctaaataattctccgttcccatcattctctctctctctctcccaatacattattattatatgtgtgtggaaaaaagaaccgtttttttttcagtgaaagcgaccacctttatattatccttttgatcagagtgtaaaaaggggatgtgattttacaaggggcttgcatgcccctttgagtttcagttttcaagtcttgcatgcccctttaagtttcaagtttcaagtttgagccccctttctgtaatccataaccatagctttggttgagttgagggatttgattatggataagtatgaggctgtcaaggatttgggagctgggaattttggggtggctaggctcatgaggaacaaggagaccaaggagcttgttgccatgaaatacatcgagcgtggccaaaagattgatgagaatgtggcaagagagattatcaaccacagatcccttcggcaccccaatataattcgcttcaaggaggtggttttgacccccacccatttggccatagtgatggagtatgcggctggaggagagctctttgagaggatatgcaatgctggcaggttcagtgaagatgaggctagatatttctttcagcagctgatttctggtgtacattactgtcatgccatgcaaatatgtcacagagatttgaagctagaaaatacccttttagatggaagccctgcaccccgcctgaaaatttgtgactttggttattccaagtcatcattacttcattcacggccaaaatcaactgttggaactccagcttatatagcaccagaggttctttccaggagggagtatgatggcaagttggctgatgtatggtcatgtggagtgactctttatgtcatgctggttggagcttatccctttgaggatcaggatgaccctaggaattttaggaaaacaattcagcgtataatggctgttcaatacaaaatccctgattatgttcacatatctcaagactgcagacacctcctttctcgtatatttgtagcaaatccattaaggaggatctctcttaaggaaattaagagccacccatggtttttaaagaatcttccaagagagctgactgaatcagctcaagctgtctattaccagagaggcaatccaagcttttcaattcaaagtgtggaggagatcatgaagattgtgggagaggcaagggaccctcctccagtatctagacctgtcaaaggttttggctgggatggcgaagaagatgaaggggaagaagacgtggaggaagaggaggacgaagaagacgagtatgacaagagggtcaaagaggttcatgcaagtggagaatttcaaatcagttaagcactataataattcttgtgtacttggttaaagtattttttttaatgctagaagtcatctatttatgtgtactataatttataataactactactataaaccatcgaggcagcctaacttatggcactgtccatgtaatgtgttagtattttttacctgtatcatcatcgaagccgtgtatgagaacagtagttatctgataacttcaaaattactcatgcctgttataaaaaaaaaaaaaaaaaaaaaaaaaaaaaaaaaaaaaaaaaaaaaaaaaaaaaaaaaaaaaaaaaaaaaaaaaaaaaaaaaaaaaaaaggggggggccgcccgcaatttaaaac

SEQ ID NO: 142552 - DNA, 508 bp, Glycine max
  Clone ID: PAT_MRT3847_9973C.1
ccacgcgtccgagttgatgtacttctaaaactaccttggcaagggagcttatcattagttcagcatgagctgatcttgtgtatcactaccattttaattattctgaaaaaacacgaggatcctactccaaaaaaaaaaaaaaaaaaaaaaaaaaaaaaaaaaaaaaaaaaaaaaaaaaaaaaaaaaaaaaaaaaaaaaaaaaaaaaaaaaaaaaaaaaaaaaaaaaaaaaaaaaaaaaaaaaaaaaaaaaaaaaaaagggggggggcgctttaaaagaaacaaagttaaagaacggggggagggaaagtaaaagttttttaaaaggggccccaaaataaaatcaaggggggggggttaaaaaaggggggaaggggaaaaacccggggggaaccaaataaaatggcttggaaaaaaaaccccttttggcaagggggggaaaaagaaaaaaggcccgaaccaatcgcctttccaaaaagtggcccaccctaaaggggaaagggaaccccc

SEQ ID NO: 142553 - DNA, 286 bp, Glycine max
  Clone ID: PAT_MRT3847_99740C.1
gagtttccgtctgtcttttggcggaaacaaggatatatgagaagtaggacagcagagtatgcattacatgcagaaactatgtgcaaaaaaaatgtgtcctaattcactgtagaagacccaaaagcgtgtaatagattctgcactcacacttgttcgagaaaatacaaaacttaggaaagaacttgtgcgtgagggtaaaaatactatagcaactgcaactctgcttagagttcctttgggtcataatggatcgtggcttagaaaacctacattgtgcacctccttt

SEQ ID NO: 142554 - DNA, 1297 bp, Glycine max
  Clone ID: PAT_MRT3847_99741C.1
ccccgcgccgagttcgccacggggggggtgtgtgggccgtttgcgagaagacgacagaagggggtgcctaaaatcgatgacttcgcaaaatggtgacgagagccaccacccaccaccgcaagcgcaagctgaaaaggttactgaagttggatggtacgttcttggcgaggatcaacaacagattggcccttacgccttctctgagttgtgccagcatttcttgaatggatacctctccgaaaatacgtttgtgtggtctgaaggaagtagtgagtggcagcccttgtcctcggtttctgacctgtgggctcaaattaaccggcagggacctgattcttcaactactgtgtctgctcctgatgttgatgagtttgaaagatggcaaaaggagattcaggaggtggaggcacaggtggaaggttcggaatttggatccttatctggcaatgttggtggtactggggcaggagaagattctgagagaccttcgacgccacctgagggtgaagaaggatttactgatgatgatggaactgtatataagtgggataggagtcttagagcttgggttccccaggattatccaactggcagcactaagccttatggggttgaagagatgaccttcttggaagaagaggaagtttttccaacaatacctaattctgatgcctctgaaaagtttgaagatagtccaaaattgagtgtttctgtgcctcccttaaaggaagaagaaaataataccaatgtgatatcaggtggaaaaaggatgctttcagatcaacaaacagacaagaaggaagctaataaaccccctgatagttggtttgaattaaagattaatacgcatgtttatgtcactgggttgcctgaggatgttaccactgatgaaattgtggaggtattttccaaatgtggaattataaaggaggaccccgaaaccaaaagacctcgtgtgaagctctatgttgataaagagacaggaaggaaaaagggagatgctctggttacatatcttaaggaaccttctgtggctttggcaattcaaattttggatggagcacctcttcgccctggtggcaagattcctatgtctgtcagccaggctaaatttgagcagaaaggagacaagtttgtatccaagcaagtagacggtaaaaagaaaaagagattgaaaatggtggaagacacaatgcttggatggggtggtcgtgatgatgcacaagtttcaatttcagcaactgatatgcttcgatatatgttcgctacagctgagatgagggctgatgaaaatctg

SEQ ID NO: 142555 - DNA, 759 bp, Glycine max
  unsure (1)..(759): unsure at all n locations
  Clone ID: PAT_MRT3847_99742C.1
gtccggaattcccggctcgacccagcgtccgaatgaagctaataataccaatgtggtatcaggtgaaaaaaggaagctttcagatcaacaaactgacaagaaggaagctaataaaccccctgatagttggtttgaattaaagatcaatacacatgtttatgtcactgggttgcctgaggacgttaccactgatgaaattgtggaggtattttccaaatgtggaattataaaggaggacccggaaaccaaaaagcctcgtgtgaagctctatgttgataaagggacaggaaggaaaaagggagatgctctggttacatatcttaaggaaccttccgtggctctggcaattcaaattttagatggagcacctcttcgccctaatggcaagatccctatgtctgtcagccaggctaaatttgagcagaaaggagacaagtttgtatccaagcaagtagacaataaaaagaaaaagaaattgaaaaaggtggaagacaaaatgcnttggatggggtggtcgtgatgatgcaaaagtttcaattccagcaactgttatccttcgttatatgtttgctccagctgaaatgagggctgatgaaaatctgcgtttagaactagaagaagatgttaaagagggagtgtacaaaagcttggtccttttagattcagtcaagatatgtgagaaccatcctcagggagttgtttttgttaagattcaaggataggnaaggatgccccaaaagtgcattagaattgatgaat

SEQ ID NO: 142556 - DNA, 662 bp, Glycine max
  Clone ID: PAT_MRT3847_99743C.1
accacgcgtccgcaaaaacgcataatccgcgaaattgtgcccacacgtcctgacttcgcaaaatggtgacgagagccaccacccaccaccgcaagcgcaagctgaaaaggttactgaagttggatggtacgttcttggcgaggatcaacaacagattggcccttacgccttctctgagttgtgccgtgagttgagttatttgaaactgtctctctctctgtttttttttttttgaatgaacaaagtggagtggagctagggctaggtattgtacattttgatttttgttgtttgttccccaattaattaagtgaattccgaggctgcactgtttcagactttgggcacatttgttttatggtgaaattgaaacctctattgtcatatttacatggaaattggtgtggatagagcatttcttgaatggatacctctccgaaaatacgtttgtgtggtctgaaggaagtagtgagtggcagcccttgtcctcggtttctgacctgtgggctcaaattaaccggcagggacctgattcttcaactactgtgtctgctcctgatgttgatgagtttgaaagatggcaaaaggagattcaggaggtggaggcacaggtggaaggttcggaatttggatccttatctgggcatgttggtggtactggg

SEQ ID NO: 142557 - DNA, 257 bp, Glycine max
  unsure (1)..(257): unsure at all n locations
  Clone ID: PAT_MRT3847_99744C.1
gacttttgataagatggattgcattgattgtggaacagtttggtaagacctataaggccttaactatacatagttgccctgtcacatgaaagtagcccttagtagtcaattgtgcatggtagcactgctaggctttttgcgaccctctgccatttctgtgtggctcattncggatcagttttgtgtagctttgcaaattgcaactgtttttgtgtgaaattgtggccatcttggcacttattctttccacaagtgaa

SEQ ID NO: 142558 - DNA, 153 bp, Glycine max
  Clone ID: PAT_MRT3847_99745C.1
catgtatgttactctgtggtgagcatggccatgggtgatgcttattttccaataacacctgtctataatgtacgtggcaacttataagagaccacattggcttttttttttacatgagaacgatgaggttttgttcaatttctttcaacaacc

SEQ ID NO: 142559 - DNA, 386 bp, Glycine max
  Clone ID: PAT_MRT3847_99746C.1
tttgttggttttttgatattttcgtgttctaaactcataagcggcgaaacataattaaacagagccgaactgaatggataagggaccccattccaagccttatacaaaaaaaaagagacgctaccttgaacttaacacagcgatcacaagagcaaaacacctggacgtgaggaaaggcaagacacgaccacgtgatcataaggatgtttgttcaacgcaaaacaccacagcgcacgcaaaccgtgcccagcataatacctaggcttgaagcctcacaacaacagtttattaagattccgaaataagggctttcactgattgaaggttggtatccaaacacctcacttgaaagtgcaagggatggaagagcaagtcggaccacatat

SEQ ID NO: 142560 - DNA, 571 bp, Glycine max
  Clone ID: PAT_MRT3847_99747C.1
gttgggggatgtttcagatttactttccagaaaatccatgaggtgttaatggaattgtgattgaaattggaatttcctttaatggacttcctttactcagtttaggattgaaattggatgctggattgatcatatacaggtatttgatataggttcttaaagatcaggacagagaattaagagaagaaagagagatgatggagaacaaaatcagagagaaagatctattattctgctcccaagagagcaaacccttctacaactgtgaaaacagtttatttcaatcacagaaaaaatgacccccttattccaatggtatttgtaagttcctccctcttaactcctgaactgtcaaacagacctttctagctctaactagtaaaaatacccactttactaactaggctttcctataatcagtcacccattacatctcattgccttcctttgcctcctagaatagacctttaatatgggaacctcttagttcctaacagtattaaacgtgggtccacattcaacaggcacattgaaaacgaggagaatatctctgcaagactgtaactattgg

SEQ ID NO: 142561 - DNA, 411 bp, Glycine max
  unsure (1)..(411): unsure at all n locations
  Clone ID: PAT_MRT3847_99748C.1
ggaacgacttctgcataacttttaatattgnnagcagatcggggaacaagagcttcctctgcttggaatacagcatcaggctttatccaacggctccagaaacttccatcatcttcatcattgcaaaaattggcaaccttaaaagcacccaataacgcatttccttggtccccgtaagcttccttctcttcaactttttctgctctttcaagaatctcatctatattcatacttaaaagttgtttcttgcttttttacccttctgtcggtttatcgcaaccgaacccttctggcgttttctcgcaacccaacccttttgtcggcttttcgcaggcgtacccttctgtcctcttctcgcagacgtacccttctgttgtcttctcgcaaccgcaccctgctgtactcttctcc

SEQ ID NO: 142562 - DNA, 177 bp, Glycine max
  Clone ID: PAT_MRT3847_99749C.1
ttgctttgtcattcgttttcagttcaatttgttactaaaattgagtactttgagcaatgatgactcataataggatcagttttacttgtgggtactgctgaacagtgtaagtttttcattggacagcgttctagaagcctttgctaagttatcccacatttgataactgatacacta

SEQ ID NO: 142563 - DNA, 488 bp, Glycine max
  Clone ID: PAT_MRT3847_9974C.1
ttccaaggaaggtttcccgtcatcactgtatgacgtcctccttctttggggggggggggggggggggggggggagggaagaggagaactcacaggagaagctacaggacttcaatgggagatacaacctcattaaggattaaataggaaaaaaaaaaaaaacacctaattagcacgtggaatatatttagtataacgttaaaatatggcaatggctgcaaccctaccatagcattatgggaggtgaaccagcggccgggaatataaaatattacaccgtatcaaaattagtatccatagaagatagaacgggggcctgatataggaagacgccagtaggaggttgaaggaaccctgagtgtgctggcaaatgcgtgtgtttaatattgcatgcgtaacgctcccccgcgtaccgaatacgggccgttataggggtacttagtcggtgacaccctatatttagggtaccatttgtaaaggcacttggaa

SEQ ID NO: 142564 - DNA, 158 bp, Glycine max
  unsure (1)..(158): unsure at all n locations
  Clone ID: PAT_MRT3847_99750C.1
tcgcatnacacgcgtaacgtaaagcttcggaattcgggctcgagnccacaatgtanngtnctacagtctagtanagnaanacacngngcaacnnatgctttcaacnntggncnatatcntcttcnnnctgactgactgcctctgagctggctaatcnn

SEQ ID NO: 142565 - DNA, 479 bp, Glycine max
  unsure (1)..(479): unsure at all n locations
  Clone ID: PAT_MRT3847_99751C.1
ctcgagccgattcggctcgagtcaacaagttccctcattacagacacacagatttgtttctagcaggtgaaagttatgcaggtatgcatgccacgtcactgttcactcatcatttctagaaaaaactgaaatttcgaaatcttgtatttattttacacatttttctgcacaaaaaacatcagggcattatgttccacaacttgcaaagctcatgattgaaataaacaaaaaggagaagatgttcaatctgaaaggaatagccgtaagtaacacacataacatttatctatcaaccactcttcttccttaggacattgctaacaatgcataatgccaaacttgcttctttaattgcagttgggtaatccagttctagaatatgccactgattntaactcaagggctgagttcttttggtctcatggattgatatcagattcaacatacanattgttcactacaggttgtaattattcgcg

SEQ ID NO: 142566 - DNA, 201 bp, Glycine max
  unsure (1)..(201): unsure at all n locations
  Clone ID: PAT_MRT3847_99752C.1
gccgcgacgagctggatcttaagggcggctgtttggtttttttgcctgtctgcgcttgttagaaaggttggtcaggcgcctgtttttgtgtgtcctgtgcggccggtttggcttgccgtgttatcggggcggctgaaagacggggggggggggttgncttggctcgccttagggttttggtgcggtcttgcagggtgggcg

SEQ ID NO: 142567 - DNA, 830 bp, Glycine max
  unsure (1)..(830): unsure at all n locations
  Clone ID: PAT_MRT3847_99753C.1
ttttttttttttttttttttttttttttaataaaactagaagaaatgataaaacctagtaagctttcagtgaagttgaatatcttgcaatcaaattcaaaatagaaagaacaaataactttctatgggaaatgcactgaacaaaattaatagtactagttaacaaaccaaataaaaacgaataatttcttaaaagataaacttggatacagtttaatacgtggttttgatactatttctaattaaagttaaaaatgagtantatctgtataacaaanatttatactaaggtgagatttcactttnttagggaaaataccaaaagttccataacttttatccaaattttagcccggggtttttccttctgcatctgaaagtatcaaattcctccttcactatattgttgttttttttaaaggaccttcactctattgttattatagtattaaaaaatacttttcctcttgcgcctccttgctttccgcaaaattcgctcantttcttccantgcttccttggtcaagttgccaanaaggtttactcctgcgttttcttggaccaagcaggaaaaacctccatcaatctcctcatcagattcaatgacnatagcacagtctctacctccccctatatacttctgantgtgtggttcttttttcttctgcncttctcanaattctatctgaaaaaatgacctttctttttttactggcttccacctccgctttcccctctgganctacgtggcttgtttaccnccttcncctccctgaantcaaaaaaaatacttgaccttggtcctgaatataatcataacaaatgtttcca

SEQ ID NO: 142568 - DNA, 619 bp, Glycine max
  Clone ID: PAT_MRT3847_99754C.1
ggaggagagaaaataggatcaaatcaattgttatacgtttttttagcaatttaaaattaacactaacaactcaaatcactaaaaaaaaaactatcggggtcaaaaatactttatcagaagatgactttttgaggcttaaagggggggatcagccatttagcttcaatggagtcgaacaaaatcaggacatccgcgaagagcaaagaatcaaaactgcaagaaataaaacattttaaattcaccaaatcattcttgaaacttctacaaaatttccttgcttcctcttgataaaaccccactccttttttaggcatatgcaacatatacagtccacctacaagttacaaccaatcaaccaataaaggatttttttggttttttgtttttggctgaacaattttcccctaactataaattggatgttaccggagctgaattcacgatgaccactcctgacattttaggcgcccaaacctttcatcgctgaaacatgttccgagcaaacctctatagggtaattcaagaggtgctttcctatataataacactaactctagctgcaaaactgggggggttagttctaaatcttccatgtaatctctagactcccccaattaat

SEQ ID NO: 142569 - DNA, 240 bp, Glycine max
  Clone ID: PAT_MRT3847_99755C.1
gtagtctccaccaccctaacgggcaccaaattaatccagacacatctccgacggcaccaaaaccgactccaccaccgcaaatgccacaatgtccaaagctaaacaccagccggaactcacgcgtcttgggaacctaggcatacagccaagggtccgccgcaatgaactcgtcggaccttccggaataggatgtataaggccccagctatgacaccggggaccacgagtggcattcacact

SEQ ID NO: 142570 - DNA, 310 bp, Glycine max
  Clone ID: PAT_MRT3847_99756C.1
catcagctttccagggggcaagtgactgtcctatccaatgttgcttcttgctgctctctctgggggaacaactgtggtatacaacctgttgtatagtgaggatattcatcacatgctttgtgcattaaagacccttgtactgcgtttgggaaactacaaatcatccaaacaatcaattgttgttgggtgttgtggatcgtttcccactactcaagtatgttaagatgaaattaacttattccttaggaatgctgcttctgcagtgcgaactttgacagcatcttcggtttctgcacgtggaaatgcaagc

SEQ ID NO: 142571 - DNA, 440 bp, Glycine max
  Clone ID: PAT_MRT3847_99757C.1
ggctcgagattgaattcttcatagagaagaagaaacttaatcgatcatcacttcacttcactaatacatcttggtgaacgtggcccacaacaagtttgacaccttggtggttggcgtccttcattatggaggatttgtgtctttaggaaacaaaaaggatgataagtacaagcctcttcctcaggaggaggtcataggcaccgggtttaaatagtcactgtctcctaccagggatagaacctgcgcagcctattataaaagcttaaccgatctgccagcagctctagctcttcaagggatgaggaaggacatgatggtcagataaggaagaagatgaataaggaactgaaagggctgtaagagaagatcgacgtaataattttgtgagttcattatcattaccaggatgaagactctaacggtcctgttgagaaaggcga

SEQ ID NO: 142572 - DNA, 1649 bp, Glycine max
  Clone ID: PAT_MRT3847_99758C.1
aagagatttcggaaaacgagaagagagagagaaagacaaatagaagaagctgcatttgcagagacgccctgagagagagaattggaaggttgcgacgagtgatgatatacacatattgtgacggtagtgaaatcgaggaaaaagaggtagcaatttgcgagttgcaatgagtaacgaaaaggctccttcatcagcttcttcgagtagctacgagttgagcaaaggcatcaatggcctcgacaaggttattcttcgcgacgcacgtggtagctccgctgaggtgtacttgtacggtgctcacgtgacttcatggaagaatgaccatgccgaggaattgctttttctcagtagtaaggctatctttaagcctccaaagccaattcgtggagggattccaatatgttttcctcaattttcaaacctcggtcctctcgactcacatggatttgctagaaaccaattctggacaattgatgattcccctcatccttttccaacaagtttttcgaataaagcttttgttgatttgattcttaaaaccctcagaagaccgacatcaagatttggcctcacagttttgaatttcgtcttagggtagctcttggacctggaggagatctgatgatgacatctcggatcaggaacactaacattgatgggaagccattttcattcacatttgcttatcatacatatttctctgtgtcagatataagtgaagtgcgggttgaaggattagagacattggattatcttgacaacttgcagaaaagggaacgctttactgaacagggggatgctttaacatttgaatcggaatttgacaggatatatctaagcactcctacaaagattgcaattcttgatcatgagaagaagagaacaattgtattacgtaaagatggtcttcctgatgctgtggtgtggaatccttgggacaagaaagcaaaggctatgtctgattttggtgatgatgagtataagtacatgctttgtgtagaggctgctgctattgaaaagcctatcactttgaaacctggcgaggaatggaagggaagactagaactttcaactgttccttctagttattgtagtggacagcttgatcccaaaagagttattcaaggaagctgaaagatcatcgttgtgttttgtgtcctgtacaggtagcttgttgccaccacgatgaacgttgaaaggaaagtgtctccaacaatttccccccttcatgttccacttaaaccttcttcatgttggacggcggatgaactcatgcatagagttttgttaaataatattttcctgcaactgatgactagttcggtcataatttacgtacaagtagaatagcccacagttgtttatggaaaatcgaaattaaaacctcaaattttattgtattttcacgttgggttctcgtactcataaaatgtttgtttttacatatcgtaggcaatgaatgcatgtatttgacaattgacgggatcattttacaacactataagttggcctgtatgtcgttaagttgttgctgttatctacatattcatgtaatgaagcaagataattattaaatatataattgttatttcaatgatgtaatatatcatatcaacttgttatgtgcgtgtaacttgtagcattgtgtt

SEQ ID NO: 142573 - DNA, 2637 bp, Glycine max
  Clone ID: PAT_MRT3847_99759C.1
ccgggtcgacccacgcgtccgagacgacagaaggggagagaaagacaaataaaagaagctgcatttgcagagacgcattcgcgtttgtctgagagagagaattggaaggttgcgacgagtgatgatatacatattgtggcggtagtgaaatcgaggaaaaagaggtagcaatcgtgagttgcaatgagtagcgaaaagtctccttcatcagcttctgcttcagcttcttcttcgagtagctacgagttgagcaaaggcatcaatggcctcgacaaggttattcttcgcgacccacgtggtagctccgctgaggtgtacttgtacggtgctcacgtgacttcatggaagaatgaacaggccgaggaattgctttttctcagtagtaaggctatatttaagcctccaaagccaattcgtggagggatcccaatatgttttcctcaattttcaaacctcggtcctctcgactcgcatggatttgctagaaatcggttctggaccattgatgattctcctcctccttttctgacaaatactccgagtaaagcctttgttgatttgattcttaaaccctcagaagacgacatcaagatttggcctcacagttttgaatttcgtcttagggtagctcttggatctggaggagatctgatgatgacatctcggatcaggaacactaacattgatgggaagccattttcattcacatttgctaatcatacatatttctctgtgtcagatataagtgaagtgcgggttgaaggattagagacattggattatctttgacacttgcagaaaagggaacgctttactgaacagggggatgctttaacatttgaatcagaagtaagattgtttaccttgttctactttgctttagaaaacacacgtgggtattacaataaatatgctgtgagtaatgaaatatgacaatttccaagaaatggagcttctgatgataaattaaataaattgctatgaataaaaatcatgtttctattctttttagggttgtacatttaaatagtacttttcatttcaaacgacggtaaaaaaaacatgttttgaattaaagaaaaaggaagtgataggcctgcttaaatggagtatcagaccaatttatagattttgaatgttttttttccttttgttgctcatgttaattcaggcataaagtgggccataaacaccaatgcccaaacaacattttccatttgattgctgctttttctatcgtgtatggatgaagagaggcagtgtttaactgtttcggaagctgtttactttctttattcaggcaaacaattgaacagttgcttcccacacccccaacaaaagcctcactttttctctttttgacttttcctgtagcacaggtggcaacttcccacaccccatccatttcaattgagttttgactactgtacttaacccatatctgaaacatatttgcatcgaaaatataataaaaaagaaagaaaaccatctaactagtttgtattgttgtgcccaatttgtagtaatgtgacacatctaggcacatgtgtgtaacctgtcctgatgtactggcatttcatatgctttgatgagttgaaactggcacttcactttttctttgaatgatagtttgacaggatatatctcagcactcctacaaagattgcaattcttgatcatgagaaaaagagaacaattgtattgcgtaaagatggtcttcctgatgctggtgattatcatcagactcatcttgtgtacttagttttttacattgataaagtttactggtggcagtgggactatattattggaaactattttaagagcaaaaaaatgttcgttgtaaatgtgtaaataaagcttaaagtccttacctgtattcattttcatgtctgaattcttcctgttaactagagtattacataaacctttttcttacaagtgagtaacttcccattccaaatttaagaaacatcttgagtagttggtatatttaacatttgtgttgcttttggattggacataaaactttttctttctcatttattattttatctgtgcagtggtgtggaatccttgggataagaaagcaaaggctatatctgatttcggtgatgatgagtataagtacatgctttgtgtagaggctgctgctattgaaaagcctatcactttgaaacctggtgaggaatggaagggaagactagaactttcaactgtttcttctagttattgtagtggacagcttgatcccaaaagagttattcaaggaagctgaaagatcatcgttgtgttttgtgtcctgtacaggtagcttgttgccaccacgatgaacgttgaaaggaaagtgtctccaacaatttccccccttcatgttccacttaaaccttcttcatgttggacggatgaactcatgtatagagttttgttaaataatattttcctgtaacggatgactagttcggtcataattgacgtataagtagaatagccttcagttgtttatggaaaatcaaactaaaatctcaaattttatttgattttcacgttgggttctcgtactcatatgaaatgtttattatcacatatcataggcaatgaatgcatgtatttgacaggatcgttttacaacactac

SEQ ID NO: 142574 - DNA, 583 bp, Glycine max
  Clone ID: PAT_MRT3847_9975C.1
gtattgccataagacgctgcacatcgcccatcatgttcctcaacattgccaacccgtccactggagctcagaagctcatcgacatcgaagacgagaagcgtgttcgtgtcttctatgacaagcgtatctctcaggaggttgccggtgacactatcggtgacgagtacaagggttacgtcttcaagatcaccggtggtgttgataaggacggctttgccatgaagcagggtgtcttgaccaacaaccgtgttaagatcttgcttgatggatctactggacactaccgtcctctccgtgacggtgagcgccgccgtaaggctgtccgtggctgcatctgcgccgccgatttggccgttgtcaacctggctatcggtaagaagggagatgccgagcttcctggcgtcactgataccactgttccccgccgccttggccccaagcgtgccagccgcatccgcaagttgttcaacttgtccaaggaggacgacgtccgtcagttcgtcatccgccgtaccatcccccgctaagaaggacggtaagaaggcccagatcaatgctccccgtatccagcgacttgctaccc

SEQ ID NO: 142575 - DNA, 520 bp, Glycine max
  Clone ID: PAT_MRT3847_99760C.1
cgtacgcgtggggtttgagcgtgaatttgtctactcaaaatgtcgccaaacacactttgtagcattgtttgcctgcttttggtctgcaacttcatctgggctgatgatgaacacagaagcttcgcagaggaattagtgagacgcctgcgacgttcccatggttactcagttggttatggaggcaattgtgcatgttcttcctccgcctacccggcgaccgcttcacacacttcatacacggcacctaaacaaaccagttactcatcttactcttgctccggttccggctgtggtcatcaagcctaccagccaccccaaaaaaccagctaccattggtgcactgggactgcctgcaacaaagcgcaggctgttgctcatccagttccggtgagcagcaacagttacaagtcttcctgcacaacttgtggctcaagtagtcaccagcagcattactcaaccgtcacagaaacgaaaacagtgtaccctgtgaagacgtactcatggtgcacgggtactgctt

SEQ ID NO: 142576 - DNA, 427 bp, Glycine max
  Clone ID: PAT_MRT3847_99761C.1
ggaaacctgctgcaggaaaaggaaaaccatcccttttgtataaaaaagaaatttcttttgtggggtaaacatacaaattttggattaagggtttcttattggaggaagggggggttgtttttatttgaaggaactcgatttttcactaagggggccccccaataaattaagatgggcccgtttttttttatttaaaaaagaggctccgtcctttttttaaaaaaacaaacccgggcctgaaacttattttccctttcttggggtgccataattttttttttttggcgggggatttaaaatcaatggccggggaaaaccttggccgtgcccgggtaaaaacccttgtggcccaacccaattttgtcgggggggaaaacacttttgagggccgggggggtaaaaaaaaaaaaagggccggaaccctttt

SEQ ID NO: 142577 - DNA, 367 bp, Glycine max
  Clone ID: PAT_MRT3847_99762C.1
ccccagggaaaaaattttttttttcttttatagagtttcgaaattggccaccaaccccccattggaagcttttcctttccacctaaaaaaccccctcccaccctttttttttcaacaatttcgcccccgggggtccccccggaatttccggcccggtccctgggggcgacccatttttccttttagggagtctttttaaagctgggcgaaaccagggccatagctgttccctgggaaaaattgtttccccctcacatttccccacaaattacgacccggaaccataaagggaaaacccggggggccctaagggggggcctacccccctttattggggtggccctccctgccccttttccagggggaa

SEQ ID NO: 142578 - DNA, 160 bp, Glycine max
  unsure (1)..(160): unsure at all n locations
  Clone ID: PAT_MRT3847_99763C.1
gcatttctcatganaatgatggtttgcgagantttcttgctgaagtttcaagtcttgggagactgaagcaaaggaatctggtggggttganaggttggtgcaagaaagatgttgggatttcttgttaatttatgactacatggaaaatgggagcttggac

SEQ ID NO: 142579 - DNA, 2167 bp, Glycine max
  Clone ID: PAT_MRT3847_99764C.1
gaagacgacagaaggggaatattgtaattcggcgtaaggtgaaaagccctccctcccatcaagcaggtttcttgtcttccggtttctggtagatcaccacttgggttgggagaaaagaacagacaatggaagcgagttgagagctacctcggttgaacatcatcgaatcgaataatcacttttacacatgacttatccttctattccgatttaagcccctaaacgaactatcgaagccacttcaaaaactactcttagattgcttcgatggtcgatcactacaacaagctggttaaactagcggcgagggctttctacgatgatctaacgagtaaaggagagaatcaacccaaatcgggaaggagtgataacagaggaatcgctgtggtgattctcgacgctctcacaaggcgacaatgggtccgagaagaagacttggcaaaagatctcaaattacacacaaaacagcttcgccgaactctccggttttttgaagaggagaagatcattactcgagaatataggagagagacagcaaaaggagcaaaaatgtatagtgctgctacagctgctacagttgatgttcagctgactggaaaagagggagaagaaaaggtcaagttgcacacgcactcttactgttgtctagattatgcacagatatatgatgtggttaggtacagaatacatcgcatgaaaaagctgctgaaagatgaattggacaacaagaacacaattgaggaatatatctgtacaaaatgtggaaaaagatataatgctctggatgcattgcgattagtatcttttgaagatgatgacttccattgtgaaagttgtaatggaaaacttgaggtagaaaatgacaaatttgttgctcaagaagggggtgatggagatgaaaatgcaagaagacggcgccatgaaaagttaaaagacatgcttcagaagatggaggcacagctgaagcctttgatggaccaactcagccgggtgaaagatttgcctgttccagaatttggcagtcttctagcgtgggaagctcgagctagtgctatggggcgtgcagccaacggagatatgtctggtgattctaaaatgtctcagcttggatataatggagcaccaatgccttatagtggagatactaaggttgtggtggacttcaatgggactgaagacataaaggatgttaagtctgaaactggaagtacatctctaaaggttttgccaccatggatgattaaatcagggatggttcttacaaaggaacaacgtggagaggtgaaggaggaaatgaagatggatgggacttcaatttcctcatcagcacagtacttggacgacaagaaatcaacagttgaccatgatgataagaaaaatatacaggatgagtatattaaagcttattatgctgctttgcttaaacaacaacatgaattggaagctgctagtaaacaagaattgccaaatacactcactgcaaatgatccttctagcagtgcttctaatcgtcaagttggcatgaaatcaaaacttgaggaagatgatgatggtactgaatgggaggaggctccagttgcaggtattggaaatgaaaattacaaggtcgatttgaatgttgaagctgatgatactccagctgatgacgatgaagaagtggactgggaggaaggttgatgaaaagaacagtaaggttcacaaaatataatttttgatggcatatacttatattcaacaaatggcagcagttatatgactgatgtctcctcacaataatgctactattcagttatatttccggcggcctcaacggtgggaaactcgattacaatatatattttttctaccagaagtttaatttggtgtttctgggggaagtaaaatctaatgctttgttgtactactgaatgcgtgctacaatggctttctttgtaaggcatcacttatccaattgaattagtttaccaatgcaataatcgttgccatacacatttaaataatgcatggtaagattttttattttttttttcaaaatggagaaattctctcatttcattcctggtagccaaaactgtatttagcatgcctgatttgccgcgttagtccggatctcatggtgtataatttaaaaaataaacaccaaatgtgtgaattatttggcgtgagt

SEQ ID NO: 142580 - DNA, 425 bp, Glycine max
  Clone ID: PAT_MRT3847_99765C.1
gatcattctctcatgccaaactgtgttcaggacctgtccaagcgagtgaatatgttggaaggcacagcgacttcacaatcttggttgttgcagtactattaaaaaatgtagactcaaataactaaaactccaaccaccaatatgacaaatgaccaggtaactggcttagacaagtaagatagattggcggcgaatccaagcatggcatgtgaatctcttgtatcgaatgtcttcttgaaaataggtccatacatggaggccaggtggtgtgacctgtggccatgaaataatgcaatgatattacaaggtattatagtatgttggcgataatggataagttctaaaggctttaacaccaaagagtgtggtaacaaccattgttaaagtctaaaggttatcatgaatccttgtagattgaaaatgac

SEQ ID NO: 142581 - DNA, 851 bp, Glycine max
  Clone ID: PAT_MRT3847_99766C.1
ggatgttaagtcagaaactggaagtacatctctaaaggttttgccaccatggatgattaaatcagggatggttcttacaaaggaacaacgtggagaggtgaaggaggaaatgaagatggatgggacttcaatttccacatcagcacagtacttggacgacaagaaatcaacagttgaccatgatgataagagaaatatacaggatgagtatattaaggcttattatgctgctttgcttaaacaacaacatgaattggaagctgctagtaaacaagaattgtcaaatacactcactgcaaatgatccttctagcagtgcttctaatcgtcaagttggcatgaaatcaaaacttgaggaagatgatgatggtactgaatgggaggaggctccagttgcaggtactggaaatgaaaattacaaggtcgatttgaatgttcaagctgatgatgctccagcagatgacgacgaagatgtggactgggaagaaggttgatgaaaagattatctctcagcacagtaaggttcacaaaatataaattttgaaggcatgaatttatattcaacaaatggaagcagttatataactgatatctccgcaataatgctagtattcagtttcatttccggcggcctcaacggtgggaaactccattacaatttttttttttttttataccagaacttcaatttggtgcttctggggaagtaaaatctaatgttttgttgtactgttgaatgtgtgctacacttggctaaggcatcacttatccaattcaaatacttcatcaatgcaataatcgttaccatacacatttaaataatgcactgtaagatttatttttcattcatgg

SEQ ID NO: 142582 - DNA, 491 bp, Glycine max
  Clone ID: PAT_MRT3847_99767C.1
ccacgcgtccggacaaatctggatatggtgcagtgatccagacacctgcattgcatcctggtatgttctcaattctaatgccatggacttctggcaaggatataaaagatcgaatgcgcaagttttctagaacggctcacgtgtttgcactggcaagggatcaaggatcaggaactgtgaattcgccttcccatataagttatcagttgaaagacgtcgacaaagagaatctaaagattggacttgagaaggtactgaggattcttgcagcagctggagctgaagaaattgggacccataacaacaagggaaggagcataaatgtgaagcaggtgagctatcatgagtttgagaaatttgtgaaagaagaaagttcaatgtctttgacagacatttctacaccattgtggtcagcacatcaaatgggaagctgcaagatgggtaccaacccaagggaatcagttgtgaaccaaatgggggagacatgggaa

SEQ ID NO: 142583 - DNA, 308 bp, Glycine max
  Clone ID: PAT_MRT3847_99768C.1
ggaaaaaaaaaagccccaatttttattttgggggcgtaagcttttaaaaatttttaaaggagggggtccattctaaaaatttggttttaacctaacccttttccaacgtgccaactttgtcctaacctttgcgcccatgaaaaattttgtgtcaaaccaaaaaattccaccccaaattctataaacgggcgaaggacaatccaaagccctttttttcttcttaaagggtttctcgggctcttttgaggcattcacaactaaccctttgttgcacaaagcacattagctcttaacagaccccttttagg

SEQ ID NO: 142584 - DNA, 359 bp, Glycine max
  Clone ID: PAT_MRT3847_99769C.1
ggaggaattgggccccaagggacaaccctgatatcaggaaaattatgggggattttttaaccctatttccaacaaaaaaaaataacgatgaacgagggggccaaagtaaaaaaaaggaggggcgtttatgcggaaccgaaacaacactcattttccctccggggctgggctataaaaaagatttggggagggggaaggccaaaaccaaaaggatcaatcatataatcacccaaacaaaacgggaaaattggcttccatggtaatggccctgcctccggccacgactttacgggggcgcctaaagcctggtctccgatctcttccacgccttccagggcctctcctagcaaccttttccg

SEQ ID NO: 142585 - DNA, 2187 bp, Glycine max
  Clone ID: PAT_MRT3847_9976C.1
ctctcccctcaaatcttgcgtactatttattttgcttttattaaaaaaaattataaaatcattgcttctctgttgatccagagaggccgacgacagagtgcagcattgctttgcttcgctgttgatccattctggagagagaaacactttttcagttctctctctctctctctaagatggccgacgatccaatgcccacgcgctggtctttccaggacttcaaattgtgttatgatgctaagtttggtagaaagaaagtcgcggagaacggagatgatgctgccggtaaagcggtcagcaatggaaatggaaattcagtgacagtggccattgtgtccaatggcaacaaaagggcatcggaaatggctgtttatgagcagtttcgaagcgaggggcagaatcagattcacacaaatggctttgtgccgacccttacagatgaaaggccgcagaagtctttgcttccaccctttgaatctgcggaaatgcgagctttagcagagagcttaagtagggatatcattcgtggaagtccagatgtgaagtgggaaagcatcaaggggttagagaatgccaaacgtttactgaaagaggctgttgtgatgccgattaagtatcccaagtacttcactggtctgttatcaccatggaagggtatcctcctttttggcccaccggggacaggaaagacaatgcttgcaaaggcagttgcgacagagtgcaatacaactttttttaatatttcagcctcatctgtagtcagcaaatggcgaggtgattcaaagtagttagtgattgtgttatatgaactttaaagatatcatgcaccctacagaaatatttctatctggaatttggtctaacaatctattatgcttccaaaacaatagtgcttactaaaattaatgcaatgattagataaaacccttattttcttacggaaggtcattcaatcaaaaccttcatcctttgtcttattaagccaaataaacacagacatacacagcatatatcttaaaacaatagtctattatcagtccgaggagcttaaaacaactaattgatatagcatgaatgacttggattaaaacaattgattgcgtgacttaagtgatgtttaacctggactattttgctatgttcagcttctctcacatctcattgtaagccgatgatctcaaagattaagtgtacaatagatatccaattatccattagtggtcatatgtttgttagttacccattagtttaatagttaattacagatttacaatatatcagttagtttaggctgaattagtttgctattctgtgaatatgtacatttacaaaaaattcttttggactgcaggtgattcagagaagttagtgaaagtgttatttgaacttgcaaggcatcatgcaccctcaacaatatttcttgacgaaattgatgcaatcattagtcaacgtggtgaagctcgcagtgaacacgaagctagtagacggttgaaaacagagcttctcactcgagccggatcggctcgaggacagatgaactggtttttgttttggcggcaacaaatcttccctgggaattggatgcagccatgctccgacgtcttgagaagcgtatccttgtaccacttccagaaccagtagcgagaagagcaatgttcgaggaactccttcctcaacagcctggcgaggaatcgatcccctatgatatactggaggataagacagaaggatattcgggatcggatatccgattactctgtaaagagacagcaatgcaacccttaagacgcttaatgtcacaacttgagcagaaccaggatgtggtgcctgaagaagagttgccaaaagttgggccaatcagatctgaagatatagagacagctttgagaaacacaaggccatctgctcatctccatgcccacaaatatgacaagttcaatgctgattatggtagtcaaatactacaatgacaagttgtatttgttattgtaaggtcttccacaatttgattactgttgtaagactagtaaacttcaaacattattttggttatgcaacttttttttgcattcgttcttctccattattagtactaagtatttttacatatctaagtaacaaatgcttgtgattatatttttaaattcactcattctttgcttttacattaaaatattattatgacaa

SEQ ID NO: 142586 - DNA, 1475 bp, Glycine max
  unsure (1)..(1475): unsure at all n locations
  Clone ID: PAT_MRT3847_99770C.1
ctccttgctcgtcccttcctcgagccgaatcggctcgaggtgacactgacgagccttatctcctggctactctgcctcctgctcgagtgcacatcatcaaaaggactaaaaaaactcaaagtacttcttttgcaaacactattccaagttccaaactctccacctctcataatggttttaaatttaatgtttattgcttcttctctgcattcaccatcaccttgcaccctcttcagttcccacaagctttgttggtcttcgttcaaaaccatttcaaagcaaagccacgcatttctccatagaaacccgtctctccagcgccacttgagtttgggttccaaaagggttcttccttcagtttgcttctttaacactgaagacaaatctgactccaaggaatcgggatggcctattctcaggcgatgggaggtgccttgggaatggcaaacagtttcattgacctctcttgcctgtggattcggttttgtgttggcaggtttgactgaagcaattgccttaccatatctcgggatcaaacctgatgtgctaagtttagatgacaaggcagagatactcttacttgatcagagcatcactactgctgttgtacttggaatcatatatagtgttgccaacactttccaaccacttcctgaagacttcttcaaatatgatttgagggagcctttcaatcttcaaaagggttggcttttgtgggctggagttggacttgctggtgccatacttgccatttcattgaccggagttgctgtgtctttcttcaatggagaaaccccacaaagagagactgatgctcttgttcgcttgcttccgttaattggatcttcaaatctcagcactgcctgcttggtgggcatcacaggtgttcttgctccactccttgaggagactgtttttcggggattttttatgacttccctcactaagtgggttcctacgccagttgctgttgtcattagtgctgctgtttttgcccttgcacatctcactcctggagaatttccccaattgtttgttctagggactgctttggggttttcatatgctcaaactcacaaccttctcactcccatcactatccattctttttggaactcaggagttatattatttcttacttttctgcagcttcaagggtacgatatcagagaattattgcaggcaacttgatggaaaaaatttctcctttgcatggatgtggagcatcatgtacagtatataatacaaatccatttctttgcttatctgcgctcctttccgtgctgtaaaacataatcagattgttctttggaacagtgaagtaggtaataataatttaccatgacagttaaaatatgctatgcacttaaaaattttcagaggccctggttgacaagaaatagggcttcgtttggatatccaatgttgaacggagtagaagagaaaaaaacggaatagaatggaatagaannaaa

SEQ ID NO: 142587 - DNA, 176 bp, Glycine max
  Clone ID: PAT_MRT3847_99771C.1
tttaagaacctaatagtttgtcattttgtattatatagtccattactctcttccctggagaaaggccacctatacattttaccgctttgcgatggaggggccaagcaaactggaaagctgttaaaaaaatccaaggtttttaaactaacacctatcttgacacgtgctgccatcac

SEQ ID NO: 142588 - DNA, 322 bp, Glycine max
  Clone ID: PAT_MRT3847_99772C.1
tttccttttcttctattatccttaccgcgggggccaaacttcaaatgctttttgaagctaaaccttgctacccaaaaatggcagcaccctcaaagctcgggaataatctgaaaccttcgaaaacaagatccgtttgagaagccagaaccctaatttcatgcactaggtgttaacctaatcaacctattctcagcatcaataacctgaggtcaaccctttggctcatctaggaaccaaacaacggtgacagagagcaagctcttactggagaatcaacccatccccgcgtgagctatcttaccctatctccgtggacaaactt

SEQ ID NO: 142589 - DNA, 303 bp, Glycine max
  unsure (1)..(303): unsure at all n locations
  Clone ID: PAT_MRT3847_99773C.1
ncctctcacgcggcgnactnnagctcggnanncggcgctngcgnnatcncgagggtncncncngtcgtgtccancntccnnncngncggncntcggcnntttnngctgcnnttcgtaccggtgggcgntgnnccnnnntcncgtgtgtcgtnccgngngctttcggcctcgncntnntgngtgntggnnacantggtntgcntgggnccctgcgngctggcgcctggnnnccccctcgcantcctcgtnctcggtnctngttggtnnngntgtcgcttgctnntntcnnnngttnngngnncn

SEQ ID NO: 142590 - DNA, 329 bp, Glycine max
  Clone ID: PAT_MRT3847_99774C.1
gcacattaacttgataccattaagtatatcatataatatgtgctacaagttgatcatgttggtcccggttcaaatagaaaccgaagagatgaaacaccgcacattactgcagtgataaggccatcaggtttcagacggacaacacgtacacagaagattagttgtagcaaactcagacacagaacagaaatacggccgtacctgatgcatgagacatctaatggctacagcagcggcctcactaacacggattgtcgcagatgccatcagagcagcgaactcggtgagaatctcatcgtcaaccctgtagcctacatccccactaaggt

SEQ ID NO: 142591 - DNA, 258 bp, Glycine max
  Clone ID: PAT_MRT3847_99775C.1
cttgaaaaaccaatgcaacaacaaaaaggaaagaaagctaactactcttttttataagaggaaaactgcattgatgtcttgatgacttttagttggaagaagaacaaaaaacaaaagaaatgggttgtggttctgagcattttatcatgatcttcaacatcaccctcttgatgcttctatcatcacaaagcacccacattttgactgtggctggttctctattcaatgcagtgggaagcttccaagttcatggcctac

SEQ ID NO: 142592 - DNA, 205 bp, Glycine max
  Clone ID: PAT_MRT3847_99776C.1
ccttttcagtcattagtgtcagtgtgaggtggggttgatcttagtttgttgttctcggggtcagttattatctgcttgcgtgttgctatagttgttgcgtgttaagagttttcaaatcactagtggtgggtagccttttcaatcgtgtcaatgcctcctacatactttgccgcttcgttgggagagcactggggaccagtggtgg

SEQ ID NO: 142593 - DNA, 150 bp, Glycine max
  Clone ID: PAT_MRT3847_99777C.1
actctcggaagacacaagcccctacttagccatgcctgcattgggggcgactttgctgggcaaagaaattgactatccactcctgccaccgacctagcggcccattgtacctcgcactgctaatttattgcctgcacactctgctatttg

SEQ ID NO: 142594 - DNA, 175 bp, Glycine max
  unsure (1)..(175): unsure at all n locations
  Clone ID: PAT_MRT3847_99778C.1
tgcgagactcgtacgtcaatacaatgactataaactcgcgctctgtacacagcaagctgaagataacaaacgcgacgatattgggactcanatcgacgatgattgaatcacgcgtttagcgctggctaacgacctaccataagtgagtcaatggtagacatttatatcatctact

SEQ ID NO: 142595 - DNA, 257 bp, Glycine max
  unsure (1)..(257): unsure at all n locations
  Clone ID: PAT_MRT3847_99779C.1
cttattnnanctgggagtncggnttctgtttcacnagaaanntacatgagacgnnangtggacgccgaagnccagacagntaagaggtcnttataggagctattgatccctcatnattgcacactgctcaagtttcctaccgttactcctannctnagnnccacatacgtacncanttgctncttctcgcgcgtcttcgtatngggtcgatattctaggagacatcactggnggacaacgttngctaccncgnanga

SEQ ID NO: 142596 - DNA, 546 bp, Glycine max
  Clone ID: PAT_MRT3847_9977C.1
ggcgagtgcaagattggaatcatgcccggacacatccacaagcaaggaaagattggaatcgtatctcgatctggaactttgacatatgaggctgtggaccagaccaccgctgtgggtcttggacaatcgacatgtgttggaatcggaggagatccattcaatggaaccaattttgttgatgtcctcaagatgttcgccaaggatcccgagactgaaggaatcatcctcatcggagagattggaggaactgcagaggaggaagcagctcagtacctcatcgacaatccaatcaataaaccagtcgtctccttcattgctgggcgcactgcccctacaggccgaagaatgggacatgctggagccattatttctggaggaaaaggaggagcagaggacaagattgatgccttgaagaaggcaggagcgcacattgcagactcgcccgccagactcggcacaacaatgttccaagtcatgaagcagctcggcaaagcttaatccaaatacactcgtcttccgctctaaaaaaacaatcaagcaatagac

SEQ ID NO: 142597 - DNA, 425 bp, Glycine max
  Clone ID: PAT_MRT3847_99780C.1
tctcttcattatactatctttgataaccaaagggactttcacttataccaaactattaattgcttcttcagtgatcatggccaaatttcaggttttgcacaaatattttttcatttttctagcactagttgtgtgccatggttcccttgtagcacatggcaggaaaataaatgtaaagccattgaaccagcaacattattcattaaacacaaaaactgtagctaataataatccttacccttcccttccatcacttaaaactaaagttgaatcaccacagtatgaggaagctaataaattgggagattcaggtgcagacaacacaaatgcattccgatccactacacccggagggagtactggtgttggccacaaaataatcacatcatcagaagataacaagatgaaaacaatggttgtagttc

SEQ ID NO: 142598 - DNA, 589 bp, Glycine max
  Clone ID: PAT_MRT3847_99781C.1
acgaggttctgaagataatccttttgtaagatatttagtttaatttcgttatttccttctcaatacttattcgtagttaccagttactagtactaccctttgtgtgcctctgtgcacttgtttaattaacgatgggcaccttttagtttgcgttttgttgaaaaccacgcagatctgtgcagtggtgttggtggtaagtcctaagcgacggtaagagagctttcttcagtccacttatgggtgacaataagatttcaattagctgccgactcattcatccaaatgctgagtgaaagcgaagaaagatactcagcaaatgagtgaatgatgcgggagacaaattgattcttaagtttcctgtacttggactgaagggagctccctttttcttttgaatcttctcttttcctttcttctattttgcacatgacaagcattatatcatttctcatctctatttaaagtagtatatcacataactcatttttgtatcttctctcttcctttcttctattttgcacatgacaaactttatatcatttttcatctctatttaaggtagtatatcacataactcataactcaattt

SEQ ID NO: 142599 - DNA, 377 bp, Glycine max
  Clone ID: PAT_MRT3847_99782C.1
gtattcatatttaatattctccggaacgttgttttcaaaccaagccagccgtccaaaacaaaataaaacaaaaaaaaaccgagctaaaaaaaaaaacccaaaggggggggagagaaagggccactaaattctagcggagagggaatcgcgccgctcttcggggggggctgcctagcggcccttggattccacacaaaggggggtcccatccctgggggggaagggtggcgacccctcgggggttgcgggatcccggttgtgggggcctgcgggggcggatggggcgctggggggagctgagaccttgccatcgggaagggaaggcgaagcgccagtggggccgggtaggggtttggggggggggccggttagcctcg

SEQ ID NO: 142600 - DNA, 540 bp, Glycine max
  Clone ID: PAT_MRT3847_99783C.1
ttttttttttttttttttttttttttttttttttttttttttttttttttttttttttttttttttttttttttggggccgcgggggtccacccgggaaatcgaaaccggaccactgtggggggcgcgtttttcccttttgggaaaaaaaaaaaaagggggagaaagccgggttaaaagaaggccccgggggaaaacggaacgccgatcactccgccccgggaaagccaaccccgaacctaaaaggggaaaaccgggggggccaaaggggggaaaaaaccccctttagtggggaacagcaaaaggtcccctttgaaaaaaaaaaaccggcccgcccccttgtttaaaagaacccccaaaaaacaggggaaaaggcggttttgggaatggggcccccaaggggggtttctcttttcgccagggaagcggccaccaggtaaagggcccttcgcccccgggcctgggagaaaatgcctaaaggggaaaaccctggtttgcccctggggggaaaacaccttttggagggggggcaagggggggg

SEQ ID NO: 142601 - DNA, 1251 bp, Glycine max
  unsure (1)..(1251): unsure at all n locations
  Clone ID: PAT_MRT3847_99784C.1
gctcgaggggcacattaccagatggacaagatattgcagtcaaaaggctttcacaaacatctacacaaggattaacagaatttaagaatgaagttatattttgttctaaacttcaacatcgaaatcttgttaaagttcttggttgttgcatcaatgagcaggagaaattactcatctatgagtacatgccgaacaaaagcctagacttctttctttttgattcttctcaaagcaaacttttagattggtccaagcgattgaacataataaatggaattgctcgaggacttctttatcttcaccaagattctagattgaggatcatacacagagatttaaaagcaagtaatattttgctagataatgacatgaatcctaaaatttctgattttgggttagcacgaatgtgcagaggtgatcaaaatgaaggcaatacaagtagagttgttggtacatatggttatatggcacctgaatatgcaattgatggagtattctccatcaaatctgatgtctatagctttggcattttactactagaggctttaagcggaaagaaaaataaagggatttcctactcaaatagcagctacaatcttattggacatgcatggaggttatggaaagagtgcaccccanaggaattcattgatacttgtttgggggattcatacgttatacctgaagccttgcgatgcattcatattggtcttttatgtgtgcaacatctacctgatgacagaccaaatatgacatctgtggttgtaatgttgtctagtgaaagtgttttaccacaaccaaaagagcctgttttcttaacagaaaaagtttcagttgaggaacattttgggcaaaagatgtactattcaaccaatgaagtaactatctcaaagttggaaccaagataaagaaatagtttaatttctttccttgcttgttaatgctgagaggttgggttgtatcctactactaaattcatgtatatattttttttcataagtttgttctatttaaaaccttcatttcaacatccaatcttgttgttgtgtattgtgtaacttctaaaataactatagtcgttttaggatcagccttttactcatgcaaaatgttggaatacatgtgaaagtgaagttccacatttgataaaaatgggaaagttaagcatgatataattgaaaaaacccataaacctaatactttaaaattttgggttaaaaaaaaaaaaaaaaaactcgagactagttctct

SEQ ID NO: 142602 - DNA, 488 bp, Glycine max
  Clone ID: PAT_MRT3847_99785C.1
ctttggaaactgttgttgagtgagaagttacatgtgaagccggatgtcttcacgtgtaataatttgattcagggactttgcaaggaaggccgtgttcatgatgctgcaaggatccattcttcgatggttgaaatggggctccaaggtaacatagtaacttacaattttttgattgagggttatctagctgctcggaaacttattgaggcgttaaaactctggaaatatgcggtggagtctggattttctcccaattcgatgacttatagtgttatgattaatggtctgtgtaaaatgcagatgctgagtgttgcaagaggacttttttgtaaaatgaaagattctgggattagacctacagtgatcgattacaatgcactaatgacatccttgtgcagggaagacagtttggagcaggctaggagtctatttcaagaaatgaggaatgtgaatcacaatgttgatgttgtctcctttaatataataat

SEQ ID NO: 142603 - DNA, 348 bp, Glycine max
  Clone ID: PAT_MRT3847_99786C.1
ccacgcgtccgaacaatacagcctgggcgctccacttcgctattgatactctccgtcttcctagccttctttttggtgctacttacaaggcacactcgagcgaggccggtgctttcaccattaacatgttcaacccaggccaaccaaacattatgcgacaaaaagatgctagtagttcatcctctggggtgttacgactcaccaaaggaggcagcagcggcgagcccacctcgggatgtctggggaacgccctttacgctgcacccaggcagatgtgggacagccgaaaccggggagggagccagctgggctacatcctttgaaattcacagtttcgcacccgacaga

SEQ ID NO: 142604 - DNA, 329 bp, Glycine max
  unsure (1)..(329): unsure at all n locations
  Clone ID: PAT_MRT3847_99787C.1
atacaattttatcanaatattttttcacaccaacgcaatattaaggggtttttttaaaaaataggggcaccccaaacatgggtttcatcttttgtcactcaatcacccaccataaccattattatcagtacatatcactattttatctcattcatgcctattcctaactttatgctcttttcatcccatcatcgctccacttctactaacctcactcttcttcaaaagtgctttccctctactacaactcaatcttttatgtattcaaaatcaacaattcacttttaaacaaaacattatcttcatcctttattccaaccacaatccat

SEQ ID NO: 142605 - DNA, 2924 bp, Glycine max
  unsure (1)..(2924): unsure at all n locations
  Clone ID: PAT_MRT3847_99788C.1
ctcaataatcacttttatcatttcaaacaaagaaagttgttagtgcttaacattcctttgaatattaaactaagttcaatttttatttcttaccattagcgtgacatgaaaaaataaatttattaattccaatatatattggtggtataaagcacttccatatatgattggtcacaatttttttttacttagattccatcttcattgaaaaaagttaaaacacatgaaaaattaattatttcagttaaattaattcctttcactttttaaatatattctttatttgggtaaaataattcctttttgttatgtgtgagtttgaaattcttttaatttaatatatttgtaaataaattattttgacctaatatattgtaaatcaattcaaaaatagaatttactgtctaaagactcattattcaaccaaacgagagagttgtgttattctatagtgacggagcaacagaaaggttaagaatgtagcataaccaaaacaatgaaacaggtgatgtagaagatcatgctgtgaacggaggtagcaatggcgatgatgctttgactataaataagttgctatccgatctagcaaggcaggaagactactttgataaaagcttacaatggcgggagagtcagggcaagaagcgcaggagacaagatgacaattggtggaatatgcggaaggacctgttattggagtagatggaatggggggagttggaaaaacatccctggcaactcatttcaagaatgagattaaaagaaaggggactttcaaggatgtcttctgggtcactgtttcccatgatttcaccattttcaaattgcaacatcacattgcagaaacaatgcaggttaagctttacggagatgagatgaccagagcaacacttttgacgtcagagttggagaaaagagaaaaaacactgcctatctcggatgatggttgggaatatattgatctgcanaaagtggtcggattcccgggtcgacccacgcgtccgcggacgcgtgggctttgtgacaaatggagggtccttagttctgtttctctttcttctctctgtgctttcaaccaagttctcaaatcactcttcttcttcacccttctgatctgctaattctcaagcgctttctttctcgttggagggtttttacttgatagtgaattcattcaacctcctgttcggccccatggaaggtccttagttttctctctcttcatctcaaagtttcactctcactcttcttcttcttcttcttcatcctttctgatctgtgctgttttttcagggtacaacaaaattgggtgctttcggttaaactgtgatgtctccgccagtgctgagcataggggaggaggagggtaaaagcaatgtcactttgttggtttcctcatcaaccaccatggaaagtgtgtgtctcaagagcttagaatttaaagagcgcaactacatgggattatctgattgttcttctgtggacagctcggttccgtccttctctgaagagactaaaagtaatctgaacctgaaagccactgaactcaggctcgggcttccaggatcacagtctcctgatagagattctgatctttgcttaagaagctcaactcaatttgatgaaaaaactttgtttccgttgcgtcctttgactgatgatcaccattcttcagccaagactgctgttttgggaaacaaaagagggttctctgatgccatgaacggcttctcctcagaggggaaattcctagttgattcggaggccgccaatccgatactgtctcccaggcctgcttctaacttgggattaaaacctggttctacacttgagaaggttggagttcagcaaaccaaaatgaaagaagtagcaacaacaaaggccaatgaagctagacccactattgatggttctgcaaataataataacagtgcaccagctaccaaggctcaggttgtgggatggcctcctataagatcattccggaaaaattcattggctaccacttcaaagaacaatgaagaagttgatggaaaagtgggggttggtgcactgtttgtcaaggtcagtatggatggtgctccctatttaaggaaagtagacttgaagaattactctacatatccagaattatcttctgctctagaaaagatgttcagctgttttactatgagtaaatgtggatctcatggaattctgggcagggagatgctgaatgaaaccaagctgaaggaccttcttcatggatcagaatatgttcttacatatgaggacagagagggcgattggatgcttgtgggtgatgttccctgggagatgtttattgaaacatgcaagaggctgaggatcatgaagagttctgatgccattggtctagctcccagggctgttgaaaaatgtaagagcagaacctaggcagtaccagtgttcctcttcgaacatggtgtattggaagcgagaactgaaggcatatgggactggatagaatctcatactaagctgccataatccttctattgtttattatgtgtccgttttatgttgtcatggcgtttatgatttagtaagcttcttttcaagattgttgtgataaaacttaacaaaactctaagacttgactgtgggagtagctatattttatgtacccgagttaatgttatggttgaaggatctttgatgtgttaaaaatgcagcgtctcaacggggtgtcctatgtttggaaagaaagaaaaatgtatgtcagtatgtccctttgccaaaagcactgcttattttggatgatgtttgggaatatattgatctgcaaaaggtggggattcctcttaaagtgaatggcattaaattgattatcacaactcgtttgaaacatgtgtgtctacagatggattgccccccctataatataataacaatattcccctttg

SEQ ID NO: 142606 - DNA, 771 bp, Glycine max
  unsure (1)..(771): unsure at all n locations
  Clone ID: PAT_MRT3847_99789C.1
attttcttcgtccacacacgtttacactttgggtcagtcaaaccgcaaacgcaatgtcatccttacctactacgtgctacctcagtttatattatggacagaaaaatgccaatactattagcaaaacgaaaaattgcttttgaagatacaccagcacgaacggtgaggtgaataacaaattaacaaagacggtacagtatacctaaactttccacttatttaatatacactgaacacaaggctgctatctcgttcaatgatttctggttgacacactttcagccatgtttcttgtttgacttgtaatgaatgcacataatggtgtggaactaagagaaagagggatgccactctactaatgcgattcctcgatcccatttgaggacgattcagtgaaaatacacaatacccatatagtgctctaaacgatatatttgttaatatacatattttttttgttgtatgtacagctacttgaggatcacaagcctgaacaataatgaccaatcacaacataaagcatgaaatatatattccacgcttatgtctgttaagtattgcagcgatccaactcagtggtcttcccttcgaacagcatttggatcggagatcatgtccatcatcattttctcaggtgaatactcccaacttgcgaatgtctttaagtcaacatttcttctttgctcagtgaaaagttcttctctcttctttnnnganntctgcacttccttnnctactttcccaccaagtcccnnnncttccacttcanna

SEQ ID NO: 142607 - DNA, 518 bp, Glycine max
  unsure (1)..(518): unsure at all n locations
  Clone ID: PAT_MRT3847_9978C.1
ggggaaagggggccttttaataaccgcttttttcccccagttaatcctgccgttcccaaggggttaaaaatttctggggtcgtccgggtaaaaaaaagcccccctccttttttaaaaaatggctgggccttctgggggacattcctgttcaaaagccctggccaataaccccccaaacaaaagtcaacccccggccggccgtctttaccccgctgctggggaaacgggggcccnaatgccaagccttggaaggggcccccccggttgggcctgccccctggctcgtgctctaagcctgcccgcctcccaaccgggggcccaaatctttttttctggggtcccccgtttgaattttgggtcaattccccccccgaattgaccctccaatgggaaaaacaaggttttcccccggtaaagggggtccctggccctttggactgctttccccggtcccaagggtcccttgccccctgccggtcttgggggagcgccccactgtgcccctttttttttgctgg

SEQ ID NO: 142608 - DNA, 745 bp, Glycine max
  unsure (1)..(745): unsure at all n locations
  Clone ID: PAT_MRT3847_99790C.1
cggtccggaattccccggctcgacccatgcgtccggcaaaagcttttgttactttatgccccatggcgtccgcttagttttctctttctctctcttctcttcatctcaaagtttcactctcactcactcttcttcttcttcatcctttctgatctgctgttttttcagggtgtacaaaattgggtgctttcggttaaactgtgatgtctccgccagtgctaagcatgggggaggaggagggtaaaagcaatgtcactttgttgggttcctcatcaaccgccatggaaagtgtgtgtctcaagagcttagaatttaaagaacgcaactacatgggttcatctgattgttcttctgtggacagctcggttccgtccttctcagaagagtgtaaaagtaatctgaacctgaaagccactgaactcaggcttgggcttccgggatcacagtctcctgaaagagattctgatctttgcttaagaagctcaactcaattagatgaaaaacctttgtttccgttgcatcctttgactgatgatcaccattcttcagccaaaactgctgtcttgggaaacaaaagagggttctctgatgccatgaatggcctctcctccgaggggaaattcctagttgatttggaggccgccaatccgatactatctcccaggcctgcttgtaacttgggattaaaacctggttctacccttgataaagntggggctcagcaaaccaaaatgaaaagagtagc

SEQ ID NO: 142609 - DNA, 191 bp, Glycine max
  Clone ID: PAT_MRT3847_99791C.1
tttgctaccataagagatagctaacaatgcgggaggccattttatgtacatcagcatccctgcatttatatacacataaactccattaagttatatgaaagacctagtaacatataacacataatacagtttttttaacctaaagagtgtctgaatcttaataaaatatttgttgtctagatacacatgca

SEQ ID NO: 142610 - DNA, 539 bp, Glycine max
  Clone ID: PAT_MRT3847_99792C.1
gaagtggaagaagagaaagtggcatcgcttaggtacagatacagatacagacacaacctggaaaaaattccgaccccagcccttcactcttctctctgcagcggaggagttgttataaagctattcatccctgctcaatattctacaccccaagacagagaaggacaatagagatcaactaactatcccaacttgccaatataaactgtgaagagtttctataaatgcaggacttctagcatactgttgtttgattaaccaagttcttccatattggttgaggaagcctcgagtcaatatttagtttttgctaccatctgtgggtttctgatggatgatgctgggcatcgtgagaatggaagacacaaagcagcagatcaatataaatctgctcagggtcagtggttgatgcaacatcagccttccatgaagcagattatggcaatgattgctgaaagagatgcagccattcaagaaagaaatctggccatttccgagaaaaaagcagcatatgctgagcgtgacatggcatacatgca

SEQ ID NO: 142611 - DNA, 599 bp, Glycine max
  Clone ID: PAT_MRT3847_99793C.1
ccacgcgtccgattcttccttctccttgcggataaatccctctccaaatgcggtgcacgtctctttctataaccagagcagggttcatgccacaccaccctatcgatctggtggctaccaatgggatcaaaccgtttagaccgtggaacaacaaaaggctgctccacatccaacgaagcaaatcaaaggcctctccgaaatgagtagactgacttctccatcttcggctacctcctctcctcctttggcacattcaacgaatggatttggaccaggcaacgagattaacacataccacctaccaacgattcttaaatctcaagaacaccaggatacttaaccaacgagactttacaataccatcttactgccgcggtgcggcttgccacacatgaactttgactgccatgtctccagagacaacgggtctggggctatgtgcaataccatcggagatggcttgcggacagaaaccttacggacgggctttctcccgcgagcaagatcccttcctacgcgacaaaggcggtcaagaacgccttagctccaaggggcgggatctgggcctggttttaacttgacaggagacgaattacgac

SEQ ID NO: 142612 - DNA, 927 bp, Glycine max
  Clone ID: PAT_MRT3847_99794C.1
atgagtggaagagtggtcaggaaatggtcaatggaggtgatgatcttaccaagcagttaactgtgtcaaaggctgattggaaaggacaggacttggggttaaaccaagtggcgtatgacgagtcaaccatgccagctcctgtgtgctcttgtactggtgtcctgaggcagtgttacaaatggggtaatgggggttggcagtctgcctgttgcacaactactctgtcaatgtatccacttcctgcagtgcccaacaagagacatgcccgggtaggtggtcggaagatgagtgggagtgctttcaacaagctgcttagtcgccttgcagcagaaggtcatgatctgtcaaaccctgttgacctcaaggaccattgggcaaaacatggaacgaaccgttacatcacaataaagtagaggatgagaaattgtttgtggggcagcattacatgaatagaaacagcttttagcgatcaattatggattctcaagtcgaatgagaaaaataatgtaagtgtaaaggtcatctgggaaagctaatgattagagtatgcccttgctatatttaggatgcataagcctggtgttaaagtcatcctcgttcgtcatttgtacgcacttaattttcttagatggtctgatggcgccaatggcatgtataaaaagtctgcatgatgggatggataaataactgttagatagtcttgtttaatgcatgtagtccttaaacctgaataattgtagactcgtgtcctcagtcatcctggaacctctctgcggtaatatgtaaaatcaactatgtatgttaattttttccttgtttcatgtttgtttttcctccacattggaacccaatctatgagtttagtttttattagtgattgctacaggaggtggccaatatgagccctatgaacctattccttggttt

SEQ ID NO: 142613 - DNA, 1158 bp, Glycine max
  unsure (1)..(1158): unsure at all n locations
  Clone ID: PAT_MRT3847_99795C.1
gctgcgagaagacgacagaaggggggagaggagacgaacactgataagtagtagtaatgggcagtggtggctggtaacggccaccaagaatcaactgagaattgttgtgatgacatcgtggcaagcagcaagacccgtaagcacccatctatgctcactttcaaccaaactcaacaaatcaaaatcctaacgcacctgccctatctcactttgttcggccacgcgtccagagaaagtggcatcgcttaggtacagatacagatacagacacaacctggaaaaaattccgaccccagcccttcactcttctctctgcagcggaggtgtacttttgatctagtacctgctatccctatgtataagcatggcaagtatttttaaacgttgtgacatccattcttgttaggagttgttataaagctattcatccctgctcaatattctacaccccaagacagagaaggacaatagagatcaactaactatcccaacttgccaatataaactgtgaagagtttctataaatgcaggacttctagcatactgttgtttgattaaccaagttcttccatattggttgaggaagcctcgagtcaatatttagtttttgctaccatctgtgggtttctgatggatgatgctgggcatcgtgagaatggaagacacaaagcagcagatcaatataaatctgctcagggtcagtggttgatgcaacatcagccttccatgaagcagattatggcaatgattgctgaaagagatgcagccattcaagaaagaaatctggccatttccgagaaaaaagcagcatatgctgagcgtgacatggcatacatgcagcgagatgctgcaattgcagaacgtaataatgcaatgttggaacgagataatgcaattgcaactcttcagtatcgtgaaacctccttaagtagtggcagtatgccatcatgccctccaggatgccaaatttcacgtggtgtcaagcatgtacatcatccccaacaacaggtgcaccatatacctaacatgggtgatgccgggggcgacacaagggaaatgcgcacaacggagggcctccctgcgncccccatcccttctgagactgggagaggaaggggggccaancgaccaaaggggccaaaggcaggtccacctaat

SEQ ID NO: 142614 - DNA, 1479 bp, Glycine max
  Clone ID: PAT_MRT3847_99796C.1
gtcgagtgaaggcaagcaaaaataaaaatcaaagagcatagggagaaatatctcgttgcagattggcgtcgcgccccggtgacgatgaccccaagtacagatcaaagagaaaaagggcttcagagggggagaaatgggtcggtccagagttgcgttgcgctccgctgacgatgacccaaaccacagatcaaagagaaaaaaggctgctctgaatgtagaaaattcagaaaccttacctacaggccaaggagtaactactagcaaggtatctctctatcactgcaattattgtaacaaagatatttcggggaagattcgcatcaagtgtgctgtctgtcaagattttgacctctgcttagagtgcttctctgttggtgctgaggtgacacctcacaaaagcaatcatccatatcggattatgattggaatgcagatgaagagttgttacttctagagggcattgaaacgtatggatttgggaattggaatgaagttgcagaatatgttggaacaaaaaccaaatctcaatgtattgaccactataatgctgtatatatgaattcgccatgttttcctctccctgatttgtctcatgttatggggaagaacaaagtggaactctgtgccatggcgaagggacatgaagccaagaaagaattttctctgactgcagagcttactctgaaagaagaagctttgttcactgatcgaataaactatgaagaatcaaagaatgcagaaatcaataatcaaactatgtctaggttaacctcagcatgtggcaaagcttacccaagtacaattaagaaggcatccaacgtgatccaaaataatggtggagttaaggtggaagagtctcgagcagattggagcattggagagaagaaacctaaattatcaggcgaagataggccttctatgacagatttgagtggatacagttttaagcgagaagaatttgatgttgaatatgacaatgatgcagaacaagtgttggctgatatggaatttaaggacactgatactaaagctgaatatgcaatgaaactgcacgtgctccatatctactcaaaaaggtaaccacagataagtggatgaatattattgatatgggttatgtgattgcatcaaggtatttctaagcaatggttgtctcatgttgtcaacaactttgttatggtcaacacattgtgattatcaagcaaaacagtggcctactccttatattagttgaatgtaccagtatactaattacatgaggttgatcacacaacatgttgatttaagagaagattgaacattttgttattgtttgaataacttacatagttatgacaacatggataatgcatgtaacactttctaatcatatttgtataatgaacacaatgttttcgatcgaacataatagtcaaatacaaaataaacgcaaatgttaaccacagtcaaatacatagtcaatcaaataattaaagtatt

SEQ ID NO: 142615 - DNA, 438 bp, Glycine max
  Clone ID: PAT_MRT3847_99797C.1
gttgtctttgttccgggaactgcgttactccttcaacttagcgcactacaagtgccaccttaagcacatgcctttcattattcgccgtcctgacgcaacgctttatggtgctgctatggactactccttaccctggcatgaaggagaaaaggctattcttgcccccattcgaagtggggctgatgacagctcccatctctctaatgccgagattgtaacgtgtatcaactgaccttaattagttgggccaaaacagatggccacaaacccaatttagctctaatgggcttaagcagtgaccaacgcgagggaatcgtttcctgcccggccggaatcgcttgccgcaccttgataaccttttgaaacgcttaaaccaaaatggggtttgacgggatttgtctttgcacaacgactaatcgggattgtaagatacacgtt

SEQ ID NO: 142616 - DNA, 1980 bp, Glycine max
  Clone ID: PAT_MRT3847_99798C.1
ataaaacggagaaaagaaaaaagaaaaatgtaagtggaagaagagaaagtggcatcgcttacgtacagatacagacacaacctggtaaaaatcccgaccccggtgccgcacaattttccttcactcgcagcggagatttaggagtgtggtcttcctgtcttggaagtgctgcttgaaagaggaccttggtcatatggttgcttgtcatcattatttgtgtggtatttatccatgcattatgtggtcagaacataataatcaaataaggattctttctacccactcatctcacctctctttttattttcccctggtttacttttgatctagtacctgctatccctatgtataagcatggacttctagcatactattgtttgattaaccaagttcttccatattggttgaggaagcctcgagtcaatatttagtttttgctgccatctgtgggtttctgatggatgatgccgggcatcgtgaaaatggaaggcacaaagcagcagatcaatataaatctgctcagggacagtggttgatgcaacatcagccttccatgaagcagattatggcaattatggctgaaagagatgtagccattcaagaaagaaatctggccatttccgagaaaaaagcagcatatgctgagcgcgatatggcattcatgcagcgagatgctgcaattgctgaacgtaataatgcaattttggaacgagataatgcaattgcaactcttcagtatcgcgaaacctctttaagtagtggcgtatgcgaacgagataatgcaattgcaactcttcagtatcgtgaaacctctttaagtagtggcagtatgccatcatgccctccaggatgccaaatttcacgtggtgtgaagcatgtacatcatccccaccaacaggtgcaccatatacctaacatgggtgatgcctcttacaacacaagggaaatgcacacaacggaggtcctccctgcagcccccatcccttctgagactgggaagtcaaggcgggccaagcgaccaaaggaaccaaagtcagctccacctaataagaagacttcaaaacccgcaaaaaaagtcaagaaggagagtgaagacttgaataatatgtttggcaaggcacatgagtggaagagtggtcaggaaatggtcaatggaggtgatgatcttaacaagcagttaactgtgtcaaaggctgattggaaaggtcaggacttggggttgaaccaagtggcgtatgatgagtcaaccatgccagctccagtatgctcttgtaccggtgtcctgaggcagtgttacaaatggggtaatgggggttggcagtctgcctgttgcacaactactctgtcaatgtatccacttcctgcagtgcccaacaagagacatgctcgggtaggcggccggaagatgagtgggagtgctttcaacaagctgcttagtcgacttgcagcagaaagtcatgatctgtcaaaccctgttgacctcaaggaccattgggcaaaacatggaacgaaccgatacatcacaataaagtagagggcgagacattgtttctggggcagcattacacgaatagaaactgcttttagtgatcaattatggattctcaagtcgaatgagaaaaataatgttaagtgtaaaggccatccgggaaagctaatgatttagagtatgcccttgcttatatttaggatgcataagcctggtggaggctggctaaatttaggggttgaagaagtgactatatagtcatcctcggcatttgtcgcacttaattttcttagatagcctgatggcaccgatggcatgtataaaaagtctgcatgatggatggataaatagctgttagatagtcttggttaatgcatttagtacttaaaccctaataattgtagactcgtgtcctcagtcatcctggaaccctatctgcgttaatatgtaaaatcaactatgtatgctaattttttccctgtttcatgttt

SEQ ID NO: 142617 - DNA, 713 bp, Glycine max
  unsure (1)..(713): unsure at all n locations
  Clone ID: PAT_MRT3847_99799C.1
ccacgcgtccgcggcaaggcttcagtttcagagggggagaaatgggtcggtccagagttgcgttgcgctccgctgacgatgacccaaaccacagatcaaagagaaaaaaggctgctctgaatgtagaaaattcagaaaccttacctacaggccaaggagtaactactagcaaggtatctctctatcactgcaattattgtaacaaagatatttcggggaagattcgcatcaagtgtgctgtctgtcaagattttgacctctgcttagagtgcttctctgttggtgctgaggtgacacctcacaaaagcaatcatccatatcggattatggataatctatcttttccacttatatgtacagattggaatgcagatgaagagttgttacttctagagggcattgaaacgtatggatttgggaattggaatgaagttgcagaatatgttggaacaaaaaccaaatctcaatgtattgaccactataatgctgtatatatgaattcgccatgttttcctctccctgatttgtctcatgttatggggaagaacaaagtggaactctgtgccatggcgaagggacatgaagccaagaaagaattttctctgactgcagagcttactctgaaagaagaagctntgntcacctgatcgaataaactatngaagaatcaaagaatgcagaaatcaataatcaaactatgtnctaggttaacc

SEQ ID NO: 142618 - DNA, 1432 bp, Glycine max
  Clone ID: PAT_MRT3847_9979C.1
aggtcgagttttcctgaatttcacaatattatttggaggatgctaataatgcaaggcaccttgctgaaattcgggtataaccaaccaaatcacaaattgtcagattgatgaaacgactggagataatatacgggatcattttgcttggttaactaatgaatcagaacatatttttaatggctaaaatgaacagcttcgatacttggggcataatcagattacacaaatggctttgtgccgacccttacagatgaaaggccgcagaagtctttgcttccaccctttgaatctgcggaaatgcgagctttagcagagagcttaagtagggatatcattcgtggaagtccagatgtgaagtgggaaagcatcaaggggttagagaatgccaaacgtttactgaaagaggctgttgtgatgccgattaagtatcccaagtacttcactggtctgttatcaccatggaagggtatcctcctttttggcccaccggggacaggaaagacaatgcttgcaaaggcagttgcgacagagtgcaatacaactttttttaatatttcagcctcatctgtagtcagcaaatggcgaggtgattcagagaagttagtgaaagtgttatttgaacttgcaaggcatcatgcaccctcaacaatatttcttgacgaaattgatgcaatcattagtcaacgtggtgaagctcgcagtgaacacgaagctagtagacggttgaaaacagagcttctcattcagatggatggtttgacaaagacagatgaactggtttttgttttagcggcaacaaatcttccctgggaactggatgcagccatgcttcgacgtcttgagaagcgaatccttgtaccacttccagaaccagtagcgagaagagcaatgttcgaggaactccttcctcaacagcctgatgaggaaccgatcccctatgatatactggtggacaagacagaaggatattccggatcagatatccgattactctgtaaagagacagcaatgcaacccttaagacgcctaatgtcgcaacttgagcagagccaggatgtggtgcctgaagaagagttgccaaaagttgggccaatcaaatctgaagatatagagacagctttaagaaacacgaggccatctgctcatctccatgcccacaaatatgacaagttcaatgctgattatggtagtcaaatactacaatgacaagttgtaattgttattgtaaggtcttccacaatttgattggcatataaaattactgctgtaagagtaaactttaaaacattattttggttatgcaacatttttgcattcgtttttctccattattagtactaagtatttttacatatctaagtaacaaatgcttgtgattatatttttaaattcactcattattatattctacatgaaaatattatcatgaaaa

SEQ ID NO: 142619 - DNA, 340 bp, Glycine max
  unsure (1)..(340): unsure at all n locations
  Clone ID: PAT_MRT3847_997C.1
gtttgttgaaaaaacgccatgctcctcctcaatttatcgcaagatcacatatatattaccatatttacaaatggagtctggtaaaaatacaatcgggttagtgaaagaaaaatacttctttgantttaaaacaactctatatttctatttactgcataatggctaaaaagtttaatctctaaagccaacattttcaacgaaaagtcttaatatccatcggagaaaattgccccatgtaagctatatttaatgtactttttcaacaaaaggacatcaatttcaataaaaattccaataactttcaatttaaacaatctatcttcactttctaaaccctttt

SEQ ID NO: 142620 - DNA, 644 bp, Glycine max
  unsure (1)..(644): unsure at all n locations
  Clone ID: PAT_MRT3847_99800C.1
gcattacaacaaatggcacttcatatagcataatcatctgttcttgctttaaaaatgcctctaattgctatttatggcaaagaaaaaatcgtattttgtattaagcatatcttactaggaacaaaatattttaaaatccatatactgtgtttctgatcaaaatcggcacagtacaatgtatttactacttttagatgaatatcaaatctactttacaaaatatgtttgattactttatttatttcctaacaattataaataaagtaatcaaacatattttctcttaagccattggttgaacttttgacggcaatgagaaagtgtaaattcagttggctgcaatcacaaaagattccataaaatgtaaagctgtccatttactgtttaatttcattacatttacaattcatcctgatgacgtattgtatgccaaccaaaagtgtcaaaagacaacattaattatcagctgaaaattcttatcacatgatcattgcttgaaaaacacaatccatgttgatactgtctctatcactacaagagagaaacttanatagcttgcaaaatcaactttgtaatgctaagactcagcctcagatatgggagggcatattccatcaagtagttccattactggcctaacttac

SEQ ID NO: 142621 - DNA, 446 bp, Glycine max
  Clone ID: PAT_MRT3847_99801C.1
tttgttttttctttcttcatttttgtgtctttttttttttttttttttttaaaaccgcgcaaaagaagccccaacgcaaaaccataaaaaagggcaatttttttaaacatatgggtgactaaaaaaaccgggtaagaaaaaaaaggccctgcaaggaaataacggggcatcaagggctttcggggcaataaccttaggtcaaatacttgtccttaacccattcatttgggttttagccgacaaaattcacccggcaaaacttctgcgtatgccacaaattcttattaaaaaaacaattatggctaaaaatgaacagttggaacttatacaaccacttgcaacaaagcccaggaaacttgctctaactggggaatatgtccaaaaagggtgggttacgccaccatttggggcccaactatctgcatgccataaagatgcctgacttc

SEQ ID NO: 142622 - DNA, 310 bp, Glycine max
  unsure (1)..(310): unsure at all n locations
  Clone ID: PAT_MRT3847_99802C.1
aactgatttaagttcacaatggcttcaaannncaggttttagcaacatgcttaggagatcctaaagtagagaacaaaaatgctaaacgatgtgctttggctcaacagccaatataggtcttgactcgatacagaatcacaggactccttacggcacaaacgtagtgcaatcaggcttcagtctgctccctcagnctacggattgtgctcctgacagtgaccgcactnnnagtgttcatgnngtaagcaccaccgggcttcaccttcccacagtccttgcatccccnnnttccaactgctttcctcttcac

SEQ ID NO: 142623 - DNA, 262 bp, Glycine max
  Clone ID: PAT_MRT3847_99803C.1
gattattgatttgaaacttgatttgtttatggaagcataaagaatcaaacggagcaagggaagggtaaacgcgttagaagaagagccaaaagtgcataaaggaaaggggcgaaaagaggaggcaccaagattagaaatggcaagagcacggggagatcggtgctagaaggaataaggtgggagccgtatacctgaatcatgtcataggctgctaagagacaaagagcaagtcagagcactagcctcaaatggggtgtgggaa

SEQ ID NO: 142624 - DNA, 292 bp, Glycine max
  Clone ID: PAT_MRT3847_99804C.1
cactaactaatcaaagatgttcttttttaattaaatggctatcacacaatggagttcgaaatttgcatcctcacatgctaaagtgaaacccatggtttagatatgcacgagattatcactaatagaccatattgggaatggtaaaaaaaacttaaaccattagcttgacaaaaaaaaaaaaaaaaaaaaaaaaaaaaaagcggccgttttaaaggatccaagtttacgtacccttgcttgcaacgtcttagcttttcattagggtaacctaaattcaattaactggccgtgg

SEQ ID NO: 142625 - DNA, 449 bp, Glycine max
  Clone ID: PAT_MRT3847_99805C.1
cactcaccaaaaaggtgcttgctttatcactgtctctcacctggggtgttccatttccttccactgaactgaaaaaaaaaaaacactgaaggagaaaaagtcttgaacttgagaatggagcatgtgggttggtgaggaattgttgtcgtcgttgttgttgttgttcacttttgctggtgtggttttcgatccaactgggtcttcagcttttgtgcttttgtttccctataaaatccttatgggtaacattaatgtggcacatttggtggtggtggtgctgttttgctttgggctgtttttgccatgcttgtgtcaaggtaactcagatgatgctaccactgatgtgtatgttgttactctgagacatgcacctgtttctcattactatggtgagttgagaagagagggtaatggcttcaaagatgctgctgctcctgggggaactcaat

SEQ ID NO: 142626 - DNA, 377 bp, Glycine max
  Clone ID: PAT_MRT3847_99806C.1
atcggagctcaacaatcggaaaagggaaatgtagaaagtggtgtctggggactgacacccttctgcactggatgtattgtgggagtcaggcgtgggagatgctacaacgggatctgcggatcatataacaagaggaatggtgtcaactgtgatgtcgaatatgaccagcgatagagtgaatggttggaggagaacaatgtctgaaacagtaaagcttggtgtataaattattaaagattcgcattcacaacgacaatctctattgcatgcacattacacactgcatggagtggatgatgacataagcctgaacaagaaaattctgaccaacatgttcagaaggatgcacaagagcatgtgggctattggaggcattg

SEQ ID NO: 142627 - DNA, 422 bp, Glycine max
  Clone ID: PAT_MRT3847_99807C.1
gtgataatcttcctttagtcatactcgttctctcagttgcattcttccacagcctttctctctttatttggtctttctgattctttctgatttttcaaaaaaagaatatttggagtccctatttccatttccaaagccattagtcccatgttattttcgagcaattgctgaatattttatgaaggaatatactaaaagtggaaattggagatatttgcgaaccaaaatgctaggagaaaactattcatacttgggtagtaaacggcagattttctaagctggggttgaatagtcttggaagtctgtcttcactgctttctgtagtaaatgccttgcaatttatttttttataatatgaagttgattggcactaattattttgtacatattagacaaattattgtcgtagatgtggttgattg

SEQ ID NO: 142628 - DNA, 361 bp, Glycine max
  Clone ID: PAT_MRT3847_99808C.1
gtcaaacaaaaaaatggctcaaattcaccaattaaatttaaacaactttatcctatcatctccagaaaccccatttaactttcatgttcaccaaaacttaatttcaacccatgtttttaggcttttagttacgaaaaacaaggcgaggtccaaaaccattttgaaaacaaaaatgcctattattatgctcaaaacctggccttggtgaagaaccaccgattcttcccagtcttgaacctttcctagaggcgctttttggtcttcttggaagcagaaaccttcttattcctggcttggaacgcttggggggtaaccgcgctctttaaaaccacatccagcctgtaacccgggggcatgaggg

SEQ ID NO: 142629 - DNA, 767 bp, Glycine max
  Clone ID: PAT_MRT3847_99809C.1
ccacgcgggctcgagcttagggtttatcgattattctgaattgttcatactgaattttaatttaatctcataagcatgttgtgattattgttctggaaattcgaaaattgacgagttaccagacttgcattgaaatcgtatcaaacaatgtcgtagctgttttctttttcaaatcctgagttgttagtgagtgtgcccaacaatggcagctgttaggtcttcctctgtaagaaggttaggaagcacaattcagggttcttttaatatggaattagttcaacactgtcactatcaccatagtatgtgtatgaatcttgcaaggttgccaagtgattcactgagtcatccttattacaaaagagagctacagtttgctaagaatcggtttagtaatttggcctctgaatcccttggaagtagtcatcactttggcactagagccagtgtatcggtaaaaccaacattctctggttattgttttcgtagtgcccttccttttgcttccatgagccacgtgttgaatcatcgaatgtattcgtcgtcagtaggtgacaaaggaagtagagatggtggtacagaagtttctgctggttctggtgcaactgatattaataccactggtgattctgttgttgggggtgattgggctgagaggattaaagatgcctggaagagtgtggcagaggcagcatcatatgcagggggtaaggtcaaagaaacttctgatgatctcactccattttgctcacaggtgcttgattcacacc

SEQ ID NO: 142630 - DNA, 436 bp, Glycine max
  Clone ID: PAT_MRT3847_9980C.1
cgcagaagggagatggaagacattgacattccagtaattgattaatcaaccgtattttatgccactaatggctcttacagacacaacaaattgggagaagatggctttgaaactgtgttactgacatgattattttacaccaaagtattatattgttcacattctctataatccaaacaaagtgtaatttccaatgggacagagatcactgttaagaggctttccaagaactctgagcaagggctgcaggaggttcaaaactgaagttcagataatagccaaatttcagcaccaatcatgtaaagcttcttggctgttgcattcagcaaaaagagaaatacttgtttacgagttcatgcccaacagaagcttggaataccttactttggtcaatggttctctttgacaattaccattctgtagatttcatgctaat

SEQ ID NO: 142631 - DNA, 317 bp, Glycine max
  Clone ID: PAT_MRT3847_99810C.1
acgcacacgcttgcgctgggatgttaacgagctatttagagcctaggtgcacgtcattctctacggaagctaccggtaaacgtttaacaagccatctcgtagctactactacgaacgttattgctgccataatcaatctggtctgtcagtgcgaacgttgacgatggagctgatactggagggtgctgcacgtcctaagtcgaatacgtgactagagaacccacctactgaccgtagatgaacttaactggtaaagattctatcatgtttgaaaattcattcgaagaatagctcgctactgactatgcaattatgca

SEQ ID NO: 142632 - DNA, 178 bp, Glycine max
  Clone ID: PAT_MRT3847_99811C.1
aatttaaatactgatgcggcgcgtcggattatttcgtgtcatatctatttttttttctttttctttttctattaatccctattcatatctctacttctccattttctgtgtaagaaatattaattgacatttttttcgcacgtttattggatgtcttgtctatggagaaagtggaatt

SEQ ID NO: 142633 - DNA, 506 bp, Glycine max
  unsure (1)..(506): unsure at all n locations
  Clone ID: PAT_MRT3847_99812C.1
aagatactgtaattcttactcttattcaccgatttcccccaaatcttccatccaagaattttagggttttctcttccagatttcccccaatcttctccgcctctcttccttttcctttacatttctctctgattgaaacgccacacccatttgagaggatcttttttctagaggttcgttttttcgcgctaattttttccacttcttgtctaattattattgtttgtaattagtaagccccgctttatcattgagggaatgttgttagttctcgcgcggaaccaaaaagtttctggtttttctcttcctgattctggtggcgggggaacgagggttttccctttttcccccttccatttctgcgttgccctataatgatggcggtgtacttttgaaattggatgtggataatatttatatattggatgggttttcgatgattattgatgttctccatattgattgtanaagccaacccaaagtgtgttttcatggggttgttgtga

SEQ ID NO: 142634 - DNA, 1476 bp, Glycine max
  Clone ID: PAT_MRT3847_99813C.1
ctaatatgggccaaaagcatttacccatatacacttcacccgaagagactggtaaagatcatatagacaatgaagaaagtgaaatgcatgaagacacagaagaaatcaatgcattgctttattctgatgatgatgatgatgatgaggtaacaagtactggtcattctccattggttacaaaaagaacttatgtgatgcaagaacagtttgcaggcatgaagaaggaggttgctggctctgattggccaaacaaaaggcagaagttaattgatagtggatacaatacactaccaccactcatggacagtgctagttccgaaaggctaaatgaaatgtgcgagtatgccagtgatgctgaatcaaagtattctagtagtggcggggtgtatgctgcaaggcaaactaaagaagataatccaacacctgctgatattcaattgaaaaaggataaaatccgtgaattgttgagagttctcgagaactttattcctggagcaaaaggaaagcatcccctgttagtcattgatggtactattgagtacttgaaatctttggcgtcccaagctggtacactgaaatatcactaagtgctcattgtggtggttacaatatggttggttgaagggcacatgggtgcggctaaaaggtctcgctgttgaatgattagatttgttgcattgcaagttttcaacttagcatctgcttcttttatcctctttctcgaggagtatttatagtgtagcagtgaaggggcaaaaacagcaatagatagtactgccctttgccactgcaattgaagaaatatggggtttgggatttaaagttgatgaccaagattttttatcttttagcgtttggaggattaaagatcacagagagattgaatggatgggagatgatagtggattgctgtgctgtaaatgaggacactttttttctccaggagttttgaattctcttgttgatcgaatgcatgcgcgttaggtaactggggtcccactctccaccctcctccttttcattcctgattttgtgctttgttctctcctctcttccaagcttgtacgcatatcatgctagcgtagactctaaagtaccaagaagaaagttcaatgttggggagtgcttgaatgaggagcgtggtgttgtgttttcatcatgacttgctggggccccatttgttggatacatagcatgttgtggtagtagtaaaggttactttgttttacgtgttgagggtggaatcataggtgattctcttttctacgttgtaattgagaggtgggtggagtattctaggtttctttttcattattatttatctgtcggttgtgtgattgtatgaatgatttggattgtgaatattgtaagggcagcgcagtggtgtattctggttgatgactcgttggcattcatatttttttgtctttgatgtttgtacatgttgaataattaaatgtcattttactatgaatc

SEQ ID NO: 142635 - DNA, 1283 bp, Glycine max
  Clone ID: PAT_MRT3847_99814C.1
ccgtttaaaacgcccctaaggggggtattactccctaaggggaattaatcgggccccccccaggttcatccaagaataaagaaactcacaccacataagctcaacaacaaagtcaagcgtttacccaccgaatcaatcccgtaatgaacataaaatgttacaaattaaattatacatttaattccagttcaatgcctgatcctgttattaagttcttaacctagccatattaggaccaccttatgaagaactaaagcaaaacatcatgcaaaaccatcaacattttcaagcatgtgacgatcgagaattattatttatcagcaaaggaagaagcaaaaccactagcgagaagcctctcaacatacttgccgagaatatccacctcaagattcactttttctccgacattcttcagaggaatcaccactttctgctgagtgtaagcaaccaacatgaaattgaaacactcttcatggtcaaacacatcgaccacagtcaaactagtcccatccacagcaatgaaccctttaggcacaatgtacttcaacaaccccttatcagctttcaccttcacccagagcgaatctccttctggaatcttcgacacgatctcccccgtgccgtccacgtgaccctgcacgaagtgcccgcccatgcggctcgccggcgtcactgcccgctccaggttcaccgccgacccgggctccaattccgagagggaggtctttcggagcgtctccggcgacaggcccaccgtgaagtcggcgactttggtgtcgaattctgtaacggtcaggcacgtgccgttcacggcgatgctgtcgccgaggtttacgccgtccaggacggtggaggccgcgattttgaggtcgacgccgccgtgtggggagatgcccagctgcttgacggtgcccatttcctccacgatgccggtgaagaggcatgcgggggtggaggggcagcggcgagtgggggcgcgtgatgtgagggggaggaaggcgcgtagaggggaaggtctggaaataggattgagtttgagataggtggggtgggaagtgtgggaagtgtgggaagtgtgggttgttgcggtgattctcggggtggtgggtgttaaggtcagagagggtgaaattgtcattttggcaatgttgtgttgtgttggaacactcttctcggtgaagtaggtgccgccggcaagtagaagtagcaacagagcactgtgttgtgttgtgtctgtgtttggtaacacccagtctgcgctcgagccggcccccctcgcggcc

SEQ ID NO: 142636 - DNA, 295 bp, Glycine max
  Clone ID: PAT_MRT3847_99815C.1
aattcggctcgaggccaaattaaggcaccctgtgttctttgattactactcacagttcttatcataccgctattcaattggagccttacttgaatagtacagttggagagagtcaggcgcaatgtcctataatctctctttgtttttaccacttgcttattgctcataagcactaaggtatctttatcttccatctgattttcggtccattaatgcacctatcaattatgatctttatagttattatgtgaatattccccattttaccactattgattactggataatgttataa

SEQ ID NO: 142637 - DNA, 187 bp, Glycine max
  Clone ID: PAT_MRT3847_99816C.1
ataccggtttttgttttttcacttgggaatatctgactgttaccggcgggcgtttgaattttaacagagtgagccataccgcagcaagcaagagccaggggcaaacctggctacagagggaaactgcgagcaagtcacaaccgcacacaacacgcgagcagaaagcaaaaagcggcaagacgcggaa

SEQ ID NO: 142638 - DNA, 335 bp, Glycine max
  unsure (1)..(335): unsure at all n locations
  Clone ID: PAT_MRT3847_99817C.1
aggggaatcaaacacaacacttcactctcaatcttcgggctttttttcaaattacttcctcctatacncctccatccttttcctctccattaacttctttatccaaacaataattttcaaaaaccttccttcatcaccattttttttttctataatcttaaacctacaccaactcaatcaacctctccacctcacattccataccttatcacaaaaatatgtccctatattcttccttctattctacttcccatttttcctcttcatttcctcttctctctctgttcaataattcttcaccaataacttcattcttttttaccaaccttccttac

SEQ ID NO: 142639 - DNA, 371 bp, Glycine max
  Clone ID: PAT_MRT3847_99818C.1
gttactgttgtgggttgacccaaatactctcacattgtcattgagggaccgacgtttttcactttccttctggggaccttgatacgggtcacctcggaaggatccccatacggagcctaaaggcggacccaacacccttattgctttgaaaaacccggtgtgggccgattcctaaacttgagcgtacataaaaaaattttgcccgcactaggttcgccgtgtctttggacatgacaggtgcccagggagggaagatagccgccacctggaaaccacaaagtctatcttcataggaagcccgccggggaaccccctgaaaggaagggcccccccaccggtcggaagaatcacccggtaggggacccgaaccg

SEQ ID NO: 142640 - DNA, 426 bp, Glycine max
  unsure (1)..(426): unsure at all n locations
  Clone ID: PAT_MRT3847_99819C.1
gtggtgggtttctggagcaatcggtgcctgcgcaagaagaaatntcgagtgaagaaggaatccgnnccgcgaatgtcttccagtagtcgggtgggcccctggtgggatcggnncgtgactgtggcccatcgnnggggcatcatgccccctcgccgagtatnncctcccttcnntcgccgacaccccccnnngccggtccattggatatggtctactggnncgtcgcacgccgctcccgcgtccccgccgtggaaccgccgaccccatcctgtcgagtacccatccagtgcgatcgtnnctccgatcccnngccgacgccgaatgccaaaccctctccgcccttttaaccgacgtgcatctcacgtgcttgcttgcgtgtgcgtggacccataccgtctccatccgaagcatgaaaacctggcgaag

SEQ ID NO: 142641 - DNA, 4352 bp, Glycine max
  Clone ID: PAT_MRT3847_9981C.1
atcaggttagaaaaggactttcatctctcccctcttgtcacacaggttctgcaacgttttcgaatacactacctcgataaacttaccaacaagctgaagggttgatgtttttgggttggcttatgacatccccaaggacctccttggcactcgacgacgataagaagcgcccagaagccgccgttgcccctcgatgccaattcatgatcgtgttcaaattgcacactgccccaacacacagagaagcccagccaaagtgaatgcgttgcaatattggtgatgtgaataataaagagctggtagatgccatggagatgtatcgtgaagaggctacatagggtcaaaaaagcagaacaggaagtgagataattacttatatttttaaggaaccagggaaaatcaagagaacagaaaaaatttcttattaaatgctctgtgatattttgaccgcgttcaataagtttcactaaatgttgcatgttggaaagccctcgtcgaatcgaagaagagtcctgggattggtgtacccttgaggtatcgaaggatgcgaaaggcagcttgaagatgagtgttggtagaagtagccatgtattggctgagttgctgaactgcatatgcgatatctgggcgtgtgttggtgaggtatatgagtttgcctattaatcttctataggaggatgaagactcagtcgaaagaaggtttcctgagttcatttgcagcttcgtggagtaatccattggtgttgagtttggtttgcaacctagcatacctgagtcacataaaatgtccaaggtatacttatgttgacatagatggatgccatcagaggtgcgtgcaatttcgagcccgagaaagaacttcaaatctccaaggtctttaattctgaactcttgatccaggagggtgattatggtttgtatttcagctatgctgtttcctgtgaggatgatatcatccacgtatactaagagtatcgtagtgatggctcctgtgaagcgcaagaaaatggagtgatctgcattggattgttgaaacccgtgagaggttaagaagctagataacttcgtgaaccattgtctgctagcttgtttaagcccgtaaagagaccgttgaagacgacatacaagctgcggattatcaaccgaaagatctggtgggatttgcatatacacttcttcgtcaagttccctatggagaaatgcattgttgacatccagctatcgtagatgccatcggttgagtgcagctaatgcaagaagaagacggattgtagtgagcttcgctaccggagaaaatgtgtcgaggtaatctaacccctccatttgggtgtacccctttgcaactaatcgcgctttgtgtctttctatggaaccatctgcccgatatttgattttatatatatgcatatccatctgatagctgtcttgtgaggaggaagaggtgtgagtctccacgtgttgtttgactggagagcctgtaactcgaccttcatcgccttaatccaacagtcatggcgagaagcttcggcgtataaggagggttctgttgttgatgagatgctcaagacgaaattcctgtgtgcaggtgagagacgtgagtatgaaaacactgaacttagaggataacgaacaaccgccgaagcatttgatgtagatgaagcaaggtctctgtgatagtcttggagatatgtcggggcatgttttgctcgtgtggaacgcctaaggtgtggaagaggttgctcatttgaaggttcattagatgagggtactgatatcgtgggtcgtgatgggtagttttctattggtgggtcaaggttcttaccggaaaaggatcccggagatggagaatatgggaaatgatcttcataaaacatgacatttctagacactgcaacatcattagaatgcaaatcatatacaagatatccttttgtatgtgttttaaaaccaatgaagatgcatgggtgtgccctagcatcaagcttttgtcgatttgctttgagcgtgttgatgtaacatagacatccgaaaacttgaaggttagagatatcgcatggatgcttatgtaatttttcgtaaggtgaaatatcatgcaagtatggtgtggggatgcaattgattaggtatgcggcatgtggcaaggcgtaacaccagaaattaggtggtagactcgcctgaaacaagagtgctcgagtgatgttgagtaggtgctgatgctttcgttccgcgacaccattttgttctggagtttcgacacatgtagtttggtgtataattcctttcgatgcataataatgatgcatgaagaactcaaccccattatcacttatgattttaacttagccattatactgtgtttcaatgaatgcaatgaagttcataatgacatgtcgtgtttcagctttagatttcatgagatgtacccatgtaaaacgtgagcaatcgtcaacaatcgttaggaaatacttgtgaccatgcatggatagtttcgaacatgggccccatatgtccatgtgaagtaaatcgaaaacatgagatgcatgtgaattgctagaagaaaacgacattttcttgtgttttgcataatgacatatgttgcatacaaagtttatgttattagggtgtcacagaagaggataataggttttcatacattgtattctttcagctgatgggtgacccaacctaaagtaccaaaggtctatgggaattacattgctagctttggtggttatctggtttggtatcaggtgatagagaccatgctttgcttcaactataccaatattcatatggttgttcgtttcctgcaatacgcatgatgtggaagaaaagattaattcacaattaatggaagatacaagctttgatatcgaaataagattgaatgtgaaagtgggtatataaagaacattgtgtaaggttatgttgggcgagagctgaattgttcctgaatgagtggcatgaacatattggccgttcggaagttttactgtgattgggttgattcgtctatgggagtgaaggttatgcaaggagctagtcacatgatctgtagcccctgaatctagtatccaggaggtggaaagcgcactggtagaaggtgacatacctaggtttattggagtattgacggtgcatgaagaaattgatgcaacctgtttgggttgattgggtgtcgtgttctcggcggatggctcctggattaaggcgagtagtgccttgtactgctcaggggagaagcgaacgaactcatgggactcatgatgctgagcttgatcatcagtggctttgctttctactgtcactacgttgttcatggtggtcctttcatcgtaaggcttgtatcccggcgggtacccatgtttccgatagcagacatccactgtatgtcctaacttgccgcagtgggtgcacgtttttcttccattgttactcttatttttcgcatcgtaattagagggcatcttcgcggcgttaatggagatgtctttgggttcgaagttgatacctggtccggtgttacctagcaattgcctttcctgttgagctacataggagaatattttggatatggcgggtatgggatccatgagaaggacgtgagaacgaatgttagcgtattgttcattcaagcctcgcaggaactgcatagctctatcctcgagctttcgttgcgcgataatggtgaaagcagtgcaggagcacctgatattgcaggaatagattggatcaggtctaaagttctcaatctcatcccaaatcatgcgtagacgagtgaaatactcagtaattgtaagtgaaccttgcttcatcgttgaagcttcttgctggagatcggagattcgcaaaagatccccctgtgaataccttgatttcatgtcgcaccaaatttcctcagctttgtccatccaaagtatactttgccgtatggaggtagccactgagtgaactatccacgaaacaaccatattgttgcaccggcgccacgctccatgcattctatccgtcttcagtggtttaggcgcgcttccatctatgaactccactttgttcttggtacttaatgcagtgaccatggacctactccatgagtggtagttagttgagtctaggactggggaaacaagggcaatggtcgggttctcgctcggatggaggtataggtaactctccgtgttattgattgatgtcgacgacattaagaagcgttcagccgccgccgtggcttctcgccgccgattcacggttgttcacaacccggccagaacgacgccgtacccgattccgcaggtgagttagggtttcatgctttcctatttttcccttattattattattactaagacgaa

SEQ ID NO: 142642 - DNA, 313 bp, Glycine max
  unsure (1)..(313): unsure at all n locations
  Clone ID: PAT_MRT3847_99820C.1
tcnngttgtgntanntnnnngngncatngctnanatnnnanccgttantgttanttcntgtgctntgnnncncagtgcgctntnctcnncggtcgntntcagtcntgnncttcgccnctccgtgcnnngtcgctngtgnnnggntggttgttaagtnntgtnnngnncgnncngnttgtgatgntnctcgctctctcgtctgnggcttgntggacnctgcggannnttntgctannntggcngtcntttgtggtgntcgtaagntcncntctngggcnntnncgctgtcgnatcgntgcnctgtncncggtnc

SEQ ID NO: 142643 - DNA, 2761 bp, Glycine max
  Clone ID: PAT_MRT3847_99821C.1
actagttctagatcgcgatctaggaagccctcactctaacaacccatcttttccctcttttctttctttcatccccaaaggaaaacttaaaattcgcaatagaaatctctctccggcccagtcgaccaccccttccacgtcccggcgctggtaggttatgcattgtgtagccgagcttcatatgacggcaagggggaggtgggattccgttcctggaaaccctttcagccgttcgctttcatgggccactgcactgctacagctttaaaggtacttgggcaattttggcgaacctctgaggaagtccggcattccggagaagaacactaggaagcctagctgcttccgttttctcgtgttttcggatcctaacattttatatagggttttggtatacaaacatttcttaaaaagacggaagagtgacgtattcaaagatttcttaaagatcgaacaaaaaagttttgtcacatcatgaggtgaaatttccaataccgggttgtgcttggtacacgtcagtgacttacaaaacaaataaagttggtttgatgtgaaatactccccattaacttcaatgagatctttaccatattatgaaccttacttgtcaatggattgctaaatttatcatgtatgaacagaccacttgtaggccacgattgaaattgggttcattgcatctttaacagaatcagttgtacaattaggtttggctcaatccaattaatcaggttaattttaaacaagttggaggaaaacgtgcatatccaaagaatgctaatccttgggcaagggatcctattgcgattgtctctaaaattagtggtgtttcagggtatggtgcatgtggtggcaaccaaaatgcatatgatggtcgtatggattctagtaggtatatgcagcctcaaagcgctgcaggtggattccctccttatggttcttctgcctacagtgctcctgggtatgggtatggtccagctagtaatggcattggttatggtgcatatggaagttatggtggtgccactgctgggtatggtggacctgctgctgcaacatatgggaatcctaatgtccctaatgctgcttatgctggtggtccaccaggtggcccaaggagtacatggcctgctcaggctccttctggttatggatctatgggctatgggaacactgctgcttggggtgctccaagtggtggtgctggctctggtggcgccggtcctggttcagcaactgcaggtcaatctcctggtggagctgctggatatgggaatcaaggttatggatatggtgggtatggtggatatggtggaagtgatagttcttatgggaattctggtgcatatggtactgttggcggacgtactggaagtgctccaaacaataatgctagtgcttctggtggtagtgaactaacaagtagtggtggcagtggcaactatatgggtgggggctatggggatgcaaatggaaattcaggttatggaaatgcagcttggagatctgaacaaactcatgcatctggaaattatgggactcctcaaggtaatggtgggcaagttggttatggtgttggctatgggggtgctcagtctcgacaagcccaacagcagtaattttggtagatgaatctcttgctggatcttaaacttcaacttgaggatccctggcttttaaaagtcttaaatcatgaggtcacaatgaattcttccagcagcaatggagtggctcaaagatcaatgtcaatacacaatgggactggttgggttgcttgaatcccagtagtttgcagtacccgctttcctagtttataataagtagtatggttgaagagatactagatgctactttctatttagtatttgtttctgcgtgtagctttaatttgcttgcttatgattttagttgatctggatttgtttgttcttgcagcatttaagctatagtatcatatttcaccttatatgatggtttgatgtagtttattatctgtgttgtctttttattggtgtgtgaattttatttcttgtctgtgttcacttttgattacacagtttggcagtaagaaatcttattgtgtaggctcattaaattgccatgacaaatagaaatatgaagatgtagtcaaggtatttactgataacagtggacacttggttgaacacttcgtattgggtagcataatggtagtcatagtaaaaactttgaggatggcataatcattttccccctgtatttgcacttgtgttgtacaggaggagaggtgcacgagtgttgaagtggagccaagtgtccactcattgctaaggaatgaactttggtcagtcagtattgtgtttttctggaccaatgcgtcgccaaatttggagattcctggcttttcatgtgataaaatcccataactttcaatctggtgtgtggtggctgacagaaattgtgagggttagcagcgcattgtctatgacatgttagaagtttatcctaattttaggtctccagttgattgatacttctgattctggcacgtgtgtttgaatattcatgctccaagtaattccttgtctggaacatcttttaatgtgataagcaagatttttaagttgatgccaaaaaagccttctcaagagaggatcaacaaatttctgtcacttccagaggtggaaattccaattctggcatgaattctgaaaatggaggaaacatcaagactaaaaagatatttgttggaaggttgccctccaacctgactgaagaaaaa

SEQ ID NO: 142644 - DNA, 305 bp, Glycine max
  Clone ID: PAT_MRT3847_99822C.1
accttggggttgatttatgtgcttgtttagtgcctgctggtcggagacgtcctagacgggaggttggtataaaccggttatgcgccaaccctccgacggtcggcgatctagacccccatgccggtgtaccgggcctccttcggcttccctccacagacggaacgagaaacatcggctgacaggcaacggtcgggcccccgagcgccgaccaagctcgaccccggcacagagccatatgcccgcaaaccacactactagcgctcaggtcgctacagtcacacgacctctcgtgcgcacaaccaccg

SEQ ID NO: 142645 - DNA, 228 bp, Glycine max
  Clone ID: PAT_MRT3847_99823C.1
attttcgggtcagacccatcgcgtccttttttctctgtggagcggacgcagtgggtaaatatatcggaacgtttctataaacgtagttgtttacatataaacacttgactcactatctatctatcaatctatatctccgagttaagccgaaccatattactaagctatggcagagctccataccaaggttgaacctgtaacaggtcccggatacggtggaacccgagc

SEQ ID NO: 142646 - DNA, 1647 bp, Glycine max
  Clone ID: PAT_MRT3847_99824C.1
ccacgcgtccggctgttttgtagccgttgtctgccttcaaaataaaacaaaaactactcatttcccacaacacaaccttcactcacgttttttggtccggattcttctgccgtctattctgaagcgtggtttttaaagcatatgcctttatagtcaaccactccaatagaacacaatgagtgctgcttctttgctattctcctgctctatgcatgtgggtgtatctcatcccaaggtggctgcaaaaccctctccatgctgtttgctcaatcagccatggaatcatttaaagtcaaaaacaccatttgggcattcaggagtctttgaaaaatctaaactttcgcataaaggtgatgagattctgtggagggcgggggcccttcaagttgaaagtgcaccctccttctctatgggccaaaaatttcaccttcatgatgtgattgaggctcagcaatttgacagagagactctcaatgccatatttgaagttgcaaggagcatggagagcattgaaagcaagtcatcaaggagccaaatgctaaagggttacctcatggctactttgttttatgagccatccactagaactaggctttcatttgagtctgccatgaaaagattaggtggggatgttctcacaactgagaatgcaagggagttttcgtctgctgctaaaggagagacgcttgaagatactataagaacggttgaaggttacactgatataattgtgatgaggcactttgaaagtggtgctgccaaaagagcagcaacaactgctagcattcctgtaatcaatgcaggggatggccctggacagcatccctcacaggcactgctagatgtttataccattgaaagagagatagggaaactggacggaattagagttgggcttgtgggagaccttgctaatgggagaacagttcgctcacttgcatacttactagccaagtatcaggatgtgaaaatttattttgtctctcctaacgtggttaaaatgaaggatgacataaaagactatctgacatcaaagggagtggagtgggaagaaagtgctgatttgatggaagttgcttctaagtgcgatgtggtttatcaaactcgcattcagaaagaaagatttagagagaaaattgaactttatgaggaggcaagaggcaagtatattgtaaatcaagatgttctagatgcgatgcaaaaacatgctgtggttatgcacccacttccaagacttgacgagatcacagtggaagttgatagagatccaagagctgcttactttaggcaggcaaagaatggtctatatattaggatggctctcttaaaggtattgcttcttggttggtaaggatgcattcacttttcgaagtgaatctgatgatctaatgtcaaaaaatttcagttgttttctttgtttcctttccttgccttttagcatgtttggtatcatgttgacgtaatttcacagttagatcagagctggtaggtattgcttctgcatcttctggtaaatggacgtggttgcccatgtatctactgtgtttccaaacatagttaggcgtcacaaatacagtgagagggagaaataaaattttctttttacatgagtaaaatttccttgaaaagcaagttttttcccccccc

SEQ ID NO: 142647 - DNA, 674 bp, Glycine max
  unsure (1)..(674): unsure at all n locations
  Clone ID: PAT_MRT3847_99825C.1
caaccttatagattgctccacagttttaatatatggtgaacgtaatccagtcaaaatataaatgtcttatctcaactacatgattcccttaagatggatacacttacagatattataatgctaatcaatgttgtgatagtgattaaagaataaaaattaaataattagtgaaaaatatttattcagaactccaatattaaggcaattgcaaattaataataatatagagtacaaattataaaaatcttatctcagatgcatgattcatgccttgagtgggctaaaataacagatattataatgttttttctttaagaaaacagatattataatgctaaccaatgctttttttttattctaatgctaatcaatgctaacagtgattaaagaaataaataccaaatatatttagtaaaaaatatttattcagaatttcttattaagtctagttagcatgatccatctaatgcaattatgtacccaaaaaaaattaaatgtgccaaaaaaaataatccatcaatgcaattgcaccaataaaaataaaatggccccctttgtcctttactgatgaggctacctcacagtggtgattttggttattgctctagacactttccttccagctcctgnattctttttcttctttttttctttttctttaatggctaatctga

SEQ ID NO: 142648 - DNA, 855 bp, Glycine max
  unsure (1)..(855): unsure at all n locations
  Clone ID: PAT_MRT3847_99826C.1
cncnnnnnnaccctgtcctttgtttctacaacgctgtgcttacactgtaattgctctcccccgcccgcttttttcacctgttttagctcccctggcaccctatattatttgtggccgctgatctgaggaatgcgggctgacagggtgcccatgtgggactcgcacgttgaggaactcactcagcatctgactatctgggacattgctccttaatcaatcaaactacccatacaagcaaaaaactaactactactattactcacctctaccaagggaaaaatgcacaatgacacaatccaatgattatacaagtcagaatttacattgtaatttctcagatccacccaaattaaacacctaattaagctagcatggcaacatatataatttgttggaacaaatattaagaaataagtaaaacaaaaaaaaacttaattattccaaaggatcaaagtactctaaaaataaataaacataagcatggcaatgcaaatatcttgcaagttgaatttaatctacctctctaattttcctttcttaattgggaaaagaggaggcaaggcactgcttttgacctgtgtgcaaattggcacgttaatcattggtctaattctaatagtagctgaccttgctctctccaaccctttctttaccctcttcacatgctgctgtctttgttactactccttgacccttctttcccttctttggcagccacatcaccaagtgagcttgcagaagaggaagaagatgaggaagaagaagagggtgacaaagaagaagcacgttgcttcttcaacctcaacacccctttccatagaacagtgcactttggtggccttggagatgggtcat

SEQ ID NO: 142649 - DNA, 482 bp, Glycine max
  Clone ID: PAT_MRT3847_99827C.1
ggaaaatcaaaagggaatccccccacaaattttcttttaccctaaaataggccaccccggtgaaaaaagtaaatttcccataagtttaccatgaaaaatatccctgggaatttcaggggggtcttcattttgacttgaatgaaattgctcatcaccccccaactcaatccccaaaaaaaatagagcgagcgagcgacttaccccaaaaggaaggcaacgggggcaacaaaaattgacatcccctttactttacaaacaattgagtgaccaaatggaattgctttccccaagggcaaaatcaaaaccatcttttcactgggagtctacccgggtgtaatttgctgaaaaaacggaccctggcatcggttggcggcatcatcattttttcaaaaatatgaatcaaaaatctaatgggggcaggccccccaacaggccaaaaatttgtgggaacccaagaaaactttctccccggataatttttc

SEQ ID NO: 142650 - DNA, 1123 bp, Glycine max
  Clone ID: PAT_MRT3847_99828C.1
ggggagctcgagccgaatcggctcgagtacggctgcgagaagacgacagaagggtcacttatgaagagagactcaagaaaggattcttcaaatggaggactctctgatgcaccagatgtttctgatgttcgtagcagcatgattggagaaattgaaaaccgttcatcacatttgcttgccataaaggcagatattgaaactcagggagaatttgtgaattcattgattagagaggtgaacaatgcagtttatcagaacatagatgatgtagtggcatttgtgaagtggctggatgatgaactttgcttccttgtggatgagagggctgtccttaagcattttgattggccagagaagaaagctgacacattaagagaagcagcatttggctatcaagatttgaaaaaattagaatctgaagtttcctcttacaaggatgatcccaggctaccttgtgacattgttctaaagaaaatggttgcattgtcagaaaagatggagcgtacagtatataaccttcttcgcacaagagattcattaatgcgtcattgcaaggagtttaaaattccaatagaatggatgcttgataatggaattattggcaagataaagctaagctcagttaaattggctaaaaagtatatgaaaagggttgctatggaacttcaagcaaagtcagcattagaaaaagatcctgcaatggattacatgcttctccaaggagtgagatttgcttttagaatccatcagtttgcaggagggtttgatgcagaaacaatgcatgcattcgaggagcttcgcaatctggcctctcttcttaacaaaacatgagcgaatgatggttgatgatggatttcagcttaccatctcagtaagccatatattaacctgttcatagttgcaaaagattggtttggtctgtgattgcattacattttggtagtgaaaaataggcaagattttgttatatgtacaaacccggtctttttttctgagatcagttgttgctaaaaatagcatagcaacttcaaaatcaaattatgttgtgtaactcagtacaactgagaaaatataatatattattatttggtagagtgaaatcctccagcactagatttgattt

SEQ ID NO: 142651 - DNA, 298 bp, Glycine max
  unsure (1)..(298): unsure at all n locations
  Clone ID: PAT_MRT3847_99829C.1
accacatctgaatcaatgccttcagatttgaattgatcatcagaaaagaggtcttcaggctctggaagaaggatttcatcaaatgctttctgcaccagctcaattgcatccttattttcctcatccatatcctgatctgtatcacaatcatcacgacaagagttgttcacttcattagttgcaaagaaatcttgctctcttttttctttgtccttccatcaaatngctgcttattttcacctgtgttactcaatacagcatgcttatacatcaactgccacattttgacaaattttta

SEQ ID NO: 142652 - DNA, 628 bp, Glycine max
  Clone ID: PAT_MRT3847_9982C.1
tttttgaaacaaacaccaacatctcaaacgaatgtaaaacttgaactaaaacaactataacatcaatttctgtgtgactgactaccatcatcacaacaaccgccatcactatctgtttgaacatatggcaactactattctaatcatatatatatatatatatttttttaagggttctccgtacctcttcatactcaacccaacgtcatcattgaatattctgatctacttcacaagcacaaaagataaaaagaagtacaaccacaaaaaaaaatgttcagattatatatgaacataaactatgaatgagggaaattataattatcaaactagaaatcaacctcaaaggttcgacaaacgcagaaccttgatttgcggacatatcagactctagtgaccactcggatctgaaattagggtttgacccatatagagattgcactccttttatgtcatcaatgttcaaatcagccctcttatctctaggcctcaaacttggatacataacagcctctttcaccgaactatgagacaaccccagcaagtgtccaatctcatgtgtggccaccgactccaagtccaccgccaccctctgacgtggtcgacccggaagtccaccgcccacgtc

SEQ ID NO: 142653 - DNA, 537 bp, Glycine max
  Clone ID: PAT_MRT3847_99830C.1
tccgattcaaatatgagcagattgcaagatattggaagtcaccatcatgggttgctattccttttatctttcatgcatatagattgcaccaaatacatcgagcagcaaaatttctaacagttatatcatttcaagttaagaaggggtatagcaaactgcctgtagccaggggttctttgtcaacaactacaaatgcctttcgtatccttattgtgatttggatttggtctttctcaagcttcctcatgagattcctaacttctgcttctgcttctacaactaagcagtgatgcctagatgatgtaaggtttgttcacaatatcatctcactgttcaaaacagaccccgggtcatctttgggccgaatatttctatatgtactttgtctttgggggcttttttgggggtgtgataaaaactagacaatctgattaggcgcggaccccctaacaagtctaaaactaaaaattgggggggctagaacttgtaaatggggttttaaatccagaaaaagcaaatgaagggatattgtttgcc

SEQ ID NO: 142654 - DNA, 289 bp, Glycine max
  unsure (1)..(289): unsure at all n locations
  Clone ID: PAT_MRT3847_99831C.1
cgttaaagtggaaagtgaaggaaaaggttggaataaatgaagcctcaactcaacgttgctgttgctcttgttattagcttgctnctgtattcagcactcattttgtgatgaaccttctgatactggactaaacaagtggaaatgtagatgctcttcattacaagggaacaagatatactctcttgctaattgttccaagtcatgtgattgccatccagatgctgaagagaatgcatccatatggacatgcgatgtgcatccaaacgggtttcnaaagtgacagcagatg

SEQ ID NO: 142655 - DNA, 1460 bp, Glycine max
  Clone ID: PAT_MRT3847_99832C.1
gatacttcattcattttatcgctcgcagctgaaaagaaactcaactctactctgcaactcattcctaggatttctacacctcgacgaatcctaggtacttcagaaattttgaatgaatggagatgacaatgtcagcagcaacttgttccaacatgactagattcagtggcattctccggacaacatgtgtatcatcatctcccaagaggaagcatgcaaaaggaatcttgagaaattttaccatatgtgcctcaccatttatatcttcagttgaccctataattgttaattccccttcctttcaagttttggcttccaatctttcgcttgccgatgtcccccaacggtcagaggagtggtttgcccttcgcaaggacaaacttactaccagcacatttggcactgcgttgggcttctggaaagggagtcgtcgccctgagctctggcaagagaaagtgtttgcatcagaggcacaaatcatgggagcaaataatgccatggcatggggaacactcaaagaagcagtagctgtagaacaatataaaaagatcacaggtaatgaggtgagctcaatggggtttgcagttcattcaaagcagtcttgtgattggcttggtgcctcccctgacggtgttcttgggtgccccccacaacttgggatactggaagtcaagtgtccatataacaagggcaaacctgaggctggcttgccttggtcgaaaatgcctttctactacatgcctcaagttcagggccagatggaaataatggattgtgaatgggttgatttgtattgttggacgccaaacggaagtactatatttcgcgtgcttagggagcgtgagtattggaacttgatacatgatatgctacgcgagttttggtgggaaaatgtggttccggcaagggaagctctacttctgggtcgtgaagaagaggtgaaatcatataagcctgcatctactcaccaaaagacaggggtagcaattgctaaaagtataaaattagctcaggaaacaaagctattttgcagagaacttgcaggccatgttgaattttatagctgattagagttcactatgcattcattttgtatccaaaacattttcatttcccaatttgttagttgctttctgagacggatttggtgctttagctactgcctttggcgccctattgtattcaaagctaacagcatttgtacagtgttcttcaaagctaactggcattttacactcttaaaaaaaaaaaaaaaaaaaaaaaaaaaaaaaaaaaaaaaaaaaaaaaaaaaaaaaaaaaaaaaaaaaaaaaaaaaaaaaaaaaaaaaaaaaaaaaaaaaaaaaaaaaaaaaaaaaaaaaaaaaaaaaaaaaaaaaaaaaaaaaaaggggggcccctttaaaagaaccaagttttaggacccgggggggggaaggataaattttttttttggggccccaaa

SEQ ID NO: 142656 - DNA, 1081 bp, Glycine max
  Clone ID: PAT_MRT3847_99833C.1
tttctcctccttgctccctcgcgtcgcgcgaactgtgcttgatcatttttttcttttccgtccttggcaatgtcatccctagaagacaaatgcctatcataaccatctccagcattatcttgatgcttgtcaccatcactatagtcgtccctcttcttccttgttcgcctctcaagctgattatcaggttcagggccttgcaactcatcaattttctttgaatcattaatttcaaagacctgcttggatacacgctgctcttgctcatcaaccgattcctcactcctaccaccttctttaaatttcctctctttctccttctccgccgccgctcgcaccctccctgcctcgccccgatgccgaatccctatgcttcccatcccctttcccgctactcttcttcacctcctcgccctcgccgtacactcccacgctcccgtccctcctcctgctcttcgaatcccccgccgtcttcgacttcttcgatccctcctcgccgccattccaccggtctcccccgccgccgccggtccttgcgccgcttcgacgacgacgcgtactcgtcggaatactccccgttcccgtgcgcgtccttcgaatccggcctccgcttctccgcggaactcgaatccttcttcgcgccgccgccgcccgctctcctccttgctcctccgatccttggcgccggaatctcgctcggagtcggagtgctccctcgcgtcacgtgaactgtgcttgctcgatttgtgctttgaactgtgtggcatcacgaaagcgagacgcggaacaacaaaaccctactcggcgaattcgaatcgggagaagtttggtgaatcaaaaagggaaaccctaatttggaaggaaacgagtaacaaagaacaaaaccctacccgactctctctctctcgattgatttagtcagagacgggtgtctttatgtgaacttgggaagggtgtatttttcgaatttacgggattatccaagaagtagaaatggagggcgggtaggtttaaatgggaaacagcgcgtggtttggcttaagaggttgaggagacgaaaagcgaagactctctttttcgg

SEQ ID NO: 142657 - DNA, 447 bp, Glycine max
  Clone ID: PAT_MRT3847_99834C.1
aattcgagcggccgctttttttttttttttttttttttttttttagggatttaattgagagaattatggaaaacgataccaaattgggaaatattaaccaccactgtcttcattttttagtatccataaaacaaagatcgaaaggatactacccctcatgctcaggcatattgaacaagaaaagaaggggaaaatgaagtgttatcgcattttatgaacaattaggagtctcaattttgtttcagagtgaaacttgtgtcatctttgctcaattagtatcggtatctaacagtaacatgggccattatatacgtgacaggcatcctttctctattacctcagcccctggcgatgactacctgagtgttcacattcggcaactgggtgattggacacaggaacttaaaagagtgttctctgaggcctgtgagccacctgtgtcaggga

SEQ ID NO: 142658 - DNA, 371 bp, Glycine max
  unsure (1)..(371): unsure at all n locations
  Clone ID: PAT_MRT3847_99835C.1
tcggacttttttaaagcnccaaagngccgctccgcgcagttacaattttatgccctaatgttctcgcagaccatgagaatcccccagtgaacaagcccaccactgagaaaccaccatgttttaagcccacagatgagaagcacacagtgacaaacctgcaggtgaaaacccccctatctgtaagcacccagttgagaagccaccagggtacaagcccccacttgagaaagccccccagtacaagcctctacacgataaaccaccaggactcaagcccccagaagacaaaccacccatgtgcaagccctcagtcgaaaaacccacaccttacaagctgccgcattgaaaaacccaccatgtacaacccccca

SEQ ID NO: 142659 - DNA, 248 bp, Glycine max
  Clone ID: PAT_MRT3847_99836C.1
ggagttagggtgcgttgcaagcagtgacatctggcctttggcgactagatgaccatgccacttccccatcggccgttattcatagacagatactggaaagtgcccgtcctcaagaatcggatttcgattatcaacccttacaccctacacctaatcatggatatcccatttcctactaatgaagacgtagatctcgctgtcgctgtcgccaaagctgaactttccctcttcaaggacacgggttgggc

SEQ ID NO: 142660 - DNA, 586 bp, Glycine max
  Clone ID: PAT_MRT3847_99837C.1
ccccgcgtgcgaaaattggataagtcacgcgcggagccatatacgagtgatcctaaattataccctatctaggagaggagggtttaaagacagtgaagtattgctacttcctctaacattaaacaacgagctaaaagggggtatgaaaatatctatacgatatatagtagataaataatatgtatagcatctcgtttacaaagataaaccccatgtcggcaagaagcacggatcattaaatgtatagcatgtggggaaatatggcacaaacaatagccccgcttgagtacagactggggacaactcaaacacatgattatatttggttggatcaaccaacaaatgatgtcagcgaatatacaagaagataaaaaactcaagattgtatcaaatgttatatccaagacattatataaatatactctggagttgagggaattggacagatcaagattccaaaaagaatggatcttattcaagttataatacatatgggatctccaagtttttaattaagggtaagtctccaaaaatcgctgaattacagacgagtatgcgttgtgtcggaagttactgagcttacaac

SEQ ID NO: 142661 - DNA, 506 bp, Glycine max
  Clone ID: PAT_MRT3847_99838C.1
aaatgacaatattgatctactgtgataatgatttgttgcctttgcttggagcaggtaaagcttttccaaacaagattgtttttgatgataagcttgtgttggctaacacacaagaattctttgatggaaattttccagtggattcttggttaccaatttttgtgaattgtctttatcctgtaagtcaattacctccagaagctgttgttgtaaatgttacatgtggtagtggacagtggtgggttacccaccactgcttggattagttgtgcagttaacaatcgctcctcagatatcaacaaagagatgctcacagcacttgtgaaaggttagaaagtagtttttattactagagcagacccgttttcagtagcaatactggcttgtctttttggcgtgaaaaaagaaattcttagatgtaacgccactaactctatgctgacacgactttttggaactgttagagtcttaaaatctggttgtgagaggcctttgtatttgtgaac

SEQ ID NO: 142662 - DNA, 1977 bp, Glycine max
  Clone ID: PAT_MRT3847_99839C.1
ggctggagctcaagtcgagaatatgatggttgtgtcatttgcagagccttctaaagggattacagatattcgtttatcttgtttcctagatcttaggcccctgtcatttgcagactcatctctctggatcgctgatattcattgatctactttgaaagggatttggtagtgaagacatcattgagagtgatttgttatttgctttttaaccgtactatttataacctgagggaagcaagggaaaaaaggaccagaatgagtagttacacaggtgccaaagaaaagagtgggcatttgtgctgattgatggattggctgatgtgtcactgccaaggcttggatacaagactcctcttcaggctgcaaaactgcccaacttggatgccatagcatctgctggagttaatggactaatggaccctgttgaggttggcttagcttgtggaagtgacactgctcatctttccttgatgggttatgatcctagagtttattatcgtggccgaggagcatttgaatccatgggggcaggattggccatgtcacctggtgatattgcttttaagtcaaactttgcaactctcgatgagaaaactggaatagtcaccagtaggagagctgacaggcactttgaagaagaaggccccatcctttgtgctgccctagatggattgaagctgccatctttccctcaatatgaagtcagagtcaggtatgcaacagaacatagatgtggagtagttgttaaggctcgaaatctgagtggaaatatatcaggaacagacccattgaaggacaaccgcttacttttgaaagcagaagctttagatgattctcatgaagcaaggaacactgctgctgttgttaacgagctgtccaaggaaataacaaaaattttggtttctcatcctgtgaatgctaaacgtgctgcagaagggaagaacatagcaaatgtagtccttttaagaggctgtggcattcgaattgaggttacaccatttataaatagacatggtttgcggccatgcatggtagctccaacgaaaataattgctggcctgggcttatcacttggtattgatattctagatgctcctggagcaactggggactatcgaactttactaacatcaaaagcatcagcaatagctaaggcactctcagctcctttacagtcctgtcccaaagtttttgtacctggagaggatgagcttaaagcaggccggtcagatggctatgactttggatttcttcatattaaggcaatagatgatgctggccatgacaaggcgagcatcctcaaagtcaaagcattagaagctgtagataaagccttgggacagttggcaaggcttctatgggaggcagaatcaacaggaaagtttcagtttttcctttgtgtcacaggagatcactctactccagtagaatatggagatcatagctttgaatcggtcccgttcacaatttgccggttgaaagactttgttggtgcaattggggaatccactatttccaaatcttctcttgacccatttcctattccaagtgttaagtcgggtgaagacttgcttgatgatctggaaacagaagagagaagacaaatgctgtgaagcttatagtggtgattcggtttatgagctaaatgaagtggcagctgcaaagggatgtctggggcgtttccctgggggagaaatgatgggaattataaagaaattccttaacttagatgcgggaactgcttagctaggaagagggagtgttatggcagttaatatttttcttttctcactctgaaatcaagtgatttcaaggtacaaaaatcaaattttgattttctgtactatttgtagaataagaagccttgttctgaaaataacaatgtaaactcaacttaaataaatttttctctgttgtttttgcactctcgtaggagagtcctaaagcttgatatgaattcaaaaaaaacattctatt

SEQ ID NO: 142663 - DNA, 339 bp, Glycine max
  Clone ID: PAT_MRT3847_9983C.1
acagaagggaggccggcgcacagggaaagcaccccagcgagcgagcaagaggcgaccagcacagagaggacagccagcctcgcacacgacagccccgagagggcgacagcacaacgaccgagacctaggccaaggcgaaaaagaagcaaggccccggggacacccaagagagaaagagagcgggcggagcaaacagcaaaccacccagagacccgacgcccagagcctcagagaagcccacgccagaccccgagcacaaaaggcaacagcagcccaaagaccgggccgcgcacccagcccaaacgagggcacacacaccaagggacgaccagcccccag

SEQ ID NO: 142664 - DNA, 844 bp, Glycine max
  Clone ID: PAT_MRT3847_99840C.1
tacttttgcgagaagacgacagaaggggagtgagattgtggcaatggtttgtgcaatctcgtcatcaccgttctcaactctctcgtttcggcgtctcgtcgtacgcaatgcgacgccgtctccgtgcaagccgcgtgccgttaaacccttaacggcacttccgagcgcggggcggaggcagttgctgttttttctgacggcgacgacggcgttgacggcgagggaagcggcgtccgtggcgcaggacattcccttgttcgggatacggaagagtctgaagaaggtggaggaggaagcggaggagattgtgagagagggatttgaggctgcggataagggattggtggcggcggagaaggggctggagacggcggagaaggggttggtggcggcggagaaggggatagaggaagcggagagggagatagaggagacggtgagttttggggggttggcgcaggcgggagcggtggcgggagcggaggtttttgggattttggttgcaacggctgtggtaagctgaattttgggtcctgaagctcaaaaatcgtgactcgtgagttggtcataactcataagtaattatcagtacattgttggtgtccatcgatatcgtagtgttaagtggtcaattggatatcgtttttggtggaagtttgatccagtcacttttgtaagaatgttcgcgatcatatcatgtaaacgaatcaatgcatctagaatctaatagccttgttcctatgtaaaaaaccaatagcattacgacaaatctttttgtttgttgactatcagatcacggattcactaattgtatgatcgtatagatgataatttactaaaaaaa

SEQ ID NO: 142665 - DNA, 461 bp, Glycine max
  Clone ID: PAT_MRT3847_99841C.1
gaggagagggcgcccacgcatccgtacggctgcgagaagacgacagaagggcacagaatcaatgctcagtattatcaacaagaatctgtttctgaacagaaatacagatgctgcaaatctaacaggcacctgatggttcgtggtgagcagggtgactgagaaggaactgaagcagcaggagaatagactccaaagaggaggcgctagaggcagatctaagatcatgagatgctatgggctgaaattgaatactttcagaaaagggagattgagctggaaaatgaaaatctttgcctccggactaagataactgacgttgagaggattcagcaagtaaacatgggttctggaccagaactgaatgtcattcaggcattagcttcccgtaacttcttcaatccaaacatgttggacgggggaactgtttaccctcagacagataagaagattcttcatcttgg

SEQ ID NO: 142666 - DNA, 419 bp, Glycine max
  Clone ID: PAT_MRT3847_99842C.1
tgattttaagattatgtatatttgagtacgaagataaaacaaattttcaattcgatcatggacgtttagggattaagttcatatctagagcatcctcaaaaaggcgaaacacatcataaccaacaaagaacaggttagctgagtcattagttcgtttcagtaacttcattattcatccttcaactgagtcattagtgcatttcagtaacttcattattcatccttcaactgagtcatccacctcaaaaaccttcctcagtttctcttcgtctgattcaaaaacctttcttgcttgtttcagctcttcattcatagaaagtagttctgtacagccggtaagttttggcgaatcctgcagtatataatggatcttagacaaacaacaaaagattatcatgaaacggaaaacaaaatatgat

SEQ ID NO: 142667 - DNA, 181 bp, Glycine max
  Clone ID: PAT_MRT3847_99843C.1
ttcactgacgaaatcatagcaagctcactaattggactgggctgtccatgccttcataatctccattgtttgtgtacagaataccacccatattcacactcacatgtgcttctcatactttagcgacttaattcactacatcatctacatggacgcccatgttctcaccattgataactct

SEQ ID NO: 142668 - DNA, 434 bp, Glycine max
  Clone ID: PAT_MRT3847_99844C.1
cgcacgggtccagttagttggtttttctagcacaagatggcttctagggttcttcttcttgcgcttcttggtgcccttgtttgcaccattgatgcaaggaagcttgggagtgaaaagggttcgtttagggatgagaagaacttcttccatcgtccagggtttggaggaggtgtaggaggaggaggtggaggcgggtttggtggtggcggaggaggagggttaggtggtggtgcaggaggagggtttggtggtggtggagccggaagaaggtttggcggcggtggcggtggaagatttggcggcggcggaggagttggtggaagatcaaggtttggaggaagagccgggtttggcggtggagccggtgctggtggcggacttggaagatgtggtggaagaaggtttggaggtggcaatggcggtggacccggcgg

SEQ ID NO: 142669 - DNA, 280 bp, Glycine max
  Clone ID: PAT_MRT3847_99845C.1
ctttgaaattcacagctggtatctgcgacatgtttgggcgctagatagactagcttgcatgtcccaatttggattattctaacctagacatctgaactaaaccttcacttcaacaccaacaccaacaccccttcctcgtcacagcaccattctataaaactcctcagttgcttgtgctacttgcttgttctactttcgcctacaaccacacctactgattcgagccacaaaacaccctttttcataaatactaactttcacataccatcaaaaaagatga

SEQ ID NO: 142670 - DNA, 184 bp, Glycine max
  Clone ID: PAT_MRT3847_99846C.1
ggcagcagctatttccatggctctatcatcctcatacggggctggcgaggccgggaagctgggccgatcaaccccatacgtgggaagggtgagcatgaggaaaaccgtcgccaatcaggtctcctaaggaagcctatggtacggcccataccgagtcaagtacttgggcgcattgtctggcgag

SEQ ID NO: 142671 - DNA, 271 bp, Glycine max
  Clone ID: PAT_MRT3847_99847C.1
ggggaaacaattcattcaccttggggaaaggattttggcccccaatttaacttatcaccccctgaaacaaatataacattagggggtatgcaaaggaattactagttacctttggaaaaaaagcccaaaaaaaacactctttcctttcacagggggggattatagctaccccactatggtattacttggcccctcaaaaaaaaaaaattcattccctttgagcttaagatgggggggaaaaaacattcatcaatctgtttcaagggcaggg

SEQ ID NO: 142672 - DNA, 277 bp, Glycine max
  Clone ID: PAT_MRT3847_99848C.1
tcggtgaattccaattccacattttcaaaaaatataagagccaaaatgggcgtgttttaatttgaaataattcgtttcttaataaaccctttcttgaacccaaagaaaataaaaccgaaatccccggggaatttccatttcacattttcaaaaaataaagaagcaaaaattttcatatattaattggaaatatttggtttcttattaagcctattcttaaacccaaagaaattaaatccgaatttcttcgggaaatcccattccacatttttaaaaa

SEQ ID NO: 142673 - DNA, 271 bp, Glycine max
  Clone ID: PAT_MRT3847_99849C.1
accagtttcaccgcacgaatatcttgttgtttggagcgatccgagaaaaactctgtaaacatgttggtttaccaggacctccttacaggtaaactaaactaatctctatttctttcgtcgtagcttttgcttgtagatctattgccatcggttttggtttcgcttctgtgtttagatctgtatcgattgcgcctctgattttgattttagagtattgaactttcgtcgatgtttggatctggcatttttttcgatgtaatttgattcattg

SEQ ID NO: 142674 - DNA, 220 bp, Glycine max
  Clone ID: PAT_MRT3847_9984C.1
gaatatcttaaaaatttaaagatccaactgaagtaaaaagatagaagaggagaaaaaaaataaggctgaaaagaaagaaaccaataaataatggcaacaaaatggataagaacacatacatcatccttcacctatataatttacaccttcagatggggtagtaaaataacaaggataagagaccatgtactccactacattctgagcagccgggtttgtc

SEQ ID NO: 142675 - DNA, 626 bp, Glycine max
  Clone ID: PAT_MRT3847_99850C.1
acgagcccttctccaacatgccaaacgacagcgttctgagtcttttcttcttcgttaccctcttcacatgccttctctctgctacttcccacgatgaccatattttcctaccgagtcaactccatgacgatgactcagtgagttgcactgcaaccgacccaagccttaactacaagccggtgatcggaatcctgacccaccccggcgacggtgcctctggccggctcaacaacgccaccggggtttcttacatcgccgcctcctacattaaattcatggagtccggtggtgctagagttattccccttatctacaatgagtcacctgagaaccttaacaagaagctcgatttggtcaatggagtactcttcactggtgggtggactgtttctggtccatattgtaatactcttagaaacattgttaagaaagctttataaaaaaataatactagaaaccatgtcccagtgattaccttcaactgtaatagaaacctcgtgataaagatcttaagcgaacagactgatattcttgaaccatgtactacgtcgaatttgcgcaattctcttatatgttataaaaaaacagatgctaaaataagtctatgtcagagatgtgcttcagat

SEQ ID NO: 142676 - DNA, 597 bp, Glycine max
  Clone ID: PAT_MRT3847_99851C.1
ctagttctagatcgcgagcggccgctcgcgatctagaaccttcccttctccaacatgccaaacgacagcgttctgagtcttttcttcttcgttaccctcttcacatgccttctctctgctaattcccacgatgaccatattttcctaccgagtcaactccatgacgatgactcagtgagttgcactgctaccgacccaaaccttaactacaagccggtgatcggaatcctgacccaccccggcgacggtgcctctggccggctcagcaacgccaccggggtttcttacatcgccgcctcctacgttaaattcgtggagtccggtggtgctagagttattccccttatctacaatgagtcacctgagaaccttaacaagaagctcgatttggtcaatggagtgctcttcactggtgggtgggctgtttctggtccatatttggcaactctaggaaacatctttaggagagcattacagaaacatgatgcctgagaccattcaccagtcatcgcctgcaacttacgtggaatactgcaaattatgatcggcagcgagcgaactcgtatccttgtaccattgtctgtcgtccagttacca

SEQ ID NO: 142677 - DNA, 442 bp, Glycine max
  Clone ID: PAT_MRT3847_99852C.1
atctcgatcgaactgtccaaggtcctgtcacaacacgggcagttgcctgtacaaccaatctgactgagagctggaatatagctaacgtcaatcggcggggtcccactgccctacaaccaaaacacctgttgactcgcaaccggctggcgtgtctttcccacgcccaatacggcaaaataaacgcctcaatcccgcgtgaagcttgcccaagtgcttcaatacggtcccttaaagttgcaacaacgtgaaaacgtctgcgggcagcacttgcgtcgacgaggaccgacggccagtaccgaaaccgtgcattaacgttaacgagcgtggagtgcgcgtggggtcgagcaagtacgttatatgcccatgcacatatcgtttccatgtttatcccccgtactacgccccaagtggccataacccgtcaaactttcagttactaaga

SEQ ID NO: 142678 - DNA, 364 bp, Glycine max
  unsure (1)..(364): unsure at all n locations
  Clone ID: PAT_MRT3847_99853C.1
tggaaataaaaaagctaccaatttcncttataagctacatgtacatagccttctgttacctataggaagaccttaaacctgggctttctgtttttttgacacatactacagaatgatgtagtcattgaccacctaactttagtaacgttaatcatacaaatctacctttgagctcctaattaacctaattaagagataaatcttgactcccatcttgatttaggctgattgggagactgctgcaaataagtgaggcccttgaccattgtgtctgtaataactgattgtggttacctgataacttcatagggggacctttgccccaacccatctctgaaagccttaggacgaatgacatgtgaca

SEQ ID NO: 142679 - DNA, 1471 bp, Glycine max
  unsure (1)..(1471): unsure at all n locations
  Clone ID: PAT_MRT3847_99854C.1
ctcgagccgcggctcgagctcgagccgcttcccttctccaacatgccaaacgacagcgttctgagtcttttcttcttcgttaccctcttcacatgccttctctctgctacttcccacgatgaccatattttcctaccgagtcaactccatgacgatgactcagtgagttgcactgcaaccgacccaagccttaactacaagccggtgatcggaatcctgacccaccccggcgacggtgcctctggccggctcagcaacgccaccggggtttcttacatcgccgcctcctacgttaaattcgtggagtccggtggtgctagagttattccccttatctacaatgagtcacctgagaaccttaacaagaagctcgatttggtcaatggagtgctcttcactggtgggtgggctgtttctggtccatatttggatactcttggaaacatttttaagaaagctttagagaaaaatgatgctggagaccatttcccagtaattgccttcaacttaggtggaaacctcgtaataaggatcgtaagcgagcaaactgatattcttgaaccatttactgcgtcgagtttgccaagttctcttgtattgtggaaggaagcaaatgctaaaggaagtctatttcaaagatttccttcagatttgttgacacagctgaagacagattgtctcgtcctgcacaatcatcgttatgccatatccccacgcaagcttcaatataataccaagttatctgacttttttgagattctggcaacatctgaggatagagatggaaagactttcgtttccacagcacgtggtaggaaatatcccgtgactgtcaacctatggcaaccagagaaaaatgcttttgaatgggctacatctttgaaagcccctcacacagaggatgcaattcgggttactcagtccacagcaaactttttcataagtgaagctaggaaatccacaaacacacctgatgctcaaaaagtgcgagataatctcatctacaattacaaacctacttttggtggaacggctgggaaaggatatgatcaagtgtatctctttgaataattctatctgtaggaggtgtccttgaatttgattttatgcacaataaattatgaactggggatgtagtttgaagaaataaaaatttgtgcacagtgatgtttgtaagatgcttaatttcagggcaatgctctgcttatcaatgtgttatatcttgttattgccccaaccttggtgtattcttcattttgctataattctattaattgcacggataatggccgtgatacatgtaaaaaaaaaaaaaaaaaaaaaaaaaaaaaaaaaaaaaaaaaaaaaaaaaaaaaaaaaaaaaaaaaatngggcctcaatataaaaagttttaatccttttataaagagataaatgaggcgccggcggtaaccttggaattatttttcttttttgagaagataaatttccg

SEQ ID NO: 142680 - DNA, 268 bp, Glycine max
  Clone ID: PAT_MRT3847_99855C.1
atgattacatgtaaaaacttttagggggtttatatttaggacctccaaacataaagggggagatttgtaactctgatcctctatgagagaccaattccctcatgctgtgggcacttcacaaatacatgaacaggggttccacctagccctgaattttacgggcttatataaaaactcatttttgccacactccataaaaaacccgcctggggagacaacagggggcagatacaggtgcaccctcccaactttgacccataaaccatgc

SEQ ID NO: 142681 - DNA, 250 bp, Glycine max
  Clone ID: PAT_MRT3847_99857C.1
aaaagcttaatcctgatgccatgctctacgcctaccacctatatagtcattgccaattttttccgcacaccaactaaccttcatgaaattcaacttcaaatttcggttctgccatttaaaagaaaattcttaaaaacaataccatctataaagattaaaaattatatctcaacctaataaatttttaaaatctaacacgtgtttttcttcaaaaattagattaccaaaccatacacattctaattttgag

SEQ ID NO: 142682 - DNA, 465 bp, Glycine max
  Clone ID: PAT_MRT3847_99858C.1
atggatacaaacactcttggtgttgatccaaaaaagagaaagacatcaactgtagaaaatgcctttaatttgcaagctaaagagacacttgatcatgaaattgctaggatgttttactcttcggggttgccttttcatttagcaagaaatcctcattacaggaaggcatttgcctatgctgccaacaatcatatcagtggttaccaaccttcagccaaaagggccatcgattgttcaaatgagatcaaagacaaggatttcattaccaaacatatgagggaggaagatgatgttgcaaaggctaaatttgtgaaagatactttgttggatgataaatggtgggataaggaacactcaaacccggtgacccccaacgcctacactccgaagagtccgtcagggcctttctctcctgattcaggtccaacccctaaaatcattttagcacatagacacagctcgtga

SEQ ID NO: 142683 - DNA, 333 bp, Glycine max
  Clone ID: PAT_MRT3847_99859C.1
tcgtttccgtggagctacgcgcacttggggacggagatggcgttggatcacagggagagtccgtttttaaaaggagggatgaatgatttggggtgcgcgcataacttggaggtgcatttgcacttggtggatgggtaccatgggaaggggaagaggttctgtttggcaaccaagagggacatagcgcttgtgaacaagagctgcgattttctcaagagtgagtacggtgttccctcgcattggcgccaggatgagaataaggggatggtcaggagccgagatggccgctgggttcttgccggacccgcccaatatttgaggctcaattcgcct

SEQ ID NO: 142684 - DNA, 1316 bp, Glycine max
  Clone ID: PAT_MRT3847_9985C.1
gcctgaaagtgtgcaatcaaaagattctgcagttatcttatccaaattatttgaagatgagatagttgaaaatgctaggagtctattggataactataatttaatgaaggatggcttcaagcctgtgaaaattaagtcagggcatcattggtggaagtcatcatgttatgaaaagttagagaaaattggtggttctgatttcagtgcttgggcaagtgagtatgtacctgcatatcggttagagattgacaccaagatattgggagattccaaaattggaggctggaagaagtctgcagagaaataggtgggaagttcttttgacccactctcaaatggttcagttggctgaaacactagatatatactatgtggatccttattcgctaccttataaacaattatcctgtggtgtggctgccaagtttgcaaacgtgtacaataaaaaggggaattcttttccaaaattgttgtcattcgcccttgcaagtggtatatttcttgtagcaattagtgctctgggtcaattttgtttgccttggttatgcaaggaaaggaaacactctgtagaacatagatctctaccatcatcggaagtgaatgttgcaatgaatgacttttttgatacaaaaaagttggaagagtgttgtgtgttagctattgccaaggcaaagggcacttttggctggtcaggtgaaattaaggtggaggatggtattggtgtatggattggagaattgccggcttacttgagaggtgaaggtgtcgatactctttctacttcagagaatatagatgcagatgcaaaagtgcccatacaagacattgctagttaccaggtggttttctctagcgagggaaagatagttggtttccaacctttgagtcgtgttgctgtcaatcattggtctgttaatcctttagcaagggagctatatggagggaaaaagctttctccaagtatcattgaaccaggtctcaaggtgtcccttcctgaaaaagttatcgttgtagagttattaatgtcaataaatccagatgcatattttgctctagccaggccattccggtgacccttttcttggggtaattgtaagactagaagctagttagtctcctactctactggttgattaaccaatcagaatattgtagatttaaggttatattccccctaagtgaaaattttcgggcaccaccttgagttttttatcagtttcttttttttaataggcatcctgaatattttagcacattgtttcaagatagttcataaccctttctcaatatgaatctacccggaacatcatttatgc

SEQ ID NO: 142685 - DNA, 314 bp, Glycine max
  Clone ID: PAT_MRT3847_99860C.1
cgaatatcgtattacggagatcatgcatgagtaggtaaactgcatgcgcgcattcaaagagaactttatttactacatacgatgtagatacgtgcacttgcttagaaaaatttcctgccaatctatgcttacacatctaatgatccttcacgattgacatgatctgctggacacaaggatatgctctacatggacgactaagatgtcgatattaaagatatcgatgaagctgctttaccagaaacacccgttgatacatcaattactagtgactgggtggctattgatggtgtgccacctgcaattgctgaaaa

SEQ ID NO: 142686 - DNA, 479 bp, Glycine max
  Clone ID: PAT_MRT3847_99861C.1
ggctcgagctattgtcttccaatgtcagcaattttgacctcaaatccaatgtgacaccacctctacaagtcctccaaacagctgttacccaccctgaccgattacagttcgtcctcagtggccttgacattgaggataatgaatatcgtgtatatctctacttcctagaattaaatagcactgtcaaagcaggcaaaagggtgtttgacatctatgttaatggtgagattaaaaaggagagatttgatatattggctggagggtccaactacacatacactgtcttgaatgtttcagcaaatggattacttaatctaaccttggtcaaggcctctggagctgagtttggaccccttttgaatgcttatgaggtcctgcagatgcgatcatggattgaagagaccaaccaaaaggatgtggaagggattcagaagattagagaagaattgctgttgcaaaaccaagacaatatagcacta

SEQ ID NO: 142687 - DNA, 258 bp, Glycine max
  Clone ID: PAT_MRT3847_99862C.1
gtgacccagggatgggggtctttcactgaaagggtcaaaatcgacgatatacttcccgttggcggtattagcaaaaaacatacctgtgtttaaaaatcaagtggggttttacaagccgaaagcttcgtttggtcataaagaatgcgagaacttcagctcaacaaaatcgcactagaaaaaaagctttgccaaaggataaaggtgctggatacacttataggttggacggaggggaaaatgggaaaaccttcttcacaa

SEQ ID NO: 142688 - DNA, 309 bp, Glycine max
  Clone ID: PAT_MRT3847_99863C.1
ttttgtaaagtgatagcgagaagacacacgggcctacaaccagagcaacctgacatcatgggaacccacacgggcggcacaacagtcttcaaagggcggtactgcatcaccgaaactgtcctgatgggtggcctaccagtaaaggttgaattgaaatgcaagacatgtcctatagatctctcacacgtggccctacgcgagtccgattgttgaacgccccgcaatgctgaatggtcgaccctaaacgatcatgcgtagcatcaatgcgatcagtatctggaactcctgaccctgaatcattcctactat

SEQ ID NO: 142689 - DNA, 144 bp, Glycine max
  Clone ID: PAT_MRT3847_99864C.1
ggaactgccggaatgcgactataaagggatccctccccgccctgcagattgactaactgcaaaagctacagccactatagtggctgccttgcttggaaatagccaaaaattggctatgtgtgacctatggagccctggaatggg

SEQ ID NO: 142690 - DNA, 408 bp, Glycine max
  Clone ID: PAT_MRT3847_99865C.1
ggggcttgatgattattaattcagtccctcatatttaagtgctgcatggacttataaaatttaagagttcacgcctattattggagtttatattaatattgggcgttctatctctttcacagaccattgtaccctaaatggttaaacatttttactggagactattatgttagttctatggtattgatatgtaaattatgatacttgcctacttggtttgctttggtgtagaggcagattgtcttaccagaatctcacttccttacccctatctccctttgtgcgcatttttgaatgataactttatcattatttggtttgagtgcaagtccatttggtttcttatgctcccctttcccaggtaagttaggattcttttatcaaccccttcttttaatccaacacaat

SEQ ID NO: 142691 - DNA, 645 bp, Glycine max
  unsure (1)..(645): unsure at all n locations
  Clone ID: PAT_MRT3847_99866C.1
tttttgagataaaactttatcgttgttattatatatcatgatgatggaactcaaaagtaaaaatcagattaaatatgcaagtagtgaaggtgaagtgaggggggcatggtatttaaatctaaaatattccaagtgtatctctgtaggagttgggggaaaaagtactttgctgttatgcaagtagccccaattcctctcatgtggcattacatggctcacactccccttcacataattttccttttggaaacaagaaactaaagcctaagtgctaccaatagtacattattattgttgggtcctaatctggaaaactgctcagtctctgagcatgataaaaagaactcaaagttaaattaaaaaatgactttgtcattttatacatgcaactgggcaacacagcatgggatgaaaaatgctgatttgtcttcagtctcttcccgtctgtagaaggttgctactgttggcaatcaattccggctgttctggatttggtttcgatccccgtgattttgccgttgaactcgactccttttttgtcctctcttttgtcttggccaacttgctagctgggaaatgtagtctagccatcanaggacggggtgctcgtgcttccctgtcaaacccccgcacacagacataccc

SEQ ID NO: 142692 - DNA, 565 bp, Glycine max
  Clone ID: PAT_MRT3847_99867C.1
acaaattcaaaggctagttgaccaaggttttggttatgatcttttctgttatgagtgtatttaactatgttgttcaaatttttgtttaataatcatcatctaatcaccaatacctgaataatctacattttgatctcacctcttgctctttgtttatataaatattttccttcaaactcttcattctttttcttctattcaacataatggtcgatcctcgaaatgttatttgggcacaggcgaccaggtaaattggaattaagagacttatcttaacaattacttaccatcctaaacatcaacagtgtgacaataaatctgtatgtatatatttagcaaccttttctaccttcatcatcatcattttcatcattttcatcatcatcaccatcaccatcatttcatctattccaatatcatcatcaaatacttacctctgaactggtgataccaaatatccagaagctactactactactactactacaattacaactaatctgtcacattgttaacctgtgttttggtggaaaaggagaacattatttaattgttcagtttagcg

SEQ ID NO: 142693 - DNA, 480 bp, Glycine max
  Clone ID: PAT_MRT3847_99868C.1
gtttacaaccccaaacagctaggaaagaaggtaatttggtgggtgaaaaagttagataaagagacgctcctagctactgttttatttagttggatgtttgcttctttgttgggaccctgttgtgttggttcacgtgacaaagaacgtagcaacataatctgtgagcatgcaagacatgatctgctggattgacaaactatgttagcacgaactgtttggatctattttttgaggaaatatggtttaatttcactgaatcagggcctttgatttgatgttttgaaatttgaatgcttggtttttagttacaaagacttgtctgttttaagaggtttgaatgagaaaaagtcatgccagctgagaatactggtcgttgctttctggacttgaggcgcagtgaggaagaagttgctgctgaggccactgcacaataaagttcattgctatttattaatttcacagtgcatccttatattcttt

SEQ ID NO: 142694 - DNA, 248 bp, Glycine max
  Clone ID: PAT_MRT3847_99869C.1
gaggttgaaaattttaaaggtgtggaataagactactcagtcacctggaatttcaatgccaatccttattttgaggatcctaaacttgcaaagacctataccttacttgaatatggaacacctaaagtgactgctacacccatatgctggaaagagggcttgggcatacccaatggagtctctcatgagaaaacaaggtacacgcgtacttctactgatgtcagcttctttagactgcttactgacac

SEQ ID NO: 142695 - DNA, 280 bp, Glycine max
  unsure (1)..(280): unsure at all n locations
  Clone ID: PAT_MRT3847_9986C.1
ctcgagcccctcatgcanatgaggaaaaagcagataatgacactactgaaaaattaattgctccttcttactgcgcaaagacatggtataagttcttgattgatacattctttcagaaaagatcagctgctttgaagctaaaatacaagacataaataatgacacaagagcgctgagaggggctagagttattgatgacgaagtgctcctcttgaggtcatacatagacaatccagctattactgtatgtcaaaaaaacctacgaaagcatggggatgcc

SEQ ID NO: 142696 - DNA, 794 bp, Glycine max
  unsure (1)..(794): unsure at all n locations
  Clone ID: PAT_MRT3847_99870C.1
gataaaacaagaatgccccaaattggcaccttggaaattataaatagaaatttactcgttagcccggatgcagaattctgtagtgacacgctcagctagctgtacacttgacgaaaatgggatgcagggaatttctctgtccctgngtcgcccacagccgatagctttcagcactaaacaacaaaagctgaataaagttcaaacaaccaagaatgacaatattttctttaaacttcccaacccaagcagcgatatacaaagcccaaaaaagggacgttatgcgctctcccaaacctacaaagttaataccaagatggtaaattctatttaaggaatacaacaaagtataatttatggatttctttcttaatttttttacccggttaatatactactcttctgtccttctatccaccgtttatcacataattaaaccgaaaaaaaaattaagaaaaataaaataagactaaggcatggcattactactgcgtatgtccaattcactactatcctccaatagtacaatctctttgatttcctgcaacatcttcaagacctgccacatagttggcctctgctccggtgaggtcaagctacaagttgtagccacctgaagaagcatgtccatttggttatcttcgctcccattgtcatccctgatggacctcacccaacttgacatgtcaccaggaaccatgaatgggagctcggagggaaatttccccgtcagaagctcaagcaacaaaatcccatacgcataaacatcggatttgtgggttgggtgatgattgggg

SEQ ID NO: 142697 - DNA, 138 bp, Glycine max
  Clone ID: PAT_MRT3847_99871C.1
aataaatatgacatatttgtatctgcaccagatttacttggtttagacagtgttgatggcaatgaaatggtgattaaacttttagcacatgttaagcccggaatgcattttccaggacaacgtttgcttcgtaaagag

SEQ ID NO: 142698 - DNA, 390 bp, Glycine max
  Clone ID: PAT_MRT3847_99872C.1
gcgatgttataactcggtgctaattaccaaattcttgttattgacgagagagagaaaccagacggtttttgtagttgcactgaggtgcacgctttagacccacttatttatgtatttctccctctgaatcgtccaagacatacgtgtgtgtgggagctgatctgtaaacattatagcatactatttcgggcgagactggatatgatagccaccatttttttgagttgaaaagaggcttatattttgtgagctgaaaaaaaactatgatcgaaagtttgtgcgcttgcatgactatacttgctatccaagcgtaatgagtgagatccactgcttaaaaaggacctaataagtgtaaggcaatgaaagaagaaggatttaatacatgaaaaa

SEQ ID NO: 142699 - DNA, 281 bp, Glycine max
  unsure (1)..(281): unsure at all n locations
  Clone ID: PAT_MRT3847_99873C.1
tttttaaaaaaaacacttttttcctccttataaaaatcacaacataanatatcttaaaaatgatcaattataggcaaacaattcacacttcacaagnattataccaattgttgacgggcaaaagaccataattgaaacccgcaggaatctttaacaaacacgtctctcaggcaacatgattgcgcttatatcccgccanaaccgaaaccgtcgcctgttcggtctaaaatcgcgtgatgcgggatagcactgaatgacccgatgagcctatcgacttaatg

SEQ ID NO: 142700 - DNA, 158 bp, Glycine max
  Clone ID: PAT_MRT3847_99874C.1
aatccgggggcatttgataaactgggacttacggggttaccaatagtcattaaattgcacaatttgccctacttaacgatactgaattggtttttggaagggttttgctgctatttattcttattcgaaaccatggattgtccttgcactcctaaata

SEQ ID NO: 142701 - DNA, 1358 bp, Glycine max
  Clone ID: PAT_MRT3847_99875C.1
cggaccttaccacagaaatactccgcaatggaaggactaagcatgaaggagccatacttttgtgacagaccaagttcaacacgcatcttctcttcttctgatcctccagaggctcccccaagcccaagtaccccacttcagcattcgcatgaaaagaagaaacagctatgtgttgaggaagaagaggaattagaaaaggagccaaagcaacatgttagtgttacccttttggatctgaatattatctcaggtgaagatgataattcatgcactccagaaggaccagaactcaacctcatcacttgtttggatgtggggtcatcatccaataatgctaattcttcatcagaaacaacaacacctcttggtggttcttctgatcatactgagcctagagtgttctcttgcaactactgccacagaaagttctacagttcacaagcactaggtggccaccaaaatgcacacaagagggagagatcaattgcaaagagagggcacaggtttggatcacagataatggccttcggccttccccttttgcaccataacaacaacatccgttttgcaagcatggcttctctacccctttatcatagcaatagaggaactcttggaattcaggcacactccatgatccagaagccttcttcttctcatcttcatgtgaatggctttggaggctcttatgcacatcatcatggttggtcaagaccaatcattgatcaacaacccggaatagcaaagcttgctgcgccagattttcatcacagaacaaaatcagcattatcatcatcacaaagcagcgttggtaggtttgaaatgatagttaatagtagtaataccatgttgaattctgcagccactaataacgaaatcggtggatgtgtggctagtggtggaacttgtttgaagactactactaatcaagaagaaatgaagcaccttgatttgtccctcaagctctgaagtctgaaccaaagccgcgatttcagctcgaaccgtcaaggtttttggactctcagagaccacatcgtgatcacaattgtgactgcaatttcccacgatgtcaaggatcgcgatgaaactgcatgtccgcaactcttaacattagatggtcttggccttatttatatagtctttgcatcgatgatatgagtaattgtagattaattagtatagttaagattttgccaaacttatttttcccccagtgtgaaataacatttgtgtaaattttattatgggaggatccaaagttctttaattttcttgtaaatgacttcttcagaatcattcaactccagataggtcgggggctttaatgagttgaaatcttaaagtttgttgagtagtct

SEQ ID NO: 142702 - DNA, 323 bp, Glycine max
  Clone ID: PAT_MRT3847_99876C.1
ctcctgcccgccccggcggctctcactatccaggtccctggttctgaaccgcctgcgttcaccttacagggggggtgagaaagcccaaccgggctggccttggcgacatacaaaggctaccgctgcataggaggggtgctatacaaagtatctgccaacacgctctacaataccctccgccaacccagtgttgggggcagcaaacccctcctgtacacaggccggatggatcctgcatgcaaatgtagcccttccctggccagccgggcagagcagcgcagccaggccattatccgcgaggcgcttcagctcaaagagaaaag

SEQ ID NO: 142703 - DNA, 1292 bp, Glycine max
  Clone ID: PAT_MRT3847_99877C.1
actcatgcctgggttaccgtattgccttttccctcttcggccttccttccgtcctgcctccgaaatcattcattgattaccatatttccttttctctcttcttccttccttccttccttccttccacaaatgttgcactctcactctcaccatcaccaccttctcttctccagtctccctcttcgtctctcactcaccaccacccatcacaactcttctttaccatctcttcattttctccacagacccatcatcaccaccaccaccacaacaactactgtttcagccattcctcctactgctgcatggcttgcaaagctcacaacacaagactttgcccactttgaactcccttcttcccatcttttcacagatgacccttctaccattcaggttgcttgcagtgttcttctcactggtgccatcactgtcttcttctttcgctctgtccagcgccgtgcaaagcgtgccaaagaattgaaatttaggtcttcaggagtgaataagtcattggataacttgaaagctataagttcaagttccatcaaagccaagagtccaccttcacctgatcaagcattgttaggggcaattatagctggtgtgattgctgttgttctctacaggttcaccacatctattgaggctactctcggtcgccaaacactttcagataatttctcagtccgccagataacaatcaccataaggacaataataaatggcctgtgctaccttgctacatttgtctacggcatcaattctgtcggtttatttctttattctggccagcttgccatggacaccatgggaggagggtcaagtggaaaggaaactgaaagcaaaatcactcagcagccaggcttatcaaatgcatcagttgagaatagtaataataataataataataaattgagcagcacaaaggaagatcaaagttcaaataactccctgtaatagaagccttgtgctgaagataaagtggaggaataagtcaactcctcatatccctttggtttcaagagtaatgttggtggcaagtaatattttcatgaagtcactactcttagtagaatgtactaaaggttccttttgttgataggaggaaattatggggttgagatgcttaaactcagtcctttgaagtatatatatatatatatatatatatatgcatgtgtgtgtgtgtgagatttaggaattagtatatactcactatattcgcacaaacctgtcttcaccaaaaacttgtgtgtaattacctctcattcaatgacaaaaatatatcttgt

SEQ ID NO: 142704 - DNA, 1377 bp, Glycine max
  Clone ID: PAT_MRT3847_99878C.1
cttccttccttccttccttccttccacaaatgttgcactctcactctcaccatcaccaccttctcttctccagtctccctcttcgtctctcactcaccaccacccatcacaactcttctttaccatctcttcattttctccacagacccatcatcaccaccaccaccacaacaactactgtttcagccattcctcctactgctgcatggcttgcaaagctcacaacacaagactttgcccactttgaactcccttcttcccatcttttcacagatgacccttctaccattcaggttgcttgcagtgttcttctcactggtgccatcactgtcttcttctttcgctctgtccagcgccgtgcaaagcgtgccaaagaattgatatgcagtccatgttaatttgcagagtgatataattgagatgtgcgattttgattcaatctatattgttcaatgaaatgggttggtgtggttctagaaatttaggtcttcaggagtgaataagtcattggataacttgaaagctataagttcaagttccatcaaagccaagagtccaccttcacctgatcaagcattgttaggggcaattatagctggtgtgattgctgttgttctctacaggttcaccacatctattgaggctactctcggtcgccaaacactttcagataatttctcagtccgccagataacaatcaccataaggacaataataaatggcctgtgctaccttgctacatttgtctacggcatcaattctgtcggtttatttctttattctggccagcttgccatggacaccatgggaggagggtcaagtggaaaggaaactgaaagcaaaatcactcagcagccaggcttatcaaatgcatcagttgagaatagtaataataataataataataaattgagcagcacaaaggaagatcaaagttcaaataactccctgtaatagaagccttgtgctgaagataaagtggaggaataagtcaactcctcatatccctttggtttcaagagtaatgttggtggcaagtaatattttcatgaagtctctactcttagtagaatgtactaaaggttccttttgttgataggaggaaattatggggttgagatgcttaaactcagtcctttgaagtatatatatatatatatatatatatatatatatatatatatatatatatatatatatatatatatatatatatatatgcatgtgtgtgtgtgtgagatttaggaattagtatatactcacaataatagcacaaacctgtcttcaccaaaaacttgtgtgtaattacctctcattcaatgacaaaaatatatacttgtaatctgtcctcttacatttatagtaagacaattaagc

SEQ ID NO: 142705 - DNA, 268 bp, Glycine max
  Clone ID: PAT_MRT3847_99879C.1
ctcatttcacttttttcacttaccagtcaaatctaaagctttcctaggttctgctaagaagaaagaaaacttcttcacttgtaagataacttttattttatcaccaccccatctccgtgtaatgttatgcagccttcgccacatttatttccaacatcatcatcacatctttagtgtgaaaaatgttggaaaatttggaatactagtcactcatctgcttgtaacttgaagagtctaatgttgtgagaatttccccatttttttatta

SEQ ID NO: 142706 - DNA, 261 bp, Glycine max
  Clone ID: PAT_MRT3847_9987C.1
ggctcgaggatccctttatcttttttataggacagaatggtgaactctctgttggcgtccgaggagcattgcgacagcggggtaatgttgcatcctcacatctctccagccacagcgtgcgtactggcgtccctgcccctgcttggcatgccatctggaccggcaccatctacactgtctataacaagcctaggaccagccctgctgaatttattgaaccctacgatcaatgaacggcgtctactcgaaatagtaatagct

SEQ ID NO: 142707 - DNA, 256 bp, Glycine max
  unsure (1)..(256): unsure at all n locations
  Clone ID: PAT_MRT3847_99880C.1
agggggggggggcggacggggaaaaggacacaccggcccagagggcagaagagggaggagcagcagaagcaggacanggaggagaagcacggagagccggcccagggcgaggaagaagngacaggcaaccggcccgccgacgagaggcnggaagcggcnaaggacggggagnagcggacggaagggaanggcccgaaaagcagaaacagcgggacagcggggacccccgacacacccagggcgaggagcacggaaa

SEQ ID NO: 142708 - DNA, 236 bp, Glycine max
  Clone ID: PAT_MRT3847_99881C.1
aaaattttttttttttttttttttttttttttttttcaactcgggggtttgcctgtaatattttgaaccggaaccagaagccgaaccagctttccataaagggagagttataaaaacagggagcaataatggaaaaaggtgatccctgggaaaaaaggaaaaccgttaacaaatgaaaaaaacatacgagcgggaaaaaaaaagagaaaagccaggggggccctaaagagggaagc

SEQ ID NO: 142709 - DNA, 388 bp, Glycine max
  Clone ID: PAT_MRT3847_99882C.1
gtgttaattgtcataggaaccaaccatttaacaaaggtaaatataacatcatatcatggccagacgattaatgtagatatgaactgacttgaggaggaggatacttgagaggtggaagtcacagctggttgctgttaccaagaccttgaactaacgcgtggaggtgtgcgtgccagaatatatgcgaatggtcacctagttgcactattcctaagacagatcctatgactccagttatcactgcaaaagctagaccatgcgaacaaaaattggcttgcaacccatgccagtgacgggttactgatggagctcaacatgggcatactgtagatcgtccctgatgcctgcacatgacgaatgatagtctgacgtcgtggggtacctgact

SEQ ID NO: 142710 - DNA, 517 bp, Glycine max
  Clone ID: PAT_MRT3847_99883C.1
cgccccccgtcaaggggtcagcgggactggaggctctgtcacagccaaaaagctcccccctccatcgactgatgggttacgccttgactagatacggttgcgaagagacgacataaggggttgaaggaatagagcacatactcaatgcagaaaatgattgattcataaccctcaagagagagctcaaatgccatgcactggctcagatgacaattcagtttattctatttgtggtgaatttaaagtgaagcttggaagatcaagaattaaggggaattcttttatccaaatttgggatgtatgtagtgatgatgcatctatacaaagaaattattgtgtttagttcccttgaacaagggcaataagattgacttgttgctctacatggtctattagaagcagattagctccagcattcaatttttctgtgcaacaacagattggcaacagatgctgaaaatacattccttgtaaaaatgtgattttggtgtgtatataattaattattattgtgtgc

SEQ ID NO: 142711 - DNA, 404 bp, Glycine max
  unsure (1)..(404): unsure at all n locations
  Clone ID: PAT_MRT3847_99884C.1
caaanaaaacggggtgtgtttttttaaagacccccgtccgtaacgccaacaaaaagcatncaaaattaaaacggcgccaaccgcaccccgaacaggaaacaaaccccaaccaatcggccaaaacagcaagacatcgccccacagacaaccctatatcctcacgcaccatgggaagaaaaaacaacacaggaacacaacgagaagcctcccaccccacaaatcccaaacctcccccttcgggcccaaccccaccattaccacccacacattacccattctacagaaaaggcccttaccaatcacaacagactacacaaccccaaaaccgaaacccaggtgccccagaaccccctgcaagaacaaacagacggcaccccccccaggggaaaagcaagggcaacaaa

SEQ ID NO: 142712 - DNA, 531 bp, Glycine max
  Clone ID: PAT_MRT3847_99885C.1
ctgcttgggggggggggggggaaattgaagaaggcgatgagaggggcagcagagcggtggttaagccggctaatggtatgaagaaaagtggccttagggttggggcagggattgaatagtgggaggcttatataacatttctgatttaaggggtttggcaatatacacttagagttgttggtatttaatggcgtgggaaaattgttgcttagtggtggaatggttggcgagcaagagtgaagacctagtaacggaggggccgtgacagaaggggtaagatgggtaaataggcataaagcgtgggggtgttagggatatcgcaaaagtataagaaatacgcatatgcggaataaaaggggttagctttagaatagacgcaaaaggagcacaagatgttaattttagcagcgggtttacgggtaagaagcaattgttgcctgcatacacgtcaaaaactacattggcgacgacgactagcttcgcggatggccatacactgccgtatagagcacctctagttagcaaagtgta

SEQ ID NO: 142713 - DNA, 296 bp, Glycine max
  Clone ID: PAT_MRT3847_99886C.1
ggagcccgattgggacaaaaaaaagatgcttaattccatgaagggcaagccccagttgaaaccaaactgcctaaaaaagcctattgggggggaacacccaccgaatggcaccaggatgtaccttgagacaaaataactagagattggactacacaagaacacaagatgggggaacaaatactcggtagggactctttggccaaatttgtggccaaagggaatttttggacaaggggttgattgcagggcacttaacgttttaaaggggttgatcaaaatggggcccacaaatggta

SEQ ID NO: 142714 - DNA, 423 bp, Glycine max
  Clone ID: PAT_MRT3847_99887C.1
aaaaaaaaaaaaaagggggggaaaaaattaaaattttaattaaagggccgcgggggtcccccgggaaatcccggcccggacccggggggggaaccaattttccttataggggggggaataaaagctgggcgaaaaaagggaaaaaactgttcccggggggaaatagtattccgttcacaatcccaaaaaaaaaaggagccggagccataaagggaaaagccgggggtgccaaaggggggggcaaacacacattattggggtggggctaactgcccgttttcaaatgggaaaacctgtggacccacctgtataaagaaaggggccaacccggggggagggggggtttgttttttgggccccgggggggttttttttttacccaggaaaacggccaaaagttgatggcctttaaccgccgggccc

SEQ ID NO: 142715 - DNA, 1015 bp, Glycine max
  Clone ID: PAT_MRT3847_99888C.1
cagtctagaacacacattactagaaatttagaaaacatggcagcggtggccggagcatcctcgtccgtgattaaacgtgggcgtgctttagggttctttaaggaaagccctttacaacgtaggcctcaaacacaagcacccacattactagaaagttagaaaacatggcagcggtggccggagcatcctcgtccgtgattaaggtggctgcactttccggatctttaaggaaaggctcttacaacagagccctcattcgttctgctattgagctaagccaaggtagagttgaaggccttcaaatcgagtacgttgatatttcgcctttgccccttctcaacaccgatcttgaggtgaatgggacctaccccccacaagttgaagcctttcgccagaagattctcgcagctgatagtatcctctttgcttcccctgagtacaattactctgtcgcaagtcctttaaagaatgcacttgactgggcatcaagggcaccaaatgtttgggctggtaaacctgctgccatagtgagtgctggaggaggctttggtggtggaagatcacaatatcatctacgccaaattggagtattcttggatcttcatttcatcaacaaacctgaattcttcctcaatgcattccagccacctgcaaagtttaacaatgatggtgacttgattgatgaagatgccaagaataggttgaaggatgtccttctgtccttgaaggaatttacccttagacttcaaggaaaaaattgaaacatttctgattcccaaaaattgttaaaataagctttggattttggtccattccttttaggaataatagtgtgatctggactgtctctgactgcatgacaacagtattatgcagaaacaagagaacgtgtatttgtttttacatttgaaattttttgttatgtaatgtcgtgtcttggtttgttttgtttacttttggcaattgagtaaagtccacatggtttaatttgtgtttgatagtcaaacattaaaaa

SEQ ID NO: 142716 - DNA, 223 bp, Glycine max
  Clone ID: PAT_MRT3847_99889C.1
ggttttattctctttacacactacattatcaagtggtgctccgcccgctctcccaacgggcttcagaagatctcttctgttcttttggttttggggggaggcgaaagaaaccctaaacgtgattattagtatcctggtcagttaccgctcacatgtcaggaattgaagagctgctcctctccttgctatttgcagacagctggttctcaccccagatagatga

SEQ ID NO: 142717 - DNA, 243 bp, Glycine max
  Clone ID: PAT_MRT3847_9988C.1
tttatgatgaagagggtgaccacaaaggggatttgagataatcccaggagggaattcgcactggctgggaaactcacgtgcgggcggcaacaactctgtgggttgaaggccgtccgtttttgagagcgagggttcaggaatgctgagttgcacacaagaccagacgatgttgttaaagccgaaccggtgaccaccatcaacgatatgggagcttatggaccgaaccctggtatattgggatct

SEQ ID NO: 142718 - DNA, 494 bp, Glycine max
  Clone ID: PAT_MRT3847_99890C.1
cggacgcgtgggcggacgcgtgggagacctaataatggtttatatctctaacaatgacactgataatttcttgcaaaaactgtgccgtcataaataatttaaaaaatcaattttctttcaattgattgattttgaactcaaaattcaagatcatagaaatataaattttagcctgctcaatattgatcaacaaataataacgtatggacacactataacaataacaaccaagatttatcccagtagatcagattggcaacatggattaatcatcgacattgagctataataaaaaccaaacttctcagtgaacaaagcattcaaggttttttccaatgtcttaacaatatggacactaaaaacataaagttaatgtacaatatgtaacagtcaacactaaacagattgtaactcttaattatttgtttataaaagcaaaatcatgacagcaaggaagcataaatttgaagtacaacaaaatatccattttaaat

SEQ ID NO: 142719 - DNA, 523 bp, Glycine max
  unsure (1)..(523): unsure at all n locations
  Clone ID: PAT_MRT3847_99891C.1
gcagattttncaagaacggcacaaagnaacaacacggcacaaggganacaaacccnnaagccgaannccaannnccagaaaccccaagnnccnaaanncccaagnnnncncggggncggancnaaaaaaccgaaaaanncagcaaanncaacggcggnnnngaaaaaaganncaacnnnnacgcaaaagnnncgnncccacgggaccgcagcancagnggcnacagcccgcaggcnncacggngcaagcagccggcccgcaaccgcccgcaaanccccnggcccccccggaaccgnccgcanncccggcgacaaggcgaacncccaccggncccccaagnncggcggncncgcgagcggngaaacgcgcancaccggcccccnggaaggcgaggacgncancaaaacgggcaaggccangcaggccangggcgccagganccgnaaggaaggcgacacccggancancganggcgncggcaanggcggccccccggcgccggaggcgccgcncgannncggca

SEQ ID NO: 142720 - DNA, 309 bp, Glycine max
  Clone ID: PAT_MRT3847_99892C.1
tgggagtgccacgtttgggaggtatagcaagcgggttaccttagacacttgcgacagggtgttttacgtgtgctatagctggattgagatcttcgaaatcttgtgcactatattaatgttagacattgttaatatcaattgctgcatttttacatattcggatatttacttggtataaatatattacttataattattattattatatagtgtttatttaatgaattacttcgttgcataaattggcaatatttgctactacctaatcatgatcatgatacaaacagttgatgatgtttggaatgaatt

SEQ ID NO: 142721 - DNA, 357 bp, Glycine max
  Clone ID: PAT_MRT3847_99893C.1
ttatttttacaagttacattgattgttaatcatgaaggcctcccccttagcatttgaaattcttttttcgaccttcaccatcgaactgttgattggtgttgcttcattagctcaagaaccaggggtagaccacctggagccataagctgcgaacaggtgccaggtaccacattctaccagacctagaggcatgggaggtggccccacagtctcaagcaaggtcacacaggaaatgctccctctttgtgtaggatgctaagctcagatttttcaaggttaccccagttgccttaacgcgctacattgcccaatggggggtgatgcttagcgcagacgagttcaatatcaagacctatg

SEQ ID NO: 142722 - DNA, 373 bp, Glycine max
  Clone ID: PAT_MRT3847_99894C.1
ctaaaaatctgtctcggggatacagtacatgcaaatgaatgcaatcaagacagattttttttataaaaaaaatgtgatcaccattactaatctatcagtcccatttacatccaagtcataaaacttggtattgaaccggtgttaagcacatttttgagctggtgattggttcttgtgctcactaaacttgttcggggtctaaagaaaaatcaggttcatctggcttgaacaattggggcacaggatcttgtagcttatggtttcctttctttgtattggcagcaaactttgaggcaaaaacagttggacctagattctgaacctttttcacactccctgaggattcctcgatctcataatttccacttccatc

SEQ ID NO: 142723 - DNA, 408 bp, Glycine max
  Clone ID: PAT_MRT3847_99895C.1
ggaaccgaaacgaacctcaacaacgctgatcgtagaacggggaaaaggggattaaggtttatgaagcaccgccacccctggatttcacattggctacgaacgaatcagagaacaatccccaaaatgctcaaccaacaacgttggattcatcatctcaattggcatccgcacttgattccaacaacatacacatccacgaacgacaagctcgtgaactcaaagccggacttcaccccctaaagcacaagtttgtcgtctggtacactcgtccacaacctcgaattcgaaatcatgcatcagacgaggacaccataacgtctactgttgaacttactactgttgaaagaatttgggtctgctactgccatcttgctcctccagcttccttacctactccaacagatttgc

SEQ ID NO: 142724 - DNA, 170 bp, Glycine max
  Clone ID: PAT_MRT3847_99896C.1
tcggtgtctctgacggtctgtgacacacacactttcttacaaactcaaggctctggccatttagggttaccgtatattgaacatggtgcacatattggcttcctctactcaatgacagattataatcgcaaaatcctcttccaatgcaagtacccattacatcatacatg

SEQ ID NO: 142725 - DNA, 257 bp, Glycine max
  Clone ID: PAT_MRT3847_99897C.1
ctgagggggatgatagggaggtggagaacaagcttttgtttcaccttgagtttgataaattcagcctcattaagtttttgttgcggaataggttgaagattgtgtggtgcacgcggttggcgagggcgcaggaccaggaggagagggagaagattgaggaggagatgaaggggacggagttgcagccaattttggagcagttgcacgcaacaagggcttctgcaaaggagaggcagaagaatttggagaagagtatt

SEQ ID NO: 142726 - DNA, 119 bp, Glycine max
  Clone ID: PAT_MRT3847_99898C.1
gcgaacgtatattttatccagacgggaccaaccctcttgaggctagccccaatagtcgagcggggagacgctcaagtgggttgtgtgtcacagcttatagacaccaaggtaggaaagtg

SEQ ID NO: 142727 - DNA, 375 bp, Glycine max
  unsure (1)..(375): unsure at all n locations
  Clone ID: PAT_MRT3847_99899C.1
aaaatctgtgcaaatttcaggttaaaagaggctaagtaatgcagtggtaaaagtggcagttgggctaagctcaccatttttgggctaagcgcagcttcagcgtgacagagaagctggcacaataccaatatcaaggccacacgctaagcgcgagatcagtgtgctaagcgcaggggttgtcattagccaggctcaatgcatgactagcgctatgctcaaatccacttactcgcgctaagcgcaatgtcgcggcttcagagcctatttaaagctggtttgtgcagaattatggtaacaatccaaagaatcaccatcacgcatagaagtcagagcacaccacagtgcctatttcgagaaaagaactctgtangcagc

SEQ ID NO: 142728 - DNA, 1808 bp, Glycine max
  Clone ID: PAT_MRT3847_9989C.1
cgcctctagaccagcaagaagcagttcagtaactcgctcttccatctcaacttcacactcacagtacagctcctattcttcaaacaggcactcatcttcaatcctcaacacaagttcagcctcagtttcatcttacattagaccatcttcccccataacacgctcttcatcttcagcaaggccttccactccctcctctcgccccacagcatcacggtcctcaacaccctccaaaccgcgtccagtttccaccagctccactgctgaaaggaatagaccatcatcacaaggctcaagaccatcgactcctagttctaggcctcacattcctgcaaacttgcattctccatctgcttcatcaactcgatcactgtctcggccttctactcccacacgtaggagctcaatgccatctttatctccgtcaccttcccctacaataggttctttaacttcagcaggtcgtgtttcatcaaatggacgcaattcagcacctgcatcaaggccaagctcaccaagcccgcgagttaggcctccacctcagccaattgttccacctgatttccccctagaaacaccaccaaaccttagaacaacattgcctgataggccagtttctgcaggccggtcgcgtcctggcggtgtcactatgaagacaaatagttctgaaactcaagcctccccagttactatgccaaggagacattcatctcctattgttagtagggggagagtgacagaacctgcagcaaaaacccgtggctattccaatggccatcatgttgatgctcctgagcctagaaaagtctcacatgctcctgaggttgctgcaaggaaatctgttaggtcctcatctactgcccctgacaacactggatttgggaggactatctcaaagaaatccttggatatggctattaagcacatggatataaggaacagctcaggaaatattcgttcactaacaagcaccacactctttcctcagagtattagaacttccactaccaagtctcatcgagtttcaagtgctccagcatctgttgacatgaatggaagcatgataagcagtaaaaatggagccaattttgatgtgggaaatggtattgataggaatatgatgatgaaaggaagagatgcagatgaaagacattattctgcaaaactgagtgaagtggacatctatgagagttctcgttacgatgcactgttgtttaaagaagatttgaagaacacaaactggctgcatggtgctgatgataagtgtgatcaaggccccatatttgataatggatttgagcaccttcctgaaccttttggcctcttataacaatatctatagatgttctgcctagtgcatttgtaacatgctattttatgttctaattattatctcaattttttgaaaggatgggatgtttcaacttatatagctccaaggtaaagaagtgaagatgcattcatatgttttctgcaatctgctgagaaatcagtggattcaactttgatcttaaacctatacaaacaatgcaggaaaaaattacatgacagaggtccaactttctttgggagaatgagaattttcataaatgagtgagttgcatcccatgtatgcgtttgtcaaaaggcaaatgtactgtgagtacatagagatgaacgggatgtgatgtcatatgcaaacactatggttgagtgttatttcccacttggcaatgaacactatagttgagttgagttgtatttctacatttttgtgctctttacttaacccatatacaatagtcaaattttgataaattctttaaaaa

SEQ ID NO: 142729 - DNA, 180 bp, Glycine max
  unsure (1)..(180): unsure at all n locations
  Clone ID: PAT_MRT3847_998C.1
ctgggatatagatagtatgcatataacatataccatttttttataacatacatcaaanaagagcatgcatttttatttaaaaaaacatatccaccttaaactctttcactcatactatttaatataagttctcccctcctcctaataactatcatttaatcatcttctctaagcaacttt

SEQ ID NO: 142730 - DNA, 1716 bp, Glycine max
  Clone ID: PAT_MRT3847_99900C.1
aaaaggttcaaaccacgcgtccgctctttctctctgcttctacaaaacgccatttccttatatatcccttctccctcccactcttcttctcgttcttcttcttaacgccatcaccacctttggcttcctttaaaaatgtattttttcactgagaaaatgcacagtttgaagatgggcttccctgactacatccaaacattggaagaagaacgccgtaagattcaggtgttctccaaagagctacctctttccttggaactggtcactcaagccattgaagcttgcaagcagcaattgtctggaactgcgagtgagtataatttgaatggccactcggagtgttcggagcagacaacatcaacggaagggcctgttttggaggagtttattccaatcaagaaaatggcatcatcatcccctttttgtgatgaagaggatgaggatgatgagcaacattctcacaagcaaagggtttcaaaggaaaataataacagtgataagaggaaatccgactggcttagatctgttcagttgtggaatccagatcccccagctgaggaggatgtgaataagaaagtgcctggattggaattgaagagaagtggaaatggtggcgctgccctccaccccccccgcctgctgggttgtggggcgttgcccagggtttctgtgagtaaagcaccctcttcaacctcggtagccgccgcgagttctagcgccgcagaacccgcagcagaaaaatctctgaatgagggacagagaaagcttcgcaggtgctggtcacaggacttgcataagcgcttcttgcatgcccttcagcagcttgggggtgcagattgtgagtatctcaatatatactgccacaccaaagcaaatcagagagctgatgaatgttgatggcctcacaaatgatgaagtcaaaagccatttgcagaaataccgtttgcacactagaaggccaattcccatggttcacaacagttccgatccacaagcagcaccttttgtccttgtagggaacatttttgtccaatcaccagaatatgcagctgtagctacctcaacagcatcaagagaagtggccacagttgcagcacctgctagaatttatgcaccagtggccacacatcctacacctgtttcacacccaccagatgattcaattaagaatccacagtttaagaaagtaaagctgtttgagcattcaaattcagatgatagggctaatcacagtgaaggagctgttcattcaaattcccctacctcatcctcctccacacatacctctacttcccttggctattgagttttaagatattgcacaagttttgtaaccaagttgttgtagaaagtccttagatattttcttatgactttttttttttactaaaaatgttctttactcctgttatctgggatttaaatcatagaggtaaaatacacagaaggtgacagttttgatgtcaaataaagtcccaccctcttggctggttactatgttatctccttggtacagaaggtgaactgaaatttcaaaatttaaaatttggaagcatgctcaatgtttcaattggtccagcttctcaagattgtgacaaattaaagctactgttctgacttagtcatattccttacaccttgggtaaactattaatcacaccactgtgttagttgggaattaaaagtggtccacctaagcacctacactgtcttggt

SEQ ID NO: 142731 - DNA, 504 bp, Glycine max
  Clone ID: PAT_MRT3847_99901C.1
ggctcgaggcttcttgcatgcccttcagcagcttgggggtgcagatactgccacaccaaagcaaattagagagataatgaatgttgatggcctcacaaatgatgaagtcaaaagccatttgcagaaataccgtttgcacactagaaggccaagtcccatggttcacaacagttccaatccacaagcagcaccttttgtccttgtaggaaacatttttgtccaatcaccagaatatgcagctgtagctacctcaacagcatcaagagaagtggccacagttgcagcacctgctggaatttatgcaccagtggccacacaccctatacctgtttcacacccaccagctgattcaattaagaatccacagtttaagaaggtacagctgtttgagcattcaatttcagatgaaagggctaatcacagtgaaggagctgttcattcaaattcccctacctcatgctcctccacacatacctctacttccctggctattgagtttaagat

SEQ ID NO: 142732 - DNA, 507 bp, Glycine max
  Clone ID: PAT_MRT3847_99902C.1
tcgcttttaaaatgtattttttcactgagaaaatgcacagtttgaagatgggcttccctgactacatccaaacattggaagaagaacgccgtaagattcaggggttcttcaaagagctacctctttccttggaactggtcactcaaggtaacgcaacaaaaaaaccagccatacacttttgttgttttggcttgaggatcataaagtttcctcctttcttttctgggtttgctttctgaggggattttggatacttggttttttttggcagccattgaaggttgcaagcagcaattgtctggaactgcgagtgagtataatttgaatggccactcggagtggtgggagcagacaacatcaacggaagggcctgttttggaggagattattccaatcaagaaaatggcatgatcattccctttttgtgatgaagaggatgaggatgatgagcaacatttctacaagcgaagggtttcaaaggaaaataataacagtgataagaggaaa

SEQ ID NO: 142733 - DNA, 708 bp, Glycine max
  Clone ID: PAT_MRT3847_99903C.1
tcccttactgccccggcggcgacctcaacgccctccgctaccgccaaactgatcacgtcttctcccccgccgtcatccgcttctatgtcgccgagatcctctgcgctctccaacacctccattccatgaacatcgcctaccgcgacctcaaacccgaaaacgtcctcatccagcaatccggacacgtcaccctcaccgacttcgacctctcccgtaccctctctccctccgttaatattccctccaacaccactactcctcctccttcccgcaaacaccgccgctgggtcccactcccactcccactccacgctaaaaacaaaaaccccaagcccgcccgagtcagcccggtcaaccgacgcaaactcagtttcgtgcgatccacctccttcgtcggcaccgaggagtacatcgcgccggaggtcctccgcgccgaggggcacgacttctccgtcgactggtgggccctcggagttctgacctacgagatgctctacggaacgacgccgttcaaggggacgaatcgcaaggagacgtttcgaaacgtgttgttcaagccgccggagtttgtggggaagaaaacggcgttgacggacctcatcatgggcttgctcgaaaaggacccaccaagcgtttgggttacgttcgaggcgctagtgagatcaaggagcatcaggtctttagaggggttaaggtgggacctactaa

SEQ ID NO: 142734 - DNA, 688 bp, Glycine max
  Clone ID: PAT_MRT3847_99904C.1
aatgaagatagaatctaagacttcatgcttattattcaaacttcccgtgactgaaacaaccctaaccttagtgaatgataaatagaaaggggtaagaggagtactctaccctatagctaatgcatttttaatttacccaatgaagaatttctcagctgtaaccgaaaaattagaaaataaaatcaggcaaaggaattctttatctactcatgcatgcagtcatgttttatattgaaatgattcttacactgttggagttttcacgatcgtgtttgtgcctatgggtgaaaatagtaatgaaaaaagaatgttactataagaatgatgggtacataattgtgaaaagtgttatgaacaaggggagcatacaaacataaaaggcataattataaagcctgattgcctcattgagaattgggctaactttgtaatttacatttgaagagggtacgaactgaaggaatgcattagccatcatctgcccaagatgagcctgggccggggttgaaagatgcagcccatcgggctgaaggggcaaaccatgagcgtccacagttctcaggtttagaaggtcaatgcccagctgagcttgtcttactatctctatgtgagggcctgatccagatgccaaagctacctggattattggaagcaacggagactgtagatcatcacgaacgtccaagaa

SEQ ID NO: 142735 - DNA, 187 bp, Glycine max
  Clone ID: PAT_MRT3847_99905C.1
gaattccaggctcgaccgacgcgtaagtacggcagtcagtacagcacagaagggggaaccacagggtgattgcagtgcatgtcaagtggttacaccactacaccatgatcgtccgcatcgtttcacatagctgctgttgagacccagcgccgtctctatgcattacacggcgactcaactggatcca

SEQ ID NO: 142736 - DNA, 305 bp, Glycine max
  unsure (1)..(305): unsure at all n locations
  Clone ID: PAT_MRT3847_99906C.1
ggaagagatccagcagcaatggtgtacgtcaaggctccagaaatcaaaagnctacttcaagagctatcaagtcaagttcaagagaagnagagagggaaaaancggttaccgtgccagggattcggttgattaatcaggncaagaacaaatataacncctccgaaataccgatttgnggttcgctttagcaacaaggacattgttgcacaaatatatctgctagcattgccggcgatttagttcttgctacggcatattccacatgagctgcccacgatntggtcttgcagtagggnntacagatt

SEQ ID NO: 142737 - DNA, 922 bp, Glycine max
  Clone ID: PAT_MRT3847_99907C.1
atggctcccgctagtaatttcgatacagtagaatttcaaatgaatgaaacagatgaaatttcacaaatctataacaagcatcgattaccaagcttaagtggtctagcaaaagtgtctccacttgttcatagggctagcataggaggcgttttaaatgtgggagaattaaacagaattaaacgcctagttcaagtgcaaaatcaatttaaaacattttacaatcaaatgctagaggaagatgaagaggttaagtatcctatactgcatgataaaatgaatcatctaccgatacttacagatttatttaaagaaattaatgaaaaatgtgatgcacacgatttatttgaccatgcgagttatactttacaaagtattagaagtaaaatttcaagaacaaatcaacggattcgtcaaaatttagatagaatagtgaaaaatcaagggaatcaaaaaaaactatctgatgcaattgtaacagtaagaaatgatcgcaatgttattccggtgaaagctgaatatagacaagatttcaatggtattgttcatgaccaatcggcatcaggacaaacactatatattgaaccgaattctgttgtagagatgaataatcaaattagtcgtttgcgtaatgatgaagcagttgaacgtgaacgtatattgactgaattgacgggattagtttcggcggaatctgatgcattactcgttgctgaatcggtcatgggtcaaatcgattttttaattgctaaagctcgttatgcgcgcactataaaaggaacaaaacctacatttaaagaggagcgaacgatatatttacccaatgcatttcaccctttattagacaaagatactgttgtagcaaatacaattgaatttattgacgatgtagaaactgtcattattactggaccaaacacgggtg

SEQ ID NO: 142738 - DNA, 473 bp, Glycine max
  Clone ID: PAT_MRT3847_99908C.1
ctgcttggggggggggggggggggggggggggggggggggggggggggggggggggggaaaacccggaaagaaggctgagaggtgcccaggaacaaaaaactaaaactggcccctttgataaggctaaatggcccaacaatatggctttggccagaagcccaccagttcctgcacggacacagtactggtaatttgttggcaccaatgcatcccaggctaagggagcaactaaaccgcctgtggcacaatttgctaacactaatttaggaggttgggccaggttattagatagagcctagagtgaaaagggtatgcaggaatagccgacagaagcaaaaaacttcccctggtaacccagcttgaggccgtttatgaatcggccagtaacataccccgagataacctgaagaggtacaataacttgggccaccaataagtagtaattcgcaaattagatggggagggttaaatt

SEQ ID NO: 142739 - DNA, 264 bp, Glycine max
  Clone ID: PAT_MRT3847_99909C.1
gcggatcacctgacatgtgacggtggccgaagtactacgaactctaatgacgttggaacggtaaggatattgtgatggcctgttagtttatgggaggtgtactgtttggcattgatctcgatgtaaacaaacaatgttagccttgccccatggggaagattaaaaaaaaaaaaaaaaaaaaggggggccccccgactattaacttctccgacccggaaattaattcgggccgggaacctgcgggggaaccagtttccccaaaag

SEQ ID NO: 142740 - DNA, 363 bp, Glycine max
  Clone ID: PAT_MRT3847_9990C.1
aattcggctcgagcaaaagatgaatacttttaggatggtgagggaatttggattagcagtggagctgaaactggactatagaaggggtagtgatcttgttatggcagaggagatagagaaagggctgaaacaattgatggacagagacaatgtggtgcacaagaatgtgaaagagatgaaagacaaggcaaggaaagctgtccttactggtgggtcttcttacattgctgttggaaaactaattgataatatgttgggaagcaactgataagtgatagcatagttgttgtattttaataaatggagttgcccctttctattagatggatatttaaatggttgcagtttgtgtatgacacagaa

SEQ ID NO: 142741 - DNA, 266 bp, Glycine max
  Clone ID: PAT_MRT3847_99910C.1
aaaaggaaataatacacttttgttgcctttattctacactctcttgctgtttcttggagtgtcagcagggaatggaagtaacgatgacactaaccgtaaagaagtttatatcgtctatatgggagccgcggattcaacaaatgcttatcttcggaatgaccacgttcagattctgaattcagtgctaaaaagaaatgagaatgccatagtacggaactacaagcatggtttctcaggattcgcagctcgtctatcgaaagaggagg

SEQ ID NO: 142742 - DNA, 426 bp, Glycine max
  Clone ID: PAT_MRT3847_99911C.1
accagctcaaccgctcaactgtcgcacatttcttcattgcatcatcctataccactcacaatcatgaacactaaagcatctgtagcctacggctggggcgtcctgatcctagcaggtggtggcgcctactacttcgccaagcgcagcatcaacgccgaccgcgaagagcgcgcagcaatgaacgaacgccgccgtcaagccatgcgtcctcagcgcgctgctcccacatcacaaatccccagcaacgaccgccccagtcctagtcaagagggcggtgccgatccagcacccgtaacacatgcacaagaagatttgagcgcgaaaggaaaatacgaggcggcggagcctttcaggagtcgcaagggtgataggtttagctgagcgggtgtgcaagacgagatgaatgtacagtactcgctttgccag

SEQ ID NO: 142743 - DNA, 646 bp, Glycine max
  Clone ID: PAT_MRT3847_99912C.1
ttcgcttcactccctctcttgtctcgttcctctcccaagtttctaactttttcacacattctcaatcctctctccaattcctaagtgggtcccaacccaattcggatttcgtttctgggtttccccaattcgaagctctgcactttcccctttgaagtggaattttttttcgttcctgtgaagttccattccatattctgggaatgggtctataaaacaagcttccaaattggagagaaagtcccaaacttttcggttcaattttgagttttcgcaattgggtctgtgatcttcttgtgtgggtgagcaaggtttgaaaaaactttctgtgatcgtgattttggccccaacttcaattgtggctgcatccgctgtaatttgttcacaattttccgcaatatcaaaggatcgtgacgacgaaaccacaactgcaaccgcaatttaaaccttgtgtgagaatgcgtgctacagcagaatttcaaggttctgttctgaatcttcgtggggttcaggttcactccatggagggttcaagcatggagcaagagcttgatttgtttcagaagcatgtcacggagcgattcctggagctatcttctgtagaaagtggtgaattgctctctctttcatgggggtaggaagctgc

SEQ ID NO: 142744 - DNA, 309 bp, Glycine max
  Clone ID: PAT_MRT3847_99913C.1
gagaaaagaaagattgagcttttagagaaaaaaaaaaaaaaaaaaaaaaaaaaaaaaaaaaaaaaaaaaaaaaaaaaaaaaaaaaaaaaaaaatcaaggggagggaccaaaaaccaattaaaacctaaaaagaaatcaaattaacccctttgggtgggcgtcgttttacaacttcctgaatgggaaaacccttgcgttaccctatttaatcgccttttaacacattccccttttgaaaactgtggtaatacccaaaatgtccgcacctatcgcccttccccttttttgcccatccttaatgaaaaatgg

SEQ ID NO: 142745 - DNA, 580 bp, Glycine max
  Clone ID: PAT_MRT3847_99914C.1
ggaagggggggaattaccaaatgtagttgcatttttttgctgtcatataatgtatagaaataggaacaacttatatcttacaagtcgattttgtaaaattgaattaaactcaaagttacatctaaaatgatattaaaatctatattagtgagtgttgttgggtctgtcgtgttacccgttattggactacgtgcaaatgttcaacaaacttcatgctggagatgttaatcccaaaattaaactccactgactatccttcaataaatttgattgtaaccaaaggtccataagattcacgaaaatgtcagcatctgaattattctcaaggagtgaggttcacacttctttggccagcatgccatatattatagcacgaattgaagttcttccacagtacattagcatatagggcacgattcatcattgggagattttagcaattttccaaagcaacaatttcatcattgggaccactccaggtatatatgatcgagaaattgctccttctttatagttggtaagagttgaacgagcaatttctcgatcatatatagttgggatcccatcatttgatcatctc

SEQ ID NO: 142746 - DNA, 762 bp, Glycine max
  unsure (1)..(762): unsure at all n locations
  Clone ID: PAT_MRT3847_99915C.1
aatttttaggtttctgtgcccttgatgaacacatcttggaccagacttgtatgcatttctggttgagacacaaaaatattttatatagggtgcaatcgtggaagtttaattgtttaaataaacatagacatgttgattaggttcaatcttttcccttctaaataatttaatatgtttcttgtagggtttcaaaaatanttttactcngagacaatctaaatgagtagaagtaatgtcaaccgctaaattatatttctctctttgaactcttagaccatggtccatacttgtataacttcaattatttccttccctggtctcttgaacaaggaaaatgaacaaataagtgttgccatcaatgtgcattacttcattttcgaaacgtacttattcagaaaattatctaattatattaatataataataaaggtaaatcaacctcaatgtagattgtaattttcttcttggcatttggtgcatcttctttcaggacactaagcaggagcaacaacatattaaatcttcaagccaagtaactcagaaaggatctaaattatcggaagccgataagcatattgaccaaacaccacctgatgctcgggtgcggtatctaaaagatcagctcatccaggttagggtatacctttcccttcaggcagtaaggaacaatccccatctcactcgagagcttcgattacgggtaaaggaagtctcacgaacactgggagatgcaagcaaagattctgatttgcccaggaaatg

SEQ ID NO: 142747 - DNA, 656 bp, Glycine max
  Clone ID: PAT_MRT3847_99916C.1
catccatcgaagttcaaatttgagcatcttcgattttgctatgagagattagaatacattggccaaaagatacaggtactattctgtctgctgtccaaatgacattttgaatgaagttgtggatttggtgatggctgaaagattattgatgaagcatttagatgctccggggttgtggctacaagagaagcaccgtcgccttcttatgaacaagtattgtggaagatatttgagggccaaacatcttcaccgggttattatatttgatgagaaggttcaagacacttatgagcataaccggagaaagagaaacccagccacgacagctgttcaacaagctcttcatgggctttcgtatcttgtttatgggaaacgtgatgtgaggcgtctgatgtttgaggtttttgactttgagcagatccagccaaaagaagtagtttaaatatggagacaaaaagactgataaaagctcttttgttttcctttattatttacctcctgttttccgtttctatccccttgatttaagttttttttcatattatcatttgatgtgcctggttgtaggtgaattgcaaaaattattatccatgcaaaaattattattaattaaaaaaaaaaaaaaaaaaaaacccaaagcggccgccctagaagaa

SEQ ID NO: 142748 - DNA, 348 bp, Glycine max
  unsure (1)..(348): unsure at all n locations
  Clone ID: PAT_MRT3847_99917C.1
ccccgcacacnaagcgccgccacagaggaacacnccggcgcaaaaagaaggacancgccgccaacgngcacgccgnantgtgaggcaacgcagccccacccgccgaggacaagagggacanccanggcgccgctccctcttgacgcgtgttagngacccaccagcaacanaccgacagaagaaaaccgcccagacggggaggagcgcaccccccaccggnagggaaaagcgggccaccgagccancaggcggcggcgccgccggagccgaagcagccgcccccggcgggggcccagcngcaccggcngccgcccgaacgaagaaggaggaaaagagcgaagagaagga

SEQ ID NO: 142749 - DNA, 2193 bp, Glycine max
  Clone ID: PAT_MRT3847_99918C.1
gcgcgggcttccttgcccccgtatccctgccagccgccgggtccgagtcgatacacaaacccaggattcaaccatcttaatgttggtaacccaaacagcatttcccatcacagtcaccctcatccgctaatggaacactctatctcctttatcctctccacaaaaccatgctcatccgtgccacctaacttaactttctcactctccctctgccctatttccaattcaactcttgatcagaaacggaaactccaaattcccccaaaccccccctttccgaattatcgcggtggccttggagccgcaacaggacttccccagcgggaacagtccccagcgtctcctcaaggaactcgccgaacgcaagaaagcaacttccccaaagaagggtcccccaaggaggttcattctaaggcccccaatagacgataacaaattagcagaaaggtttctcaacagcccacaactttctctcaaatcgttccctttattaagttcgtgcttgccttcgtcgcgcctcaacaatgcggataaattgtggattgacgagtacttgctcgaagcgaagcaagctctgggatactctctggaaccctcggagacgctcggggatgataatgataaccccgcgaagcagttcgacacgctgctgtacttggcgttccagcacccgtcgtgcgagaggacgaaggccaggcacgtgcggtccgggcattcgaggttgtcttttctgggacagtacgtgctcgagttggcgctgacggagtttttcttgcagaggtatccgagggagtcgccgggtccaatgagggagagagtgtttgggttgatagggaagaggagcttgcccaagtggattaaagctgctagcttgcacaatttgatatttacgtttgatgatatggataagatcatgaggagggagaaggaaggtcctgtcaagtcagtattttgggctttgtttggggctatctatctttgttttggtatgccagaagtgtatcgtgttctttttgaagtcttcggaatggatccagatgccgaagattgccaacccaaattgcgtagacaacttgaagatgtggattatgtatctgctgagtttgaaggcaagctaagctggcaagatatcgttgcatataagcctcctgcagatgctctgtttgaacacccaaggctattcagagcttgtgttcccccaggaatgcatcggtttaggggcaatatatgggattatgatacaagaccccatgttatgaaaacacttggatatccattggaaatggcagacagaatcccagaaattactgaagccaggaacatagagcttggacttggattgcagctttgtttcatgcatccatcgaagtacaaatttgagcatcctcgattttgctatgagagattagaatacgttggccaaaagatacaggatttggtgatggctgaaagattattgatgaagcatttagatgctccggggttatggctacaagagaggcaccgtcatcttcttatgaacaagtattgtggaagatatttgagggccaaacatctccaccgggttattatatttgatgataaggttcaagacacttatgagcataaccggagaaagagaaacccagccacaacagctgttcaacaagctcttcatgggctttcgtatcttgtttatgggaagcgtgatgtgaggcgtctgatgtttgaggtttttgactttgagcagatccagcctaaagaagtagtctaaatatagagacaaaagtgacaataataaaagctcttttgtttttcctttattatttacctcttgttttccttttctatccccttgatttgagcttttttcatattatgatttgatctgcctagttgtaggtgaattgcggattcttctttagaacttgagcttgtatataatcgttgtatttatttttttcggatattgcacgccctagacaagtagataacccaacgtacaaagatgaggatacatatgacttgttctacttgttggttctgactatggacgttggtattggtatggttattggtgaattaaactcaacattttcactacacaaatgagaatatagttgggattttgtacttttgtttattctccatgcaaaaatttttcttgaaaaaaaaaaaaaaaaaaaaaaaaaaaaaagcggccgctctagagga

SEQ ID NO: 142750 - DNA, 383 bp, Glycine max
  Clone ID: PAT_MRT3847_99919C.1
caactgcactgacgaattccaggttcgccgcgtttgcagagcgagaccaaagtctcatcgatcgtggacctgatgcatcccatcaccatctcgtggtgctgtgcacccctatcaatccttattggcggccgtgccgtacgtttcctgcggcagatcggtaccagttatctgcaccgtaccctatatatctatcagctgtgcaagctgtgatgaccatcttcgacagcttcgatgaacccgacgttaactgcatcatcgtattcaaagttaatggatcggtcgggatcctgcacgaccgacgatttctcctcgactcattcatcgaccaacgagtcacccttcgacagatgatagtgactgcacatgatccatggcaagcttta

SEQ ID NO: 142751 - DNA, 481 bp, Glycine max
  Clone ID: PAT_MRT3847_9991C.1
gttttaggagtgtttttctttttttttttttttttaaaaaaaaaagcaggggattggaaggccaccccctaagtccttgacagaaaatgtattcattcactcatacgatgttatacagggactttcccataaaacatacatgcctagttactataaaaaaagaaacaagccgcctggtttaaaattccaactggaaattagggagtacaatggccaaagtttttaattcaaacacaacccactgaaactagttttccaaatgggcccttctaaggctaagtttattttttttgattaggacaaaatgagggttaccacaccatgagaaacttaaataatggtccctattcacggcctttattatagcacccccggaaacgaggctgaaaagtaacaaggaaccaaccagaggcgtttgcttacccaaaactcatccctgaatttacatcaccgctgctggttttatttaaccgggccctgg

SEQ ID NO: 142752 - DNA, 411 bp, Glycine max
  Clone ID: PAT_MRT3847_99920C.1
tttttaaattacaaggaaagttctatttgagcaaaacattaaacttgctccttctaaaatgatacctcgcaagaaaactaattggcaccatactgagcaaaacattattaataaagcaacacaaaggttcctgactaaaaatgaaagccaaaataaactcaatgaaaagtacactgtattcacgaaaattagttaaaataatcataattcaccatatttttagcaatgtggacagtagacctaaagttccatatgaaaaagctaatactttctgcactaggccctttttcaaagaagccttattgacaactaggaaacacaataaaaatgaagaatgtttgataatttctcttcttactaattaaatgccacgcaacaagtgggacgggtagcattgaacttagcaaacat

SEQ ID NO: 142753 - DNA, 518 bp, Glycine max
  Clone ID: PAT_MRT3847_99921C.1
acatatactggaactcggttttccattaggtggacttgctaagttgtttgctcaagactgggaaggtgatgtgactgttgttattcccgcactcttgctcaggtatgcacctaaagaacagtaaaataacagctagatatataaggataaaataacttcagctagatctcaattcaaataaaaagtgctagtggttaacaccaagcctttgattacaatacttgatgaagtttccttggaaacatactggaattatgtggcaaaatgttctttctatattcatacacttatgctaaaggttcaggaatttatttatgtatcatttacgaaagatgactcagttaattagtgattaacttgtgcatattgtgactgttgttttacctatgtcctgttccagtacaccaaaattatacagaacccttcttatggagagcttcaaaaggcaaccaaccaagggagaagatgtacctgggagaaactttcagccataaaagcaaattgtggcattgagcttg

SEQ ID NO: 142754 - DNA, 991 bp, Glycine max
  Clone ID: PAT_MRT3847_99922C.1
cagactccaaaaccctggtagtgtgctccgttgagataaacctgagtgggagtgaggcgaagggggagaaagctaaaactaaaaaatgtcatcttctaagctcacactgtacggaatcggaaccgcactcttccgcacccgtagaactgcacccgtaactgtaactccccactctccctttctcttcttcaaacccattcccttcccgccgtgcttcctccgccccgattcctcttcctcctcctccttctccgccgccgccgccgccgccgcagaaaccctaccctccgtcgaccacccctggccggaatgggtctccttcgtcgaccgcttgaacaccaaaggctacctccccaaaacctcctcttccgacgacaccgtaagcctttacgccaacatgaactctctcaaggacgcttgtctcagcttcgcgcgtgaccgttacgaccttttcaatttgctgcctacaaatgatatccaagcagtggttgagggtgggtgccctaatcttctccgtaaagctgttaattcagctaagaggctgagagcacacctgcaattagatgaaggggatgtttgtggtgcttgctatctacgaagctcttgtgatagagcttatgtgattctgaaggattttgaaactgatgcccgaactgttgatatagttcgaatacttttgttctacgcactagatccacttgtgctttctggaggagacaaaccaccgggccgggaagttattgaatcatctgtcagaaaacttctctctcagctaattgagttgagtgagtcccctgctcctgcccctgctcctgctcgttcaaagcctactgcacaggatgctgtggtagaaggccaatctctaagtgttacgactaatcaattgtttaaagatgctgagatgaagaaaggtgactggatgtgtccaaaatgcaatttcatgaacttttctagaaatacgcaatgcctgaattgtaacgaagacaggcat

SEQ ID NO: 142755 - DNA, 496 bp, Glycine max
  Clone ID: PAT_MRT3847_99923C.1
aggcgactactgctgggacactgctgggctctccgcagaccctgaaaccttcgccaagaaccgtgaactctaagtgatccactccatgcgggccatgctcggagccttgggctgcatcttcccggagtagttgtcccgcaacagggtgaagttattagaatccttgtcgttcatggccgggtcccagatctttaccgatggtgggctcgactacttgtgcaccctaagcctgatccgcgcccttagcattcttgccttctgggccacacttattatcctaatgggtgcctgctatcgttgaccgattgttagtggcctcgactgtgaggttactatccaatactacccagatggctgctcgtacacatgcgaccttgatgatgacacatatgtctttgctgtgctcatagttagcggcattaattacggtcgagtgtgctatttctttatgattgtattcttgcagcaagccacgtgtaacgacgagacatcattg

SEQ ID NO: 142756 - DNA, 169 bp, Glycine max
  unsure (1)..(169): unsure at all n locations
  Clone ID: PAT_MRT3847_99924C.1
tctcccacacgtncggcttaccttttggcccatcccgaatacaactaattctgttgaactgacttggcaccacttccttgcttggagactgatacaaacacactgttctcaacttaaggtgccttccaacgtatcccgcctttcctttattntttccttttcccatata

SEQ ID NO: 142757 - DNA, 196 bp, Glycine max
  Clone ID: PAT_MRT3847_99925C.1
gacatcccattcgtcaacacgcgcagctatccctgcatcgtgctctaactctggctctgcctcgagctctaggtcagacgacatcgccgagtactactaagggcggcatgacagcgcgctgagcactgagccgaagcacttgctcatggcccagttcttcggagttaagggttcctacgcttggctgtacgcacgg

SEQ ID NO: 142758 - DNA, 467 bp, Glycine max
  Clone ID: PAT_MRT3847_99926C.1
ttccaggaaggtttcccgtcatcactgtatgacgtcctccttctttgggggggggggggggggggggggggggggggggggggaaggagtaaggagaaaaatagagtgcaaccgggaaattgggagttaataccccccgaggtataatgcgtggcaacgtgtggtggagttccggtttaaaattttgcctgaaggtaaaaatctagcgttatcgtgtacggagacgagggatacgagtacaagttaagtcaagatggaatacatgaaaaatagggtaaaaaaaaacctagggttgtgaaaaaggtaaattaagatggactaaatgaaaaatagtataaaaagtcaaaaagtttatcgccgaaaaaaaacgcgtacgtgtcgtaggcgggtttaagataatacaaaaagcgtacataaacgtaatgcagcgcatcgtaaggctaagtatcggggggtggaaaattgga

SEQ ID NO: 142759 - DNA, 438 bp, Glycine max
  Clone ID: PAT_MRT3847_99927C.1
aggaaagggagcctgaggtttgttgggactcacttgtcatataaaacaataatgaagcattaatcgcgttaaatgcaaacgatacctcattttttgtttcttttgctaataaagcaaaatttcactttgaaagaaaataaaatatacaactcaaaaaacttggctgatattagatgggattctaaaagtttgaatgtattgtaagaaacaaagatcatcttcacgcgtcagctgtgtctaaagatggcctatttcagcattttctttatctgggaagatccgagggaccccatgaaagcattcccttgcctctacagccataagtacaacatcgccactttgaaagaacattgccaggggagtatcctctctggattttcctcctaaaagaaatatagctttgcagcccagacttagactaactataggcttgctcca

SEQ ID NO: 142760 - DNA, 558 bp, Glycine max
  Clone ID: PAT_MRT3847_99928C.1
ataaagctacattgaaaggattgatgaaatataagcttcattcgagggacttggagaatgcaaaattttgaaattatatatctttatcttgttttcatatcacaaacaatttcagtagagatttattaattcctctaaaatgaatagtttaatttaaagaataaaatataattacaatcacaattattgaataaaaaaatgaggatggaatgaattccttaaataaagcatttgagtattgtaaaaagaaaaagatagttaagagagggtattccatttaaaagtgatcaactattagataccctaataaatattagccaacaataaaattgatagatatcttatataccataataaaaaattataaactaaatatttagtcaaactaattaaaaatttagttggtagttaaaagttgaaaattaacttattaaatgataagtgtttgatagaactaactgtaaaagtaattaaaaagtataaaatgacataaaaataataaaattataatttattttaaaaagataatcaaaaaatcagataaatatattaaggata

SEQ ID NO: 142761 - DNA, 305 bp, Glycine max
  Clone ID: PAT_MRT3847_99929C.1
ccccgccacaatggctttgccttcaccggcactatcaccttgtacgctctatccttctgcgcctgactgcaaaactgaccaaggccgatactctgacagactatcactacttctcaacacgctctgatttaagcattactatcgctaacgcgcatggatattttaactttctatacataaccctagttctccatctatattatcacactagattaccttcttcttatctgactgtcgatcatggcgtgagcgaagaatgccatagtgactcacatagtgatggctatatcaaatgaggctcgtag

SEQ ID NO: 142762 - DNA, 794 bp, Glycine max
  Clone ID: PAT_MRT3847_9992C.1
agagagaagcaagcacgtacatattagtgatattacaaaatgcatatgctctaatttcaagtgaaaatatgcatcccataaaactaacagaaccatacatgataacatgtaggaaattaaaacacccactcgttacaaaccatgaaatcacactattgctacttttttttataaaaaaaaacaaaaaaaaaaaaaatcacaaactagtactactacgtactactattttttccaggcgacaaagcctagatttcttagaacataacacctcacgccacaattattttcttaacgaaacactaaaagaaagactatataggctataatagcaaagtagcgaccgaaagaaacacgaaggtgtgtggtctcaactctcaagggagaggaagactgggtccttcaccgttaccaggacctccgagtccgccaagcccaccaggcccaccgaatcctccaagtcctccgagcccagaaggcccacccatattaccatcaaacccagaacccactccaccaaagggaaggccattgttgccaactcccgaaaacccatacccaaggaagttcttctggtcctccaaaccagcgtcattgggcatgtttctggcacttgcaaccacggcaagagcaagaaccaccaagatcatgcaccacctagccatttttctctctacacagcacttgtttttctccctttcttacacactatgcttagttgctttttcacttggtagtagtggtggtccccttctgtcgtcttctcgcagccgtactcgagccgattcggctcgaga

SEQ ID NO: 142763 - DNA, 903 bp, Glycine max
  unsure (1)..(903): unsure at all n locations
  Clone ID: PAT_MRT3847_99930C.1
cttcagagttggaaataccccataagaaggagcataattcatcacttgtaaattaggttcttatgatgacaccaaccggctgacaaggagctgagaggatggatgcacaagatggtgcaaactgcagagattatgagcatgacatacaaaatgaagaaagtggagggtactggtcagggatatatgactgaaacatggctcatacatgccacttcttatgaagagggcttacaccacctcccagattgctattgttggtgccaacccctgccctattgaaagccttgactatgagatttttgacaatgaaatattgaagaatgactggagatccaagaagaaggttcagataatccacttatgtgatgcttaagtggggatttgctcttcttattggattaggtactggattggttggcttctttaacagttttgcagttgagaacatagctggtttcaagcttcttatgaccaccggtctcatgtctaaacacagatatcttgatgcttttttagcatatgccggtgcgaatatgtgtttagcagctgctgctgctgcactttgtgctttcattgctccagcagctgcaggctctggcattccagaggtaaaagcatatctncaatggcgtggatgctcaaaatatcttggctccaagcaccctttttgtaaagatattttggttccatcctaangagtttctgctggattttgtggtgggcaaagaggggcctatggtacatacaggtgcatgcatagcttctttattgggtcagggntgggatctcacaagtatcacttgacttgcacttggcttagatatttcaaaaatgaccgagaccggcgagacatganttacttgtggtgctgctgcttgntgnttgctgccgccctttcgtgca

SEQ ID NO: 142764 - DNA, 349 bp, Glycine max
  Clone ID: PAT_MRT3847_99931C.1
tgatggttctggtgctacttactcccaatgttgaccgtgcgctataatgagaatgtacatggtggagggacttaggcgtgaaatcgcacatgctatctatataaactccatttttcccagctggactaatgtggagggcggaccaaatcatgaaaccaagagcttggagtctttctgtctatcatctgtaagactaatgctcttccacccttattgtgagcttacttgccaacgaaaaaaggatggcgtatttagatatcttgaagagactgaagaatggctttataaggatggagttgaggaaggtgaacatggttattctacaaaactggacgaactctaaaagctg

SEQ ID NO: 142765 - DNA, 733 bp, Glycine max
  Clone ID: PAT_MRT3847_99932C.1
cggacgcgtggggttagaccaaagattgcattgctaagaaaacgcagggacagattcgaaggcgagatccagcagaaaattgcagtgcgcgccttcacccaatcacagatttaacatcaacaattcaaatctcaactcaaccatgtgggacacaatcgccaacttcaaggagaacttgaacaaaatagccctcgacgttcactacgccgatgaagacgacgtcgttttccctcccgacgtccacaccgccgccgtctccgatcgccgcaattctcacagctccgcgcattccaaatcgcttcctatgtcgccggctgcctccaacggaacatccgatcacccctactctcctgaggtaatgttttcatgaaattcgctgcgaggctctgcgattattatttttttgcgatgcgataatggaatgtgccgtgggacgttggaatgttagctagcgatgtgtgattgtgaatgctctacgagtaattgagtcgcatagagttcaaattagaatttagaatttgagagtggaagtaggataacgaataattgcgtttgatttaagagtggtgtttcaaaaccctaggcgtgacatcgtgtagataacttgacagattaactagaagacaaaccatgaaaccacttaagagcgtggatcaactaatacgaaattgtttcaactttaaacttgtggtttggagttcataccctaggtatgtagttgcgggcattactc

SEQ ID NO: 142766 - DNA, 593 bp, Glycine max
  Clone ID: PAT_MRT3847_99933C.1
aaaaaaacccggggggtatttttgatttggcaaaaaaaattacccaatccccgccggacatcacacaagaggggggcccctccccccttaaaagccaaggataactttggcccatgacccgacccatgcccccccaaaaaaaaaaaattttacctttttacctacaaaaaacaaagactttaaattttaaaaagaagaaaggggataccccgacctttttaatgaaaggaaccccaaccccccaaacctgggcttgatttttgggggggggggggcccccaacttgattaaacaaaaacccgttgattgaaacacttggacctgaagggaagggccctgattaccacccgggggaaaagggcccaaaaacccccccccaaaaatggccccccccaaaaaaaccaggggtcaccccacccaagggccctggtgaaaaagataacccccccaaaactccgagcgggggtgaccccccctccggggatggggatggttcccaaatgaaccaaaaacccccggaaccccattggcaagggggccccaaaggggaccggggagtccccggcccctcccttggcatcggggggggaaaa

SEQ ID NO: 142767 - DNA, 151 bp, Glycine max
  Clone ID: PAT_MRT3847_99934C.1
acggcacgtgtagcggattactacgccgtcgatacacgctactgctgaacgacgacaccgctggaatgacacaccgctacttagtcgtgattcttatagttatagcctatacattgaccattacctctattcgacttataatggcgactgt

SEQ ID NO: 142768 - DNA, 406 bp, Glycine max
  unsure (1)..(406): unsure at all n locations
  Clone ID: PAT_MRT3847_99935C.1
atatatnnnnnnnntgtctcaattaacattgaactcagtatctaacatatataaactagtgaaatataattataaaccattaaaaaggaaaatagtgaaacgcaatgacgcatacggcatgcaggagccatgcatgttggacttatttagttagttatggatcccaagggaagtcttcaattctccggacgagcaggagcaggagcaggagggaaagtgtaacttccgcagcgggttccgggtggaactgggattccacaggaattgagcacatagacacctttttctaagctgaagagaagagcgtaaatagtaaaatattggcataggcagggaatgtcagcaccttccagggcttggcagcaggctggtgatggcggttcctttggcccaatgcgtctggtgc

SEQ ID NO: 142769 - DNA, 480 bp, Glycine max
  Clone ID: PAT_MRT3847_99936C.1
caacaaatgagaggagatagtgaaaattccatgcgtggttattcattataggaaagcgtgatgcggaaggacacggttggaatcaaatgtttactactgacaagaattcccccaaaatgattccatgtgattcaacctttggaaggagccggaatcccaacaaatatgatccatcccctaccaaattgcttagcttattttaccctaaaccaccaaataaaaaaggggtaaaaattaccccttccaccgatgttgactttaccttgttgagactttcgaaccccatcaaaaaagacaaaaatgactgatatcactgcaatttttcaactctgctgaaacattggtagcttttttcttccagaggctcctaatattatttttaaccctatacaactgtaaccaacccacccacaaaaaaatataactatcttttgttctcccaacaaagctttttactttttcatttaactaccttttccc

SEQ ID NO: 142770 - DNA, 1361 bp, Glycine max
  Clone ID: PAT_MRT3847_99937C.1
tgcacacttaaaactgggggctctatggtacttggttacactatgccatgccggcactttccttgctggttgcttccattcgctatggcgttgcaggagaggctagacaagttcaagaaacagcaagagaagtgccaaacgactcatgatggcgttgcaggagaagctagacaggttcaagaagcagcaagagaagtgccaaacgacactttcgagcattgcagctagtaaggccgcggcaacccaaaaatccgccgctcatggctcggccaatggaagaaacgcggcccctgcggttaagttttcgaacgacacagagaggcttcagcatattaatagcattcgcaaggcccctgtgggtgctcagatgaagcgtgttattgatctccttctagagacacgacaagcttttacaccagagcagataaatggggcatgctatgtcgacatgaaggctaacaaagatgtctttgagaatctgaggaaaaacccaaaagtgaactatgatgggcaacgattctcttacaagtcaaagtatggttttaaggacaaaacagagcttcttcaactggtacgaaagtatcccgagggcctcgctgttattgacctaaaggatgcttaccccaccgtgatggaagatttgcaggctttgaaagctgcagggcagatttggctgctatccaacttcgattcacaggaagacattgcctaccctaacgaccccaaagtacacattaaggtggatgatgacctgaaacaagcttttccgcagtattgaattgccaagactgcacagaggaggagaaaggatcttcaaaagaatggaatgaagcctgctaccaacactgcacagaggaggagtgcagctcaaattcaaggcatttcttccaagcccaagcctaagaagaagaagagtgaaatcagcaagagaacgaagcttaccaatgcccatcttccagagctctttcagactttaaacagttcctgattaactctcagcaagtgttggtgtagttcaaatagatactttatcagccagtctataaactagattagcagagtgaaatattcaggaggttcttgctgctgtgccctacttttaatttctatacatcaaggctgcagctaatggactattgtggtctataacaactcgtcttgtgaatccctgtatattaaaatcatgttgcatttagttttctagtcttgtaactttttatacataaattattagattggaagttcaatttttttccttcaacttatctaatgagcttaagcagctgtatgtttaacatgggatagtaacctacccaatgtttcaaaagtggacttggttaaaaataccccgaattcaacgt

SEQ ID NO: 142771 - DNA, 339 bp, Glycine max
  Clone ID: PAT_MRT3847_99938C.1
gttcagcacaccggtggaggaagaggaaacggtcgagttttgttgggatttgatcactgcaatatcaatagccaatgttcatagattccacatattctggcccaactttcatgagtaccttctttcagttgctcagtttcccatgttctccccaatcccatttgtagaaaaaggtattttaggccttctcaaggtctgtctcaagctcttttctgcaccaagagacgaaaaacaagccgaggaacttattttcaagtccgtaaacttaatgtggaagcttgatatagaaatactcgacacgtttcacgatgtcatatcacattcaagtagcaaaatact

SEQ ID NO: 142772 - DNA, 588 bp, Glycine max
  Clone ID: PAT_MRT3847_99939C.1
gtccaaatccttctgaacaaagctcaaataacaatgatgttggttctatgtatggggcaacaaccagtggaaattcaaggcagagtttcaatcaagatcaggttccaaatttgactgggagttcatccccggaaccagcatctgagacccagagtggtagagcagagtggacaagaaagagtttggaggggtcagctgtgaaggaaccagatcctttggacatgtcagaggaggcaaaggctgagaggtggttccgtcgcattgcacagattaaggatatttctgagctcagtcaaattccagatgaagattttccttcaataatgcctatgcgcaaaggggtgaacagatttgttgtaagcaagaggaaaacaccattggaaaggagattgacgtctcagcagtacagaagaaatcttccaaccgcgagctcagatccaattaaaaaagaaaatgaaggtagctgaaagtggtagtattattaatttattatccatttgcttaatttttcaacgtgcaattaaaatgttgctggcaaatatagaaatggatcaaaccttttatttacacttgtaacagaattttgac

SEQ ID NO: 142773 - DNA, 486 bp, Glycine max
  Clone ID: PAT_MRT3847_9993C.1
aaccgcccacgcgtccggcaaatactgatgcaactttggttaacaccggcgacactggtgcgatctgactccagcaaacaacaccggtgcgactctgtctctagcgaacaactccggtttgactccactcaacactgttctgatgaatcaagatatttccactttgtcgttccctatgaattttatttttttttgcatcaaatcacaaaaaagttaaatgataagaacttcttgctgtggcgacagcaaatcaagtcagcgatcactatgcgtggactcaatcgcttcgttgtgaatcctcaaatccctccgcaatatgtctttgatgaagattgcgatcttgatcgcgttaatcctctcttctcgatgtggtaggaacaagattagtttctccttgtttggcttcagtcaacgctctcgagctcgatgcttgctcgtgttcttggatagacgtactcgtatcaagtgtgggacaagacccaagtg

SEQ ID NO: 142774 - DNA, 432 bp, Glycine max
  Clone ID: PAT_MRT3847_99940C.1
ggctcgagctgccatattcttgttctactcgttatcttgtgtttggattgtccgcatattaagaaagacatttgttattgcttaaaaaaaaaaaaaaaaaaaaaaaaaaaaaaaaaaaaaaaaacaaaaaaaaaaacaaaaaaaaacaggaaaccgcgaggcatacgcctgtgcgaacccgcgaaatgctgcctaactgccgccgagacccagccgcccggccactccgggaccaacccccaccgccgcatcaatcgcggtcctatcggcaccgcgcaaacgtcgcacagccactgacactttcacaggccaaacaacgcgcgagcccgaccttcaggcgctgaacttcgccggccttgacccgagcggccgcattagcgactacatgtgccgtccctggcacgccaccacccgggaccaccagcaaccccc

SEQ ID NO: 142775 - DNA, 385 bp, Glycine max
  Clone ID: PAT_MRT3847_99941C.1
gcagcccggcatacggctcgagaaaagattggcgggaaagatgaacattttctgcagttcttcgtggctctccgggctcaggcactggcgtagcgcaaacaacgatcacggtctctctcacggccgaggatgctcgaacagcatgacgcgtcgctcaagaatgtttcgaaaaactataggaagcccgatggcacattgtctggtggagcacgagatcacgcccgccaagattgtcacccttgcacccaggtaaccgcgctaatcttgtccatgaaggccgaccgtcttgggctcaatatgggggcagcaggccatggactaatgcgatattgatggtggaatcctacaactgacgaccaagcgttagatcgagcacatcaactgg

SEQ ID NO: 142776 - DNA, 534 bp, Glycine max
  Clone ID: PAT_MRT3847_99942C.1
cccacgcgtccgcccacgcgtccgcccacgcgtccgcaagtttgagcttttagcccaattaaaatgcgatatgaattttctgagttctgagattaaaaccgactccccctgcaatgttaatccaggaaaattttcgacttcaattttatgagccgatcagaagagaacattcgctgattgtcaccaacactgacgtggactcactttgtgcaacaaatattctcactcacattttctcttgtgacgatgcctcatacactctcagtccggtggactccttcccgacgttggagaaggcaatcaatgaccatgtcagacaggccaagaacattgtgctggtcaattgcatcggctcgcggtctgtcagcgaattgagcattgcccgactgacggacgaagtgacattctgggtgttggagtcgcggagaccgctcaatttggaggacatttacaacgcgaactctgtgcgcgtgttggccccagcagcggaagttgcggaatggacactgcccgaagcgagtgccatttttgaaa

SEQ ID NO: 142777 - DNA, 151 bp, Glycine max
  Clone ID: PAT_MRT3847_99943C.1
tttgtgaaaagaaattgaccatttaaaaagaccgcagatccagaaaagggagcaacatatcccatgcaaaacaatctagcggggcaaaaaggcctataaaatggggtcaaacgattcacactaactttccgattgcgaagaaataaattgt

SEQ ID NO: 142778 - DNA, 187 bp, Glycine max
  Clone ID: PAT_MRT3847_99944C.1
cccacacggacgtttgcatgtgagctgagggaggggtgtaactgcatacattgcctccgcaccatacatactctatgggttggactcaccagctctttgcgaagggttgttctcatacacttgacactatgactagaggttcaaatattggacatgtcccctaaaaagagtagccggtacactctgt

SEQ ID NO: 142779 - DNA, 322 bp, Glycine max
  unsure (1)..(322): unsure at all n locations
  Clone ID: PAT_MRT3847_99945C.1
caatttccaaacggcatctccttgagcaaggatgcttccctctttgtcttttctgaagggatgaatggaaggtgagtctaatattcgcataagttcataacccctttctattttctctatatgtggtgaaaaagatactaatttgattggttttaagttaatgttggcagataccaattaaacaattccagaagatttttctattttctctactgaactcatgctagtgttatccagaagtgaaatttagaaactatcttttccataattttgtaattttcaaaanaaaacaaaataaaagaacaatttgttttttgacatt

SEQ ID NO: 142780 - DNA, 510 bp, Glycine max
  unsure (1)..(510): unsure at all n locations
  Clone ID: PAT_MRT3847_99946C.1
gttctagatcgcgagcgccgccctttttttttttttttttttttaaggacacgagaaaaagttgcctgataaagcatcttgtgatatacaaaccagtacgaaatatcaaatgaaaacacattaacgttcaaatccttacggtatacgatatccctagttatttattttaatatgagctttacacgagccttgtacagatttgtttaaactaaaaatacaacaattatcaagcaatactggcctatgcgtctttgattgggttgttttttggcagggttatcagggtttcttagatgcagagtttaatagaataataactgaaaactcgtggttcgtttttggtggctgatatgctggagcactcagtgcatgggtacgtgtaaagtttgcccatttaacatgtggaagtntggnaagttttggaggtgttgttggtgtttataactttacagaatatgatcaacagattggggaggtaggaggtggtgaatgtaaaggagtgttacaaga

SEQ ID NO: 142781 - DNA, 201 bp, Glycine max
  Clone ID: PAT_MRT3847_99947C.1
ggggtggggggactgtggagttgagggcaagaggcaccacaacaccataaaaggaccattatgccatgttaggtgcaagaactctaaccctagcagaaaaggaaaaggtgaaacaatcccaaatccaagaactcaaatgacatctaaagctccgaaaatcacaacccctcaaaactaaagcagctgcacctggcaccgaaa

SEQ ID NO: 142782 - DNA, 718 bp, Glycine max
  unsure (1)..(718): unsure at all n locations
  Clone ID: PAT_MRT3847_99948C.1
ccacgcgtccgcggacgcgtgnggcctaaacacaacaacgctgcatctaatccaattctcgtacgtgtgtgtgcttttttctctcctcgaatttgttccctctccttggtcccctcccaacatcatcctcttttgttccgaaattctcgggttctctgctaatttccgccattttttttgtccacaccaagtacttgtgctctgaccggcttccccttccgtaactcgtcactcactaccgcaagctctcttcgcaagatcgagcccgtgcataggttctccgggtacccaattgaaaaaagttgagatttgatatcatatccagaagtgagtagattcgatactcacgagttcagttctgattaggattaggaagtgtaaggatgaagagagggaaggatgatgagaaggtgatggggccaatgttccctagactacatgtcaatgatacagagaagggaggcccaagagcaccacctaggaataagatggccctctacgagcagtttagtattccttctcaaaggttcaattcaggtgttctgccactcaacccaaatatttcaagtaatacagttccccctgcatcctcaagtctgaggactgtccctgagagaaattgtgtctaccctggtcatttgcaccacaaagacctattcatcgagctgaaaaaggtactcacgccaatcagaagggacanatttgagtgcttctcttg

SEQ ID NO: 142783 - DNA, 406 bp, Glycine max
  Clone ID: PAT_MRT3847_99949C.1
aaaaaaaaagggggttttgtttttaaatcaagtgggagggaggctgttacatgaaaactttttattggctcataagatgataattggtttccccccgcatttaattaacccccttccctttttaaatttcacaaaccttaaatccccgggatccaatcctgttgagcggggaaaaaaccggttgcaaaatgttgtaaagaaccccaccaatagccggggtgaaccacaaacagcaaaagctgtcccctgttgttcgaagagggggcttaaaccctcggcgccactttaaaagccgccccccccgatgtttggggggggaccaccaagccggccaaaccgccaggccccaacccaaggatcacacctttggggctgcgcatgcgggtaaaatggttcaccccccgtt

SEQ ID NO: 142784 - DNA, 229 bp, Glycine max
  Clone ID: PAT_MRT3847_9994C.1
atagacgacacaaatggttttttattatatccaaccttccccagaaaatatggggtgaggaacctatgtagggggctggaaagggaactttcaaattcctaatctgtaacaaatctgaggcaattttaaagcatttgggactttttgaatacccaacaatattttttattaaagggttaaacccatttcctaaattttgaacgtgtttgttgattgatgtaaaaaaata

SEQ ID NO: 142785 - DNA, 367 bp, Glycine max
  Clone ID: PAT_MRT3847_99950C.1
ttgagatgactgtgtactagataactaccattacacaagttgatggctgaggtagaaatcatcatgatgtcctgtatattatgacatatatggccttctttgtttgccatcaacttggattctgttgtgaatatgaactgactaaatgtagatttaaatttttagttgcttgctgtacttatttcggataagaagttgagcttcaggtttattgatggctaagcttgcgtttagataggaggaagccctgatgttgatacagctttaacatttgtgctggttatgagctttttattccatgtcgcatctgtatgtgagagtaatatgataaaactcgttagttttctagaatgcattaatcgacggg

SEQ ID NO: 142786 - DNA, 336 bp, Glycine max
  Clone ID: PAT_MRT3847_99951C.1
tcggttaatgtatgattgattaatgttatctggagactacaggtgcacctgtgacacacaatttattaattgcagaacattacgacattatgagtgttctttatgcaatagcaactaattttagaagagttgatccacaatagatgcggggaaatacgcatacgttgctgaattacagtttaccaatgtttctcactgataaaaataaatagtcactttaaagcagaaattttatagatcccccttatagtattacaggagagacataattttggactaaccactagaatattcttgcttacacagactgcgacaggctggagttgcaaatatgtt

SEQ ID NO: 142787 - DNA, 461 bp, Glycine max
  Clone ID: PAT_MRT3847_99952C.1
aattcggctcgaggtgaactcgttctatggaatccatcaattggtgtatacaaacggttacctttctctgacgaatatgacttaatcaatggatacctatatggttttggctatgacatatcaacagatgactacttgcttattctgatttgtttaggtgcatatgctctatttttctccttcaaaaccaattcctggagcagagtcgatcttcatgctcgatatgtggatcctgacagtgaattccaagctgggactctcttcagtggggcttttcattggttggttttctctaactgtattgttgaacatgatgatcttcctttctcttttgaagaatatgtacctttcatcattgcctttgatctcacacaaaggagttttacggagattcctctctttgatcattttactgaggaaaaacttgaaatttatagtctgagggtaatgggaggatgtct

SEQ ID NO: 142788 - DNA, 381 bp, Glycine max
  Clone ID: PAT_MRT3847_99953C.1
atcacgcgtccgtccacctgtatggaccaaacatggtatgagcaaggaggcagggatgattgaggggctttgtggaggggaggaaaacttgatgcatgacaggacacacctgctggagactggttggtcgagagtggctatttgctagaaagatgtatggagagctggatggggaatcccttctggttctccggtcccagttgtttgcggtaacatctttaatgagaagctcattggagctagctatgattaattactgcaccaggctgaagctgcaagtctggatatacactccttgaaagatgctggatcgttgcgtgtgtatggtgatgattacttagtgggtgatgctgaatatgaaacgccttactttaaagggtc

SEQ ID NO: 142789 - DNA, 225 bp, Glycine max
  Clone ID: PAT_MRT3847_99954C.1
ttcatccacgcgtacctcagtagatgaaccccaagtataataacaacaatcctatattatgcgaagcgggctcctaatgaggaggatatgatagcaaactgggatacagcggttgaagaagccctatgaatccggggtatggtggaccataatatagggagcgatggtgtggcccacattatggacttggattgcgcgggacccgtcatgaagatcacactcaca

SEQ ID NO: 142790 - DNA, 279 bp, Glycine max
  Clone ID: PAT_MRT3847_99955C.1
ttccctttgtttgtcaccgtcatcctagtcataacctggcacctgtcacaaacaagtaccacgaccaaagaggtagtaattagcctacccacaggcatcaatctactagtcaccagtggacctccaaatcctcgaccggattcagttcggctggttgtgtggtcttgttctgctcctagcccttgttttcgtcctaaatatgagcggtttgataaattttggtttagcaagcaccaatgttcgcccataatctatgctagggtttcaattccgagacag

SEQ ID NO: 142791 - DNA, 373 bp, Glycine max
  Clone ID: PAT_MRT3847_99956C.1
gtgttgtgggtatgtttatcttcattcatttcagtgcagtctagctgcttttcatgtagctcatcgtaagatggcagtagatcataaacacatacacacgtggacaagactcaaaaaaagctgtttatgctttagcagcaccagccttgatgaggagaacatcaccgtcctcgacaacgtagtccttgccctttgtcataatcttgccctttgccttcaaagtggcttcatctccctcttccttgagtgcgctgtagttgtatacgatagcctggatgaaggtcttctcgaaatcaccgtggatgacaccagcagcttgtggcgccttggtgccagtcctaattgtccattggcggacctcatcggtaccagt

SEQ ID NO: 142792 - DNA, 719 bp, Glycine max
  unsure (1)..(719): unsure at all n locations
  Clone ID: PAT_MRT3847_99957C.1
aaaacaatgaagggtggcacggttcagattagctggcacgacggcaaacccgtcttaaccctcgatttccaccctcactccgccactctcgccaccgccggcgccgatttcgacatcaagttttggcaaataaaaccagcggggtcaccgaagaagcttcccgtggtttcctatcttagtaacctctcttaccatagctctgcagttaatgttattcgcttctcttcttccggggaattgctagcctctggtgctgatggaggggacttgataatttggaagctgcattctactgatgctggccagacatggaaggttctcaagatgttacgtggtctactgatgccacgtatatcatttctggatcagttgataattgttgcattatatgggatgttaacaaaggaactaaccttcagacgttggatacccatgcacactatgttcagggggttgcatgggaccctctagggaaatatgttacttctcttagttctgataggacttgccgaatttacatgaataagcctcataaatcaaagggcattgagaaanatcaattatgtttgtcagcaagtcatttccagggcagatcagccattatttaagaattctaaggagaacaaatttcatctcttccatgatgagacgttgccatctttcttcaggagattagcatggtctcctgatggttcatttctacttgggcccgcaggctc

SEQ ID NO: 142793 - DNA, 2026 bp, Glycine max
  Clone ID: PAT_MRT3847_99958C.1
ggtagggtcggcccgttccgggtagctggcacgcccgagcacgcctctcctcactctctatccccacccacagcccatgaagggtggcacggttcagattagctggcacgagagcaagcccgtcttaaccctcgatttccaccctctctccgccactctcgccaccgccggcgccgatttcgacatcaagttttggcaaataaaacccgcggggtcgccgaagaagcttcccgtagtttcctatcttagtaacctctattaccacagctctgcagtcaatgttattcgcttctcttcttccggggaattgctagcctctggtgctgatggaggggacttgataatatggaagctacattctactgatgctggacagacgtggaaggttctcaagatgttacgatctcatcacaaggacattctggacctgcagtggtctactgatgccacatatatcatttctggatcagttgataattgttgcattatatgggatgttaacaaaggaactaaccttcagacgttggatgcccatgcacactatgttcagggggttgcatgggaccctctagggaaatatgttacttctcttagttctgataggacttgccgaatatacatgaataagcctcataaatcaaagggcattgagaaaatcaattatgtttgtcagcaagtcatttccaaggcagatcagccattatttaagaattctaaggagacaaaatttcatctcttccatgatgagacgttgccatctttcttcaggagattagcatggtctcctgatggttcatttctacttgtgcccgcaggctcttacaaaattagtactgcatctgaatctgtgaatgcggcttacatattttctagaaaagatctttctaggcctgctatacaacttccctgtgcaagcaaagctgttgtagctgtccgattctgccccatattttttaaacttcggggaacaaattcagctgggttatttaaattcccatatcgcatcatatttgctgttgccactttgaattcattgtacatttatgacactgagagcacctctccgatagctgtattagctggccttcactatgccgcaataacagatattacctggtcatctgatgctcattatttggcattgtcctcacaagatggtttctgctctttggtggaatttgaaaatgacgaacttggatcaccttactctttatcagaaggaaaagtctcaaacaaggatggtaggagcactgtacagacaaccaatgacactgtaactgtaccaactgggaatgttagtgcagttctagcagagagcaagaaaatggaatcagaagacacggctgatgacgtggtcattgaagcctctggcaatattggtgctgttgtaacagaaagtgggaaaactgtaacacaagagaaggctggcatgatccagtcaactgggaatttagcagattttaggaaaaatgaagcagcagggaaagctgtttacatggtcattgaggcaacaggggatgttggaggggttatagcagatagtaggaaaaatgaagcagaagagaaaactgatgacatggtcattgaaacaactggaagtattgatgcagctgaattagatagaagaaaagctgagccagaagataaggcagagaaacagccagctaatctagattcagatggtaaacaagcggaagcaaaggagaagacaaagactctgcaatcaagtttagacggtataaaatcaggggcagaagaaaaggcagggccacaattgttcaatccgaagagtacacccatatcaaataagccagccaagaagcgtattactcctactgccattgatccatgatttttcaattcctgagaaattctttccatgcatgcctgtatacatctgttgtgcggcatttttttggaagtcatatttccccctctaatgtttttctcatagttttcgttgacatattctgtaatatagattccaatatatcatttagtgaaaacaatcttcaatttggagact

SEQ ID NO: 142794 - DNA, 1176 bp, Glycine max
  Clone ID: PAT_MRT3847_99959C.1
ccacgcgtccgataaacttgtatgtatttgtgttcccacctcatgctctatataaaccctattcttgtagcactttactctccaagcaactaagcaagatatcatcacattgcaaagaaaatacacattacattactaagtctttgttcatttgagtagtagtgatggctagcctcaaggttgcatgtgtggttgctgtgatgtgcatggttgtggtggccatgagtgctgcacccatggcacaggccgcaatcacgtgcgggcaggtcgccggcgacatgtctccgtgcttcagttatcttcgaagcggcggaaaaccgtcgcaggcctgctgcaacggagtgaagtccctcagcagcgcggcgaagaccaccgcggaccgccagggggcgtgcagttgcctgaaaaaccttgtcattaatatggaacattatttgaagccatcaaacaacaatctttcttctatcaaccctcagccatggtgttttctttcaaccaaagcttctgcctttcttcttcgcttctccttctcctcatggccctctgtgtttcttctctttctgacaccgttttcaactctcaagcagcgcataccgctcggaaccttcttcaggctaaaaaaagtttgtattttttttcctctgcctatgcttttggatctacccgattattatgcttttttttttggtcctgctaacttaatcaacctatatcttaaatattaaaagggtgtggtttagttggtaattaacatttgttgagcatgtgagtttgctcacattacaaattcttggggagaggctaagagatttaaatgtgattaagccacaagactaagaattgatctaaccaaaagagttggtgcaatgggtgtaagattatgctactttcatatgtgtgaaaatgagatcagtctcttatcccgtgggttgggaactctcgaggactctgatgcaggaccaaagaagagtaagtactcacagcctgcttcagcatcataattgaaacttatccttccaaacacagcttttcatcaggtaatttaaaaatattgatgtatgatcagttaccattttttatatgtttcttgtgaaatacttttgagcaaaaaaaattgacaatgtacctgtagtttaagcagagttctaatgatcaaatattatctaacgccacccc

SEQ ID NO: 142795 - DNA, 139 bp, Glycine max
  Clone ID: PAT_MRT3847_9995C.1
aaacccaaaaagggttcttttaagttttaattgcaaaaaccttttttttgaacacaagtttgccaaaaaacttggaagaaaacatccataattccatattatagaccaaaatggttttatttacaacccaccctttcgg

SEQ ID NO: 142796 - DNA, 613 bp, Glycine max
  Clone ID: PAT_MRT3847_99960C.1
tacggctgcgagaagacgacagaaggggggatcaaatttcttgtgaattgtttcatcgcgcagtccatgtcccaattgccctagccgcgctaccacacaatactcaatacctttgttaacaacggcgatagttattcttccctccctcgtcgcttgcaacttatctctcattatttctcaaatctaaaaggttgagttttcgttacgatgaaagtgatgaagaaggggaaaagaccctcacatagtggggaaaagaagaagaataagaggaacagggaacaaaaccctgatgttgagataattgttgccacgcagaacggtaacgtggatagtgccaatggaatgcatgttagagaggcaaaaaaggagaaaacttccatcaacaaaaagagaaagagcaaggacaagaatctagttaggaaacgaaaaccgaaaggccaagaggttgatttggatgagcaaagtgatggagtagtggacaatcctcattctaaagctgaggagatccaagggttagatgggcacatagattctgattctggagcagctatcaaaccatgtaggtcaaagaaagacaagaagaaaagaaaggaggttcaagattcaccggaaa

SEQ ID NO: 142797 - DNA, 279 bp, Glycine max
  unsure (1)..(279): unsure at all n locations
  Clone ID: PAT_MRT3847_99961C.1
ctcgngcctaggaagangntgcataacttgcacaaacaaagcaaccctatgtcgnangggngnttgtntcaccggagccnntggcgccttggancnntgggggccctcctcctcncccagcgtngttatacggtccatgccancgtccnnganatcaaggatgaaaatgagacgaaacatttggagganntggaangagcaaagagtcgtctccatttttttgaaatggatcttcttgacatcgactccattgccgctgcnataaagggttnctccggc

SEQ ID NO: 142798 - DNA, 659 bp, Glycine max
  unsure (1)..(659): unsure at all n locations
  Clone ID: PAT_MRT3847_99962C.1
aaacgccaaaattgtacaacattgttcgactactcatcatcaagattttcatagcttgctttttccagcagcagccagctcggcaccagcaccgccaatgcagagcttgccagtctccttcaccttggtctggaagaggaccacgttaccctccttccacaattcagtcaccagggtctgaccaggaatcacaacaccagcaaagcggaccttgatgttcttgaactgaccgtaagtcctaacgactgctttaccagcgatnncgaaggagcatagaccatgaaggatgggctccttgaagccgccgaccttgctgaactcagggtcgatgtgaagggggttgcggtcgccagacaagcggtagatggccgcttgctcctcagttgtcttctcttcgacgactgcgtcgggtgcgcgctgaggcatcttgtaaacgcgggttgcagcgccacggtcgctgcccttcttggcgcctccgaagccaccagagccgcgaatgaagacggtgctctcgttgtagaagaggtccttgccagtcttcttgtccttggtggtggaaccagtgacgatgagtccggcgttgcccttgtcgacgacctcgacgaggctggggtatgaagtggtggtcgcctcagtagggatgggctcgtgccgaattc

SEQ ID NO: 142799 - DNA, 418 bp, Glycine max
  Clone ID: PAT_MRT3847_99963C.1
tcgaccgacgcgatccacgcacgcgtacatccacgcatacgatcttgtctgtatgacgatgttatatctgaatacacgtaaaaaggcacaagttcaaattgcttataatgctatacttcgctacttgccactggtttttgtccatcacagatggcttgtatccaaatggatacttcgaggaatgtccagaaccatcagaatctaaaggttcgacagatactacacccaatggcattcacattgtacaatctcaggaatggctgcatacatacaatcattggctaatcaaggtgacatggcactcgatgtgcctcatggtacctatgctgataggcttgccaccgaagcttccattaagcagaagattccaattgcgaacggcatgttctactcattaacattcattgcctcacgcact

SEQ ID NO: 142800 - DNA, 318 bp, Glycine max
  Clone ID: PAT_MRT3847_99964C.1
aatgtgggtttttccgtttttactctactccctatttctcggtgacttgctatctttatatagctcttctactaatcaaacacatatttacatactcacctatctttcaattctatttattcaatttttataatctctaattatatacccactctttttatcactctatattaaaaccttctaactaaatattacttctcacatatacccttctacattctcttattcattattccatatttatttatataattctattaatctcttaacttattgctaaaaatatttaatcctacataccttaacttttataaaata

SEQ ID NO: 142801 - DNA, 422 bp, Glycine max
  Clone ID: PAT_MRT3847_99965C.1
ctgcgagaagacgacagaaaggatccatgtctgaaaggggaaaagagataaaaaaatttaaaatttctgcaaggaaaaaaattaggcataacctccttaggaaacataacaccactagctttctttatagctttcgcccaatgtttcatcaatgatatatttaaaacaatgttaacaacacaatttattaaaataaccaagtgaaagaatatagaaccatagagagtaaactagtacaaagctgagaaaagaaacttacatgtctccagcctcacaataacctataacaatgcacacatagcaaccctaagaaggaagttaggttaatatgtcatccatcaacaatcaacaataaagaaaaactgtaataataaaaagaaataaccaaagtaattatccaaaatagagaataaacttaaatc

SEQ ID NO: 142802 - DNA, 120 bp, Glycine max
  unsure (1)..(120): unsure at all n locations
  Clone ID: PAT_MRT3847_99966C.1
catnatanggttncttntnttcctgggcttgaactccacaaagccanggaagganaacanaccaaaccaaacntattcnttatttcccacttgttcaacctgnggtgnatatancccngg

SEQ ID NO: 142803 - DNA, 474 bp, Glycine max
  Clone ID: PAT_MRT3847_99967C.1
aaaaaatagcccaaaaagtgaaatgaatgttgggataattggtttatatggatcgttcctggtcgagaccaaatatcaaaatgacattgccataaatagataaaatagtatttccatttatttatcaaaagaggagtattctttgaaaccaaaatggattttccttgatatctaacataatgcatgaaagtatccttaaagaatgataaggtatatgaacaatccttaacagatacttctacaagatgttctattttttcatagaaaaaaattcgctcaaaaaaaacgcgaaaatattttaatcgtaacttagaggatttgttacgtagaaaaagaaagatagattcatattcccatacatataaattatataggaacaaaaaaaatcttggattactttttgaaaaaaaagtagaaatccatttttttggagtaaaaatactattccaattataataataagaaaaaaaaata

SEQ ID NO: 142804 - DNA, 256 bp, Glycine max
  Clone ID: PAT_MRT3847_99968C.1
gacggcataaaaaatggctcatctgttaatattgaatgaaataattacaatacgtcaatacctgtttcggattacttgttccaagatattcacagaaatgtaatatgttaacttatgcccccccttaataaaaagttaatgttgttgacatgccaccgaaaattcttctttatttttaaaaacatcgcaagagaaaaagaacactcctggttttgacaaaattatacaagcattccttctcaaaatgcttaaataa

SEQ ID NO: 142805 - DNA, 151 bp, Glycine max
  Clone ID: PAT_MRT3847_99969C.1
ggctgcaacgacaaataggctcttggaaaaagctctatctacttctgctgccatcatttccgaactggagaaaaagaagcagaaaaagaaagaagagcaacaaagactcaatgaagatggtgccgcaattgctgaagcactagctctgcat

SEQ ID NO: 142806 - DNA, 434 bp, Glycine max
  Clone ID: PAT_MRT3847_9996C.1
aaacaaaaacaggaattggaacattatcaacggaaatcgcttaccccaaaaaaggggggcaacccccaactggtaaaaaggggggccccaaccccaataaaacccccggggggaaaacatttaaggaaaaccccccctgattaaaacaaatttgctaaaaaaaaaagttatgcatttcccctaaactttttttgcccttgttttaccgccaaaaaacatcccacaaaaaaaccctttttttcttttgtcgggaggaaaaaaaaaaaaacccttttattcaaagggggccccaaaacctggggcagcccccccggaactggaagttttcccatatcccctttggtaaacagggtgcctccccaagggggaaaaaggatatcggcaaacatgctggaaaacatgccatccaaaaactatacctttggaaaacccca

SEQ ID NO: 142807 - DNA, 233 bp, Glycine max
  Clone ID: PAT_MRT3847_99970C.1
caaacttttcaatctcttacactcatatattacttttcatgcggcatagttatattttaatgattcaacaatccagataattctttttcttttaaccatttccatttaaataagttctctacctcaatcaccttttcacccatccaaaatataacacccactttttataccaatatcaattcctcatttaaatgtgatttccatacttgtcaaaaattttattacatactccc

SEQ ID NO: 142808 - DNA, 433 bp, Glycine max
  Clone ID: PAT_MRT3847_99971C.1
tattactccaatgctttagacgcgcaccagttgtggcttttggagattatgaatctgttcgttgatggtatggagaaaagctattagactgagaagatggaaaaatgagttagcctgagcaagtgctgtaattctttccatatacctcttcttttaggaagcttgattatattttgctctacataagtaataagtaaatcataacataatgtgtcttcaacgatcaaagaatattagatagaatttgtttttttttctttcctcttttcatataattaactaacgaagtgataatatataaacacctctgaaacactttatcaacatctatttttttttttcttatcctatacatcatatatcacatatatatcatacctatttttttccttttttaactcttttccctctttagatgttaaataacattcgg

SEQ ID NO: 142809 - DNA, 315 bp, Glycine max
  Clone ID: PAT_MRT3847_99972C.1
gagaccccccaatgggggttttgaaatcaacaaatttctggtttgaaaggcaaaaaaccccgcccccgggtgcccaaaaacccggaaaacaaacgggaaaaccccatcctctttggggaaaacaaaggtaaaaaagggtggtaaccccccttccttttcacaaaaacccacggccccaaaggggggccccccgggttcacccgggaaatcccgccccgcccccgggggcgaacccagattcccaataaggaaaatcccacgcgccccgcggaataaccccccctccctcttcctgggggaaaatgaaaaccgggc

SEQ ID NO: 142810 - DNA, 214 bp, Glycine max
  Clone ID: PAT_MRT3847_99973C.1
ctcgagccgctcgagccgattcggctcgagtttgttaattatgctatttagtactcgtagttagcctttagtctgtagtgttgtgagttgtgacttctaccattgcttgctaatcatacaaaatggttgttctgccgatggcaagtcaatgttcaaagccataacatttgtacacaaacaatccacaagagttttcaaagctctaaggcaatgc

SEQ ID NO: 142811 - DNA, 530 bp, Glycine max
  Clone ID: PAT_MRT3847_99974C.1
agaacattttgatactcctttgtttgtttgggatttcatcttcaaactccatcaatcaacatgtaaagaaaaagatggaaattcacattcacaatagcttactttcaactggcttgtactagtatctattagaatttttaaaatggtgtcctataaccttctctcaagagatgcttaagctaatggtatgcttggaccagctcacactgtcttgcaaagccaattggatgcatctcttcatgactaagaattcacttacttcaggttggcaacttgcagtcaccaatggatagagcattaacataatagaaattggcaaatgctacaaatcagggtgctactttcctccagagtgttagttgttaaacatttagtggtccatcgctgattataccacttgtttctaagaaaaactattaggagaggacctaatgcatgacattgtgatttgtgtcatatgaccttggtaatctgcagtcctaattttgatccctctagacactaaggcaagtattcaagtacgagtaatt

SEQ ID NO: 142812 - DNA, 466 bp, Glycine max
  Clone ID: PAT_MRT3847_99975C.1
taactttttgttatttttttttttttttttttttttttcaaaaacaaaaaacacaccacatgcttttcttttaaatcccaaagcaaaagaaggagcgcctggccccattttctgaccttttcattctttagagaaaaaccaacattgcccatgggttctattttctgcccttcactttataccaaccgtggaaacacatctgtgtttcccaaaaacttacaaaatgcctatgactgcccctcaaaaaccaagccctctctttattagaacccttttggcgctcaaaaaggaaacgttaaacactctgttgagacctttaacgcgtgcagacaccaggggttctgacaccctcttgcgtgggtcagaaaagaaataatttatccccccctctccttatataatacccgcgtttttttggacccaaaagcaacccaataccccccagttttcccccccataatttttg

SEQ ID NO: 142813 - DNA, 344 bp, Glycine max
  Clone ID: PAT_MRT3847_99976C.1
acaaaaacaaaagatggctttccttattcattccttgaataaataatgcttaatggtggaaaacaggcctcttgggaaagaaaaatttccgggccctaccttggttctacttacggggtctttaacggagctgaaagagccctttgttacctctttggacataaaaaacatggttgggacacgggaccactttaaaagggtgcttgttatacatcttcaaaaagaaaacggcacattagttgcccaaaacaaaatccttttccgttgctctagaaagcttttgacccccaaaaaagacagaaccccttaacggactggcttctccggtttaccaccaactttgg

SEQ ID NO: 142814 - DNA, 331 bp, Glycine max
  Clone ID: PAT_MRT3847_99977C.1
attcatggttttatggttacacacaacataattttgcttgataaggaggggcaaaaacaagtaaaccggcctcacatccaaagcgacacggggcacgtaaacaactgtaacaaacacccaggagaaggcaacaaccctcaccctaaggccaaaaggggacaccacaagcccccaacaggccgaagaaccgacaaacctgaaaccagactgaattacagacaccccccatctgaggggaaaaccaagggtcacaaaaaccaacgggcgatcttcgagcaaagcgaatcatgcccgccagagcccaagacccgcatccaaactccgggctgca

SEQ ID NO: 142815 - DNA, 354 bp, Glycine max
  Clone ID: PAT_MRT3847_99978C.1
agcatactggtcacgtgaataaagatcaggatgctgaggctaaaactagatcaagtttaggtttaccttcaaatgataaagatcctcaacaaatgaatcattctgtacttgaagacactccatttataactttaataaatttaatcgggcaacaattatttggttggcctttttatttaatattcaactcttccggtcaggtttatgatggtcgttggacaaatcattttaatcctaattctcctatttttgatcctaaaaattttgttgacgtcattatctttgatattggtatcattatgggatcatcaactatcggtgatttctcttatgtctattcgctcattgtcgtag

SEQ ID NO: 142816 - DNA, 178 bp, Glycine max
  Clone ID: PAT_MRT3847_99979C.1
cagccccacttttggcttgcttggcctaaccactaaccaaaccaaaactcttaaggctcaatgggttctcaacaacacgacaccggtttcctcgaagaagacattgaccacgaccaccaccaattttatgaggacggggacttccaaaaaaaaaacaactacctttttgtcgaacacc

SEQ ID NO: 142817 - DNA, 404 bp, Glycine max
  Clone ID: PAT_MRT3847_9997C.1
aaaaaaaacaacaaaagctttatttaaaaaaacggggggcaaaagatttttaaaaaaaacaaaggggcccgtatataaaagcgggaatttatttaacccaacccccggggggctttgggaaaacaagggaccccgcctaaaaaaaagccccaggaaaccccgttttggggggtcttccattgggccaatttcaaaacctgggaaaggagaaacagaaggggggaaaaaacaacttttttttaaaaaacaacccccccctaaggaacttggtaaaaccccacccccttgactttttaaagaacccaagggggggggggaaccatggggttggggcgggaccccccaaacacatcctcctaaaaaacaatcttttcggtgaggacacggggagcattagggggggg

SEQ ID NO: 142818 - DNA, 661 bp, Glycine max
  unsure (1)..(661): unsure at all n locations
  Clone ID: PAT_MRT3847_99980C.1
gacactattttataacgcacatagtttcttctgctaggaatttttctgtcactacccactcctttctctgtctccatcgtttcgcattgcacaagcactctctctttcccttaccctttttcaggtttcaacgctccaactatccatggcaaaccgctggctcagacccgaggtgtatccactgttcgctgcggttggtgctgctgttgggatctgtggattccaactggttcgtaatatctgcatcaaccctgaagtcagggtgaacaaggagggaaggaaggcaggagttttggagaactttgctgagggagagaagtatgccgagcacttcctgaggaagtatgtgcgcaacagaactccggagattatgccctccatcaacagcttcttcgctgacacaagtcgcaactaagttgctttgaataaacaaaggttaatgtgagatattaattctattgtggttacaaacagattttatcatgcatttgtaaaactaaatttggttgttgctttctctagccgtacagtgggtttgctgtggttgagaataataatactgattttaatgcattaatgatggctgctgtttcaatgcccactaaattgttggtgtttnnnnnnnnnnnnnnnnnnnnnnnnnnnnnnnnnnnnnnnnnnn

SEQ ID NO: 142819 - DNA, 164 bp, Glycine max
  unsure (1)..(164): unsure at all n locations
  Clone ID: PAT_MRT3847_99981C.1
ttccaaanngnnanaatctcacgcncgcgtacgtnagcncggaattcggcncgagntctagctngatggcgtaggctgcagannnancagatgaagaggaggancacggnggtcatcnaaangcaagnagntcgccacagggcgggaattggganaccaananc

SEQ ID NO: 142820 - DNA, 902 bp, Glycine max
  Clone ID: PAT_MRT3847_99982C.1
gggaagggacggagggagtaatgttgagctggcgttttatgattgggtgttagttttgcagcgcatcgagtggcgtgcacaagcacaactcggtgtgggtattctacccttgcaactagttctatccaccaatagaatttcgtctagaaaaatttacacaatattttaagacgcacataaacttcctctgtcactacccactcctctctctgtctccgcctttcgcattgcaagcgctctctttctttgcttttccctttccccctttcagttttcaacgctgcaactatccatggcaaaccgctggctcagacccgaggtgtatccactgttcgctgcggttggtgccgctgttgggatctgtggattccaattggttcgtaatatctgcatcaaccctgaagtcagggtgaacaaggagggaagaaaggcaggagtgttggagaactttgctgagggagagaagtatgctgagcatttcctgaggaagtatgtgcgcaacagaactcctgagattatgccctccatcaacagcttctttgctgacccaagtcgcaactaagttgctttgaataaataaaggtttatgtgagatatgaattctattatggttaaagacagattgtatcgtgcttttagaaaacaaaatgtggttgttgctttctctggccgtgcagtgtgtttgctgtggttgagaataataatactgattttattgcattaatgattgctgctgtttcaatgccataatcctgtctagcttttgctgcagaaatttgtggtgaaactggtagtagtattgaaggtaaacgtgaattacctaactcgttcttgtttgttacaatttgaacaacttttttcgacctttttagtcaaaaaaaaaaaaaaaaaaggccctaagg

SEQ ID NO: 142821 - DNA, 790 bp, Glycine max
  unsure (1)..(790): unsure at all n locations
  Clone ID: PAT_MRT3847_99983C.1
aatacccgggttgacgagctcatatgtcggcggccgccctcttttttatggcctggaacaataattgaatattttcattatcatttctttctttttacaagataaagatttgtcactgaatatcttcttacacaaatctctctaaagagtttaatactttcctttaatccctttttcacagtaacatgaataaatatctgatgatagttaatgacggtgaaaataattatttaccgaggccacttcctagcctttaacaacgtatgaatcgtgtagtttttatttatatatagcatttatagtattcatcgtaagctaggtcaaatcgttatttaacacaggtcttcatccatctttgttattccttgtcaaatatatattccccgattgaagactattgctgcatccttatctcctcgcccactacaattcacaacaaccttagtaccattgcatagagtagggaccaatttatctaagatagccaatgcatgtgcggcctccaaagagggaaatatgccctctaatttgcatagtctttggtacgcttcaagagcctcttcatcatttgcaacgcagaattccgcacgcccgctttctttaaggaagcttaactctggaccaactcctggatactccatcccagcagcgatggaatgtggatgaataatttgaccatcttggtcctgcagtaaatagctgatggctccatggtacgcnccacttctcctgtggtcacgttgaagatgcttncactctccagcccaaccccagctcactccacgaactc

SEQ ID NO: 142822 - DNA, 493 bp, Glycine max
  Clone ID: PAT_MRT3847_99984C.1
cctctttccttcaacaaatgcccaaccctatgcccaactgctgacccagcccacctatccattcaccattccctcccgcagtccagcctaccgaccaccgccgcgcctgcttaccatgcgggctgtacttcccctatcaagcaaggatgcagcggaggagactgtgcttgcatcaatacagaactgttcctacttcgacggcatcctctccgatggctatacgtttaaccctctccatacatcttggacgacgctgaaccagacaactcaactgaccgcggtgactaacatgctcttatacaatgcctcgcaaggctccccttgtgagacgctcaatccctgtatgaccgtgatgaactagtggctacttctccgctccgtggagatactttactcccttagaccctaccggaactgtcacaacgagaagaagctctgcgacactggcttcactggtgccgtctattaaggcaaggtataaggacccaatgag

SEQ ID NO: 142823 - DNA, 416 bp, Glycine max
  Clone ID: PAT_MRT3847_99985C.1
gcggccggcctttgttttctctctcttaggcacagcactgaagattacaaagtgcgttatattgatgggtacttttaaatcaactatccaggtaatacaagaggactccatactctatatagggcgtgactccaagctatagatgcaaacataacttttctcacggaacgactttgacgccaaaacaaattggtatcgtaacttttcactacttgcaccgaaactgtaatgtatgtggagtcacttggaaaagcactaccttggaagctctaacaacggaacgatacacctgtgtaatctacctcggcagctttgagacagatctgctaactaccaccaacgctttgccagtgaactacactgctatggaaggcagagccatgttggatatgacatcataagaggaatcctagggg

SEQ ID NO: 142824 - DNA, 1707 bp, Glycine max
  Clone ID: PAT_MRT3847_99986C.1
tcgaggctcggcccttcggcatcgagacccaaaccctcttgaccttgtgatatctctctcttttaatttctaggatcaaaccaaaaaatggtcttagaagagagtgtagtgcatgatgtgaggctatcctcagttgggccgggccgggccaccgggtcggacgtattccacaacccgggtggcttggacttggccatgaagcttcactaccttagagtggtgtacttctttgatagtgaggctgcacaagacctaaccatcatgaaaattaaggatggcatgttcactttgttcaaccattacttcatcacctgtggccggttccggcgatcggattccggtcgacccttaatcaagtgcaatgattgtggagcaaggttcattgaggccaagtgcaacaaaaccctagatgagtggctagccatgaaggattggcccttgtacaagttgctcgtctctcaccaagtcattggcccagaactatctttttctcctcctgttttgttccaggtgactaaatttaagtgcggcggaatttcattgggtcttagttgggcccacgtattgggggatcctctttcggcttcagaattcattaactcttggggtctaatattgaaaaatatgggcctaaaaatgctttttaacatcccaagatccatcccaacacccggacagcccggacctgaaaaggatccagtttcagcaaaacggatcgacccggtgggagatcattggattccagccaacaacaaaaaaatggagacattctccttccacctaactagctcccagttgaactacttgcaagcacaaatttggggttcgggtcaagtcttgaccaaacccttgaatcactatgtgccatgatttggcgttgcatgggccgcatggcccgggttcgatcaggatccgaacccaaaaccgtgaccgtgtgtagagggcaatcatatcattggtaacaaccaagtgatatgcaaggttgatgctgcaagtgaatcctcaattcttgacactgatttgacagttttagctagcatgcttgtggatcaaggtgtggatgagaggaagcaaattgaggaagcagttgagagagaccaaggtgtgagtgatttcttcgtctatggtgtcaacttgacatttctagacttacaagaaaccaatgtgtatgacttgcaattgaagggacacacaccaaagtttgtttactacacccttcaaggtgttggagatgaaggggttgttttggtgtatccattgcccaaaggttctatggagaatggtgttgatgggaagtttctgaccatgatttttccggaggatgaaatggtgaagcttaaatctgagctcaagataattggtcttttgcttgagaataattaagttttaatgagattaaaagcatgtttgactttccgttcatcttgttagcacgaatttcaattttaaattcaatggtcaaccgtatattaacgcaaaaggaatgatggagatgcttttgcaaacttcatttttcaccaatgttggttcgtcgaatacccaaacacgcattaaatatttgttaatgaataaatttcttttttatttgatgtatctgtgagcaaggaaaactttcagtttgtaatacataatttattgttttaaaaaaaaaaaaaaagggaaataaattgaagtgtgacatggcgtgattgaaaaaaaaaaacttgg

SEQ ID NO: 142825 - DNA, 250 bp, Glycine max
  Clone ID: PAT_MRT3847_99987C.1
gtggtcgcaatttgcatttttttgttgagttaaactaaaaaaaaagaggccacaaccgcggccgagttgcaggggaaactggggtctcggatcattttttaaaaatgggctgggaactttggatgggcttttaatatttcataacccacatggaggggatatgactgttccattttagcgcggatatcgacatatatggtgggggaggcctttgatgttaaaggacaaaaataatagccattttttgaac

SEQ ID NO: 142826 - DNA, 1611 bp, Glycine max
  Clone ID: PAT_MRT3847_99988C.1
ctcgagccgaatcggctcgagtccggctgcgagaagacgacagaaggggaaccctacgtccgattaaagcctcttttacagttcagtctcttgttaaagcaaaatggtcttagaagagtgtgtagtgcatgatgtgaggctatcctcagttgggccaggccgggccaccaggtcggaggtgttccacagcccgggtggcttggacttggccatgaagcttcactatctcagggtggtgtacttctttgctagtgaggctgcacaagacctaaccatcatgaaaattaaggaggccatgttcactttgctcaaccattacttcatcacatgtggccgcttccggcgatcggattccggtaggcccttaatcaagtgcaatgattgtggagtaaggttcattgaggccaagtgcagcaaaccctagatgagtggctagccatgaaggattggcccttgtacaagttgctcgtctctcaccaagtcattggcccagaactatctttttctcctcctgttttgttgcaggtaactaaatttaagtgcggtggaatttcattgggtcttagttgggcccatgtattgggggacccgctttcagcttcagaattcattaactcttggggcctaatattgaaaaatatgggcctacaacagctttttaacatcccaagatccatcccaacacccagacaacccggaccagaaaaggatccagtttcagcaaaacgggtcgacccggtgggggatcattggatcccagccaacaacaaaaaaatggacacattctccttccacctaactagctcccagttgaactacttgcaagcacaaatttggggtccaagtcttgaccaaacccctctttttgaatccctatgtgccatgatttggcgttgcatggcccgggttcgatcaggatccgaacccaaaaccgtgaccgtgtgtagaaccgacccgtataagaggtcaaatgatatcattggtaataaccaagtgatatgcaaggttgaggttgaaagtgaatgctcaattgtagacactgatttgacaatcttagctagcatgcttgtggatcaaggagtggatgagaggaagcaaattgaggaagccattgagaaagaccaaggtgtgagtgatttctttgtgtatggtgtcaatttgacatttctagacttggaagacaccaatgtgtatgacttgcaattgaagggacacacaccaaagtttgtttactacacccttcaaggggttggagatgaagggattgttttggtgtatccgtggccaaaaggttctatcgagaatggtgttgatgggaagtttgtgaccatgattataccggaggatgaaatggtgaagcttaaatctgagctcaagataattggtcttctgcttgaggataattaagttttaatgagattaagtgtttatcaacgaataaatttcttttttattaagtatatttgtgagcaagggaaacttttagtttgtagtacatagtgtattactttaaagtcatgtgtgtctcacgttaaacgtaaatgtgacatggtgtgattcttcttcctgcgttgttattaaataaattatttccttttaaaaaaaagaaaa

SEQ ID NO: 142827 - DNA, 1167 bp, Glycine max
  Clone ID: PAT_MRT3847_99989C.1
atatattcctccacaatcattgcaaattccaatttgtggtatcaacttttgtccattttattacattttgcttatgatatcctggcaatagtatcctgaatgtattgccaattgcaattatatttccctgttcttgttgtttaattatttaattattgtatagtatgggctaaactagtgcttgtattttgctaggttggttaccttcttggtttaggtgatcgccatccgagcaatcttatgttacaccggtttagtgggaagattttacacatagattttggagactgttttgaagcatcaatgaaccgtgagaagttcccggagaaggcctttgtacatgatcctctcataaattggcgtctttttaacttcaatgaagttccacaaatgtctatgcttaccagcaatcatgtacctcctgttgtaaattctgaggaatctgccccaaatagagagcttccccaccctcagcgtggtgcccgtgaaagagaacttctacaggctgttaatcaacttggtgatgctaatgaggttctgaatgaacgtgctgtggttgtcatggctcgtatgagtaataagcttacaggacgggatttttcaacttgttcttcagtatcaaacaactcccttcagcatgctgtggaccatagcagcttaatttctggagacactcgtgaagttgatcatgctttatctgttaagttgcaagttcaaaagttaataatccaagcctcctcacatgaaaatttgtgccaaaattacgtagggtggtgccctttctggtaaatctcaaaggagcagtaaattttgtatatagtctgtacatagtgaaaacctgccatggatccaagtccattttgcccccctcttccccctttcacctattagcatctttaatttgtgtatatgtacagtaatttgtctcctgacactgcaatgaaaaaaatgaagcatagcacatacttggtccttgtagttcagaccacattttaactgggtctttgtaaatatcacctttccattagggagtgtgtgttgtaatatatgttcaattaatatccctacaagatggaaatggaactagatcatagttgtgagaaggcattttttgacctgatgtttgatatctcagatgagacaatagttattgtggattaaaatacg

SEQ ID NO: 142828 - DNA, 237 bp, Glycine max
  Clone ID: PAT_MRT3847_9998C.1
gtgggggggaacataaaactggcccattttttttttttttttttggcccatcaaaaaggggtttaaacataaatttatcaaatttttcctaattcccaccatcccaattccccatttttgagaaggggtgttaacgattttttcctactttcacaatacaaaatatttttaactactacctctacccataattcctcccctatataaaggaggggttcactaaaattccataaattc

SEQ ID NO: 142829 - DNA, 516 bp, Glycine max
  Clone ID: PAT_MRT3847_99990C.1
gggtgattctgttgtgtaataagcagggtggtgggaaccaaaaaaaaattgctagtcccccccattttggtccctgggagtgcagtaatggaaatagtttattgcagccgctctgtactagttatctcgttcgacaaggtctaaactcaggtcagctaatgtaagaaatttagttgggtgagatggggtgcgtgaagcaaaaaaggaggtgcaggatgtaattccctatgacttgtaaagacctttgttggtgggctatttgaatgaaagaactgaataggaaatgaacctgtgtaaaattatttagtgtctattttaagtttcagtttaccatggtgtccgcacaaaatgttaacaaaaacaaaattataatttatttttttatgtaataacatcaggatactataaaattgacattgtgatattaaacgttcaagaaatcacgtccttaaacgatgcctttgtgaaacctcagttatatatatacgctataataataatatgaccaattatttt

SEQ ID NO: 142830 - DNA, 233 bp, Glycine max
  Clone ID: PAT_MRT3847_99991C.1
gagccacaatgaacaaatgaactaataattataaaaagttgagtttggtacaacatgattaggccaataaaaaacatgcctaaaacaatgcaactcaattagtgaaaccccattccaaagatgaaatcatttttttaaaaaaacaagcccacatgttttctcacaccaagaattttgtaaatctcacctttggtggaaaaacccagtcaggtaaaatttggttctacactaaa

SEQ ID NO: 142831 - DNA, 388 bp, Glycine max
  Clone ID: PAT_MRT3847_99992C.1
catatttttctcccttctggcttctttttccttggttggtaatgatcctgcacactctaaatatttcttgtacagttaagtatttacttcctccgatcctctttataagaaacaagttttagtgtattttacactaaaacttgtttcttattaaaaaaaaaaagacagtaggtagtattataataatgaaactgagtgatgtcagttatcctggacccatgtttggttaggttgttctgccttgaccggttgttacatgtttgatattttgatcattacgtcttaatacgtacacaggctgttaaagaaacggggcgcaagttccgggagaccattcttgctcttggaggtggcaagccaccactagatgtaagatacactacatcac

SEQ ID NO: 142832 - DNA, 304 bp, Glycine max
  Clone ID: PAT_MRT3847_99993C.1
ctctacaaaagcacaatttgttgggtggaataaccctcaaccaccgtataaccggcgctggttcacatttcttcagaagatttccctgaaaaggaagatcaagaaaaacccaaaaagattgatgcaagatcgagacatagtatatatcctcaatacaatgaggttaatgctcagagggaaacaaatctgcttaaatcgtctattgaagatgttgcaactcctaaaggttccatgttggatcttaaacactctcaatttaaacatctgcactttgccaagaccacattctgttggaaccattcta

SEQ ID NO: 142833 - DNA, 388 bp, Glycine max
  Clone ID: PAT_MRT3847_99994C.1
tcgcggtcgcgtgggcggacgcgtgggcggacgcgagggctacaaggatggttgctgttgatccaacattcttatactctgcatatgccttaaaggaggttcagtgctaagggacataatgtaccaagttatctactatcattatacctaggtgttcttgataagatctgtcctaaggtactcaaaacttggactggctattgagattttaatggcgagacagtgagcgctacacaataattaccatctaagctaattatcgacgggtgagacagtcattgaattatgatggtggacgcgctggaagggctctcaggactctttgtttgaagaccgttgggatgtgtcctagacacactcacactaagggacatatcaattagaattg

SEQ ID NO: 142834 - DNA, 1532 bp, Glycine max
  Clone ID: PAT_MRT3847_99995C.1
cacgaaccaaatcatgcaataatttcatttattctcttccgatccaatacaacacaatccctctgattccgtatccgccgccggcgatggccaccctctccgatcatcgccgccgcatgctcccgccggagaacgttgacgcgcagccaataacttcggactccgtctctaacaaccaccgcaccactcatcggcgcgatgccggaaataacggcctccggcatcgcctcgttcggcaagaatctttgcgcagaaatatcgaacacgtcgccgcggaaacctacttggtttctcgtctcgccttcacgcttcttcgctatctcgggattggttaccgttggattacacaattacttgccctaggatgttatgccatgctacttatgcccgggtttttacaagttgcatattactatttcttcacaagcaaagtaaagcgaagcattgtttatggagatcagcctagaaacaggttggatctgtatctacctgccaatattggtgaacctaagccagttttgatatttgtaactgggggagcatggattattgggtataaagcatggggctcccttttaggactacagttggcagaaagaggcattatggtggcatgcattgattacagaaattttcctcaagggaccatcagcgacatggtaaatgatacttcgcggggaatttccttcatcatcaacaacatagctaattatggaggtgaccctaataggatttatctaatggggcaatctgctggtgctcatatttcttcttgtgctttactggagcaagcagccagagaatcggaaaaagaagatagtgtttcttggagcatttcccagttaaaagcttatcttggtttatctggaggatacaacttactggatttagtggatcacttccaaaatcgtggcttggatcgttcgattttcttaagcataatggaaggtgaaaattctttgaaggaattttctcctgaaatcaaaattcaagatccatgcctcaaatcttccattcctcactttccccctgtatatctggtccatggaactgcagattattccataccatcagttgccagtgagcggtttgcggaagctcttaagaaggcaggggtaagagctgagttgattttatacgaggggaagactcatacagatttgtttctccaagatccgctccgaggtggtaaagatgacctatttgatcttgcagttgccattatgcattccaatgatagtgatgctcttgcaaacgatgccattgcacccccaagaagacggtttgttcctgagattttattaaagttggctagaaagatcagtcctttctaagcttgtaactgtcagggaaaatgtcatctctataagcttgtaagcatagtgattagaattttatgattcctgattcgaatcctacattccgataaaattcagctacttattgattcatattattaatattagacgaatctcaatttttgtatcttacggtacatgaatgaatctgcacaatttcatatcatcaataca

SEQ ID NO: 142835 - DNA, 238 bp, Glycine max
  Clone ID: PAT_MRT3847_99996C.1
cccaacaataaaacctatttttaaagcgcggctgggtttcaatacacgtatcatattacatccatatctaatatttataatatacatatcctatcctttaacatcacataaactccttatttctcactcccaaaacataacaaaatcttagacctttttactatttgacacataacctcaataccaatttattttacataaaaccctaataacctatatactttaaatacataaaaat

SEQ ID NO: 142836 - DNA, 789 bp, Glycine max
  Clone ID: PAT_MRT3847_99997C.1
ccacgcgtccgcggacgcgtgggttttaactgggttgaatccacttgaatgttttgttcattcagtgacaaatcgtgatagctctttcagtgaccatgcagaccttcctggaacactgacacgtagacttatgttcttcatgcgtgatttgcatgatgcatatgatggaactgtgagaaatttatatggtaatcaacttattcagttttcttatgatattgaagaggactcttcatgtgataaaggtttccaagagtatgctataggtggtgaaccagttggggcaatttctgcttgtgcaatttctgaagctgcatacagtgctttgggtcaaccagttagtctactcgaaacatcacctttgctgaatttgaaaaatgttttggagtgtggttcaaggaaaagaaatggtgatcagactgtgtctttatttttgtctgaaaagcttggtaaacagagacatgggtttgaatatgcagctttagaagtcaagaattatttggaaagattgttgttctcaaacattgtttctacagtgatgataatattcaccccacatgacggcagcagccaagaaaaatacagtccttgggtctgccactttcatttagacaaggaaattgtaactagaagaaaattgaaagtgcattctatcattgactctctctaccagagatattactcacagagaaaagactcaaaagtctgttttaccaatttgaaaatttcaagcagaagtgttctgctgattccatggctaaggaaggtgaagacacttctatagataaa

SEQ ID NO: 142837 - DNA, 537 bp, Glycine max
  Clone ID: PAT_MRT3847_99998C.1
attcatctcgctttcaatttttctaccttttcctttccacccagttcaatcttttcaccaagtttgatactttcctgcttttcaaccacacccatcttctccttttcattgattcacacttgacgttttgcctcttcacacgttctatgttctgaatcttctcaccattcaccggtatattgattagttctgtgtttttctcatccgtgcgttgatgtgtttgtgttgcttggaaaaggttggaaattgaggcagtgaatgatttgtttagcacagcaatgtttattgttcagagttgtggggttcatgcattttctcaaaaccttctattgggtttctctgattggcttttcatgagtgaattatgaagatgagactgttttgagttattggggatgtttgtactttgtaccacctgaaagcttctctctcttttggatcaccatgaaagcagtttacacattttgctgacttgaccttttcatatcactcttaaaataattcattgttttatgcgacattggaagatattggtct

SEQ ID NO: 142838 - DNA, 394 bp, Glycine max
  Clone ID: PAT_MRT3847_99999C.1
ggctcgagctcaaattcttccacctgatatctaataggcttcgaacggacctgacctgcgacgggcgaccgaatctgtcacctcgactgaggaatccttgaccacaggatataacgatggtgacctatgtcacctgaggatgcttgtcctccgctctcaggcatatacaccttacacgcatgaagctcttaaagctatgcactggctgcctaaagaggagcgctagcatacatgacgcgtcgttcgcacactgtgcgaccaggaatcggcaaacctgtcctggctcatggattaatgagactggcgacccgcctcgagacgccgattgcttagggagcgctgatccgtttcctcgattactgagtcgcttcgctcggtccttcgtctgagaaag

SEQ ID NO: 142839 - DNA, 599 bp, Glycine max
  unsure (1)..(599): unsure at all n locations
  Clone ID: PAT_MRT3847_9999C.1
gacagcagaatgatcgtgattgctcattaaagaatttggtgttgaacatacattaattaaataatccgatcccggggtaggtctagacattgaggtggatttggaaacagaaatatcattccttccccttagaatttttaatttatcattaaaaaataaataaagatagactcttggaataaagtaattttttcagataaaaaaattactaatgactttacaagaatttaaccaactactagtaggaaattctgaaaaaaaaaaaaaaacttgataatctcaactttcaccgaaagttactcctaggacaatgcgatattttgctgaaagacggaaaaatcaactactagaacttgcttaaatttagtacatttaaatgccggaggacattaattttttcattcccatcccaatctctaatattttcatttccaaaactcaaacaatgcctagttaaattaaaaacaaggcaaatcattagggtgcgtaattaggcaccggcccgaggttttttctttgcgaccacaaccgtcggtttttggttgttttaaatcaggggttaaaannnnnnnnnnnnnnnnnnnnnnnnnnnnnnnnnn

SEQ ID NO: 142840 - DNA, 398 bp, Glycine max
  unsure (1)..(398): unsure at all n locations
  Clone ID: PAT_MRT3847_999C.1
caacagtgagaacaccatttgatttttgattctagcaagcagagcttttgacagttctctattgaccttctcggnggaggaatcttagcggacaaaactggagattggatcacactgatacaaaattctccaattattaacttatttgagagttgctgctttgaagaaaggctgnntaatggacaagattgtgatgtctgcgaatgcagcattccaaagggagtgattgtgcctcattggtacaagtgtttttaacaaacacgcacagtacagagccttttgatgcatgtaagtggacaaaatcagaaccacatttcctgggaattgatcttcccaataaaggtttgtggggctaataatggttccaaaatgtgggagtctgagtggaaaaatcaaac

SEQ ID NO: 142841 - DNA, 825 bp, Glycine max
  Clone ID: PAT_MRT3847_99C.1
ctgttctatattgatagagtgagaaagggaaaggaagaagagcttgaggaagtgatgggagatgggagggtcggtaaaggataacagcgtctctatgattaattgttgtgttgtttattcttttgccgattccacccattcctatgattttctttggttcctttctttccactctcctctccgctctccacaatctgttatggtcatgaagctgccggtctgactgggttacattcaagacaagaaaaaacaacaaatcgcttctttcttttttcgtcttttctttcctttttcttgtttaaggcttaacaaattatctcagctctagtagatgtagattattacagacagatgctagttaattagctagctccacaagatgtttaaaaatgtgatctatccatatcaagctggaccaaatccaaataattttactggagcttttctttcttggtaaaagctggacatttttaaaggtttgggtgccactataacgccaccaaagttttctttcttgatttttaaccaagttacatttttttccctaaattattccagcgctaataaatactgaattttctgttttttttataaaaagaattttacattaaattctttgaaaataatttcattttggttggtaatatttttttttagttcataacaaattaacgaattttgtatttatttttttataaaaaattattagaaaataacatattaaatcaagcaaaaaaatgtattttattaaaataaaaaagtgaaggaaaaaattatttaaaaccaacacaccaacatattttaacttttttattaaactaaacg

SEQ ID NO: 142842 - DNA, 468 bp, Glycine max
  Clone ID: PAT_MRT3847_9C.1
gaagcttaacaatcttcacaataaaaaatgcattagttgatacaaaccataattccctcgtacaacctataatagattcataaatcattaagccaacgaacgttcacaataaaactaattttaaacccaaaataaattctttaatgaaaccaaatatttaacatgattctagatgatggaacatcaaaagaaacagagacgagggtgagtgtgagggagatctgtctttgaacacaaatatgccaaaaggagagaaggttgatacactataaatacctaccctcctactgtgctctgtttggggctgatgatacttggtgcattagtgtgattagaaatataggcatttgggaagctggggtttcaatggaggtgatagcaaggtaaagaccaaatagcaaaaaattgtaatcagattgaatcgaattaacctaaccctgaccactgcaacaaatatggtcctaatat

SEQ ID NO: 142843 - protein, 83 aa, Glycine max
  Clone ID: PAT_MRT3847_100000C.1.pep
FFFRRHERRKEGCQTFKTTHRSPDYYYGHIQPNICLPTLRSFGLTQSSERYRAKGTTLGLHLTHRHMRWHQRFTHQKIWMTCF

SEQ ID NO: 142844 - protein, 89 aa, Glycine max
  unsure (1)..(89): unsure at all Xaa locations
  Clone ID: PAT_MRT3847_100001C.1.pep
FQPRLSXAXAVXRHSRATXYELQLGVXRGSGSEXXFKRXLVGSKIXDGEPDKRAGFGGYIGXXXYAXEXRNXIAXXXALLXNKXAXWRX

SEQ ID NO: 142845 - protein, 103 aa, Glycine max
  Clone ID: PAT_MRT3847_100002C.1.pep
LNCNQSFQISLHSNSSSVFICCFLKFLWAMLTEFFFIERVAFHWKSWWEYIDNSPLCPKSSIFDFLTRGLGSLVGIISAQCYKLPYWLIPLGCLFPGWKGQTS

SEQ ID NO: 142846 - protein, 96 aa, Glycine max
  Clone ID: PAT_MRT3847_100003C.1.pep
NKIDFGVQTPVSYRLPVTLSGIPPGKAGLKKVQRLCGKNFPRVRYPPSSPNFSLVIYNDKGVSSFSWFRLVGLILWFIFLLKNLNYCLVVCQMLGK

SEQ ID NO: 142847 - protein, 87 aa, Glycine max
  Clone ID: PAT_MRT3847_100004C.1.pep
PQLRAFLGEFFLKKRGPEDLMGYGAARRGAISRGTLLLGIVSVKGPLINYIVCPISKVLKGFPILFLARLKTPRGFWFPGRGLGFIF

SEQ ID NO: 142848 - protein, 111 aa, Glycine max
  unsure (1)..(111): unsure at all Xaa locations
  Clone ID: PAT_MRT3847_100005C.1.pep
ERDTSRPRGFGFSTFADRMGMVDAINEMHCPEIGDHFISVNKAQPTIGGDDTDQCYRCGYSSRGTGSYSAGYRVXHDDCFICGRLVHCAQYCPLARCGRCHSGSSYPSRPK

SEQ ID NO: 142849 - protein, 118 aa, Glycine max
  unsure (1)..(118): unsure at all Xaa locations
  Clone ID: PAT_MRT3847_100006C.1.pep
WFAFAWSWXPLGWFIPSEIFPLETRSVGQGLSVCVNFLFTFVIGQAVFSMLCLFRFGIFFFFYGWILIMSTFVLFLFPETNNVPIEEMAERVWKQHWLWKRFIDEDDCVKEEKVVTGN

SEQ ID NO: 142850 - protein, 81 aa, Glycine max
  Clone ID: PAT_MRT3847_100007C.1.pep
ERFRGASFGFFDYSPPCGGPRFKFCWEAGGFPPGGGLFKKPSEIRNRFFPFLKKKKKKKKKKKKKKKKKKKKKKKKKKKKK

SEQ ID NO: 142851 - protein, 120 aa, Glycine max
  Clone ID: PAT_MRT3847_100008C.1.pep
KQIGLLVLPRSNMGMQQVIPFFLLKSVSMVLNRTKSRFTSLRFARMMMSRARPRLILGPFGICVHVAFNICKMTMSKFFPRLSSEQIDTRDCCFGHPKPLKIVTSNSPHACLVFLKFSNN

SEQ ID NO: 142852 - protein, 221 aa, Glycine max
  Clone ID: PAT_MRT3847_100009C.1.pep
LLLLIISHGHTTTPQAWAKEGWSIKAFILHFQLKTFILKGVLVDKPLLNMISSSTNDSRVIRASDVSSASFGSNVSLESGIPCGIAFSNSEIRDIYVIPVASGIIGKLLLAEKHPFRSRHGVVIAIAPLAGLFPKIDEDHPSWLHLQIREFDPQFYSTKARGNHLSMPDHLADGRWTLGFPNARACEEAHLVILNEITKQRSAVEYMLAPLLQDDLELAKS

SEQ ID NO: 142853 - protein, 141 aa, Glycine max
  Clone ID: PAT_MRT3847_10000C.1.pep
KIKVPSKISVFAWRLLRNRLPTRTNLHRRQLQIIDMSCPFCRCSEEDEAHLFIHCSKIQPLWWESMSWLNIQGATPQTPRQHFLQHGSGLDKVIRVNRWQCWWLALTWSNAVFNGNKVFEDAVFLLWTWLRRFREEFYNTF

SEQ ID NO: 142854 - protein, 156 aa, Glycine max
  unsure (1)..(156): unsure at all Xaa locations
  Clone ID: PAT_MRT3847_100010C.1.pep
PRVLFLLVSVSTQSHSCKTIYTGLSLLYDKNNQAGRENLDFXCEIRMLHRMPGFNEQTHVSVWTNFKDAFTVLDNGXLTVTTAYKVNAVLKSIKSGLYGDGIKWNFSKCLVDKEGSVGDRYALHYFFSEHLEGLAEAVGCLIDPMNDWSGQWINCH

SEQ ID NO: 142855 - protein, 66 aa, Glycine max
  unsure (1)..(66): unsure at all Xaa locations
  Clone ID: PAT_MRT3847_100011C.1.pep
VYDYVRPDFSGSKRXSFRAGHNRTITVGLDKTRASLQDKKHTYCDCLKRNCKEMSYDXWVAPEDTA

SEQ ID NO: 142856 - protein, 182 aa, Glycine max
  Clone ID: PAT_MRT3847_100012C.1.pep
MMAKESSSTSTSTSTSTPLLSSTNPSSTTFTSRILLLVASMFLLAAFVLALYFSSPTSSSPSLPPPRAKLPHPVVILISSDGFRFGYQFKTPAPNIQRLIKNGTEAETGLIPVFPTLTFPNHYSIVTGLYPPHHGIVNNVFFDPLTGEKFTMQSHQPKWWLAQPLWETVLLHNLCARPYFWP

SEQ ID NO: 142857 - protein, 304 aa, Glycine max
  unsure (1)..(304): unsure at all Xaa locations
  Clone ID: PAT_MRT3847_100013C.1.pep
MDARASSSSASSILFLAAIVAAYFYSSEAAVSKGSFEDNFSIMWSEDHFTTSKDGQIWYLSLDKDTGCGFQTKQRYRFGWFSMKLKLVAGDSAGVVTAYYMCSENRAVLXRDELDIEFLGNXNKQTLEDXFILNNVYKNGTGGREMCHMLWFDPTEDYHTYSILWNYHLIVDFVDRVSVWVFKNNGEPNNFFPNEKPMYLFSSIWNADEWATRGGLEKTNWKLAPFVSSYKDFSVDGCQWEDPYPACVSTTTKNWWDQYDAWHLSDDQKKDYAWVQRNLVIYDYCQDSARYPTTPEECSLSPWD

SEQ ID NO: 142858 - protein, 96 aa, Glycine max
  Clone ID: PAT_MRT3847_100014C.1.pep
IEKTVKISTCQCQIRLVMKKCFQAKGLWQNVCQFSSSYVFHSKNLYRILARRAVSEIPALISHFFYASNFIHSTQGSDDNTNKKKTFERTNQFKCF

SEQ ID NO: 142859 - protein, 215 aa, Glycine max
  unsure (1)..(215): unsure at all Xaa locations
  Clone ID: PAT_MRT3847_100015C.1.pep
METGIIQGPWGFRSLSKFVLCTISGALTVCFALAGALTGAIAGALAAKATKSGLLRGVSLGAIAGSILSVEVLEASRAYWCMEQTGSRSASSMADFIEELVRGRLVEESLTPAILTAYNLQFEQVGIANTGYVETHDVHGLVAPRETCXPLRSYDGVTPPMISKAENTCCAICLQDIEVGEIARSLPRCHHTFHLICVDKWLVKNDSCPVCRQNV

SEQ ID NO: 142860 - protein, 96 aa, Glycine max
  Clone ID: PAT_MRT3847_100016C.1.pep
STRSLSVSFQGEAFSLPVSKTKAASATPTPRKAATPERRRATPVKGENSRPADQHRWPARTRHVDHLSKSVDIIDNKKKVVGNGKWEWVWDCGLFF

SEQ ID NO: 142861 - protein, 68 aa, Glycine max
  unsure (1)..(68): unsure at all Xaa locations
  Clone ID: PAT_MRT3847_100017C.1.pep
YPGTNGYLGSLDIGRVRXFPAELRACFFPNGPQFGEIMCFPKPFFGEAGALLKVAVPAQMELFFPRRG

SEQ ID NO: 142862 - protein, 132 aa, Glycine max
  unsure (1)..(132): unsure at all Xaa locations
  Clone ID: PAT_MRT3847_100018C.1.pep
RADSAVRNACRDIVGALAXFLKGNDRGGGGGGVGTVVGLFVKPLIEAMGEQNKGVQAGAAVCMAKMVECGGGGGGGEAVSVATFQKLCPRICKLLNSSVSEPYWSCIEVVSSLRKPYLSRVPAVSCILRNKK

SEQ ID NO: 142863 - protein, 62 aa, Glycine max
  Clone ID: PAT_MRT3847_100019C.1.pep
AEADGGGHLAVSADHGESEAAEDVEEERKATREPVKGPWSNQMHPMTGIIQTLAANILTLPA

SEQ ID NO: 142864 - protein, 75 aa, Glycine max
  unsure (1)..(75): unsure at all Xaa locations
  Clone ID: PAT_MRT3847_10001C.1.pep
WAKWPGXLNXIHXFQWXXAMXQMHXXQPNDQXRKHEQRRGNGLMQXSGQIENPPLLVGHASRYETTWSRPEEFTD

SEQ ID NO: 142865 - protein, 107 aa, Glycine max
  Clone ID: PAT_MRT3847_100020C.1.pep
MPIRRIAIGRPEEATHPDALKAGLAEFISTLIFVFAGQGSGIAFNKLTNDGAATPAGLISASIAHAFALFVAVSVGANISGGHVNPAVTFGAFVGGNITLLRGIIYW

SEQ ID NO: 142866 - protein, 323 aa, Glycine max
  Clone ID: PAT_MRT3847_100021C.1.pep
MGKKLMHAVQYDSYGGGPAGLKHVEVPIPTPSKDEVLIKVEAASINPFDWKVQKRMLWPLLPRKFPHIPGTDITGEVTEVGQGVQKFKPGDKVVAIVNPFNGGGLAEFAVAKESVTASRPSETSASECAALPVAGLTALQALTKSIGIKLDGSGERKSILVTAASGGVGHYAVQLAKLGNTHVTATCGARNIELVKSLGADEVIDYKTPDGAALKSPSGKKYDAVIHCAMGFPWSTFEPNLTVTGKVVDITPSSASMLTFALKKLTFSKKQLVPLLLFPKGEDLQHLIHLVKEGKLKTVVDSKYPLTKAEDAWAKSINGHATG

SEQ ID NO: 142867 - protein, 321 aa, Glycine max
  Clone ID: PAT_MRT3847_100022C.1.pep
MDKKIPRPSFSLSLLQLLDANFSISVVASILLLLLMGCIYSRVCIGDNCRGSSINGDPIIARNDVAEVANFSPSSSDVEEGEIRDQLNQLSITRDSEAGIRRLARVSAQFLPPDGSRIVNVPSGNFELRYSFLSQRGYYPDALDKANQDSFCIHTPFGTSPNDHFFGVFDGHGEFGAQCSQFVKRKLCENLLRNSKFRADPVEACHAAFLATNSQLHNDVLDDSMSGTTAITVLVRGRTIYVANSGDSRAVIAERRGKEVVAVDLSIDQTPFRSDELERVKMCGARVLTMDQIEGLKNPDVQCWGTEEGDDGDPPRLWVPN

SEQ ID NO: 142868 - protein, 123 aa, Glycine max
  unsure (1)..(123): unsure at all Xaa locations
  Clone ID: PAT_MRT3847_100023C.1.pep
LHHHQTLKSLGRYNKISGGITKHLKTTKIIIHIHTQPIYYTKSLFLEGYPYHPNLQLPHLQNYNNPYFGVKPISLFSXDTTMLLKDLTFTLDHNAVDSTTNDAHVHQIKSRHSNIYAPMAKNA

SEQ ID NO: 142869 - protein, 115 aa, Glycine max
  Clone ID: PAT_MRT3847_100024C.1.pep
QNQKKKNPPPQQKQIRALPPLKNFPYPKKIPRNSRIFFWGGGGGETNWNPHKPQLKGNFKPRNKPPIFSTPTPGGDGPPPFLTPLFSKQGKTRAPLTPKKTGPRAPPGPQGHLGK

SEQ ID NO: 142870 - protein, 248 aa, Glycine max
  Clone ID: PAT_MRT3847_100025C.1.pep
MDSGGHYNPRTVEEVFRDFKGRRAGMIKALTTDVEEFYQQCDPEKENLCLYGFPTEQWEVNLPAEEVPPELPEPALGINFARDGMQEKDWLSLVAVHSDAWLQSVAFYFGARFGFDKADRKRLFTMINDLPTIFEVVTGSAKKQTKEKSSENNGNKSKSSSKGRGSEPPKYSKQVKDEEEGLDEEDDDEHGETLCGACGENYASDEFWICCDICEKWFHGKCVKITPARAEHIKHYKCPSCSNKRPRP

SEQ ID NO: 142871 - protein, 604 aa, Glycine max
  Clone ID: PAT_MRT3847_100026C.1.pep
MASSTSHPSFWSLLNLSASIPISSSVCMFPPSKKPSKATKRRHAWEVACNGNPRNRRDILIGLGGLYGATTSLTSNNTGSAFGASLSPPDPTNCVQPDPEKDPFCPPPPFKDYELPPHDDKTLPLRIRPAAHLVTDDYIAKYEEAVRRMQDLPPDDPRSFMQQANVHRAYCDGRGYNQKGFADYKLDVHGSWIFFPWHRWYLYFYEKILGKMIDDPTFALPFWNWDNPAGMRIPPIFTDKSSPLYDEHRNSDHVNAFIDLDYKKDHSPVKPPQTIIWPPVVKKNNSIVDNLIVNNLIKVYTAVASKTNSSPDSFLGPAFEVGSDPKKHFGSLESLHNTVHSWTGELEKPNHDMGLLATAARDPIFFAHHSNVDRMWNIWKTELLDGRRFDHKSDEWLESSFFFYDENSNYVRVKVKDCLDSKKMGYDYQRVDLPWLLAGELIKPKKEIIPLRSKPEASTFKTLQLPLLLESIERTNVKRPKPRSRNENEEEEGVEEVLVIDVEYDSTDGVRFDVFINDQGDNEIGPQDSEFAGSFVTLPHSPHVNHNNITRASFKLPLTYQLKDLGVTKDDDSISVTLAPIYGDKPVTIKDVRIKRVYPEVDDE

SEQ ID NO: 142872 - protein, 86 aa, Glycine max
  Clone ID: PAT_MRT3847_100027C.1.pep
TLFFCKLCIHSFTADMRFIMVSELYHFLSAATIDQPLRSLPSPSSVMRHRFWSTPTFVQSLFIFSYFPFSFFDYIFLNFFSPKHKT

SEQ ID NO: 142873 - protein, 73 aa, Glycine max
  Clone ID: PAT_MRT3847_100028C.1.pep
EDSATESRKDGSVDHSGVVRGGCATVRRCTRIVVGGSGQPYTNGGGGGGPKNSGVGLCQHRLETRVFTIIFRI

SEQ ID NO: 142874 - protein, 49 aa, Glycine max
  Clone ID: PAT_MRT3847_100029C.1.pep
HYHSVMQNYINYYSQLFHFSFNQEKERVIPSFSCNCNKKITHSKDRKHA

SEQ ID NO: 142875 - protein, 191 aa, Glycine max
  Clone ID: PAT_MRT3847_10002C.1.pep
MTQMTHLISPPLQPQAAACSASGWETRELRSRDAQAMLKTNVFFASFDQRSKQACGESACTALAVCIAHWLHSNHNMPTRSQFDSLIKRGSSEWRRLSHSDHYLKLFPDKHFDLETVLEANIRPLVVTPQNSYTGLFCPEKYQSLEGAMIYYDIWDEMTRNDDVVDHEPCNDIVTRNDAFYVLMAQAEAVC

SEQ ID NO: 142876 - protein, 77 aa, Glycine max
  Clone ID: PAT_MRT3847_100030C.1.pep
KPQQETRIYNSTQKLYLTLKPLIKKITHSDKCKTASQTSSNPTAKKINITSLDQKKNRKTFLSKTGHINSAYTYCNH

SEQ ID NO: 142877 - protein, 112 aa, Glycine max
  unsure (1)..(112): unsure at all Xaa locations
  Clone ID: PAT_MRT3847_100031C.1.pep
SHASPSRRRVGCDKFQIVYSTMKPPNVQEDHIFLKAFPYSFEGVAXDWLYYLALRSITSWDDLKRVFLEKFFPASRTTAIKKDISGIRQLSGESLYEYWERFKKLCASCPHH

SEQ ID NO: 142878 - protein, 61 aa, Glycine max
  unsure (1)..(61): unsure at all Xaa locations
  Clone ID: PAT_MRT3847_100032C.1.pep
KALCHXFFMVLVTLKGINQFLLHNGFIPRSLRFQIPMLCLYLSCHQFYSTLFCHSVPLPPS

SEQ ID NO: 142879 - protein, 234 aa, Glycine max
  unsure (1)..(234): unsure at all Xaa locations
  Clone ID: PAT_MRT3847_100033C.1.pep
MPKPHSEAGTAFIQTQQLHAAMADTFLEHMCRLDIDSAPITARNTGIICTIGPASRSVEMLKEMIKSGMNVARLNFSHGTHEYHAETIKNVREATESFASDPILYRPVAVALDTKGPEIRTGLIKGSGTAEVELKKGATLKITLDNAYMEKCDENILWLDYKNICKVVEVGSKIYVDDGLISLQVKEKGADFLVTEVENGGSLGSKKGVNLPGAAVDXPAVSEKDIXDLKLGWS

SEQ ID NO: 142880 - protein, 56 aa, Glycine max
  Clone ID: PAT_MRT3847_100034C.1.pep
YPCINHLIFITSFLYKHTITAEITDLMIFRWHTAYHIKLEKFGCKNFDKLIPCLQA

SEQ ID NO: 142881 - protein, 114 aa, Glycine max
  unsure (1)..(114): unsure at all Xaa locations
  Clone ID: PAT_MRT3847_100035C.1.pep
TFSNVNGQIIXYXXGSGRESXDVSXXIRSXNKGVEGQIGNNKRHKEKGSNSKTPXHXXERENPGQIPVGXXFXKPIKFFFIKHILTCQASATCHGKGRMTRSXQXSVTTXXEAF

SEQ ID NO: 142882 - protein, 81 aa, Glycine max
  Clone ID: PAT_MRT3847_100036C.1.pep
LKGWLDSHLLYHKAMLEHMNIERETYFYMMDMTGTHAMTRVMIAITLSVCTIILASEWTHMIVRSHFSFSKRGYFPLARDL

SEQ ID NO: 142883 - protein, 194 aa, Glycine max
  unsure (1)..(194): unsure at all Xaa locations
  Clone ID: PAT_MRT3847_100037C.1.pep
MLGRIRSGAIFQRFQGNGILSLNKIYSNCVTSSPRMQQKGLENVTVSEVLMTKGEENVGSWLWCRADDAVVNAMKNMADNNIGSLVVLKPEGQHIAGIVTERDCLKKIVXXGRSPLHTQVGQIMTDENNLITVTSDTNILKAMKIMTENHIRHVPVIDGKIVGMISIVDVVRAVMEQQSGELKRLNDYIRGQYY

SEQ ID NO: 142884 - protein, 148 aa, Glycine max
  Clone ID: PAT_MRT3847_100038C.1.pep
MSMSEYVVELPILDISQPLQPSSLTSLSKACKDWGFFHIINHGISKDLCSQIHYLSKYLFSLPSEAKLKLGPFSSIKSYTPHFIASPFFESLRINGPNFYASAKSSEDILFDKQTSKFSETLQEYCSKMVDLSERILKLVLMSLEDGF

SEQ ID NO: 142885 - protein, 60 aa, Glycine max
  Clone ID: PAT_MRT3847_100039C.1.pep
PTLPKFLIPIVPTSWLDGRIVFFGKVFFEMVVVYKMEVEGPQRGLPKTRVVMVDRGELLL

SEQ ID NO: 142886 - protein, 66 aa, Glycine max
  Clone ID: PAT_MRT3847_10003C.1.pep
NFNCFDFWPCDWKYELLPYILKYEIIVVSTIMTCKIQYNHDFRHDTLKNNVVVRLKCGENSNENPC

SEQ ID NO: 142887 - protein, 88 aa, Glycine max
  Clone ID: PAT_MRT3847_100040C.1.pep
LRGDDRRRGSQGTSWVKVLVRRIRSKCRDTITITLYTTCHLHHLGVSDSGTRNKQPQQSLSSCPGATRCISTIPHSSRRSMGAARDLG

SEQ ID NO: 142888 - protein, 86 aa, Glycine max
  Clone ID: PAT_MRT3847_100041C.1.pep
NYEDESSVMNVRCGSLNSVPYSQLVEISRALEDSEHDFIWVARKNDGGEGDNFLVELVKRMKERNIRHLIWGCAPQSVDTGSILRL

SEQ ID NO: 142889 - protein, 188 aa, Glycine max
  unsure (1)..(188): unsure at all Xaa locations
  Clone ID: PAT_MRT3847_100042C.1.pep
VMLNMLPKYYHHVGSYENTLITKFFGLHRITLRGGKKVRFVVTGNMFCTELHILRGLDLXKRLIDXKYSVEIKIYSNTTLKGLDLKYETNVDXPNNLNSYEDEFLQGEQLFIPKGLLXVSHEPRIVKIVLGPHIRGKILRVYCIGDKXVDLFFSGIALLRVQSGVNMPAQATRKLQGDKVEESEVELF

SEQ ID NO: 142890 - protein, 259 aa, Glycine max
  Clone ID: PAT_MRT3847_100043C.1.pep
MGLLSNRVERHEIKPGDHIYTYRAVFTYSHHGIFVGGSKVVHFRPERNLKSMTETSSNWDDPTSNPCPTFPDCGFRQPNSGVVLSCLDCFLRNGSLYCFEYEVSPSVFLSRIRGGTCTTASADPPETVIHRAMYLLQNGFGNYNVFQNNCEDFALYCKTGLLIQDKQGVGRSGQASSVIGAPLAAMISSPLKLLMPSPVGVATVTAGMYCMSRYATDIGVRSDVIKVPVEDLAVNLGWICQEEEEVAEHENPDRQITTR

SEQ ID NO: 142891 - protein, 101 aa, Glycine max
  Clone ID: PAT_MRT3847_100044C.1.pep
NTTTYFPLCAPHCAIFARHWPLQRANTHPSFRNREPVENLFRGPHFTPWVALCALPLRILAARDGVSLFTMAPCSGAHAARRRHALLNMAYSNLEPDTTTV

SEQ ID NO: 142892 - protein, 50 aa, Glycine max
  Clone ID: PAT_MRT3847_100045C.1.pep
ARNSARGGGWSNRGGLPKAQWALGISPLSSYQTLPLKASYKLSDCELCHH

SEQ ID NO: 142893 - protein, 187 aa, Glycine max
  Clone ID: PAT_MRT3847_100046C.1.pep
MASCLPNASPFLVMLAMCLLISTSEAEKYVVGGSEKSWKFPLSKPDSLSHWANSHRFKIGDTLIFKYEKRTESVHEGNETDYEGCNTVGKYHIVFNGGNTKVMLTKPGFRHFISGNQSHCQMGLKLAVLVISSNKTKKNLLSPSPSPSPPPSSLLSPSPSPLPNNQGVTSSSGAGFIGVMMWLMLLL

SEQ ID NO: 142894 - protein, 62 aa, Glycine max
  Clone ID: PAT_MRT3847_100047C.1.pep
IGLSLNSSNFFYKLYDLTTNPYASLLLRPFSLLCLLCRINSLPNFEFIISFFLISYLFFPFR

SEQ ID NO: 142895 - protein, 123 aa, Glycine max
  Clone ID: PAT_MRT3847_100048C.1.pep
DAIGNMLVKFPPLLTYSLNKKIRPVVIFLMTKAGVSEKDIAKVVALGPELLGCNIAHKLDLNVKYFLSLGIRLRQLGEMIADFPMLLRYNPDVLRPKYIYLRKTMVRPLQDLTEFPRFFSYSP

SEQ ID NO: 142896 - protein, 108 aa, Glycine max
  Clone ID: PAT_MRT3847_100049C.1.pep
QPPASTKAGAQIKKTRPDPPSKEKGKPEAHRTQQRKNPAAQEGPPPQSKTARDPRNGQTTPKKEAPKTHRDQNPKNPQGQKRGRENRASPNGPPPRGRKKKAPNQKGG

SEQ ID NO: 142897 - protein, 96 aa, Glycine max
  unsure (1)..(96): unsure at all Xaa locations
  Clone ID: PAT_MRT3847_10004C.1.pep
MAYNQQEPWVLESGNXPRVMTTETRLGHSEHRKCSTCRRMKSSRALVSQAAXATLRNXLAHWHWALLGNTLCILIPACPGDIGAEWIDFGGPCTYI

SEQ ID NO: 142898 - protein, 54 aa, Glycine max
  Clone ID: PAT_MRT3847_100050C.1.pep
NRVITQFLTPKSYFDFDTPYFIYFHTIFTSTTHFLNLTSSLLKATLLIPFDHQV

SEQ ID NO: 142899 - protein, 166 aa, Glycine max
  unsure (1)..(166): unsure at all Xaa locations
  Clone ID: PAT_MRT3847_100051C.1.pep
NITYRAPAEFPYTSGIVPGAGLAFGSEMSGGISVIIAEKLHILNSPIGIELKTTRGRGGYERHXISDAELENISLGVSMTGYSGFHPDDKYDTSSLPVVGDITFKNVIGANISVAGNFSGIVESPFSTICLSNVTFSLSSEPSPSWFCSNVIGFSEHVIPEPCPDI

SEQ ID NO: 142900 - protein, 89 aa, Glycine max
  Clone ID: PAT_MRT3847_100052C.1.pep
FGDPWNPPPKEDAWHPFSLVKVSTIGSKFLSSPGKLKKRSLFLAPRMFRSVDPPTFIKNFKDLYCILPLCGERKFPILSQDHLKALIEL

SEQ ID NO: 142901 - protein, 49 aa, Glycine max
  Clone ID: PAT_MRT3847_100053C.1.pep
AFLNNKIKKVMLYNIISMKYDAREPPRKIMRMYNVNIFYAETDFKGHTL

SEQ ID NO: 142902 - protein, 118 aa, Glycine max
  Clone ID: PAT_MRT3847_100054C.1.pep
TNPLCVDMFSNFCMYVYVLQNILSYVKTTFCVSNFVIVNVGLLLICKLLMRCVSNSLNSCLRVLETTYCTVQFNFLYMKGVKEIAEECQRWLCVLTVMLVKCKTETNHLPSVKSFIDV

SEQ ID NO: 142903 - protein, 69 aa, Glycine max
  Clone ID: PAT_MRT3847_100055C.1.pep
SFPLIHAILSSSLALSGATSTPWLLSPTHSFSSCMQRKGVCERVKVDLIPSPVLCCSTSTSVPGCRESW

SEQ ID NO: 142904 - protein, 90 aa, Glycine max
  Clone ID: PAT_MRT3847_100056C.1.pep
LSCLLSRCISCCKFLEFAFDFYLLEKSLPTPITKHQSKKKIYNLPQMFLSFFLSFYETKPNERESTKLFPLQYPLARSNKHRFKQSQNHS

SEQ ID NO: 142905 - protein, 87 aa, Glycine max
  Clone ID: PAT_MRT3847_100057C.1.pep
VVMVLFSKNQQWAHSEAQGKVVGAPHNKMLKLFQNVDVLALKNHESRAYQSEGGISAFSVPRDNWYPDVRQGHLNKFQNNGSHILMI

SEQ ID NO: 142906 - protein, 54 aa, Glycine max
  Clone ID: PAT_MRT3847_100058C.1.pep
TTLALQAFRSNLVFFVTPAQIAAGQAERGALLRVGGWVQPGSVERDAAQGLKVR

SEQ ID NO: 142907 - protein, 58 aa, Glycine max
  Clone ID: PAT_MRT3847_100059C.1.pep
SKHAYIVLFFLRSRRQAYMHYLPDFAVASSIYMMTSISTNSIVSGTHVRHRPEHHAWS

SEQ ID NO: 142908 - protein, 257 aa, Glycine max
  Clone ID: PAT_MRT3847_10005C.1.pep
MTMHRESWAFVFGVMGNIISFGVFLAPLPTFYQIYKKKSTEGFQSLPYVVALFSAMLWIYYAFVKREAALLLITINTFGIVVESIYLAIFLLYAPRKPRLTTIKLLLLLNVFGFGAMLLSTLYLSKGAKRLAIIGWICLVFNISVFAAPLFIIRRVIKTRSVEYMPFTLSMFLTINAVMWFFYGLLLRDYYVALPNTLGFVFGIIQMGMYLMYRNATPVALEEPVKAQELNGHIIDVGKMGTMEPNHAATAGAVGKV

SEQ ID NO: 142909 - protein, 26 aa, Glycine max
  Clone ID: PAT_MRT3847_100060C.1.pep
IIRLLLLRKQITMVLGHSIFIAPSIF

SEQ ID NO: 142910 - protein, 319 aa, Glycine max
  Clone ID: PAT_MRT3847_100061C.1.pep
MVEMESAAENPNYPAVDYKRPSILSFPRRPALRVTSEFDSESAVFFHKISCKLLDSLAKFKFSFNHSGKGGDISEPQFSFVSKHLSLHYDLEDHNALVKTSIDLAPSLQLTASHDLKAQQGEVTVLANLADPAYSLQLSTPLPSVGLPKATFRFPLGELSLQEKQEEEVNNLLSVDGVLKGQLFNGLCSAHYKDEELKLRYGYKDDEISFLPILSLPSNALSFAFKRRFGPSDKLSYWYNCDSNYWSAVYKRTYGKDFKFKAGYDSEIRLGWASLWVGDEGGKAKTAPMQMKVQFMLQVPQDDIKSSALMFRIKKRWDF

SEQ ID NO: 142911 - protein, 129 aa, Glycine max
  unsure (1)..(129): unsure at all Xaa locations
  Clone ID: PAT_MRT3847_100062C.1.pep
ICSWKDVFSMPVLEKVALDELLCGKVLPHLRVISENVQDAITRTERIIASLSGVWSGPSVIGDKKYVDXRKLQPLLTYVLSLGRILERRNAPESDTSHLARRLKKILVDLNEYDHARTMARTFHLKEAL

SEQ ID NO: 142912 - protein, 142 aa, Glycine max
  unsure (1)..(142): unsure at all Xaa locations
  Clone ID: PAT_MRT3847_100063C.1.pep
SECPIPGERREAIRHDNQVLXAYWSDPGHPKLYKHVYMTXSIVPMNRDRADXRKHEKAMTLKDYIXGILRSAYTLDSTSLDITLPXIDAATYLIDKLALKAGNENDDDEADTVGYCTFIVQNVTXYPTTXLKFNFLGKESIK

SEQ ID NO: 142913 - protein, 54 aa, Glycine max
  Clone ID: PAT_MRT3847_100064C.1.pep
LIPFCPSKMVQGSNNGGGNANKTLWKGHVDVPMIKVNCPWGQAFIFLLLLRGLP

SEQ ID NO: 142914 - protein, 117 aa, Glycine max
  Clone ID: PAT_MRT3847_100065C.1.pep
MSETLTHPTNEIEVAKNTTHYNNTTPTQNKETLNTKRKTNARNPNPPIGEIEAAKNTKQQHNMGNKIKTKEAQKQAKVEEKPTSEPLTHPTGEIEATKNTTHKRNPKHQKKNQHQKP

SEQ ID NO: 142915 - protein, 70 aa, Glycine max
  Clone ID: PAT_MRT3847_100066C.1.pep
LINSSDCGPGIHPFVWARERTRGASGSACYFTTEDQVDNIVVDKNTRTTPRDLRNYGPTNLALYTAGQFP

SEQ ID NO: 142916 - protein, 92 aa, Glycine max
  Clone ID: PAT_MRT3847_100067C.1.pep
MTKRTKKAGIVGKYGTRYGASLRKQIKKMEVSQHSKFFCEFCGKYAVKRKAVGIWGCKDCGKVKAGGAYTLNTASAVTVRSTIRRLREQTES

SEQ ID NO: 142917 - protein, 99 aa, Glycine max
  Clone ID: PAT_MRT3847_100068C.1.pep
RRTYSGARILVSLVHIQFSNNQMSEMLTTCNACYYHRLSSLSVYHREYAMSVHLFSGPSIPGNLALGYVKHPYMGFLLLNQSGIRGFLIHPDAVYTSTS

SEQ ID NO: 142918 - protein, 330 aa, Glycine max
  Clone ID: PAT_MRT3847_100069C.1.pep
MANEIPHDEVVCVTGANGFIGSWLVRTLLEKENPRYTIHATIFPGSDASHLFNLHPSAASRLTLFPADLLDAAALSRAITACSGVFHVASPCTLEDPTDPQRDLLEPAVQGTLNVLTAARRVGVRRVVLTSSISAMVPNPGWPAGRAADEASWTDVEYCKGRGKWYPVAKTEAERAAWAFDGVEVVAVLPATCLGPLLQPDLNASSAVLRELMMGSRETQEYHWLGAVHVKDVAKAHVLLYETPTAAGRYLCTNGIYQFSSFAAMVSELYPEFPIHRFPEETQPGLTACKDAAKRLIDLGLVLTPIQDAVREAVESLIAKGFLQCTPSQS

SEQ ID NO: 142919 - protein, 254 aa, Glycine max
  Clone ID: PAT_MRT3847_10006C.1.pep
MTMHRESWAFVFGVMGNIISFGVFLAPLPTFYQIYKKKSTEGFQSLPYVVALFSAMLWIYYAFVKRETALLLITINTFGIVVESIYLSIFLIYAPRKPRLTTIKLLLLLNVFGFGAMLLSTLYLSKGAKRLAIIGWICLVFNISVFAAPLFIIRRVIKTRSVEYMPFTLSMFLTINAVMWFFYGLLLRDYYVALPNTLGFVFGIIQMVMYLMYRNATPVALEEPVKAQELNGHIIDVVKIGTMEPNHGGAVGKV

SEQ ID NO: 142920 - protein, 48 aa, Glycine max
  Clone ID: PAT_MRT3847_100070C.1.pep
VIIHTNTKFPLSLSRHLGANFSSGIFIRIKSRSLTILHHAHQGSKCTP

SEQ ID NO: 142921 - protein, 59 aa, Glycine max
  Clone ID: PAT_MRT3847_100071C.1.pep
LIYQENGRIQKLWLARPTAQKCSLQPRKTINLQDYYDQCNRNFTLNNWDLPRHPKQRRM

SEQ ID NO: 142922 - protein, 182 aa, Glycine max
  Clone ID: PAT_MRT3847_100072C.1.pep
PRVRSVKFLSNYPVALSKLLEENMELKRRKNNSDDYAWNDYLSLPFTQNVISESLRMANIVNAIWRKAVKDVDIKGYLIPKDWCVVASLTSVHMDGMNYENPFEFNPGRWENIGTGTNNNCFTPFGGGQRLCPGIELSRLELSIFLHHLVTTYRWVAEEDEIIYFPTVKMKRKLPISVTTIN

SEQ ID NO: 142923 - protein, 74 aa, Glycine max
  Clone ID: PAT_MRT3847_100073C.1.pep
IHVRAPTALGCKTTDPCADYIAYRLTDPLGGKLMSLYDINQWTMAVRSSLTRTPFSTEAHYHHWVKHTLQGIWQ

SEQ ID NO: 142924 - protein, 68 aa, Glycine max
  Clone ID: PAT_MRT3847_100074C.1.pep
TETLCGCGSGCTRQRDSLCCTKAHTVKPYVSSLPRLWNSIGLNHLLLTCLSYAQANIPLGLRHLGTCT

SEQ ID NO: 142925 - protein, 70 aa, Glycine max
  Clone ID: PAT_MRT3847_100075C.1.pep
SHSRLPKLSISFQHNHILTNINYSIYRRVIFLSKRDCINKPFKTFQYLSKLVNLHLETTHPYTFNMFNQF

SEQ ID NO: 142926 - protein, 71 aa, Glycine max
  Clone ID: PAT_MRT3847_100076C.1.pep
QSSASSYSWCEGARSIRSRQSWASCVVWISVGATVVFSVAGELAAAAVQAAQAHAYSLRAPPHAHEGPHTA

SEQ ID NO: 142927 - protein, 48 aa, Glycine max
  Clone ID: PAT_MRT3847_100077C.1.pep
VIISAQIAITSCLLSCKMGDAYKMKVNDLVKKLRQVLLNHTNVNTNPY

SEQ ID NO: 142928 - protein, 51 aa, Glycine max
  unsure (1)..(51): unsure at all Xaa locations
  Clone ID: PAT_MRT3847_100078C.1.pep
VWENNELRVSLGTGIYIQMPLFSYLLDGLDKKHPFYLNSVRAXXXXATAST

SEQ ID NO: 142929 - protein, 70 aa, Glycine max
  Clone ID: PAT_MRT3847_100079C.1.pep
FILARTPLSVLNIPSRLGLHCHHRQSAASFVPSLALANCLYGYLATAPLRYNHPPPSPKEGGRHTVMTET

SEQ ID NO: 142930 - protein, 39 aa, Glycine max
  unsure (1)..(39): unsure at all Xaa locations
  Clone ID: PAT_MRT3847_10007C.1.pep
LALFLFCAFTTXYLPSAIADFMLNNEGDPIENGGTYNML

SEQ ID NO: 142931 - protein, 106 aa, Glycine max
  Clone ID: PAT_MRT3847_100080C.1.pep
NSEGFIFQKGSPVARDFSKAILRLLEDGTVKELEDKWLKPDGDCHNNSTSQGTESLRLESFWVLYVIYGAASTICFLLHTILSLKSRQTTRDEAREGNANPGEESR

SEQ ID NO: 142932 - protein, 110 aa, Glycine max
  unsure (1)..(110): unsure at all Xaa locations
  Clone ID: PAT_MRT3847_100081C.1.pep
FAFGVDWDDEEDVFLEAALNAALSGDYVXDYIEGISVGTSDGLPHVLXHKSGERGKRRDGSEDAEETTIIAGTTVDKAINKLIEKLATIVATLCGIECTIDEKLTRDKTI

SEQ ID NO: 142933 - protein, 65 aa, Glycine max
  Clone ID: PAT_MRT3847_100082C.1.pep
LIVPTHAPTNPRASFVFFCFSPRQPKRGGASFIIGEELLAASSMSIKYLRVLSLDNTVAYCIWIP

SEQ ID NO: 142934 - protein, 82 aa, Glycine max
  Clone ID: PAT_MRT3847_100083C.1.pep
NGPAEYELLYDDYIALANLIVDSLTTDERVTPLSLTKFCCPACNSTTKLNSSLDVQHLPYFMKMNAILPLLTPYSQKCHSNI

SEQ ID NO: 142935 - protein, 109 aa, Glycine max
  Clone ID: PAT_MRT3847_100084C.1.pep
MSHRKFEHPLHGSLGFLPSERASRHRGKVKAFPKDDPSKAPHLTAFLGYKAGMTHIVREVEKPGSKLHMKETCEAVTIIETPPMVIVGVVGYLNTPRVLRSLATVWAEH

SEQ ID NO: 142936 - protein, 86 aa, Glycine max
  Clone ID: PAT_MRT3847_100085C.1.pep
VAPSARRSRLGHTKSSFGSGMALWLSPLVRASPNRRWNHKGLPPEMAAAAEVRAAAAKPHLSAAASFCANRSRKLADFGRVNNHNR

SEQ ID NO: 142937 - protein, 382 aa, Glycine max
  Clone ID: PAT_MRT3847_100086C.1.pep
ARAARDGIVLLKNTNSLLPLPKTNPTIALIGPNANASSKVFLGNYYGRPCNLVTLLQGFEGYAKDTVYHPGCDDGPQCAYAQIEGAVEVAKKVDYVVLVMGLDQSQERESHDREYLGLPGKQEELIKSVARASKRPVVLVLLCGGPVDITWAKFDDMVGGILWAGYPGELGGVALAQVVFGDHNPPGKLPITWYPKDFIKVPMTDMRMRADPASGYPGRTYRFYTGPKVYEFGYGLSYTKYSYKLLSLSHNTLHINQSSTHLMTQNSETIRYKLVSELAEETCQTMLLSIALGVTNHGNMAGKHPVLLFVRQGKVRNNGNPVKQLVGFQSVKLNAGETVQVGFELSPCEHLSVANEAGSMVIEEGSYLLLVGDQEYPIEITV

SEQ ID NO: 142938 - protein, 103 aa, Glycine max
  Clone ID: PAT_MRT3847_100087C.1.pep
VSNQAELRLRLCPTGWEKIAAAMMRHCLLFIENNGGAFFFPKDNVFKDIIQIKPVGGPGGPPWNSRLVPAGVPLFPFWRGKKTWGNWGHICSLGKEKTRAKPT

SEQ ID NO: 142939 - protein, 75 aa, Glycine max
  Clone ID: PAT_MRT3847_100088C.1.pep
PYGDPRGPESPFQEIKRGPLFPNSTPIIFHGCHPSRPLIPPKGRPPFLAFVKEKNKKSETKETITKKDKKKKTTI

SEQ ID NO: 142940 - protein, 105 aa, Glycine max
  Clone ID: PAT_MRT3847_100089C.1.pep
SDQSSMFLAPFIFAYNESLLGVTFYRSLIEIASIPSSSTMVFLSSPTMNKSYCLRMTHHSHSYRHLFYTSTIHMNMTQVYIDFACHIGHLVNISQSSNTRVCRLC

SEQ ID NO: 142941 - protein, 240 aa, Glycine max
  Clone ID: PAT_MRT3847_10008C.1.pep
TDSYNDGIGTVTYWWSHSMISDQSYKSILKYCNFTAEETSGKCDDVYSYAVNYEFGNIDQYSIYTPTCTASQNNTVRHMRFKNLHLISGYDPCTENYAEKYYNLPEVQKAMHANVTNIPYKWTACSDVLLKNWKDSAISVLPIYKELIAAGLKIWVFSGDTDSVVPVTATRFSLNHLNLSIRTRWYPWYSGGQVGGWTEVYDGLTFATVRGAGHEVPLFQPKRAYILFKSFLAAKELPKY

SEQ ID NO: 142942 - protein, 230 aa, Glycine max
  unsure (1)..(230): unsure at all Xaa locations
  Clone ID: PAT_MRT3847_100090C.1.pep
VLNSASREKSYLNRQNNGHGTMFSRRFIHAGPYDNLKDIAMKILQKEVSTVPIIHSSSEDASFPQLLHLASLSGILKCICRYFRHCSSSLPVLQLPICAIPVGTWVPKIGESNRQPLAMLRPTASLASALNLLVQXDITALAKNRAYAHINLDEMTVHQALQLGQDAYSPYELSSQRCQMCLRTDSLHKVMERLASPGVRRLVIVEAGSKRVEGIIALSDIFNFFLGYNS

SEQ ID NO: 142943 - protein, 263 aa, Glycine max
  unsure (1)..(263): unsure at all Xaa locations
  Clone ID: PAT_MRT3847_100091C.1.pep
LKHIPYQLGNHGSNLTEEELETHTISAWKGGKWTGFTQCFIRAGPYDNLKEIAVKILQHGISTVPIIHSEDGSFPQLLHLASLSGILKCICRYFRNCSSSLPILQLPICAIPVGTWVPKIGESNRRPLAMLRPNASLTSALNLLVQAQVSSIPIVDDSDSLLDIXYCRSDITALAKDRTYTHINLDEMTVHQALQLGQDSYNTYELSCQRCQMCLRTDSLHKVMERLANPGVRRLVIVEAGSKRVEGIIALSDIFNFFLGYNS

SEQ ID NO: 142944 - protein, 113 aa, Glycine max
  unsure (1)..(113): unsure at all Xaa locations
  Clone ID: PAT_MRT3847_100092C.1.pep
TXXXXXFNKVIXXXYFXXXFCLLXLILPWSKMKLRWDGLSCMLEWIGAQTHWLMWGYLLEFKGKNVFLQLWAAGLLFLAANIFILVMIIRHHKYASVFKALEYANSKNAAKLE

SEQ ID NO: 142945 - protein, 86 aa, Glycine max
  unsure (1)..(86): unsure at all Xaa locations
  Clone ID: PAT_MRT3847_100093C.1.pep
LWAHSSGGCAXVSLSLSLSLSLSXXFSFFPFLXSVXEPPPRRKXLCVYLVANSSAISLWFGWFVTPLLGLCLIVYYPREIKILNYQ

SEQ ID NO: 142946 - protein, 110 aa, Glycine max
  Clone ID: PAT_MRT3847_100094C.1.pep
HYNLYIPRVNTNVTKQDDRMKLTVTTKLATISLLLIYACFSAKFFYAAGATSMTPLSSSSSSPSFEMQNLWPNSCVAAQPLLKGTPYSSLQIKTTIVTHTDIYDRMNYTI

SEQ ID NO: 142947 - protein, 299 aa, Glycine max
  unsure (1)..(299): unsure at all Xaa locations
  Clone ID: PAT_MRT3847_100095C.1.pep
MLVKTCCPFLLKHKLGNHGSNLTEEELETHTISAWKGGKWTGFTQCFIRAGPYDNLKEIAVKILQHGISTVPIIHSEDGSFPQLLHLASLSGILKCICRYFRNCSSSLPILQLPICAIPVGTWVPKIGESNRQPLAMLRPTASLASALNLLVQGVNFLSDLEHSVSKRKATERKNEEIGILLYFXAQVSSIPIVDDNDSLLDIYCRSDITALAKNRAYAHINLDEMTVHQALQLGQDAYSPYELRSQRCQMCLRSDPLHKVMERLANPGVRRLVIVEAGSKRVEGIVSLRDIFKFFIGD

SEQ ID NO: 142948 - protein, 107 aa, Glycine max
  Clone ID: PAT_MRT3847_100096C.1.pep
LYHYLYVTYHLYSALNRYTPKPPSYHPGLMFALPLVVSALRFFFLVCATTFHLCAFPICKLLTYWPSCFTWVALPLKLVSEDSIVYYFFIYIKLVTALRSRSYVGSI

SEQ ID NO: 142949 - protein, 68 aa, Glycine max
  unsure (1)..(68): unsure at all Xaa locations
  Clone ID: PAT_MRT3847_100097C.1.pep
MNKVIGQPVRGLKREVNKKXVLKVPGIEHKVLDAINNEPWVSSKDHFLHILLRQRRNPYEYQMIIARI

SEQ ID NO: 142950 - protein, 63 aa, Glycine max
  unsure (1)..(63): unsure at all Xaa locations
  Clone ID: PAT_MRT3847_100098C.1.pep
PXNRRDHRQPKHXTEGKHXRKQDDSXEQEARTXPXEXGTKEEAKGGKHKQNXGNHEAGSKGRQ

SEQ ID NO: 142951 - protein, 36 aa, Glycine max
  Clone ID: PAT_MRT3847_100099C.1.pep
IYENWIVLKNSVHELIKPHYSLRWGTKNGFMFDAEL

SEQ ID NO: 142952 - protein, 47 aa, Glycine max
  Clone ID: PAT_MRT3847_10009C.1.pep
ESVFIFLLTSCTWKSGVSHEALMPCNVNSFCNSLFAAESQIDSDVMK

SEQ ID NO: 142953 - protein, 75 aa, Glycine max
  Clone ID: PAT_MRT3847_1000C.1.pep
SKEVATSLLAELKGVAEQRKNGKSPVSKQGESCDVMSNGLSIVLPVMILDPLTMSILGHDDQYENHHEHLMYALW

SEQ ID NO: 142954 - protein, 93 aa, Glycine max
  unsure (1)..(93): unsure at all Xaa locations
  Clone ID: PAT_MRT3847_100100C.1.pep
GXYIAPAFMXKLXXXXSKNFMTLPNIKXPLXLGIWGGKGXXKSFQCXLVFAKMGINPIMMSAGELEXGNAGXPAKLXKQRYREAADMIKXGKM

SEQ ID NO: 142955 - protein, 52 aa, Glycine max
  unsure (1)..(52): unsure at all Xaa locations
  Clone ID: PAT_MRT3847_100101C.1.pep
LGPNRAIEGTIQRSLNRGNRGRANNPNGDKPCCEMFFXXNLSIMIFLNFKDL

SEQ ID NO: 142956 - protein, 881 aa, Glycine max
  unsure (1)..(881): unsure at all Xaa locations
  Clone ID: PAT_MRT3847_100102C.1.pep
MARVLVQSTGMPGLLSGQRHGKHKGSGKSKRSVKMMSTLRMTALRMWSFSGLRTLNPMDSLSRPRHTFPLKRTSGRARAKRCVPKAMFERFTDKAIKVIMLAQEEARRLGHNFVGTEQILLGLIGEGTGIAAKVLKSMGINLKDARVEVEKIIGRGSGFVAVEIPFTPRAKRVLEFSLEEARQLGHNYIGSEHLLLGLLREGEGVAARVLENLGADPNNIRAQVIRMVGEGADSVGATVGPGSSNNNKMPTLEEYGTNLTKLAEEGKLDGPMGSEVDIEHITXILGRRTKNNPCLIGEPGVGKTAIAEGLAQRIANGDVPETIEGKKVITLDMGLLVAGTKYRGEFEERLKKLMEEIKQSDEIILFIDEVHTLIGAGAAEGAIDAANILKPALARGELQCIGATTLDEYRKHIEKDPALERRFQPVKVPEPTVDETIQILKGLRERYEIHHKLRYTDEALVAAAQLSYQYISDRFLPDKAIDLIDEAGARVRVQRARXPDHAGQIAELIRQGKEMXEEAVRHQXLEKAGGLRDRELYLKAQSSTRVEKGKGMSRAXTEAGDEGPIVTEADIQHIVSSWTGIPVEKVSTDESDRLLKMEETLHKRVIGQDEAVKAISRAIRRARVXMIQLDISAFMERHTVSKLIGSPPGYVGYTEGGQLTEAVRRRPYTVVLFDEIEKAHPDVFNMMLQILEDGRLTDSKGRTVDFKNTLLIMTSNVGSSVIEKGGRKIGFDLDYDEKDSSYNRIKSLVTEELKQYFRPEFLNRLDEMIVFRQLTKLEVKEIADIMLKEVFDRLKAKEIDLSVTERFRERVVDEGYNPSYGARPLRRAIMRLLEDSMAEKMLAREIKEGDSVIVDADSDGNVIVLNGSSGAPDSLEEALPV

SEQ ID NO: 142957 - protein, 58 aa, Glycine max
  unsure (1)..(58): unsure at all Xaa locations
  Clone ID: PAT_MRT3847_100103C.1.pep
SNTTDNDEAVRATTPDPEKXRVRPNTGLEMPRAARAAILTMHAQEEAPADKRSGPEYH

SEQ ID NO: 142958 - protein, 195 aa, Glycine max
  unsure (1)..(195): unsure at all Xaa locations
  Clone ID: PAT_MRT3847_100104C.1.pep
MARVLAQSVNVPGLVAEHRHGQQKGSGKLKRSTKMMSALRTNGLRMSGFSGLRTFNPLDTMLRPGIDFHSKVSIATSSRQARATRCVPKAMFERFTEKAIKVIMLAQEEARRLGHNFVGTEQILLGLIGEGTGIAAKVLKSMGINLKDARVEVEKIIGRGSGFVAFXIPFTPRLSRLPVPPLQKARQLGHNYIGI

SEQ ID NO: 142959 - protein, 68 aa, Glycine max
  Clone ID: PAT_MRT3847_100105C.1.pep
LEDLVVAVKHHRHMGGGTGGVNLSFGSNYPYLKMSECTERAKTCHHTSLRSLHMHRAIGCDERIKFYC

SEQ ID NO: 142960 - protein, 631 aa, Glycine max
  Clone ID: PAT_MRT3847_100106C.1.pep
MARVLAQSVNVPGLLAEHRHGQQKESGKLKRSTKMMSALRTNGLRMSGFSGLRTFNPLDTMLRPGIDFHSKVSIATSSRRARATRCVPKAMFERFTEKAIKVIMLAQEEARRLGHNFVGTEQILLGLIGEGTGIAAKVLKSMGINLKDARVEVEKIIGRGSGFVAVEIPFTPRAKRVLELSLEEARQLGHNYIGSEHLLLGLLREGEGVAARVLENLGADPTNIRTQVIRMVGESADSVTATVGSGSSGNKMPTLEEYGTNLTKLAEEGKLDPVVGRQPQIERVTQILGRRTKNNPCLIGEPGVGKTAIAEGLAQRIANGDVPETIEGKKVITLDMGLLVAGTKYRGEFEERLKKLMEEIKQSDEIILFIDEVHTLIGAGAAEGAIDAANILKPALARGELQCIGATTLDEYRKHIEKDPALERRFQPVKVPEPTVDETIQILKGLRERYEIHHKLRYTDEALVAAAQLSYQYISDRFLPDKAIDLIDEAGSRVRLQHAQLPEEARELDKEVRQIIKEKEEAVRNQDFEKAGELRDREMDLKAQISTLVEKGKEMSKAETEAGDEGPIVTEADIQHIVSSWTGIPVEKVSTDESDRLLKMEETLHKRVIGQDEAVKAISRAIRRARVGLKS

SEQ ID NO: 142961 - protein, 79 aa, Glycine max
  Clone ID: PAT_MRT3847_100107C.1.pep
APLAGTPVVMLPSIISSSVSATVFSVFSPVFVSAVVSSVVKLAVTLILLIITLSSNFSCENVWQHGVQLRPHVPRYVLW

SEQ ID NO: 142962 - protein, 98 aa, Glycine max
  Clone ID: PAT_MRT3847_100108C.1.pep
RPVHTASEGGKRIVASPYAKKLAKELMFDTKSNSLPLAIGSAVAKDVEAYAAAGYAWPTVAPELWKIAAPAGVELVSGVPFTTMHTAVSRNMAESLGD

SEQ ID NO: 142963 - protein, 64 aa, Glycine max
  unsure (1)..(64): unsure at all Xaa locations
  Clone ID: PAT_MRT3847_100109C.1.pep
ADTSRNVQIPLVMNSVVIILVKRPXKFRSKKDKEYEEEVIVIEGVEYDSIIPPKYDVLIADEDD

SEQ ID NO: 142964 - protein, 123 aa, Glycine max
  unsure (1)..(123): unsure at all Xaa locations
  Clone ID: PAT_MRT3847_10010C.1.pep
AKAVALVLPPLKGKINGIALRVPSPNVSVVGLVVQVSKKTFAEQSESSIQXSADNWVQGILPGCDETQVXFDLWCKDVSSTDDSSWFMVLGDDRVKVRAWYGNEWGFSPKVVDLAPIVATKWK

SEQ ID NO: 142965 - protein, 53 aa, Glycine max
  Clone ID: PAT_MRT3847_100110C.1.pep
NLGEEPRFLGYWGWRKTQPRGFLPIWNRARPLKGCFSSGLGLGWERESNQPIN

SEQ ID NO: 142966 - protein, 51 aa, Glycine max
  unsure (1)..(51): unsure at all Xaa locations
  Clone ID: PAT_MRT3847_100111C.1.pep
NDGAYMEVAFYLQFYLNIFLFTLTIHVYMCCSYTGNCTYIFXVYAEILFLV

SEQ ID NO: 142967 - protein, 70 aa, Glycine max
  Clone ID: PAT_MRT3847_100112C.1.pep
LVIPKIQVYIIINNFRMKLTLPAPAWSGSGCMISYQVFIIHLGILIHCINTNSETNFLPSAIWVYTVTYS

SEQ ID NO: 142968 - protein, 66 aa, Glycine max
  unsure (1)..(66): unsure at all Xaa locations
  Clone ID: PAT_MRT3847_100113C.1.pep
MSGLNDQIHTAFDTFADAYADDSAADSKDYVHIHVHQRNEXKSLTTGQGLKQELSYDKILNDVLKD

SEQ ID NO: 142969 - protein, 116 aa, Glycine max
  Clone ID: PAT_MRT3847_100114C.1.pep
NQRDEHEIKRRPERTRNHQSDLQDKDATGDSTKNGTDKKKEAKKRKEGPGKTKTSEASIKDDVTKNVLKTQAAAPVELNTGRTRTADDVEGADAGGKANAQHIAPGKARPRGKQSH

SEQ ID NO: 142970 - protein, 86 aa, Glycine max
  unsure (1)..(86): unsure at all Xaa locations
  Clone ID: PAT_MRT3847_100115C.1.pep
XRRPAXCXRXIKXKPXPQSERFCRSVPXPKIXIYDVGMKKKGVDXFPFCXHXVSWXKENVSSEALEAARIACXKYXATFAGXVVST

SEQ ID NO: 142971 - protein, 40 aa, Glycine max
  Clone ID: PAT_MRT3847_100116C.1.pep
INLSYFTIFFFEWVLRNLFLHDLNFVFMGPKIVYILTFQF

SEQ ID NO: 142972 - protein, 94 aa, Glycine max
  Clone ID: PAT_MRT3847_100117C.1.pep
TLNLIKLTLPPNGNRAPPKTKRLGTKTLTPKSELTNPCLRHQNSFIWSPETKLQAGGLQRPGWENAEATQLKTLAAQTPFTSGRFSKKARTPRP

SEQ ID NO: 142973 - protein, 65 aa, Glycine max
  Clone ID: PAT_MRT3847_100118C.1.pep
VGWVGFRNNVYQPRGVLCGFAGLNICIGDAFRQCFCRRLSLWCLGMIYLDVDQLPAPVGSRSASS

SEQ ID NO: 142974 - protein, 62 aa, Glycine max
  Clone ID: PAT_MRT3847_100119C.1.pep
GCCCCSHSLGRCSERKILNPFSYPANVCLLLFNKFILRILLKSEDIGSAAAHRTSYCFSFQI

SEQ ID NO: 142975 - protein, 126 aa, Glycine max
  unsure (1)..(126): unsure at all Xaa locations
  Clone ID: PAT_MRT3847_10011C.1.pep
MSQEGKGCRTRGELTDIIDLLLHIDLLGXQGAGEVLPKKNVFNDKLXVDNTREFFDGNLPEDFGIPIFANCLYPVSXLPVEAVVVNVTCGSGSGGLHTTACISSGVNNRSSDIIKKICTAIGKEKK

SEQ ID NO: 142976 - protein, 67 aa, Glycine max
  Clone ID: PAT_MRT3847_100120C.1.pep
SYAILVNWLILMVRSQLMIVLVKEFSEIYVMICIPDKDLDNSLKVPCILHMDSIKGSHSGLKTLVQR

SEQ ID NO: 142977 - protein, 120 aa, Glycine max
  Clone ID: PAT_MRT3847_100121C.1.pep
FFSQNFHLSPSPLENAPIFSPTIRSFPSQFPASSPSSISRKIHRSQTYIDFVFLTLILFFQSVFFSNIYRFQNPDLDAHEPLFAFGATLIWVFKCFMETVVFKFLNFCRMTSGVASIAEV

SEQ ID NO: 142978 - protein, 225 aa, Glycine max
  Clone ID: PAT_MRT3847_100122C.1.pep
GVRETLVLPNCESLCIPWMLAEKDDWVPRTVAPFIWINQEYGNERSTSIDTNNQPSGGVEASLEVGASTSSNDPEHKQQNPESTESSQEATRTSSDSLELPLSSSNSVTLESSRSLEEQNTPLLENDKPKKTSDIKEFRTSLIQNDKLLETNEQNIENNSESQSQHSVVMPKQNHSVEHEDGLPKKMGRRERMLDLGKKMSEKLEEKRRHIEEKSRHIVEKMRGP

SEQ ID NO: 142979 - protein, 130 aa, Glycine max
  unsure (1)..(130): unsure at all Xaa locations
  Clone ID: PAT_MRT3847_100123C.1.pep
LACRAGDAGPCNLPCLLSVRPAIGHVCRCHLNLLLTKSSPINPDKERVYNAGAVXRVLIRSLLLFACMVQLKLLDLIEKFAXAGPFNQESLMSVGCVELLLEKIYPFLLALSLLSYALKIVEILGSYRGC

SEQ ID NO: 142980 - protein, 77 aa, Glycine max
  Clone ID: PAT_MRT3847_100124C.1.pep
FSLSFINKILISSSTRMLVAYHSQLELFIIITTPFSQVNLITLQILIHRSSSKSDILNIYVPIFCSINLLDFRPHHS

SEQ ID NO: 142981 - protein, 63 aa, Glycine max
  Clone ID: PAT_MRT3847_100125C.1.pep
FSIEFNDRKAKGFSLYPKPGTASLLPTPGFPAGKIKGHQKKSPINSQVDPLLYNRTEPSSHFT

SEQ ID NO: 142982 - protein, 78 aa, Glycine max
  Clone ID: PAT_MRT3847_100126C.1.pep
MPGPQRFPVSSVPQHSVGTPPTMRAPPGPPVQPQPPYPNVTQGIMQPPSSPFGAPTWQMQSQQVAPPPPVPGPSQGPR

SEQ ID NO: 142983 - protein, 67 aa, Glycine max
  Clone ID: PAT_MRT3847_100127C.1.pep
QVGIIVSGAEARPIAFYVFRDSLVHIEDHNLLANQIRADAATYWNEYPSCHMTNYLLLQGLHTFPIL

SEQ ID NO: 142984 - protein, 251 aa, Glycine max
  unsure (1)..(251): unsure at all Xaa locations
  Clone ID: PAT_MRT3847_100128C.1.pep
PVWYNMLEGGLISHKIFSLWLNQDPSEEMGGEIVFGGIDYRHFRGEHTYVPLSQKGYWQIDLGDILLANNSTGLCEGGCAAVVDSGTSLIAGPTTVVTQINHAIGAEGYTSFECKSILHNYGDSIWESLIAGLYPDIIXSAIGFCSNNEFNTMDDVIKTVVHNQSWNRSQTRESPFCSFCNMIVLWIQVQLKQSNVKEKVLKYVDELCEKLPNPPGQSFINCNRIATMPHITFTIGNKSFPLSPEQVCCLT

SEQ ID NO: 142985 - protein, 94 aa, Glycine max
  Clone ID: PAT_MRT3847_100129C.1.pep
LSFCPSTVKSMWQDRGFKLIPFFGIFWHPGVLGVASKSLSPRGFGFFPLCEKENIGVKVRHFFCQRSKKMWGYNFPKGSKNSVGNYHFAGSNFP

SEQ ID NO: 142986 - protein, 134 aa, Glycine max
  Clone ID: PAT_MRT3847_10012C.1.pep
MGDSSVQSGSPNAKPDLVDGDSAVSNNATLETIVQSFQDSMSLGKRHKFWETQPVGQYKDVGDSSLPEGPIEPPTPLSEVKQEPYNLPNAYEWTTCDMDSEEICDEVYVLLKNNYVEDDENMFRFNYSKEFLSW

SEQ ID NO: 142987 - protein, 428 aa, Glycine max
  unsure (1)..(428): unsure at all Xaa locations
  Clone ID: PAT_MRT3847_100130C.1.pep
MATMTSLIGLINKIQRACTVLGDHGGEGLSLWEALPSVAVVGGQSSGKSSVLESVVGRDFLPRGSGIVTRRPLVLQLHKTEDGTQEYAEFLHIPRRRFTDFAAVRKEISDETDRITGKTKQISNIPIHLSIYSPNVVNLTLIDLPGLTIHVAVEGEIGCNVRRRPGPYXDRRNQIAKRLELYKQARDDIDSVAXEIMKSQSLQQMFRGRFVIDLIILTIFLIKHEQKNLRXYGKLNSHLRMILLVHRPQCTKALEFYVVILCNLRVVQIFGFYDHIDYFQRTFSILLXDRIGRPIAVDSGAQLYTILEMCRAFDKVFREHLDGGRPGGDRIYGVFDHQLPAAXKKLPFDRHLXLKNVQRVVTEADGYQPHLIAPEQGYRRLIEGSIGYFKGPAEASVDAVHFYFSPLLKELVRKSISETEELKRFPTL

SEQ ID NO: 142988 - protein, 66 aa, Glycine max
  unsure (1)..(66): unsure at all Xaa locations
  Clone ID: PAT_MRT3847_100131C.1.pep
TXLPLPLXLXXLXXXXXTGKLTXXXXXXSXIXXHXIXLTPHSYPHXXXFFXXSLLXSTXSXLLRXX

SEQ ID NO: 142989 - protein, 243 aa, Glycine max
  Clone ID: PAT_MRT3847_100132C.1.pep
LEPFDRHLSLKNVQRVVTEADGYQPHLIAPEQGYRRLIEGSIGYFKGPAEASVDAVHFVLKELVRKSISETEELKRFPTLSNDIATAANEALEKFREESRKTVLRLVDMESSYLTVEFFRKIHFEPEKNPNGPPNPNRNGPPNMDSYTDNHLRKIGSNVNSYIGMVCDTLKNTIPKAVVHCQVREAKRSLLNHFYVHVGRKEKEKLGAMLDEDPALMERRNQIAKRLELYKQARDDIDSVAWK

SEQ ID NO: 142990 - protein, 100 aa, Glycine max
  unsure (1)..(100): unsure at all Xaa locations
  Clone ID: PAT_MRT3847_100133C.1.pep
MATMTSLIGLINKIQRAXCTVLGDHGGEGLSLWEALPSVAVVGGQSSGKSSVLESVVGRDFLPRGSGIVTRRPLVLQLHKTEEGTHEYAEFLHIPRRRFT

SEQ ID NO: 142991 - protein, 101 aa, Glycine max
  Clone ID: PAT_MRT3847_100134C.1.pep
RMKVSRVYGFQRDQFMKFHRKTRLTSSVTLGSVQRRASQGSLGCFPPSCIFRQVFYKLKSRLKQALVWQRSSSPQYSYDFRSYSLNFDDGLSSDHIPPRFC

SEQ ID NO: 142992 - protein, 87 aa, Glycine max
  unsure (1)..(87): unsure at all Xaa locations
  Clone ID: PAT_MRT3847_100135C.1.pep
VIDKRKPKKEYSEKANMQAPKIALDDRVYLXPPSPKNSAVDSHEPYCTGGIVLASEDGKIVLENTLDARLDVIFRQKLPEVRKRLLG

SEQ ID NO: 142993 - protein, 53 aa, Glycine max
  Clone ID: PAT_MRT3847_100136C.1.pep
RRSHNLHPKGIILQIHTLRKHGTLIIGRPARQTQHHFILPVPQPPTFKLKLVP

SEQ ID NO: 142994 - protein, 315 aa, Glycine max
  Clone ID: PAT_MRT3847_100137C.1.pep
MQSKISAFFKSTTSDSSSVSADNDDDLSIWEKQQHHIINTYTRRPPNPNAVIPSVVKNKKRSYAQFHLDFGQSDFLLRACSTCGINFTPGDPDDEKSHNHFHKSYTQGIQFRGWTKENVIPLPTLEAGRIILVSEIDLTSHRRIVEQVVSMMEIELGCGWILHDLFKVYLFVSLHRVVGCLVAEPIEKAFKVVSGSPDSVKKREVRTRSTTFRFGNVIFQREVEKKVASLSDSERMEGAIFCDSKPTIAACGIRAIWVAPSNRRKGIASKLLDAVRKSFCKDLELERSQLAFSQPTSAGKALATSYTGTGSFLAY

SEQ ID NO: 142995 - protein, 60 aa, Glycine max
  Clone ID: PAT_MRT3847_100138C.1.pep
GFSKVTVDVEPARKFHSLILEWIPIAVKCVYEPASAINWYTWSDANYLLYVQFGMLSPHL

SEQ ID NO: 142996 - protein, 93 aa, Glycine max
  Clone ID: PAT_MRT3847_100139C.1.pep
RNINSFNNKIKRPKPGSNTRIHKNHRGPPYRPEKNMTSTNKTKELRSNNNIQANPHRQENQEQVERATYIEHTGKGHATIPTARNPYTTSAKP

SEQ ID NO: 142997 - protein, 50 aa, Glycine max
  Clone ID: PAT_MRT3847_10013C.1.pep
LATDCIIVSSSVSSGSRSSLVSLFQFGFEFEFQLISFSLPGLCFIFIFLI

SEQ ID NO: 142998 - protein, 212 aa, Glycine max
  unsure (1)..(212): unsure at all Xaa locations
  Clone ID: PAT_MRT3847_100140C.1.pep
MACNSFSWLMLSSTNAKRVPLFFVPTSTCFKFDVPVASQIQWHTRSRNIPQIKRHWVEASDQSLASQERFSVASYNILGDRNASQHSDLYVNVPSRYINWGRRKRVICDELFGWDPDIICLQEVDKYFELSDIMVKAGYAGSYKRRTGDAADGCAMFWKADKFRLLEGESIQFKDIGLRDNGAXLSVFEMCESDSRRMLVGXIHVLYNPNRG

SEQ ID NO: 142999 - protein, 155 aa, Glycine max
  Clone ID: PAT_MRT3847_100141C.1.pep
MALTEFFHGEISSELWKMLVSISRKALRCKSSAESLITYVRELLPTIEEIKYSGVELPAPRQSQLDRLSEILRSGVELSHQALSSSRWNVYRNFQLAKKMEKLEKHVTRFLQVPMQAHILADVNHVRFEMAERFHRVEVVYPRMEPLIGEMKIVV

SEQ ID NO: 143000 - protein, 59 aa, Glycine max
  Clone ID: PAT_MRT3847_100142C.1.pep
NFSTHQIPIHTTSTPSKLKPLNLNQPFNNIPNYKHNFTKNYKNNLTYTHTKSQHTITHS

SEQ ID NO: 143001 - protein, 39 aa, Glycine max
  Clone ID: PAT_MRT3847_100143C.1.pep
PTSNNPYISLLFLLLPLTIRQVLHLHGGPFSNPILSNLY

SEQ ID NO: 143002 - protein, 95 aa, Glycine max
  Clone ID: PAT_MRT3847_100144C.1.pep
YPRRHHSEYSTWILCRGYCMVTEIRIPNLCPISSNHRQQDDTLLTIRCCKALRSPLLSKCGMSSILAPIGSWWSLFFFLLAAFLVHCLAHYGPLL

SEQ ID NO: 143003 - protein, 79 aa, Glycine max
  Clone ID: PAT_MRT3847_100145C.1.pep
LTAPFFFLGLSVQSRALMMNLPDLIIRPITSNEDLGCDHYHKHDHIKILKGRPAPVILGPNMTHGLTSLRKNHLIFTTY

SEQ ID NO: 143004 - protein, 173 aa, Glycine max
  Clone ID: PAT_MRT3847_100146C.1.pep
KKKKKKKKKKKKKKKKKKKKKKKKKKKKKKKKGKTDIGGPLFTGRLLAAAWLFFGAPFIWGPWLGFPCAGPGNPLALPPLGASKYFPFSPVAFLAGGPTPGALPHFGPPSMAPVSRPVGTPLARRFSSFPPGGPPPWGGPHPPVLYLPSFFLWPFLRVPPSGFTPGAPFRVPF

SEQ ID NO: 143005 - protein, 87 aa, Glycine max
  Clone ID: PAT_MRT3847_100147C.1.pep
NAPNKSATDECSHTMAQNMLYKSCEVPDPKTDTLKVDPITWLEHGVVTTQIATPNEASGRRTVSNRTAYLGLLKMGTRTPRRAQRTE

SEQ ID NO: 143006 - protein, 77 aa, Glycine max
  unsure (1)..(77): unsure at all Xaa locations
  Clone ID: PAT_MRT3847_100148C.1.pep
GKGDASRTGPEPPGRPTRPASPPAGHQQEXKARAETTDPSGHPTGASCATPPPNTDGETHPGAHTAPASPPPATTTP

SEQ ID NO: 143007 - protein, 134 aa, Glycine max
  Clone ID: PAT_MRT3847_100149C.1.pep
GGAYSLFPPSVGSDCLAITLRWVPSGFPQSRLCTFSAMYFHWAYPFQFIQPCRFMCWSSRLSCSNYVGLLFSNWLYCGGMIASPRLGPLVLSFFPRLCKACKVVVPFSCLRGRVNLFLRFSCALIPVLKKKTTK

SEQ ID NO: 143008 - protein, 84 aa, Glycine max
  Clone ID: PAT_MRT3847_10014C.1.pep
STSLGGSLLFLVAKKQRHLIHQNRASLDIYSFVDVRSLNDSSAKEYDSIFRTGCIPGPKRGRHHGSSKSVWLPHSCPICTTEDG

SEQ ID NO: 143009 - protein, 168 aa, Glycine max
  Clone ID: PAT_MRT3847_100150C.1.pep
MRPQRTSIHAVTTWVRRQPPKVKAFLAVVSGMAALVLLRFIVHDHDNLFVAAEAVHSLGISVLIYKLMKEKTCAGLSLKSQELTAIFLAVRLYCSFVMEYDIHTLLDFATFVTTVWVIYMIRFKLKASYMEEKDNFAIYYVVAPCAMLALLIHPSTSHHLLNRISWAF

SEQ ID NO: 143010 - protein, 109 aa, Glycine max
  Clone ID: PAT_MRT3847_100151C.1.pep
MRPQRTSIHAVTTWVRRQPPKVKAFLAVVSGMAALVLLRFIVHDHDNLFVAAEAVHSLGISVLIYKLMKERTCAGLSLKSQELTAIFLAVRLYCSFVMEYDIHTLLDFA

SEQ ID NO: 143011 - protein, 115 aa, Glycine max
  Clone ID: PAT_MRT3847_100152C.1.pep
TSVSVLNDCIYHWSLSAAVHCCPPSSTTFRRKTDRRTHQEKRFLQIGPSLKFHRQPPSDALPLAVFVSGVCKPRATVQAGLEDGTATEQVTSPPRFCSKGYFALKQCPFVAVKKP

SEQ ID NO: 143012 - protein, 48 aa, Glycine max
  Clone ID: PAT_MRT3847_100153C.1.pep
ESEEVKRRLGGEDVETQTKSQQMYVNTPRTGVVDKFTGMVAYWLYPPT

SEQ ID NO: 143013 - protein, 94 aa, Glycine max
  Clone ID: PAT_MRT3847_100154C.1.pep
MAESHRTRPSRRQPSRLQSRAPSSLQINRTVEWNVAIPLLSPLVSSPPPPPQKDEPPPPQQQRPPEKVVFKKWQHPAAPFCYEPPSRVPPFVNV

SEQ ID NO: 143014 - protein, 96 aa, Glycine max
  Clone ID: PAT_MRT3847_100155C.1.pep
LNDPMRQRQLFEDQAKAKAAGDDEAMFIDENFCTALEYGLPPTAGWGMGIDRVAMFLTDSNNIKEVLLFPAMKPEDKKENVATTDTLESTTVGTSV

SEQ ID NO: 143015 - protein, 42 aa, Glycine max
  Clone ID: PAT_MRT3847_100156C.1.pep
HPCFHIIEQNDLTHKINLEWLYFVSKIILVYNMELWMLSSKI

SEQ ID NO: 143016 - protein, 118 aa, Glycine max
  unsure (1)..(118): unsure at all Xaa locations
  Clone ID: PAT_MRT3847_100157C.1.pep
XXRTTRGKSSCDXGGXRDAATRSAGKRKETXRRRRQAXAAGEDHETPQSIXTGAQRRPTRTXTRRQNPIMCYQTKHSNRRRQDTTSNVSMQLMIRGRCKRVVRQHLQTTTGTGMNAEK

SEQ ID NO: 143017 - protein, 59 aa, Glycine max
  Clone ID: PAT_MRT3847_100158C.1.pep
AWFLLWAGPQTLRGMVLFYANVALEDSIEFFLPMMVSVYVFIAYEVTSLWLVMICFFLP

SEQ ID NO: 143018 - protein, 112 aa, Glycine max
  Clone ID: PAT_MRT3847_100159C.1.pep
MEGGSFNGAQIDAKIMQTFKKNFVQVQDIFDQNRLLINEINQNHESKVPDNLTRNVGLIRELNNNIRRVYDLYVDLSSSFTKSMEVTSEGDSSGGAVKSSDGKAGHKRHRPV

SEQ ID NO: 143019 - protein, 440 aa, Glycine max
  unsure (1)..(440): unsure at all Xaa locations
  Clone ID: PAT_MRT3847_10015C.1.pep
MGDSSVPSGSPNAKSDLVDRDLAVSNNASSLETIVQSFQDSMSLGKRHKFWETQPVGQYKDVGDSSLPEGPIEPPTPLSEVKQEPYNLPSAYEWTTCDMDSEEICDEVYALLKKPDVDDNNAEDDENMLRFNYSKEFLSWALRVHGYYQSYRIRIGVKPSGQGLVFLXCDTIRFRFHYEVVKTIHLLCSISLLXPRSKGPVTYRKLAYSVWMDWENTSQAAYTAKVVLPTPITTCQYWHRSLNPKKLIDVGFSRLGARMTMSRTIKLYKLPDSTVTPGFRKMELRDVPAVTRLLRNYLSQFVVAPDFDENDVEHWLLPNENVVDSFLVESPENHEITDFCSFYTLPSSILGNQNYSILKAAYSYYNVSTKTPLTQLMNDVLIVAKQKDFDVFNALDVMHNESFLKELKFGPGDXRQLHYYLYNYRIRSALKPSGLGLVLL

SEQ ID NO: 143020 - protein, 63 aa, Glycine max
  Clone ID: PAT_MRT3847_100160C.1.pep
PQSLFPIPKSGEEPLPCFPPVLSGWLCCPILGLGTSYPRPLVWYQGTPLGLFFFFPFKTSPGF

SEQ ID NO: 143021 - protein, 40 aa, Glycine max
  Clone ID: PAT_MRT3847_100161C.1.pep
LIHGPAKGFLLRFVRLRDEVSGVNWRGVTRMALSTLLTTC

SEQ ID NO: 143022 - protein, 51 aa, Glycine max
  unsure (1)..(51): unsure at all Xaa locations
  Clone ID: PAT_MRT3847_100162C.1.pep
PTLWHCDEEGRKKGSGNFCARYRNDXADYGWCFDSDYEAMKGFLTMPRATT

SEQ ID NO: 143023 - protein, 69 aa, Glycine max
  unsure (1)..(69): unsure at all Xaa locations
  Clone ID: PAT_MRT3847_100163C.1.pep
GPDFRVRPHPSGFLGDQWSVFLEGHKGKSRTFKLXIPCPTLSSSLTFKHSXLAPIYLFVIGGVQLGALA

SEQ ID NO: 143024 - protein, 120 aa, Glycine max
  unsure (1)..(120): unsure at all Xaa locations
  Clone ID: PAT_MRT3847_100164C.1.pep
GIPGTTHTFHLTPTLATKTRGDNATTHGSNTLPSTYKKAKINLDKRAEXAHRTRSRAMNWIPQAELAEYXAQRSTPGGXLMSEGTLINPTAPGNPHDPGIYTXEQGEAWRNIKDAEQDKG

SEQ ID NO: 143025 - protein, 82 aa, Glycine max
  Clone ID: PAT_MRT3847_100165C.1.pep
MEFLGAISESLIIVGTMMLILAAVGFVISILGWKVIVYILLFFGWILVTCTFILSGISLVVHNGVTDTCVAMEEWVQHPRDN

SEQ ID NO: 143026 - protein, 56 aa, Glycine max
  Clone ID: PAT_MRT3847_100166C.1.pep
LTTGYTGLCHYIFGWITHTIPVGFCNKTMNTALLIYVIGIGEGFVHLQIPFPAAIG

SEQ ID NO: 143027 - protein, 83 aa, Glycine max
  Clone ID: PAT_MRT3847_100167C.1.pep
TNKTFAQTPKCFSNKNTLIGNADQLELESERKERISRVYPQSPIPNRKVEALIQNFTSLNLDLNRELRKRQKKLKSDTKSYIK

SEQ ID NO: 143028 - protein, 140 aa, Glycine max
  Clone ID: PAT_MRT3847_100168C.1.pep
GCYLNYSSNTTPLPLDQAPSQSPLKQKHHNTKKKKQKEERSLIFLFNYPSFKSFFFFSMSRTPNYEFQEWWNKQREKNTNTNNLDPLDDSLKKLEYGHSSPPPFTALDVDSSLPRTPPPPTTTAPAGKNAPEAHGSSHGS

SEQ ID NO: 143029 - protein, 295 aa, Glycine max
  unsure (1)..(295): unsure at all Xaa locations
  Clone ID: PAT_MRT3847_100169C.1.pep
EDFKCDCFSCDMNRKHKEKKRLKNWHTKICHKIAEEPNFPKNEIIDMYLCNDNASDGPHIVWGKPNIEMLIDFLNFHQHWEPAYVRRMMFPMMSTIFMRDMTTTTEETMLFGQYQFDSIERVKMRYGYQFFVVKWKHAGVNXXCKVPLKESSVQHDAIIELDETVDLLDDCDVPEIHEDSGCRFLLTDENMDLVGAAFPAEVKRFWQEQELKRRKNSTSRSQENEKSPSPNSRSIQLNITEFYPSTKVKHRQSKQGGGESSKIADSQGNEGSKMKRKMSSPDKIPKSVRRRLLFD

SEQ ID NO: 143030 - protein, 60 aa, Glycine max
  unsure (1)..(60): unsure at all Xaa locations
  Clone ID: PAT_MRT3847_10016C.1.pep
PPSTVVCKAASVKPQTXIECLNSGENVTHLICKSLLVYLNNLAKGSEANIAGTLAIMDPC

SEQ ID NO: 143031 - protein, 127 aa, Glycine max
  Clone ID: PAT_MRT3847_100170C.1.pep
ARESKAIDNTIKILYSYGGKILPRHTDAKLRYYGGHTRVLSLHPSTSFSELILKLTELCASPVTLKCPLPNGDLDTLISVTSDEDLANIIHLYDRASSSLPHRLKIRAILSPPKKLSPSPSSPSSSA

SEQ ID NO: 143032 - protein, 61 aa, Glycine max
  unsure (1)..(61): unsure at all Xaa locations
  Clone ID: PAT_MRT3847_100171C.1.pep
HHPVDAPCVNLKFPHLLCXASGILFPMLLSNPDIKEKEREGSGGVALVVTAIIARDQPLRV

SEQ ID NO: 143033 - protein, 133 aa, Glycine max
  Clone ID: PAT_MRT3847_100172C.1.pep
TSGQVITIGNERFRCPEALFQPSFLGMEACGIHETTYNSIMKCDVDIRKDLYANTVLSGGTTMYPGIADRMQKEITALAPSTMKIKIIAPPERKYSVWIGGSILASLSTFQQMWISKQEYDESGPSIVHRKCF

SEQ ID NO: 143034 - protein, 157 aa, Glycine max
  Clone ID: PAT_MRT3847_100173C.1.pep
SSSTETYSAQDNGQFRRPSKNGLMRPLRLSNSPKISLKDPTSPRRKNPDLVMKPISSSRVPIEPAPWKQQDGNQSSQKPNLRGIKAPARAPDSFPSVYSEIEKRLKDLEFKQSGRDLRALKQILEAMQEKGLLESRKVEQAPNVVGSQSDYEPKATN

SEQ ID NO: 143035 - protein, 47 aa, Glycine max
  Clone ID: PAT_MRT3847_100174C.1.pep
IYLFYLGHLFLYVHFPLGDQVDSTSLMVVEKFSHTPRASGPFPPKAW

SEQ ID NO: 143036 - protein, 134 aa, Glycine max
  unsure (1)..(134): unsure at all Xaa locations
  Clone ID: PAT_MRT3847_100175C.1.pep
DVRVGANRHRERQTIWTAAHAIDYRESPSAPILEPGKLXSRCLYRAGIAXLEVTVLELYITLLTVMGVFKSKSMCYTVDVQGIAWAIGGMIYGLVYITAAVLGGHISPALTXFALVLARKLSLTMASCYIIMHC

SEQ ID NO: 143037 - protein, 129 aa, Glycine max
  Clone ID: PAT_MRT3847_100176C.1.pep
QLQGQIPTSLGQMKNLKFLSLAGNRLNGLIPTSLGQLYSLKVLDLSSNSLTGEIPKAIENMRNLTDVLLNNNNLSGHIPNGLAHVATLSAFNVSFNNLSGSLPSNSGLIKCSSAVGKSVLSPCHGVSLS

SEQ ID NO: 143038 - protein, 45 aa, Glycine max
  unsure (1)..(45): unsure at all Xaa locations
  Clone ID: PAT_MRT3847_100177C.1.pep
ILWAPXXVAXXSXPXXXXRPXXXXCGRESXESVTESRLRSGGDRG

SEQ ID NO: 143039 - protein, 86 aa, Glycine max
  Clone ID: PAT_MRT3847_100178C.1.pep
PVGLVSATQVWELGARLAGSNEGWGCPRGRYPVLDGGDEEERWRLERRQMTRVPESSSEWRLSLFGRSLPPVCERFEIDSGELDGV

SEQ ID NO: 143040 - protein, 152 aa, Glycine max
  unsure (1)..(152): unsure at all Xaa locations
  Clone ID: PAT_MRT3847_100179C.1.pep
MGTVNNTVDTVNAAASAIVYAESRIQPTTTVPKKRWGSCWSLCWCFGPHKNSKRVGNAVLVPEPVEPIGPVGFHPATAAPNPSTAIVMPFIVPPSSPASFLQSDPPSATQSPVGLFSLSSLTVNASGGPASIFAIGPYTYETQLVSPPVXST

SEQ ID NO: 143041 - protein, 600 aa, Glycine max
  Clone ID: PAT_MRT3847_10017C.1.pep
VKLVLKFKQVIVNDPFDAVSYWVLVEVEVNPCNWFGVECSDGRVVVLNLKDLCLEGNLVPELANLVHIKSIILRNNSFHGIIPQGIAHLNEMEVLDLGYNNFSGPLPTDLGNNIPLTILLLDNNDHLCGFSPEINELKMVSEYQVDENQLSSAEKVPIRSIKRHAGQNNGVRKLLQVRTREGGSPFNRVFPDSPAPFPSAPSPAPATPPVVQKPAPVDRNNSASPSPLPEPRSAPLSKSSSSKNHLVVILAGVMGGVVFLLISIIGLYLCKTNKVATVKPWATGLSGQLQKAFVTGVPKLKRSELEAACEDFSNVIGTSSIGTVYKGTLSSGVEIAVASVAATSSKDWSKTLEAQFRNKIDTLSKVNHKNFVNLLGHCEEDEPFTRMVVFEYAPNGTLFEHLHIKESEHLDWGTRLRVAMGMAYCLQHMHQLEPPMVLSNLNSSGVQITNEYASNISDLRFSTEITTDMKKSPARKNIDMTPASNIYSFGVILFEMVTGRLPYSVDNDGSLDDWASHYLQGDQPLKEMVDPTLASFQEEQLEQVDALIKSCVHPDQKQRPTMKEVCVRLREITKITPDAAVPKLSPLWWAELEIASVDAS

SEQ ID NO: 143042 - protein, 122 aa, Glycine max
  unsure (1)..(122): unsure at all Xaa locations
  Clone ID: PAT_MRT3847_100180C.1.pep
DRRPTAPTTFRDSTDNSGSWTEAAXDGVSIFNSKNIPGDHXSRSNCREGRMDAIHVSTAFTIYDIYMTHHDRGVRPGHSXDRYTQDRXMQDTMTYHHLRESLVHXMPWCRHXWLHVVNTYYT

SEQ ID NO: 143043 - protein, 41 aa, Glycine max
  Clone ID: PAT_MRT3847_100181C.1.pep
TIAAPCDLSGHASDFCLNFYAIGSHITGVLLSPFSGVGLHT

SEQ ID NO: 143044 - protein, 85 aa, Glycine max
  Clone ID: PAT_MRT3847_100182C.1.pep
RGHQQLLKILLDNGADIDIQDEAGQTPLHYAAITDNIDIYKTLIRHRADPSVRDSDGNTPLDVASAETRDAIHEMSQSEPQPKGG

SEQ ID NO: 143045 - protein, 69 aa, Glycine max
  unsure (1)..(69): unsure at all Xaa locations
  Clone ID: PAT_MRT3847_100183C.1.pep
VNNLIGXXEXXXKNGVLXPILLFIIXLTDSTCFXIEHFFLISKIFRXXFESIXXCESXLXLXVXRFLXL

SEQ ID NO: 143046 - protein, 72 aa, Glycine max
  Clone ID: PAT_MRT3847_100184C.1.pep
VRLVPLLCLLRVDQDIRGSPSSCPEQRGWRGNNGSVLPAPPFLPNLVNQTIFAIAFRWEKEPLKKGVSPRLG

SEQ ID NO: 143047 - protein, 227 aa, Glycine max
  Clone ID: PAT_MRT3847_100185C.1.pep
RHRNLLPLLAHVSRPGCHYLVYEFMKNGSLHDTLSKVEVGEFELDWLSRHKIALGVAAGLEYLHLNHNPRIIHRDLKPANILLDDDMEARIADFGLAKAMPDYKTHITTSNVAGTVGYIAPEYHQILKFTDKCDIYSFGVILGVLVIGKLPSHEFFQHTEEMSLVKWMRKILSSENPKEAIDTKLLGNGYEDQMLLVLKIACFCTMDDPKERPNSKDVWCMLSQIKH

SEQ ID NO: 143048 - protein, 36 aa, Glycine max
  Clone ID: PAT_MRT3847_100186C.1.pep
ECVRAFITESTDGDILELHIQDPFHRLLLHGVCEVI

SEQ ID NO: 143049 - protein, 632 aa, Glycine max
  unsure (1)..(632): unsure at all Xaa locations
  Clone ID: PAT_MRT3847_100187C.1.pep
MAGKTQTHYFLLLFLFLISINAKLDLYPSDYKALLTLQKDLGVNGQVSATLACETEGVFCERRKLSGKETYALRITRLVFKSNNLNGVLSPSIGRLTELKELSLSDNNLFGRLPPQIFDCRKLQILDLANNLFSGEVPPELSSLTRLRVLDISTNRLSGNLNFLKYFPNLETLSVADNLFTGRVPPSVRSFRNLRHFNFSGNRFLDPSLQSSSPDTILSRRFLSEDGDGDVPAPAPAPNNSQKKKSNASTHAAAAAPGPAPNHTNKHKHSKRKLLGWILGFVAGALGGTLSGFVFSLMFKLALALIKGRGRKAGPDIYSPLIKKAEDLAFLXEKEEGIASLEIIGRGGCGEVYKAELPGSNGKMIAIKKIVQPHKDGAESAIEDSKVLNKKMRHIRSEINTVKQIRHRNLLPLLAHVSRPGCHYLVYEFMKNGSLHDTLSKVEMGECELDWLSRHKISLGVAAGLEYLHMNHNPRIIHRDLKPANILLDDDMEARIADFGLAKAMPDYKTHITTSNVAGTVGYIAPEYHQILKFTDKCDIYSYGVILGVLVIGKLPSDDFFQHTEEMSLVKWMRKTLSSENPKEAINSKLLGNGYEEQMLLVLKIACFCTMDDPKERPNSKDVRCMLSQIKH

SEQ ID NO: 143050 - protein, 140 aa, Glycine max
  Clone ID: PAT_MRT3847_100188C.1.pep
VAPSAVPLIITKRLTQQSPANRDLLAPQYINANLAVSTVTNISGDEQIASHYRPFHRHTYSTQHKCVASCHQQLNPDYFALDFSAAIVLLWPPTLPALSHEQYHTQIFSLEFYFTLSNLTLLFLKQLAAVAPRWLGCRLV

SEQ ID NO: 143051 - protein, 95 aa, Glycine max
  Clone ID: PAT_MRT3847_100189C.1.pep
MLYYSRDIVNYICNDEDIKAVSFVGPITAGIYATASARGKRVQSNAGGTNHVLVMPDAGLDATLDALVPAGFGAAGERCMTSSIAIFVGGSMQWY

SEQ ID NO: 143052 - protein, 676 aa, Glycine max
  Clone ID: PAT_MRT3847_10018C.1.pep
MSKNWKSSCFRDPGGVLFLLALCLLFQNFSLCCSLNEEGIGILVCGILYSREVNCVYLRGIKAEKGVLCAGKALLKFKHGIVNDPFDALSNWVNDEVAVNPCNWFGVECSDGRVVVLNLKDLCLEGNLVPELANLVHIKSIILRNNSFYGIIPEGIAHLNELEVLDLGYNNFSGPLPRDLGNNISLTILLLDNNDHLCGFSPEINELKMLSEYQVDENQLIRAEKVPACRRSIKQQSRHVGQNKNGVQRLLQTRTHEGGSPFNRVFPVSPAPFPSAPPPAPATPPVVQKPAPVDRNNSASPSPLPGPRSAPLYKSSSSKNHVVVILAGVMGGAVFLLISIIGLYLCKTNKVATVKPWATGLSGQLQNAFVTGVPKLKRSELEAACEDFSNVIGTSSIGTVYKGTLSSGVEIAVASVAATSSKDWSKTLEAQFRNKIDTLSKVNHKNFVNLLGHCEEDEPFTRMVVFEYAPNGTLFEHLHIKESEHLDWGTRLRIAMGMAYCLQHMHQLEPPLVLSNLNSSAVQLTDDYAAKISDLSFLNEIASAVIKSPARKNTDMTPASNIYSFGVILFEMVTGRLPYSVDNDGSLDDWASHYLQGDQPLKEMVDPTLASFQEEQLEQVDALIKSCVHPDQKQRPTMKEVCVRLREITKITPDAAVPKLSPLWWAELEIASVNAS

SEQ ID NO: 143053 - protein, 90 aa, Glycine max
  Clone ID: PAT_MRT3847_100190C.1.pep
NSARAYLALAMAEFFFIIAAGRDGDECWNLEQDSKALELLHSDVELLTGDFSEKDLEVMQSVEKFNLDNTHMLAQPPMIDDETIDDDAGE

SEQ ID NO: 143054 - protein, 51 aa, Glycine max
  Clone ID: PAT_MRT3847_100191C.1.pep
CCKQQVKTQVPERHTSKMSSVCTRKCQLYGPDTALRILDLSEAHSAISSHE

SEQ ID NO: 143055 - protein, 81 aa, Glycine max
  Clone ID: PAT_MRT3847_100192C.1.pep
GHNGRIRVSLTPVIVRFRGGVTTQSVWVYGPKQGGSPFPILLGTFFEGQLGVALFDWSPHCQTGLFFHELPLGRAWVFFSY

SEQ ID NO: 143056 - protein, 87 aa, Glycine max
  Clone ID: PAT_MRT3847_100193C.1.pep
TKATQRSKVLKLAALNKNGIRGSHQPHPFKPRLIKAILPPAIKNPILGTTIAKRRGKLQTLAQKPASLKRRPQSSEKKPTFIGTHLP

SEQ ID NO: 143057 - protein, 188 aa, Glycine max
  unsure (1)..(188): unsure at all Xaa locations
  Clone ID: PAT_MRT3847_100194C.1.pep
ESSSDKEVSDQHMKITFPGKKMQTIAERFEEALGTSSVITEGTHVGAPNSLRPGIFGKLPXMMLKVKETDMEFWKKLQPEARPDGELGCIDVKIISRYRDGKLTVCHCSFSKSTENFLLQDNSKGMGCGGRKSSQSTIIFSPRVCNNVDLEVGNLIQIHPPWKEAQVGNDNIIVCTYFSEILFQFDSL

SEQ ID NO: 143058 - protein, 56 aa, Glycine max
  Clone ID: PAT_MRT3847_100195C.1.pep
FKFRKTNWGSGVLRDDCIFTFNTMNYSTQSKLLNEILGGYKQLGSIVKDTNKLFVS

SEQ ID NO: 143059 - protein, 55 aa, Glycine max
  Clone ID: PAT_MRT3847_100196C.1.pep
KLYSMQLLKTTTRSSLLFFPTYPNLLSKPTSTRFIILKTHMNSYLTNSNILSLHK

SEQ ID NO: 143060 - protein, 58 aa, Glycine max
  Clone ID: PAT_MRT3847_100197C.1.pep
KVGPLQAPARKFRVGPRGRPRVPGIPPLNPPENHRFIFPLNPRPVNLAYGGVFSGGAV

SEQ ID NO: 143061 - protein, 57 aa, Glycine max
  unsure (1)..(57): unsure at all Xaa locations
  Clone ID: PAT_MRT3847_100198C.1.pep
ISWYRVFRLTLKKHDPLIDTIIYISKFKTFINNXLHRHKHNFKARIKKKIRTNWEPN

SEQ ID NO: 143062 - protein, 160 aa, Glycine max
  Clone ID: PAT_MRT3847_100199C.1.pep
MEAAKGTVKGVAIIIGDNNIRGSLQFLQHPNGTTHVTGRVTGLSQGFHGFHIHAFGDTTNGCNSTGPHFNPFKKDHGAPSDDKRHAGDLGNIAAGPDGVAEISIRDRQIPLTGVHSIIGRAVVVHADPDDLGRGGHELSKTTGNAGARVACGIIGLQSSV

SEQ ID NO: 143063 - protein, 47 aa, Glycine max
  unsure (1)..(47): unsure at all Xaa locations
  Clone ID: PAT_MRT3847_10019C.1.pep
LLLFLSVVTSSRMELIFFKSYQSSIYDDYXYSKPFFDLFICTLSMPS

SEQ ID NO: 143064 - protein, 64 aa, Glycine max
  Clone ID: PAT_MRT3847_1001C.1.pep
RLECILTEWDEFKNIDFQRVYDSMQKPAFVFDGRNILNAEKLREIGFIVYSIGRPLEQWLISMA

SEQ ID NO: 143065 - protein, 586 aa, Glycine max
  Clone ID: PAT_MRT3847_100200C.1.pep
VFETLSSKLRNLELLDISFNYLTNDILPTLGGFTSLKELYLVGIHLDSDLHFQENDGFTWPTGLQALDLVGNRLNNKFLPSLNGLESLKHLYLGFNQLEGSLNIGGLSGLTSLEILDLSYNNISDFVVHQGLKSLRRLDALYLDGNMIDGSKLRKSLRAFSSVRMLSMRENEFKGTIVVGDFLDLSNLEDLTMDLSNNMENEFLKSIEKLTSLKVLSLYDCNINGTLPPADWSKLKKLELLDLSGNKFEGPLPSSFVNMTSLLELEISDNHFIGNFGSNIASLTSLEYFGFTENQFEVPVSFTPFANLSKIKFIYGEGNKILLDSQNSLPTWIPKFQLQVLSVSSTTKTKSLPLPNFLLYQNNLTILDFSSWKLERDFPNWLLENNTKMMEVLFRNCSLTGTFQLPMRPLPNIRQIDVSDNIIVGQIPINNISSIYPNLQSLNLSRNNIQGSIPYELGQMNSLYSLDLSDNQLSGEMPEDIFGVGHQLNFLKLSNNKLEGPILNIPNGLETLLLNHNRFTGRLPSNIFNASIISLDVSNNHLVGKIPSLIKNLSGLNELCLSNNHFEGSIPLELGELEYLTSLDLS

SEQ ID NO: 143066 - protein, 72 aa, Glycine max
  Clone ID: PAT_MRT3847_100201C.1.pep
RKEKKNSLNYYTCRFFFVPPKKRKRGAGLSIIHPLQHFNIFSFHCHIGDNYFLLFETKFEPPHFFFFKYLTN

SEQ ID NO: 143067 - protein, 64 aa, Glycine max
  Clone ID: PAT_MRT3847_100202C.1.pep
RHRGGCCVSFSGRILGAEAEKEHPHRPLYSATPESRYLNTCLRSFPFSFLISSREKRTQWTLHV

SEQ ID NO: 143068 - protein, 119 aa, Glycine max
  Clone ID: PAT_MRT3847_100203C.1.pep
KTKIPPASPISLLLSQLGFAFLHSLRHPPPPLSASPRSLAFQCLPNLSAKSKQCQAVPLSSKFGVRFSSYQFLPLFDYRAPPMAPSRRRGVSKAAAAAAACRQFQVGDLVLAKVKGFPA

SEQ ID NO: 143069 - protein, 54 aa, Glycine max
  Clone ID: PAT_MRT3847_100204C.1.pep
VGYELMEWALHEVVIANDYLTRERHRLVLYQMLRSMYHMHTATVYGIDLNPKNI

SEQ ID NO: 143070 - protein, 169 aa, Glycine max
  Clone ID: PAT_MRT3847_100205C.1.pep
MAESTDDESLLARIQQLEQERDELRKDIEQLCMQQAGPGYLAVATRMHFQRTAGLEQEIESLKKKLAACTRENLNLQEELSEAYRIKGHLADLHSAEVSKNMEAEKQVKFFQGCVAAAFSERDQAIIEAEKAKEKEETMLQQINGIHKRVEELTSDCLKLKEFNDALQI

SEQ ID NO: 143071 - protein, 113 aa, Glycine max
  Clone ID: PAT_MRT3847_100206C.1.pep
ETLKKPGRGPLQKGFGPKPHNPKTFWGKHNFWKEALKPKNNFLRRGPNKKSFQQNTTGVEGGKTHSQAGFAFARAPKKKYLTLFGGTGVFPNSRQNVTKLGEPPLTQNFTKKG

SEQ ID NO: 143072 - protein, 37 aa, Glycine max
  Clone ID: PAT_MRT3847_100207C.1.pep
KVLITGSIIIIKILLALISNYHKVLALLILSSFLKNV

SEQ ID NO: 143073 - protein, 47 aa, Glycine max
  unsure (1)..(47): unsure at all Xaa locations
  Clone ID: PAT_MRT3847_100208C.1.pep
VIPKNISSKKVXCKVMTKFYTSPLLSFLLDXAGTDGRGFDPXXFRXG

SEQ ID NO: 143074 - protein, 64 aa, Glycine max
  Clone ID: PAT_MRT3847_100209C.1.pep
TRPLNLLPRSEEEAQRTVSYSLYPKKNGCHIGGYPRMGAKRELKVGVEAFWDGKSRAEDCGKGG

SEQ ID NO: 143075 - protein, 218 aa, Glycine max
  Clone ID: PAT_MRT3847_10020C.1.pep
MMKNRYPLPERRWFVAMAVVGLIATAMFLTNAIRTSETSYLCPGALGIRSKTRTEFSYDASPIQLRAILHYATSRVVPQQSVSEIKISLDVIKSLGRPINFLVFGLGHDSLMWASFNPGGTTVFLEEDHKWVHSILKDAPGLRAHTVRYRTQLRDAKGLLTSYRSEPSCSPTKAYLRGNEACKLALENLPDEVYETEWDLIMIDAPKGYFAEAPGRMA

SEQ ID NO: 143076 - protein, 308 aa, Glycine max
  Clone ID: PAT_MRT3847_100210C.1.pep
MGSASEFDPALALSHKFPDTTYSYTERDAALYALSVGVCLSDAVDADELKYVYHENGQESIKVLPTFSTLLVLRSGASGYNLPGLKYDPRLLLHGQQYIELYKPLPSSCHIHNKVSLAGLHDKGKAAILEIETKSYEKESGDLLCMNRTTVFLRGSGGFSKSSKPFSYTNYPVNQNPAVKIPESKPFSVFEDRTQPSQALLYRLSGDYNPLHSDPMVAKVAGFSRPILHGLCTLGFAVRAIIKCICRGDPDLVKSIAGRFLLHVYPGETLVTEMWLEGSRVIFRTKVKERKRTVLSGYVDLRGLTSSL

SEQ ID NO: 143077 - protein, 56 aa, Glycine max
  unsure (1)..(56): unsure at all Xaa locations
  Clone ID: PAT_MRT3847_100211C.1.pep
ISVIILIVRDALQTTYSYTERDAALYALSVXVCLSDAVDADELKYVYHENGQESIK

SEQ ID NO: 143078 - protein, 200 aa, Glycine max
  unsure (1)..(200): unsure at all Xaa locations
  Clone ID: PAT_MRT3847_100212C.1.pep
MGSEATLKLPVIDFTNLKLEANNPNWEAIKSQVHKALVDYGCFEAIFEKVPLELRKAIFAALQELFDLPLQTKILNVSKTPYHGYVGQYPMVPLFESMGIDDAHVYENVESMTNIMWPHGNPSFSKTIQSFSEQLSELDQIIRKMILESLGVEKYLEEHMNSTNYLLRVMKYXGPQTSDTKVGLTTHSDKNIVTILYQNE

SEQ ID NO: 143079 - protein, 55 aa, Glycine max
  Clone ID: PAT_MRT3847_100213C.1.pep
HLHKHLDLSQELLRTLPRKRPFHVNSYLVSAPTKCEHLTRLYTITKHCNKKKHGT

SEQ ID NO: 143080 - protein, 54 aa, Glycine max
  Clone ID: PAT_MRT3847_100214C.1.pep
YDGKRTRPQAPILYSGRDPRVRPLERIRCLWDYRALHCMIYTVYNTRTTGAHDI

SEQ ID NO: 143081 - protein, 293 aa, Glycine max
  Clone ID: PAT_MRT3847_100215C.1.pep
RLRRGYMIISRLNRAPSILYTVSCRHEGWSSVAKFLTEDVPQLLKSEDLKDIQEVLSLAFKSPPSELRGLITWIAEVRRQEDGNLTLSEEEKGRLAIKADILEQIRTTGLFKHVTRWLDSESSCCNTLANLGDKDMLPALAASVCCQAADLLTVCGRLGLSGGKCCSQIDVKHLNADSENPVTLVSGIVTTGGGSEQGVDVLVPLCQREPSRLCLSNEGHCIGMHPSTADVLTVLLLALPLHTWSGIKEEKLRVEALSLLATEDLPPLLQEEVLFLRDQLHFLMTDISAPSPS

SEQ ID NO: 143082 - protein, 51 aa, Glycine max
  unsure (1)..(51): unsure at all Xaa locations
  Clone ID: PAT_MRT3847_100216C.1.pep
TGPLFENVNKFQPPVLCTXANTIFLRGTADDIWFGIGASRPKGIFPKKRNF

SEQ ID NO: 143083 - protein, 183 aa, Glycine max
  Clone ID: PAT_MRT3847_100217C.1.pep
IVYGIGILFGTILGVIAFFTTKMSGPPNKCLFPWLAGGFVMSVTWSYIIAQELVGLLVSIGYICGISPSMLGLTVLAWGNSIGDLMTNLTMALNGGQDGAQVAMSGCYAGPIFNTLIGLGLSLVTCTWSEYPQAVVIPRDPYLWETMVFLVAGLVWALVVLIKRDMKLDGLLGGGLLSVTSFL

SEQ ID NO: 143084 - protein, 88 aa, Glycine max
  Clone ID: PAT_MRT3847_100218C.1.pep
VKRGCEGCWVADLISKGRRSGREDHRSGHRGRESVDLVVWVRHRRRRRRRHAQRVTQRQAQFLSWSSNCCEFHPCARISAIWKLSNLE

SEQ ID NO: 143085 - protein, 79 aa, Glycine max
  Clone ID: PAT_MRT3847_100219C.1.pep
FPMEGVRKLKRTSPKSPLASAITTRFCSLSTQYLKGIVASWLEADHTLNATSLCPSLDDTNFTSTYLLYFPHTLSLGRS

SEQ ID NO: 143086 - protein, 66 aa, Glycine max
  Clone ID: PAT_MRT3847_10021C.1.pep
EMKGLTIRGQVVDCIFGSRWVSICVDKSVKRRMILGGFLEVKIAEFCNVDGWVWLNGMYYGSWVFG

SEQ ID NO: 143087 - protein, 64 aa, Glycine max
  unsure (1)..(64): unsure at all Xaa locations
  Clone ID: PAT_MRT3847_100220C.1.pep
HESPVPAIAPIPKLEVLSTLXFKPPLGVGPFKSPSPSPRGFDXQFPPPPPLLPQFFLPHTSAPS

SEQ ID NO: 143088 - protein, 156 aa, Glycine max
  unsure (1)..(156): unsure at all Xaa locations
  Clone ID: PAT_MRT3847_100221C.1.pep
SQVPNLQTCAVVLDGLLKCWLDSEAVTLFRAMMKSGLDLDIVIYNIMLDGMCKMGKLNDARKLLSCVLVKGLKIDSYTYNIMIKGLCREGLLDDAXELLRKMKENGCPPNKCSYNVFVQGLVRKYDIARSRKYLQIMKDKGFSVDATTVELLIRFL

SEQ ID NO: 143089 - protein, 95 aa, Glycine max
  Clone ID: PAT_MRT3847_100222C.1.pep
MLEGKAVIEDTDMPDKMQIQAMASAYEALDLYDVFDCTSIAAHIKKEFDTKYGSGWQCVVGSSFGCFFTHSKGTFVYFTLETLNFLIFKGASYLI

SEQ ID NO: 143090 - protein, 88 aa, Glycine max
  Clone ID: PAT_MRT3847_100223C.1.pep
AWNRETPPPHGGRPSVGKECAGPPFFLFPNKATAESLTYNADAVIQSYPLFYKLTRSKYPTIGYNHQNSKPKPYPYNKGLLTKPPHEI

SEQ ID NO: 143091 - protein, 82 aa, Glycine max
  unsure (1)..(82): unsure at all Xaa locations
  Clone ID: PAT_MRT3847_100224C.1.pep
EFKGKTRGAKGKGEKEHGXRVVHHKEVSPFKGNSQKIKVEKRHPYALYLEPKGAPKMGEKFEFLFKFHWKLWTQKKKKKTTQ

SEQ ID NO: 143092 - protein, 104 aa, Glycine max
  Clone ID: PAT_MRT3847_100225C.1.pep
SCCHSYPTNPESGLAKLRLASEEGWSNLAHNLGISPLLFRLGGIYGPGRRYLPFVIVIYFSSNASIISFFLGSAKAYKSFVPAGCHDNQFKPVIPRIYHSISVI

SEQ ID NO: 143093 - protein, 65 aa, Glycine max
  unsure (1)..(65): unsure at all Xaa locations
  Clone ID: PAT_MRT3847_100226C.1.pep
SSRGEFNLDDVEVALKDSEEXQLPGKKEEQPTAMNAFELISMSKGLNLETLFDTDRGFKGDTGFP

SEQ ID NO: 143094 - protein, 83 aa, Glycine max
  Clone ID: PAT_MRT3847_100227C.1.pep
HASASSLLLLPSSIHLRTAFLFLTLSLYSGSFFLNFLLFFFLPSPHFNHRSFFFSFIFFCAPLFALKLRNFGSVTPLCYWVVP

SEQ ID NO: 143095 - protein, 61 aa, Glycine max
  Clone ID: PAT_MRT3847_100228C.1.pep
SPVIVKGVHGHLTKKPEEIGAGDQGQMFGYATDETPELMPLSHVLATKLGARLTEVRKNGT

SEQ ID NO: 143096 - protein, 103 aa, Glycine max
  unsure (1)..(103): unsure at all Xaa locations
  Clone ID: PAT_MRT3847_100229C.1.pep
AWVDSSSIXALCTVDLSSESLHPRDVHDSLPSYEIKPVHASRSLSSEVLVSLSVALSSVDLGWFVDVIRVNLSDSEGRFAAHYRMLSYAGILLAEQTMRCMPA

SEQ ID NO: 143097 - protein, 177 aa, Glycine max
  unsure (1)..(177): unsure at all Xaa locations
  Clone ID: PAT_MRT3847_10022C.1.pep
ELISINSCIFSISILLDXISLIFIRCVLIISSIVVFYRHSYIFSDFNKIRFLFLVLMFILSIMFIIISPDLVRILLGXDGLGLVSYALVIYFQNYNSYNSGMLTILTNRIGDVAILISIAXIFNFGGXHYIFYLNYLNNYILIILILLLIAAFTKRAQIPFSSXLPAAMAAPTPVSA

SEQ ID NO: 143098 - protein, 61 aa, Glycine max
  Clone ID: PAT_MRT3847_100230C.1.pep
KFFFMNSLASITLCITRRSRDFAYSREYYIPAIKVFHLRSMQKLGRMPTKYAPKRDIRVGL

SEQ ID NO: 143099 - protein, 102 aa, Glycine max
  Clone ID: PAT_MRT3847_100231C.1.pep
NSHQRNLCPIQQAASNVRNSVVRTLFQTLGMHGQKLSKSMWEDCLCNYVFPTLDRASHMVATSSKDEWQGKELGTRGGKAVHMLILTLSLYYVFCLFVASVM

SEQ ID NO: 143100 - protein, 57 aa, Glycine max
  Clone ID: PAT_MRT3847_100232C.1.pep
SHAICSLGKPRNGFGRGVIIGVMKFQTAIAIMYRIFYKKTPRLLYYAEDLSEVIYKA

SEQ ID NO: 143101 - protein, 51 aa, Glycine max
  Clone ID: PAT_MRT3847_100233C.1.pep
DKNDYLPIHIPKEWENEKSRKYYMTNMSLCWQLEMVTLTIISLTNSSIRDT

SEQ ID NO: 143102 - protein, 73 aa, Glycine max
  Clone ID: PAT_MRT3847_100234C.1.pep
CDNPIIGNAFIVSWVFPFSPPSSPHHPLLYLQFFSKYNLFDNFTEIKLNFRSPSDPPLFLSHYFFSPYRAFGL

SEQ ID NO: 143103 - protein, 122 aa, Glycine max
  unsure (1)..(122): unsure at all Xaa locations
  Clone ID: PAT_MRT3847_100235C.1.pep
QALSFIHEIEALVSYKLXVVPYKWVNRNYMVWDEEAIIALHKFVQKHPGGLEVVYALSAWVKSNHSNLHVKLATAPNLAETQQDCDGDCSDQIYSAHASIPKDPPALRNAXCIQAYELFTQP

SEQ ID NO: 143104 - protein, 55 aa, Glycine max
  unsure (1)..(55): unsure at all Xaa locations
  Clone ID: PAT_MRT3847_100236C.1.pep
AFRMKTENLWQPVFIKKILEAKEFERVESVHSVRIGSELSDDGIPDCCQRCXLIN

SEQ ID NO: 143105 - protein, 57 aa, Glycine max
  Clone ID: PAT_MRT3847_100237C.1.pep
LSIISLPAVLWWFFLDPGPSSSSSAPVFNPGQKKLLCFRCDRVQCHALSCVGRIGGG

SEQ ID NO: 143106 - protein, 125 aa, Glycine max
  Clone ID: PAT_MRT3847_100238C.1.pep
MEMSLDTSDHTSDLESERTNGKPKNKLPRPRNPLIDAVAAHDKSKLRKVTERVMPQIAPKVDERDSLLEQIRTKSFNLKPAVTTRPSIQGPKTNLKFAAILEKANAIRQALAGSDEDDDADWSDS

SEQ ID NO: 143107 - protein, 67 aa, Glycine max
  Clone ID: PAT_MRT3847_100239C.1.pep
NDLVLSLCDFIYSVLHTLKQVLVLNLSRYHYAKSLLNHIHHRQLSLNTYLKLIIHTHFLVAYLSTHH

SEQ ID NO: 143108 - protein, 48 aa, Glycine max
  Clone ID: PAT_MRT3847_10023C.1.pep
PRVRLIIISLMLLRRLGIFEEQMLLKLRLESVLQLYSTAYSVALYAHA

SEQ ID NO: 143109 - protein, 42 aa, Glycine max
  Clone ID: PAT_MRT3847_100240C.1.pep
NQSPQFQKMMLLGVICLKFFCSVLFKLRIHRKFICISNQHVL

SEQ ID NO: 143110 - protein, 167 aa, Glycine max
  unsure (1)..(167): unsure at all Xaa locations
  Clone ID: PAT_MRT3847_100241C.1.pep
PPSVQEGIPPXHQRFHFAPVKQLEDGRTLADYNIQKESSLDLVLRLRGGMHILVKTLTGKTITLEVETSDTIDDVEARIQDKEGIPPDQQLLILAGKQLKDGRTLADYNIHKESTLHLVLRLRGGMQILGKPSPQDYYPRSESSDTXDNAKAKIHDKGGIPPDQGRL

SEQ ID NO: 143111 - protein, 58 aa, Glycine max
  Clone ID: PAT_MRT3847_100242C.1.pep
EVHELFTDWKPYFDASNCIFIHAPSSSRQLLYDGERSYFTNQQCAIRNIAFTVRRPTF

SEQ ID NO: 143112 - protein, 249 aa, Glycine max
  Clone ID: PAT_MRT3847_100243C.1.pep
TRPRHSDSDSKRCHSRFDSDPNKRYRRDEYGKEDRERVSSSTDVQNEALFAKHNKPNDPIQLPTSLSYFQHNEQGGTGQVGRSSGQRKERGRWKDTKKRFNINEREEKNHGREQRNEKSQAKLDDNTFQRRDGFTGRSRKRASFREKKIVADSGDANVAAVKSGQKEERNSNPQHLDRPEKHFADDKGEARRGRRYGGNDSYKGRDKFNGRRGYRPEKWKHDLYQEVNKDPIPQNEDDQIAKLEALLAS

SEQ ID NO: 143113 - protein, 131 aa, Glycine max
  Clone ID: PAT_MRT3847_100244C.1.pep
KVLPIHHRTRAAAAAAGSYHQRGRRRRRRRRRRTRRSGGGALRLIGGARRRRHRRRRLIGSMRIVAATYVKLLEDVLHPLPFVPRLFFFLHSLTHQREILNYNRNQVSVRGRFLFFGFSVSCDFQGTQGEK

SEQ ID NO: 143114 - protein, 32 aa, Glycine max
  unsure (1)..(32): unsure at all Xaa locations
  Clone ID: PAT_MRT3847_100245C.1.pep
GXYQRMEXXYTSEITLFSLYLSGIISNFFQQK

SEQ ID NO: 143115 - protein, 352 aa, Glycine max
  Clone ID: PAT_MRT3847_100246C.1.pep
MEKKKVAVPLVCHGHSRPVVDLFYSPVTPDGFFLISASKDSSPMLRNGETGDWIGTFEGHKGAVWSCCLDTSALRAATASADFSTKVWDALTGDELHSFEHKHIVRACAFSEDTHLLLTGGVEKILRIYDMNRPDAPPREVDKSPGSVRTVAWLHSDQTILSSCTDMGGVRLWDVRSGKIVQTLETKSSVTSAEVSQDGRYITTADGSTVKFWDANYYGLVKSYDMPCTVESVSLEPKYGNKFVAGGEDMWVRVFDFHTGNEIACNKGHHGPVHCVRFSPGGESYASGSEDGTIRIWQTGPLTLDGSETVSANGSVDKVKETADEVSRKIEGFQIADEGKSKEKDEAVEESS

SEQ ID NO: 143116 - protein, 81 aa, Glycine max
  Clone ID: PAT_MRT3847_100247C.1.pep
RARQVAWSQVSSLAPSQSLVRQRIRSVSPRRAAISSLVRTPPKNNGRGPYTPVVDRSQGSHRHGLISGNSGGAWPIKDGRA

SEQ ID NO: 143117 - protein, 40 aa, Glycine max
  Clone ID: PAT_MRT3847_100248C.1.pep
LNSSTGKWGSLFLAFRICYIWLFVAGRVECIMIALGCSIC

SEQ ID NO: 143118 - protein, 91 aa, Glycine max
  Clone ID: PAT_MRT3847_100249C.1.pep
MQKCNANKYIEPLHHQKKEESTKVEMGEEHKSQKTKKGSERFNLFCLDTPLQQRNDQRRQHNKQMMENKGVNRLKCMFVSEIHITKIDTER

SEQ ID NO: 143119 - protein, 299 aa, Glycine max
  Clone ID: PAT_MRT3847_10024C.1.pep
MAVAGVSQAISSTTATRTPSCIDFHSKKPFLLGLAHSPQPNLSISARRSRNTHCCRCTLNSDDTSLSWDWNRWCRHFSDIEQAENFASVLKFQLDDAIEKEDFEEAVKLNRALSEATSKDTVAEIMDQLKSAIDDERYHDASRLCKCTGSGLVGWWVGYSKASDDPFGRIIHISPGMGRFIGKSYSPRQLMRASTGTPIFEIYVVKNADDTYHMQVVYLRQAKGKSRRNPQSIPAKGPSKPEVENASSVEVQEPEEKIERNDEKNSNIEGVTEEGIKSVINFLKEKIPGLKVKVMNVNV

SEQ ID NO: 143120 - protein, 57 aa, Glycine max
  Clone ID: PAT_MRT3847_100250C.1.pep
FLFGFLISGKGPGRPQWAGNQELVLPIMSSKKHIRAINLGTPMGTGSLGVVNWPYHI

SEQ ID NO: 143121 - protein, 44 aa, Glycine max
  Clone ID: PAT_MRT3847_100251C.1.pep
MILFSSFILIKKFHIIKSILYTRCLGTGRRTPSVVFSQPYSSRI

SEQ ID NO: 143122 - protein, 58 aa, Glycine max
  Clone ID: PAT_MRT3847_100252C.1.pep
NARICVVIFIHAEYNLQIYSYRQTKVTNHRGTQANPALRYKWQKLPNSSAPKGGNLTS

SEQ ID NO: 143123 - protein, 67 aa, Glycine max
  unsure (1)..(67): unsure at all Xaa locations
  Clone ID: PAT_MRT3847_100253C.1.pep
VGATXXGXTYHTKLEKAARXTPGAPXRGGRPTREGTXPKTXXQXEPDXXXRXQHPSTTTKXXXXQGK

SEQ ID NO: 143124 - protein, 117 aa, Glycine max
  unsure (1)..(117): unsure at all Xaa locations
  Clone ID: PAT_MRT3847_100254C.1.pep
ILDALLGGDTAAVASSPDSTTSTVICFQLMPIWQIYFDESIDTDXLVMIEFSLMRCVTCKFIQPATHAMADXSNDVDLVKIDVYEXPDVAQECHVQAMPTVVMRYNGMEVDEVAGAE

SEQ ID NO: 143125 - protein, 148 aa, Glycine max
  Clone ID: PAT_MRT3847_100255C.1.pep
YSAPFWEKWFAFGFRFGISGLAPGFGQTLPWGESFRVWALRKGRFFWVPLFFSVGRRRTKKPLFWGAFRVPLAGFFMVFWVALRLVFRKPFRRCLECSRLFQRGAPIFPKKFRVFFLFWPLFKVCFLLAFQENNVFFFEVFLGGVCLN

SEQ ID NO: 143126 - protein, 67 aa, Glycine max
  Clone ID: PAT_MRT3847_100256C.1.pep
KPVTTTSQPFLHSVHTIKPENGADMLIQALQRHGGGITNVFAYSGGCSIDIHQALKHSNIRIIVPWH

SEQ ID NO: 143127 - protein, 62 aa, Glycine max
  Clone ID: PAT_MRT3847_100257C.1.pep
STNINLISISSHWKLLISVISFNSLNGYTREVPFLIYPFFLLTLNKKKVGMSDYTIWLFSLS

SEQ ID NO: 143128 - protein, 248 aa, Glycine max
  unsure (1)..(248): unsure at all Xaa locations
  Clone ID: PAT_MRT3847_100258C.1.pep
MIALKAIQASSFALHHNNVRLPHTRASSVLCFCSKSNKNEPDNSQPPPEGDAQSQELLAQIAMLQTQKVRLTDFLDERSAYLAQFGEEAKAEFDKIGEDALKGLDEAGARVCLLQLFFSFFXFDYLCNFLPWIRESENKIVEFEGQMEKDRNEGLFFKNLGQKAPVYKAKAKEEEEVEKIKDVNSESSGSKTRKNVYLFFIGLLTFGIVDSLASSSGADWKKVAVLGGILVVLFSLFINEQNKDNKKD

SEQ ID NO: 143129 - protein, 51 aa, Glycine max
  Clone ID: PAT_MRT3847_100259C.1.pep
MIGHKFMVIFDNSNFYINIILSMVDLVMKTEGNCVFVVAWPVESLLVTNMY

SEQ ID NO: 143130 - protein, 33 aa, Glycine max
  Clone ID: PAT_MRT3847_10025C.1.pep
MSHMILPIGKDDRNIDSKRNTLVTITQGYSFTS

SEQ ID NO: 143131 - protein, 56 aa, Glycine max
  Clone ID: PAT_MRT3847_100260C.1.pep
VQNIPRLCWFLPMLISPTGSIFESPWASFFTNLFTFMLFGHVVGSWWYLFGLQVYQ

SEQ ID NO: 143132 - protein, 48 aa, Glycine max
  Clone ID: PAT_MRT3847_100261C.1.pep
QNFTFRIKSWLNHHKNNYLLFYKIMIQLTNFLLNISQVKCLLMTTVMN

SEQ ID NO: 143133 - protein, 64 aa, Glycine max
  Clone ID: PAT_MRT3847_100262C.1.pep
FCFYALSLLVIGLICFDIYPLCQGVLQYAIWMYVVSYCNFTSQHHVYYVMVKKYSQERMLFFES

SEQ ID NO: 143134 - protein, 58 aa, Glycine max
  unsure (1)..(58): unsure at all Xaa locations
  Clone ID: PAT_MRT3847_100263C.1.pep
PTRPTKQTKAENNNVYNAKHXYPRSIFKRIPPTQSYNLESNHLQNNLKGLHLNSVSLT

SEQ ID NO: 143135 - protein, 96 aa, Glycine max
  Clone ID: PAT_MRT3847_100264C.1.pep
YIIPQNTNNSTQGSSFYMGLSKERGIKGDKSKSLQHRTLRVKHSKILWDLNGDTIQQFFLKHYGLGELGKNLKALVGEKHTFWGTSYHHREGVRLG

SEQ ID NO: 143136 - protein, 48 aa, Glycine max
  Clone ID: PAT_MRT3847_100265C.1.pep
FLWLCPRFHFSPERLWPCFRQALMNFPVGKPGSPTRTSPKYKRKTQES

SEQ ID NO: 143137 - protein, 53 aa, Glycine max
  Clone ID: PAT_MRT3847_100266C.1.pep
NLISKQLFFYLPFFPSRPTIENQLHGECIYKKEEKAKKIFLSVQLKETIFGRV

SEQ ID NO: 143138 - protein, 69 aa, Glycine max
  Clone ID: PAT_MRT3847_100267C.1.pep
AARRRQKGYTFCFAVTCLAILKHSSITMYASVSSVTTLRLIKHSNLSVIAWQASYDIDKEKSKHLMRDT

SEQ ID NO: 143139 - protein, 32 aa, Glycine max
  Clone ID: PAT_MRT3847_100268C.1.pep
HQSNFFHQTLSSCFCYFQPGLISFPQTLHFKF

SEQ ID NO: 143140 - protein, 72 aa, Glycine max
  unsure (1)..(72): unsure at all Xaa locations
  Clone ID: PAT_MRT3847_100269C.1.pep
IILSCCCYTCCIRRKLRKMLTIRGGFIDDFLSHLMCXCCALGKKGEKCRSVVLKVLRRPTQDLHPRSTWNHK

SEQ ID NO: 143141 - protein, 54 aa, Glycine max
  Clone ID: PAT_MRT3847_10026C.1.pep
DILPSYLKLAIGFYFTYNDLHMSLCTEGHNCGVRSYFSFFILPITNALPWFDPR

SEQ ID NO: 143142 - protein, 198 aa, Glycine max
  Clone ID: PAT_MRT3847_100270C.1.pep
ADSLWSISERNCLETIRNVANVGNVQFSAHSSHLLAFGSADYSTYCYDLRNLRSPWCVLAGHRKAVSYVKFLDSETLVSASTDNTLKIWDLNKTSPVGASINACSLTLSGHTNEKNFVGLSVADGYIACGSETNEVYTYYRSLPMPVTSHKFGSIDPISGKDTDDDNGQFVSSVCWRGKSDMLIAANSSGCVKVLQMV

SEQ ID NO: 143143 - protein, 66 aa, Glycine max
  Clone ID: PAT_MRT3847_100271C.1.pep
PLWLIFSYTVGAFSLWGGGFLYQWGVIDYSGGYVIHLSSGIAGLTAAYWVHKFYSYHICFKYLKAS

SEQ ID NO: 143144 - protein, 67 aa, Glycine max
  Clone ID: PAT_MRT3847_100272C.1.pep
CPRRPNTGRVFIFIDYSWGFLRTSQEKPILQGHLRPKEVVRDRFYEPNLSDRGLQLGRGPTGGQEMT

SEQ ID NO: 143145 - protein, 55 aa, Glycine max
  Clone ID: PAT_MRT3847_100273C.1.pep
VTTTRGELNWEMSFSYPCWGNSCTNRTDRLHLCSLTTLARKSLSMGMPGIFTPTY

SEQ ID NO: 143146 - protein, 65 aa, Glycine max
  Clone ID: PAT_MRT3847_100274C.1.pep
CYLIYLCNVPKCFKAIYDSDLLMYVKGSMYLMQTTCMCMCISGSFSFLLMVLQLSCGYNLLGLGL

SEQ ID NO: 143147 - protein, 105 aa, Glycine max
  Clone ID: PAT_MRT3847_100275C.1.pep
LLDEIEGEGLECDQYTHTIIVDGLCKAGNFDGAQRHLNYMNSLGFGSNLVAFNCFLDGLGKAGHIDHALRLFEVMEVKDSFTYTIVVHTLCWTRPVLGTSKAVAS

SEQ ID NO: 143148 - protein, 107 aa, Glycine max
  unsure (1)..(107): unsure at all Xaa locations
  Clone ID: PAT_MRT3847_100276C.1.pep
SLYFLGFFDVSFRPHITPFLPQLLISPFLRSPLFSNTRFWYKKGQTLSSKHLLEVVDGTITCNKSXXDEVQPHHIDLVHMSLESGSLSIRYILISMVMVLIPIKRKY

SEQ ID NO: 143149 - protein, 87 aa, Glycine max
  unsure (1)..(87): unsure at all Xaa locations
  Clone ID: PAT_MRT3847_100277C.1.pep
DSRRTKVDMASCNDTIRDNQEKTKLTXQTSYLSEIIVEILDASPXDQADDDGAXMDLDSQGAGTCVVLKTPTRQTIXLPVDGLGDPD

SEQ ID NO: 143150 - protein, 75 aa, Glycine max
  unsure (1)..(75): unsure at all Xaa locations
  Clone ID: PAT_MRT3847_100278C.1.pep
MRTRVELLLVLLSGFWRVSGVKQRKRNAYATMMFVXTPWDYXFYIGILVLVISLATLDTQADLVVFASFGASPRW

SEQ ID NO: 143151 - protein, 49 aa, Glycine max
  Clone ID: PAT_MRT3847_100279C.1.pep
VASSALDISKTVTRGILQIFHMVKEVYQCHASLQGSGFWALQTAYVEGG

SEQ ID NO: 143152 - protein, 89 aa, Glycine max
  Clone ID: PAT_MRT3847_10027C.1.pep
TFNRKKKEERISGLMKKATESEGSMVLIIICLVWQMKLFHIKSPPSFCNLFLRRHQKRFSLTGSSATLCHVQFSQGFGFSLGFCLMQCE

SEQ ID NO: 143153 - protein, 41 aa, Glycine max
  Clone ID: PAT_MRT3847_100280C.1.pep
TNPQRSSHLYLITLSTLTVLLFNTYCTLFHLMEHFKNLITC

SEQ ID NO: 143154 - protein, 113 aa, Glycine max
  Clone ID: PAT_MRT3847_100281C.1.pep
ARVFFSGNSGGAPGGYPAFPMRRPINAYRSLLKKICLTKKFLRHRETQNTTQKQKGKTGGAKKENPVTIKERAKPHKLKGENPPGQRAKTISQPPEKERPKRGQKGGFYLDQG

SEQ ID NO: 143155 - protein, 65 aa, Glycine max
  Clone ID: PAT_MRT3847_100282C.1.pep
QLHVLRRLLLLAVGGLSPWAAYEFGISHHFIACSVPSGCTNWRAVAAVLSFRAYVGCTKCANISF

SEQ ID NO: 143156 - protein, 96 aa, Glycine max
  unsure (1)..(96): unsure at all Xaa locations
  Clone ID: PAT_MRT3847_100283C.1.pep
WFXFFFFFFFFFSKFSCFHFKLNSCQYNENWVFVEKKKKMFFLTKVSTWISAVLLKRVCSLSLKHNFHIMMNLFCSLCLSNYSLAEFSGWLYYHIC

SEQ ID NO: 143157 - protein, 41 aa, Glycine max
  Clone ID: PAT_MRT3847_100284C.1.pep
YYIASYSIVIVQSLHTLGSKTTPFSSLVNKCNCSQQELLLG

SEQ ID NO: 143158 - protein, 140 aa, Glycine max
  Clone ID: PAT_MRT3847_100285C.1.pep
MAASEGRPLVEAVEHKEDFYEHQEPSGCGYGCFQGFGLSWCRSHEEGKGLVEQKGNSWLSCKLRKIKEFSEVIAGPKWKTFIRKISGYGRKQQQKNRFQYDEHSYALNFNSGDKSEDDDTPPSFSARFSAPFPSARRQTE

SEQ ID NO: 143159 - protein, 218 aa, Glycine max
  Clone ID: PAT_MRT3847_100286C.1.pep
NSSLIAFRIFLSCYPATGLAARLFTRVSQFVHVFVFFVFWITRILDLLNAPFLAVIEDRDARRMTARRLSDVVLDCVMPYIHDSKDRDAVSQVCRRWYELDSLTRKHVTIALCYTTTPDRLRRRFPHLESLKLKGKPRAAMFNLIPEDWGGFVTPWVRVISQYFDCLKSLHFRRMIVRDSDLQVLARSRGHVLQALRLENCSGFSTDGLYYSHCNLSV

SEQ ID NO: 143160 - protein, 59 aa, Glycine max
  Clone ID: PAT_MRT3847_100287C.1.pep
ASSCTRRLSRRSKRTQASMCLMLLAKDSLCEQRIGTNVMSNCTRKDIDARPFCRLIAAV

SEQ ID NO: 143161 - protein, 56 aa, Glycine max
  Clone ID: PAT_MRT3847_100288C.1.pep
VLGGTKVLIYTMALSRHSTNLLVTVEDAEALQKTKGGEGTYSNHGNGVQHITGTET

SEQ ID NO: 143162 - protein, 81 aa, Glycine max
  Clone ID: PAT_MRT3847_100289C.1.pep
KNYYTICTYNFNFLIFLLKFEIVYYTYNFNIFLIFWKLYFTIRFQHVFFNYFINCILTYNFTSKKKKKGDRSRSRTKRTRG

SEQ ID NO: 143163 - protein, 38 aa, Glycine max
  Clone ID: PAT_MRT3847_10028C.1.pep
RSAEKFRESVCFKARSQIFIEGGLDYLGNPSLTHAQSI

SEQ ID NO: 143164 - protein, 81 aa, Glycine max
  unsure (1)..(81): unsure at all Xaa locations
  Clone ID: PAT_MRT3847_100290C.1.pep
MAATKLIIASLLASILLLDFVDADQWEHAQTHGSILHQIDCNGACAVRCRXSSRARLCQRACRTCGRRXNCVPPGTVGNQE

SEQ ID NO: 143165 - protein, 114 aa, Glycine max
  unsure (1)..(114): unsure at all Xaa locations
  Clone ID: PAT_MRT3847_100291C.1.pep
RKWLLASHKYTVYIHSLLTSRCMSSRQILTACLSYAIDDPTHKQALSAFREVGDAKTITDRYSGRSRGFRCDPFSAAETARSTLSAMDETDLYEXIIIVSYENDRPSATPSVVY

SEQ ID NO: 143166 - protein, 77 aa, Glycine max
  unsure (1)..(77): unsure at all Xaa locations
  Clone ID: PAT_MRT3847_100292C.1.pep
QAAQQNVQQQHHPRILPSHCTTPFHFHSLRGGERQKNPTPTPWPQKGIPLSLTTPTPCCVVSXKXKVXVMKNTKKKR

SEQ ID NO: 143167 - protein, 125 aa, Glycine max
  Clone ID: PAT_MRT3847_100293C.1.pep
QKLRRYIVCLIGVHYTNLKSNPSIVLARCTLPPYCPGQRLVLGGGSRALKLGPVDVLARALLEDERVGSSRVEGLGVRDRRAALEALLDRAKSAGLAVRATVGARRAVRGRALVACRSAGSESSR

SEQ ID NO: 143168 - protein, 147 aa, Glycine max
  Clone ID: PAT_MRT3847_100294C.1.pep
MGVLDYISKFFSVSPATGKKRKAMPTVEIKVKMDCDGCERRVRNSVVHMKGVKQVEVNRKQSKVTVTGYVDRNRVLKKVQSTGKRADFWPYIPYNLVAYPYVAQAFDKKAPSGYVKYAAQALPVSNSLDEKLTSLFIDDNPNACSIM

SEQ ID NO: 143169 - protein, 41 aa, Glycine max
  Clone ID: PAT_MRT3847_100295C.1.pep
FLVNLLKTMCIRQKGSRDLSISGFSSQLLSPEFAFAVSGLE

SEQ ID NO: 143170 - protein, 265 aa, Glycine max
  Clone ID: PAT_MRT3847_100296C.1.pep
MSSMAITTRDRDRELLIPVADTPAGDAAVSPSPKPSSSASSPHHSGRETFYKVIRSWASKKFMTGCVILFPIAITFYITWWFIHFVDGFFSPIYAQLGIDIFGLGFITSITFIFLVGVFMSSWLGASVLGLGEWFIKRMPLVRHIYNASKQISAAISPDQNTQAFKEVAIIRHPRIGEYAFGFITSSVTLQNYSGDEELCCVYVPTNHLYIGDIFLVNTKDVIRPNLSIREGIEIVVSGGMSMPQILSTIDSRIRLGEISRINRS

SEQ ID NO: 143171 - protein, 85 aa, Glycine max
  Clone ID: PAT_MRT3847_100297C.1.pep
MTYLYGTVRIVGTVYWHITSTHLESCHSSQITMTLFHRSCRTGDVRASTMCYGKVGTSNVPFSAEGALYSPSELFAADTGIHRCG

SEQ ID NO: 143172 - protein, 48 aa, Glycine max
  Clone ID: PAT_MRT3847_100298C.1.pep
IGSTEWVEQNLINLSSKAVAYLNVDCAVQGPEFFVGSTPQLDNLILEV

SEQ ID NO: 143173 - protein, 137 aa, Glycine max
  unsure (1)..(137): unsure at all Xaa locations
  Clone ID: PAT_MRT3847_100299C.1.pep
MFFRVKRRWPQNVFAVIKGSEESDRYVLLGNHRDAWTYGAVDPSTGTAALLNIARXFSALLGLGWKPSETIILCCWDAEEFGMIGSTEWVEHNLINLGCKAVAYLNVDCAVQGPGFFVGSTPQLDSLIIEVTKKVFS

SEQ ID NO: 143174 - protein, 57 aa, Glycine max
  unsure (1)..(57): unsure at all Xaa locations
  Clone ID: PAT_MRT3847_10029C.1.pep
TYTRPIGIINNTIKIFTFPXVHSPTPFCFYRNTYTSHNCTDYYQCLPMFTIFYYSTY

SEQ ID NO: 143175 - protein, 71 aa, Glycine max
  Clone ID: PAT_MRT3847_1002C.1.pep
AACNNIDIFTTNFSINCCDGSRKKIPSTNTSCTGSTLSHPRVNRPSLVLQPTHEIDPTSHSWALLLFSLAR

SEQ ID NO: 143176 - protein, 62 aa, Glycine max
  Clone ID: PAT_MRT3847_100300C.1.pep
NSPQGSKNKFSHVWGPPGFSFFFDQIKRRRASPTGVQGAKIPLKGGINKSGKLGRGVTPGQF

SEQ ID NO: 143177 - protein, 87 aa, Glycine max
  Clone ID: PAT_MRT3847_100301C.1.pep
KMESDRNWEQNALISELIQGLEVARKLKEDLSSASSVDARDSHSLLQRILSSYDKALLFLRWNESVSMQQPTKTSSPQSPYPLTKLL

SEQ ID NO: 143178 - protein, 61 aa, Glycine max
  Clone ID: PAT_MRT3847_100302C.1.pep
CFFAAVTPVCASKFVWFFWGMWTGGVYLAPSPFVAVFARVAQSSVDVLNLVASALSVFREV

SEQ ID NO: 143179 - protein, 177 aa, Glycine max
  Clone ID: PAT_MRT3847_100303C.1.pep
MSAVNLNTWPRPSFILNQTATRRSRSSPTSHFFHGVNKLPSPISSLTVAKRSFTLSAVLTKEDTVETEEKPPIFDFKNYMVSKASAVNKALDDAVSLREPQKIHEAMRYSLLAGGKRVRPVLCVAACELVGGEEATAMPAACAIEMIHTMSLIHDDLPCMDNDDLRRGKPTNHKVFG

SEQ ID NO: 143180 - protein, 40 aa, Glycine max
  Clone ID: PAT_MRT3847_100304C.1.pep
FIYYIYYFCPFLQLPIISNKFSLFCLVLFSHINFYLIHLN

SEQ ID NO: 143181 - protein, 55 aa, Glycine max
  Clone ID: PAT_MRT3847_100305C.1.pep
DHSSAVLYIGISHSERTDGPRAIHQLVGDRALYHERTKSDPIRMDEEILCFKEYL

SEQ ID NO: 143182 - protein, 34 aa, Glycine max
  Clone ID: PAT_MRT3847_100306C.1.pep
YLSPHTTPIDIDLGIVARAGSRSRAAARDLEPRA

SEQ ID NO: 143183 - protein, 74 aa, Glycine max
  Clone ID: PAT_MRT3847_100308C.1.pep
NDPNNTTIFDGNLDPTVTDDHVRQVISPYGELQPVNISGGKRCRFVQSANGNCTNRWDVRLLNGTLVAGQDVRI

SEQ ID NO: 143184 - protein, 51 aa, Glycine max
  Clone ID: PAT_MRT3847_100309C.1.pep
LWSQLSKLLHRLMSTVDEPGNDRRMLSSIPAVVVVQPIRTIVSNHAKLSAL

SEQ ID NO: 143185 - protein, 60 aa, Glycine max
  Clone ID: PAT_MRT3847_10030C.1.pep
QVKNLQKDHLHGNKSSMVVSVFVDPREAGDGDVDVDGMMRPRMKAQFVISSSVGSIIIFP

SEQ ID NO: 143186 - protein, 80 aa, Glycine max
  Clone ID: PAT_MRT3847_100310C.1.pep
LFFFLYSPAYIFLSPTLFPFPLLYCLSNISKTDYKISSPNKNKKNQTAKGLETNYIQSQLKKTLFSFSLLIRKTLHKKTP

SEQ ID NO: 143187 - protein, 157 aa, Glycine max
  Clone ID: PAT_MRT3847_100311C.1.pep
TFSAAVPIPFDCAVRPAPSRAPALGKGIALANPLSIVAADCPRRTVQFWPAKRKSASDRLQRVFSVSSARLFSSFPIVPIANFNMCLCVFSAPNFLRYSPICRFFVLCVVFSSSELLAAVASVPHCPSSSSVSSFSLSFRSMSEAVEVNAFGHSLKP

SEQ ID NO: 143188 - protein, 140 aa, Glycine max
  unsure (1)..(140): unsure at all Xaa locations
  Clone ID: PAT_MRT3847_100312C.1.pep
KIRLGPLCIRXNPGCFFFGTNQKGVFLFPNAQKGAGGGPRVGPTRGFPPPDPLVVGKPPPFLLVFLANKLGFLKSQIGRVGGNLNPNFLFGQKGGGKTFFVVSGGPPRALFXGPNNPKQGGFFTPKISIFFSLKAAAVWL

SEQ ID NO: 143189 - protein, 53 aa, Glycine max
  Clone ID: PAT_MRT3847_100313C.1.pep
VLSTPNAPLQLIRYIGNASLSKHVKSYQSTVASIDTHVCLRSTYACRHQCMYM

SEQ ID NO: 143190 - protein, 58 aa, Glycine max
  Clone ID: PAT_MRT3847_100314C.1.pep
VARGKSFSIEFEGERFIHDHCILLPFVTIKFLILSFHFLSLSSFFWLLSTMGCTFLTE

SEQ ID NO: 143191 - protein, 54 aa, Glycine max
  Clone ID: PAT_MRT3847_100315C.1.pep
LPIYASTLSLAGELLMKDKNNSENMCVYLVANFTAITMRFGSVETAMIAVWLHA

SEQ ID NO: 143192 - protein, 99 aa, Glycine max
  unsure (1)..(99): unsure at all Xaa locations
  Clone ID: PAT_MRT3847_100316C.1.pep
CHTAHIACKLDTLLXKIDRRSGKSIEDTPKFVKSGDAAIVKMVPTKPMCVESFTEYPPLGRFAVRDMRQTVAVGVIKAVDKTEKAGKVSKAAEKAQKKK

SEQ ID NO: 143193 - protein, 44 aa, Glycine max
  Clone ID: PAT_MRT3847_100317C.1.pep
YGQELPARATRQPTRPTTEGGTGVQAKCMTCFGVRRNMGVHFRR

SEQ ID NO: 143194 - protein, 99 aa, Glycine max
  Clone ID: PAT_MRT3847_100318C.1.pep
PSVGSLSVLLQDAHDPYTLFKTAIMQASLCFYLKLTCSKQSLPASSSLIYLLQYAMVSTALHTRPSNTFLLVHSVPHGISVVLGSAQSECARSRFQACS

SEQ ID NO: 143195 - protein, 247 aa, Glycine max
  Clone ID: PAT_MRT3847_100319C.1.pep
MSAAVAASAAAATMSGYHHNSSSRQQQHIDHELALTPQRVCVSPPLSRYESQKRRDWNTFGQYLKNHRPPLTLSRCSGAHVLEFLRYLDQFGKTKVHAETCGYFGNSHPPGPCACPLRQAWGSLDALIGRLRAAFEENGGAPEMNPFGTRAVRLYLREVRDAQAKARGIAYEKKKRRKPQQSGHDHDHDAMMMVGSTSDVNYSSGYSGGGGGAFVPHQQMLSDSNGTASTSDGVSYFSSSSQCGGFN

SEQ ID NO: 143196 - protein, 439 aa, Glycine max
  Clone ID: PAT_MRT3847_10031C.1.pep
MDISPYTTPKKLSPHSNNHNNIIADEAAALLDHNNMHRSNHSHTSTSRSSDSSEPSEDGKWAPKLLRECAKAISERDSSKTHHHLWMLNELASPYGDCDQKLASYFLQALFCRATESGERCYKTLSSVAEKNHSFDSARRLILKFQEVSPWTTFGHVASNGALLEALEGEPKLHIIDLSSTLCTQWPTLLEALATRNDETPHLKLTVVAIAGSVMKEVGQRMEKFARLMGVPFEFNVISGLSQITKEGLGVQEDEAIAVNCVGALRRVQVEERENLIRVFKSLGPKVVTVVEEEADFCSSRGDFFKCFEECLKFYTLYFEMLKESFPPTSNERLMLERECSRSIVRVLACCGTGHEFEDDHGEFDCCERRERGIQWCERLRNAFSPSGFSDDVVDDVKALLKRYQSGWSLVVTQGDEHISGIYLTWKEEPVVWASAWKP

SEQ ID NO: 143197 - protein, 88 aa, Glycine max
  unsure (1)..(88): unsure at all Xaa locations
  Clone ID: PAT_MRT3847_100320C.1.pep
KELVLNPHMESCTQAVVLLQEQVALLYMPPKSTGNYXLKNIXHDCADHQSEARLLFDFTRRSXLDYETDGTYDLTYHRYILTIKESKR

SEQ ID NO: 143198 - protein, 81 aa, Glycine max
  Clone ID: PAT_MRT3847_100321C.1.pep
LLTLYHHSSSHIPYCYLNMKKLNPQRLPVFKYRIDVLYLGETHATTHHSLRHSQWINHSNCLVPERNTLSLWWQTQCLDLT

SEQ ID NO: 143199 - protein, 73 aa, Glycine max
  Clone ID: PAT_MRT3847_100322C.1.pep
MHTDITLINLDHPYTESLLQLIVMPSCLIQSTVRALLANHALSILFRSIAMKLNLTTGIITSLKISARLVDIF

SEQ ID NO: 143200 - protein, 65 aa, Glycine max
  Clone ID: PAT_MRT3847_100323C.1.pep
QFTIQVVLLQIHYNDPSIYPIDGGIPPLRLLLFRIRKSYPVLFFEHSGALPVKGLYDKSKYLDKF

SEQ ID NO: 143201 - protein, 623 aa, Glycine max
  Clone ID: PAT_MRT3847_100324C.1.pep
MASSACTKPIFPSAFTVSKSKLSRHVHVSFTSPKPIYYHYRKLSHASQRSLVVNSVLKTVDPTQTSLRRSNSEDVGSLGEKPTILVSEKLGEAGLQVLRGVGHVECAYELSQEELCTKISCCDALIVRSGTKVTREVFEAGKGRLKVVGRAGVGIDNVDLQAATEFGCLVVNAPTANTIAAAEHGIALLAAMARNVAQADASTKAGKWQRSKYVGVSMVGKTLAVMGFGKVGSEVARRAKGLGMHVIAHDPYAPADRARAIGVDLVSFDHAIATADFISLHMPLTPTTNKIFNDNTFAKMKKGVRIVNVARGGVIDEDALVRALDTGIVAQAALDVFTEEPPSKDSKLVQHENVTVTPHLGASTKEAQEGVAIEIAEAVLGALKGELSATAVNAPMVAPEVLSELAPYVVLAEKLGRLAVQLVCGGSGIKSVKIVYRSARGPDDLDTRLLRAMVTKGLIEPISNTIVNLVNADFIAKQKGLRISEERVVVDSSPEMPVDSIQVQISSVDSKFASAVSESGQISIDGRVKFGEPHLTCVGSFDVDVSLEGNLILCRQVDQPGMIGRVGNILGEQNVNVSFMSVGRTSRRNKAIMAIGVDEEPNKEALDNIGAVPAIEEFVFLKL

SEQ ID NO: 143202 - protein, 64 aa, Glycine max
  Clone ID: PAT_MRT3847_100325C.1.pep
LIQSASLNWGARLYILGPDLLLNLIPPILYKTKYPSTLMHACVACSYITNTSFKDLHVPRILTA

SEQ ID NO: 143203 - protein, 254 aa, Glycine max
  unsure (1)..(254): unsure at all Xaa locations
  Clone ID: PAT_MRT3847_100326C.1.pep
MASSRACTKPIIFLSAFTKSKFSHQYHVSFINTTSHIPIYPKLSQQRSLVVNNVLKTVEPTESSLRSSNSEEFGSLGEKPTILVSERLGEAGLQVLRGVGHVECAYELSQEELCTKISCCDALIVRSGTKVTREVFEAAKGRLKVVGRAGVGIDNVDLQAATEFGCLVVNAPTANTIAAAEHGIALLAAMARNVAQADASTKAGKWQRSKYVGXVSMVGKTLAVMGFGKXGSEVARRAKGLGMHVIAHDPLCSA

SEQ ID NO: 143204 - protein, 141 aa, Glycine max
  Clone ID: PAT_MRT3847_100327C.1.pep
ISEERVVVDSSPELPVDSIQVQISSVDSKFASAVSESGQISIDGRVKFGEPHLTCVGSFDVDVSLEGNLILCRQVDQPGMIGRVGNILGEQNVNVSFMSVGRTSRRNKAIMAIGVDEEPNKEALDNIGAVSAIEEFVFLKL

SEQ ID NO: 143205 - protein, 219 aa, Glycine max
  Clone ID: PAT_MRT3847_100328C.1.pep
MEPLNHKSFERVVSQKALQMGNSFPCQICVVGFLCGVCLTSLFMAALTSFGSFQFSPILFSTMSMASNSSGNSTFPNDINKVTRSDCQFKLKETERLEDSKSSREQNNDERVSLLYSAWSSVLNEPTSGGKEHLQKHGISGSSLPNAPHLENCKVKTHLYDYLDKRKGYEVFPPWTTWKGSLQTFPVAAFNEQINLRHEAVSEGAYPPWIAGPDEENYP

SEQ ID NO: 143206 - protein, 85 aa, Glycine max
  Clone ID: PAT_MRT3847_100329C.1.pep
EWESKEKLYPDVSHAWTVGYMDDEEATDASATDDTSHMLDIGVSLTAREHWLLHHKRPRIDMTLMGLVPTQYCLLLTWANVMYNK

SEQ ID NO: 143207 - protein, 80 aa, Glycine max
  Clone ID: PAT_MRT3847_10032C.1.pep
NVRCKGCHCNCTSCCCCCPPRRANEYHDCLTTCAHKISALCRLVAAPFMNVQKSMTNMLHNSAILHKTATTLPMLHRLRP

SEQ ID NO: 143208 - protein, 65 aa, Glycine max
  unsure (1)..(65): unsure at all Xaa locations
  Clone ID: PAT_MRT3847_100330C.1.pep
MQGGKKAGESIKETATNIXASAKAGMEKTKATVQEKAERMXPRDPVQKDWHPKERGKLTQGDWTS

SEQ ID NO: 143209 - protein, 57 aa, Glycine max
  Clone ID: PAT_MRT3847_100331C.1.pep
KNAEPLTKAITQAGYYFQSLDTPSDAESPTERETATERVPTIYNGRYTCVTLVYFTA

SEQ ID NO: 143210 - protein, 46 aa, Glycine max
  Clone ID: PAT_MRT3847_100332C.1.pep
FLANFYYFNSIATGALRQKFLQLILFHTHFPMPNSILNHFGDDWTT

SEQ ID NO: 143211 - protein, 213 aa, Glycine max
  Clone ID: PAT_MRT3847_100333C.1.pep
KFKLQTYHSELASLLGHCSGVNCCLVVFNCLAPDLVLLHVMESWSYVPEEKECVSNEALSPPNTLGRSKNSFLGWELKTPCGFSNDMLGLGHHSIENQGFEELGFPEMLGKHMSAAPSGRLPARKVNGNRQQQHSDRITGTVVDAPSGFSQRGDSNSKLSNSNSLIDLKLGRFADHGDFTDRAFSKVLSSSESSTPPKRVRASGLHSQTAYCQ

SEQ ID NO: 143212 - protein, 97 aa, Glycine max
  Clone ID: PAT_MRT3847_100334C.1.pep
CGRLQRMVYENKKQHRRSSYFQRLLKVRRDLRLLQSANMEELVSSCLLVIKGDRPKQKLHLLGSLKRRKCDGDKHNFMERLLGAARLLAEMKVLINS

SEQ ID NO: 143213 - protein, 62 aa, Glycine max
  unsure (1)..(62): unsure at all Xaa locations
  Clone ID: PAT_MRT3847_100335C.1.pep
TAREEVLETCGDLQREQSLHRIKVHLDALTRGTYGKHFFARVXNLELAGERRVAARAPPQQP

SEQ ID NO: 143214 - protein, 87 aa, Glycine max
  Clone ID: PAT_MRT3847_100336C.1.pep
MGTEFETIEARITSMLPQLQSECGILQRMVYKNKNQHRRSSYFQRLLKVRRDLRLLQSANMEELVSSCLLVIKGDRPKQKLHLLGSL

SEQ ID NO: 143215 - protein, 101 aa, Glycine max
  unsure (1)..(101): unsure at all Xaa locations
  Clone ID: PAT_MRT3847_100337C.1.pep
RVEPRVRPRVRPRVRPRVRPRVQWTPFSVDSLTGGVFGYGVFPKINNGGLEXGPGQENWVQNGVGFFQRDCQIMGISPGDNLVFYNQRPFVLTNFFHIFSL

SEQ ID NO: 143216 - protein, 68 aa, Glycine max
  Clone ID: PAT_MRT3847_100338C.1.pep
LNKVLLPSEVAGNHKISNFILEARVVTIAFLHFIFIKQRCSTPYSLAEKDKPAEHPLTPNSSTLGKLT

SEQ ID NO: 143217 - protein, 37 aa, Glycine max
  Clone ID: PAT_MRT3847_100339C.1.pep
ALTLANLVFSLGFRLLRGCCFALSSREQPKQNECQIQ

SEQ ID NO: 143218 - protein, 267 aa, Glycine max
  unsure (1)..(267): unsure at all Xaa locations
  Clone ID: PAT_MRT3847_10033C.1.pep
RFLTSPSVGVLNDGYDNVNSDLILTVNFVLIHLEKNKRYIVKDLLGHGTFGQVAKCWDSDTNSFVAVKIIKNQPAYYQQALVEVTILTTLNKKYDPEDKHHIVRIYDYFVYQRHLCICFELLDTNLYELIKMNHFRGLSLGIVQLFSKQILYGLALLKEAGIIHCDLKPENILLCTSTVKPAEIKIIDFXGSACMENRTFYSYIQSRYYRSPEVLLGCQYTTAIDMWSFGCIVAELFLGLPLFPGASEXDLLXRMIEILXRXTTDMY

SEQ ID NO: 143219 - protein, 87 aa, Glycine max
  Clone ID: PAT_MRT3847_100340C.1.pep
TLRIYFIYQNVCRCITLPYICRPWFGLVEQNKFLKVQDYEMFPNRASYSHKYRCNNNNKSLIPLEIHRSQEKFKILFPIQVCWGHIP

SEQ ID NO: 143220 - protein, 67 aa, Glycine max
  Clone ID: PAT_MRT3847_100341C.1.pep
LLSLSWSFYFSKPHCIPLEIYGTGNWTYDAHNFFGCLRIWKHEMVYVSRSHCDDALHLLTGSAKYFS

SEQ ID NO: 143221 - protein, 177 aa, Glycine max
  Clone ID: PAT_MRT3847_100342C.1.pep
MASTCSSSFSVTKKYDVFISFRGEDTRADFTSHLHAALRRNNIDTYIDYRIHKGDEIWVEIMKAIKESTLFLVIFSENYASSSWCLNELIQLMEYKKHEDVDVIPVFYKIDPSEVRKQSGSYHMAFAKHEKDRKVTEDKMQKWKNALYEAANLSGFLSDAYRCMLCPYIIVFQLLFI

SEQ ID NO: 143222 - protein, 43 aa, Glycine max
  Clone ID: PAT_MRT3847_100343C.1.pep
GISKLIFIIQFNPISSLPVLNITTILNLRIQIINLIISIIIIP

SEQ ID NO: 143223 - protein, 87 aa, Glycine max
  unsure (1)..(87): unsure at all Xaa locations
  Clone ID: PAT_MRT3847_100344C.1.pep
FFIGSVTLAVDTISCEAFPHRLVQLAEIHDKDASEFSRGGSVTAGSNXERTATTMSADGGPYRDATAHERTASTVPRDSVIGVTSTT

SEQ ID NO: 143224 - protein, 94 aa, Glycine max
  Clone ID: PAT_MRT3847_100345C.1.pep
ACRSMMPHLWTRCISMRNKSYINESLLAIFHRGCSHYLILRYQRKPEVRSMVNISTLCNFFRLVDSVGSLHTRYQGTRKHVLCNSLHTLCHSVG

SEQ ID NO: 143225 - protein, 72 aa, Glycine max
  Clone ID: PAT_MRT3847_100346C.1.pep
KTTHGQVIDWQDLMKIQDGNETELLGGVYALMKIQSVMRGSQECQSPVIRNATIFTKKQNHRSRTFKGEENL

SEQ ID NO: 143226 - protein, 237 aa, Glycine max
  unsure (1)..(237): unsure at all Xaa locations
  Clone ID: PAT_MRT3847_100347C.1.pep
EKMTQIMFETFNTPAMYVAIQAVLSLYASGRTTGIVLDSGDGVTHTVPIYEGYALPHAIMRLDLAGRDLTDYLMKILTERGYSFTTTAEREIVRDIKEKLCYVALDFEQEMQTAATSSQLEKSYELPDGQVITIXGNERFRCPEALFQPSFLGMESSGIHETTYNSIMXCDXDIRKDLYGNVVLSGGTTMFPGIADRMQKELTALAPSTMKIKIIAPPXRKYSVWXIGGSILASLST

SEQ ID NO: 143227 - protein, 52 aa, Glycine max
  unsure (1)..(52): unsure at all Xaa locations
  Clone ID: PAT_MRT3847_100348C.1.pep
KKKKKKKKKNXFLKKNKIFLKRKKKKRRGKKKKKKKKKKKKKKGPPPLKNQT

SEQ ID NO: 143228 - protein, 81 aa, Glycine max
  Clone ID: PAT_MRT3847_100349C.1.pep
PLCADNLIHYTSQRYFLSLTLGRESHLDSQICGDLLSVNRWGGVTRIRSTAGMVKTTESLNSLRGSRVSFVILVRILGRFL

SEQ ID NO: 143229 - protein, 42 aa, Glycine max
  Clone ID: PAT_MRT3847_10034C.1.pep
HASRDAHSQHESSNGMCTLAEADLRLSRRHCLDELGRYKALH

SEQ ID NO: 143230 - protein, 71 aa, Glycine max
  Clone ID: PAT_MRT3847_100350C.1.pep
MSAASSMALSIPSLAGQAVKLGSSAPEVGRVSMMKTVTKQASSGMPWYGSDRVKYLGPFSGERRPTHGEYQ

SEQ ID NO: 143231 - protein, 92 aa, Glycine max
  unsure (1)..(92): unsure at all Xaa locations
  Clone ID: PAT_MRT3847_100351C.1.pep
ARSSIXXEXDFDXXXLXXXXXXXXCALGAXNXVFXXXDFXXXXXTVHXHXXTXXXXECAXVXXNPVKLXILSRXRXXLXXVXLXGXYXXVXX

SEQ ID NO: 143232 - protein, 60 aa, Glycine max
  unsure (1)..(60): unsure at all Xaa locations
  Clone ID: PAT_MRT3847_100352C.1.pep
APLIFSXWXPSFLXXXYCLSIXYNGRXXLPCXHNLIXTXTVASXXDRSXCXQMSXXIEFP

SEQ ID NO: 143233 - protein, 74 aa, Glycine max
  Clone ID: PAT_MRT3847_100353C.1.pep
RRVLPRLRLLPAFKLCYEITSILTGLCTKNGVTTLILLRLVHINAIRRIYFDVQTPRLTHEYSHIVPSIITILC

SEQ ID NO: 143234 - protein, 109 aa, Glycine max
  Clone ID: PAT_MRT3847_100354C.1.pep
MSTEKEKTSSPSPSVELCKGFNGLEKVLLRESRGSSAEVYLYGGHVTSWKNDHGEELLFLSNKAIFKPPKAIRGGIPLCFPQFGGLGTLDQHGFASRMIKMTSSVSSCL

SEQ ID NO: 143235 - protein, 224 aa, Glycine max
  unsure (1)..(224): unsure at all Xaa locations
  Clone ID: PAT_MRT3847_100355C.1.pep
MGHKQGLIMGVWNSHXTSLGNIIGXVVASGVLDFGWGXSFVVPGILIHFXGFWSYLFLVENPEDKAFVHSGMDIEMSVETDSAENRQKVESEEAKLIASEISDSSSAIGFLEAWKLPGVAPFAFCLFFSKLEAYTLLYWLPFYIRHTAVAGVHMSHKTAGLLSTIFDIXGVLGGITAGFISDLIEARAITSILFLVLSIPALALYRIFGSLSMLINIILMFLSG

SEQ ID NO: 143236 - protein, 49 aa, Glycine max
  Clone ID: PAT_MRT3847_100356C.1.pep
LVPLIPKRKEKMVGPQQLYTRAETEGFDLELRETLYPRVSVGENQLPLG

SEQ ID NO: 143237 - protein, 96 aa, Glycine max
  unsure (1)..(96): unsure at all Xaa locations
  Clone ID: PAT_MRT3847_100357C.1.pep
LVATVGIPXNICIXIGACAMNSSFRGRASSDIYTICCQDWELWNPACTKAMTMSFNPNAYYDAWRMESVQRTGFKCDIICVTGLSVTSMHDDQDTI

SEQ ID NO: 143238 - protein, 47 aa, Glycine max
  Clone ID: PAT_MRT3847_100358C.1.pep
HMRKPSSSRVGIAAEAHDALPKIDRKPWTLVHCVIKGCYLVPWAAQK

SEQ ID NO: 143239 - protein, 68 aa, Glycine max
  Clone ID: PAT_MRT3847_100359C.1.pep
QNINKYECNQTHEEERIHLFLSIFLTPPPFYHQLLSNSFIHFFSSYFTLEDVTAPMWSFTFLCLAEHI

SEQ ID NO: 143240 - protein, 53 aa, Glycine max
  Clone ID: PAT_MRT3847_10035C.1.pep
CHLEGIHHHESTHETCTTSGAHHTQHLYDRHVHSHIDHSRHCKISRHVFPRPA

SEQ ID NO: 143241 - protein, 108 aa, Glycine max
  unsure (1)..(108): unsure at all Xaa locations
  Clone ID: PAT_MRT3847_100360C.1.pep
MLGAENLGGXAPPPRLDHVAVSLPGGRILIFGGSVAGLHSASQLYILDPTDEKPTWRILNVPGCPPRFAWGHSTCVVGGTRAIVLGGQTGEEWMLSELHELSLASSAI

SEQ ID NO: 143242 - protein, 111 aa, Glycine max
  unsure (1)..(111): unsure at all Xaa locations
  Clone ID: PAT_MRT3847_100361C.1.pep
LAPQVCKTWIISNDAQRLSTSDHKNAAFXWLKNIXHMYCAAQQYDASLLLDSTXRSLSETETDRSFGLXRNFKYIETIKEAVERECTXMIDXADILFLSDRDRIVSLGGAH

SEQ ID NO: 143243 - protein, 181 aa, Glycine max
  Clone ID: PAT_MRT3847_100362C.1.pep
MEWDSNSDLSGDEEEEGFVFNDADDAGPLPFPFPVVENLLQTAPCGFVVTDALDPDHPIIYVNTVFEIVTGYCAEDVLGRNCRFLQCRGPFAKRRHPLVDSTVVSEIRRCLEEGIEFQGELLNFRKDGSPLMNRLRLTPIYGDDETITHVIGIQFFTEANIDLGPCPGSTIKESAKSSDRF

SEQ ID NO: 143244 - protein, 353 aa, Glycine max
  Clone ID: PAT_MRT3847_100363C.1.pep
MDDMEDDARYPPKSFSLNRQNPSHRHKHPIRAAPYHRPMPTRYQEPDDDDDDDNEPDDFDDGEAENGYDDDNNVAAYPRIPKKRKVVGTAAAGGSYEFAPRVNFSYGNSRGSGSGEEWNEHETFVLLEVWGDKFLQLGRNSLRSEEWHEVAEKVSEELKTERTVTQCRSVLDKLKRRYRKEKARMDEIGLGSCKWAFFKKMDMLMASSARQEYGLACGVDSGEYVFMNTRVYLNSSNGFDEMRDSPGESESDDDDDEEEDVGGGGGDEDEDEDDEMSCRVLADSIQKFGKIYEKIENSKRQQMMELEKMRLDFNRELELQKKQILERAQAEIAKIQDVDEEDTDTSGGENLSE

SEQ ID NO: 143245 - protein, 617 aa, Glycine max
  unsure (1)..(617): unsure at all Xaa locations
  Clone ID: PAT_MRT3847_100364C.1.pep
MEWDSNSDLSGDEEEEGFVFNDGDDAGPLPFPFPVVENLLQTAPCGFVVTDAHEPDNPIIYVNTVFEIVTGYRAEDVLGRNCRFLQCRGPFAKRRHPLVDSTVVSEIRRCLEEGIEFQGELLNFRKDGSPLMNRXRLTPIYGDYESQTHVMGIDLFTKSLKGIGPVRGSIINVYDYSSARMVSVLSSLQTRPVVCRKVFRGVCRFIQLREVVLSLKILVQINPRDIASVSSVCRRLYELTKNEDLWRMVCQNAWGSETTHVLETVPGARRLGWGRLARELTTLEAAAWRKLTVGGAVEPSRCNFSACAVGNRVVLSARRRQNGQPMNDTFVLDLNSSNPEWQHVQVSSPPPGRWGHTLSCVNGSHLVVFGGCGRQGLLNDVFVLDLDAKPPTWREISGLAPPLPRSWHSSCTLDGTKLIVSGGCADSGVLLSDTFLLDLSMEKPVWREIPVAWTPPSRLGHTLSVYGGRKILMFGGLAKSGPLRFRSSDVFTMDLSEEEPCWRCVTGSGMPGAGNPGGIAPPPRLDHVAVSLPGGRILIFGGSVAGLHSASQLYILDPTDEKPTWRILNVPGCPPRFAWGHSTCVVGGTRAIVLGGQTGEEWMLSELHELSLASSAI

SEQ ID NO: 143246 - protein, 94 aa, Glycine max
  unsure (1)..(94): unsure at all Xaa locations
  Clone ID: PAT_MRT3847_100365C.1.pep
KCSTSGFKKWSTSEIWASTSGSFDSPXPQLQPHEPHLQPHEPHLPIMSRSVKDGNKTAPATTIENLGPLSNLSSFIRYTNSKQYLHHYKNNSII

SEQ ID NO: 143247 - protein, 62 aa, Glycine max
  Clone ID: PAT_MRT3847_100366C.1.pep
PRVRTTKLAHLACNIYLINHQRMVLYKCPSFCAEHLKHFKREGARWHHQAIKEKKRKKEGWS

SEQ ID NO: 143248 - protein, 132 aa, Glycine max
  Clone ID: PAT_MRT3847_100367C.1.pep
CLLQFALPTLRSKVLCLPEQVCFSVAGLVPARVHRFQQLLIYPLLAQLPCACFSWSSPQRRISIGTSCRQRHPVRGLDVASVIAGIAAAGTLSVVRGPGPFLFLPQGAASLSSFRRKFGQTPGRTRGLRPGS

SEQ ID NO: 143249 - protein, 112 aa, Glycine max
  Clone ID: PAT_MRT3847_100368C.1.pep
EGPLVFFFPPPKLKKKRLPPGSSYPFYKKMVILKKKGGALGPPQVRLIGVVSLSSWAAKKPIILWGHTRFLFVSSKWGNLFFCPPPSRVWGSPPLSWNFCPPPPRKGVKVSL

SEQ ID NO: 143250 - protein, 71 aa, Glycine max
  Clone ID: PAT_MRT3847_100369C.1.pep
GRSLEDQGIIRLEVKISNSMKHKPTRILLYYINQVALSCAINKLLFSWVVTLLQCQRMKKFKFLTQAAIHS

SEQ ID NO: 143251 - protein, 112 aa, Glycine max
  unsure (1)..(112): unsure at all Xaa locations
  Clone ID: PAT_MRT3847_10036C.1.pep
TQINIKLWNLXSFKHIGINNMGLTNYIKLSPSKHTTYIAHTTSEYSVKKVQKAHYPISEKLTSSLMIHRKNNKNKLDAITIIKHTIKIMHLLTNLNPIHIMRDTIINSSPHE

SEQ ID NO: 143252 - protein, 54 aa, Glycine max
  Clone ID: PAT_MRT3847_100370C.1.pep
MMVTGGGGPSPTAAMSEEEAHGVAVAPAPAGQHDSFILTPEAGVRGGGAPVLAA

SEQ ID NO: 143253 - protein, 49 aa, Glycine max
  Clone ID: PAT_MRT3847_100371C.1.pep
QTESRIHYLFFHNNNMTFSTLFLLSFTLSLNLISPLPTLSSSLYVSLCE

SEQ ID NO: 143254 - protein, 284 aa, Glycine max
  Clone ID: PAT_MRT3847_100372C.1.pep
MAEDGNNNDVPLHKFKDSNPNPEEFDAKGYSLSGKIMLSAIILLFFVVVLMLCLHIYARWYLRRARRRQLRRQRELRRTQLVFYNDDATPAAVSRGLDAAILATLPVFTFDPEKTGPECAVCLSEFEPGETGRVLPKCNHSFHIECIDMWFHSHDTCPLCRAPVERAPEPEVVVITVPDPVSETGSGENENRTGSSSSSSSVGLSKPKPSLVGVTIEVPPRDENFQNELQPSCDSSSSFRSPMSRMLSFTRMLGREKKGNVSPSSCGGGDCSSAAERGEREETQ

SEQ ID NO: 143255 - protein, 169 aa, Glycine max
  unsure (1)..(169): unsure at all Xaa locations
  Clone ID: PAT_MRT3847_100373C.1.pep
MEITSSHSSGSMMWLFKDQGSDDNSAQGMIRKCRRLEGVHQERASENWDYLRSIGIXERKLPSIVSKCPKILALDLYEKIEPTAECLRTLRTTPNEVASAIAKFPHILSHSVEEKLCALLAFFQTLGIPEKHSAKMILLNPRLISYSIETKLTEIVNFLVNLGLSKDGM

SEQ ID NO: 143256 - protein, 49 aa, Glycine max
  unsure (1)..(49): unsure at all Xaa locations
  Clone ID: PAT_MRT3847_100374C.1.pep
NSARGATLDIFIXIHIFVLSWHLSSRRVVLLYLHPQYSISWCAIQHKGQ

SEQ ID NO: 143257 - protein, 45 aa, Glycine max
  Clone ID: PAT_MRT3847_100375C.1.pep
GRKIKQTYFIKIFFYRNKKKLNYWNKKVFKSKKYKEKEKCSWPLK

SEQ ID NO: 143258 - protein, 168 aa, Glycine max
  Clone ID: PAT_MRT3847_100376C.1.pep
TDLFHEDNSTPNVYQSASSHGSNPTPQTAENGKLFEIGDDKEVLLVACVNCYSREVLNLGDQVDAENNFKNIEPFKVHNDKNGQLDTIKKEHESQGIVKCKDMPYQIISSTGYSYSVKKFEETEPLLYSPDCYFCNTNSLDTVVLHSNDTSSTSLKKFLAYEERDSQL

SEQ ID NO: 143259 - protein, 466 aa, Glycine max
  unsure (1)..(466): unsure at all Xaa locations
  Clone ID: PAT_MRT3847_100377C.1.pep
MEGEACSEGENNLKRGGSDDDSNENNNNNNNGSSGKIVNSNEGQSKPKRQMKTPFQLETLEKAYAVDNYPSETMRVELSEKLGLSDRQLQMWFCHRRLKDKKDLPSKKPPRKVLAEPLPDSPRDDPRLSLELANEYGSGSGSGSSPYARVEPLNVVPRCVPGYYESPQAKLELRAIACVEAQLGEPLRDDGPILGLEFDPLPPXCFGAPIAAVTEQQKLPSFAYDSKIYERHDARTNKALARTFRDNQFLPNKSGIRSDASGQFSQSHLHDPIEGFVRNPPFAHGNEHLPRIHATKGHSSRVRLLSQQDKQLIPYQSPSRDDDAAPQRELYPNIANAGKNSHSTGHQIVGPENLHALPSVQVLHNNATWIEKKRKSDDAHDVEAHEMKIRKELEKQDNLRRKSEERTRKEMERQDRERKKEEERLMRERQREEERARREQKREMERREKFLLKENLQAEKTRQREK

SEQ ID NO: 143260 - protein, 198 aa, Glycine max
  Clone ID: PAT_MRT3847_100378C.1.pep
MSRHPEVKWAQRLDKVYITVQLADSKNAKVDLTPDGIFTFSGSAGAEDHQYELKLELFDKVNVEESKINVGERSIFIVVQKAEDGWWKRLLRGEGKTPHYVKVDWDKWVDEDEDEGNTGEVDLGGMDFSKFGGMGADAMGGMDAMGGMGGMDFSKFGGMGDAMDDIDESDDEEQEVSKPVEQDAGEGSTEKKEAAPST

SEQ ID NO: 143261 - protein, 200 aa, Glycine max
  Clone ID: PAT_MRT3847_100379C.1.pep
MSRHPEVKWAQRLDKVYITVQLADSKNAKVDLTPDGIFTFSGSAGAEDHQYELKLELFDKVNVEESKINVGVRSIFCVVQKAEDGWWKRLLRGEGKPPHYVKVDWDKWVDEDEDDGNNGEVDLGGMDFSKFGGMGADAMGAMGGMGAGAMGGMDFSKFGGMGDAMDDIDESDDEEQEVSKPLEQDAGEASTEKKEAAPST

SEQ ID NO: 143262 - protein, 78 aa, Glycine max
  Clone ID: PAT_MRT3847_10037C.1.pep
RVRLQWRAKSTAIKKIAGKTTFQIVNIDGDIVAYAKQKHSSSGVVLGNDVLTLDVEGGIDHSLIMAFVTVFGLICGKM

SEQ ID NO: 143263 - protein, 152 aa, Glycine max
  Clone ID: PAT_MRT3847_100380C.1.pep
MSQLLDKAKNFVSEKVNDMAKPEASVTDVDFKRVSKDNVEYLAKVSVRNPYSTSIPICEINYSFKSASREIASGKIPDPGSLKAKDTTMVDVPVKVPYSILMSLAKDIGADWDIDYQLDLGLVIDVPVIGIFTIPLSQKGEIKLPTLSTMFA

SEQ ID NO: 143264 - protein, 57 aa, Glycine max
  Clone ID: PAT_MRT3847_100381C.1.pep
DESVENGELEDAPKLTLQTTDQELVNDYWCKKCAVQPSWVPIINYVDVNKKDPWKRS

SEQ ID NO: 143265 - protein, 100 aa, Glycine max
  unsure (1)..(100): unsure at all Xaa locations
  Clone ID: PAT_MRT3847_100382C.1.pep
YGQELCLIPICEINYSFKSASREIAAGTIADPGSLKAKDKTMGDVXHVKVPXSILMSLAKDIDYQLDLGLVIDVPVIGNFTIPLSQKGEVKLPTLSNMFA

SEQ ID NO: 143266 - protein, 57 aa, Glycine max
  unsure (1)..(57): unsure at all Xaa locations
  Clone ID: PAT_MRT3847_100383C.1.pep
WCPVKNWTVHILNKLYTRFGDFKLQNPANRPFAQXFHMHYAGSILECHSICSNVISC

SEQ ID NO: 143267 - protein, 54 aa, Glycine max
  Clone ID: PAT_MRT3847_100384C.1.pep
GKKKALAIKITWLLTNEHKFPGVVPFGVWNKGVGKGSITGVFKGTTFVKRPRLN

SEQ ID NO: 143268 - protein, 47 aa, Glycine max
  Clone ID: PAT_MRT3847_100385C.1.pep
YYYYCPVDVLQPMWTICPLTISTYPIILGLDYLLIVLLSLQTPLSFY

SEQ ID NO: 143269 - protein, 88 aa, Glycine max
  unsure (1)..(88): unsure at all Xaa locations
  Clone ID: PAT_MRT3847_100386C.1.pep
TRKRYNPRERKARDDTARLMLLTMPAKGEVASERDDERVEARSDEGGWGKRVVMSSVSVSSSISSTSHTLPTSNTAPSSPFPPSXRPL

SEQ ID NO: 143270 - protein, 103 aa, Glycine max
  Clone ID: PAT_MRT3847_100387C.1.pep
MGSKVLLVVVMFIAAILLISAEVAPNEYENFNKKDGKHAPNGLYDSKWGYGGWGGPWYGGWGGPYYGGGWGGPYYGGGWGGPWRGGGGGGWGGWRRPNGNPHN

SEQ ID NO: 143271 - protein, 41 aa, Glycine max
  unsure (1)..(41): unsure at all Xaa locations
  Clone ID: PAT_MRT3847_100388C.1.pep
GHDMIILACAXYWSGSSRDWAXKGPILLGVKACIAKSFGRI

SEQ ID NO: 143272 - protein, 58 aa, Glycine max
  Clone ID: PAT_MRT3847_100389C.1.pep
LHAPPSYAISPNCRSYFSNLQLLKCLKLQDHVINLLITRAPLLFCFIIRALRSSLNFL

SEQ ID NO: 143273 - protein, 319 aa, Glycine max
  unsure (1)..(319): unsure at all Xaa locations
  Clone ID: PAT_MRT3847_10038C.1.pep
MAFTGSGSGQPQFISSTGNRSFSNAPLIENSDTNQIVVPDRRSWKNLFAYMGPGFLVSIAYIDPGNFETDLQSGAQYKYELLWIILLASCAALVIQSMAANLGVVTGKHLAEHCRSEYPRVPNFILWIIAEIAIVACDIPEVIGTAFALNMLFNIPVWIGVLLTGLSTLILLALQQYGVRKLEFLIAFLVFTIAACFMAELGYAKPVAKEVVTGLFVPKLQGHGATGLAISLLGAMVMPHNLFLHSALVLSRKIPRSVRGIKVREYCERINLXETAQTMEACRFYMIESAFALTVAFLINISVISVSGAVCNSSNLSAG

SEQ ID NO: 143274 - protein, 150 aa, Glycine max
  Clone ID: PAT_MRT3847_100390C.1.pep
PRVRFNRLHSHANHFSFLSLPLSLSSLPRRDGSVGRITNPQVHRFYHESSILSRPEEDGTMTMVTTTLEINKKILSLDYTSFRVEILSADAQPSYKDGVIVVATGCLTGSDNLKRKFTQSFFLAPQDKGYFVLNDAFRYVDEYKSVDIES

SEQ ID NO: 143275 - protein, 76 aa, Glycine max
  Clone ID: PAT_MRT3847_100391C.1.pep
NFSKMSTKFNSMGVRLKRPEWEKPGLNQLNPLSTKPPFPNWRNNQEAPNHWPSQQLPNLNGQWEPPCNRAINPAGF

SEQ ID NO: 143276 - protein, 184 aa, Glycine max
  Clone ID: PAT_MRT3847_100392C.1.pep
HYHAEKAASNNALEDTPKKSFASIGNALKENAAPFHVRVSPVKLVEQPRVSSIPAPEAPAPSIESPPEKNNENGGKAYAIFVANLPMNATVEQLERAFKKFGPIKQDGIQVRSNKQQQSCFGFVEFESATSMQSALEASPPVTLDGRRLSIEERRANNDRGRYSSGRGGYRNDRNGYFRGRGNF

SEQ ID NO: 143277 - protein, 456 aa, Glycine max
  unsure (1)..(456): unsure at all Xaa locations
  Clone ID: PAT_MRT3847_100393C.1.pep
MAVSEESSTTQMIGNAFVEQYYSILHQKPDQVHRFYHESSILSRPEEDGTMTMVTTTLEINKKILSLDYTSFRVEILSADAQPSYKDGVIVVVTGCLTGSDNLKRKFTQSFFLAPQDKGYFVLNDVFRYVDEYKSVDIESVPANDAATADESAPTDAFVPEPEAIHVAEDVPASQTDVVDADIGVSKEVSQPLENGNLSVTEKVVPVDHVKECSHQEHHSHAEKAASNNSLEDTPKKSFASIVNALKENAAPFHVRVSPVKLLEQPRVSSIPAPEAPAPSTDSPPEKNNEIGGKAYAIFVANLPMNATVEQLERVFQKFGPIKRDGIQVRSNKQQQSCFGFVEFESATSMQSALEASPPVTLDGRRLSIEERRANNDRGRHSSGRGSYRNDRNDNFRGRGNFGGGHGGGYGXGNDSFEKRSEFSGRPRGGNNGGRSNGEAVPRSYQNGGAKVTVNQ

SEQ ID NO: 143278 - protein, 89 aa, Glycine max
  Clone ID: PAT_MRT3847_100394C.1.pep
YTFQHSELLGIFTWRESTKPTASTANCNHLSFTLKNWFDALGMSFSYGTEELFLIVVLCWVQDRPSTKVHAAPGGGSSLNYLFGGPPGN

SEQ ID NO: 143279 - protein, 126 aa, Glycine max
  Clone ID: PAT_MRT3847_100395C.1.pep
LSFSTAGPVTAVVDVGPPADWVKINVRETKDGFEVYALVPGLLREEVRVQSDPVGRLVITGVPEHLDNPWGITPFKKVVNLPARIDSLQTSAVVSLHGRLFVRVPFEQGAVCECSSLESLIYEISP

SEQ ID NO: 143280 - protein, 146 aa, Glycine max
  Clone ID: PAT_MRT3847_100396C.1.pep
VVLLQQQGLVTPNRREMGRGVSAGGGQSSLDYLFGSGVPASSANGARTQNASAPSPPVDKQSPAPAAAAAPAPAAAAAPAPAPAPAPAPADKQIPAGIPGSLKNNYHRADGQNCGNFLTDRPSTKVHAAPGGGSSLHYLFGGPPGN

SEQ ID NO: 143281 - protein, 157 aa, Glycine max
  Clone ID: PAT_MRT3847_100397C.1.pep
GDIKNTKSKKNHHPLSSNILLNNINNVPNLLPVKTDPSPPATKIPSKQSQVCDTCHQESKSSSQLSSCARQRYKQEGTTTTLLATRDRSENKPNNGAFSFSSTTVVQPHTPQELQYITAILARTTALKSQGIPTTLSLNQGWFSPTNPLDPSIFHHL

SEQ ID NO: 143282 - protein, 40 aa, Glycine max
  Clone ID: PAT_MRT3847_100398C.1.pep
SVDACPSEISDNNSVVYYPRYPSLNVVQLHKCLLHCFILG

SEQ ID NO: 143283 - protein, 123 aa, Glycine max
  Clone ID: PAT_MRT3847_100399C.1.pep
MGRGVSAGGGQSSLGYLFGSGVPASSANSQPANGARTQNASAPSPPVDKQSPAPAPAPAPAPASSPIDKQIPAGIPGSLKNNYHRADGQNCGNFLTDRPSTKVHAAPGGGSSLNYLFGGPPGN

SEQ ID NO: 143284 - protein, 132 aa, Glycine max
  unsure (1)..(132): unsure at all Xaa locations
  Clone ID: PAT_MRT3847_10039C.1.pep
MAFTGSGSGQPQFISSTGNRSFSNAPLIENSDTNQIVVPDRRSWKNLFAYMGPGFLVSIAYIDPGNFETDLQSGAQYKYELLWIILLASCAALVIQSMAANLGVVTXKHLAEHCRSEYPRVPNFILLDLLAE

SEQ ID NO: 143285 - protein, 123 aa, Glycine max
  Clone ID: PAT_MRT3847_1003C.1.pep
IDLEVIDRETEASLAVLGCSPLVDPRGRGAILFDIGGGSTELVRIERDPENPEPRIKAWMSIPFGVVTLAEQFGGRDVTPEIYDAMEREVAHHVAPFAEQHGVDLADMHLLGTSGTVTTLAGI

SEQ ID NO: 143286 - protein, 101 aa, Glycine max
  Clone ID: PAT_MRT3847_100400C.1.pep
KSYNRDIYASNVFLDLLCFNNGIAILSFEYDCIMHFTTLSTSLSVPILFTPGSLILLSGKAPYHWKHQINCTPEFQIWHSQPLTQSKRSSITLGKLCPSSP

SEQ ID NO: 143287 - protein, 121 aa, Glycine max
  unsure (1)..(121): unsure at all Xaa locations
  Clone ID: PAT_MRT3847_100401C.1.pep
AIHCPAIEAPGIFYTNEASYSFAGYPLHILSQPVATAVPXGLMIIVGDANPKAGFNTADDIGTHTINSAHDPITLQTFLFMRPPADTLTHDELVTLXEVKIGXPLERTYVPDAQLLKHIEQ

SEQ ID NO: 143288 - protein, 73 aa, Glycine max
  Clone ID: PAT_MRT3847_100402C.1.pep
SCTNKKNQVWKLGSITSHYIYRFAGSFGNLAGLLPFPTSQGHERSNNWLGPAVSVVLVTCPNGRSKSVFKTML

SEQ ID NO: 143289 - protein, 42 aa, Glycine max
  Clone ID: PAT_MRT3847_100403C.1.pep
SFCFFCSHLTSGQKDGDDLPRTSNVLEILTKTRFPPVHDIGD

SEQ ID NO: 143290 - protein, 109 aa, Glycine max
  Clone ID: PAT_MRT3847_100404C.1.pep
LQYPFKQDRLLLLAVVAPYPDRNSVGVIIVDISSGQHIHKSKDLDVIDVSDGQIVYVVLLKSSVQSREGYLVVSKASMRSQYALMYGIYQENNGRRWGSFHEVQWRCPP

SEQ ID NO: 143291 - protein, 306 aa, Glycine max
  Clone ID: PAT_MRT3847_100405C.1.pep
REGRLLYSGRRQALTFADLGARAPLQLRGTDGQNGIAFSVRRDEVVTGATLHLVYSYSPALLPDLSQLKVLVNGEVAATLPLPAAQAGMTVARDVLIDPRFVTEYNHLNVQLIGHYTKDCENPASSSLWATVSNASRLDLTYAALPERPELGMLPAPFFDSRDVRRLELPFAFAARPSRETLEAAGIVASWFGALASYRGARFPARLGSLPESRNAVVFATTDDHPDGVTLPAIDGPMLAIAERPAPAEGQLLLVLGRTPDEVKTAALGLALGSKALAGTHAAVNRLANVAPRVPYDAPNWLSSTP

SEQ ID NO: 143292 - protein, 39 aa, Glycine max
  Clone ID: PAT_MRT3847_100406C.1.pep
AEQVNICSRRGLEGSLDDVYTWTKYGQKNILIAKFPRLD

SEQ ID NO: 143293 - protein, 32 aa, Glycine max
  Clone ID: PAT_MRT3847_100407C.1.pep
FFFLIFFFFYCRHVYAFMLLLQRIRTDYQIKC

SEQ ID NO: 143294 - protein, 75 aa, Glycine max
  Clone ID: PAT_MRT3847_100408C.1.pep
TKPRHITSLHSSSKLSRIFTLEPNPWRIASSPTRCPRSHPKRRLPLLTKKNKPSQWSTCSPSSFPCPTRHFWSVS

SEQ ID NO: 143295 - protein, 82 aa, Glycine max
  unsure (1)..(82): unsure at all Xaa locations
  Clone ID: PAT_MRT3847_100409C.1.pep
KFRVGPFMDKVIQFSLGGVPPHKEGKSQKPKMLFRKSFFSLRKSGLKSVKVLIGVKNLTNYLWSEKKKKXXXXXXXXXXXXX

SEQ ID NO: 143296 - protein, 107 aa, Glycine max
  Clone ID: PAT_MRT3847_10040C.1.pep
PVYTVVCLIFRFELPCGTTCVFLCGASTIIIGCSGAITFFFFFLFLFALLVFLFSTTSSSLLRSSCSLCPTVLTPTSLLSTLSTSSVVFSIFLMVSTAVTTGFLAPV

SEQ ID NO: 143297 - protein, 61 aa, Glycine max
  Clone ID: PAT_MRT3847_100410C.1.pep
CKEQSLIGFKNQKNASFQGKAKRFDCFLSIVSFVYRPLLFFYLERQILQPTKKKCSINTFL

SEQ ID NO: 143298 - protein, 80 aa, Glycine max
  Clone ID: PAT_MRT3847_100411C.1.pep
STLPGTVSYLTQPGYPWAAMKDPRAPLGIWGTLTHRARRDDSTRLLDTASRTSRDYHTDGTYTSRGPGFHLRVIDTCCVV

SEQ ID NO: 143299 - protein, 52 aa, Glycine max
  Clone ID: PAT_MRT3847_100412C.1.pep
GGADDQHSCTGRNPKKGQVLRPLLCQAIDSVYRAFFNVLPEVASNYALEFRF

SEQ ID NO: 143300 - protein, 130 aa, Glycine max
  Clone ID: PAT_MRT3847_100413C.1.pep
WGKGSLSRSEPQWLVGEKKKRGIEAGKTSAEVTQNRREERKQFKLERARAQREAIEQQLKEEGKLDPDGSIEELVDEGQATESPRGTIYTPDAEHVVTVHGDSITSELNKTLAQDTPPWGRSATPAPAMD

SEQ ID NO: 143301 - protein, 339 aa, Glycine max
  Clone ID: PAT_MRT3847_100414C.1.pep
PTRPYGCEKTTEGAADLGQLYDLFVQLKVNLRVNLMGYDYSGYGASTGKPSESSTYADIEAIYECLETEYGVSQEDVILYGQSVGSGPTLHLAAKLPRLRGVVLHSGILSGLRVLCHVKFTFCFDIYKNINKIKKVKCPVLVIHGTEDDVVNWLHGNGLWKMARESYDPLWIKGGGHCNLELYPDYIRHLCKFIQEMESMTTEKRLKKIRQSANQSKSNTGCTCSRCCRVKCCRVKCPECSNCCCCMNVSWSINCPECCWRPSCKCCRLPKFPSCFRSICRTKWSWPSCCATKCSLSLPSCCCCCYPKRARPSCCCMNCFCWQCCVGKHSDGTNGKQNG

SEQ ID NO: 143302 - protein, 55 aa, Glycine max
  Clone ID: PAT_MRT3847_100415C.1.pep
FAKVRLFFFWQKDFCLKSNFVMEKQTCTKTSTLQNFKRLQNEKDTMMSFIHCLKN

SEQ ID NO: 143303 - protein, 119 aa, Glycine max
  Clone ID: PAT_MRT3847_100416C.1.pep
PPPPSSKQFAAPPGIPFPASVGNSPFSFLGPPHPPLYMKGHCPLSLDSRTGRPPPPPFIDFFDQQYSSLPLVLLIGALFSLILSKGRNVMGLSFVAFYEFLEQKNVRQGFVFYFIVKKV

SEQ ID NO: 143304 - protein, 76 aa, Glycine max
  Clone ID: PAT_MRT3847_100417C.1.pep
WVNMFPLPSPKGFENRKNHLFSFLFRSLEKGKLAFKIYECGYVKLIPPINRSPGKIIARGWHPKKKRKKKKKKNPT

SEQ ID NO: 143305 - protein, 128 aa, Glycine max
  Clone ID: PAT_MRT3847_100418C.1.pep
YRSSVMGKQGSHKSLRPEFQGWHSKTLLLHGLKSDSSKCSYCRGLYVGKKHIRAIVVMFGLLGCLFLLDSLIISYFEFTNLQPSTASNNSIVFQGRDSYIYSKRSPVYMYERLLNLASSALAEKEFKQ

SEQ ID NO: 143306 - protein, 105 aa, Glycine max
  unsure (1)..(105): unsure at all Xaa locations
  Clone ID: PAT_MRT3847_100419C.1.pep
GSYPADGPFHLFIFPPERDQRRGTFNKPLRRKPANAKAKRRGPPRPHNKNXGGKGKGNKGGGGGADKKKXPRNQPQQQGQAGNTKETGRAPQQKKRKETQDEQQA

SEQ ID NO: 143307 - protein, 40 aa, Glycine max
  unsure (1)..(40): unsure at all Xaa locations
  Clone ID: PAT_MRT3847_10041C.1.pep
MAQILAPSTQWQMRISKSSPNATPITSNMWXSLLWNKIRK

SEQ ID NO: 143308 - protein, 335 aa, Glycine max
  unsure (1)..(335): unsure at all Xaa locations
  Clone ID: PAT_MRT3847_100420C.1.pep
YGNLVTILSIDGGGIRGIIPATIIGFLESQLQELDGPEARLADYFDVISGTSTGGLVTAMITAPDNNNRPLFAAKDIKPFYMDHCPKIFPQHSGLGGTILAKMIRSLGGPKYDGKYLHEVVKEKLGDIRLHETLTNVVIPTFDIKSLQPIIFSSYKLKISPCMDAKLSDICISTSAAPTYLPAHNFNNQDSKGNVHEFNLIDGGVCANNPTLVAMNEVTKQIIMQNPDFFPIKPMEYGRFLIISIGTGTAQNEEKFHAQMAAKWGLLDWLTQSGSNPLIDVFSQSSSDMVDFHLSAVTQALHSEDNYLRIQDDTLTGTDSSVDIAXKGELGEALP

SEQ ID NO: 143309 - protein, 87 aa, Glycine max
  unsure (1)..(87): unsure at all Xaa locations
  Clone ID: PAT_MRT3847_100421C.1.pep
XCLIXSXLXXXXLXSXXXXXXLXXXXTXFXXXPIMXXXXQXXXCXXXPXPTXCXYYXFXXRILXXXXTXYRXIXXXXXNSNXTXXHE

SEQ ID NO: 143310 - protein, 52 aa, Glycine max
  Clone ID: PAT_MRT3847_100422C.1.pep
LEYSSLTGLRTVSYFNRLQITLRIMDVDRLEHSCRSVSLYLMHQLFGAIARQ

SEQ ID NO: 143311 - protein, 58 aa, Glycine max
  unsure (1)..(58): unsure at all Xaa locations
  Clone ID: PAT_MRT3847_100423C.1.pep
LLEMIINFNLEQLIKLSMSFVIEGEFDTINDERERDEDALPGLHRNFFSXYFCEEEKK

SEQ ID NO: 143312 - protein, 129 aa, Glycine max
  Clone ID: PAT_MRT3847_100424C.1.pep
WLIEHLYNHGNKMTGSLTVLLCIGFGLSTSIDITHIQLRRAIRAPVPMSLMLHQGAHHSLLKHSYWQHIRQAPVTVAMPFWTAIVFFNRPRHRHKCMPNTYTPIWLVLTFKRVRRGDSLPMLIPSRQYK

SEQ ID NO: 143313 - protein, 109 aa, Glycine max
  unsure (1)..(109): unsure at all Xaa locations
  Clone ID: PAT_MRT3847_100425C.1.pep
RLALGLWVPSLASLCGLLFCASLLCLSPPSSLAAVPCPGRLRVLGFGVAFPCLSFLVRCARCCLGSSCGRGWVGGVGLLMGPGGRWWRPXFDRSRGSSRVFRVGPRPGV

SEQ ID NO: 143314 - protein, 46 aa, Glycine max
  unsure (1)..(46): unsure at all Xaa locations
  Clone ID: PAT_MRT3847_100426C.1.pep
LFGMESKNWVIYLEKRHDEYIIFFKSPCSFYKDNKLYILPPRIYXW

SEQ ID NO: 143315 - protein, 53 aa, Glycine max
  Clone ID: PAT_MRT3847_100427C.1.pep
WKIPPHGPPQRFNFFKRPTPSQGLSFFQLLVSPFLARMMTNLSRNWGSGDPFT

SEQ ID NO: 143316 - protein, 39 aa, Glycine max
  Clone ID: PAT_MRT3847_100428C.1.pep
CARTLGQRLRGSNYLGDCLCCCSEFPSSSSSSLHSIIVI

SEQ ID NO: 143317 - protein, 45 aa, Glycine max
  Clone ID: PAT_MRT3847_100429C.1.pep
PSCDYLLTSLLFCTTLFSLVLRVGWNNIVLIIILAHGTLSLRIKY

SEQ ID NO: 143318 - protein, 515 aa, Glycine max
  Clone ID: PAT_MRT3847_10042C.1.pep
MVAVTGGTVKGTPVVEKSEEHKSGGKVEKVGDKGLASVEEKKDAITNHQSEGSLKSARSTEGSLSNLESEAVVNDGCISNSKGNDLHSVQNQSQSQSLSNIAKTFIGNEMFDGKTVNVVDGLKLYDDLFDSTEVANLVSLVNDLRVSGKKGQLQGSQAYIVSRRPMKGHGREMIQLGVRIADAPAEGENMTGASKDMNVESIPSLFQDIIERMVSSQVMTVKPDCCIVDFYNEGDHSQPHSWPSWYGRPVYVLFLTECEMTFGRVIASEHPGDYRGSIKLSLVPGSLLVMQGKSSDFAKHALPSTRKQRILVTFTKSQPRKSLSSDAQQLASAVASSHWGPPPSRSPNHVRHHVGPKHYATLPTTGVLPAPPIRPQMAAPVGMQPLFVAAPVVPPMPFSAPVPIPAGSTGWTAAPPPRHPPPRVPAPGTGVFLPPSGSGNSSQQLPASTLAEVNPSTETPTMPEKENGKINHNSTSASPKGKVQKQECNGHADGTQVEPALETRLDSNDKAAPSH

SEQ ID NO: 143319 - protein, 56 aa, Glycine max
  Clone ID: PAT_MRT3847_100430C.1.pep
CYNWFRFYIQLLHPGGKQFFTEKLWGVLHNQNLKPFGGKIFTQELNPSEHPAHHQI

SEQ ID NO: 143320 - protein, 82 aa, Glycine max
  Clone ID: PAT_MRT3847_100431C.1.pep
QIIKYIKCGDSGNICLCFHIYIYVIFLFYFPLSVSAGYEFDYVFDWTILKYQQAQKNRVQSRISTVPGTSSSPAMPMDVDNQ

SEQ ID NO: 143321 - protein, 231 aa, Glycine max
  Clone ID: PAT_MRT3847_100432C.1.pep
ALESWIEKEIEADFETVSTTPVLKTPSPMEKQAANLYTRKIFSKFQDELVETFVYTANRIEGDGPNSTFRVAKFEDDQKAYMVTLNHSELKANCSCQMFEYAGILCKHILTVFTVTNVLTLPPHYILKRWTRNAKNSAGLDEHTGESHAQESLTARYGNLCKEAIRYAEEGSVTVETYNAAISGLREGVKKVANVKKSVAKVTPPNNQASGTAYDDRKTTPTLDTTPLLWP

SEQ ID NO: 143322 - protein, 82 aa, Glycine max
  Clone ID: PAT_MRT3847_100433C.1.pep
MAAPQIPEKQWAQVFEKTAGPIEYKQIPVQKPGPDEVLVNVKFSGVCHTDLHAWQGDWPLDTKLPLVGGHEGADAADAPYRP

SEQ ID NO: 143323 - protein, 67 aa, Glycine max
  Clone ID: PAT_MRT3847_100434C.1.pep
LFGFSFLIPFLAFSRCFFSWEGPLDFFFSFSRQFYLFLNSLFSSFFIALPFSRYFCTHTISLLIFFY

SEQ ID NO: 143324 - protein, 105 aa, Glycine max
  Clone ID: PAT_MRT3847_100435C.1.pep
FFVFFFFFFFFFFFVFILWGVVLFQTHQERREFSAPKEDKTRSRGKKNAFSGAHAKRGKPTIHGKKGVDGKKKRIRALPQRLEIETFLAFFVGDTQNGWAHSPLL

SEQ ID NO: 143325 - protein, 68 aa, Glycine max
  unsure (1)..(68): unsure at all Xaa locations
  Clone ID: PAT_MRT3847_100436C.1.pep
PSLAGKAVNQGTSSPGLGTVSITKTVTTQVSSXSPRYRPDRLKYLGPFSGEPPSYLSREFSWDYGWDT

SEQ ID NO: 143326 - protein, 90 aa, Glycine max
  Clone ID: PAT_MRT3847_100437C.1.pep
GNLGHRILPPARWEWHFEASNGVIPPDEANQYRVPLVGQIAILMIRKETADEHVDNILHSDLEAFTPHPRYGVSFYWLFHHARWPICRIY

SEQ ID NO: 143327 - protein, 64 aa, Glycine max
  Clone ID: PAT_MRT3847_100438C.1.pep
KIEELHREVFLPRDAVKGTEGIASRAAVLETEVARVHHDTVSEMTAADEARADADELRKAFGEK

SEQ ID NO: 143328 - protein, 80 aa, Glycine max
  Clone ID: PAT_MRT3847_100439C.1.pep
TAARRRQKGNREEFVHRSCHLHESFTNLGTETILHAIFNFMLKSTISCSICHVWSHLEGYRLIPLVKVILEGDSKNYREE

SEQ ID NO: 143329 - protein, 107 aa, Glycine max
  Clone ID: PAT_MRT3847_10043C.1.pep
YMSTSISMRQISFTGLCTVSLMQNRSLLLIPHTQERFRRRPLAINGHVHPAGYAAKRACTHNKCCDCTSAAESARARTVTAIMHKDDDRIEMSYGSYAAATPREPTM

SEQ ID NO: 143330 - protein, 70 aa, Glycine max
  Clone ID: PAT_MRT3847_100440C.1.pep
RAYCTSGLGGLSLYSITYTYMKRIRVEPVTFGFMCTPKLGERDFKLGRPQALISKQVLLVHLSFSINSST

SEQ ID NO: 143331 - protein, 172 aa, Glycine max
  Clone ID: PAT_MRT3847_100441C.1.pep
PDSGSIAPPYDYGAGEIQHSKPLQPGLVYETNPVDYLNYLCYTGHNLTTVKVISGTVPDNFNCPKDSTSDFISNINYPSIAVNFTGKANVVVSRTVTNVAEEDETVYSAVVEAPKGVFVKVTPNKLQFTKSSKKLSYQVIFAPKASLRKDLFGSITWSNGKYIVRSPFVLTK

SEQ ID NO: 143332 - protein, 62 aa, Glycine max
  Clone ID: PAT_MRT3847_100442C.1.pep
SIFLGFPPPLNNVFGPFFYNQKTPFPFCPKKKKKKKKKKKKKKKKKKKKKKKKKKKKKKKKK

SEQ ID NO: 143333 - protein, 47 aa, Glycine max
  Clone ID: PAT_MRT3847_100443C.1.pep
NEYVKPKTTLFIVHIIQREKAFIWLSSHSNKKWIIHCLNTDILNQME

SEQ ID NO: 143334 - protein, 208 aa, Glycine max
  Clone ID: PAT_MRT3847_100444C.1.pep
PLMGLCLLWCGMSFYLPQFYDAAADETRPTPARLGSIAAAIYTFMAVYSPGEGPVPFTYSAEAFPLHLRDVGMSFATATCWGFNFILSLTWPALVAAFGEQGAFGWYAAWNFFGWVYCYFLLPETKNLTLEELDTVFDVGNRQFAGYYSKKLPWYLRKNVLRKRVDPFPQLFDLHDDPIPEGAIRGGADKAFGEKRAIPPDVGAVNGV

SEQ ID NO: 143335 - protein, 90 aa, Glycine max
  unsure (1)..(90): unsure at all Xaa locations
  Clone ID: PAT_MRT3847_100445C.1.pep
PNEERGGGEYIQSWAGMPHRNNPGPLPLVVTLNCVEGCALXFEXLXGVATLXHVPLXCLSDGKIESAGAGLLHSLAYLPRAGQRXXXPYH

SEQ ID NO: 143336 - protein, 77 aa, Glycine max
  unsure (1)..(77): unsure at all Xaa locations
  Clone ID: PAT_MRT3847_100446C.1.pep
SLQAXRKXLQEELTQXASAKXELEVARNXIKELQRQIQLEANQTKGQLLLLKQQVSTLLVKXEEAARXXAEVEKKLX

SEQ ID NO: 143337 - protein, 74 aa, Glycine max
  Clone ID: PAT_MRT3847_100447C.1.pep
RAFFGVQMARQFGPNWRSLNPVENNRRCPSVSVPPNKGRGGAGHGSRRHAQSLRLTFQFFPEPGSFSIFNSFGS

SEQ ID NO: 143338 - protein, 166 aa, Glycine max
  Clone ID: PAT_MRT3847_100448C.1.pep
QTHVKSTWVPAAKRRERHQQLAALQQQHQHPKRHHRDTTTTQLASAPQPIIGLELGQFPPEVSTSAVFRCVRVSAVDASDEQCAYQTSVNIGGHVFKGFLYDQGPESSYTTSAAAEGSSGGEPQPLGLITGATTATSGNNPFDPSLYPAPLNAFMAGTQFFQHPRS

SEQ ID NO: 143339 - protein, 117 aa, Glycine max
  Clone ID: PAT_MRT3847_100449C.1.pep
MMAEGKEESKFSEESVKLFVGQVPKRMAEDEVLAMFKEFALVDEVNIIRDKASRASRGSCCFVICPSREEADKAVNACHNKKTLPGASSPLQVKYADGELERLEHKLFIGMLPKNIS

SEQ ID NO: 143340 - protein, 555 aa, Glycine max
  Clone ID: PAT_MRT3847_10044C.1.pep
LECCCAFIFVQLSAATANPRPERLNLAVYGGGAVCPTSLGDKPSSGRNLRCGRSVHRLRRVMDEAEEEQQRRRLKLEEALEIQSLRRIISAYLNYPDAAEEDVRRYERSYRKLPPSHKALLSHYSRKFQRLRWCISMNTHFIFGMLQAFEPPLDMSQDVDFSEDPHPESTQKDHLVSEGISACSCESVPVRITCSVSDQHRCVEGGNHTCISQAQMHSNEEVDIESCHQSNTGSHSPSMIHPKETSEYCGSPIADSNGNVPVTSSQQQWLDPSLKLNVPLVDVDKVRCIIRNIVRDWAAEGKKERDQCYNPILDELNMLFPNRSKDSPPACLVPGAGLGRLALEISCLGFISQGNEFSYYMMICSSFILNHSQTAGEWTIYPWIHSNCNSLSDSDQLRPVSIPDMHPASAGITEGFSMCGGDFVEVYSDSSQVGAWDAVVTCFFIDTAHNIVEYIEIISKILKEGGVWINLGPLLYHFADMYGQDDEMSIELSLEDVKRVALHYGFELEKERTIETTYTANSRSMMQNRYFSAFWTMRKKICCSAAASALRMRFN

SEQ ID NO: 143341 - protein, 216 aa, Glycine max
  Clone ID: PAT_MRT3847_100450C.1.pep
MSIFALRRITVAPAFIISTCSLRAVKTMVPVSSPMRHSAMTVGRACVVIESYREECVCVIIGISSNQSISMASSNSTQQEGNKPAKRKPVFTKVDQLKPGTNGHTLVAKVLSSDTVVHKPRPSSAHNLKPTVIAECLIGDDTGTIVFTARNEQVDMMKAGATQILRNAKIDMFKGSMRMAVDKWGRVEVTDPADFEVKEDNNLSLVEYELVNVVEE

SEQ ID NO: 143342 - protein, 47 aa, Glycine max
  Clone ID: PAT_MRT3847_100451C.1.pep
QCTIILIHNQYFYTATRVIPDIILHTCDRQRRNTRNSTQKKGINRLE

SEQ ID NO: 143343 - protein, 63 aa, Glycine max
  Clone ID: PAT_MRT3847_100452C.1.pep
TKRRHFFFCFMHRTFFYLSEEHKPGFFVFSIGRQEGWAYEPFAIVTEKVGHIPYELLINLNKR

SEQ ID NO: 143344 - protein, 239 aa, Glycine max
  Clone ID: PAT_MRT3847_100453C.1.pep
MARALTHHLSLILFLIVAVAGDATLLRNRHHGSRPSMLLPLYLSAPNSSTSALDPRRQLTGSESKRHPNARMRLHDDLLLNGYYTTRLWIGTPPQMFALIVDTGSTVTYVPCSTCEQCGRHQDPKFQPESSSTYQPVKCTIDCNCDSDRMQCVYERQYAEMSTSSGVLGEDLISFGNQSELAPQRAVFGCENVETGDLYSQHADGIMGLGRGDLSIMDQLVDKNVISDSFSLCYGGMDV

SEQ ID NO: 143345 - protein, 92 aa, Glycine max
  Clone ID: PAT_MRT3847_100454C.1.pep
AKNDRKIHFRNHYHSYHYNHFGLPRPTAPTDTAFSKLIHAGCCYKIRVSFHCLYLFSKINYQPKKQDDSHIIIQACACPFILYINFILYRYH

SEQ ID NO: 143346 - protein, 120 aa, Glycine max
  Clone ID: PAT_MRT3847_100455C.1.pep
LGIVDENMLILEEQLKCGRSVSERFCQFMTVWNISIDCVSLMREKGQTKKVAVSVFPMDTILFVCVSKLFQAVFVEEIYVFIFYSLRVYDNSYIFSISCKRHFFYANVIFIIIKKKKKNS

SEQ ID NO: 143347 - protein, 35 aa, Glycine max
  Clone ID: PAT_MRT3847_100456C.1.pep
MWFVYVCDEEEKELGRQQAPGSCPYCGAKVEAMDV

SEQ ID NO: 143348 - protein, 84 aa, Glycine max
  Clone ID: PAT_MRT3847_100457C.1.pep
VLVYMPSGQLAKDVEKMSDEAAVNFAFMQLKKILPDASSPVTILILLLISFTFSRARKMNAFITKTLSKIRRPLYNLALLQFLS

SEQ ID NO: 143349 - protein, 60 aa, Glycine max
  Clone ID: PAT_MRT3847_100458C.1.pep
LVESIILWKGIQQRIITHAEYRPSVCFNFLISYPNVLFFYLLVHISVAASTFSRYIDEPS

SEQ ID NO: 143350 - protein, 43 aa, Glycine max
  Clone ID: PAT_MRT3847_100459C.1.pep
ALPRWSVVEVFMIVGLVVAHSTLCNGHMGTRCRSRNSRPMMNS

SEQ ID NO: 143351 - protein, 198 aa, Glycine max
  unsure (1)..(198): unsure at all Xaa locations
  Clone ID: PAT_MRT3847_10045C.1.pep
PTRPICSSFILNHSQTAGEWTIYPWIHSNCNSLSDSDQLRPVSIPDIHPASAGITERVFPWCGGXDIVEVSSDSSQIGAWDAVVTCFFIDTAHNIVEYIEIISKILKDGGVNRYHVWINLGPLLYHFADMYGQDDEMSIELSLEDVKRVAFHYGFEFENERTIETTYTANSRSMMQNRYFAAFWTMRKKSAAVQQQVP

SEQ ID NO: 143352 - protein, 173 aa, Glycine max
  unsure (1)..(173): unsure at all Xaa locations
  Clone ID: PAT_MRT3847_100460C.1.pep
SAPTLLDTQGPYHTYPSLSHVLWRQSVTLYKKINLEETELRLSLPLRGNDTLKNTSSTGKKVFSDTAVDMKHNLSXTSYNAYCDLTKEKNTTAGGPSDNDPXKPPAKAHAAGWPPLRPFRKNIVHRSHSNDGEXSATSSICNANTGAPIENVSMHGAPYIRKVDWKTYKSYQE

SEQ ID NO: 143353 - protein, 107 aa, Glycine max
  unsure (1)..(107): unsure at all Xaa locations
  Clone ID: PAT_MRT3847_100461C.1.pep
PGLDDAPLAKEVEFLFWKGGVPCLEFELGPGFVFREPHGSPGFYDGRSWALWKLPLFGCRDASPVLEGLPEAXAASPPGFLRFLGFAPVSPVPGLRFFAFKPPGFLV

SEQ ID NO: 143354 - protein, 152 aa, Glycine max
  Clone ID: PAT_MRT3847_100462C.1.pep
MHGDRVAVFARPGPPTHSGPANPRTSSEQPESDDNVQAMESDDNVQAMESDDNEQAAESDDNGQAVEYDQGNWEIGFNGAPSRWSRDLVGMSDDDVEASEDDDDNDNVIGIENNGEEDSEADAMSEEGSDGTANRIVNEESSESDVSEDSSD

SEQ ID NO: 143355 - protein, 121 aa, Glycine max
  unsure (1)..(121): unsure at all Xaa locations
  Clone ID: PAT_MRT3847_100463C.1.pep
KNTHPTLNAPEGMAHTPMEDLEVGDPHTIDGIPSDANTMLEVLXIGNTVMNGYPKDLKXXQETFKGRXFYTGDLGVKHTDGYIELKDRSKDIIISCGENISTIALEGVIFRYTADFEATSG

SEQ ID NO: 143356 - protein, 87 aa, Glycine max
  Clone ID: PAT_MRT3847_100464C.1.pep
VSLKDAANSTDESVFHPLPTLFRLLGLNPFKKAELTPGDFYSNKRPLCQRVPLPRTKSEHPSQNGQENDNEDSISEIDVENIVGVGS

SEQ ID NO: 143357 - protein, 42 aa, Glycine max
  Clone ID: PAT_MRT3847_100465C.1.pep
VLVAIIKNDNNSLTQVIKFRIGRTAKITPALKKTSSKTSKIG

SEQ ID NO: 143358 - protein, 79 aa, Glycine max
  Clone ID: PAT_MRT3847_100466C.1.pep
ISSASSKARCSSSLAGRALKLGPSSPEVGRVSMRKTVTKQAFFGSPWFGPDRVKYLGPFFGEPPSYLTGEFPGDYCWDT

SEQ ID NO: 143359 - protein, 63 aa, Glycine max
  Clone ID: PAT_MRT3847_100467C.1.pep
RGQKAFGTSPTVKFVVDGAEAGSLSACGPPSFLKVYEAGHLVPMDQPKAALQMLKNWMGGSLT

SEQ ID NO: 143360 - protein, 92 aa, Glycine max
  unsure (1)..(92): unsure at all Xaa locations
  Clone ID: PAT_MRT3847_100468C.1.pep
XRXXXGYIXGIVKDIIHDPGRGSPLAXXXFRXPYRFKXXTELFIAXXGIHTXQFVYXXKXAQLNICNXXXXGXXPXGTIVCCLEEXPADRAS

SEQ ID NO: 143361 - protein, 72 aa, Glycine max
  unsure (1)..(72): unsure at all Xaa locations
  Clone ID: PAT_MRT3847_100469C.1.pep
XLFFFFFFFFWNPLSNTTTHHSLYIFSLDPTHHMATFLFLITNLTIIEITCNPNYKKPIPNPPKSYHNKRKW

SEQ ID NO: 143362 - protein, 60 aa, Glycine max
  Clone ID: PAT_MRT3847_10046C.1.pep
HFSLLRLRASFYLFSKKLIIPCYLLERAGKKKRSFFFQLNKHVMFCVNSVFSWRIARKNL

SEQ ID NO: 143363 - protein, 397 aa, Glycine max
  Clone ID: PAT_MRT3847_100470C.1.pep
MLMIIDSPELEVHCCRAADPTFAEVSVVFTVHTQMELKLLLITVLMMVSLSATAAADYIRPQPRKTFHLPWHSKPSSYPQQVHISLAGEQHMRVTWITDDNSAPSIVEYGTSPGRYDSVAEGETTSYSYLLYSSGKIHHTVIGPLEHNSVYYYRCGGQGPQFQLRTPPAQLPITFAVAGDLGQTGWTKSTLDHIDQCKYNVHLLPGDLSYADYIQHRWDSFGRLVQPLASARPWMVTQGNHEVESIPLLKDGLLSYNSRWKMPFEESGSNSNLYYSFEVAGVHIIMLGSYADYDEYSEQYGWLKEDLSKVDRERTPWLIVLFHVPWYNSNTAHQGEGADMMASMEPLLYAASADLVLAGHVHAYERSKRVYNKRLDPCGSVHITIGDGGNKEGLAPK

SEQ ID NO: 143364 - protein, 84 aa, Glycine max
  unsure (1)..(84): unsure at all Xaa locations
  Clone ID: PAT_MRT3847_100471C.1.pep
FEKKKKKKXMLRSRFLWFTFGFASTYAVLSQVVLKDLMLERHALTSHMERDFRILEDRLSNIEESSSSVPLPIDQVEGVSGPAK

SEQ ID NO: 143365 - protein, 161 aa, Glycine max
  unsure (1)..(161): unsure at all Xaa locations
  Clone ID: PAT_MRT3847_100472C.1.pep
MFVSSPMESGGPPVQSYPVFREKFTTYYACPSSRWRGFQALHPGRGMYHDVRRRLPYYWSDITAAFTYRTVASTVRMYFVKQFPSPSSCPPTVRPLKPSSLLSAIAYTLDMFRRTGNCYGINESLFSSALAATVFSVLAXQPLTIVGVTGLISLFNYTMYD

SEQ ID NO: 143366 - protein, 42 aa, Glycine max
  Clone ID: PAT_MRT3847_100473C.1.pep
KSFSLGNINCFGIKILIRDLHVGVIQLLKPGWSNFKIRSLFN

SEQ ID NO: 143367 - protein, 140 aa, Glycine max
  Clone ID: PAT_MRT3847_100474C.1.pep
CTLEEGPELNLITCLDAGSSSDNANSSSETTTTTTTNPLGNSDATEPRVFSCNYCHRKFYSSQALGGHQNAHKRERSIAKRGHRFGSQIMAFGLPLLHHNNNNNNNNRFASMASLPLYHSNRGTLGIQAHSLIQKPSSSS

SEQ ID NO: 143368 - protein, 103 aa, Glycine max
  Clone ID: PAT_MRT3847_100475C.1.pep
IQNWEWGQMGAYVLTPGQGGACGGSPASGVSSDPLSFPGFGLRHNQQKWGVPSNSDFGIRAEAPFKEFNQASQTQAPVPCDSNNESEIPGQGNCALSGSSQTN

SEQ ID NO: 143369 - protein, 101 aa, Glycine max
  unsure (1)..(101): unsure at all Xaa locations
  Clone ID: PAT_MRT3847_100476C.1.pep
ALGPPRSIIPSIRVLSRICCHSLSCDPGFATACQEQCPVSLSRGLCTALVWGPWSSLWGKSSQICDPGESAEXVVKGTXCFWGACGVLTFGLEQRGPISEL

SEQ ID NO: 143370 - protein, 31 aa, Glycine max
  Clone ID: PAT_MRT3847_100477C.1.pep
IQFVFPHNCYKTVNRQEDVNDVWLRILMLKT

SEQ ID NO: 143371 - protein, 60 aa, Glycine max
  Clone ID: PAT_MRT3847_100478C.1.pep
NSHGSDEVRKFARYTPISIFVIGGCAFDTCITLYGQPLCLIYAMSLAKARIKTCYFSLNS

SEQ ID NO: 143372 - protein, 60 aa, Glycine max
  unsure (1)..(60): unsure at all Xaa locations
  Clone ID: PAT_MRT3847_100479C.1.pep
RAXRCQTCTYDNXIGSLRVCEMCXTIRVVNGVSSFQRSSRSDGLPLDELRRRRIDRFGGR

SEQ ID NO: 143373 - protein, 147 aa, Glycine max
  Clone ID: PAT_MRT3847_10047C.1.pep
MATTAALCGTMMSSSFLRRKAVVTSLKAFPNANAVFGVKGGRGGGVTAMASFKVKLITPEGEKEFECPDDVYILDQAEEEGLELPYSCRAGSCSVCAGKVVSGKVDNSDATFLEDEQLEAGFTLTCVAYPTSDVVIETHKEEDLSAA

SEQ ID NO: 143374 - protein, 97 aa, Glycine max
  Clone ID: PAT_MRT3847_100480C.1.pep
STGYPGINVFTVTGPTGSVNTRRVGVSTRSGLRVLTRYPGSSVRVGFGLIIGLIAFHSLLSAELSHQEMKKLPLVIFMSSPLLSIIIREVTSMHVRT

SEQ ID NO: 143375 - protein, 37 aa, Glycine max
  Clone ID: PAT_MRT3847_100481C.1.pep
TLLLEVRGFYFGGGKDFRNSSCKLLNHPPIFVKTFSG

SEQ ID NO: 143376 - protein, 86 aa, Glycine max
  unsure (1)..(86): unsure at all Xaa locations
  Clone ID: PAT_MRT3847_100482C.1.pep
IYFFAYEKDVVFNCKVLAAANPANXNALIMKEIATSISEKKNSXMTTLKYNRALSQTSKRQTDRVSQIKNVMIWGDYXSTKYPDDN

SEQ ID NO: 143377 - protein, 87 aa, Glycine max
  Clone ID: PAT_MRT3847_100483C.1.pep
PPPKDLIWSPKEALTDLKGVSPPCLFVKFYWASMAMGIYENFFCLGWPWGFFYFFLIKVLKNCFFTQTHGFSFFFFCCSPPFFFFPL

SEQ ID NO: 143378 - protein, 92 aa, Glycine max
  unsure (1)..(92): unsure at all Xaa locations
  Clone ID: PAT_MRT3847_100484C.1.pep
TSWAACAGSVEKASTRLPGIREGVGDVLDSRAHVIFYPCFVNVETILEAVXDAVFEAEXLTDDNEYGQVCRTQIXGMSCSSCSCTLESRVQA

SEQ ID NO: 143379 - protein, 63 aa, Glycine max
  unsure (1)..(63): unsure at all Xaa locations
  Clone ID: PAT_MRT3847_100485C.1.pep
CKVKRASSSCEGSPYHPCNAVEKLNNFVRRAEISGXSIRRSPYHCKLVMYGSKMTFLETHNVL

SEQ ID NO: 143380 - protein, 59 aa, Glycine max
  Clone ID: PAT_MRT3847_100486C.1.pep
FFPARPHIVSCLNIVKAGVYNVQTFLSERINPSKNSLISINLSRGKLCVHWFSDRSHYG

SEQ ID NO: 143381 - protein, 79 aa, Glycine max
  unsure (1)..(79): unsure at all Xaa locations
  Clone ID: PAT_MRT3847_100487C.1.pep
IHSCLLYEEVNLTVFFYKMNQYFYCNLTLFRVCLLSSALTYIVVHYGSCTICRIFTSVLIRYIGWTRSSSYSTSLLXYA

SEQ ID NO: 143382 - protein, 165 aa, Glycine max
  Clone ID: PAT_MRT3847_100488C.1.pep
RKVLLKNVLDYLKADTYMYAPLLSPPTSDFPSPNAFPSSAKGVEYKKPVTEKQWFGKQVGKYLKYDGYMYDPLLRLPHSSLEPLQDCGMMRMDDSARTLRMKVNQRTNHLGNANQSSESHLPQTDLSDQHIGGHTETVKHTVYQSCRSTSATRIVTLNSQPRAHS

SEQ ID NO: 143383 - protein, 48 aa, Glycine max
  Clone ID: PAT_MRT3847_100489C.1.pep
RLKRSFDLGLKVTSRLYHVHRMCRWWNSTHTSREEACSVVDCNRNLIS

SEQ ID NO: 143384 - protein, 102 aa, Glycine max
  Clone ID: PAT_MRT3847_10048C.1.pep
VADAWADAWATHAGEGLIMHTSWTSHGARYRRQRILESRDLVRWERNRNCHRDGFVRYGKGNYCNTGYGKEATWCHIGFKWIVKRQNACVYQNCTTDSSRGS

SEQ ID NO: 143385 - protein, 57 aa, Glycine max
  Clone ID: PAT_MRT3847_100490C.1.pep
NTKSFSIYYLMGLFNVFTLGAPKKKTGAPRRKNGHREEKKQSKDYVPSFISNQNQFN

SEQ ID NO: 143386 - protein, 129 aa, Glycine max
  Clone ID: PAT_MRT3847_100491C.1.pep
RYPPPPPFTKRFLGCKGFHQAGPFAKRASRNFRVPRFPLLVLCILPPSVWGSTPPPFQERGLFLPPTHGNAFIQVHGGCQSCLPFFLVKKFKKFVGIWGPLVTVRLVIFIQQCFFFRRNKVRTNSKKQK

SEQ ID NO: 143387 - protein, 79 aa, Glycine max
  Clone ID: PAT_MRT3847_100492C.1.pep
IDHRRGNATRKNQEHSRRKQRQDPILNRYEKDINENIPQKANDQDDADDNHHTDTTMHEKNQTHKDERRKTQRRLKRRT

SEQ ID NO: 143388 - protein, 40 aa, Glycine max
  Clone ID: PAT_MRT3847_100493C.1.pep
SLLLILGARLSWHGLNPVQNCFFSLTNVYMKNRAHVMITL

SEQ ID NO: 143389 - protein, 304 aa, Glycine max
  unsure (1)..(304): unsure at all Xaa locations
  Clone ID: PAT_MRT3847_100494C.1.pep
MMYNDQQHQHQQHQYQQQQQQQQQPFHQPPGPEFHRGPPPPSHPPPMMRQGSASSTNLAPEFHHPGPGGPPPPHYDAHSDSHGAKRIRKLTQRKAVDYTSTVVRYMQIRMSQRDSRDRTVLQPTPAAAIDMLAVGTDNPSTSXKFHTSLNKNRCPINRVLWTPTGRRLITGSQTGEFTLWNGQSFNFEMILQAHDQAIRSMVWSHNDNWMVSGDDGGAIKYWQNNMNNVKANKSAHKESVRDLSFCRTDLKFCSCSDDTTVKVWDFARCQEECSLSGHGWDVKSVDWHPTKSLLVSGGKDNLVK

SEQ ID NO: 143390 - protein, 52 aa, Glycine max
  Clone ID: PAT_MRT3847_100495C.1.pep
IYQALYLAVLSVGPSTSCLRFLVMPSELCHDGLALQKNVPFYLKAKFTISDN

SEQ ID NO: 143391 - protein, 386 aa, Glycine max
  unsure (1)..(386): unsure at all Xaa locations
  Clone ID: PAT_MRT3847_100496C.1.pep
MAGQSRKWMILVATIWIQAFTGTNFDFSEYSSSLKSHLNISQLQLNYLATASDMGKVFGWSSGLALMYLPLSLVLFIASSIGFIAYGLQWLAIKNLITLPYYLFFLLCLLSGCSICWFNTVCFVLCIRNFPVNRPLALSLTVSFNGVSAALYTLAANSIDPSSDALYLLLNALVPLLTSLAALVPILLQPPLDSLNRSPEASRRNSVIFLVLNFLAIFTGIYLLLFGSSTSDESTSRLYFGGAILLLISPLCIPGTIYARDWFHHAIHSSFRMEGSGFILVHVDDLELHKELLTCQNSALSLSNGDSHGLLSENGSIYVISQSAKSSDLCCDKMFGQDQLAMLGEEHTAAVVGPRLDFWLYYGTYFCXGTIGLXTAIXLGQIAQSL

SEQ ID NO: 143392 - protein, 125 aa, Glycine max
  Clone ID: PAT_MRT3847_100497C.1.pep
EKWRARLPMAGFTPSPMSPNVRKPIRKLFIKQSCAKFKIKEEMGGFHFGWETKNLIVVSAWKCPIQIFLWHETHCSVDVEFVGLFSWNLLGLPPGQTQMYTNGHLMLKQTFMGRATQNSYQCLGL

SEQ ID NO: 143393 - protein, 46 aa, Glycine max
  Clone ID: PAT_MRT3847_100498C.1.pep
CTQDDESLTVLSCKHLYHPECINNWLKINKVCPVCSTEVSASGSNL

SEQ ID NO: 143394 - protein, 344 aa, Glycine max
  Clone ID: PAT_MRT3847_100499C.1.pep
MENDTAAAVNNNTTATATAKAGSGGVKSNNHNLEEEHSNLNGEEQMAEQVEAEEEEEEEEDREADDGEGEETGSAVPNPRQPSRTPFTNLSQVDADLALARTLQEQERAYMMLRMNNDGSDYGSWEGGSYLHDEGDDFDDLHDGTDVDEDEDDDDDEDDDDEEDEDEDAFDVHAHASAGEHDNPTIEFDPDVFSSDEAYARALQEAEEREMAARLLAFAGINDREEEDIEEHGANSQDAWEDVDPDELSYEELLALSEVVGTESRGLSTDTIACLPSVNYKTGSDQHGSHDSCVICRVDYEDGESLTVLSCKHLYHPECINNWLKINKVCPVCSTEVSASGSNL

SEQ ID NO: 143395 - protein, 97 aa, Glycine max
  Clone ID: PAT_MRT3847_10049C.1.pep
CFYCFFLPPHQRPHHLPPLRPHPYDPHQPDILLLGPPCPLIKISPSGVSPFLPHYSHFYCFFLPPHQRPHHLPPLRPHPYDPHQPDILLLGPPCPHH

SEQ ID NO: 143396 - protein, 111 aa, Glycine max
  Clone ID: PAT_MRT3847_1004C.1.pep
VSDAVHKREDDPERRMEHQRILGKVTESEEVKRRLGGESVVTEKKYQEMYVNSPGKGVVDKLKGVVGTCFTNPAENQSSQDSSMNYEAGRAEVEQVNQGAAGERRLQESSN

SEQ ID NO: 143397 - protein, 207 aa, Glycine max
  Clone ID: PAT_MRT3847_100500C.1.pep
GTVISIAGALIMTLYKGLPMTSDVMPNNVFLSSQQSKWLLGGFLLAVGCFFCSVSLVIQTWTIKDYPEELMLITISTSFSVILSFIVAFIAEENPKAWTLKLDMELVCIFYSAIFVMSTRNVVNVWACRKKGPVYVAMFSPLGIVIALAMGIVFLGDALYLGSLIGAAIIAIGFYAVTWGQAQEETMGYEKHGTCSIILSPFSETPL

SEQ ID NO: 143398 - protein, 65 aa, Glycine max
  Clone ID: PAT_MRT3847_100501C.1.pep
LGYRLHIDHDGPFRELIILYHSGRSTRSNLTYSFMPCLCSSIVSSNFISLALILKFLAWDNPAIT

SEQ ID NO: 143399 - protein, 170 aa, Glycine max
  Clone ID: PAT_MRT3847_100502C.1.pep
HPPKLKLGDGGHVRNLTPSRHDRQWNLLDGHVFEGTTIERWALISFGGTPEQKSNVPRFINQLCQRCEQLGIFLNKNTVISPQFESIQILNNVTLLESKLKRIQRTASNNLQLLICIMERKHKGYADLKRIAETSVGVMSQCLLYPNLNKLSSQFLANLVLKINAKSGGC

SEQ ID NO: 143400 - protein, 105 aa, Glycine max
  Clone ID: PAT_MRT3847_100503C.1.pep
RLELEPASNSFYCIVIFYQHVPNVLPVIILFASLQAKRNRGRTPTPGKYCGPRDKRGQGGRRSHSYSPKRWQDRGYHSRDRRGRSRSPYHRRVEDYSDTHRRQRD

SEQ ID NO: 143401 - protein, 77 aa, Glycine max
  Clone ID: PAT_MRT3847_100504C.1.pep
HASAHASVLDRERPPFFYAYAYAFIFNIISSSPISSSLTITSSQRGFTNYLFYFNFKIQIMYSCLIEQVKQITLSYL

SEQ ID NO: 143402 - protein, 107 aa, Glycine max
  unsure (1)..(107): unsure at all Xaa locations
  Clone ID: PAT_MRT3847_100505C.1.pep
MASLKVASLAAVLCMVVVSAPMAHAAITCGQVTSSLANSIGYLQKGGTPSXGCCNRVKSLNAFAKTTVDRQTAGNCLKYDPSQNSGFNANNANFIPXKCGVSIPYKI

SEQ ID NO: 143403 - protein, 122 aa, Glycine max
  unsure (1)..(122): unsure at all Xaa locations
  Clone ID: PAT_MRT3847_100506C.1.pep
ASSTQPTVWNQIATVGTPLNFDLNKHRFXVSFTMELFGGGILKDRTVHRITLYXNTTSMRTVIRVAVWKKSCLMDKRAMTGNAXTKRVIVPXLLRVCLTISNSTEHFDACQRTKSXPHSWEM

SEQ ID NO: 143404 - protein, 37 aa, Glycine max
  Clone ID: PAT_MRT3847_100507C.1.pep
REKMYQLRHNSNQIVIKHLPFIKHNSVFTILSFFPFT

SEQ ID NO: 143405 - protein, 121 aa, Glycine max
  unsure (1)..(121): unsure at all Xaa locations
  Clone ID: PAT_MRT3847_100508C.1.pep
LLRGSVASNSSADPAGGAAIFSSHVIIMNHPVLIVNGSAPVLDCHTSHIAVXFADLCAKIDRRSGKELGKEPPFLTNGDAGLVHMIPTKPMVVDSFSECPPLGRRAVRDMRXTVGVGVIRA

SEQ ID NO: 143406 - protein, 335 aa, Glycine max
  unsure (1)..(335): unsure at all Xaa locations
  Clone ID: PAT_MRT3847_100509C.1.pep
MAKDSADADSHHRRLGLLKDQVHLVKRKGSDRYEIAPIQDQLXSFEKGFFIVIRACQLLSQKNDGIILVGVAGPSGAGKTIFTEKILNFMPSIAIISMDNYNDASRIVDGNFDDPRLTDYDTLLQNLHNLKEGKPVQVPIYDFKSSSRTGYXHIKIINKFNPFTGFQSPTYILKSGRNVEVDKIKAVLAEDFKETTEQTYDIYLLPPGEDPETCQSYLRMRNKDGKYSLMFEEWVTDNPFVISPRITFEVSVRLLGGLMALGYTIATILKRNSHVFSDDRVCVKLDWLEQLNRHYVQVQGRDRLVLKYIGEQLGLEGSYIPRTYIEQIQIEKLVN

SEQ ID NO: 143407 - protein, 39 aa, Glycine max
  unsure (1)..(39): unsure at all Xaa locations
  Clone ID: PAT_MRT3847_10050C.1.pep
PGPRNIHPSITRSLEKLLINXELKLYLLFTLKNKVCCVY

SEQ ID NO: 143408 - protein, 118 aa, Glycine max
  Clone ID: PAT_MRT3847_100510C.1.pep
HSFPGFRVLKLSPLPRLVLCCIWPPFLFLSPPLRLLAPWSFPPHRLVSCFFAVFGPQVCFPWGPLFPWVFFGLRSWPVGPRFVSPGVPRPCLVAPLFWVFNRACFLLALPRPFIFLFY

SEQ ID NO: 143409 - protein, 127 aa, Glycine max
  unsure (1)..(127): unsure at all Xaa locations
  Clone ID: PAT_MRT3847_100512C.1.pep
KLGIPLRLGRTGICKNLDVASRVARSDGLDCITLDGDQVSKKGSMTGGFYDHRRSRLRFMNIIKQNADTIHIREEELEKVRFNLQEIDQKINEIVAEQQKIDAKCAHDXSVIEQLKQDIANANKQKL

SEQ ID NO: 143410 - protein, 57 aa, Glycine max
  Clone ID: PAT_MRT3847_100513C.1.pep
ECIIKKMDNKKMIYKFYNIITRENCQLYLKSIWFTKSKHTYKIRRLSKPTQQEKLKS

SEQ ID NO: 143411 - protein, 63 aa, Glycine max
  Clone ID: PAT_MRT3847_100514C.1.pep
RVRTKTGKNFCSQVIERHYFRMTLDFHIEQKLLEGVADIPCEKVEERIEGCVCHLFMCLYKGP

SEQ ID NO: 143412 - protein, 66 aa, Glycine max
  Clone ID: PAT_MRT3847_100515C.1.pep
TGARSTKFYRVKRKASFVFFQNKKEFFLFNIRTWSSNKIQKGCVGVFSKCLKKKKEGQNFYFKAFS

SEQ ID NO: 143413 - protein, 58 aa, Glycine max
  Clone ID: PAT_MRT3847_100516C.1.pep
SSTNSSSNSISHHHNNLFDRAHSNLGRDHSTPTNIHSIYTRYIPTITFISLTALLTFQ

SEQ ID NO: 143414 - protein, 421 aa, Glycine max
  Clone ID: PAT_MRT3847_100517C.1.pep
MTSSRERLVKAVKQFVEVRYKVFGDRYGQNIIDILDFPIKVVLSPFTLAFDIAGSAPRGFGVPELISKLSATSVFAIAALGTYDIAFELGRKVICQRNCNSCNGWRALHCTMCRGSGRVHYQVKNCNLNTGEKATAESVADAIANNRAELVHIPSSLDFQKPLPSKECPTCDGTGVMSCPECKHRLLHVRISADDIMEPPWQAYNVLKKIDYPYEHILHSMKDPSIAAFWLITFPQIMGGFTYDDDVKQKIWWQYKENMRYDQLRDVVAKRKPGWEYLQDALISIDPARARDDPVIVKNVPYYKAKKALETEVMKIDPPPRPPNWGELDLPLNASSWSEEDLKDPDKFYEMTVLLNAQREISDKILDAQWETKWRQDKLNEMLEAKVKPYIQDIDNAVLPEPILLKPQNQEKRQRRRWFFF

SEQ ID NO: 143415 - protein, 111 aa, Glycine max
  Clone ID: PAT_MRT3847_100518C.1.pep
MLMIFSIFGGRFVSSRYFFYCSGLCVCFIAYLDLFLLSLLWFEAAPTSGEFQEVEGETEERRRARLERHQRTKERAAKALAEKNQRDLQTQREQAERHVSSFLFFLFVDDW

SEQ ID NO: 143416 - protein, 47 aa, Glycine max
  unsure (1)..(47): unsure at all Xaa locations
  Clone ID: PAT_MRT3847_100519C.1.pep
RRLSIENCSAVKSDKSVNHEDRSGAKSPLLLPXSRRLSLXGGSKTIK

SEQ ID NO: 143417 - protein, 77 aa, Glycine max
  Clone ID: PAT_MRT3847_10051C.1.pep
KRQISSSPVEYSILPLYDLIISFSTELITCFFHKQGKCKLLYVCMLSCLPYGTPTRDINAKIKPWQIKKKSCHYNTD

SEQ ID NO: 143418 - protein, 117 aa, Glycine max
  Clone ID: PAT_MRT3847_100520C.1.pep
MEESQKHLQRNKWFDFDMELPSPFQLEQAVCSHGLFMMPPNHWDPLSKTLIRPLRSSPSSFLVSLSQHSQSLAVRVHATHALSPQQQNHITVPNSLCNRFFCFARFHSFASSAVAVF

SEQ ID NO: 143419 - protein, 164 aa, Glycine max
  unsure (1)..(164): unsure at all Xaa locations
  Clone ID: PAT_MRT3847_100521C.1.pep
FGSKDPWIVSASDDQTIRIWNWQSRTCISVLTGHNHYVMCASFHPKEDIVVSSSLDQTVRVWDIGSLKRKAGPAADDILRLSQMNTDLFGGVDAVVKYVLEGHDRGVNWAAFHPTLPLIVSXADDRLVKLWRMNDTKAWEVDTLRGHMNNASXVMFHAKQDIIV

SEQ ID NO: 143420 - protein, 54 aa, Glycine max
  Clone ID: PAT_MRT3847_100522C.1.pep
MSLATAEIKAKAEVYYGEELCQEKSKLLLKEVGLPNGLLPLKDIEECGYERDSG

SEQ ID NO: 143421 - protein, 66 aa, Glycine max
  Clone ID: PAT_MRT3847_100523C.1.pep
AGKYEKLHEYRIIQAISLGSVMVLFVRSPPLILLFGHSRPPPAPPLPPPQRRRTSYSDDGKPSLER

SEQ ID NO: 143422 - protein, 76 aa, Glycine max
  Clone ID: PAT_MRT3847_100524C.1.pep
GVEVCVALTRWERCIGYLTYTVPRVCVAIKYVRQGLYMIKYDMRVFLEKDSTWRNLATGPSSLKNTTSMFCMFHKL

SEQ ID NO: 143423 - protein, 393 aa, Glycine max
  Clone ID: PAT_MRT3847_100525C.1.pep
MNMNMNMNMNTKSRLITLWVVLYFCSITNSLAASKQCHFPAIFNFGDSNSDTGGLSAAFGQAGPPHGESYFHHPAGRYCDGRLIVDFLAKKLGLPYLSAFLDSVGSNYSHGANFATAGSTIRPQNTTLHQTGGFSPFSLDVQFNQFSDFQRRTQFFHNKGGVYKTLLPKAEDFSQALYTFDIGQNDLASGYFHNMSTDQVKAYVPDVLAQFKNVIKYVYNHGGRSFWVHNTGPVGCLPYIMDLHPVKPSLVDKAGCATPYNEVAKFFNSKLKEVVVQLRKELPLAAITYVDVYSVKYSLISQPKKHGFEEPLRACCGHGGKYNYNLHIGCGAKIKAHGKEILVGKPCKDPSVWVNWDGVHYTQAANKWVFDQIFDGSFSDPPIPLNMACHKHL

SEQ ID NO: 143424 - protein, 80 aa, Glycine max
  Clone ID: PAT_MRT3847_100526C.1.pep
QTACKSPGGKAPRKQLATKTVFKLAPGTGGVKKPPRFRPGTVVFRGFLKFPKSPELFFRKLPFQRFVKEIVQVFKTVFRF

SEQ ID NO: 143425 - protein, 46 aa, Glycine max
  unsure (1)..(46): unsure at all Xaa locations
  Clone ID: PAT_MRT3847_100527C.1.pep
EYLQEGICVGSMNXEVSYEEAIEWKVVDDDDSNHSLALVLMMWCFV

SEQ ID NO: 143426 - protein, 39 aa, Glycine max
  Clone ID: PAT_MRT3847_100528C.1.pep
VRALLVYLRICPHAHAQYSIHSYKGSFISIRRFFPVILL

SEQ ID NO: 143427 - protein, 416 aa, Glycine max
  unsure (1)..(416): unsure at all Xaa locations
  Clone ID: PAT_MRT3847_100529C.1.pep
LEGWPSGTSIRSVSTLSNNHNGSLGRRLLLRSHHSLRLHLIPSQSHHSPTTMAVLGGAASARIIPSVSLSTSSRSFFSLSSSSKLKCLRSSPRISHLFLNQQRAEVRVSSGGYGTVSAPKSVASDPDQLKSAREDIKELLNSKFCHPILIRLGWHDAGTYNKNIEEWPLMGGANGSLRFEVELKHGANAGLLNALKRRQPIKKKXTCVTYADLXFSWSSPTTMEEAGGPKIPMKYGRVDVSGPEQCPEEGRLPDAGPPSPADHLRQVFYRMGLNDKEIVALSGAHTLGRSRPDRSGWGKPETKYTKDGPGAPGGQSWTVQWLKFDNSYFKDIKEKRDEDLLVLPTDAALFEDPSFKVYAEKYAEDQEAFFKDYAEAHAKLSNLGAKFDPLEGIVIDDSPNAGGEKFVAAKYSTGKE

SEQ ID NO: 143428 - protein, 61 aa, Glycine max
  Clone ID: PAT_MRT3847_10052C.1.pep
AINRNNATLLSSFHMFRCPDYDHTDPLLRLISIITLYDYIDTIRVSIYSRSSSLVYILSRI

SEQ ID NO: 143429 - protein, 57 aa, Glycine max
  Clone ID: PAT_MRT3847_100530C.1.pep
KSWIALIRRKYHREHRLVHNNFGIGNAEVVPTPIGLHTGKRKRVRTGFGDTGNSERY

SEQ ID NO: 143430 - protein, 435 aa, Glycine max
  Clone ID: PAT_MRT3847_100531C.1.pep
MAERVSLPLPSQSQLSPTTTMALLGAASSSARIIPSVSLSSSSRSFFSLSSSSSKLQCLRSSPRISHLFLNQRRAEVRVSSGGYGTVSAPKSVASDPDQLKSAREDIKEFLNSKFCHPILIRLGWHDAGTYNKNIEEWPQRGGANGSLRFEIELKHGANAGLVNALKLLQPIKDKYSGVTYADLFQLAGATAVEEAGGPKIPMKYGRVDVSGPEQCPEEGRLPDAGPPSPADHLRQVFYHMGLNDKEIVALSGAHTLGRSRPDRSGWGKPETKYTKDGPGAPGGQSWTVQWLKFDNSYFKDIKEKKDEDLLVLPTDAALFEDPSFKVYAEKYAEDQEAFFKDYAEAHAKLSNLGAKFDPPEGIVIDDSPNAGAEKFVAAKYSTGKRELSDGMKQKIRAEYEAIGGSPDKPLQSNYFLNIIIIIAVLAFLTSLLGN

SEQ ID NO: 143431 - protein, 77 aa, Glycine max
  unsure (1)..(77): unsure at all Xaa locations
  Clone ID: PAT_MRT3847_100532C.1.pep
CSGASAXSXSXDSAXSAPXPNRSPXRACXLFNXXGXLRVFXXXRRXMXRTMXXXXQAXCXXRXRXNNQXRVCVXSVC

SEQ ID NO: 143432 - protein, 42 aa, Glycine max
  Clone ID: PAT_MRT3847_100533C.1.pep
PTHTRMSILPMMPRSIIMCGQQLHYHFVWEQQPGRCSWIIII

SEQ ID NO: 143433 - protein, 97 aa, Glycine max
  unsure (1)..(97): unsure at all Xaa locations
  Clone ID: PAT_MRT3847_100534C.1.pep
CFWWGCRVGEVVDALVNSVGRESVRXMQGLMFRXGPAVCEDAQACMEEVHQCLXGGMQPLGECEALVTSELGRVEDRLGRCXMRCYDEAIHSVELLI

SEQ ID NO: 143434 - protein, 128 aa, Glycine max
  Clone ID: PAT_MRT3847_100535C.1.pep
KTGYFYPYDPYFDCFVVFHPGFGNAASMHEWEETLPLLLETKVPIIATGYSPWDVQQDVDHLTKRYGNEMDMLLQPGENLFRSLRWDLNDLDPHDVTCSNWGVYAFRGKRYETAKKEEEVEVHSDRTA

SEQ ID NO: 143435 - protein, 82 aa, Glycine max
  Clone ID: PAT_MRT3847_100536C.1.pep
KCSNFKQLKQVHGKIIRYGLTYDQLLVRKLIQLSPSYGKMKYATLVFDQLNAPNVFTWNVMIRAYTIGGSPKMAFLLFKAML

SEQ ID NO: 143436 - protein, 80 aa, Glycine max
  Clone ID: PAT_MRT3847_100537C.1.pep
LYGCEKTTEGGALGDTYLLTPAGKGLDRCSFKPNEGSRAKLNSISTANTVSTPHELDRDHVLMYRDALTHNTVTMIALIS

SEQ ID NO: 143437 - protein, 92 aa, Glycine max
  unsure (1)..(92): unsure at all Xaa locations
  Clone ID: PAT_MRT3847_100538C.1.pep
PXFXFFXXXNRPINTEXPQTNFFFFLGNKTQWRKLLQSSISFFGDPISPREREIGFRGAHTGGGGFFFLGWPLLHGKETPNLILSLLPFFLD

SEQ ID NO: 143438 - protein, 161 aa, Glycine max
  Clone ID: PAT_MRT3847_100539C.1.pep
TTSFLHLSLGASRQSKILSAEAKDAADRICRRLQMGSKLSEIIESKEDACALFDLYKNEQYLLMDYKGKFCIVLKEGSSPEDMLKSLFHVNYLYWLERYMGFKPSNVASECRPGGRLEVSLDYAQREFSHVKHDGSDGGWVMDGLIARPLPVRIRIGDGTS

SEQ ID NO: 143439 - protein, 81 aa, Glycine max
  unsure (1)..(81): unsure at all Xaa locations
  Clone ID: PAT_MRT3847_10053C.1.pep
PKFALSGIPNXLPLGMPYGGKNLLAKKTIFRPPLKEFPSPPEVVYLKNYGHVDFLLSLQANQVFFDPKISFFKSPGKFRRG

SEQ ID NO: 143440 - protein, 76 aa, Glycine max
  Clone ID: PAT_MRT3847_100540C.1.pep
LSIIRNIFRCRLYSRLDLRESPVFRTKSVFDWSTTHLNTMQGSPVGFRPYGHYHLILNLNLPTPFVNRYSLSGRRG

SEQ ID NO: 143441 - protein, 52 aa, Glycine max
  Clone ID: PAT_MRT3847_100541C.1.pep
SYQINRACPEATPGTIILDAYSHTKSNIIHKSSGHISHTHPNTHTKDIHLIS

SEQ ID NO: 143442 - protein, 57 aa, Glycine max
  Clone ID: PAT_MRT3847_100542C.1.pep
NGIHKFRINITRQTWAYCANPLCHHGNEIPAYTSTFRHNPPPNDGIDDACIRSNLFP

SEQ ID NO: 143443 - protein, 79 aa, Glycine max
  Clone ID: PAT_MRT3847_100543C.1.pep
LKRHQPEAYREQNSVYQQRISRMEGDTLHGVCVGLDVVEMIMGFLFAAINEKHDCSARGHDDRRRKCLRDWKSVRLVCY

SEQ ID NO: 143444 - protein, 38 aa, Glycine max
  Clone ID: PAT_MRT3847_100544C.1.pep
AKNLVRVAKRSNMLLHPLVFSQAPNMKHGTVYSARRIR

SEQ ID NO: 143445 - protein, 118 aa, Glycine max
  unsure (1)..(118): unsure at all Xaa locations
  Clone ID: PAT_MRT3847_100545C.1.pep
PGLTALVTRGAYGIGKGLTLTLAHNGAFXTIRDFSEEKGRQAASTRXKINSHFHSKLRCFAGILVKCDASHAWYLAAASDKHFGTYGRLDICINSAGISRSVPFRDDQTDVTRTLKYT

SEQ ID NO: 143446 - protein, 94 aa, Glycine max
  Clone ID: PAT_MRT3847_100546C.1.pep
FHPPISPSIYTKTNTLSYSYHIPIISEKPKPPINYKLDSFDMELFGLFFHFQINIFSSDAMNVLFHFAFVHKVVMQSSESKRQKGKKVAFLNYQ

SEQ ID NO: 143447 - protein, 84 aa, Glycine max
  Clone ID: PAT_MRT3847_100547C.1.pep
SFLQPLLLLHFLDLKSQFFKLFPQLIMAENVDPIANNVIINNATLTNLLNPYYAHPNENPGVAIVAQVLNGGNYHSWSRDMLLA

SEQ ID NO: 143448 - protein, 366 aa, Glycine max
  unsure (1)..(366): unsure at all Xaa locations
  Clone ID: PAT_MRT3847_100548C.1.pep
MAAVSESEVVHSVWGFGKFHDKFNPFLSHAFLSTLEHSASAVRETGCIQHHIVAKANNTTILAVVPLYVKTHSYGXAYHSYGYNYYPKLQSCVPFAPVTVPRILLRNTSFKHQIFSAIKELTLTSQLSSLHVTFPSENECHKLTEKGFLPRIGMQYHWKNRNYKNLDDFLMDMKQSKRKNIRQECKKVTNIDMCRFFQQISAQNLIMKRLRGYLIKARHWDSFYTFYRNTTDNKWGTPHLTREFFHELGAKMGDNVLLVVAEEGDELVAGALNLIGGDTLFGRLWGCQPRSYYQAIEAAIELNLKTVEAGAQGEHKIQRXYLPVTTFSCHYLIDNNLYFSRNVCTAEVMNTLAIWFEDEWSMCLYC

SEQ ID NO: 143449 - protein, 74 aa, Glycine max
  Clone ID: PAT_MRT3847_100549C.1.pep
PSLLFGGLPFFFLFGCFYIQIPPFLHGQVSQHYLNSISYYIPLYPSESTQRFFILSYDSTDKFLRLITPSTIKH

SEQ ID NO: 143450 - protein, 84 aa, Glycine max
  Clone ID: PAT_MRT3847_10054C.1.pep
PYVATHYLTFIPVFKLSPTIFVCCSACSCSCVVPLLELFSLFHLMLYWLALLSNRLLFLHFNLLATLYLCPPPPPPPKKEDVIQ

SEQ ID NO: 143451 - protein, 180 aa, Glycine max
  Clone ID: PAT_MRT3847_100550C.1.pep
EGLLALTRVGSRRVVQISAGFMIFFSILGKFGAVFASIPAPIVAALYCLFFAYVGSAGLSFLQFCNLNSFRTKFILGFSIFMGFSIPQYFNEYTAFKGYGPVHTRARWFNDMINVPFQSEAFVAGMLALLLDVTLRKKDNQTRKDRGMHWWDRFRSFKTDTRSEEFYSLPFNLNKFFPSV

SEQ ID NO: 143452 - protein, 64 aa, Glycine max
  Clone ID: PAT_MRT3847_100551C.1.pep
KRTLFLQSAHCSFRHEIWSQNFLVAVCYLYKVMSSGTFLAWCKSINQDHPGLIVFKPLPFIWFE

SEQ ID NO: 143453 - protein, 610 aa, Glycine max
  Clone ID: PAT_MRT3847_100552C.1.pep
MENHIYASSYSPSTNYRSFRDPPADTMFLSHHLHHHRTDASSAAALRFPSSALSAVEAADIAPPGVTSRIASSSAAADDENFLSTWPPAAAAAPFALDLKRSSEALYHPTILGTIGQSEAWYSTNPLAKRPRYESASNMTIYPQRPGEKDCAHYMLTRTCKFGDSCKFDHPFWVPEGGIPDWKEVPIVTSETPPERPGEPDCPYFLKTQRCKFGSKCKFNHPKVSSENADVSSGLPERPSEPPCAFYMKTGKCRYGAACKFHHPKGDSCKFDHPVWVPEGGIPDWKEAPNVVTSETPPARPGEPDCPYFLKTQRCKFGSKCKFNHPKVSSENADVSSGLPERPSEPPCAFYMKTGKCRYGTACKFHHPKDIQIQLSDDLSQNVAQTQTNSMMGGATGDTQPIKSLISPSLQNSKGLPVRLGEVDYHPYMKTGTCKYGVSCRYNHPDRNAINPPIAGLGASILPSSAANLNIGLLNPAVSAYQAFEPRLSNPMVGIAETIYPQRPGQIECDFYMKTGECKFGERCKYHHPIDRSALSLSKQATVKLTPAGLPRREGDVICPYYLKTGTCKFGATCKFDHPPPGEVMEMAKSQGTSANGEEAEGDTSALEQL

SEQ ID NO: 143454 - protein, 66 aa, Glycine max
  unsure (1)..(66): unsure at all Xaa locations
  Clone ID: PAT_MRT3847_100553C.1.pep
XIHXXLAGGVVSPFSLSLPGSETRLIPPHPWFIRLMCMMTLYMRDMRKFIFVDNLSXNIEYHISAF

SEQ ID NO: 143455 - protein, 210 aa, Glycine max
  Clone ID: PAT_MRT3847_100554C.1.pep
ISCKYGVTCRYNHPDRNGMYNILILIVLTFSCFLNNYFALSFFDAAINPPIAGLGASIFPSSAANLNIGLLNPAVSVYQAFEPRLSNPMSQVGIADTIYPQRPGQIECDFYMKTGECKFGERCKYHHPIDRSAPSLSKQATVKLTPAGLPRREGAVICPYYLKTGTCKFGATCKFDHPPPGEVMEMAKSQGTSANGGEAEGDEIETSAQL

SEQ ID NO: 143456 - protein, 67 aa, Glycine max
  Clone ID: PAT_MRT3847_100555C.1.pep
PKNNTTHNNFKITHTQKEKNSLYYSLLLLQSCLSSFTVPIFILPSQAFDYSTTLPNNKSLDFLFPIT

SEQ ID NO: 143457 - protein, 119 aa, Glycine max
  Clone ID: PAT_MRT3847_100556C.1.pep
YYVVYFCIHMQLFVKRYDEKEIKYQSQAKNFFSTHAPFSFEYFLEKRKRLMTNERDPFCEHYGLALRNNTLELCLIIKIMACYLVILFSASNKHVGVLLNDAFSQQWCVYICPSVVFSQ

SEQ ID NO: 143458 - protein, 73 aa, Glycine max
  unsure (1)..(73): unsure at all Xaa locations
  Clone ID: PAT_MRT3847_100557C.1.pep
MSRRKVIDAMEENVTLGPCGRDGXHVCGVGYMCVYYXIDTFIHVCDLYERETLDRITSXMSAKAGRYESCPYS

SEQ ID NO: 143459 - protein, 54 aa, Glycine max
  Clone ID: PAT_MRT3847_100558C.1.pep
TVSRIPESTHAVRPHTRGRVLVLAIAYYYLESWPNNSLACYIMLMLCNDILFHF

SEQ ID NO: 143460 - protein, 59 aa, Glycine max
  unsure (1)..(59): unsure at all Xaa locations
  Clone ID: PAT_MRT3847_100559C.1.pep
VNKCARPLQFLPKPVPACTPYQHKLATTLANESSQKIAXXPFSTHALKVGSYSSFKHTN

SEQ ID NO: 143461 - protein, 145 aa, Glycine max
  Clone ID: PAT_MRT3847_10055C.1.pep
MIVEPNAVMDSIMAAATSVAPIPSVVPTLPDFETAGETGHRTLWVVFVMMVISMVIFVGAAWSTPVSKRLYHVITTLILTFAALSYFAMASGHGASFHHVVVKESHKHVPDTTKDVYREVYHARYIDWTITTPLLLLDLCLLAGL

SEQ ID NO: 143462 - protein, 119 aa, Glycine max
  Clone ID: PAT_MRT3847_100560C.1.pep
LFLLLTPQGENINFCPPHRFYEKKDNSNPFPSLRKRKKKKRRCIFKRPSCPELRNSQAGLVRPKKTEKHILFFDQGRGNPLMTLKEGKRLAPLKNTGAGPKEMLFEGGSLHRNNPRTRT

SEQ ID NO: 143463 - protein, 46 aa, Glycine max
  Clone ID: PAT_MRT3847_100561C.1.pep
WGGFELLKSQRMASFVRTTNLVKFKLYCKAILSTHKSRILGAHGQD

SEQ ID NO: 143464 - protein, 71 aa, Glycine max
  Clone ID: PAT_MRT3847_100562C.1.pep
ALPPLVLDPQRLFPRCLLWVGALHSAPGEFVGRGNPTLGSPGCPSSLALSVLVLFAIKERFVAHVMAGYYI

SEQ ID NO: 143465 - protein, 45 aa, Glycine max
  Clone ID: PAT_MRT3847_100563C.1.pep
IKKKKKKKKKKKKKKKKKKKKKKKKKKKKKKKKKKKKKQKKRGHL

SEQ ID NO: 143466 - protein, 123 aa, Glycine max
  unsure (1)..(123): unsure at all Xaa locations
  Clone ID: PAT_MRT3847_100564C.1.pep
MAFSGSQAPYLSPAVPFSGTIQGGLQDGLQITVNGTVLSSSGTRFAVNFQTGFSGNDIAFHFNPRFEDGGYVVCNTRQNGSWGPEERKTHMPFQKGMPFDLCFMVQSSDFKVMVNGIXFVQYF

SEQ ID NO: 143467 - protein, 252 aa, Glycine max
  Clone ID: PAT_MRT3847_100565C.1.pep
YQREGYIKAMANLIEKELKSFDCPEEVMIFFSAHGVPLAYVEEAGDPYKAEMEECVDLIMEELEKRKITNACTLAYQSRVGPVEWLKPYTDETIIELGKKGVKSLLAVPISFVSEHIETLEEIDVEYKELALESGIEKWGRVPALGCEPTFISDLADAVIESLPYVGAMTASDLEAQQSLVPLGSVEELLAAYDSQRRELPPPVIVWEWGWTKSAETWNGRVAMLAVLLLLFFEFTADKGLLHQMGIWPSLR

SEQ ID NO: 143468 - protein, 53 aa, Glycine max
  Clone ID: PAT_MRT3847_100566C.1.pep
PPPVRHLSKSNAASALTSSLKKAAAAAPIPPLGPPAKTAEETTNPALNQINCF

SEQ ID NO: 143469 - protein, 39 aa, Glycine max
  Clone ID: PAT_MRT3847_100567C.1.pep
YFSVLMLWNFILVNLSQAYSLFYLLTMVITLSGKLLGKE

SEQ ID NO: 143470 - protein, 136 aa, Glycine max
  unsure (1)..(136): unsure at all Xaa locations
  Clone ID: PAT_MRT3847_100568C.1.pep
LSPPKAVSSASRRRARLLTRQGXSHVGIMGPQWSRLLGDHRGVTRPGKLPNXPCATFSSSFTSQQXKKAPFPPPVXXGVXLGAXASLSVVSAVCPPVLLSSLCCFLFRGFPFCALVPPPPAPPGRPLHKILLCVRV

SEQ ID NO: 143471 - protein, 73 aa, Glycine max
  Clone ID: PAT_MRT3847_100569C.1.pep
RMTNADQTKPEMPQICESENSRNRIVEKEREFTGLLKIFDQLRNLKKNLKEKQNTEQEPTRPPTRPPTRPPTR

SEQ ID NO: 143472 - protein, 64 aa, Glycine max
  unsure (1)..(64): unsure at all Xaa locations
  Clone ID: PAT_MRT3847_10056C.1.pep
TRTWVPMRRRFFFXFFFFFFGQPGLVLLPRYSALFWTILIQFNIGNHPELKKRGGIGGILTKQT

SEQ ID NO: 143473 - protein, 62 aa, Glycine max
  Clone ID: PAT_MRT3847_100570C.1.pep
PVYYKTGVTRFGMVFSICPFTWLLGNYSVQSVRTDQPTLYYDSDLHESPVSCMLITHLRALY

SEQ ID NO: 143474 - protein, 49 aa, Glycine max
  unsure (1)..(49): unsure at all Xaa locations
  Clone ID: PAT_MRT3847_100571C.1.pep
MCPRPEPAWLKASASEIQPXASRTSNELVPWKLXXESHPGSARPQINTH

SEQ ID NO: 143475 - protein, 58 aa, Glycine max
  Clone ID: PAT_MRT3847_100572C.1.pep
RSLSSASRRPGNWSASTENNPQTTIGLPLLSRERIVGPFCLRSVIGLPSSTVCFFSYR

SEQ ID NO: 143476 - protein, 86 aa, Glycine max
  Clone ID: PAT_MRT3847_100573C.1.pep
KFRGRPHPSDSWKKGKMGRVAKEKYLNTVNNFFVGPPPYSKGLDSINEDRGGVLDMRLFETGEFALIAGVGVPTVPEWFLTAMLIK

SEQ ID NO: 143477 - protein, 371 aa, Glycine max
  Clone ID: PAT_MRT3847_100574C.1.pep
MEVSITDEIAGTMELNPDRLGELKAFDDTKAGVKGLVDEGVAKIPRLFHHPPDEFVMASKLGNTEYTIPVIDLAEVGKDPSSRQEIIGRIREASERWGFFQVVNHGIPVTVLEDLKDGVQRFHEQDIEEKKELYTRDHMKPLVYNSNFDLYSSPALNWRDSFMCYLAPNPPKPEDLPVVCRDILLEYGTYVMKLGIALFELLSEALGLHPDHLKDLGCAEGLISLCHYYPACPEPDLTLGTTKHSDNCFLTVLLQDHIGGLQVLYQNMWIDITPEPGALVVNIGDLLQLITNDRFKSVEHRVQANLIGPRISVACFFSEGLKSSPKPYGPIKELLTEDNPPKYRETTVAEYVRYFEAKGLDGTSALQHFKI

SEQ ID NO: 143478 - protein, 91 aa, Glycine max
  Clone ID: PAT_MRT3847_100575C.1.pep
KKPHLSFEAGYMPDTRLHLAISNMFLLVNFNRKKSPQNKLQASTGYGSLLPVAFTLAFGKILTLSQECNAVSNVSNNNTTLTKFIITRLKF

SEQ ID NO: 143479 - protein, 86 aa, Glycine max
  Clone ID: PAT_MRT3847_100576C.1.pep
TAARRRQKGGLAARVVDRQQVHRTMSKEEMLHRFELADDDNPETLADLSQENERQDNPNLVGHSLKHTTPHSNGSWYHHKFTESLL

SEQ ID NO: 143480 - protein, 85 aa, Glycine max
  Clone ID: PAT_MRT3847_100577C.1.pep
ITFPSSVGKQSSVNLLMAASRSLPHSWRALSRALSHYQVRCSCTAHSQWAWGPQALYNIHKSFRARGSGTIDPTSRSHVPQAPFT

SEQ ID NO: 143481 - protein, 209 aa, Glycine max
  Clone ID: PAT_MRT3847_100578C.1.pep
MEQAGKQGIMVASQSQNPIEQIQARFKDLETGFRLWLSKQSLPVEAAVVTTTSAAQGAAIGAFMGTLTADASSTFPTPPPNASLNPQAMASLKQAQALAGGPLIQARNFAVMTGVNAGISCVLKRIRGKEDVQSSMAAAFGSGALFSLVSGMGGPNQATNALTSGLFFALVQGGLFQIGQKFSQPPAEDTHYAKTRHMLNNLGLQRLRK

SEQ ID NO: 143482 - protein, 73 aa, Glycine max
  Clone ID: PAT_MRT3847_100579C.1.pep
MFVVKGCLLVNCIHLFISTIHCFSFLREKLPTQYSGTIVHFLRLLSMCLLSLFPFSSRIFFFPIFPIFIPPLP

SEQ ID NO: 143483 - protein, 68 aa, Glycine max
  unsure (1)..(68): unsure at all Xaa locations
  Clone ID: PAT_MRT3847_10057C.1.pep
MGKVKIGINGFGRIGRXVARXALXRDDVELXXVXDPFITXXXXXYMVKYDXVHGHWEASGCAPLRRRP

SEQ ID NO: 143484 - protein, 271 aa, Glycine max
  unsure (1)..(271): unsure at all Xaa locations
  Clone ID: PAT_MRT3847_100580C.1.pep
MEQAGKQGIMVASQSQNPIEQIQARFKDLETGFRLWLSKQSLPVEAAVVTTTSAAQGAAIGAFMGTLTADACSTLPTPAANACLNPQAMGXVKQAQAVAGGPLIEARSLWILCAXNPVKAFVCFFFPKYVKQLYFTFEGKXNVQSSMAAAFGSGALFSLVSGMGGPNQATNALTSGLFFALVQGGLFQIGQKFSQPPAEDTHYAKTRHMLNNLGLQSYEKNFKKGLLTDNTLPLLTDSALRDVRIPPGPRLLILDHIQRDADLKDKRGSRK

SEQ ID NO: 143485 - protein, 127 aa, Glycine max
  Clone ID: PAT_MRT3847_100581C.1.pep
TLYNPTMMSQHSRRRLPRGNPRKAKRDEVDKQAAPKAAEPAPSSNRLLAGYLAHEFLTRGTLLGQKFELDLDRAGLAGSSSAEASAVEARPCVVKEHHSYEVLANLLKRKETHIKGKCEPHTAFQLD

SEQ ID NO: 143486 - protein, 228 aa, Glycine max
  unsure (1)..(228): unsure at all Xaa locations
  Clone ID: PAT_MRT3847_100582C.1.pep
MEQAGKQGIMVASQSQNPIEQIQARFKDLETGFRLWLSKQSLPVEAAVVTTTSAAQGAAIGAFMGTLTADASSTFPTPPPNASLNPQAMASLKQAQALAGGPLIQARNFAVMTGVNAGISCVLKRIRGKEDVQSSMAAAFGSGALFSLVSGMGGPNQATNALTSGLFFALVQGGLFQIGQKFSQPPAEDTHYAKTRHMLNNLGLQSYEKNFKKGLVXDNTLPLLQTVL

SEQ ID NO: 143487 - protein, 135 aa, Glycine max
  Clone ID: PAT_MRT3847_100583C.1.pep
MEQAGKQGIMVTSQSQNPIEQIQARFKELETGFRLWLSKQSLPVEAAVVTTTSAAQGAAIGAFMGTLTADASSTFPTPPPNASLNPQAMASLKQAQALAGGPLVQARNFAVMTGVNAGISCVLKRIRGKEDVQSR

SEQ ID NO: 143488 - protein, 94 aa, Glycine max
  Clone ID: PAT_MRT3847_100584C.1.pep
AVNQLGDANEVLNERAVVVMARMSNKLTGRDFSTCSSVSNNSPQHAVDHSSLISGDTREVDHALSVKLQVQKLIIQASSHENLCQNYVGYGLLT

SEQ ID NO: 143489 - protein, 69 aa, Glycine max
  Clone ID: PAT_MRT3847_100585C.1.pep
HFNTHCNGKARQGYLAWTSPKDAGPHKRVAVTTVGYYTERDSHSAEGDAIKADNAAAIILTFPNNCRVL

SEQ ID NO: 143490 - protein, 40 aa, Glycine max
  unsure (1)..(40): unsure at all Xaa locations
  Clone ID: PAT_MRT3847_100586C.1.pep
LEKPNLKDEILSLTKQAHMYTHTRNLINFRSXRKTXISEI

SEQ ID NO: 143491 - protein, 75 aa, Glycine max
  Clone ID: PAT_MRT3847_100587C.1.pep
GRPIRGSPWPPQTAVPSQTPPATSLRRASVPLVSLTPCCTMSWYRYFSFLYFYPHPPLASDIFQTCVGGLFLYLV

SEQ ID NO: 143492 - protein, 42 aa, Glycine max
  Clone ID: PAT_MRT3847_100588C.1.pep
IGPLAMRHHLFSDASGVSFLRMLFPFPVLFCFFIPTHQKNSI

SEQ ID NO: 143493 - protein, 70 aa, Glycine max
  unsure (1)..(70): unsure at all Xaa locations
  Clone ID: PAT_MRT3847_100589C.1.pep
DAGEVCEEPYSHCVHPGRNTITLDLPPHKPGSLXLEFLPGQIGQPRLRTHRFSKXGPEASDRLMRYEKSA

SEQ ID NO: 143494 - protein, 32 aa, Glycine max
  Clone ID: PAT_MRT3847_10058C.1.pep
THSHWRKISFICLHTCYLSHRPTMIGYTQLIE

SEQ ID NO: 143495 - protein, 56 aa, Glycine max
  Clone ID: PAT_MRT3847_100590C.1.pep
PRFGLLTNDIKIYHFYINLTIIKIKIKNKLPINFQSEKTIPYQKLRHIIKVYPFKE

SEQ ID NO: 143496 - protein, 119 aa, Glycine max
  Clone ID: PAT_MRT3847_100591C.1.pep
WIAAECGLSSGNNAFYAVTPTKMSWVTATAALDTHTAFHTKDTVESAELSSSDDNASLSAGSDDESERLSGTEDTGKKQTRQGRDWRPKSTLHLKIARGEKLSAVERLASRTLLPEEYY

SEQ ID NO: 143497 - protein, 41 aa, Glycine max
  Clone ID: PAT_MRT3847_100592C.1.pep
GIYTIQPNQSRGGSNQRNPRLITLELTTRITPYFLSLININ

SEQ ID NO: 143498 - protein, 363 aa, Glycine max
  Clone ID: PAT_MRT3847_100593C.1.pep
MASLACVNHLPPWLSPRPGSDPEPDFEFPLDPPTTMLPADQLFSDGKLLPLHLKPLSTTTPQTPKSPSSASVNTVTPPTTTSSSSADPYLFSPKAPRCSSRWKDLLGLKKLYQTTNNTKTTPSSTSAKSLKILLHRKTTSSSTSSFSSENAPLLTSISSDAESLSISSSRLSLSSSSSSHDHDDLPRLSLDSDKPNPNLSLNTNQISLHRNPNPRIRLVRNRTNSFDAHKPSSDQHYSRPGRSSIRRESETVTCRGVSVDSPRMNSSGKIVFQSLERSSSSPSTFNGGPRFKHRGMERSYSANVRVTPVLNVPVCSLRGSSKSGSVFGFGQLFSSPQITTTGKGHHQSGRSNRNGREYSCIRK

SEQ ID NO: 143499 - protein, 157 aa, Glycine max
  unsure (1)..(157): unsure at all Xaa locations
  Clone ID: PAT_MRT3847_100594C.1.pep
AYYGWVALNHKMGMFDSYPGSPTLGLVDLGGSPLQVVVEIDGSGDDVHMMRLKLSSTEPRILAYSLPAFGLNDAFDRTVSHAQEQSKCGKXELRHPCLVSTFAQNYTCLSCSGLASIYQKNRSQHQESEHYSLRLTGELDWEQCKELAIAAAMNLSD

SEQ ID NO: 143500 - protein, 49 aa, Glycine max
  unsure (1)..(49): unsure at all Xaa locations
  Clone ID: PAT_MRT3847_100595C.1.pep
SSASILDCCSRARPRTTSGGCPTLQLSPFYRTAVXKMLXFVEAPLTFPX

SEQ ID NO: 143501 - protein, 87 aa, Glycine max
  Clone ID: PAT_MRT3847_100596C.1.pep
RNKSLGIYIYKIIIAHKNAIELISKMHITGSSHRLFSMGNKQIPIFPRSTSPCRTHSKVTTTREGWGRTQRIVFTPSKSSIGSLARD

SEQ ID NO: 143502 - protein, 58 aa, Glycine max
  Clone ID: PAT_MRT3847_100597C.1.pep
KLNTRSCHRCSFSFPFPLGEEIFWGMTSNLRHGSYLKSMCGNVLPFSLAKDNKPLFQL

SEQ ID NO: 143503 - protein, 70 aa, Glycine max
  Clone ID: PAT_MRT3847_100598C.1.pep
NLAVCPAGTFMLYLSTMWNDADDGMKLLTAAMNALLTLPVTGNPECIPSVHSDHEDIAPIVHWSAFYTQK

SEQ ID NO: 143504 - protein, 52 aa, Glycine max
  Clone ID: PAT_MRT3847_100599C.1.pep
GPWGDTSANRYQVSNISPQFWDKCPKKKKKKKKKKKKKKKKKKKKKKKKKKK

SEQ ID NO: 143505 - protein, 75 aa, Glycine max
  Clone ID: PAT_MRT3847_10059C.1.pep
SLPRQVYHKPVSLSGEHSVDIRVRTEVGDAAGVAGSNFPRVVLLKRSQPLILIYVGDLFKSTDTLQNLLNFSAHK

SEQ ID NO: 143506 - protein, 234 aa, Glycine max
  Clone ID: PAT_MRT3847_1005C.1.pep
MLTGKVIQLLLKPDNISWNAMFLKIKIGMLVYWPRKKVKKKRKVSGKDTLESSGSQSWKSKVSGTQTSSVGVEQDKGVSVKDYLVDKLRPGDEDRALSEVISETLHKKELPPEEVTEEGVRKVVSDAVHKRDDDPERRMEHQRILGKVTESEEVKRRLGGESVVTEKKYQEMYVNSPGKGVVDKLKGMVGTWFTNPAENQSSQDSSMNYEAGRAEVEQVNQGAAGERRQQESSN

SEQ ID NO: 143507 - protein, 35 aa, Glycine max
  Clone ID: PAT_MRT3847_100600C.1.pep
LMRLFFVVGPFLTAIEKVSSKEQIYLSRIPIRTNE

SEQ ID NO: 143508 - protein, 45 aa, Glycine max
  Clone ID: PAT_MRT3847_100601C.1.pep
WSSKFEFRSPYRKINPSHASVRKMEKKMQSSPFVRSDASLGPAFH

SEQ ID NO: 143509 - protein, 82 aa, Glycine max
  Clone ID: PAT_MRT3847_100602C.1.pep
MSAQSEGNYAEALQNYYEAMRLEIDPYDRSYILYNIGLIHTSNGEHTKALEYYFRALERNPFLPQAFNNMAVICHYVRLSPL

SEQ ID NO: 143510 - protein, 52 aa, Glycine max
  Clone ID: PAT_MRT3847_100603C.1.pep
MMMEIAITIQNILLHHLNPPSSTHVNELSSLYASSCVSEDSAVYHRTSTFRD

SEQ ID NO: 143511 - protein, 207 aa, Glycine max
  Clone ID: PAT_MRT3847_100604C.1.pep
MNFLLRSTTGVYREPSPSIPVPEPRVDTHHRSASAGSSLENRVSDDPYAWYDARVVSGVFLKHVDVAEDEGWVTIPCKELPENWTCAPDIQSLCSLDRSFLFPGERVHILACFSACKQDTSSFKVDAVTSDNGIGHSPKKENGNIENRNNSVSGEGEPGTSDEEQMEDVSDDESLLQKEVLKKQTALLLQKFENSHFFVRISESDDP

SEQ ID NO: 143512 - protein, 69 aa, Glycine max
  Clone ID: PAT_MRT3847_100605C.1.pep
LPPSSGFLLLPPLSILSPSSSSSISAHRSIFGARPNLVSPQHRHGVIHVVPYYWNECTLTRQLRITHVI

SEQ ID NO: 143513 - protein, 714 aa, Glycine max
  unsure (1)..(714): unsure at all Xaa locations
  Clone ID: PAT_MRT3847_100606C.1.pep
WIFFFFSISQAREQQQLQSLRNLASVKLEPQQMQTMRTLGPVKMEPQHSDQPLFLQQQQQQQQQQFLHMSSQSSQAAAAQINLLRHHRLLQLQQQLPAXQLLKAMPQQRSQLPQQFQQQNMPMRSPVKPAYEPGMCARRLTHYMYQQQHRPEDNNIDFWRKFVAEYFAPNAKKKWCVSMYGSGRQTTGVFPQDVWHCEICNRKPGRGFEATVEVLPRLFKIKYESGTLEELLYVDMPREYHNSSGQIVLDYAKAIQEXSVFEQLRVVRDGQLRIVFSPDLKICSWEFXARRHEELIPRRLLIPQVSQLGAVAQKYQAITQNATPNLSVPELQNNCNMFVASARQLAKALEVPLVNDLGYTKRYVRCLQISEVVNSMKDLIDYSRETGTGPMESLAKFPRRTSGSSGPRGQAQQHEEQLQQQQQQQMVAHNSNGDQNSVQAAAMQIASSNGMVSVNNTVNPASTLTSTSTIVGLLHQNSMNSRQPNSMNNASSPYGGSSVQIPSPGSSSTVPQAQPNSSPFQSPTPSSSNNPPQTSHPALTSANHMSTTNSPANISMQQQQQTSLSGEPDPSDAQSSVQKIIHEMMMSSQINGNGGMVGVGSLGNDVKNVNGILPVSANTGLNGGNGLVGNGTMNSNSGVGVGNYGTMGLGQSAMPNGIRSAMVNNSIMNGRGGMASLARDQAMNHQQDMSNQLLSGLGAVGGFSNLQFDWKPSP

SEQ ID NO: 143514 - protein, 75 aa, Glycine max
  Clone ID: PAT_MRT3847_100607C.1.pep
TGIRATNNITLYHAYECEPLTFLTLCMIVNLKNQRQVFSLFFLQPIYCEILTTDPILFLVRQLIITKPSVISTAY

SEQ ID NO: 143515 - protein, 46 aa, Glycine max
  Clone ID: PAT_MRT3847_100608C.1.pep
EVGPEEETTMVENRENNNSDSRRSLTLHFISVMATQTQTHTHPNTT

SEQ ID NO: 143516 - protein, 80 aa, Glycine max
  Clone ID: PAT_MRT3847_100609C.1.pep
RARERGSGSGRESSNALLSISPKGTVHQGSCSLSRSTSTGSSIGSHLTAAGEDCIEFIHSCLSRSKPSTKAPRRDSIQAP

SEQ ID NO: 143517 - protein, 113 aa, Glycine max
  Clone ID: PAT_MRT3847_10060C.1.pep
IKRKGYRNGRRQKTRRPSFSGGHSRCRSFCRVPTGLRFRFPVPLLLLPGLTLFPPTFKGGLFPPQLPRRRFWLGPLWGKTHLLPGGRLGPPPILQRRSPFQFLPLEPGKIPSS

SEQ ID NO: 143518 - protein, 85 aa, Glycine max
  Clone ID: PAT_MRT3847_100610C.1.pep
MGAPGCPALAVAPAAVAPDPWALPDAPASGALPAVPRVACTAEAPVVDQGKEKVKRLSIRGSRGVTRSKLLSQLQSKQEHPNTME

SEQ ID NO: 143519 - protein, 243 aa, Glycine max
  Clone ID: PAT_MRT3847_100611C.1.pep
MDAEAAPLKLESLVCIDSTTLSHSELLALSLSSLSTFDLRSTHDLVTPKIDPSLFNESTGSHRQTYSRPQQSSPTGRRRRLAGLLPNNLPPLPENRLIIDYLKQLIRDDPKFDQVQLTPPSPSPSPSLPQLKRKRGRKPKVKLHLDPCYRGIDIIVNPNGVAVDLHQLANSQDPFAEELKRRTEGLHNEEELLGFLRDLPGQWGSRRKKRRIVDAGDFRGDVLPVSWKIVVGLKRKDGRAWVY

SEQ ID NO: 143520 - protein, 138 aa, Glycine max
  unsure (1)..(138): unsure at all Xaa locations
  Clone ID: PAT_MRT3847_100612C.1.pep
MVKCFSLIVVLSLLAASAIGSEVISGESDGDFIIRQVVDDGGVNEGSNGDDLLLGADHHFSVFKQKFGKSYASKEEHDHRFRVFKANLKRAQRHQALDPSATHGVTQFSDLTPSEFRRSFLGLXSRRLGLPADANKAP

SEQ ID NO: 143521 - protein, 495 aa, Glycine max
  unsure (1)..(495): unsure at all Xaa locations
  Clone ID: PAT_MRT3847_100613C.1.pep
MWYLCVFFHRLLDYRKPEVESLAQLFGATEDPQNGDVSSQLQWKLPHHFHANCNCNSXQHYHADSPFHFVNLPSEKLARDIATRSILVKGMYELWGEGSSYEELKESVLSYPDERKLPYLDSDSTFKITVDSFGKVISLEDQKELIQGLSYIPFKGRVKLKNPDHNFWLIEVDNYGGNNGLPPIVQKRVFFGREVGGADRKLLPTYQLKSRTYLGPTAMDAEIAFLMANQALATSGKLVYDPFVGTGSILVAAAHFGAITMGADIDIRVVRDGRGPNCNVWSNFKQYGLPMPVGLLRADNNLPPWRSTLKEVFDAIICDPPYGVRAGGRKSGGRKLLKGAVEPYTIPDEKRTNHIPSTAAYSLVECVHDLFDLAAKMLVMGGRLVYFYPVLREDGFAENHFPEHPCFKLISSSEQILSSRYSRVLLTMVKTGPYTEEIAEAARKKHIEFKENHVKWLEDGNLHSAVFSPADDQFTEAGDPKLIKDPKPKYRGKYV

SEQ ID NO: 143522 - protein, 159 aa, Glycine max
  unsure (1)..(159): unsure at all Xaa locations
  Clone ID: PAT_MRT3847_100614C.1.pep
PKAGPRLVTGVALRXAGVPPTVIVQCLQPTFNHPXXFDYSSKHSKVGSLQMFMSNDGNCEDLGPRAFSAEEVHKITVLDLRMANADRHAGNILFKKEAGGHTLLIPIDHGYCLPEKFEDCTFDWLYWPQARQPYSPDTGDYIKSLDAEKDIELLKYFGW

SEQ ID NO: 143523 - protein, 86 aa, Glycine max
  unsure (1)..(86): unsure at all Xaa locations
  Clone ID: PAT_MRT3847_100615C.1.pep
MDILPCYSSSHDPDVRKGHWTMVEDXTLRDYMRYHGEGSLELLNXGARLKRSGKSCPLQTVNYLSPDVXXGNITSEEHVSIIELHA

SEQ ID NO: 143524 - protein, 40 aa, Glycine max
  Clone ID: PAT_MRT3847_100616C.1.pep
LNGKSLKEMSPEKNKNVGTQEESKQTHSHVNKKNCSICLG

SEQ ID NO: 143525 - protein, 136 aa, Glycine max
  Clone ID: PAT_MRT3847_100617C.1.pep
ARAALQTSAIEAKCLSVSGEGSHLSALLCLLLAALPRLFPADAALSATFCLRGLWALQSGLSLYADAFIPEGCHRLLDVTSGVEGSTQCDLDESKLRAVAILDLAFLIHAIIVVLIVLLTYALFARSFGGRRLGSY

SEQ ID NO: 143526 - protein, 75 aa, Glycine max
  Clone ID: PAT_MRT3847_100618C.1.pep
RSELVSSRELLLMHFKTVGFDDLYMEFLNLSTPSYCRAHDLVMASVSHSVLVIYCENQYLSNSSYRLGIRIDLLN

SEQ ID NO: 143527 - protein, 40 aa, Glycine max
  unsure (1)..(40): unsure at all Xaa locations
  Clone ID: PAT_MRT3847_100619C.1.pep
YYFIRIPTLXXPINXYVLHSFQXIKNNYMXXKYTRRXSGF

SEQ ID NO: 143528 - protein, 105 aa, Glycine max
  Clone ID: PAT_MRT3847_10061C.1.pep
LKQKLNSRVCNNNLLSLSLHKLVAMVGILQQFYQVIPSFPLFVYRAQEEWSKMKHITIVNTIDRYTAVTPSNPPFSFYSHIYACHDQINSPHFHAPNHPNPIPII

SEQ ID NO: 143529 - protein, 66 aa, Glycine max
  Clone ID: PAT_MRT3847_100620C.1.pep
IHHSLVQPFQPYIILDWVWSSMKASYLISCTRSRDRIRAVICCWNERYAQLLSVHNEADSIVSCID

SEQ ID NO: 143530 - protein, 81 aa, Glycine max
  Clone ID: PAT_MRT3847_100621C.1.pep
TQSFHDISHHPPFLYSIYVTFLYTFFILIKPTLAASIPNLYHHIIKYLSRLNYILLSIPIHSKYSPHSLTNATQEQSILIS

SEQ ID NO: 143531 - protein, 60 aa, Glycine max
  Clone ID: PAT_MRT3847_100622C.1.pep
FSTRYRVPWPGRVPSTASVLVVAPGQTYGAKQQKAARHMNLSRCNVIVNPFLLCRHNTCA

SEQ ID NO: 143532 - protein, 87 aa, Glycine max
  unsure (1)..(87): unsure at all Xaa locations
  Clone ID: PAT_MRT3847_100623C.1.pep
KPXXDEXYEGVLGFSWSLATXXLVGHGXMSMPVRXMFPSSEMRHLGLXXARYSRRGEIAHKLEGFCLWKAPLTIXWAFENHSLKKVR

SEQ ID NO: 143533 - protein, 78 aa, Glycine max
  Clone ID: PAT_MRT3847_100624C.1.pep
SPPTEPSRETSTLPSLEPGHPPARPRVNRTMPPGTAHPTGTLSLMAGRPHGLSDHPIERVVYQAYPPSTIARGLYSHM

SEQ ID NO: 143534 - protein, 92 aa, Glycine max
  unsure (1)..(92): unsure at all Xaa locations
  Clone ID: PAT_MRT3847_100625C.1.pep
GPPNFSVPRAVPGPSFGDVFXGMQPPPRVMFXTPKPRAPGFVNPGNPTGVLVFGPARPLDRKPFLRFLFSPGGDKVSPPVPAAQNLGGPGFF

SEQ ID NO: 143535 - protein, 112 aa, Glycine max
  Clone ID: PAT_MRT3847_100626C.1.pep
KPRRFTPPGVPNRGGKNPKKGPFPQNLKLGVKNGKKGPPPYLLKKQRGPLMGKNKGALVFFFWALLGKKAWERGGKPPPPGGALWRGGKTFSPPRKKNEKALGETPFPLKFW

SEQ ID NO: 143536 - protein, 80 aa, Glycine max
  Clone ID: PAT_MRT3847_100627C.1.pep
KSEVKNILPLLKTSENESLERDNKYYPEHVHLLDAHKRVLFVDLTPVIEAKLKTIEYDFMPDTMDQTKDHYEDTLPLNVQ

SEQ ID NO: 143537 - protein, 46 aa, Glycine max
  Clone ID: PAT_MRT3847_100628C.1.pep
FWGIFAKYHLTTHVITMYEFCSFTVVHYEVLLSVSKMSLFRKRADA

SEQ ID NO: 143538 - protein, 500 aa, Glycine max
  Clone ID: PAT_MRT3847_100629C.1.pep
VSARNSSCSLLHLPPLELRTLNMDAAKEEFLRDFGEHYGYPNGPKSVDQIRATEFKRLQLQDLVYLDHAGATLYSDLQMESVFNDLTTNLYANPHSQSDSSSATLDIVKNARQQVLDYCNASPKEYKCIFTSGATAALKLVGEAFPWSCNSSFMYTMENHNSVLGIREYALGQGAAAIAVDIEGELHPEISGETITTKISPHQVQRRKVAGSLKEEPTGDVYNLFAFPSECNFSGLRFDLDLVKIIKEDSSKILGISSVCHGQWMVLIDAAKGCATMPPDLSKYPADFVAISFYKLFGYPTGLGALIVRNDAAKLLKKTYFSGGTVSASIADIDFIKRREGIEELFEDGTVSFLSIVSIRHGFKILNSLTVSAISRHIASLALYTRKMLLAMRHGNGSSVCILYGHHNSMKLCHEMGPIISFNLKRPDGSWYGYREVEKLASLSGIQLRTGCFCNPGACAKYLGLSHLDLISNTEAGHVCWDDLDIINGKPVGAVRVSFG

SEQ ID NO: 143539 - protein, 114 aa, Glycine max
  Clone ID: PAT_MRT3847_10062C.1.pep
MMGSATVQIATSKFVLCPNASAAKVASPKKNAVINFSSNFKGSVTKIHAIPPNGSVSICSSRVSVSSLKADENKRRSNLESLFCYDKAIPEEIIEKPVGLSLEEKAIGNKFICK

SEQ ID NO: 143540 - protein, 85 aa, Glycine max
  unsure (1)..(85): unsure at all Xaa locations
  Clone ID: PAT_MRT3847_100630C.1.pep
YTSKACEVMSKPQKSLAYLLETYCGVTTNKLLQREDWRQRPXSAEMVHYAQTDAHYLLYIANCLINELKQLDNENSSSDDKFHFV

SEQ ID NO: 143541 - protein, 52 aa, Glycine max
  Clone ID: PAT_MRT3847_100631C.1.pep
AGYNPLKSPSEHCSSERGSSATTFSLRIGDKNSGITFTTYPIELQSHVTQGS

SEQ ID NO: 143542 - protein, 36 aa, Glycine max
  Clone ID: PAT_MRT3847_100632C.1.pep
CVHIETIMTKRLLNGDDGQFENSYVTSCNKKDWKFM

SEQ ID NO: 143543 - protein, 80 aa, Glycine max
  Clone ID: PAT_MRT3847_100633C.1.pep
CTRAKTRGYRFHVHGKAYTWHIPMACSMVLDTLLDLALRHYSTSVTNACGTCKDQHYCLIIPYIMETAPRTHRILATHAR

SEQ ID NO: 143544 - protein, 100 aa, Glycine max
  Clone ID: PAT_MRT3847_100634C.1.pep
APALRLWTFHSSSASVAPLLAAVNGRVQPSSTYIHHLSSPLLRSRYPREHLIDGCLPMILLSSKAGVHTMGFEKGFSCTCPRADAARARTARADSARARA

SEQ ID NO: 143545 - protein, 42 aa, Glycine max
  Clone ID: PAT_MRT3847_100635C.1.pep
NKKDWAIALLNIHIMCYNNISNFVFLKNSRFLFLSLKVLIVQ

SEQ ID NO: 143546 - protein, 205 aa, Glycine max
  Clone ID: PAT_MRT3847_100636C.1.pep
YSIYLASCLPNNASPFLFMLSMWLLISISEAAKYVVGGSETWKFPLSKPDSLSHWASSHRFKIGDTLIFKYDERTESVHEVNETDYEQCNTVGKEHVLFNDGNTKVMLTKSGFRHFISGNQSHCQMGLKLMVVVMSNNTKKKLIHSPSPSPSPSPSPSPSPSPSPSPSLSSPSPSPLPNNQGVTRSSGAEFIGVMMWLGVMMLLL

SEQ ID NO: 143547 - protein, 87 aa, Glycine max
  unsure (1)..(87): unsure at all Xaa locations
  Clone ID: PAT_MRT3847_100637C.1.pep
RHRTDGTRPSTLYKKSADALSLPPPEGPNSGVLVTQDDHMAPTSXLGLGEFHEVKELPFPQRISLELSYRSGVALKRAHDYHHGAFI

SEQ ID NO: 143548 - protein, 69 aa, Glycine max
  Clone ID: PAT_MRT3847_100638C.1.pep
SISVIPRGCALVDRAQVGFSVQLVAPNDMKKYAVMSSSALSLTCSRDENLWYKTMIDLPMMFMCRSVLK

SEQ ID NO: 143549 - protein, 66 aa, Glycine max
  Clone ID: PAT_MRT3847_100639C.1.pep
IFPSMKEIFAITAIHNQQFKLNGALYDCNHSSKEIPFPEEFLKVLILSYALLPSERSIELELEKAG

SEQ ID NO: 143550 - protein, 123 aa, Glycine max
  Clone ID: PAT_MRT3847_10063C.1.pep
NKTGLRPLYLECNNSSIGGPDPGFPAFGLGIPEWVPPCIAAQNLPFALVPYVPMRQYSERPAPYLFSLSGQWYTAWGRALFPALVALSHRGTPPLGTCLTPGPYALFLWFLPSNCGFRGRVFN

SEQ ID NO: 143551 - protein, 46 aa, Glycine max
  Clone ID: PAT_MRT3847_100640C.1.pep
YNQPQGGKTSWGKAMPYFSTSEPTADLKDYYEDQGSRKGQPNELEI

SEQ ID NO: 143552 - protein, 105 aa, Glycine max
  unsure (1)..(105): unsure at all Xaa locations
  Clone ID: PAT_MRT3847_100641C.1.pep
XLTXFFTPYYFTNSTHFWDLFIKKRPLTFITYSLKSSFHIFAIIHHNHYCYFLKNISYNTLIHLPIISIFTLPRSLSTTYKHPSIHLFPLFNIYSSTVQINILIY

SEQ ID NO: 143553 - protein, 62 aa, Glycine max
  Clone ID: PAT_MRT3847_100642C.1.pep
KAQAQAVTTGMKDCPKYDPLLGERFHNGKKSTHCAGHRLDEPYSFPHLVYWQSTLPLAIGLC

SEQ ID NO: 143554 - protein, 142 aa, Glycine max
  Clone ID: PAT_MRT3847_100643C.1.pep
MDVYEEMEEAKAEIEKLKVKLGDKTNTLQNIKKYYDAQVNKIQEAIFKVEKLNQEMLQKADDINDDLKESLNNKESIAKHLNAANDELGANCDDKFRKWHDEERGYVLALEEANEKLDNQEKQMHLSRQEIESMEGCFSISY

SEQ ID NO: 143555 - protein, 144 aa, Glycine max
  Clone ID: PAT_MRT3847_100644C.1.pep
KTSNKKSSTSAFSSQTAPNFLNKTENLAASIQHGLEIIDSYQRNSALRQSPYRFSLQPRKSKLTFPASKVDVGLQTSLDDIVGEDSVLFTCSNCNSRTQLHVNETDNDSNLQLVPVDCHESADKTKKQVIKAVEKVLAGSIRRE

SEQ ID NO: 143556 - protein, 217 aa, Glycine max
  Clone ID: PAT_MRT3847_100645C.1.pep
RTGYTAARRRQKGTPDEDFGILLEAAVMYDRRVAAILGEDDSVDEEVIWKEISDGKQCLYPRLLFIITGKGPEKEKYEVKIKRMKLKRVAFRTMWLSADDYPLLLGSADLGVCLHTSSSGLDLPMKVVDMFGCGLPVCAVSYSCIRELVRVDKNGLLFSSSSELADELLLLFKGFPDDCDALKVLKYGALETGSSSRWATEWEEHAKPLITEVISRF

SEQ ID NO: 143557 - protein, 71 aa, Glycine max
  Clone ID: PAT_MRT3847_100646C.1.pep
NTPILCLNVDRGKKNYHKQTGFPWANCCPTIYCNRYYESHLTCKKHIALKLSGGLQPMRHKFDSKKKCNRS

SEQ ID NO: 143558 - protein, 74 aa, Glycine max
  unsure (1)..(74): unsure at all Xaa locations
  Clone ID: PAT_MRT3847_100647C.1.pep
KKAQLFGTNFDKRRNNCVWRGPRSLAPQKIXXXVLYLKTDNDFWCASGRSQTKALYTLGSPDEVYGFVTVLANV

SEQ ID NO: 143559 - protein, 96 aa, Glycine max
  Clone ID: PAT_MRT3847_100648C.1.pep
NSAPASFAFNSYYQKNPAPTSCDFGGTANIVNTNPSSGSCIYPSSSGAGASGSGTGSPVLGSQSPPDLNTSYSAGLRPLIGCMVLAISLVTVRLTT

SEQ ID NO: 143560 - protein, 57 aa, Glycine max
  Clone ID: PAT_MRT3847_100649C.1.pep
KIMILLIVIRKRCLNLLTIALGNIEPYFIGWVEHDKDVRLHSDESTPYGLQDGILTT

SEQ ID NO: 143561 - protein, 64 aa, Glycine max
  Clone ID: PAT_MRT3847_10064C.1.pep
YWLFLCLFPHQCLISCLLHYAIGNGRFTAPVHEQAPAAEQDSCHQQGFKVPDSARAVRAVSTAP

SEQ ID NO: 143562 - protein, 117 aa, Glycine max
  Clone ID: PAT_MRT3847_100650C.1.pep
PKQFIKGFFFGPFLGGGNQNPLNPLKGQFKTLPGWPKPPQPGVYKGEPPFYKRGGAPNLLGLALSQEKNSFTHFRGLKTRPFKMGIRGRIPLLLGGGEGFPRGRGAPLGNPLFPFDP

SEQ ID NO: 143563 - protein, 126 aa, Glycine max
  unsure (1)..(126): unsure at all Xaa locations
  Clone ID: PAT_MRT3847_100651C.1.pep
FXXXXXXSXLXXXXXTSXXXXXXXPXXPDLXXXPXXHXXXXXYHXSPQXXXPXXXXPTLHXPXXPHSFHXXXXTTXXXLXXYXSXXLTXYSXSSXTXXXXXXSXXXPXXXHXXYXTXLXHPXTXTF

SEQ ID NO: 143564 - protein, 470 aa, Glycine max
  Clone ID: PAT_MRT3847_100652C.1.pep
ECGPSVAGLGKIRLELEEIVKFFTHGEMYRRRGVKIPGGILLCGPPGVGKTLLAKAVAGEAGVNFFSISASQFVEIYVGVGASRVRALYQEARENAPSVVFIDELDAVGRERGLIKGSGGQERDATLNQLLVCLDGFEGRGEVITIASTNRPDILDPALVRPGRFDRKIYIPKPGLIGRIEILKVHARKKPMAEGVDYMAVASMTDGMVGAELAIIIEVAAINMIRDSRTEITTDDLLQAAQMEERGMLDRKERSTETWKQVAINEAAMAVVAVNFPDLKNIEFVTIAPRAGRELGYVRVKMDSVKFNQGMLTRQSLLDHITVQLAPRAADELWFGSGQLSTIWAETADNARSAARTFVLGGLSEKYHGMSNFWVSDRINEIDSEAMRIVNSCYERAKEILEQNRTLMDALVNELVEKKSLTKQEFVRLVELHGFLKPMPPSILDIRVAKCREFQKLIGSGKETSLSSHA

SEQ ID NO: 143565 - protein, 85 aa, Glycine max
  Clone ID: PAT_MRT3847_100653C.1.pep
YSSIISIAVIRAASGCDREPHQPQLAYMSPQHNCDDHNYSCNLKPRRESVVVAVFESDRRVRHKMIGFGEKGKEERENPMDADAW

SEQ ID NO: 143566 - protein, 62 aa, Glycine max
  unsure (1)..(62): unsure at all Xaa locations
  Clone ID: PAT_MRT3847_100654C.1.pep
MGLSFTKLFIMLFAKNEMRILMVGLDAAGXTTILFKLKLGDIVTTIPTIXFNVVTVEFIYFF

SEQ ID NO: 143567 - protein, 108 aa, Glycine max
  Clone ID: PAT_MRT3847_100655C.1.pep
ASILFQSRRKRPRTPTPGHYLGLKSTRDYGHRGDHGRYRGGGSGHDDYGYRGDRGRSPRRSPPYRGGRDYSPRHSPPPYGGRSRRDRSRSLPYSPYGSPDRRYARGSR

SEQ ID NO: 143568 - protein, 116 aa, Glycine max
  unsure (1)..(116): unsure at all Xaa locations
  Clone ID: PAT_MRT3847_100656C.1.pep
FAIVHASAHTSARFYKVTSTKAHFVSGKTFKHVIIGAXDYITSEDFPEKEYQEKPKKIDARLRQRIDPQYNEVQAQMETNLFKLTLEDVETPKGPMLDSKISQSKNAPSQKTQVVG

SEQ ID NO: 143569 - protein, 88 aa, Glycine max
  Clone ID: PAT_MRT3847_100657C.1.pep
VTSEVDESREKREKVKASKEVEVAAVVVVLSALEVFDFPLASDALHHYILLIHTIIVHFSVVIVAVEYVSHTFVSPTVVTMIPLAMAT

SEQ ID NO: 143570 - protein, 561 aa, Glycine max
  unsure (1)..(561): unsure at all Xaa locations
  Clone ID: PAT_MRT3847_100658C.1.pep
VGPPDRIPVASVAGSAAGFRCHVRPPPSLIKSSGPLNEHVAPTVGSGPFLLPSGTANGFLGEETDGRPGCSLDTRRVSCKRKAVERNVGQSSDGGSSSYSQHTDGSTWNTLPTQAYGGISFNRSAPTDQVNARLGLSTGDGSSESIPVSNVARSSGSFHRNFRPRTSPSSQQISVPSTAISSGNVIRSSGVSSPSPILQRFHPVDXSFDLRAVPPVDTMVPQSQPLVIHVPALPRNAQSFRWSGGSSSTNNHSSNSVMCADRNNLPNEEASSRSMPRNIIEYPMFVPATNLRNVVRNPARTSNNANLSIPGNVGSSSRTGSNPAVNPPPASAWVSRPNPQQYPRRLSEYVRRSLFSPGLEAAGSSSNSYTPFRGPPTSSESRGLSSGVNPFERQGDSEFGIPYSLQSLVVAGEGSSRLVSELRNVLGLMRRGGNLRFEDVMILDPSVFSGIADIHDRHRDMRLDVDNMSYEELLALEERIGNVSTGLSEEIVSKLLKKKKYSAEPDSQHEAEPCCVCQEEYKDGDDLGSLDCGHDYHRDCIKQWLMHKNLCPICKTTGLAT

SEQ ID NO: 143571 - protein, 56 aa, Glycine max
  Clone ID: PAT_MRT3847_100659C.1.pep
KTTSTTHLLESLYTYVYIYIYILLHLHTYSIPLISNKHNYNKKLLIFRNITYYNKY

SEQ ID NO: 143572 - protein, 68 aa, Glycine max
  Clone ID: PAT_MRT3847_10065C.1.pep
GYEDEERSRLLLVEGSIAEKWKDRLGKKVKRWDMKLRHLGLSKSDSSNSDSTQSQKSGRNSNPRQARN

SEQ ID NO: 143573 - protein, 80 aa, Glycine max
  Clone ID: PAT_MRT3847_100660C.1.pep
CNDAGLCFAGVHDSFWTHPCDVEKMNQILREKFVELYNMPILENLLEGFQTTYPGLAFPPLPKRGDFDLQKVLDSPYFFN

SEQ ID NO: 143574 - protein, 49 aa, Glycine max
  Clone ID: PAT_MRT3847_100661C.1.pep
LISFHPRGLAREKRAFKHWDFVFRGESIPYPWVRDENVKSLPPPNNGCP

SEQ ID NO: 143575 - protein, 45 aa, Glycine max
  Clone ID: PAT_MRT3847_100662C.1.pep
RDITRIYIRLGFVLNKIAWKATFHPYLTLFIMLCLASHTFRMHSV

SEQ ID NO: 143576 - protein, 654 aa, Glycine max
  Clone ID: PAT_MRT3847_100663C.1.pep
KATNVVLSKIKNFDPENASKIMGYLLMNLEESELIRLACSPDPVLHTLVLRVKNHLSGLTLSSTTPSSPSLPPSPLNPTARLTAISSNPFSRGGGPTNGFDFTRNHPSSPSSHSHAWNFPNNNPISPKSTPLFSYDNIRALSPRVVNDDCGDFVDEQQVNEYFPFLNDSSKNEDLVDPRLEFGVGAQNWHSGDSHLQHRRSYSASDVGFGCDEAAAAAPGLGYKPCLYFARGFCKNGTNCKFLHGAFTDSLDAIVGSPSKQLEGMEQREEFVRFNKAPQLQRIASGPSAPAREKYFEFLIQESQRAAAAFMMGEEFYNFGWDRPERNDFLAAISGEKPNSASRQIYLTFPAESTFKDEDVSEYFSKFGPVQDVRIPYQQKRMFGFVTFVYPETVRLILSKGNPHFICDSRVLVKPYKEKGKVPDKRQQQQQQQLERGDLSPCLSPSGFGSKEPYDFHLGARMLYNPHDILLRRKIEEQAELQQVLELQERRLKNLQLPDFKNNPIHHHQRSLSVGTPLVLPHQLHSHINDAGLSPDSIKGDITGYSGSFTSTNSLGIASEQQQQLQKEVDPAHIDDSESRNLMESGNAEGVDLSNSVGQALPDSLFASPTKAAGGYHADFSTLAEVNESAVFSASSSSQDKLEPTTSSSDVASH

SEQ ID NO: 143577 - protein, 79 aa, Glycine max
  Clone ID: PAT_MRT3847_100664C.1.pep
LGFSVAPYSLQNIKIYGTTLPARILMSKPFSPELLNFQSFKLTLLAFSFCTIFTKLFTLCRLALYITYPGAFGLPLLSN

SEQ ID NO: 143578 - protein, 101 aa, Glycine max
  Clone ID: PAT_MRT3847_100665C.1.pep
KRGWGGVTRTLSFLGMPPPSLVGFRGPNPNPGGENFSPLSRYLWFLGWGLFFFSHKGFCGPPGLLAPYPGRMGPPCWPRMYPPGRFFLGGSKGILFLGVGG

SEQ ID NO: 143579 - protein, 69 aa, Glycine max
  Clone ID: PAT_MRT3847_100666C.1.pep
NVETYSILMASGSYNCTTHVAGNCLLRAEVCLVHEQVREELPKRGRDEGEARDILAKRGGFILWHIKNR

SEQ ID NO: 143580 - protein, 70 aa, Glycine max
  Clone ID: PAT_MRT3847_100667C.1.pep
GRGTPLNFWSPHSGSLQFVLGFLSPTLSLKGKLQTSAQCFSVTPLFQFCFFKQKHFWRVLNLGFVQRLSF

SEQ ID NO: 143581 - protein, 67 aa, Glycine max
  unsure (1)..(67): unsure at all Xaa locations
  Clone ID: PAT_MRT3847_100668C.1.pep
AIGVTTELTKYTALNPTEAITVAITHTFTLFMNISIAANIXSSHLNPAITFELSIRNNITVITNVLY

SEQ ID NO: 143582 - protein, 100 aa, Glycine max
  Clone ID: PAT_MRT3847_100669C.1.pep
FYFILFPPPFFFFFWKGFFLFLGWGGLSPRFKPPGEKKKKKPGPEDFKKKGNWGLKEGRKEKEKKKREKKRREGEESHFFLWGPAKTAGGPSLISFFFWD

SEQ ID NO: 143583 - protein, 59 aa, Glycine max
  unsure (1)..(59): unsure at all Xaa locations
  Clone ID: PAT_MRT3847_10066C.1.pep
SYQQLRCXPDALXKTPQGEETXTEEGVXNKTSGSKGTSMKVSANHAGGLSLSTLAPGVP

SEQ ID NO: 143584 - protein, 50 aa, Glycine max
  unsure (1)..(50): unsure at all Xaa locations
  Clone ID: PAT_MRT3847_100670C.1.pep
RYIECCQVNLFLFWXCGIVKPQSLFLLAIRSKLVREFCQYHAFEFMGNPP

SEQ ID NO: 143585 - protein, 84 aa, Glycine max
  Clone ID: PAT_MRT3847_100671C.1.pep
LARGSMSSDGQNFRVPGSYIKGIAWGGRHSAVITDAGAVLTFGWGLYGQCGQGSTDDELSPNCVSSLLGIRIEGVAAGLWHTVC

SEQ ID NO: 143586 - protein, 82 aa, Glycine max
  Clone ID: PAT_MRT3847_100672C.1.pep
WGSLLAPLRLIRISCLLELSPMLSRNKMRTSCRAFCRIELFGSGKLACYCHSFGNLLLFWELLLQAYNHVHQDLGGQELTRF

SEQ ID NO: 143587 - protein, 59 aa, Glycine max
  Clone ID: PAT_MRT3847_100673C.1.pep
YKIGQSIFKSCHCENMLFPILKGRLKTFFWMFEQYEKDSNRSILPKQLKKVLEHFELLF

SEQ ID NO: 143588 - protein, 119 aa, Glycine max
  unsure (1)..(119): unsure at all Xaa locations
  Clone ID: PAT_MRT3847_100674C.1.pep
RAVSSEFGSRIFTSGTLRQYRKKHKHVDLRAVKKWSRQILEGLLYLHSHNPPVIHRDLKCDNIFVNGNQGEVKIGDLGLAAILQQANSAHSVIGTPEFMAPELYEEEYNEXXDIYAFGM

SEQ ID NO: 143589 - protein, 75 aa, Glycine max
  unsure (1)..(75): unsure at all Xaa locations
  Clone ID: PAT_MRT3847_100675C.1.pep
GLIQLPFRNLKKAPFFSKFEKAMVGISFIPPISFSKGCSPSSISEKKKRVLFPVLNKSGGGYKQKKTKKIINXPX

SEQ ID NO: 143590 - protein, 72 aa, Glycine max
  Clone ID: PAT_MRT3847_100676C.1.pep
KEVIIEVSPPSPTPDSIVVAIIPYFILLNIAFYAQLTHNKKKCYFCHAVVCQIGECLVLSSKSVTQNDSVSL

SEQ ID NO: 143591 - protein, 51 aa, Glycine max
  Clone ID: PAT_MRT3847_100677C.1.pep
DPLISSVRQCSYRGRGTHNSVQEMEGITQEKNVFFFQNSKKYYLFSRKKMK

SEQ ID NO: 143592 - protein, 146 aa, Glycine max
  unsure (1)..(146): unsure at all Xaa locations
  Clone ID: PAT_MRT3847_100678C.1.pep
MCSAISQVEQEELLEKLEVFKIKGRDKHGRKILRIIAKLFPARLVSVDVLKKYLEDKVFPKLGKRKFVVLYVHTGVQRSENFPGISGLRWIYDSIPANVKENLEAVYFILXHPGLQARLFLATFGRFLFKXGLYGKLKYVSRVDYL

SEQ ID NO: 143593 - protein, 203 aa, Glycine max
  Clone ID: PAT_MRT3847_100679C.1.pep
MCSAISQVEQEELLEKLEVFKIKGRDKHGRKILRIIAKLFPARLVSVDVLKKYLEDKVFPKLGKRKFVVLYVHTGVQRSENFPGISGLRWIYDSIPANVKENLEAVYFIHPGLQARLFLATFGRFLFNAGLYGKLRYVSRVDYLWENVRRNEVEIPEFVFDHDEDLDYRPMMDYGLESDHARVYGGAPTMDSPVTTYSMRCIS

SEQ ID NO: 143594 - protein, 365 aa, Glycine max
  unsure (1)..(365): unsure at all Xaa locations
  Clone ID: PAT_MRT3847_10067C.1.pep
HASDGMKIRGDXHICLMGDPGVAKSQLLKHIINVAPRGVYTTGRGSSGVGLTAAVQKDPVTNEMVLEGGALVLADMGICAIDEFDKMDESDRTAIHEVMEQQTVSIAKAGITTSLNARTAVLAAANPAWGRYDLRRTPAENINLPHALLSRFDLLWLILDRADMDNDLEMARHVVYVHQNKESPALGFTPLEPSVLHAYISAAIILSPSVPRELEDYIATAYSCIRQEEAPLKEARSNAPHSYTTVTSLLSILRISSALPRLRLSDTVAQSDVDEALRLMQMSKFSLYSEDRQKSGLDAISDIYSILRDEAARGNRMDVSYAHALNWISRKGYSEAQLKECLEEYAALNVWQIHPHTFDIRFIDA

SEQ ID NO: 143595 - protein, 81 aa, Glycine max
  Clone ID: PAT_MRT3847_100680C.1.pep
WGLIACDRLYGKLRYVSRVDYLWESVRRNEVEIPEFVFDHDEDLDYRPMMDYGLESDHARVYGGAPTMDSPVTTYSMRCIS

SEQ ID NO: 143596 - protein, 613 aa, Glycine max
  unsure (1)..(613): unsure at all Xaa locations
  Clone ID: PAT_MRT3847_100681C.1.pep
KKCKHNMLVXILDILVQHPNIVVDDSVEPDENETQKGVDYNGPIRVWGNLVAFLERIDVEFFKSLQCIDPHTRDYVERLRDEPLFLVLAQNVQEYLERVGNFKAASKVALRRVELIYYKPQEVYVAMKKLTELTEDGDNGVEASEEKGFEESRIPTAFVATPEVVARKPTFPENSRTIMDVLVSLIYKYGDERTKARAMLCDIYHHALLDEFSIARDLLLMSHLQDSVQHMDISTQILFNRAMSQLGLCAFRVGLISEAHGCLSELYSGGRVKELLAQGVSQSRYHEKTPEQERLERRRQMPYHMHINLELLETVHLVSAMLLEVPNMAANVHDAKRKLISKTFRRLLEVSDRQTFTGPPENVRDHVMAATRFLSKGDFQKAFDIIVSLDVWKFVRNRDTVLEMLKDKIKEEALRTYLFTFSSSYESLSLDQLTKFFDLPVSCTHSIVSRMMINEELHASWDQPTGCILFQDVEHSRLQALAFQLTEKLSILAESNERATEARIGGGGLDLPLRRRDGQDYAAAAAGSGTASSGGRWQDLSLSQPRQSSGRAGYVGGGGRPMALGQGSGYSRDRSGRGSGAGYQSGRYQGGSALRGPHGDVSTRMVSLKGVRA

SEQ ID NO: 143597 - protein, 188 aa, Glycine max
  Clone ID: PAT_MRT3847_100682C.1.pep
SYESLSLDQLTKFFDLSVSRTHSIVSRMMINEELHASWDQPTGCILFQDVEHSRLQALVFQLTEKLSVLAESNEKATEARVGGGGLDLPLRRRDGQDYAAAAAAGSGTASTGGRWQDLSPSQPRQGSGRAGYGGRPMTLGQAAGSGYSRGRGRGSYGGSGRTSQRGSALRGPQGDGPARMVSLKGVRA

SEQ ID NO: 143598 - protein, 40 aa, Glycine max
  Clone ID: PAT_MRT3847_100683C.1.pep
SCAKKAISVNFFVYETPFLEKDIAPLRVSRHNTRSLFFLS

SEQ ID NO: 143599 - protein, 102 aa, Glycine max
  Clone ID: PAT_MRT3847_100684C.1.pep
PQCSNVACLERQEEYLFAKPARDAAAKAKMEAEAPSTEEVPLHEDNEWNIRCLMILFLIIFMCVTEDTKHLSIEIDLIPDLLVAIIYAKDLIVSNLIPFLKF

SEQ ID NO: 143600 - protein, 151 aa, Glycine max
  Clone ID: PAT_MRT3847_100685C.1.pep
CHGFEIHVFGCNNTLSARLPLYQDHWQRQPTWGERHHNFFLLSPHSQLTNGCYVALAPTCRVRFNIRCDKKFSSNSTLYILLTINFWARFSTTLYYILNVSYGLPLHLIYITVSYGLPIRRIYSAFITVLSPSAPPPPPKEGGRHTVMTET

SEQ ID NO: 143601 - protein, 136 aa, Glycine max
  Clone ID: PAT_MRT3847_100686C.1.pep
MARTKQTARKSTGGKAPRKQLATKAARKSAPATGGVKKPHRFRPGTVALREIRKYQKSTELLIRKLPFQRLVREIAQDFKTDLRFQSSAVSALQEAAEAYLVGLFEDTNLCAIHAKRVTIMPKDIQLARRIRGERA

SEQ ID NO: 143602 - protein, 77 aa, Glycine max
  unsure (1)..(77): unsure at all Xaa locations
  Clone ID: PAT_MRT3847_100687C.1.pep
GRAEPSSRKNALIFNMRRQAVKIQAAGRGVXVRKHYCKNLWSDGVVEKAVLRWRLKRMGFRGLQGKTVDAGTGDQDQ

SEQ ID NO: 143603 - protein, 56 aa, Glycine max
  Clone ID: PAT_MRT3847_100688C.1.pep
VVFIAETEKEETEFLAYVLHQNSPPNNNSLNVTFIPQFDILFGFVFVVPVELFVFS

SEQ ID NO: 143604 - protein, 123 aa, Glycine max
  unsure (1)..(123): unsure at all Xaa locations
  Clone ID: PAT_MRT3847_100689C.1.pep
ITKYWGSSDLTIVTHTREAWAMLIKRWMGIVCTSVKTSMLCRRTHNLRTIQISAQDHGILFYQIRTAYTHHALVRNRSIYSISNYVTKISXHGGDSHLHNWYFQLGTRLKKLTIHLYLSSWSA

SEQ ID NO: 143605 - protein, 39 aa, Glycine max
  Clone ID: PAT_MRT3847_10068C.1.pep
KYILINCSSLFTNHTPESQRNISLISSPIRFPSVVFSQP

SEQ ID NO: 143606 - protein, 38 aa, Glycine max
  Clone ID: PAT_MRT3847_100690C.1.pep
SYSNALIPPLPSSVTRSLFRSLQFFRCYSTWIHTRSLC

SEQ ID NO: 143607 - protein, 78 aa, Glycine max
  Clone ID: PAT_MRT3847_100691C.1.pep
SRVFFPGGQPLVINPGFLDAQGDFIFLATNFKLKNSRDRNFSIVGPFSYLGEKSTVLDLPLYHAMCLPYNHKTMVATR

SEQ ID NO: 143608 - protein, 56 aa, Glycine max
  Clone ID: PAT_MRT3847_100692C.1.pep
VCSMHDVHVCDSGSCMISGIECRIIITLRNNILVEQTHHVICCRVGLFRFIILLED

SEQ ID NO: 143609 - protein, 204 aa, Glycine max
  Clone ID: PAT_MRT3847_100693C.1.pep
MLYNHTSSMSLPSPLYLNTTSFRLTRQSPFPFPRRRFNPPAFRSVSPLSSSPSASLFDLRGGKGMSGFHDVELKVRDYELDQYGVVNNAVYASYCQHGRHELLQNIGINCDAVARSGDALALSELSLKFLAPLRSGDKFVVRVRISGSSAARLYFDHFIYKLPNQEPILEAKAIAVRLDKNYRPIRIPAEMKSKFVKFIRIEDS

SEQ ID NO: 143610 - protein, 95 aa, Glycine max
  unsure (1)..(95): unsure at all Xaa locations
  Clone ID: PAT_MRT3847_100694C.1.pep
LHAFVQIFYHLNFTGLSKAVKKGDTIXIGKYLVTRRGNRLCWLXDIEVEGEYLTWLVNNTATLFESLITAHDYHIQIDLNTVCDSDYEALATWCV

SEQ ID NO: 143611 - protein, 222 aa, Glycine max
  Clone ID: PAT_MRT3847_100695C.1.pep
MDSNSVVSWPRMPENINGFGLKQNQSEEVHVLAVDDSTVDRKVIEHLLKVLACKVTAVDSGLRALQLLGLLDEQKIPSETNGFVGLKVDLIITDYCMPGMTGYELLKRIKESSTFKETPVVIMSSENVLPRIDRCLEEGAEDFIVKPVKLSDVKRLKDYMTTKEVRGELSQEEREGINKRKLLDTSDVSPSSPPSISSSPLPSSLSSVIDSPIRRLKMTNTD

SEQ ID NO: 143612 - protein, 44 aa, Glycine max
  Clone ID: PAT_MRT3847_100696C.1.pep
QIFFTQIKLNRQRNTTHFNLAQINYSPTLETRYRYDPILTIPHD

SEQ ID NO: 143613 - protein, 144 aa, Glycine max
  Clone ID: PAT_MRT3847_100697C.1.pep
GPEFPGLTHGPIITDYCMPGMTGYELLKKIKESSSFKETPVVIMSSENVLPRIDRCLEEGAEDFIVKPVKLSDVKRLKDFMTTKEVIRGELSQEEREGINKRKLLDTSDVSPSSPPSISSSPLPSSPSSVIDSPIRRLKMTGTD

SEQ ID NO: 143614 - protein, 49 aa, Glycine max
  Clone ID: PAT_MRT3847_100698C.1.pep
QMIMRSFIKINNLISDKMINDNFYYFIENKNKNHNRKFKLCLKINLISQ

SEQ ID NO: 143615 - protein, 61 aa, Glycine max
  Clone ID: PAT_MRT3847_100699C.1.pep
INNMAHGIQTLIPNSNFHNPQVAKSSSVLDFASYKLKNSAHCMLALKNDTIVMPKVRSSRT

SEQ ID NO: 143616 - protein, 49 aa, Glycine max
  Clone ID: PAT_MRT3847_10069C.1.pep
RPIRAYYISHSWHAQVCHKCKMMSDAIHTYKSNVSVPVPPQSIKCYYKY

SEQ ID NO: 143617 - protein, 122 aa, Glycine max
  Clone ID: PAT_MRT3847_1006C.1.pep
PIQSGCCKPPTGCSYNEETVVVTQDPDCYRWNNAPTLLCYDCDSCKAGVLENIRRGWHNISVLNVVVLVFLIGIYSIAFCAFRNARRAQTDYPHGVNRMTKVKPRWDYYCWRWWYNKKEELF

SEQ ID NO: 143618 - protein, 99 aa, Glycine max
  Clone ID: PAT_MRT3847_100700C.1.pep
GIRKVKVGTSFAIDVLEASFAPSNGAFRKDLSAPVMKPMLKFLNRTKSFFFLDVYPFFSWSADPLNINLDYALFQSKNLTVTDPGTGLVYTNHLDQMGD

SEQ ID NO: 143619 - protein, 83 aa, Glycine max
  Clone ID: PAT_MRT3847_100701C.1.pep
RLREDDRRGSLIRQLSSNHHGQFQNFLHFPNPNPNPPFLTLVVPLTPQIRQSVVRGECPLASSGFCERPRVVHREGGSFWGGG

SEQ ID NO: 143620 - protein, 39 aa, Glycine max
  Clone ID: PAT_MRT3847_100702C.1.pep
SRSRYTQHSQLSLDSNQSSHGYYFHTHCNVRLQDLLLCR

SEQ ID NO: 143621 - protein, 46 aa, Glycine max
  Clone ID: PAT_MRT3847_100703C.1.pep
AIMVHSWDIIKGVGIYCADSVLIIPNYLFHPFIAMADSIVSKSKLV

SEQ ID NO: 143622 - protein, 86 aa, Glycine max
  Clone ID: PAT_MRT3847_100704C.1.pep
RGLNPGAPKREPLEVWGPKKGEKNRGFFPRWGASNIGPGNSGCPPENFSNNWGPLYGKGGLNWGMSECKPQKVNCRELFGTPPRGF

SEQ ID NO: 143623 - protein, 254 aa, Glycine max
  unsure (1)..(254): unsure at all Xaa locations
  Clone ID: PAT_MRT3847_100705C.1.pep
MYYRSDANFSTTVNNDIDNVNTNSQRIGVNNDKAGLALCDEDLGLIEGDMCASSTGVVRVQSRKKAEMFLVRTDGFSCARERVSESSLAFTHPSTQQQMLMWKTTPKTVLLLKKPGEHLMEEAREVASFLYYQEKMNVFVEPDVHDIFARIPGFGFVQTFYTQDXXDLHEKVDFVACLGGDGVILHASNLFRDAIPPIVSFNLGSXLGFLTSHNFEDFKQDLQQVIHXYSTRDGXVYITLRMRXRCEIFRKGKA

SEQ ID NO: 143624 - protein, 34 aa, Glycine max
  Clone ID: PAT_MRT3847_100706C.1.pep
NSARGTIIPVSFGPTNSITSCKVVINSGFLRITS

SEQ ID NO: 143625 - protein, 52 aa, Glycine max
  Clone ID: PAT_MRT3847_100707C.1.pep
ANFSTEGNFRARVDLQRTHRIKGMIKLAVTVVISENTCIALARAMNKFLRGR

SEQ ID NO: 143626 - protein, 73 aa, Glycine max
  Clone ID: PAT_MRT3847_100708C.1.pep
MATTVLTTLRQCTGFRPHFSDHPAKNLDGVQPMSRTVKGALGPLCDYIGSSTTLTMVALTTLILYTGRIVWST

SEQ ID NO: 143627 - protein, 76 aa, Glycine max
  Clone ID: PAT_MRT3847_100709C.1.pep
VSEPHYWEVIFPIEVWGPNNGFEKRRSEWANQTSWHLSFLIDRPKQAAVFDIIFFSERDNKIAGETLMPSFFCTQA

SEQ ID NO: 143628 - protein, 55 aa, Glycine max
  Clone ID: PAT_MRT3847_10070C.1.pep
FSIFHMYNRRPKLLLTMLESVRERPVFYSNEHYSIRSRAVGLGRFIGTIVCSKYP

SEQ ID NO: 143629 - protein, 65 aa, Glycine max
  Clone ID: PAT_MRT3847_100710C.1.pep
ENIISCSSLCCIIPLQFHDRDFQWVMKVTRTACKSVVLLSASHSWIPELKFDESTPCILGHPTRP

SEQ ID NO: 143630 - protein, 44 aa, Glycine max
  unsure (1)..(44): unsure at all Xaa locations
  Clone ID: PAT_MRT3847_100711C.1.pep
TPVDHEXPPSASECRNPKSLNLKQTSGINNLVGSSSGATLVTNF

SEQ ID NO: 143631 - protein, 52 aa, Glycine max
  Clone ID: PAT_MRT3847_100712C.1.pep
VGTTHPCPSRGGCCQLSHEHPLMRGTEMSHDVLNATHLPTRIGEQPNPRNLP

SEQ ID NO: 143632 - protein, 148 aa, Glycine max
  Clone ID: PAT_MRT3847_100713C.1.pep
DIAFPQERPRNHLDMRHRLDSKGQREGKLIDYRVSELRVVELLDGLCEKMQDYTLKIDTNTYEWFKVDSWDNLTTNKQEARAYSKDISSYCGRLLEETEDEFAELIKKGSVKVGGVSKVLCQDLSKHCSQMSVSYAAEVDDDGHDGEL

SEQ ID NO: 143633 - protein, 167 aa, Glycine max
  Clone ID: PAT_MRT3847_100714C.1.pep
PVFGETRALAPGGVRIGAPPLPFRGLVEKAFYPIGEFLPRGGALPLGVPKGQGKLFKGFPKGLVTTRALEVFKAGVGRFFAPFARPGFRGFEMRAKGWVPSKRFLFNWGPQSWAPRAEMGKKGIGVFPFGGGGGFREGVSIQKKKNFWPPLPGFGSPGWSYFFPFTH

SEQ ID NO: 143634 - protein, 536 aa, Glycine max
  Clone ID: PAT_MRT3847_100715C.1.pep
MFNHSALHYYFLLFFTCTCLARQQCQFKQECQLDTIHALKPDNLIESQGGVTETWNASHPELCCAGVAFIKRTINPNGLHLPSYVNYPELHFVLQGEGVLGIVIPGCDETFEEPQREREHDRHQKVRYLKQGDIFAVPPGIPYWTYNYANVSLVVITLLDTANFENQLDRVPRRFYLAGNPKEEHPCGRKQEEGNNINMFGGFDPRFLAEASNVKVGITKKLQSHIGDQIIKVEKGLSIIRPPLEHEVREAEVEEKPKTREHCECQKERKHKEGEGEEEVVQEKEIRKRKHHIGEHEGCGECEDKEEEEQSRSRERGEWHEHKGQQHGKEKGRERYKEGGEGRVRSNVLEEILCTLKLHENIADPSHADIFNPRAGRVRTINSLTLPVLKLLRLSAQWVKLYKSGIYVPHWSMNANSVAYVTSGGGWVQVVNSQGKSVFSGAVGRGRVVVVPQNFAVAIQAGRDGMEYIVFRTNDRAMMGTLVGPTSAITAIPGEVLANAFGLSPEEVSELKNNRKEAVLSSPASHHSPNPLIVTM

SEQ ID NO: 143635 - protein, 95 aa, Glycine max
  Clone ID: PAT_MRT3847_100716C.1.pep
TTRSSSIAFLLISRMHCAIYGGNWLITRRFKIIACVMQQWLGPLLPIILGTLCHFHYFKQWSCLLLNKEASSMTTRSIFQIEIIIIYQCPLQCSR

SEQ ID NO: 143636 - protein, 71 aa, Glycine max
  Clone ID: PAT_MRT3847_100717C.1.pep
LLAELDNVAFRRKSNSSIVDSRTTVKQIKDAFIEFQQGSDVAIVLISQNVANMIRFVVDSYIKPVPAMLVY

SEQ ID NO: 143637 - protein, 75 aa, Glycine max
  Clone ID: PAT_MRT3847_100718C.1.pep
AGDALSPLSFVSLTHLGILHFPPRAFISTYRSRSSAQPVIHFSDARLSTLHIDNCMRHLNRRCVHFSSCVVLTDQ

SEQ ID NO: 143638 - protein, 53 aa, Glycine max
  Clone ID: PAT_MRT3847_100719C.1.pep
LLVRHSIKGCYVVIIGGEDWTWKPIWDAILCKKPLNRITGPNSSPTEHKSEAF

SEQ ID NO: 143639 - protein, 135 aa, Glycine max
  Clone ID: PAT_MRT3847_10071C.1.pep
QSREGCSQGASLTSEESDLAHRSEDLEERVDTGSTMAVTEGDLFCDKQMTPNKNLRAANPKKRGEPEAVRVSVQVLGAMTLFFPTFFRNSNGFQAPGPFFQKADQRASYFKRISGLFLPFRMPFGMAFLRARAST

SEQ ID NO: 143640 - protein, 95 aa, Glycine max
  Clone ID: PAT_MRT3847_100720C.1.pep
FGGWGVFLFFFFFFFFLFFFLEKGARKRKIPPGNPGPLRPVSPPHFFGTWTKKGGGLPPKCSFPQGGKRPHPPRPSGLGPPPEPPGGPKDPRRGV

SEQ ID NO: 143641 - protein, 77 aa, Glycine max
  Clone ID: PAT_MRT3847_100721C.1.pep
DPRVRPLVSPLLRMFQFQNTVYIIQAGYFISTLDLFILLTLLNSLPHSTFSTTLKSIAKMIITTIYQSSTYLYNMLL

SEQ ID NO: 143642 - protein, 138 aa, Glycine max
  unsure (1)..(138): unsure at all Xaa locations
  Clone ID: PAT_MRT3847_100722C.1.pep
LGTTVQIVPDMTPRFXLLSTTTNGDFVQGKDLALVKVNXLCAGDGLTSCFTLIPPVGILASXDKGLIVEYSVRMSYVAHYVNQPQKXDMLEGNFXSYDIKILLYMGKRYPYIKHIFACGKTLLLDIIKCLVNIFQKIL

SEQ ID NO: 143643 - protein, 92 aa, Glycine max
  Clone ID: PAT_MRT3847_100723C.1.pep
AGVAERLRAYLEGTCVEWLRRYLEHGKETLLRLDPPKAHVTLHPRPEGDVTLRCWALGFYPADISLSWQLNGEDLTQDMELVETRPAGDGTF

SEQ ID NO: 143644 - protein, 141 aa, Glycine max
  unsure (1)..(141): unsure at all Xaa locations
  Clone ID: PAT_MRT3847_100724C.1.pep
GSRWGGERAKIFVNGNLLTLYRGGVSGSGFHSKHEDLLGNIDMHLRLVPGDYAGTDTGYHLSCVGPTHDQIDFELLDDLIGDTYALHTNVYSQGKGNREQQIHLWVNPTNDYHTYSVQWNXQSIIFSEDGTPIWEIKSLET

SEQ ID NO: 143645 - protein, 86 aa, Glycine max
  unsure (1)..(86): unsure at all Xaa locations
  Clone ID: PAT_MRT3847_100725C.1.pep
FYIFFIQFFTFNQQXKQIWKGRGVKNNLNKPQGKTKDARKPCNYQTPSYNKPLKNQEHAEFNWTKIHWGVKPNPYGNRNHKLYRNQ

SEQ ID NO: 143646 - protein, 54 aa, Glycine max
  Clone ID: PAT_MRT3847_100726C.1.pep
ALSHRFCKCRPSNRIRYLNHFFMLQIGMFWRYCIQAYLLCLYLQLSFSVSGCRF

SEQ ID NO: 143647 - protein, 50 aa, Glycine max
  Clone ID: PAT_MRT3847_100727C.1.pep
GGVRIFFLSSHFFCALFSFLLRKKKDLDSSHAPPKDCALPPNIQKAMTMG

SEQ ID NO: 143648 - protein, 140 aa, Glycine max
  unsure (1)..(140): unsure at all Xaa locations
  Clone ID: PAT_MRT3847_100728C.1.pep
GQTRDAANLIHMAQWESARREAEARLVRESKLQVQNNLGSCSSTQPARLVLNKITTQQQPSLPPCLDILKAWQSSWNKPPQQPTTKENNTKIMHSMYAMMLSTDDTLESPTSTLCXPGTTTTTTMLSISNNIGLLFNENN

SEQ ID NO: 143649 - protein, 428 aa, Glycine max
  Clone ID: PAT_MRT3847_100729C.1.pep
MRARSLVAAASLAPLLGRLLRTKSSVCCVESFSLANFGEVFYRFAMRGRQRVSSREHILGHVRGGSFPAVRAPPAKPCWRRSLRHVIVASLSSFLYGYHIGVVNETLESISIDLGFSGNTMAEGLVVSICLGGAFIGSLFSGWIADGVGRRRSFQLCALPMIIGAGMSATAKTLWGMLLGRLFVGTGMGLGPPVAALYVTVFSLSAVREPFGALTQIATCLVRMGSLFIGIPAKEIVTWWRICFWVSVIPATMLALFMEFGAESPHWLFKRGRTIEAEASFEKLLGGVHVKPAMTELSKSDRGDGSDSVKLSELICGRYFRVMFIGSTLFALQQLSGINAVFYFSSTVFESFGVPSAIANTCVGVCNLLGSVVAMILMDKLGRKVLLLGSFLGMGLSMGVQVIAASSFASGFGSMYLSVAGMFWLMLH

SEQ ID NO: 143650 - protein, 170 aa, Glycine max
  Clone ID: PAT_MRT3847_10072C.1.pep
VLLFGNKRVLEWHLRYKIVLGVVNALHYLHEDAEQCVLHRDIKSANVLLDTEFNTKVGDFGMAKLVDPRLRTQRTGVVGTYGYLAPEYVNVGRASRESDIYSFGVVSLEMASGRRTYQDGEFHVSLMNWVWQLYVEGEIMRAADEKLNNEFEVDQMRSLLVVGLWCTNPE

SEQ ID NO: 143651 - protein, 220 aa, Glycine max
  Clone ID: PAT_MRT3847_100730C.1.pep
MASATEAINKLLFIFLFLQQYSLLIMADDSVSVPVPADWPQQFHSVLFINRSGDLQKTDLWYDWPNGRNFNIIQHQLGVLKYDLEWDNGTSFYYTLEPFDKTCKIVHFEVGILRPNWLHGANYLGQEHVDNFLCNVWEKVDFISYYEDVLTRRPVKWIFSSSGMVAHVMTFEVGAVLEDKHWQAPVYCFGDAETQNKTSTSLLHSQDAFPGGSSHGILMR

SEQ ID NO: 143652 - protein, 47 aa, Glycine max
  unsure (1)..(47): unsure at all Xaa locations
  Clone ID: PAT_MRT3847_100731C.1.pep
SVRRTDFHPGSNSATNTIGAKMCDXPLPNTPTVYDWLFTEETITRHR

SEQ ID NO: 143653 - protein, 97 aa, Glycine max
  unsure (1)..(97): unsure at all Xaa locations
  Clone ID: PAT_MRT3847_100732C.1.pep
KDLVEGNSSFDIKSRSRLEKVASTKAXFVRWKNPSNHDIIRQLAHMSSPTFALIRTRSRRTPYRSVPRVTQKIDPQYNEGQAHMETNLVKPSPDDVE

SEQ ID NO: 143654 - protein, 419 aa, Glycine max
  Clone ID: PAT_MRT3847_100733C.1.pep
MLSSLLNPSFTTTLPIHSILIPNNRRASTVVSCTSSHLTTNNHSHVSSPPNIKDEARRRPAAENDFTAKYVPFNAGFDSPETYSLDEIVYRSRSGGLLDVQHDMEALGRFDGAYWRALFDSRVGKTTWPYGSGVWSKKEWVLPEIDPDDIVSAFEGNSNLFWAERFGKQFVGMNDLWVKHCGISHTGSFKDLGMTVLVRLELEPLEPLERLVGVGCASTGDTSAALSAYCASAGIPSIVFLPANKISTAQLIQPVSNGSLVLSINTDFDGCMKLIREITAELPIYLANSLNSLRLEGQKTAAIEILQQFNWEVPDWVIVPGGNLGNIYAFYKGFKMCKELGLVERIPRLVCAQAANANPLYLHYKNGFKDFNAVKAETTFASAIQIGDPVSIDRAVHALRNTEGIVEEATEEELMDAMV

SEQ ID NO: 143655 - protein, 55 aa, Glycine max
  Clone ID: PAT_MRT3847_100734C.1.pep
ALCMMDRWACKLQRLIENRTDGHRVYSPWEQGNPGNRTKIMRTSHGYNKQTMGDL

SEQ ID NO: 143656 - protein, 105 aa, Glycine max
  unsure (1)..(105): unsure at all Xaa locations
  Clone ID: PAT_MRT3847_100735C.1.pep
KKGEKKITLFSINQNGPKRLFGNKLKKXGEKVVPKKKGINFSRENGCLFFETRGKTRVNVHQCFXKLVFKILDTPTLKTEGSKGVKKNIFKDRPPPFYASPSSCC

SEQ ID NO: 143657 - protein, 42 aa, Glycine max
  Clone ID: PAT_MRT3847_100736C.1.pep
GGLWRGGGFVTLCDQWKERESMNKPPRDAFNHGEKEPAWRRI

SEQ ID NO: 143658 - protein, 129 aa, Glycine max
  Clone ID: PAT_MRT3847_100737C.1.pep
MTDSFLRDVECCIIQPQNSDQWVWLADTAGQYSAKSAYSVLRGESPEEVQVEAFQELWKLKAPNKISAFAWRLLNDRLLTRANLTWRQIDLEDNTCPFCSSMEESAGHLFFHCRKFLPVWCLVGIAVLG

SEQ ID NO: 143659 - protein, 95 aa, Glycine max
  Clone ID: PAT_MRT3847_100738C.1.pep
LCPPVGRVPPQISLQIVAPVNEIFALDHSPPPFFTLQNCNFVRDGFPKIPSRSCPPLTPSPKIFNVGLGPLPVGVFLPLVLWNLYPTPPQRREVF

SEQ ID NO: 143660 - protein, 47 aa, Glycine max
  Clone ID: PAT_MRT3847_100739C.1.pep
VKKTVCSIHSKNVCCMKSVPFHLHSSIERARKEEFSSGYKFFQVVKK

SEQ ID NO: 143661 - protein, 83 aa, Glycine max
  Clone ID: PAT_MRT3847_10073C.1.pep
GFFNAEFSPCLPPLSGHNPLGFSCVSLPRFPPYFSGLFAGCIFCGIAILLTVLPRALLCPVFCQAFIRLSLGPFVSRSGIARV

SEQ ID NO: 143662 - protein, 47 aa, Glycine max
  Clone ID: PAT_MRT3847_100740C.1.pep
KKPIFLTYFSCKNNFNVARCVVTTLFPYVRDGYPLTLILWNHPLYPI

SEQ ID NO: 143663 - protein, 277 aa, Glycine max
  unsure (1)..(277): unsure at all Xaa locations
  Clone ID: PAT_MRT3847_100741C.1.pep
FDKAASKFQEVAALAFFNWGNVHMCAARKRIPLDESAGQVVVAEQLQVAYEWVKEKYSLAREKYVEALSIKPDFYEGLLALGQQQFEMAKLHWSFALAKKIDLSGWDSKETLQLFDSAEEKMKAATHVGIXWEKLEEQRAKELPRVRAARRRQKGRRRKKQGATEGESSSVGGQGEISAEEAAEQAAVMRSQIHLFWGNMLFERSQVECKLGMTGWKENLDAATERFKLAGASEADVSMVLKNHCSNGDAKDGDDKKVENPQHNKTVKPEINKAHQV

SEQ ID NO: 143664 - protein, 65 aa, Glycine max
  Clone ID: PAT_MRT3847_100742C.1.pep
LLTQLGVLVSMKWRLPSPKIPPPKPELLILGTQTQTLILKYADRKNTPSQQNLKSQLEQYLLPVD

SEQ ID NO: 143665 - protein, 47 aa, Glycine max
  unsure (1)..(47): unsure at all Xaa locations
  Clone ID: PAT_MRT3847_100743C.1.pep
INLTTPRDKHTTYLLTCSFXMICKRRKNANHFCKLSLFLSYTTNTYS

SEQ ID NO: 143666 - protein, 134 aa, Glycine max
  Clone ID: PAT_MRT3847_100744C.1.pep
EKRRKQRGRRVVRRKGPKGGRVIVSGAMLVEVETVLQTQEPVIKPIWNTFASSLSGIWKGVGAVFSPITAEMEPMEIGSKNEHLYDCYTLSRIEAVPSVSGERTSQIQRKVNWVTLNPYGEIPQHIEGSNVAKD

SEQ ID NO: 143667 - protein, 85 aa, Glycine max
  Clone ID: PAT_MRT3847_100745C.1.pep
GAPGVGRLQNGLLPLYDMGDPPYHKGAAIKSLLYQESLSHKLNKNRKPPFWAPQVKKNMGQMWFCRIFERAPLGKKRTRSFFPPC

SEQ ID NO: 143668 - protein, 69 aa, Glycine max
  unsure (1)..(69): unsure at all Xaa locations
  Clone ID: PAT_MRT3847_100746C.1.pep
VDDRHCRPRLAIIEYIPLSASXSGVRTSDDKLGALCMQSLQDNVHSIREAAANNXKRLAEECGPAWAMQ

SEQ ID NO: 143669 - protein, 94 aa, Glycine max
  unsure (1)..(94): unsure at all Xaa locations
  Clone ID: PAT_MRT3847_100747C.1.pep
XRXXXXSTLXXXXPXXXXNLXXTXLRXXXXTXXXXGXAQXXXXXQXXXTTTEPSGQSXXXXAXNXXXXAXXXEXXXXVXSXXDXLEXXSXRXXX

SEQ ID NO: 143670 - protein, 68 aa, Glycine max
  Clone ID: PAT_MRT3847_100748C.1.pep
ILAKLASCIFSIGITTGTIRWEELIALYHQYLSALSLRVVHVHHPFCIPHTNSTGIFPEKRADDNLLL

SEQ ID NO: 143671 - protein, 64 aa, Glycine max
  Clone ID: PAT_MRT3847_100749C.1.pep
HNDVTQIRIILLISTHKFYTSPITFGFAEYEALKGSTQAQESCWMGNGKRCQASWHKNGLRLIV

SEQ ID NO: 143672 - protein, 42 aa, Glycine max
  Clone ID: PAT_MRT3847_10074C.1.pep
IKEHTTPWEIWKTINVQLSLTLTNLSILCSSTSIFPYQLSIP

SEQ ID NO: 143673 - protein, 276 aa, Glycine max
  Clone ID: PAT_MRT3847_100750C.1.pep
ARAARVRLQEDDRRVLKRYKMEECNLAKSPIDFGLKLGAGLDEKPVDATLFKQMVGSLRYLCHSRPDIAYGVGLVSRYMNDPRTSHMATPKRILRYVKGTLDYGLLFSKASHNQGLRLIGFSDADWSGDLEDNKSTTRYVFKLLGSTICWSSKKQKDVGLSTCESEYMVAASAACQSAWLESLFVELKIQLYSVVQLNMDNESVICLANNPIAHGRTKHIGTKYPYLRDQVRKERISLAYCKSEEQEVDILTKALRGEKFYKFREKLGIVNCLNLN

SEQ ID NO: 143674 - protein, 51 aa, Glycine max
  Clone ID: PAT_MRT3847_100751C.1.pep
KKKLLLNTNILFSANILYSVIYNNHYVFDNNDILFFFPRLTLFPIMPPFPF

SEQ ID NO: 143675 - protein, 67 aa, Glycine max
  Clone ID: PAT_MRT3847_100752C.1.pep
MGNVHVHISIVDIGHVDSGKSNSTGHLIYKLGCIEKRVIERFEKDAAEMYKMSFKYAWVLDERKAER

SEQ ID NO: 143676 - protein, 97 aa, Glycine max
  Clone ID: PAT_MRT3847_100753C.1.pep
GPGFLFRGPTGSPGFFIGRFWPFGEPPLFGSPDPFRGLRGFPGVKFASPPGFPRFLGLGTVSQGRGVSFLASKPPGFLVFNFSKAFLPPPPLFFFGF

SEQ ID NO: 143677 - protein, 141 aa, Glycine max
  Clone ID: PAT_MRT3847_100754C.1.pep
MDVEVRQIFNKFDKNGDGKISVTELKDMLAALGSKTTDEELKRMMEELDQNGDGFIDLKEFADFHCNGGAGKDDSKELRDAFDLYDVDKNGLISAKELHDVLRNLGEKCSLSDCRRMISNVDADGDGNVNFEEFKKMMTRS

SEQ ID NO: 143678 - protein, 78 aa, Glycine max
  Clone ID: PAT_MRT3847_100755C.1.pep
TGKTPALCLPALKKLDQDNNAIHVVILVPTRKLPLQTSLVCKELGKHLKIHVMDSTGGTSLTYDRLILYHPAHVLCGT

SEQ ID NO: 143679 - protein, 89 aa, Glycine max
  Clone ID: PAT_MRT3847_100756C.1.pep
SLSKFHCYLSNLNFKPCHRFYHIFNLTGMLKTVPEKDIWRRPRRKDFETDDALGRRCISYKLCRDQRHGGQQTQKELAVHMETEDPFKA

SEQ ID NO: 143680 - protein, 51 aa, Glycine max
  Clone ID: PAT_MRT3847_100757C.1.pep
DPRVRSRMDSPMDRLFCYSLSANRGELIPHGPIFYPYSLLQIISNNLISTI

SEQ ID NO: 143681 - protein, 70 aa, Glycine max
  unsure (1)..(70): unsure at all Xaa locations
  Clone ID: PAT_MRT3847_100758C.1.pep
LRRRSPRLLLCGPRLGFGFLRFGLMALPLVPFCWPYLWISFWASLLPSVXGASPLVRPPMRDGLGSCLKG

SEQ ID NO: 143682 - protein, 261 aa, Glycine max
  Clone ID: PAT_MRT3847_100759C.1.pep
LGYRLRNLLDGLIDERQTAFIRNRHILHGILILNEVVDEATKRKKPTMIFKVDFEKAYDSVSWAFLDYMMERLGFCLKWRQWISACLHSATISILVNGSPTKEIVPSRGLRQGDPLAPMLFNIVAEGLTGMMREAVNKNLYRSFLSGKQNEPINILQYADDTVFVGEASWDNILVLKSMLRGFEMVSGLRINYAKSQFGVVGFQANWAQQAAQFLNCRQLDTPFYYLGMPIAVKASSMVVWEPLLNKFQAKLSKWNQKTLS

SEQ ID NO: 143683 - protein, 229 aa, Glycine max
  Clone ID: PAT_MRT3847_10075C.1.pep
PRVRAHQFTSQNMHYMSYQQNVITSRQPNSQHIQPNMVSPGQPNSQQVQHNMHGQPFENQQTTYPKVEVAEFKNGSQVGHSLSHYPQRSALPVQNNQNNPAEVGSGQVPNVGVNAGQPQQFRALSGSMQQSPSGSDLYYQHGPNFHSQMSPGMMHGHPSNVHPAGQKMGHEDNLHGRAGNEYDYNSTKDMSTMGCQQPDITPIPIPRNQQDMRIGNAPFQNVMPSGNGS

SEQ ID NO: 143684 - protein, 170 aa, Glycine max
  Clone ID: PAT_MRT3847_100760C.1.pep
MAAACSSSVLLLLLAAAADLAGMSANAATFTITNNCGFTVWPAATPVGGGTQLNPGGTWTVNVPAGTSSGRVWGRTGCSFNGNSGSCQTGDCGGALACTLSGQPSLTLAEFTIGGSQDFYDISVIDGYNLAMDFSCSTGVRLVCTDPGCPDAYHHPNDVKTHACGGNSNY

SEQ ID NO: 143685 - protein, 65 aa, Glycine max
  unsure (1)..(65): unsure at all Xaa locations
  Clone ID: PAT_MRT3847_100761C.1.pep
TYSXDSSRAGSXFFFXFFVFFSIESLQHLYLTKGMVRCEEKVSSPQQGSPLQNILYFLYMTSPSK

SEQ ID NO: 143686 - protein, 137 aa, Glycine max
  Clone ID: PAT_MRT3847_100762C.1.pep
MSTSDKSEVVERGAKDDEKPKEEHEKGGFLDTVKDFIQDIGEKIEGAVGFGKPTADVTGIHIPSINLEKAELVVDVLIKNPNPVPIPLIDINYLVESDGRKLVSGLIPDSGTIHAHGEETVKIPLTLIFDDLRNTYD

SEQ ID NO: 143687 - protein, 83 aa, Glycine max
  unsure (1)..(83): unsure at all Xaa locations
  Clone ID: PAT_MRT3847_100763C.1.pep
ALAFLSFELVAHFSGLRSLSQPXNLHLIPQTSVLPGWFHTAYVSWLEFRVDYIAPLIQSLSTFCILLFLIQSVDRMVSCLGAS

SEQ ID NO: 143688 - protein, 358 aa, Glycine max
  Clone ID: PAT_MRT3847_100764C.1.pep
AKEEISSLEKEFSSYKVRAHALLQKKDAELAAAKDSEQLKALEETLREVENEVLSITEERDRVLQDLQSAMANHEKEIAENTALENVKQHIRSFEIKLDSANVKHLKEKEEWGLSLQNVEETWRIRCEAMKAENEATATKDMQKELEEFKQRCKKLKEEHASFHDLADRMIEEKGYEISRLIDENKNLRQSLQSRPPVDQNDNYSTAMHKLDSTNLSPSAAEQQILILARQQAQREEELALSQRHILALQEEIEELERENRLHSQQEAMLKDELRSMERSKKREGVDMTYLKNVILKLLETGEVEVLLPVIGMLLQFSPEEIQKCQQAYHNSTDVPPPNPASDTSGSGLSLFSRFTFS

SEQ ID NO: 143689 - protein, 139 aa, Glycine max
  Clone ID: PAT_MRT3847_100765C.1.pep
AKEEISSLEKEFSSYKVRAHALLQKKDAELAAAKDSEQLKALEETLREVENEVLSITEERDRVLQDLQSAMANHEKEIAERDTALENVKQQIRSFEIKLDSANVKHLKEKEEWGLSLQNVEETWRIRCEAMKAENEATA

SEQ ID NO: 143690 - protein, 90 aa, Glycine max
  Clone ID: PAT_MRT3847_100766C.1.pep
KGDGGGILVTTAIVPCKCKETSRVMYNKYHNREGEFTGCSACYLAKDIVHFLPLNMSSHKILLENCIMSLYDFSIGNAKGMRSVPLSSCL

SEQ ID NO: 143691 - protein, 89 aa, Glycine max
  Clone ID: PAT_MRT3847_100767C.1.pep
FVFGFQLSNRGVGIRRQVWPPKDVKSHDTAPLDQVFGVFLFPLLMPWRIVYTTSLGASYSSKLSACRTTGFKPQDSPHYSYLILYCTIT

SEQ ID NO: 143692 - protein, 81 aa, Glycine max
  unsure (1)..(81): unsure at all Xaa locations
  Clone ID: PAT_MRT3847_100768C.1.pep
MAKDVEVAERGSFSGKDFQDPPPAPLIDAXEELTKWSFXKXLLIAEFIATXLLFLYITCAHRYRGTKHQTDHADACGGGWH

SEQ ID NO: 143693 - protein, 79 aa, Glycine max
  Clone ID: PAT_MRT3847_100769C.1.pep
IAFRHSFLSPIYLSELCELVAPVTQQYGDEAIVTNNAQPVIPRPIADLLCYPIHRFGHCYPYSVYAYVPPPPPPSRRYY

SEQ ID NO: 143694 - protein, 73 aa, Glycine max
  unsure (1)..(73): unsure at all Xaa locations
  Clone ID: PAT_MRT3847_10076C.1.pep
KGFPQDGVCGEICTFVIEKSFGYFNSPVXKNSGVNVSTPYAANLEKMAVPKVXKIVRSSKKARSRYVPLEEFV

SEQ ID NO: 143695 - protein, 84 aa, Glycine max
  Clone ID: PAT_MRT3847_100770C.1.pep
ERKCEMWTVCPLATYRLAFSCDITLLATRITTRVSCETFSTTYKTHLVIVILCQTLCLVNIDVLVWRFEIVQGKRDLDLTLRSI

SEQ ID NO: 143696 - protein, 37 aa, Glycine max
  Clone ID: PAT_MRT3847_100771C.1.pep
ELRLDPKQLMRCNGRNHKSNCRQFATLCCYVVSIQTK

SEQ ID NO: 143697 - protein, 227 aa, Glycine max
  unsure (1)..(227): unsure at all Xaa locations
  Clone ID: PAT_MRT3847_100772C.1.pep
SPTRPIFKSFCEKNADGQSMLASTLIPQPYSMNHAFLEEDVNMSFGSMLLHSLTLGENGDLETCCRAASVLSHMLKDHLQCKERVLRIEIEAAPMQSLGAPEPLMHRMVKYLAVASSMKFHDGKSSTSGNSYVQAIILKLLITWLADCPSAVHCFLDARPHLTYLLELVSNSSETVCIRGFAAVVLGECVIYNKSTDRGKDAFAIVDTIXRKMGLSSYFFKIDEMQK

SEQ ID NO: 143698 - protein, 178 aa, Glycine max
  unsure (1)..(178): unsure at all Xaa locations
  Clone ID: PAT_MRT3847_100773C.1.pep
MAMKTAEEHEVGISCFISDLPGFRGILKQXVDRDGAVVQLSSFDAPLEEPEENRTNTHDTVVSYASQIESFKSLAEEYDAILLEEFINKINAGGEDSVSPIVLSPDSDKSHRKAMHNFFKENFKFLVTDVVNGPDASSKCIRVRLNSXVTQQQRQKLQERKERDDXAFDSRGSKNCLE

SEQ ID NO: 143699 - protein, 89 aa, Glycine max
  Clone ID: PAT_MRT3847_100774C.1.pep
SGRLGVYNSSAPIVSTPHPVGSIPLLRAVPLLLFLLRPFWTSSPLRPFWLFFHLANCFFPPFPLISLSLLFSPVLLFFSLPFCFVFLSP

SEQ ID NO: 143700 - protein, 39 aa, Glycine max
  Clone ID: PAT_MRT3847_100775C.1.pep
SQVPFSSTIVLWIKFDCSFLCAFSIVLQSKLEFDYRYIQ

SEQ ID NO: 143701 - protein, 202 aa, Glycine max
  Clone ID: PAT_MRT3847_100776C.1.pep
RLPEYLECYKLICERKVKPLDLVALLKSLGEEKCIVFTRSVESTHHLCKLLNCFGDLKIGIKEFSGLKHQRVRSKTVGEFRRGEFQVLVSSDAMTRGMDVEGVRNVINYDMPKYTKTYVHRAGRTARAGQTGRCFTLMSKDEVGGFKKLMKKAEASDCLEYTVPSSLIEALHSTYQSALTKLKEKILESRRKPRISLVNRSK

SEQ ID NO: 143702 - protein, 96 aa, Glycine max
  unsure (1)..(96): unsure at all Xaa locations
  Clone ID: PAT_MRT3847_100777C.1.pep
MKACYPEKGSGVEISPXPVESGTPATFKISATYRQAIYGGESVNGVPYVGAPDHTEGIDLXHEVSXAVANGKLLISHTQTLPSITTPGPYSLEMTL

SEQ ID NO: 143703 - protein, 109 aa, Glycine max
  Clone ID: PAT_MRT3847_100778C.1.pep
AQRFLMLVYVMLFWIYIRCFIKSLSCSIVGSTDKIEGENSGVPEKTKDKSCQSIKVRTNIHENSFAYERIYKRFFYCTFYDLIRMIILCFFGLHIINPPHYFLFNIKRN

SEQ ID NO: 143704 - protein, 35 aa, Glycine max
  Clone ID: PAT_MRT3847_100779C.1.pep
SSKEFITFGLYYMRPTNRQISVEHKQHLTYSKNKV

SEQ ID NO: 143705 - protein, 97 aa, Glycine max
  Clone ID: PAT_MRT3847_10077C.1.pep
AAELVGGGGRADANMQIFVKTLTGKTITLEVEPSDTIENVKAKIQDKEGIPPDQQRLIFAGKQLEDGRTLSDYNIQKESTLHLVLRLRGGIIEPSLR

SEQ ID NO: 143706 - protein, 54 aa, Glycine max
  Clone ID: PAT_MRT3847_100780C.1.pep
FVILFFIFKSANFVLQYSKLCNSSPSVDYRWTFSCLLINTFTTLFKIIFLIYQS

SEQ ID NO: 143707 - protein, 48 aa, Glycine max
  Clone ID: PAT_MRT3847_100781C.1.pep
SKAVFAMIGISLPDIMRDIAYNNVLIAVVNYCHGKNNRLLIHTRTQKF

SEQ ID NO: 143708 - protein, 117 aa, Glycine max
  Clone ID: PAT_MRT3847_100782C.1.pep
PAHLLRFRLLLFPLLFLLNYVYTRFSRTAPPLASSGSLLWCGFCVVCWPALLFAIPFCLLPHWLAPCPVGALLSASFCLLPTPLLACPNAPPPTGHSLLQRVHRGVRHSGTFLATDR

SEQ ID NO: 143709 - protein, 58 aa, Glycine max
  Clone ID: PAT_MRT3847_100783C.1.pep
SLLLFKNYSPFPGGGGGIIITPLFFYGNKPLISDPTPWGLKPHPLFLKVLNFPFFLNP

SEQ ID NO: 143710 - protein, 42 aa, Glycine max
  Clone ID: PAT_MRT3847_100784C.1.pep
SASTRVRDGAKTPRITSAASTHDFSRRTSELLITVYTVLRAR

SEQ ID NO: 143711 - protein, 364 aa, Glycine max
  Clone ID: PAT_MRT3847_100785C.1.pep
MGRAPCCDKANVKKGPWSPEEDAKLKSYIEKHGTGGNWIALPQKIGLKRCGKSCRLRWLNYLRPNLKHGGFSVEEDDIICSLYVSIGSRWSVIAAQLPGRTDNDIKNYWNTRLKKKLLGKHRREPRNRGNYNSVKQENDVNRGSGTTDGDSSSLSLLQENGSTTHHQEQHQQQPCWPQNINNMPVLPLQVPLPYKNQGPCFNDQDSLKKLLIKLGGRFSGDSYHPTLDGLNLEFSSHGQQIYQEQVHVGSSAACISATINNNNEVQFAQTGQYPGVDNLVQGQGGNFTPSFEEMVSSSNYPDGLEFLYNEGMIDHKIIDTTTTTTWGETSTPIYHHHDSLASTYQGQGVIQECVLQDFSYPRAQ

SEQ ID NO: 143712 - protein, 64 aa, Glycine max
  Clone ID: PAT_MRT3847_100786C.1.pep
EKNVLEYLIDKLLAFRSLGFGRIITNEYVQCMPVFFGVVSRPLCTICLSRHDLKQRKKSSTHDP

SEQ ID NO: 143713 - protein, 116 aa, Glycine max
  unsure (1)..(116): unsure at all Xaa locations
  Clone ID: PAT_MRT3847_100787C.1.pep
SRGMAAPVSNGHSEEGRNEKSLMENGEYTFFARSMYKRRKVSAVRDFPDGCGPFALRIDPVLNVNIVGCGSTNGTIIEDKNGEHLGDDTVKTSNCENDGSHSEVKDSLLTEXKKKK

SEQ ID NO: 143714 - protein, 137 aa, Glycine max
  unsure (1)..(137): unsure at all Xaa locations
  Clone ID: PAT_MRT3847_100788C.1.pep
GFGNNPSLKTLRIIKQDAKSFLDEGMLPLSLXCLVIRDFPNLKKLDYKGLCHLSSLKKLILDYCPNLQQLPEEGLPKSISFLSIEGCPNLQQLPEEGLPKSISFLSIKGCPKLKQRCQNPGGEDWPKIAHIPTLFIP

SEQ ID NO: 143715 - protein, 109 aa, Glycine max
  Clone ID: PAT_MRT3847_100789C.1.pep
EARNRARQSLHPSLLVCIISGSSEGKDRSMSTTATTTSEEVSSNEWKVIHMSEQEEDLIRRMYKLVGDKWNLIAGRIPGRKAEEIERFWIMRHGDAFSVKRNGSKTQDS

SEQ ID NO: 143716 - protein, 75 aa, Glycine max
  unsure (1)..(75): unsure at all Xaa locations
  Clone ID: PAT_MRT3847_10078C.1.pep
RFTISTKTIVRPGKKGSTVQGSRTHTXTSVHDAMLADVVSPAQNVSARTIYGIDHSQILQXYLEPQXRTNNEFSL

SEQ ID NO: 143717 - protein, 85 aa, Glycine max
  Clone ID: PAT_MRT3847_100790C.1.pep
CSFAHYSSLPSLLLLLLLFSDTQEMEDDESPQIKGVVIISLPPPDNPSFRKTITAFTFSYPSPQPSIQPHQHQSQPTHPNAQHNT

SEQ ID NO: 143718 - protein, 50 aa, Glycine max
  Clone ID: PAT_MRT3847_100791C.1.pep
PILLLSSSPLPRGEGVTWRALPTAELSDSNATHVACCDVRVFHPVFKVYR

SEQ ID NO: 143719 - protein, 137 aa, Glycine max
  Clone ID: PAT_MRT3847_100792C.1.pep
NTQNRVRGVREQIMDNIKDDRKRKSLERYGSITSAVSEEKGDTTKKRRVERSRKMAEAKERNLTPSVPSDMQAVLRRCETLEKEVRSLKLNLSFMNRKDSEQTKQIEDLQKQNEDLADEKERLLEEIERIVSETGKI

SEQ ID NO: 143720 - protein, 74 aa, Glycine max
  unsure (1)..(74): unsure at all Xaa locations
  Clone ID: PAT_MRT3847_100793C.1.pep
SVGSREASKDQLGERRWNHTLRPLXQHAKSNIRCYTQANTLAYATSAAASNEVKRTKEESMREVMDLSWCCPNT

SEQ ID NO: 143721 - protein, 62 aa, Glycine max
  Clone ID: PAT_MRT3847_100794C.1.pep
MTKMPFTFVKFPFHILLFLVLSLPSPVISQDQQTTLLGIKRQFGDPSALRSWKSSSPPCAWS

SEQ ID NO: 143722 - protein, 70 aa, Glycine max
  Clone ID: PAT_MRT3847_100795C.1.pep
QNYPPQQNFVRASQNYPPQQNYGRHQELSSPQIWPGIKISTHRLRQHPIIHHRLCQARNYPPTDLTAHDY

SEQ ID NO: 143723 - protein, 62 aa, Glycine max
  Clone ID: PAT_MRT3847_100796C.1.pep
ADRTLLLSSLGRHSSQSQGHAQKKLLVSDYKKLNQDCLAARTDCPRRRKPVVFPIPKSQGFV

SEQ ID NO: 143724 - protein, 83 aa, Glycine max
  Clone ID: PAT_MRT3847_100797C.1.pep
KCGYPIWLQRVWNGHVYGFMNGPNLWSCWWVWWHCRKLYRRVLSTMATLTDTPLLLAIAAALGEAVLNELNYSEEPHNWGPGS

SEQ ID NO: 143725 - protein, 87 aa, Glycine max
  unsure (1)..(87): unsure at all Xaa locations
  Clone ID: PAT_MRT3847_100798C.1.pep
MAVVCIGFGVMIAPVYIAEISPAIARGSLTSFPEIFINFGILLGYISNYAFSRLPSHINFRIMLGVGLIPXLVIAIALFVIPESPRW

SEQ ID NO: 143726 - protein, 86 aa, Glycine max
  Clone ID: PAT_MRT3847_100799C.1.pep
FKTDAAVRLLTRIKRLSGQSGHGITADLLHPTRVSKISGDHIKRVTTKLSHTIITCAKDNEDAFDENEQHLLTTLAHHANGYRYQS

SEQ ID NO: 143727 - protein, 79 aa, Glycine max
  Clone ID: PAT_MRT3847_10079C.1.pep
PIGIHSINSGSNQARSDPSHYVHSDGPSPRHRSAFCCHTRVLSYLSSTMPYNKYVMVFPTDLYQEEILPPAELRRLREA

SEQ ID NO: 143728 - protein, 105 aa, Glycine max
  unsure (1)..(105): unsure at all Xaa locations
  Clone ID: PAT_MRT3847_1007C.1.pep
VMPEGRGRRRSNNGFEKWEAQILSKTKLVSFTKRIVPSTLYALLPIVLLCTYFDLLFLTPHSTTTTYHLSLSPXSPPPPSSSFSFSTEKNKTYQNPCDYSNGDWV

SEQ ID NO: 143729 - protein, 67 aa, Glycine max
  Clone ID: PAT_MRT3847_100800C.1.pep
SLTSLYFQITLKYIILLPTDYISINKLRTPPPIRSSLCKKIADGYCTHPYPCICKQALSQIQTHHST

SEQ ID NO: 143730 - protein, 203 aa, Glycine max
  Clone ID: PAT_MRT3847_100801C.1.pep
MKSTIFFALFLVCAFTISYLPSATAQFVLDTDDDPLQNGGTYYMLPVMRGKGGGIEVDSTGKEICPLTVVQSPNELDKGIGLVFTSPLHALFIAEGYPLSIKFGSFAVITLCAGMPTEWAIVEREGLQAVKLAARDTVDGWFNIERVSREYNDYKLVFCPQQAEDNKCEDIGIQIDDDGIRRLVLSKNKPLVVQFQKFRSSTA

SEQ ID NO: 143731 - protein, 93 aa, Glycine max
  unsure (1)..(93): unsure at all Xaa locations
  Clone ID: PAT_MRT3847_100802C.1.pep
PQTTSIQATLMNLSCTTLTDMXLHAAVPNFHQLXLDPASTNTVSVHGSITQSLIITNSQHGKKSLAMRVTIAYKIYGXDRLEDRQLHHSSRGL

SEQ ID NO: 143732 - protein, 92 aa, Glycine max
  Clone ID: PAT_MRT3847_100803C.1.pep
MEKQQQPSKETKPQNESGKESSTEGLPMEDSPYVKYKDLEDYKRQGYGAQGHQEPKPGRGAGATEAPTLSGAAVSSDAQATATDVINSKGVL

SEQ ID NO: 143733 - protein, 42 aa, Glycine max
  Clone ID: PAT_MRT3847_100804C.1.pep
GKASALIQHEWRPKSFVTISAEVDTKAIEKSSKVGLALVLKP

SEQ ID NO: 143734 - protein, 52 aa, Glycine max
  Clone ID: PAT_MRT3847_100805C.1.pep
IHNTTCVMWILGVLPEKVLHSQKEMVTYSLRYFFQPIFLLRIKISWIFSKFE

SEQ ID NO: 143735 - protein, 254 aa, Glycine max
  unsure (1)..(254): unsure at all Xaa locations
  Clone ID: PAT_MRT3847_100806C.1.pep
YAEFSETGIRRTGTTIWGVTFGTVKRTFARLVILLVSMGYGVVRPTLGGLTRRSSXKVVMLGGTFFIASEVLELVENVGAVSDLSGKAKLLLVLPAAVLDVFFILWIFTSLSATLTKLQTKRMMIKLDIYRKFTNALAAAVLVSVGWICYELYFKSNDVYNEQWQNAWIIPAFWQVLSYSLLCVICILWAPSQSATRYAYRDDGSDEFDRDETTLTLIKPSPISSKDVRSVPDARPVQSSNGNSNDDLEEDKRE

SEQ ID NO: 143736 - protein, 49 aa, Glycine max
  Clone ID: PAT_MRT3847_100807C.1.pep
VIKFLNKVIGRKGALESTGNATITCLNDYIEVMNELLTFGVRMNMCRDS

SEQ ID NO: 143737 - protein, 85 aa, Glycine max
  Clone ID: PAT_MRT3847_100808C.1.pep
ILNYQRWVPIKESGLSTASKLQQKGILPVHFVATHLKNLCSNSPRSAGSIGTQLKQPCQAMHAMGLISHFPLAAGPVSHLAPSFR

SEQ ID NO: 143738 - protein, 117 aa, Glycine max
  unsure (1)..(117): unsure at all Xaa locations
  Clone ID: PAT_MRT3847_100809C.1.pep
VLCCALNEQTKHIINREVMLALGKQGFXXNVGRGGLIDEKELVKXXMEGEXXGAGLDVFENEPHVPKELLAMNNVVLSPHSAAFTVESMMNLCELMGGNLEAFFLNKPLITPVMLPQ

SEQ ID NO: 143739 - protein, 95 aa, Glycine max
  Clone ID: PAT_MRT3847_10080C.1.pep
PTQGIMGTEYAIAAERADDKHSMYLKSIEAYNANHLYESKPTKTIYDPAATCVHSNALHGGCRRKINTERVYTQANTVNEGDDSTEYPFGRHYQA

SEQ ID NO: 143740 - protein, 33 aa, Glycine max
  Clone ID: PAT_MRT3847_100810C.1.pep
SCTLLLQRGLFLEENHLRLLDTRSEKNGFKLEP

SEQ ID NO: 143741 - protein, 69 aa, Glycine max
  Clone ID: PAT_MRT3847_100811C.1.pep
LPPIFFFPPPSFYVQICWAPVIDPPPKGGAQCLSVIVSKKKNPNSGGGNFGGALFEKLLFCWLSLVPHG

SEQ ID NO: 143742 - protein, 148 aa, Glycine max
  Clone ID: PAT_MRT3847_100812C.1.pep
VVFVAAVVLVAWPCHGASYQRVPLQMKTGYGDRSSQEKCTKCKLAVYLHNIRAFKTIPEDCVEPTNDYINGEQFKSHSQTVNQLAFFYGREREVHHHDIFICGINDTALSNIPYYEKHAYDVAEFNETFSDEWIINVDAPALPKTLSN

SEQ ID NO: 143743 - protein, 92 aa, Glycine max
  Clone ID: PAT_MRT3847_100813C.1.pep
LVCWVGKGLKVSCLLRSFHCTTVAESSCFFLFPRYPLIQLWIFTSDFLSFFGLYTLGVSPHPTVCNNHKVRTFSFLISISWKYKRSFYLFLF

SEQ ID NO: 143744 - protein, 56 aa, Glycine max
  unsure (1)..(56): unsure at all Xaa locations
  Clone ID: PAT_MRT3847_100814C.1.pep
XVXXXXXAXXXXXRXVXSXXXXXXXFXLXXXXXXXXXKFXXFPAXRILRPSXRXPT

SEQ ID NO: 143745 - protein, 101 aa, Glycine max
  unsure (1)..(101): unsure at all Xaa locations
  Clone ID: PAT_MRT3847_100815C.1.pep
SXXIXXDSLKKYFQFSSENCIQKLLSTSYTNKRNXQLLIENAHSLQLNXILKLYSGSLHTFRNPFVLRTFSPQHFITMANAIYSAKQLDFYLFQTTYIKKL

SEQ ID NO: 143746 - protein, 96 aa, Glycine max
  Clone ID: PAT_MRT3847_100816C.1.pep
VKGKTTVVAWDLLELLAFPNSILKEKAKQTGHHQWEWVAPEAPSFSISRSSSNHRELKIAKLNSNRIWELINELRRNEKARTFHLGFLNSHPLLSV

SEQ ID NO: 143747 - protein, 95 aa, Glycine max
  Clone ID: PAT_MRT3847_100817C.1.pep
HWIGTELSYINITAMSNYDLPPPATPSEPTVPQWTPPLPTTYPPPTSYFSSTFDDSSSSSSTSTFGIIIGVLVGVFGLILLYGIWHKYLKKRCSK

SEQ ID NO: 143748 - protein, 119 aa, Glycine max
  unsure (1)..(119): unsure at all Xaa locations
  Clone ID: PAT_MRT3847_100818C.1.pep
LESYLLMVRRLMGSVCKDRDETQRENIFHGRCMVMRKICSLIIDEVSCTNVASQRLIEKLALETFPHPKPYKLQWLSENEELAVDRQVLICFSIGKYVDEILFHVVPMEXSHLLLGMSW

SEQ ID NO: 143749 - protein, 74 aa, Glycine max
  Clone ID: PAT_MRT3847_100819C.1.pep
HISHIDNMFIYNFSHSINFRIHTPSFSCSFERFICFQFSLLITKRVNNLCIDRQGIFMISSNHKLLISIYIANI

SEQ ID NO: 143750 - protein, 56 aa, Glycine max
  unsure (1)..(56): unsure at all Xaa locations
  Clone ID: PAT_MRT3847_10081C.1.pep
TCYVPNLFEPHSEQNLDVSLRYGAPHSSQNFAGVVGSMCKRPQTSPPVSGCKQVXE

SEQ ID NO: 143751 - protein, 79 aa, Glycine max
  unsure (1)..(79): unsure at all Xaa locations
  Clone ID: PAT_MRT3847_100820C.1.pep
EGVPRVLACWGCNLLGVQSNKIVAEGXSQRTGVDMNGANDGVLLIIENPVTGNGDIFNVGYPNDEVTDWQLAEMMTQVY

SEQ ID NO: 143752 - protein, 133 aa, Glycine max
  unsure (1)..(133): unsure at all Xaa locations
  Clone ID: PAT_MRT3847_100821C.1.pep
RTHLLLRXCSRMAILKKDDWRVECGNPSGFPFTVFCNSIFNEMLIRYSYEKYLRLAKAXPSMFLQSFKNFVSLCVYGDDXLISVHEYXVKPYFSGSKMKSILAGHYITITDGFDITRAYLQXKVSDCDFLREL

SEQ ID NO: 143753 - protein, 52 aa, Glycine max
  Clone ID: PAT_MRT3847_100822C.1.pep
KGYNGRFHTFHLQFNLTSIVYPHRIQREKFITSCTRSREKRKLVCTKSATTS

SEQ ID NO: 143754 - protein, 153 aa, Glycine max
  Clone ID: PAT_MRT3847_100823C.1.pep
RAESARAKVMKQLSRLFPNKVTIQLPQDEALLSDWKQQLDCDIETMKAQSNVVSIRLVLGRIGLDCPDLETLCIKDHTLTTESVEKIIGWAISYHFMHSSEASIRDSKLVISAESIKYGHNILQGIQNENKNMKKSLKDVVTENELEKKLLTD

SEQ ID NO: 143755 - protein, 229 aa, Glycine max
  unsure (1)..(229): unsure at all Xaa locations
  Clone ID: PAT_MRT3847_100824C.1.pep
FGELPNLLFKVXNSGSNCWEGETALRRKTEDNSIEYDSTDDNVVYFLSKAGFVVASNMQRSPSKQFSSVITNKDGQEIVYFLSSSGNVVACNLTCKCFFEYPRLLPVFSEYSIDVVECNGEMLVVLLSEFLEIATLRVWKYDEASRGWHQIAAMPAANSHEWYGKKADINCVGAGNQIFICLNSPELCTYVVCDLEPNKWVEFPKCCINGEVIDFMSALSFEPRIEASV

SEQ ID NO: 143756 - protein, 62 aa, Glycine max
  Clone ID: PAT_MRT3847_100825C.1.pep
RLTPDARGPNSQFDLRLRLSIFQQRNRWEGHRQHEDGAILAHVLLTNSCRPEDTWSMNKNKI

SEQ ID NO: 143757 - protein, 423 aa, Glycine max
  Clone ID: PAT_MRT3847_100826C.1.pep
MTEDMKIDHIVEVPDTPDRTTVRHDYQKYLGNPDKRGRAFNAADENNNHSNYISLSPSEESYSSQNAPIFRRAQTDGAEKMEKGKSISSKVPSKSSHRGISILDLTEENEQIRHPKPAFSHRGSRDNATEDKKALKATNGRSSLPVISDSSNTSRNAFIGKYKLDIKTLPGPNISVDHGKGISLSNDSQLQNEKQVSLPPRVCTSPRGRGHKRLVRNGCISPHNIATMEKQLAEQSNHQTKDAEQSHTGHSVSSNTVSPVSVDDLVAEERGDGRGKGKEILVHPSSHNRLTFRTAASPVTNYEEINGPSNAIRNPLQYSGGQGGWRTTHNERNANQPSNDVNGHHSRRSDDIGRFNYRQNTNRMDRRNTGSGQSSKHVHVSQSDHTAQPTSVFIPYVDQSSRAHPTADILTKRQSSGMSLMNP

SEQ ID NO: 143758 - protein, 74 aa, Glycine max
  Clone ID: PAT_MRT3847_100827C.1.pep
KGLSNPFSRFLNQLQQKKMASSSILLVLGLSFENMILFLWFHTLQVSATHQIPQLCDLIPRWVLQNECCMKFCL

SEQ ID NO: 143759 - protein, 30 aa, Glycine max
  Clone ID: PAT_MRT3847_100828C.1.pep
TSELSVDFSVAHQGRGAYRKMLATRRVDGS

SEQ ID NO: 143760 - protein, 51 aa, Glycine max
  Clone ID: PAT_MRT3847_100829C.1.pep
TMSFENCLLFHYNTFELLSNRNRTYLLKTPSKFLISFMNIGNYSYSVFLYI

SEQ ID NO: 143761 - protein, 39 aa, Glycine max
  Clone ID: PAT_MRT3847_10082C.1.pep
QKTVDSALIKAIGSVPDLKTYLGARFSLKAGVKPHELVF

SEQ ID NO: 143762 - protein, 130 aa, Glycine max
  unsure (1)..(130): unsure at all Xaa locations
  Clone ID: PAT_MRT3847_100830C.1.pep
MVRSATIQTMAGTQEDVKLLGIVGSPSVCMVHIVLNLXGVVFKFLXDNLGNKSDLLLKYNPVHKKAPVSVHNEKPIAXSLVIAEYIDETLDNNPFLPFDPYQRALVRFWSIFIDDKIVGVVXKSVFMVDE

SEQ ID NO: 143763 - protein, 88 aa, Glycine max
  Clone ID: PAT_MRT3847_100831C.1.pep
YLVPCALKAYYHSELENKKHLLTTSVQYTHKRLLTTAEQLSCIVEALVSLQGCNIDSYPINLYNLDRTWRLQFTFCSDVLILLQADAT

SEQ ID NO: 143764 - protein, 123 aa, Glycine max
  Clone ID: PAT_MRT3847_100832C.1.pep
LLCNHVEAARFLDLFAACLSHNTVFSGLLGIITKTDRSSTLGYLPSIAELKSGANFFNYGPLLINSALSEVPKCRLIEEKSIDEPVKTAQNNYELPRMPPWFSYVGSIKLYQPLAGILRFVGL

SEQ ID NO: 143765 - protein, 35 aa, Glycine max
  Clone ID: PAT_MRT3847_100833C.1.pep
HCRVWLSLSEPLVRHTQLAIGSWYLGIRFADTLCV

SEQ ID NO: 143766 - protein, 84 aa, Glycine max
  Clone ID: PAT_MRT3847_100834C.1.pep
CFFFFFSFIIFFFCCCPSLLGVYWVLTRPLQGSWPMFLGPVFFLYPAHENGWGGGSGFLGGEPLCGAQKCPPPWALDRPLREPG

SEQ ID NO: 143767 - protein, 122 aa, Glycine max
  Clone ID: PAT_MRT3847_100835C.1.pep
MEKKKVAVPLVCHGHSRPVVDLFYSPVTPDGFFLISASKDSSPMLRNGETGDWIGTFEGHKGAVWSCCLDTSALRAATASADFSTKVWDALTGDELHSFEHKHIARACAFSEDTHLLLTGGG

SEQ ID NO: 143768 - protein, 52 aa, Glycine max
  Clone ID: PAT_MRT3847_100836C.1.pep
VEAHPITPMNIYGLHVTGVAVRPKEHTYVKKLAGSLPCENDSATYGPLGPMR

SEQ ID NO: 143769 - protein, 117 aa, Glycine max
  Clone ID: PAT_MRT3847_100837C.1.pep
AYTNATFKDYAKQGVSFASYNVSFSPGRASKTVSGSLVKRWVEPGKFFRESMLKDGTLMPMPDIRDKMPKRSILPRSILTKLPFSSSKVHELKRLFKVSDNSSMEKMIMDSLGECER

SEQ ID NO: 143770 - protein, 85 aa, Glycine max
  Clone ID: PAT_MRT3847_100838C.1.pep
ITVSFLTSSFVIVISFIAVVLRVTFFLIAIVHALLPQGNVPFVFSKDYNLLPAILSTFFIFFYLITPFQFSLLYYILLFFLKIFI

SEQ ID NO: 143771 - protein, 47 aa, Glycine max
  unsure (1)..(47): unsure at all Xaa locations
  Clone ID: PAT_MRT3847_100839C.1.pep
STRPSNSKTTLSITHTNTHSKSVFNAMRVEPHQHNLXFIPNDSLLSH

SEQ ID NO: 143772 - protein, 76 aa, Glycine max
  Clone ID: PAT_MRT3847_10083C.1.pep
LLDPLDYHHRLIHRGFVGCDKVAKFSLILPTLLSKTVPFSCTLCLHPYRNKRVSVSVHLAIFAYPFFFFILVFLCL

SEQ ID NO: 143773 - protein, 63 aa, Glycine max
  Clone ID: PAT_MRT3847_100840C.1.pep
NIIHVVVIFPQTIRLCVSRMSTFFLNLSVNDLRVSSLLGLTLMGTSTYVNDKATIDKPSTLQT

SEQ ID NO: 143774 - protein, 293 aa, Glycine max
  unsure (1)..(293): unsure at all Xaa locations
  Clone ID: PAT_MRT3847_100841C.1.pep
MQSEALSALKAAEGMMRESDPYIVLHLCLEYADQRKLSIALDHAKKLIKLEDGSSVSGYILLARILSAQQKFVDAELVIDAALDQSGKWDQGELLRTKAKLRIAQGKLKNAVETYTFLLAVLQVQNKSLGTASKVVKNKGNRDRRLEMEIWLDLANVYTALSQWQDAEVCLAKSEAINPYSAYRWHTKGLLSEARGFHQEALKSFRKALDIEPNHVPSLISTACXVSQLGGQSSSIVRSLLIDALRLDRTNPFAWYNLGMLYKADLGTSPMEAVECFEAAAFFEEFSPIEPFR

SEQ ID NO: 143775 - protein, 192 aa, Glycine max
  Clone ID: PAT_MRT3847_100842C.1.pep
NAAQGPPARHLLPHRVLGARHFLLHRLRLRSFQGFTVAAPKGHRLWCSATSAPEEAASNAEVDDPEWRKKEEKIVRDVEPIVSLTMQILYSSRYMNGEILTMEDERAVVENILIYHPDYEDKIGSGLNSIMVDQHPLYLFPRCLFVVRTDGSWIDFSYRVCIEEYIKNKYQVSAERFVKRRFLRDLIKRWGI

SEQ ID NO: 143776 - protein, 79 aa, Glycine max
  Clone ID: PAT_MRT3847_100843C.1.pep
TRYERQLTHPGRVIRVSSAPTCTIIIPLAVWFFSTSIIMYPRRPLTNPQIRDATNLPQNGGSSRVSNPILALVQKRKMK

SEQ ID NO: 143777 - protein, 69 aa, Glycine max
  unsure (1)..(69): unsure at all Xaa locations
  Clone ID: PAT_MRT3847_100844C.1.pep
MTFSLVHMRYNQADRXXARVXLXXDDVXXVAXXXXFIXTEYMTYXFXYDXXHGHWXXHDXXVKGXKXLX

SEQ ID NO: 143778 - protein, 291 aa, Glycine max
  Clone ID: PAT_MRT3847_100845C.1.pep
SDRPDFRIKMDTKNPRSRVTQAEDFFVNALESWRKAQKLGSMILVGHSLGGYLTTAYALRYPQHVTKLILVSPAGFHRQIPHLQTSSKQQESAQQDAMQAMDAELNVPQDKLTRGPGHGSSDIDADMRASQNATKKTWRTSFFHYLWEKNYSPFSLLRASVFFGPLLVGNYAERRFADLDAVERQNMYSYLWSISVAKASGEYAITHLLAPGAYARYPMCDRIDALKIPILFMYGEHDWMNPEGANQSLERLRKAGNHLSRVVPVPRAGHHIYLDNAPAFDELIRKEIESA

SEQ ID NO: 143779 - protein, 75 aa, Glycine max
  unsure (1)..(75): unsure at all Xaa locations
  Clone ID: PAT_MRT3847_100846C.1.pep
VQIASGNGYCVPFXSHSLKSVLGFNQSQITLLGVANDIGENVGILPGLACNRFAPWLILFIGALVAFLGFGVLGL

SEQ ID NO: 143780 - protein, 66 aa, Glycine max
  Clone ID: PAT_MRT3847_100847C.1.pep
SYYFDMPLNDTLIKRREHYSYIEIFYADANLAGYHEYKIIMYSWLSQGLMPLDLPFLANKYATESD

SEQ ID NO: 143781 - protein, 82 aa, Glycine max
  Clone ID: PAT_MRT3847_100848C.1.pep
TSLSRYNICLITYKMLPFNQHLMDLKSYSIILLIYIFIHHTLHQLSATDPTILGHTTSTKLIKLLISQTTNFLLQGSRILST

SEQ ID NO: 143782 - protein, 226 aa, Glycine max
  unsure (1)..(226): unsure at all Xaa locations
  Clone ID: PAT_MRT3847_100849C.1.pep
GSSFVFLSDSCIPLYNFSYTYDYIMSTSTSFVDSFADHAXTKEGRYNPKMDPVIPVYNWRKGSQWGVLTRKHAKVVVEDETVFLMFQRYCKKKPLPEFWRAHYIPADTSKVHNCIPDEHYVQTLLAQKGLEEEITRRSLTHTSWDISNSREYDRRGWHPVTYKYSDATPMLLNFIKEIDNIYFETEYRREWCSSKGKPSTCFLFARKFTRTAALRLLNMSVLGVFN

SEQ ID NO: 143783 - protein, 93 aa, Glycine max
  Clone ID: PAT_MRT3847_10084C.1.pep
VVCERGVDLGPVQISHYQQDFQVGSFLLGAYFFYPGTKPACFGSIIVVNCVVSSLSGHSTGSPPLPPHPPPPPPPPPPPPPPPPPPPPPKKED

SEQ ID NO: 143784 - protein, 62 aa, Glycine max
  unsure (1)..(62): unsure at all Xaa locations
  Clone ID: PAT_MRT3847_100850C.1.pep
MCYVIIADGQVTRSVDTEHGHVRAQDKKTVGAVVKASNIPLXIILTGPGDGPGDIMQQHHDI

SEQ ID NO: 143785 - protein, 68 aa, Glycine max
  Clone ID: PAT_MRT3847_100851C.1.pep
FCKSCVGSRQKSDVTRFISCPNFWKLVTSILDLDLMNLFLKACAWFNPIIRGKEILIGNTSATYHRDE

SEQ ID NO: 143786 - protein, 65 aa, Glycine max
  Clone ID: PAT_MRT3847_100852C.1.pep
RATSSDASLKARLAKQRRQLALHKRGRNVFSPLNVKDREIGHQLVNEFQRHPRVVCLCRRSARAE

SEQ ID NO: 143787 - protein, 59 aa, Glycine max
  unsure (1)..(59): unsure at all Xaa locations
  Clone ID: PAT_MRT3847_100853C.1.pep
NNLIAPTQTSPRHANAKAATPADANDNPNYYGFEIHMHGXKSGDIKALVENNNVLLISG

SEQ ID NO: 143788 - protein, 117 aa, Glycine max
  Clone ID: PAT_MRT3847_100854C.1.pep
SLSDLKLQKRKQSSNLLSWLKSMFTETEEYMGFLGPIHIWQGMDDKVVPPSMTDFVHRLLPGAAVHKLPYEGHFTYIYFCHECHRQIFTTLFGTPQGPLSISIEVDQANLEETNIEQ

SEQ ID NO: 143789 - protein, 101 aa, Glycine max
  Clone ID: PAT_MRT3847_100855C.1.pep
FAELVTKQALFFGDSEVQQLLKKFRVLGTPKKNVWPGVSKIINWRENPQWNPQSLSTGVPSLNKLGLDLLFQMLKNEPSKRIFSKKTMEHVYFYDLDKRPL

SEQ ID NO: 143790 - protein, 80 aa, Glycine max
  unsure (1)..(80): unsure at all Xaa locations
  Clone ID: PAT_MRT3847_100856C.1.pep
GFFGSLPPFGSQNPQRGFFNFRGFYIGGTPFGGKTFPEGLVFGPQTFHDNFSGVLKIKPPVVPXNFFRNDPGFPFFFGGA

SEQ ID NO: 143791 - protein, 44 aa, Glycine max
  Clone ID: PAT_MRT3847_100857C.1.pep
MLCGGSIYECLTSRASGTTSIYIASSLHVLRHLPASSSGDAPLP

SEQ ID NO: 143792 - protein, 142 aa, Glycine max
  unsure (1)..(142): unsure at all Xaa locations
  Clone ID: PAT_MRT3847_100858C.1.pep
GFLGGGLRGQLTLHGGTSPRVTILPILLGGGAGAKNAMIMNLPDAVLSLLRYFDGELAYEVNKMTPPYNQGTVSFFIGFGRLVYDTINSGAFSXKLVVFGEIHAPVVMEFTQQEVVTSXNNXERAATTLMAHGCPPLHAMVY

SEQ ID NO: 143793 - protein, 84 aa, Glycine max
  unsure (1)..(84): unsure at all Xaa locations
  Clone ID: PAT_MRT3847_100859C.1.pep
SPDGVFPFFPHEEVVAPVPWVMENVPXGGPAPSLFAGVFFRGGKKNGRGFPGLLGIPPGDRGENPDDVFVMGGSLEGRIWGSSG

SEQ ID NO: 143794 - protein, 82 aa, Glycine max
  Clone ID: PAT_MRT3847_10085C.1.pep
ETQNFSLGNFPKEKTEAPIRKSKIKIGKKPTPPLEKNLNKAKLALKKSQEKKNLISPKQTERGVKNFPKGLIIFKNKPQAFF

SEQ ID NO: 143795 - protein, 51 aa, Glycine max
  Clone ID: PAT_MRT3847_100860C.1.pep
RKRITLHSYLRRNFYTSTYTPFFLKKKNTKFNKFIEQNQQILSLFLRTKNK

SEQ ID NO: 143796 - protein, 138 aa, Glycine max
  Clone ID: PAT_MRT3847_100861C.1.pep
ARAARGETMLDPMAVFALLFGSELFEDYIGHLAVASMASSELADGTEDPDKLNEKLKAVQKEREEKLAKILRDYLGQYVRGDKKGFFQRAESEARRLSRAAFGVDMLHTIGYIYSRQAAQELGKKAIYLGVPFLAEWV

SEQ ID NO: 143797 - protein, 40 aa, Glycine max
  Clone ID: PAT_MRT3847_100862C.1.pep
EDLDTSAYRPFFLKKKNTKFNKFIEQNQQILSLFLRTKNK

SEQ ID NO: 143798 - protein, 55 aa, Glycine max
  unsure (1)..(55): unsure at all Xaa locations
  Clone ID: PAT_MRT3847_100863C.1.pep
NGIAKSGAKMVMAVSCAKVPKVTIMVGGSFGARNYAMXGRAYRPNXLFLGPKARI

SEQ ID NO: 143799 - protein, 68 aa, Glycine max
  Clone ID: PAT_MRT3847_100864C.1.pep
ERARELVSSFVCWILLQIQLNFLDPINIFIKSIVLTKGAIIEYTIIRCQLFRSEQPVFLHYPVCMKMV

SEQ ID NO: 143800 - protein, 50 aa, Glycine max
  Clone ID: PAT_MRT3847_100865C.1.pep
LFYPQTSPCSCDGIVIKAAQRLWSSVVVWNKLRHLRAKRPHQVSTIQSKR

SEQ ID NO: 143801 - protein, 100 aa, Glycine max
  Clone ID: PAT_MRT3847_100866C.1.pep
MHSVIGNVRKVSGVTCWSSSTCSSSTSSSSALVSSSYLELWHACAGPLTSLPKKGNVVVYFPQGHLEQVASFSPFTPLEIPTYDLQPQIFCRAANVQLLA

SEQ ID NO: 143802 - protein, 52 aa, Glycine max
  Clone ID: PAT_MRT3847_100867C.1.pep
KENIYIYNIISIFILVAFHSFHIIYLIKYTIFFFSYFVLPFLHVYSCQYVNK

SEQ ID NO: 143803 - protein, 110 aa, Glycine max
  Clone ID: PAT_MRT3847_100868C.1.pep
HHCRNLFSHIRTARFPTSCTVKLQFAYPQTCLRQHGQPQLSLSAGPLQSQKIHGVSGQFLTSQPRTRQSTLSAAFPHTHVDPGLLCHTASITAYQQRAHESAHVSAHASA

SEQ ID NO: 143804 - protein, 76 aa, Glycine max
  Clone ID: PAT_MRT3847_100869C.1.pep
GSRREYEDPSTAHKHAVFLQSNLVWICSSPQSNPNPTLHLLSKNKRTSFNLFLFPLQRKLQFTPLSPLKAPPIERF

SEQ ID NO: 143805 - protein, 103 aa, Glycine max
  unsure (1)..(103): unsure at all Xaa locations
  Clone ID: PAT_MRT3847_10086C.1.pep
RPYGCEKTTEGGIXFNYLFCKLGTREQPNSLIRFRLREQWYVPSKPLSKFTGGKDSRKQLATKVDRSRPGTGGVKNPTVQAEPGSEGDQSPEEHRLLNRNSIQ

SEQ ID NO: 143806 - protein, 34 aa, Glycine max
  Clone ID: PAT_MRT3847_100870C.1.pep
RREEWFRTGVPLSGSSGIAIGEEDRACFLAQSSH

SEQ ID NO: 143807 - protein, 113 aa, Glycine max
  unsure (1)..(113): unsure at all Xaa locations
  Clone ID: PAT_MRT3847_100871C.1.pep
MQIIATSCIFRSHSLRMGGAELGLKDNSLKGMRLWKKVKYQLGXIHSLPRYXERQRGHISNTIRSECPILHVLLITFTIYNESAHHSERSPNRFLILRSLTIYTGVTIILLQQ

SEQ ID NO: 143808 - protein, 85 aa, Glycine max
  Clone ID: PAT_MRT3847_100872C.1.pep
VQYNIKHMLSAIYTKYNISLYQVSKFGWSRNCSRIRHFNGEWISRCCHHYTGLISQHFNGWISHCCRHYTGQISRHFNGRIFHCC

SEQ ID NO: 143809 - protein, 110 aa, Glycine max
  Clone ID: PAT_MRT3847_100873C.1.pep
LYHVSVHIILCFLFRLNSAVYLDHIIIIVLFSVLCSFLQHYFSSTNEYLQVMALLFEESKKSHGLNKEYILLEDNMKKRKQREDNNTQICSASVSLIINPSNSLITYLVS

SEQ ID NO: 143810 - protein, 80 aa, Glycine max
  Clone ID: PAT_MRT3847_100874C.1.pep
KGNHFHAPRPLSQLNFKKALATSKKTKVAASKNGGFTLQSPSKWTVPGKSGNFQFQAAIHEIFKLVVSHMITPQSNSQDP

SEQ ID NO: 143811 - protein, 45 aa, Glycine max
  Clone ID: PAT_MRT3847_100875C.1.pep
RADPHDRPLFHSITIFFPSTITKSTLTGYNSHMAIITHFFHITYT

SEQ ID NO: 143812 - protein, 46 aa, Glycine max
  Clone ID: PAT_MRT3847_100876C.1.pep
MCGLTVEDLSTIGVFSTVWLHHTFIPTHWLIFSFVGRTQKSSLPTT

SEQ ID NO: 143813 - protein, 137 aa, Glycine max
  unsure (1)..(137): unsure at all Xaa locations
  Clone ID: PAT_MRT3847_100877C.1.pep
VLGGNPGRPRARGSKGQRTGRKXKGTGXEGKEXAAKDKXGKXDPHIKXQXGKGXQKTRTXHTPNPAWNHTFEFDEIGGAEYLKXKXXXEEXXGEENXGSAHXXXEGXXEGSXRDXXXPXERXXXGEXRXQRAEQEGR

SEQ ID NO: 143814 - protein, 146 aa, Glycine max
  Clone ID: PAT_MRT3847_100878C.1.pep
ILEINSLKLSYNKLAADCAGAVFSAMMKYALDTPHSSADVLLQNVQAVFTKWKKALTSYLTDIDEQIEVILKFEEICEESAKEFAPLFTRILHYLYNEDVVEEDAILSWEAELKDADEADKVFVKQAQKLIQWLKEAPEEDDDDEE

SEQ ID NO: 143815 - protein, 158 aa, Glycine max
  unsure (1)..(158): unsure at all Xaa locations
  Clone ID: PAT_MRT3847_100879C.1.pep
MAEGNSSSGGDLFSSGKLVAGAAVSVFQQKSVENVDKQEVAGAAAELLHAASVYGKLDDKPAGQYVEKAEGYLKEFSAGHATEQEQPAAAPGDDAAPKPPAPEAPKEPAAVPAPAAEEGSKSSEGFGLGDVMKGAEQLVGGKXXGGGEESARGGGLFK

SEQ ID NO: 143816 - protein, 77 aa, Glycine max
  Clone ID: PAT_MRT3847_10087C.1.pep
VSFSTVHSFFCVTVTIIITIPFLILPLFHPSTHFLALDYCPILLSPWLLISLYMSPAKTLTSRLCNVSMMLEERKSL

SEQ ID NO: 143817 - protein, 28 aa, Glycine max
  Clone ID: PAT_MRT3847_100880C.1.pep
VGRICQRSPSPVHDLHRFPALRFLRLNG

SEQ ID NO: 143818 - protein, 34 aa, Glycine max
  Clone ID: PAT_MRT3847_100881C.1.pep
EKARTFVTRPVYGDNMDTLASSSMHVLILKQLQF

SEQ ID NO: 143819 - protein, 64 aa, Glycine max
  Clone ID: PAT_MRT3847_100882C.1.pep
TFHSHQLTLRLSHPHPGFNRQHPLERTQRQASFRRFAMRVGLLSQNRVIHVIATSLHIRRILDP

SEQ ID NO: 143820 - protein, 76 aa, Glycine max
  Clone ID: PAT_MRT3847_100883C.1.pep
NVEEMNKNGYGLRTLPNALFLHNPHFQPNETHSLLCTQSQRGTCLSLMVDMTCLHCNVPSLSIRTQAFNTVGYAAH

SEQ ID NO: 143821 - protein, 52 aa, Glycine max
  unsure (1)..(52): unsure at all Xaa locations
  Clone ID: PAT_MRT3847_100884C.1.pep
PFNKDTSPLPLKLGAKPIQXFLEPKPIGPEFCFNFLASXEYLKAKQVKATLT

SEQ ID NO: 143822 - protein, 59 aa, Glycine max
  Clone ID: PAT_MRT3847_100885C.1.pep
TLKFERFPPNHTLMSFGCCFLLDLRFKASASLHTFMLITSPRNHFLYDLSARQKKNIKT

SEQ ID NO: 143823 - protein, 60 aa, Glycine max
  Clone ID: PAT_MRT3847_100886C.1.pep
TPERLNIPVSQIQGLESEVVVIRYSHVSGHPALEFGFSNSFEAMCVNRRVARNCRFRGSS

SEQ ID NO: 143824 - protein, 40 aa, Glycine max
  Clone ID: PAT_MRT3847_100887C.1.pep
LFLMAAQPITKARLFSNVLWSSLLQDECHKGIYRSCERKL

SEQ ID NO: 143825 - protein, 88 aa, Glycine max
  unsure (1)..(88): unsure at all Xaa locations
  Clone ID: PAT_MRT3847_100888C.1.pep
SRRLWPALWRXFLSLLSSSSWVVGRLWLVLAFFVLFSFVSGFWVRLPVFSGSSFLSCSACVGSRKVRVVCGVCTLRYSWSWSLLAVLL

SEQ ID NO: 143826 - protein, 97 aa, Glycine max
  Clone ID: PAT_MRT3847_100889C.1.pep
PKRFTVVLSCSSVLTPLLCLFGWVFVPCIFFFVSFFLPFGGFFYIVIYIVCTALSFLYYPPPPYCVPLSSHPLSSCALLTHPRLFALYPPPPPQAGG

SEQ ID NO: 143827 - protein, 51 aa, Glycine max
  Clone ID: PAT_MRT3847_10088C.1.pep
GSSTYTACFRPIGKSTHGYLCIGSIQPKPAPAYYQSLDNYHPSGDSGLLCT

SEQ ID NO: 143828 - protein, 45 aa, Glycine max
  Clone ID: PAT_MRT3847_100890C.1.pep
LCLSLKHVDSCLDAHLNKDWLLFPYNKRIAFPLSMYIHRVQPANQ

SEQ ID NO: 143829 - protein, 43 aa, Glycine max
  Clone ID: PAT_MRT3847_100891C.1.pep
CISSNSIEEVAFSFNGGKDSTVLLHILRAGYFLHKKGQNSVNG

SEQ ID NO: 143830 - protein, 114 aa, Glycine max
  Clone ID: PAT_MRT3847_100892C.1.pep
MEIDKAIRECDDRRLQTKYNNATYVVQRALALYSIEEVAFSFNGGKDSTVLLHILRAGYFLHKKGQNSANGDLKDFPIRTIYFESPCAFPEINSFTYDTAATYVKLLPFYSLIF

SEQ ID NO: 143831 - protein, 59 aa, Glycine max
  Clone ID: PAT_MRT3847_100893C.1.pep
EVTCYFPCPLFRPILIPSWRMLLLLMVNFFIILAFASSQKLFLFNCCLCNVIFVNSSLT

SEQ ID NO: 143832 - protein, 137 aa, Glycine max
  Clone ID: PAT_MRT3847_100894C.1.pep
DPFPSHSTSTQRNPNSYIYYFSSLSFNLPICLFVHPFLWLYTDQSLQSALCFITLRRHKKKNQEPQLSMVTAAKSSNHHSPPSAPSPAQPSDANSPKFRRKNLPSPGVQLVHGGEPQPGSGIHPIAAASAASSSSLG

SEQ ID NO: 143833 - protein, 90 aa, Glycine max
  Clone ID: PAT_MRT3847_100895C.1.pep
RVGLDGFFSRSLAVSPQNRKQKQSLLASPDYFTFFLLLGVRFPNGQNITLCAGHSTFATYFLFHLLVSLLNTFLFDIGPRVIFKLFLFLS

SEQ ID NO: 143834 - protein, 54 aa, Glycine max
  Clone ID: PAT_MRT3847_100896C.1.pep
VIYLDYISTFSLNIAFILHCDFSFLFILISDGIQFQFSITLNMILLCPTLLSSS

SEQ ID NO: 143835 - protein, 88 aa, Glycine max
  Clone ID: PAT_MRT3847_100897C.1.pep
YLIFMHCFFVPVPRMASTTLFSFRLSLNPLHHQQTTRPKSLLSSPRTNPRLASFINNHLALTHVTYPLLQSHSAPKRKFHVYSDGESS

SEQ ID NO: 143836 - protein, 86 aa, Glycine max
  Clone ID: PAT_MRT3847_100898C.1.pep
PRVRPRVRPRVRPPHECGYPGSVFNPLNFAPTLEAKEKELANGRLAMLAFLGFLIQHNVTGKGPFDNLLQHLSDPWHNTIIQTFSG

SEQ ID NO: 143837 - protein, 52 aa, Glycine max
  Clone ID: PAT_MRT3847_100899C.1.pep
VGGGTLNQQHYHWRGSLSITKSSIYMLSKHKRIDVDLSDEYKRETLHHFVLR

SEQ ID NO: 143838 - protein, 76 aa, Glycine max
  Clone ID: PAT_MRT3847_10089C.1.pep
PLFMYSTNLSTRLMSAFNLKITNWCESLVVYGTNGMISQKENYNRDWNYTIHALVHAVHLGYLTVENASVCHPLAI

SEQ ID NO: 143839 - protein, 90 aa, Glycine max
  Clone ID: PAT_MRT3847_1008C.1.pep
LDLIFSILIEQRLGEVNVSGDFSKDFGYLEFANSNNCSKDFKSNTNLLNKVWYQPEEIYPVNGIPEARHEIFWVPVDKTYFKIASKLKVS

SEQ ID NO: 143840 - protein, 48 aa, Glycine max
  Clone ID: PAT_MRT3847_100900C.1.pep
DVFRYFALSYPCVWWCKPCCHRHYMEDVFASHDATMLEKVVLCEELFY

SEQ ID NO: 143841 - protein, 33 aa, Glycine max
  Clone ID: PAT_MRT3847_100901C.1.pep
LILLSFNIINLIIHYIIINTIFHINLLNLFILF

SEQ ID NO: 143842 - protein, 54 aa, Glycine max
  Clone ID: PAT_MRT3847_100902C.1.pep
PMIKSAVFSMKKIRTIYTTGALIDRYRMPYQSLVKKVNYDHTDRKLRNLQFSCT

SEQ ID NO: 143843 - protein, 227 aa, Glycine max
  Clone ID: PAT_MRT3847_100903C.1.pep
SDVYVWDTDSGTLVTIVHNAHVGNTYALARSHTGDFLFTGGEDGAIHMYEIVNDGYESKAWHVAVWVPHSAAVYSLAFEFPWLVSASSDGKLALIDVRKLLKISKRALGKRVSKVKHLGGDPVEPPQRMLHGFKSNLFSVDIGAERIVSGGEEGVVRIWNFTEALEIERRARALRGIRLEHRMRRRKLQTELSNKSGRSDQCSVAAKKNSVTCIWPTKRGMSGKLKA

SEQ ID NO: 143844 - protein, 88 aa, Glycine max
  unsure (1)..(88): unsure at all Xaa locations
  Clone ID: PAT_MRT3847_100904C.1.pep
QLLSFSTXQTLYLLNLHTCSAXXKTLYNNSSLSSIYTQTLTLLLLPHLYFFFFTSNSFILHFFLLTSHSHSSHILSISKLHYLLFLHL

SEQ ID NO: 143845 - protein, 64 aa, Glycine max
  Clone ID: PAT_MRT3847_100905C.1.pep
HKRIRFLHLVERKSHRIHCLSFLAQDMAFNYVKAYLLVAIGNQSHQIDYVTLGLHLFYFFCFRC

SEQ ID NO: 143846 - protein, 51 aa, Glycine max
  Clone ID: PAT_MRT3847_100906C.1.pep
TQYQGIYNTRTPCLTNQARHPWCLRMYLIPLGCNSPFLVMKYLMLLSKTKN

SEQ ID NO: 143847 - protein, 66 aa, Glycine max
  Clone ID: PAT_MRT3847_100907C.1.pep
SGGYFFLPGTPAHIEQDKRCSAKQNCGPENVVSTPVFFFPPPPRREAPPFYFRAGLYSWHEKLYSF

SEQ ID NO: 143848 - protein, 49 aa, Glycine max
  Clone ID: PAT_MRT3847_100908C.1.pep
TDDMRPEPYDYGLNNYMIPLTLIESAPKAILIYGAKPAKEKCGTKICYH

SEQ ID NO: 143849 - protein, 88 aa, Glycine max
  unsure (1)..(88): unsure at all Xaa locations
  Clone ID: PAT_MRT3847_100909C.1.pep
GENNDGHGSNKNVKXGRPASAKTASLQAKNMLNLXXNLVAPGDHIEDLKLPNQSDVSGIISKKKTADTKPILNPSVSLKTSSDDAPAV

SEQ ID NO: 143850 - protein, 96 aa, Glycine max
  Clone ID: PAT_MRT3847_10090C.1.pep
DGTMPPMKCWVTRLSGKPNKQQHAVKLTQLKLELGLFGARLGAANDRIAFEITGIATKKETTPLPLVPFSKRRYTHSHTTCSRRFLSSKSPSLAWE

SEQ ID NO: 143851 - protein, 84 aa, Glycine max
  Clone ID: PAT_MRT3847_100910C.1.pep
CPWGPPNLCLFPPPFCPPPFSLFASPPDFVWIFTGYPLPPGSGITPFSSRFFFPPHKENRYPNKNPSQIPRETPASRLKENFPI

SEQ ID NO: 143852 - protein, 52 aa, Glycine max
  unsure (1)..(52): unsure at all Xaa locations
  Clone ID: PAT_MRT3847_100911C.1.pep
KNHQKSSXTVNKKLIKDGIESRVRKSMSFFSCTRSCTVHDTNLVRISHLDKD

SEQ ID NO: 143853 - protein, 91 aa, Glycine max
  Clone ID: PAT_MRT3847_100912C.1.pep
KHYLLCSIQDMNDIGPNLWWLIREDLVLLSANHWRFRNTVKAVCAFALIWVSLCLANSEAKTILETLTFFQILTSKMYVSHVQRNIVLEHF

SEQ ID NO: 143854 - protein, 84 aa, Glycine max
  Clone ID: PAT_MRT3847_100913C.1.pep
SPLLQTTLAPADLKLKPLEILSKLSSYLQSAIMSHCGDRERNNRICKEGVFSEDKRPEKRAKQRTKKEDNAFLGLGGLMPKCAK

SEQ ID NO: 143855 - protein, 114 aa, Glycine max
  unsure (1)..(114): unsure at all Xaa locations
  Clone ID: PAT_MRT3847_100914C.1.pep
EAANYQDTIGRLQDEIXQNMKEEMARHLREYQDLLNVKMALDIEIATYRKLLEGEESRISLPLPTFSSLNLRETNLESLPLVDTHSKRTLLIKTVETRDGQVINETSQHHDDLE

SEQ ID NO: 143856 - protein, 85 aa, Glycine max
  Clone ID: PAT_MRT3847_100915C.1.pep
PTYDTPVPSSLAIALTVSVIPSLMLAPPLYIQRVFHTIFHPHFSSLIFLLRNSLRAFPLPFHFRPHSCYTPSPPPTQGGSHIIQS

SEQ ID NO: 143857 - protein, 42 aa, Glycine max
  Clone ID: PAT_MRT3847_100916C.1.pep
IPTVFDIFIVNVIANGSIVNLALWYTAHNKYYNRKRPLKYGG

SEQ ID NO: 143858 - protein, 203 aa, Glycine max
  unsure (1)..(203): unsure at all Xaa locations
  Clone ID: PAT_MRT3847_100917C.1.pep
MAEHLASIFGTEKDRVNCPFYFKIGACRHGDRCSRLHTKPTISPTLVLSNMYQMFYMNMNIITNPDQPQPQSLDPDKVQDHFDDFYEDLFEELSKYGPIQSLNICDNLADHMVGNVYVQFREEDHAANALMNLTGRFYXRQYEENVCNRGGYCNFMHLKKISRDLRRKLFGRNRRWNGRSGSRKQSPRESYHGGAFTFWSWFW

SEQ ID NO: 143859 - protein, 248 aa, Glycine max
  Clone ID: PAT_MRT3847_100918C.1.pep
MAEHLASIFGTEKDRVNCPFYFKIGACRHGDRCSRLHTKPTISPTLVLSNMYQRPDMNMNIITNPDQPQPQSLDPDKVQDHFDDFYEDLFEELSKYGPIQSLNICDNLADHMVGNVYVQFREEDHAANALMNLTGRFYSGRPIIVDFSPVTDFREATCRQYEENVCNRGGYCNFMHLKKISRDLRRKLFGRNRRWNGRSGSRSKSPPRNRNHGEHLHSGRGSGRRDFDRSHGHHGRRPRSRSPRYRGK

SEQ ID NO: 143860 - protein, 151 aa, Glycine max
  Clone ID: PAT_MRT3847_100919C.1.pep
MSEAQKQVWKGAIPLQIHLHESEVTTLPPPPPALVLAPRIGYLPLLISLLKPQFSTTLPPGVDTIWFEYKGLPLKWYIPTGVLFDLLCVEPERPWNLTVHFRGYPSIVLLPSEGDVRVMWCFINSLKEAAYVINGNSKDVMNMSQTDQVEL

SEQ ID NO: 143861 - protein, 138 aa, Glycine max
  Clone ID: PAT_MRT3847_10091C.1.pep
EAESWRRTAANVLLKSGNKNLLSVLSDSAANGVPSLARASLVTISWMSSYLHLVDDRKLPPMALSILMPLLLKYLNYDKDVEARVLASYSLLCLVKISGCVSFLSSLDKDSLKHLQNLSLVTWTSNELISIISKSSLQ

SEQ ID NO: 143862 - protein, 314 aa, Glycine max
  Clone ID: PAT_MRT3847_100920C.1.pep
MAEHLASIFGTEKDRVNCPFYFKIGACRHGDRCSRLHTKPTISPTLVLSNMYQRPDMNMNIITNPDQPQPQSLDPDKVQDHFDDFYEDLFEELSKYGPIQSLNICDNLADHMVGNVYVQFREEDHAANALMNLTGRFYSGRPIIVDFSPVTDFREATCRQYEENVCNRGGYCNFMHLKKISRDLRRKLFGRNRRWNGRSGSRSRSPPRNRNHGENSHSGRGSGRRDFDRSHGPHGRRPRSRSPRYRGKRSRSPVGRDRSPPIRESSAERRAKIEQWNREKEQGDTGNMNNSKSSDDYQEQSVAQNGSESGNHQI

SEQ ID NO: 143863 - protein, 213 aa, Glycine max
  Clone ID: PAT_MRT3847_100921C.1.pep
MKKMILTLFFNIILSLLSLSHASVVDFCVADYTGPNGPAGYSCKSPAKVTVDDFVYSGLGTAGNTSNIIKAAVTPAFDAQFPGVNGLGISIARLDLAAGGVIPLHTHPGASELLVVVQGTICTGFVASDNTVYLKTLKKGDVMVYPQGLLHFQINDGESQALAFVSFSSANPGLQILDFSLFKSDFPTELITQTTFIDAAVVKKLKGVLGGSG

SEQ ID NO: 143864 - protein, 151 aa, Glycine max
  Clone ID: PAT_MRT3847_100922C.1.pep
MAEHLASIFGTEKDRVNCPFYFKIGACRHGDRCSRLHTKPTISPTLVLSNMYQRPDMNMNIITNPDQPQPQSLDPDKVQDHFDDFYEDLFEELSKYGPIQSLNICDNLADHMVGNVYVQFREEVHAFSALMNLTWDSLIFGRHIIAVQLYR

SEQ ID NO: 143865 - protein, 74 aa, Glycine max
  Clone ID: PAT_MRT3847_100923C.1.pep
WVLSGPPFDLHRRQSWLTLRTRSGISTSLADSIYMEDKEGEVNRTTIHKGVIVRVRIVGKIYESIMNLRYRDLG

SEQ ID NO: 143866 - protein, 123 aa, Glycine max
  Clone ID: PAT_MRT3847_100924C.1.pep
GGGFFIFFLLFTCHCSLDSGNFLFHMFFYTQPIATLRPPGPTGKIFQQGEPKKKRGGAIQKHGEGEKNGPHQRKRLGDHPPVHRGGKNEESGQTPLYQNEAQVKGGMKRLIMSCTKGGGWEGN

SEQ ID NO: 143867 - protein, 137 aa, Glycine max
  unsure (1)..(137): unsure at all Xaa locations
  Clone ID: PAT_MRT3847_100925C.1.pep
RTTKLEETLAQFMQVTMSNHKSTESALKNLEIQVGQLAKQLAKKSSNNFTVNTEKNPKEECKAIVSRSRKLVAVEDEDVVALKEQVVVKDTIVKKKNEVTDAMSQRREKQIKVEEKEIKAQEKEIEVXXXXXXXXXX

SEQ ID NO: 143868 - protein, 73 aa, Glycine max
  Clone ID: PAT_MRT3847_100926C.1.pep
FMGLRLDGGQLHQQRFSLCQCRCTIMFTCHLELCHNKWPLECNFLVTTQHNLQQQCPHMDLIVLNSMHLLCLK

SEQ ID NO: 143869 - protein, 134 aa, Glycine max
  Clone ID: PAT_MRT3847_100927C.1.pep
MDGSRRLLGHSIGVFSEGIGLVLFRWSTLRTAVENEWGGHESRVKADQLASDILAWFTQSKEPLYIDDLEDILDQGMLSLNVEVEDGSIEEVAEKLMVMQEEFLEGNFKSLEDLRKANLEQCYSSSCTTDCKRW

SEQ ID NO: 143870 - protein, 70 aa, Glycine max
  unsure (1)..(70): unsure at all Xaa locations
  Clone ID: PAT_MRT3847_100928C.1.pep
CKYESILPLGTQFADWVFLGTSLMHFLSDSDEIFXDLTTESYPFAYMLASSGYLLTMLGDCVITYVTSNI

SEQ ID NO: 143871 - protein, 63 aa, Glycine max
  unsure (1)..(63): unsure at all Xaa locations
  Clone ID: PAT_MRT3847_100929C.1.pep
HIICVVLINILRSILLKFQSLNNLQFIASFYQHMAVQRRVCSFVLXFFLSIGFSVVLCLDISA

SEQ ID NO: 143872 - protein, 110 aa, Glycine max
  unsure (1)..(110): unsure at all Xaa locations
  Clone ID: PAT_MRT3847_10092C.1.pep
ISXXXRSSXKTTXFHXAQSPXXXXSXXXFXXXYXYXXXNLSXXTXNVQRYXXXXNXIXXLXLXXPXXSLXVXYSIXFILXXYMFTXXQXXLLLXXFNVXXXXIRXXXXXX

SEQ ID NO: 143873 - protein, 135 aa, Glycine max
  unsure (1)..(135): unsure at all Xaa locations
  Clone ID: PAT_MRT3847_100930C.1.pep
YAESCAASRAPVPNSPHAPRFPFWTKHEKNLALTEEEKMAVITNRGIPADVLAKRAHDFDKHGAHESLKDQIPADDKLASTKVNKLAKIMHLTQSEGGXLTLLREEDEGXHIPVSNIRAREHHVREIPLTAQEEI

SEQ ID NO: 143874 - protein, 65 aa, Glycine max
  unsure (1)..(65): unsure at all Xaa locations
  Clone ID: PAT_MRT3847_100931C.1.pep
KVTITLFNLQGFNSFKLLFETQTGXFRLLKKFTNRSQKLGNLXNYRMAQFQSKPNTFLLPHHADA

SEQ ID NO: 143875 - protein, 35 aa, Glycine max
  Clone ID: PAT_MRT3847_100932C.1.pep
IIRCSSITTSSINQSINKSISNKMIYDLWSNSTIF

SEQ ID NO: 143876 - protein, 58 aa, Glycine max
  Clone ID: PAT_MRT3847_100933C.1.pep
WVTSTADDGWMGTVGSRYSAQSQLWLQDEREPKRQRLKHTHRDYDSALRPRQHAVTHE

SEQ ID NO: 143877 - protein, 38 aa, Glycine max
  Clone ID: PAT_MRT3847_100934C.1.pep
LEVSEIICYGRFYSGLDYCQMPRDSLSHSTGVLTAFST

SEQ ID NO: 143878 - protein, 72 aa, Glycine max
  Clone ID: PAT_MRT3847_100935C.1.pep
FQSKSILTLHRALYMIKAKAKLVFNYSFSQQVRFNLLGSLVSQSVIGLLSSVVRYLCLYKWKFVYCNYILHE

SEQ ID NO: 143879 - protein, 58 aa, Glycine max
  Clone ID: PAT_MRT3847_100936C.1.pep
RSVKVIRLFFLSRSPPLMRWTGFLCQSVFSKCPMLLRKGISLHSVWFILGLSVFSGGC

SEQ ID NO: 143880 - protein, 76 aa, Glycine max
  unsure (1)..(76): unsure at all Xaa locations
  Clone ID: PAT_MRT3847_100937C.1.pep
QGKHANGKNAWFGINGNTGSFPSMKKGKIWDASHVKAXQPFRLPFKPXCMLFRIFYIVGGVKKKQAPGVVPSKPKV

SEQ ID NO: 143881 - protein, 114 aa, Glycine max
  Clone ID: PAT_MRT3847_100938C.1.pep
PGKSQRIAAICGFCSYYFVCIVDGQGSTTFVVAGQGLATFTVTGNSFCGLHIAFADLSSTQSALSSSSIEAVHANSGLGLRVSFQGVPFFFSFVCFDFLGLNLSPLAFFSLCKT

SEQ ID NO: 143882 - protein, 65 aa, Glycine max
  Clone ID: PAT_MRT3847_100939C.1.pep
NRYQKQSDLDCKNVPIPSYFLGYDSLRGKKMTLCAGHRLRESYTMTLLHYVLNTLLFDLRLRVKC

SEQ ID NO: 143883 - protein, 171 aa, Glycine max
  unsure (1)..(171): unsure at all Xaa locations
  Clone ID: PAT_MRT3847_10093C.1.pep
MTTMSTSSSSQSLKIGIVGFGNFGQFLAKTMIKQGHTLTATSRSDYSQLCLQMGIHFFRDVSAFLAADIDVIVLCTSILSLSEVVGSMPLTSLKRPTLFVDVLSVKEEXHPRELLLRELPEDSDILCTHPMFGPQTAKNGWTDHTFMYDKVRIRDQATCSNFIQIFATEVG

SEQ ID NO: 143884 - protein, 39 aa, Glycine max
  Clone ID: PAT_MRT3847_100940C.1.pep
SGINNGHNELVAIINAHTGSTRQTHEHPIIDLCFGEIFP

SEQ ID NO: 143885 - protein, 46 aa, Glycine max
  Clone ID: PAT_MRT3847_100941C.1.pep
NLFLLCEKHPFNFKFLNKVLNSVYVCLTFKTPNGPKKGVPFGKVNP
